United States Patent Application Publication US 2007/0067865 A1 - sequence listing, part 42

SEQ ID NO: 262314 - DNA, 2306 bp, Zea mays
cgggagattgtacccctgacaactttcccaatgtattcatctccttttccgctcaggctcagacagacatggccaacaggcttggcttctctgcatggtatgaggcgggaaggatgatgacctggctaactctctcatgtggcttcgagataccgcaaatcctggctttcagtcgttaaattttggtggacttggtatgagcccttggatgcagccaaggctggatgctaccttacttggtctgcaacctgacatgtatcaggcgatggccacagctgcttttcaggatgcaacaaagcaggcatcgcccacaatgctgcagttccagcagccccagaacatagctggccgggcttccccgcttctttcaagtcagatgcggcggcaagcacatcatcaatttcagcagcaaccgtaccttcaaaacatctctgagagcacaatccaagcacagggtcagtctgagttcctcaagcagcagatccaacgcagccagtcattcaatgagcagaagccccagatgcaacaccagcaagaatcacagcagcagcagcaaccacagtgtctgccagtcccccaacatcagcaaatgcaacaacagaatatgaccaactaccagtctatatctaatgcattatcaccgttttctcagctgtcgccagtttctcagtcttcacctatggcgctgcagactatattaccgttctcgcaggcacagagcttcacagacacgaatgtaggttcattgtctccatccaatggtaacaccatgcaaaacacactgaggccgttctcatcagaagcagtttctcacctcagtatgccgaggcccactgcgatacctgtcgcagacccatggtcgtcgaagcgtgtcgcggtggagtctctgcttccttctcggcctcaggtttcatcccagatggaacaattggaccctgcaccagctagtatacctcatagctctgcgttggcaccacttcccggaagagggtgcttggttgaccaagatgtgaactctgatcctcaaaatcatctcttgttcggtgttagtatagactcgcagtcactgctaatgcaagggggcattcctggtctccaaaacgggaatgattcagctgctataccttattccacttccaatttcctcagcccttctcagaatgactttcctctggaccatacactaaattcttcaggctgcttagatgattctgggtacgtcccgccatgttcagataattctgacaaagtgaaccgaccaccagcgaccttcgtgaaggtttacaaatctggaacctacgggaggtcgcttgatatcactaggtttagcagctatcacgagctccgtagggaactggggcgcctatttggccttgagggccagttggaagacccattgagatcaggctggcagcttgtattcgtcgaccgtgaggaggacgtccttctcgtgggcgacgacccttggcaggaattcgtgagcacggtgtcctgcataaagatcctctccccgcaggaggtgcagcagatggggaagcagggcctggagctcctgagctcggcccccgcgcggaggctcggtagcagctgtgacgactacgtcagcaggcaggagtcgagaagcctgagcaccgggatcgcgtccgtcggttcggtcgagttgggatgagcagcaagatagcgcgcacgcagcagcagcagcagcaggttacgcatcctcagcctcagggtaggtaggggactgaagggttggtctgcgacttgatgacccacgagctcctcgttgcgcgcttcgttcgcctccatgcgatggatagaagttcagcgcagaccaagccttagctctgcgagctatgtaccatctaataattctgtccgtgtcgtaccatgtcaactcctaagtagaagaattgaagaaactaccagcagccgctgtctggtatacacgctgaaacattttttttcttgtatggagaaatactaatcatctggatgtagccaggcctatgctctctaatggttgatcgggtaatacagcccctcgcacccagcaaactcacaagagaaacttccagttgctccattaagtttgggcagtaataaaaggtccgtcaaaaattaacttttttttttctcggcagcaacaagaagtccatacaaaattaacttattttttagtggctaaacggaggaggctgaaaatattttttttttgttttggcggtatgtactaagacgttgtatttagtcattgaaaatagattgattttcggcaaattatttattattttaattggattctttct

SEQ ID NO: 262315 - DNA, 891 bp, Zea mays
ggcagctggactcgtttcgtaaatgattgtggtaccgagcttatccgtctccagataagagagcacagggcgaagaatagcatggccgtcgttcgagaattggttggagtattgaagtcaacaaaaaagcaaattcagcttgcagaattcaaggaaaacaagtggaccctaaaagactccaacttgccaataagtcatggcactgatggcagtccgctcgatctcaaaggtgacaaccatctgatcaagctttatcggggaaggaaacgggaggacgagcgcaaatgttgcagcgctcactctgaggacgtatcagctgttactgctgtaaagttctgtgctgaacatccatatggcaaagccgttgccttgctagacactgaagctcagcttatcatggtgaacgaggattggctcctacttccatggatctccatatcagtcctgtttatggacggcgatggcggtatgaaacttggcggcggtgccatggttcagaaaggtacagtgtttggatccgacactagcatggtgctagacacacagaccgtcggagcagggagcgtggcatccaatctagcacaatgtggcacttgcagcgccgtgttcggtggtgatgataaagaaatggcaaactgcaaggttgagcatgtgagctctggcgcttctcgcacagtcgttgcaagtggtgagaatgggcacactgagactgctggctgtggaggcggctgtggtagcaattgtggacccatgatggcatggtcaacgaaggctccaatgccgccaacaccatgtccggcggctgtggctccggttgcggtggtggttgcggtgccctgttcaacgctagcactgctgccggagagggcctgcacaataagtcggctgggt

SEQ ID NO: 262316 - DNA, 609 bp, Zea mays
tcgaggagagcccgaggctactagccgctgtgccattaggcagtggcggactactcagacgcgatcggcatactggacgagtaccatgcggctgctggcgcctgccagacgctcaactgctccccgcaggtgtacgagtctttggagcaccggttggccgtggcagaggcagcgcacaggctgaggctcccactgctctctcaggacggggaggtccatgagcaggagatcgaaaagctgagcacctattcaagaagttcattcgatagcaccctcacaagcgcgacacccagctcaagttcaatctcgacgagttacaacaattatagcagcagcgctagtgcggtgactgttgctgctccacattggagtggtagttctgatgcagttgaacctggagttggtggtgttcctgaccgttttcttgggatcacttctgattatctctaccaagtgcaacaagagcagccagccatgtctgttgacatggctgattatcagagaactttggctagggagattgaagcccggttagaagccaagtgtgatgctttggctgatctatctgctatggatgaaagggattcgtcatccctcagtcaaatttca

SEQ ID NO: 262317 - DNA, 520 bp, Zea mays
cgcgtccgctccgccggccgccggcagccgcccgcgatgtcgaaggccgcggcagcgtccctcccgccggcgccgccagaggtggcgcaccgtgtggagcagctccagcgccaccacctcgccccggacgcgtccctcctctccagctccgcgcactccgacctcctccaggcgcgcgaggaggtcgcggcggagcgcgcgctgtacctcgaggcactggcggtgtacgcggaggcggtggccatggtggaggagtaccatgcggctgccggcgccggcaagaagctcaactgctccccgcaggtgtacgagtctttggagcaccggttggccgtggcagaggcagcgcacaagctgaggctcccactgctctctcaggacggggaggtccatgagcacgagatcgaaaagctgagccacctattcaaggagttcattcgatagcaccctcacaagcgcgacacccagctcaagttcaatctcgacgagttacaacaattatagcagcagcgctagtgcg

SEQ ID NO: 262318 - DNA, 445 bp, Zea mays
agggggtggcaacttcatttttaactttaagagaacactgaatattttctttgatctggaacagatgcttatacagagcgacagtcctgtgccacctgaacttgcaaggcatgaggcatcaaaatttaagccaggctcgattcctgatcgacctccaaggcgaaatgatacagtctttgcaaatcattgaagcaatcttttggactattatgagctcaacttctaccatagagggaggaatctagattagtatttatgaggtacaaaacttcgatggttagaaatatctacttatgaggttgtaaaactatgacgattatctttggttttatttctgtttggaaactggcctcattgtcataactttaatatgttttggtggtgatttagctgtggacatgtgtagcttcccataattttgttctattctgcaaggtttgtcatc

SEQ ID NO: 262319 - DNA, 440 bp, Zea mays
caaaacgcaacggtcgaatctcctcgaattcgaattgcagccggtgccaccctcctcacatggcggcggcggaagagatgatggcggtgctggacaaggagacgctggcgctgatgggtctgggcaacgccgccgccgcggtggttgccgagtgcgagaagttcaaggagaacgcgaggccgctcaagcgcgggcgcgacgtgtccaaactcaaccacgcgctcaaggcacacgccgatcccgcccagcgcgccactcttctcgaagcccgaaagaagatgattgaggcaatctacgagtaccaaggcgaggatccgcttcaaccgtggctggactgcatcaagtgggtgcaggagtattttccgaccggcggcgagtgctcagggttggtggtgttgtacgagcagtgcgtgcggaccttattggacgacgagcgcttc

SEQ ID NO: 262320 - DNA, 851 bp, Zea mays
ctgagagatcgagagaaataataaaaaaaaatccgtcttcttgtggtcttctccaaaccctagcgcccccggccccggtctccgcccccccgccttcgccgtcgcggtcgcgccccatggcggggaagtcgcgaccgcccaagcggatcctcgagtcctataccatcaagggttcggacagagtcatcaagcctggcgattgcgtgctaatgagggcatctgatgcttcaaagccaccttatgtggcaagagttgaggcaattgaagcagcaggatctcgaggcaccaatgtgagagtacgagtgcggtggtattatcgaccagaggagtccataggtggtcggcggccatttcatggttccaaggaggttttcctctctgaccactatgatgtacaaagtgctgacaccattgaggggaaatgcaatgtccacagcttccgtagctatacaaagcttgattctgtcaatgctgaggatttcttctgccgcttcgagtataaatcagctactggcagctttgtaccagatcgtatagcagtgttttgcaagtgcgagatgccatacaatccagatgaccttatgatccaatgcgaggaatgttctgactggtttcaccctgcttgcattgggatgacaatcaaagaagcaaagaaactcgagcattttttctgccagacctgtacagctgaaaatggtaagatggttgagaattcacatgaagctacagcgcaatcagaagaaaagctggtggagtcaaaaaggcggcgaaagtgatggccgtgctgattaaatttatgaaatctatgctgcggtgtacaaagccttcccacgtttcacgtttgagaactg

SEQ ID NO: 262321 - DNA, 590 bp, Zea mays
aagccttcccacgtttcacgtttgaaaactgtaattttattgttcgtcccagtttgtggtcctgggctggggtccctctaatgtcaggcacactgtatatagcttgtaacctggtcagattgttgtattagagcacactagggtttgtgtgatagcacggaagttcggactactgagtatgtgtagagtatggcattataatgccagcatcaggtgatcaggcttcttctgggcattaggactcctgcatgatccagcaataatacttccatgcagctggacctggttagtcactagtaagttgtcaggaaacttagtactgccatgtgaactttttttgaaaccctctatgtaatgtaagcatctgtgtcccccttgcaaactgttgcacgaaattgggcacccaccctggcccattggctgcggttgcataattgcggcaactaacttgtgttttaagtttggaggaacaataataaagtttaggctcattgaactggtctggttctacgaaacaaaccctcactttttgcttgtattttgagttaatgtgatgtttattctaattatgggctaataaattgctgtcc

SEQ ID NO: 262322 - DNA, 403 bp, Zea mays
cccacgcgtccgtccacgcgtgcggccacgcgtgcgaccacgcgtccgatgggctggagcacatttgtaagttccatcagacccgaggagtcacggccatacagcaggccgcagtccacgtctgagtacgaatggcgaaggtgatgtgttgatcaactacagcaaaatggctgagacccacactgaagggatgagattattggtattgtttggctgggtaatctcagatgtggttagttgatggatgcctttttggagtactccttttgtttcctttctagttaagcaggcaggtagcactacttgtatccagagtttcacggggcggttggggagggggcatattttgggcagcagacctcagttctgacatggaatgacgcatcacgcagcaggggcggtt

SEQ ID NO: 262323 - DNA, 947 bp, Zea mays
ggcgccagttggaaaagataatccttgacaagcacgaggacaccatgagcaaaatgggcgccatactggcttccggcattctcgacgccggcggcaggaacgtcgccatcaggctcaggtcgaggtcgaagcacgacaggctcaccgccgttgtcgggctagccgtcttcacccagttctggtactggtacccgctcacctacttcataagcctcgccttctccccgacggccctcatcggcctcaactccgacctgaaagtgcccaagtttgagttcctgtcgaacgcgaagccgtcgctgttcgattaccccaagccagtgacccagcagaccacagccacgtcagtcaaggtgccggcggccatcctgtcgacctatgccaagtccaaatccagggcaaggaaggacgcagagagcaaggccaaggcgaaagcagaggactcttccagtgcttctacttcgatgcaggtggacggcgcttctgctgctggtgctgctgcagagaaggccccggagccagagcctacgttccagatcctgacgaacccggcccgggtcgttccagcccaggagaagttcataaagttcctggaagacagcaggtacaagccggtgaaggctgccccctcggggttcgtcctcctgcaggacctcgagcccacggaggccgaggagctcgccctaaccgacgcgccgtcaaccgctgccacgacaagcaccccggcatccagcgccggcgtagccggttggcatggctgtcgacgacgagccccagccgcccccggccttcgagtacacgtcataaataagggtggtgatcgtcggatcaggatgtgtgggttgggttgtgttgtctgtaggaacttcgtactggtgttggatggcggaacccgggcggccccctaagctcatttatttcccctgaaaatatattttttttcctgg

SEQ ID NO: 262324 - DNA, 1481 bp, Zea mays
tggcttcctagagcatctattgaggcttaacttgagcaagaatgatcttgttggattcatccctgcggagtttggtaatttgagaagtgtcatggagattgatttatcctataatcatcttggtggtctgattcctcaagaacttggaatgctgcaaaacctgatgttgctaaaactggaaaacaacaatataactggcgatgtctcttctctgatgaactgcttcagcctcaatatcttaaatgtgtcatacaataatttggctggtgctgtccctactgacaacaacttcacacggttttcacatgacagctttttaggtaatcctggactctgtggatattggcttggttcttcatgtcgttccactggccaccgagacaaaccgccaatctcaaaggctgccataattggtgttgctgtgggtggacttgttatcctcctgatgatcttagtagctgtatgcaggccacaccattcacctgcttttaaagatgccactgtaagcaagccagtgagcaatggtccacccaagctggtgatccttcatatgaacatggctcttcatgtctttgatgatataatgaggatgactgagaacttgagtgagaaatacatcattggatacggggcatcaagtacagtttataaatgcgaaataaagaattgcacaccagtggcaataaaaaagctgggtgaccactaccctaacaggcttaaggtatttgaaaccgagctcgggactgttggtagcatcaaacaccggaatctagtcagccttcgagggtacatcggtgtcacctgttgggaacctcctcttttatgattatatggagagtggcagcttatgggatggtctacatggaggctcgtccaagaagaacaaacttgactgggtggcgcgccttcggatcgctcttggtgcagctcaaggcctcgcttaccttcaccatgactgcagcccacgaataattcaccgggacgtaaaatcaaagaatatactcctcgacaaagattatgaggcccatcttacagacttcggcatcgctaagagcttatgtgtctcgaagactcacacgtcaacctacgtcatgggcactattggttacattgatcccgagtacgcccgcacctcccgcctcaacgagaagtctgatgtctacagctacggcatcgttctgctggagctgctgaccggcaagaagccagtggacaacgagtgcaatctccatcacttgatcctatcgaagacggcgagcaacgaggtcatggagacgggggaccccgacgtgggagacacctgcaaggacctgggcgaggtgaagaagctgttccagctggcgctcctctgcaccaagcggcagccctcggaccggccgacgatgcacgacgtggtgcgcgtcctggactgcctggtgaacccggagccgccgccgcagccgcagcagcagcagcagaaggcgcacgcgcaccaccagctg

SEQ ID NO: 262325 - DNA, 383 bp, Zea mays
cgcgtccggggggctctcattgcgtacgctaagcggttcatccccgggctgtcgcgcaccggccggcgggtctggggcggctgcggcactgccgctgcgccgtcttcgtgcgatgtggaggagcagaaggcgcttctcgagaccgtcattgccaaccttccagaggaaaccatcaagagcaccgtccacaccggcacggtcgtgggcgccaccacggcgcgcgtcctcttcggtctcctgcgtactgcgagcatcctgcatgcgtcggacgcgtcacgggacatgcttgagcggcgcatcgccgcgcggctgcccgacgcggccgtcgatgacctgctcatcccgagctactcgtaccttgtggagacgctctacgacgtgga

SEQ ID NO: 262326 - DNA, 1633 bp, Zea mays
tataaagaagggtcccaattccattgctgatgcagcgcaagcctgctctctgctgcatcagcatggtattggggacccttctttatattgctgatgcagcagagagcaggcttccgctggttttacgggtcgctggtgataccggcctcacagaaggcagtaacaagcttcggcagaagcttaccaagcattatcttgaaaccggttgagcagttcttgttgccgtcctctgctacgtatgctttgtcgtgcgcatgtccgacgagatcgcccccaagataagcctcgcaggcatccacgatgtgcggggcacggcaggtgaaatgctccttgaccaacgtctcaaaatgctttggaggcttgcgtaaaacatacatcatggatttgcatgacagaaggaaggcattctcattgtacgtgatggagttcttctctccatcagccttgcccacaaatttgtcgtatcccgcctcgttgaagtaaggtttttcgttgagaacaagggcctgaagcgataacagcagctgaagaacagttgagctctcagcattccacacttcgttaccagtgcctgtccatgtcttcaggaggctgaggcacacttttcccgactcatacagatttggattcaggcggagaccaccagaatgatagtgaacagaaggtggttcatgggggtaatcaggaggaaagaaaatatcgaagaaaaaaagattgtcatggtaaggtgttccaggtgccccaacgatgcaagccctcagaagatccatcctttcctcataaactctcacatgaataccatctggtaggtcattttgcaggatgttccattccagtcgcaccttcttcagccaacctcttgtaacactttcatggccattttccttcacaaaatgatgatccaaacagtcagtgactacatcgaatctttttgagatggcatcttctgaagagagaattggcttgtcaatctgcgccacaaacttcactatctgttcttcttttggtgtttcttctgcacatggctgcatttctgccatcttcacaatttcatatcgaggatctaccaaaactgagcttggagatggagaaccatgaataccaaacaaactagcagccacatttgtcaggaagtcaaaagctgtcttgggaaatagaaaagcagtggctttgcacaaggagccagtgcagtcttcagtagactccagagcaatctcatggttcaattcctcctgctcagcctcgtctaatgaatcaccaattgtatgttcctcattcattgattctacagaactattatcaagaagcttgtccaatccaattatctcaaaatgttgcaccttggatataacaccatatagcccattgcacttcaattccattgtccttgtacccaagtacatttccggtgcatgataagaagccagaggaggtaaccaatgattctttgcttgccaatgacccatttgtgggatctgcttcagacttgtctatgttcatagctgacctgataacgacctcgccagtgcagaaggagaaatctgggtgctctactagctcataaacacttacagtctccactgcagggtcacttccatagctgacaatgtcactatgtgctggaccaatccat

SEQ ID NO: 262327 - DNA, 472 bp, Zea mays
acaatgggggcttttttctttgttttttaggttgcaatatgagcaaatatatgaatacacagctgctatgccaatagtccaaaacgattgaacaacacacatttacattttatttcacactgaccgcagaagacagcccaaacccaaacacttgagtgtttagctgccttcagcttagcaacataaacaccagcaatcatgcgtacataccgttccgcatttacaagaccaatcatatcagttcagcaatcatctgggaatactgtttcacatttacaagacaggcacaagtaacacacaaaccaggcgccattttatttggaatacacaagcatcgaatatacacgcgcaatataaagaagggtcccaattccattgctgatgcagcagagagcaggcttgcgctggttttacgggtcgctggtgataccggcctcacagaaggcagtaacaagcttcggcagaagcttac

SEQ ID NO: 262328 - DNA, 425 bp, Zea mays
cggacgcgtgggcggacgcgtgggcggacgcgtgggttccccgcgtcaatcctgccgcctgctgctcgcgcgcttactgtggccgcagctttctccacccttggcgatggaggccgcgatcgctcacgctccatctgctccggtcctgcgccgctcgcgcagcctcaaccccacgcccgccgtccggccgcacccaaaatcctggcagggggtgctttcggcgaggcacccgtcgaacgccgtcaggtgcgagccgtcccagcgcccagaggcgcgcccgcgcctgcgcgcggcgcagccggctggcgctgacgcggcggccgggaggaagcggctggcggtgttcgtgtccggagggggatcaaactttcgggcgatccatgaggccgcgctgggcggcgccgtgcacggagatgtcgtcgcgc

SEQ ID NO: 262329 - DNA, 494 bp, Zea mays
attgttgcgaaaaggctagggcataggctctcagataaccactgggaacttagggacttctctgccaatttggttgccttggtagcgtgcgggtttgctcatgtctatcacaaccttcaatatcggttaactaaaacattgatccatgcatttcttgatcctgccaaatcactgacacaacattatggtgctgtccaagggatatctgcactggggcccagcgcgattagactcctccttttgcccaaccttgtgacatatatgcaacttctggagccggaactgcagcttgagaagcagaaaaacgagatgaaaaggaaggaagcttggcgtgtttatggtgccttgctgtgtgctgcaggcaaatgcttgtatgatcggttgaaactatttcctggtttgctttctccgtcgatgcggcctcttttacagagcaacaaaagggtcttaaccaacaacccaaataagcgaaaatctagcacagatctctctgc

SEQ ID NO: 262330 - DNA, 649 bp, Zea mays
cttgacagtaacatgtccagttgagtttttagtgaaagcgacatttttttggtattggggggttatggatttgtaatgctattgagtcttaaatctctgcagtcatggacgattttctttgctcatcctgtgataattttgcaacccattctgcatgcttatatgcagggtacagtcgatgactcagttctctgaaagcagtgatgtttacagctttggagtttttcttttggagcttattactggcagggaagcagcttccttgatacctacagagtccagagaatatttggcacactgggtaatttctactgacatgtagctgtaagttatctagaaaggaaagttatggagttctgcttaatctccagcaaaatatcattctggtgtttagtgtacctaactgtgaagtcaggccacacatttccaaaacttgaaaacagctagagcataaactgttttcatagttattaggagtgagaagtgtttgtcatgttgtaggatcacataaattcttattaggatatattattgaatactgacagtccttgttgatgtttgataatggatacaactaattgtaccttagttgagacactttttaagaggaaaataacaatttgacaaaagtgctgcaattctcgtgcat

SEQ ID NO: 262331 - DNA, 425 bp, Zea mays
ctggttagtactccgcatgttcgtttttttacgccgacggaaatcaacctgcgccgctgccttctccgttctcgccgtcgcctccgcctccgctgccgccgcgcaggtcagggtcatgtcgatcttcgagtacaacgggagcgccgtggtggcgatggtggggaagaactgcttcgcgatcgccagcgaccgccgcctcggcgtgcagctgcagacgatcgccaccgacttccgacgggtgttcaaggtccacgacaagctctacatcgggctctcggggctcgccaccgacgcccagacgctgtatcagcggctggtgttcaggcacaagttgtaccagctgatggaggagagggacatgaagcccgaaacctttgccagcctttgtttagcccttctctatgagaaaaggtttggaccatact

SEQ ID NO: 262332 - DNA, 427 bp, Zea mays
gcgaggtggcgcggcggctccggaagcggtcggcggctacggggaagcgcctcagcttgatgaacgagtacctccccgaggagcgcgacccggtgaggtgttggctcaccgtcgccgcagtcgcattcgtctcgctcctagttttaggttttgggagtggcaatgaaactccagtagagcttccaaagaaacttatcatcggccccccaagtgctgatagaatccaacttcctgatggacggcatctggcttatcaagaacaaggagtttcagctaacagagcaagattttcactgatttatcctcattcttttctttcatcaaggctagcaggaatccctggaattagtgcatctcttttggaagaatttggagtacgacttgtgacttatgatcttcctggttttggtgagagccatccacacgt

SEQ ID NO: 262333 - DNA, 604 bp, Zea mays
gtttctggaaaggcatttatctcacacaaaccttgcttttcaaaagatatccgcaagttctgtaagttggcatatcctcttgtacactatgctcgcatgtttgggttgtctggctgctttgcaatatgcttgcaaagttcttataccgggaatgacgactacatattagagttctttttgccactcgattgtattgacgaagatgaccaaaatgccttactggggtctatattaactctgatgaagcggtgtcttcgtagcctaaagctagttgatgacaatgatttgagtggggtttctcttcaccttagtaatgtgctaaaacttgagaatgaagaatccaaaacagatgcacagtttgatggttcccttcgcgaatcacctgaggatgatagacatggaggatcccacaagtttgataatgagaaccagaaagttttggatatcacagagggacaattgttgactgatgactactctcaagacaatggtacttctgttggcagaccaaatggtagtggtgcttctgattcttcattgcttcacaaaaccaacaaaccccctgaaagaagacgtgggaaagctgaaaagactatcagtttag

SEQ ID NO: 262334 - DNA, 551 bp, Zea mays
gtatagaggctgctcaaggtggtttgttcctggaagagatgcaacgaaaatggaatgacggtaacaaggcattgaaaatgattagagacatcctgatgtatatggacaggacatatattcccactaataaaaaggcacctgtctttgatcatgggatagagctttggagggataccatagttcggtctcctacgattcaggggaggttgtctgacatgctcgtcgaactcatacatatagaaaggaccggtgatgtgataaacagaggcttgatgaggactacaactaaaatgttgatggatctagggctgtctggttaccaggacgattttgaaaggccatttcttgaggtctctgctagtttctatagtggtgagtcacagcaactcattgagtgctgtgcttgtggtgagtatctgaagcaggctgagaggcgcctctctgaagaatcagagcgtgtgtcacagtacttggatgttaaaaccaatgagaaaattactgctgtcgtggtgaaagagatgctagcaaatcacatgcagaggttgattctt

SEQ ID NO: 262335 - DNA, 1795 bp, Zea mays
ttgataacgggcaccacaagagcaagggtgcagatgggagagctcaacggattggtatagaatctttccctcaacccgtcgattgtagttgctcagcactcaggaaatcctctgatctggtcgcaaggaacttgatcaatagtaccttctgaggcaatatgacatcagcaggtctactatcatcaggttatgaagcaagtaccagtggaaccactgatcgattgccagatgagatgaacgggatgagcataagggatgaaaaggaagtggacgccgctgttgtcaatggcaatgggatggaggttggtcatactattgtgacgactgttggtggaagaaattcacagcagaggcagactattagttatgtggcacagcgtatcgtggggcaaggttcatttggagttgtcttccaggccaggtgtctggaaactggtgagagagtagctataaagaaagttcttcaagatgtgagatacaagaaccgtgagctgcaaacaatgcaagttcttgatcacccaaatgttgtatgcttgaagcattacttctgctcaaccactgataaggaagagctttacctcaatttggtgcttgaatatgtgccagaaactgttcaccgtgttattaaacattacaataagatgaaccaacggatgccattgatttatgttaaactttatatgtatcagatttgtagagctttggcttaccttcacaactgcgtaggagtgtgccacagagatataaagccacaaaatattctggtgaacccacatacccatcagctgaagttgtgtgacttcggcagtgccaaagtcttggtacaaggggaaccaaatatttcatatattcgttctagatactacagagccccagagctcatatttggggctactgagtatacaacagctattgacgtgtggtctgctggttgtgtacttgctgagcttcttctaggtcagcctgtttttcctggggacagtggtgtcgatcagcttgttgaaattattaaggttctaggtactccaacacgggatgaaattaagcgcatgaatccaaactacaccgaatttaagtttccgcaaatcaaagctcacccatggcacaaaatcttccacaaaagaatgccatctgaagctgtagattttgtgtctcggcttctgcagtactcaccaaacctccggtgcacagcattggaggcgttaatccatccattctttgatgaactgcggtacccaaactcacgtctaccaaatggccgttcccttccccatctcttcaattttaaacctaatgagttgagaggagtaccagaggagtttgttgtgcaattgatccctcagcatgctaagaagcaatgtgctttcttaggagtttgagaaagcagttcaattttattccagaaaagaaaaaagagagaggatgcagcagttgagaggttacctgagtattgattacttacgttctgtttaaccgcacagtagcattagcctacagtattatcgactaggcaacgtgtgctgttatctttcacgacggcttttacatcgcaatgttctaccacggtggtgggatctttttcaccacattctgtaaagcagaagaagacgtaaatcgactggtcacccgttcttgtggtctgtatattggtctcccccaatcttgagaacacgttcttttgtttttggagaagaattcatttgggaatctgtatccctatccccaaatgaaacaagaactcatgtattcttgaactggattcagttacatgagagtcaaaccatgccctttctct

SEQ ID NO: 262336 - DNA, 1771 bp, Zea mays
tttttcctgcgttggcattccgcctgctggacttcctcgtgctgtgtctctgtctgtcgctctcgctctcagacgactgggccgccgccgcttggtgctgaggctttcgttggtctcttcggcggcgacgagcacccaccagcagttctgtagaaatggctgatggtgaggacatccagcctcttgtctgcgacaatggcaccggaatggtcaaggctggttttgctggggacgatgcaccaagggcggttttccctagcattgttggccgtcctcgccacactggtgtcatggtagggatgggacagaaggatgcatatgttggcgatgaggcacagtccaagagaggtattctcacgctcaagtacccgattgagcacggtattgtgagcaactgggatgacatggagaaaatctggcatcatactttctacaacgagcttcgtgttgccccagaggagcaccctgtgttgctcactgaggctcctttgaacccaaaggccaacagggagaagatgacccaaattatgtttgagactttcaatgttcctgccatgtatgttgcaatccaagcagtgctctcactctatgctagtgggcgtactactggtattgttctcgactctggtgatggtgtgagccacactgtgcccatttacgaaggatatgcccttcctcatgccattcttcgtttggatcttgctggtcgggacctcacagactccctcatgaaaattctcactgagaggggttactccttcacaacctcagccgagcgagaaattgtaagggacatcaaggagaagctagcatatatagcccttgactatgagcaagagttggaaactgccaagaacagctcttcagttgaaaagagctatgagctacctgatggacaagtaatcaccattggtgcagagagattcaggtgccctgaggtcctcttccagccatccatgattggtatggaggctgctggaatccatgagacaacatacaattcaatcatgaagtgtgacgtggatatcaggaaggacctctacggcaacattgtgctcagtggaggttcgactatgttcccgggtatcgctgatcgtatgagcaaggagatcacttcccttgcaccaagcagcatgaagatcaaggtcgttgcaccgcctgagaggaagtacagtgtctggataggagggtcgatcctagcctcgctcagcactttccaacagatgtggatatcgaaggaggagtacgacgagtctggcccggcaattgttcaccggaagtgcttctagggtttcacaagttcctcgtcgttacctagtctcaaattatgtcccctccatttctcgagatatgtgtggcagatttgcatgatacgtttgtttgtttccatcggacctgaagtcttcttggggataggctcccccctttgtatgttgtggctccaatccatgtgcgagcacgctgtgtctgtcgtgacacctggttcgtgagatgggttgtcaaacttgattggtttgttgtgcgtggctggaagagctgatagttatatatttggcttggactgtgccgcttgtatgtatctgaattctgaaagcgttgtaatctgagcatccgtgcaaagtatgaatggcccttttatatgggctggattttccggtttctatacaatttggtgtttgtcgactgccaagacttaaaatataaacatgattgtattgcagaaaaaaaaaaaaaaaagggcggccgcccgggaatccggacggacggcggc

SEQ ID NO: 262337 - DNA, 609 bp, Zea mays
ggtcgacgacgcgtccacggacgagtggggtcccctttccgccactgcattttatccttcctggtgctctgtccacctctctcgctctgggccgccgccgccgccctaagccacgtgctgaggctttcgttggtctcttcgccggcgacgagcacccagcagttctgtagaaatggctgatggtgaggacatccagcctcttgtctgcgacaatggcactggaatggtcaaggctggttttgctggcgatgatgcaccaagggcggttttccctagcattgttggccgtcctcgccacactggtgtcatggtagggatgggacagaaggacgcatatgttggcgatgaggcacagtccaagagaggtattcttacgctcaagtacccgattgagcacggtattgtgagcaactgggatgacatggagaaaatctggcatcatactttctacaacgagcttcgtgttgccccagaggagcaccctgtgttgctcaccgaggctcctttgaacccaaaggccaacagggagaagatgacccaaattatgtttgagactttcaatgctcctgccatgtatgttgcaatccaagcggtgctctcactctatgc

SEQ ID NO: 262338 - DNA, 990 bp, Zea mays
tcgtccacgcgtccgcccacgcgtccgcccacgcgtccggtagaagctagcatatatagcccttgactatgagcaagagttggaaactgccaagaacagctcttcagttgaaaagagctatgagctacctgatggacaagtaatcaccattggtgcagagagattcaggtgccctgaggtcctcttccagccgtcgatgattggtatggaggctgctggaatccatgagacaacatacaattcaatcatgaagtgtgacgtggatatcaggaaggacctctacggcaacattgtgctcagtggtggttcgactatgttcccgggtatcgctgatcgtatgagcaaggagatcacttcccttgcaccaagcagcatgaagatcaaggtcgttgcaccgcctgagaggaagtatagtgtctggataggagggtccatcctagcctcgctgagcactttccaacagatgtggatatctaaggaggagtacgatgagtctggcccggcaattgttcacaggaagtgcttctaggcttcgcaagttcctcatcgttgcctagtctcaagttatgtccccttcatttctcaagatacgtgtggcagatttgcatggtacggttcatttatcaaattatgcccaccccctctttgtatgttgtggctccatgtgcgagcacgctgtctgtcgtgacacctggttcgtcagatgttttgtcaaacttgcttggcttgattggttgtacttgtacctgtaagagctgatagttatatgaatggcttggactgtcctgctgtttatagccttaggactagtttggaaacacaatcccccttggggattaaaaggggctgaggaggaaattagttcatttccatctcaatccctttcaatcccgaatggggtttaaggtttccaaagtagcccttagtatgtattctgagcatccgtgcaaagtatgaatgaccctgtagatgggctgggttttctggttt

SEQ ID NO: 262339 - DNA, 590 bp, Zea mays
ggaattcccgggtcgaccgcacgcgtctccattcattcacacaccacacctcccgaactccgaactacaagtttcgcttctcgtcgcgacgactgggcgagaccgccgccgccgccgccgcctgagttctttagaaatggctgatggtgaggacatccagcctcttgtctgcgacaatggcactggaatggtcaaggctggttttgctggcgacgatgcaccaagggctgttttccctagtattgttggccgtcctcgccacactggtgttatggtagggatgggacagaaggatgcgtatgttggcgacgaggcacagtccaagagaggtattctcacgctcaagtatccgatcgagcatggtattgtgagcaactgggatgacatggagaaaatctggcatcacactttctacaacgagcttcgtgttgccccagaggagcaccctgtgttgctcactgaggctcctttgaacccaaaggccaacagggagaagatgacccagattatgttcgagactttcaatgttcctgccatgtacgttgcaattcaagcagtgctggcactctatgccagtggacgtactactg

SEQ ID NO: 262340 - DNA, 642 bp, Zea mays
ggcagtcttctcgcggttgcaggccacaaacaactgctcctcctgcattccccctttccccttccgtccgctgcattcctgctctcttgctctcctcgctctcagaccacagttgccgccgccgccgccctaagccagggtgctgaggctttcgttggcctcttcgccggcagcgagcacccaccagcagttctgtagaaatggctgatggtgaggacatccagcctcttgtctgcgacaatggcaccggaatggtcaaggctggttttgccggcgatgatgcaccaagggctgtattccctagcatcgttgggcgtcctcgtcacaccggtgtcatggtagggatggggcagaaggatgcatatgttggtgatgaggcacagtccaagagaggtattctcacgctcaagtacccgattgagcacggtattgtaagcaactgggatgacatggagaaaatctggcatcacactttctacaatgagctccgtgttgcccaaaagaacccccttgggtggttaaccaaggttctttggacccaaaaggccaccagggaaaaaataacccaattattgttggaaactttaaaggttcttgccttgattgtggcaatcaaagcggggttttaattttttgttaggg

SEQ ID NO: 262341 - DNA, 547 bp, Zea mays
tgtcgaacctccactgagcacaatgttccccggtatcgctgatcggatgagcaaggagatcacttcccttgcaccaagcagcatgaagatcaaggtcgtcgcgccacctgagaggaagtacagtgtctggataggagggtcgatcctagcctcgctcagcactttccaacagatgtggatatcaaaggaggagtacgatgagtctggcccggcaattgttcacaggaagtgcttctaggtttctgccaagttcgtcaagtgcttttagggttcgccatgttcatcatcgctacctagtcttaagttatgcccccttcatttgctgagatatgtgtggcagatttgcatcgttttggtatttcgtggctccatgtgtgagcatgctgtgtcctataacctggtttatgagatgagttgttaaacttgcttggcttgattggttttacctgtaagagctgatagttatataaattgcttgtacttgtttgcatccagaacatccgtgcaagtatgaatggccctgtacatgggctgggttttctggctt

SEQ ID NO: 262342 - DNA, 576 bp, Zea mays
agcatgaagatcaaggtcgtcgcaccacctgagaggaagtacagtgtctggataggagggtcgatcctagcctcgctcagcactttccaacagatgtggatatccaaggaggagtatgatgagtctggcccggcaatcgtccacaggaagtgcttctaggttccgcaagttcctcattgttatctagtctcaagttatgcccccgtcatttctcgagatatgtgtggcagatttgcctgcgacgtttattttcatcggacctgagtcttctcggggttagcagctacctttgaatgttgtggctccctgtgcgagcgtgctgtgtcgtatcacctggtttgtgagattagttgttgtcaaacttgcttggtttgattggttgtgcgtttaagagctgatagttatatacatatattgctttgctataccgccgctatatctatgtagcctttatgtatgtatctggattctgaaatgcaagaatgaacttcgagcagcctttgtgttaacaaaaaaaaaaaaaaaaaaaaaaaaaagggcggctgctcgcgatctagaactaggcggacgtgtggg

SEQ ID NO: 262343 - DNA, 336 bp, Zea mays
cgcctgagaggaagtatagtgtctggataggagggtccatcctagcctcgctgagcactttccaacaggtatgttgtattgtttatattactttcagctgctgcattttatttctatgaactcgtattactttccaacaggtatgttgtattgtttatattactttcagctgctgcattttatttctatgaactcgtattatgatgaaacgaaataacttctgagttctgttatgatggcccttgatttaccagatgtggatatctaaggaggagtacgatgagtctggcccggcaattgttcacaggaagtgcttctaggcttcgcaagttcctc

SEQ ID NO: 262344 - DNA, 516 bp, Zea mays
gaggtatagtgtctgagtaggaaggtgctgctatctgaacgcggcatggtccaacagatgtggatatctaaggaggagtacgatgagtctggcccggcaattgttcacaggaagtgcttctaggcttcgcaagttcctcatcgttgcctagtctcaagttatgtcccctgcgggtctcaagatacgtgtggcagatttgcatggtacggttcatttatcaaattatgcccaccccctctttgtatgttgtggctccatgtgcgagcacgctgtctgtcgtgacacctggttcgtcagatgttttgtcaaacttgcttggcttgattggttgtacttgtacctgtaagagctgatagttatatgaatggcttggactaaaaaaaaaaaaaaaaaaaaaaaaaaaaaaaaaataaaaaaaaaaaaaaataattataaatataaataattatttatataatattaaaaaaatacaaataaatataatatattataattttttttttttattttattttt

SEQ ID NO: 262345 - DNA, 463 bp, Zea mays
cccacgcgtccgcttcatttctcaagatacgtgtggcagatttgcatgggacataacttgagactaggcaacgatgaggaacttgcgaagctagtctcaagttatgtccccttcatttctcaagatacgtgtggcagatttgcatggtacggttcatttatcaaattatgcccaccccctctttgtatgttgtggctccactgtgcgagcgcgctgtgacgtatcacctggtttgtgagattagttgttgtcaaacttgcttggtttgattggttgtgcgtttaagagctgatagttatatacatatattgctttgctataccgccgctatatctatgtagcctttatgtatgtatctggattctgaaatgcaagaatgaacttcgagcaaaaaaaaaaaaaaaaaaaaaaaaaaaaaaacgagaaagaaacgaaagaaaaaaaaaagggggcgcgccccccc

SEQ ID NO: 262346 - DNA, 1647 bp, Zea mays
tctttcccacgcgtccgcccacgcgtccgcagcagctgccacagagacatcagagagcggtcctccttgtgagtctgagctgaagaggaggaggaggaggaggagaagcagcagcgcagccggaggagggagagcgaagatgcgccgcgtcgcgctgttgctcgtcgccgccgtgtgcgcgctggcggcgccggctgccgcggtcgtcactgacggtcttctcccgaacggcaacttcgaggatggcccgcccaagtcggcgctggtgaacggcacggtggtgtcgggcgcccacgccatcccgcggtgggagacgtccggcttcgtggagtacatcgagtcggggcacaagcagggggacatgctgctggtggtgccgcagggcgcgcacgcggtgcggctgggcaacgaggcgtcgatccggcagcgcctggccgtggcgcgcggcgcctactacgccatcacgttcagcgcggcgcggacgtgcgcgcaggcggagcggcagcggctgaacgtgtcggtgagccccgagtggggcgtgctgccgatgcagaccatctacggcagcaacggctgggactcgtacgcctgggcattcaaggcgaagatggacgcggtgacgctggtcatccacaacccgggcgtggaggaggacccggcctgcggcccgctcatcgacggcgtcgccatccgtgcgctgtacccgcccgcgctcgccaggcgggcggggggaaacaacctgctcaagaacggcgggttcgaggagggcccctacttcctgcccggcgcgtcctggggcgtgctcgtcccgcccaacatcgaggacgaccactcgccgctccccgcctggatgatcgtctcgtccaaggccgtcaagtacgtggacgccgcgcacttcgccgtgccccagggcgcgcgcgccgtcgagctggtgggcggccgggagagcgcgctcgtgcaggaggtgcgcaccgtgcctgggtggacctaccgcctcgccttcgccgtgggagactcgggcgacggctgcgcgggctccatggccgccgaggcctacgcggcgcgcgccacggtcaaggtgccctaccagtccaggggcaccggaggatacaagcgcgccgtgctggacttcacggccatcgccaaccgcacccgcgtcgtcttccagagcaccttctaccacatgaagcccgacggcacgctctgcggcccgctcgtcgacgacgcctcgctcgtcggcctgcgcaagaagaagcccgcgcgccgcctcatgcagctcctgtaagcgctgcttccacgtgcactacgcccggacggaccgcgcaagcgatggtgtaatacggctggtatgtgttttttggtttggtgtgtgcgtgcgtggtatacgcgtgccgtgcgcgccctgtggctgtggctgcagtggcgtcgcgttgggtgttttcttgttgtgacgaagaaaaaagggtatgggttggggtggtccgctggccggcgcaccggggttttaatcaacttatattaacctgatgaaggtgaaggtgaaggtgacacgggattaatggcaaaaatgctcctagtactatttttgtaaaaaaaaaaaaaaaaaaaaaaaaaaaaaaaaaaaaaaaaaaaaaaaaaaaaaaaaaa

SEQ ID NO: 262347 - DNA, 573 bp, Zea mays
ttcttcgcgtgcgcccacgcgtgcgcccacgcgtccgcccacgcgtccggtgcctgggtggacctaccggctcgccttcgccgtgggggactcgggcgacggctgcgcgggctccatggccgccgaggcctacgcggcgcgcgccacggtcaaggtgccctaccagtccaggggcaccggaggctacaagcgcgccgtgctggacttcacggccatcgccaaccgcacccgcgtcgtcttccagagcaccttctaccacatgaagcccgacggcacgctctgcggcccgctcgtcgacgacgcctcgctcgtcggcctgcgcaagaagaagcccgcgcgccgcctcatgcagctcctggtatagcgctgcttccacgtgcactacgcccggacggaccgcgcaagcgatgatggtgtaatacggctggtatgtgtttttggtttggtgtgtgcgtgcgtggtatacgcgtgccgtgcgcgccctgtggctgtggctgcagtggcgtcggttgggtggtccgctggccggcgcaccgggtaaaagacgagaggttttaatcaacttatattaac

SEQ ID NO: 262348 - DNA, 369 bp, Zea mays
catccacgtggcgcgtcgatcgtccttactaacggggaggccttcggcgagggactggttggagacgctcacggcctccctgcttgcgcgctgggcgagaaggagggcgacgcgctcaaagcgtatgccccgaacgcctccagcccgatggcgacaatcagcttcgggggcacggtcgtcggcgtcaagccggcacccgtggtggcctccttctcggcgcgtggacccaacgggctcgtcccggagattctcaagccggacttcatcgcaccgggcgtcaacatcctcgccgcgtggacgggcgccacgggtccgaccggcctggagggcgatacccgccgcacggagttcaacatcctgtccgggacg

SEQ ID NO: 262349 - DNA, 952 bp, Zea mays
gagaaacctacatttgtctactgtctgcacttgcatcaagagggcaaacggatcaagtttatgccatagtgagtgatatgagtgtcgctggacttggattaaacaagttttgttatgctggattgataactgcattcaagaacaagacaccaaccgctgaggaaactatggcgaagattcttgacttcgtcgggcagtcgaaaggttggcaatatgttgaaagagtatcaaaggacattgctgagaatataatgatgaatgtgtcagaggaagaactgtacaacctcccaacagcagaatatgtaaataggcgaggaggatttgtctttaaacaacatacagtttatcatgttgctctccaagcttgtgcagaattgcgaacacaagagacacttgaagcacttctggaaatgttcaataaggataatagagatggatctacttatgatgcctacatggtgatgcaagctatgaggtgttacctacgatgtggagatattgattctgctgttaagatgtttgaagagtattcaagctcgaggtccccacccgctgagttgtatgcgacacttgctgagggagctatgattgggtacactccaagaggaatgcaacttgctcaagaaactatagagaagatgacttcaagaaattttttcttgaatgccaagatgggaactgatctcctacttgcagctgccggtgaaacggctggtggatatacgactgcaaattatgtctgggatctcctgcaaagccgtaaaatcactccaacacttcctgctgttgaggcataccacaagggtctgacggcgcgagagattccttctgacgatccacgacttctcaatgttacccatgttttggacaacccggagcctcccgttgtccaagaagaacactcagtaacttaaaacaatattgtccctgatcgatgcaatcagtaatttgc

SEQ ID NO: 262350 - DNA, 1468 bp, Zea mays
agtgaacatgaggccactcgaatcgaagcattgcattggttcttcactttgctggatcgatatcgggctgagttcttggcgtacctgaacgatatttttgatccactccttaatgcactttctgatccttcggacgcggttgtcctattagtattggaagttcatgcacgtatagctgaagagtctcaccacttccatcatcttgtatcctacctaatctgcaccttccacaacaaccattttctactggagaagcgtggtgctttgatagtccgtcgcctctgcgttcttctgggtgctgaaaaagtatatcgtgagttctccactattcttgagagtgaagttgaccttgattttgcatccgtcatggttcaggctttgaatttgattttgctcacatcaactgaacttggtgagctccgctctcttcttaagaagtcgttagtggattcctgtggcaaggacttgtttcagtcattatatgcttcgtggcgccactctccgatggctacaataagtttgtgtttacttgctcaggcatacagtcatgcgagctgtgttattcagtcgctgggagaagaagacataaatgtgaaatttttggttcagttagataaattgatccgtctcttagagactccagtatttgcttacttgcgtttgcagcttcttgagcctggaaagcacacctggcttctgaaaactctttacggtctcctgatgcttttgcctcagcaaagtgcggccttcaagatcttgaggactcgactgaagactgtgccattcagtgaaaatcttaagcgcacatcttcagcgaatccatactctcagattctgcaagtgacggaagatggcaatagaaaccaagatatgcagaactacagtgcaatcaatttcccattccttctccagcaatttgagaacatgcagctgcagcatcgtaaccatttgaaggatcaactgccaatcccgtaaatctgcttcgactttaacattatctcaggagatacaaagatacgaagaagcgcattcctcttcgctgtcagagattaacaggcccccttcaagaacatccaaaggcattttatgatgcatttgttcttgcgatgtatgatatatttgccggaagcatcaccacatatatgttggggctttggttagtctcctcgttttttttcaaaggaggttgcatagggtacatagtgtaatcttttctatttcgttcctagatttgtcaagagatggcaattatttgttggagaaagctcgttgccacattctagtcattcttttcttagtggtttcactgctcatctggtttctgtaatttttcaattgaaggccaaatgagcaaagtagtaattggagatagaaatatgttactactgtcctatctatcgatctccaataaattagcgttgcaatgtaaattcctgttggctcgtatgaaatatttcctattttatat

SEQ ID NO: 262351 - DNA, 603 bp, Zea mays
agaccctaccttgcttcctatggtgtggagaatccaatctatgctgtcctacaacttgcacaaacaaccatgagaagtgaactcgggaagataaccttagataagacttttgaggagagagatgcattaaatgagaaaattgtgagtgccatcaatgaagcagccacagattggggcctgaagtgtatccgctatgagatcagggacataaatcctccagcagggattaggcaggctatggagatgcaggctgaggcagaaaggaaaaaacgcgctcaaatccttgagtcagaagggatgaaacaggcccaaatccttgaatcagaagggaaaaagactgcccagatccttgaatctgaaggagctatgttggatctagcaaaccgtgccaagggtgcggctgaagcaattcttgccaagtcagaagctactgctcgtggaatgagattggtttcagatgcgatgacaactgaaggcagtgccaatgcttctagcctgaaacttgcatagcaatacatctaagcattttcaaatcttgcaccaaagacaaaatacaatgcttatttcaagatataagtccccaaaattcccaacatttttttt

SEQ ID NO: 262352 - DNA, 1113 bp, Zea mays
  unsure (1)..(1113): unsure at all n locations
caaggtgtccggaaacttccccacttgcctcttgcccaccctattcgctcctgttccagggggaccgagggccctgctcggtcggcccaattcaatgcccaaacgacacgctcgccaaacaccctcttncacttggaaaaaccagacaacttgaatgggctatgcgtctgagagttgcatactacatcgctgaagcactggagtattgcagcactgagggaaggcctttgtaccatgacctaaatgcatatagggtcctctttgatgagaatggtgatcctcgcctttcatgctttggcctgatgaaaaacagtagggatgggaaaagctatagcacaaatcttgcatatacacctccagaatatttaagaaatggaagagtaacatcagaaagtgtcatattcagctttggcactatactgctggacctcctaagtggaaaacgtatacctccttcccgtgctcttgatatgataaaaggcaacaatatccaagtactgatggattcacatctggagggaaactactcaacagatgaggcaaccacattggttgacctggcctctcagtgcctacagtacgaacctagggatcggcccaacactaaaaagctggtgtcctgtacttgagcccttgcaaataaaatcagaggtaccatcctacgagatgcttggcattccaaaacatgaggaagaagcgcctccccctccacaaccgcagcgccctctctctcccatgggtgaagcctgttctaggacggatctgacagctatccatcagattctagtgaacacgcattacagggacgatgaagggagcaacgagctatcgttccaggaatggacgcagcagatgagggacatgctggaagctaggaaacgtggggacttcgccttccgcgacaaagatttcaaggcagccatagactgctacacgcagttcgtcgacgtgggacgatggtgtcgccaacagtgtacgcgaggcggagcttgtgccacctcatgtgcgaccacttagccggccctccgtgacgccaatgcagcgcagtgcgcgtacccagattggccaacgcgtctacatgcagccgtcgcgtctcgaactgaactgcagacg

SEQ ID NO: 262353 - DNA, 787 bp, Zea mays
  unsure (1)..(787): unsure at all n locations
ccgtccgtnncttcttccttcttcccctgggctcggtctgctatcttcctactgtccggggaancccagccgagcggcctgaaccccacaccacacacacagggttgcctacccacgccacgcacgcgcagccgcggcggaagccacccgggggtgggctccgatgggctgctgcggctcctcgcagcgggcggggacgcacccggagaagaagccgccgggggcgctccccccgcaccgcccctcctactcggtcaaccagcaccaggcgccgccgccgccgccgccgccctccgcggctcgcgctggcgcccgccaggtgccgccgctcaaggagttctcgctcgcggagctgcgcgccgccacggccggcttcgcggcggggaacatcgtgtcggagagcggcgagaaggcgcccaatttcgtgtacaggggccgcctcgacgccggccgccgcgcgatcgccgtcaagaagttcaccaagatggcgtggcccgatcccaagcagttcgcggaggaggccaagggcgtcgggaagctgcgccaccgccgcctggccaacctcatcggctactgctgcgacggcgacgagcgcctgctcgtcgccgagttcatgcccaacgacacgctcgccaagcacctcttccactgggaaaaccagacaattgaatgggctatgcgcctgagagttgcatactacatcgctgaagcactggagtattgcagcaccgagggaaggcctttgtaccacgacctatatgcatatagggtcctctntgatgagaat

SEQ ID NO: 262354 - DNA, 443 bp, Zea mays
tctcacgcgtccgcccacgcgtccgcccacgcgtccgccctcgcgtcccatttggagggaaactactcaacagatgtggcatccatcattggttgacctggcctcccagtgcctacagtatgagcctagggatcgggccaacactaaaaagctggtttccgtactcgagcccttgcaaataaaatcagaggtaccatcctacgagatgcttggcattccaaaacatgaggaagaagcgcctccccctccacaaccgcagcgccctctctctcccatgggtgaagcctgttctaggacggatctgacagctatccatcaaattccagtgaacacgcattacagggacgatgaagggagcatcgagctttcgttccaggaatggacgcagcagatgagggacatgctggaagctaggaagcgtggggacttttccttttgcgatt

SEQ ID NO: 262355 - DNA, 1373 bp, Zea mays
gaaaaaacaatagttccatcccgcatagtgaaatcaggtcaagttctcgtgagaacattctttctggtgtttcggatggacagatcaacttgcttcatgagaggcagcgtcgtcgtcgtgtgaggtcaggcaaagaacccattgagatgaatctcaaccacatagaccactcaaatctccagcttgataatactagtgaccttggaggtttaaaaccaaacaagttacctcattggcttcaggaggctgtacgtgctcctgcttcatctaagccacctgaacgtgggctaccagcaactgtctcagcaattgctcagtccatgtgccttcttcttggagaacaagaaccatcaatacctccattcttgatcctgggaacccctctttctcccccaaaagatccaaggattaattcaaagaagaggaaactccgcaaagctcatcaatctacctctcatgtaggtgattgcatcgctacccaagcacccccatccgttaaagcttcagctgctcctcttgctgtcgattgcaatgatggtgcgccttcactcaacttgaactctgcattgctgtcatcttcagctgtaagcaagaagctagatgagttacctcccacatttaaagaatcaaaccaaaccatggatggttcagaagctgttgcaggcaagttggaggctcctgaaattggttgtcaggtaactggttcctctccagtagatgacaaagctagagaatcttcaggatcaccagtgaaggatactcctgatgctggagtcagattgcaaggatcagataactcagctatggcattttctgcactcccacttgaagcacctgtgacaagcagcagagcagagcctgtggcatgtgatggcagtgacatgaaagaggatattccactagacgctgaaagcaacgggaacctggaggagcgatgaactggctcctcttgtgaacatggatgcatcacatcaagtatctgctaaaacgtcaacggagattggatgaaatgttctcagatgagcatcagacttgagccagttagctcgacattcctttctcttccgttgagcagaatactgggattttccctctcccaatgtttccagtgttgatgatctcatgttgtgtaatgctttagtgcagagtgcagataggataaaattcaacgacaagtggtgcttcttagcagtagttgggcactagtccgtcgggagcaactcgtgggagcctgtatgcaagaaatgtatatttttgctaacatggtcctggttgggtgtgtagactgtagaccgctattcatttatttatgcgtatatggttcagtaaaaaaaaaaaaaaaaaaaaagggcggcgctcgctctagatcgcga

SEQ ID NO: 262356 - DNA, 553 bp, Zea mays
gtgagctaccagcaacagtttcggcaattgctcagtcggtctgccttcttcttggagaacaagaaccatcaatacctccattcttgatcccgggaacacctctttctcgcccagaagatccaaggattaattcaaagaagaaactccgcatggctcagcaatctaactctcatgtacagcagtcaaaaattggatctggtgagggtgattgtgtcgctaccccagcacccccatccattgaagcttcacctgcacttcctgtcgattgcgatgatggtgagccttcactcaacttgaaatctgcatcattgtcatcttcagctggcagcaaggggctagatgagttacctcccgcatttaaagaagcaaatcaaaccgtggatggctcagaagctgttgcggccaagtcagatgctcctgaaattggttgtcaggtacctggttcctctccattacatgacaaaggtagcgaatcctccgggtcgccagtgaaggacactcctgaggctggaatcagattgccaggatcagataactcaactattgcattttt

SEQ ID NO: 262357 - DNA, 441 bp, Zea mays
ctcttccgttgagcagaatactgggattttccctctcccaatgtttccagtgttgatgatctcatgttgtgtaatgctttagtgcagagtgcagataggataaaattcaacgacaagtggtgcttcttagcagtagttgggcgctagtccgtcgggagcaactcttggaaacctgtatacaagaaatgtatatttttgctcccatggtgttggttgggtgtgtagactgtagccccctattcatttatttccgcgtatatggttcggtaatttgccgtctgtctagcggtccctgtaagggtaggcttggtcatgataatacctcgccctgagtggtggcctgatagaacatgaaaccccctttcccccgctgttattgtttgataattgagcggaatgcctttatggttggactaaaaaaaaagatgaaacaatgtgttt

SEQ ID NO: 262358 - DNA, 340 bp, Zea mays
ctcttgcgagcatggatgcatcgcatcaagtttctgctaatacagccaacgaagatgggtggatgtaaaatgatcattagactcgagctagttagctcaacattcctttcttttgcgttcagcataacactgggattttccctctcccaatgtttccagtgttgatctcgtgttgtgtaatgctttagtgcaggtctcgttgcagataggatgaaacgcaaagggctagtggtacttaccagtagttgggcactagtccgtcgggggagcaactcgtggaaacctgtatccaagaaatgtatattttgctaatatggtgctggttgggtgtgtagcaggt

SEQ ID NO: 262359 - DNA, 1098 bp, Zea mays
gcgtcgctgaataaggatcgtgaacttgcgcgtggacgctgtggtactgtttacaaggcggtgctcagagatggccagccagtggccatcaagaagctgacagtttcaagtatggtcaagtcagagcatgacttcaagcagcacgtcaagcttctaggcaaggtgcggcaccataacattgtcaccctcaaaggcttctactggacttcctcactgcagctccttatatatgaattcattcctgctgggagtttgcatcagcaccttcatgagtgctcataccagagctcgctttcatgggtggagaggtttgacataatcgctggcgtggtccgcgcacttgtgcacttgcatcgctactgtataatccactacaatctgaagtccagcaatgtcttgctagacacgaatggtgagcccagggttggtgattatggtcttgtgaacctgctgccgatgctggatcgctatgtgctcagcagtaagatccagagcgtgctgggatacatggcacctgagttcacttgcacaacggtcaaggtcacggagaagtgcgacatatacagcttcggagtgctagtccttgagattttgtcaggcagaaggcccgtagaatatctggaagatagtgtggctgtgctttctgatcttgtcagtgatgcactcgatgatgacaggctggaggactgcatggatccacggctatcaggtgagttctcgatggtggaggccacactgatcatcaagctgggcctggtctgtgcatctcaggtgccttctcaacgaccggacatggctgaggtggtcagtatgcttgagatggtgaggagtcctcagggtaccccagaagatgatctggtttgagatccattaaccggagtttctcccttttctcattccttttttccattcgtctttgggtagatacatgttgaggagatggggaaagtgcggtccgaaagtatgttaggtctttgactagtgagtctagtttggatccaatatttaggcacttctgtatctcaggtgtctgaatttttagttgattttagggaacactcttgaatacccaactagtataagaaaattattgttttt

SEQ ID NO: 262360 - DNA, 475 bp, Zea mays
gtccacactgatcatcaagctgggcctggtctgtgcatctcaggtgccttctcaacgaccggacatggctgaggtggtcagtatgcttgagatggtgaggagtcctcagggtaccccagaggatgatctggtttgagatccatttagggtgcgttcttttgttcaggattgatgccaggattggttccaggtgatcaaagcttatacaaattagataagcattcatggttagattggttctagatcatgattccggaacaaacaaacacacccttaccggagtttctcccttttctcattccttttttccattcgtctttgggtagatacatgttgaggagatggggaaagtgcggtccgaaagtatgttaggtctttgactagtgagtctagtttggttgcaatatttaggcacttctctatctcaggtgtctgaatttttagttgattttagggaacactcttgaataaccaa

SEQ ID NO: 262361 - DNA, 465 bp, Zea mays
cgggtcgacccacgcgtgcagcactcctcagaaagagagagggagagagatggcggcgagcgcgctgctgacggggtcgccgtggctgcgcatgcgcctcctcccggacgcgcctgcgcgccccttccgccgcctctacctccgccgggcgctctccgcccgcgcctccgccgccaccggcggcgccgagggcaactccggccccgtccgcgtccgcttcgcgccgtcgcccaccggcaacctccacgtcggcggcgcccgcaccgcgctcttcaactacctcttcgcgcgctccaagggaggacgcttcgtgctccgcgtcgaggataccgacctcgagcgctctaccaggaagtccgaggaggccgtcctcgccgacctcgcttggctcggcctcgaatgggacgaaggtcctgacgtcggtggggagtttgggccttatcgccagtcagaacggaattcact

SEQ ID NO: 262362 - DNA, 493 bp, Zea mays
taccggttctgagatgcacgcttgacccacgcgttcgcgggcgcgtgggcggacgcgtgggctccttgtacatcatcatctagaggagatgcttcggtccgtctacttgctcgtttgaaaagcaaggggtccagaaaaatcatttctagtgctgcctctgccaatggaacacttttggcctattcagatggtgtgagaccctgcctctttgcgctaaggcataagggtggaaagaagtatacccttgacaaattagagctaccaaaaggattgccctgttctcagagtatggcgtttactgttgattcgtccaatttgatacttgcgggacgtaatggaaaaatatacatcattgacattgcaacaagagaaatttcaaatgtatttcaccctacaagaaaggcagatggagcaaaaatctcaagagaatcacctgtaacgaagatgttcctaagtgcagacgggcaatggctagctgcggttaactgctatg

SEQ ID NO: 262363 - DNA, 1286 bp, Zea mays
cccacgcgtccgcgccaagtcgccgtcgacggccgtggacatgagcgaggggctggcggcgtacaccaacggcgtggtgagccggtcggtgctgggctcgacgcaccggaagaaaggccggaacacgctgttcagggagatgaccatgaccaacgtggacctcctggtggggttcaacctggagtactacatcccgcggtggccgctgacggacctgctcttcaggctcgtgtgctggaaggtcacgcgccacctcaagcgctgggacgccctgctggaggaggtgatccacgagcacgtggagatgaggaagctgtccggcgacaaggagaaggagtcggacgacttcatcgacatcttcctctccagatacgaggagtacggcttcaccatggataacgtcaagtccctcctcatgaacgtgttcgaggcagccatcgagacctcatatctggtgctggagtccgccatggccgagctcatgaaccacaggcgcgtcatgaagaagctgcaagcggaggtacgggcgtacggagcggagaagaagctggacatgatcagggaggacgacctgagcagcctgccgtacctaaaggcgtccatgaaggaagcgctgcggctgcacccaccggggcccctgctgctgccgcactactccaccgccgactgccagatcgacgggtaccacatccccgccaacacgcgcgtcctcgtgaacggctgggccatcggcagagacccggcggtctgggagaagcccgaggagttcatgccggagaggttcatgcgcgacggctgggacaagtccaacagctacagcggccaggacttcaggtacctgccgttcgggtctgggcgccggatctgccccggggccaacttcgcgctcgcgaccatggagatcatgctcgccaacctcatgtaccatttcgactgggaggtccccaatgagaaggaagacggtggcgggaaggtgagcatggacgagacgttcgggctgatgcttcgcaggaacgagccgctctaccttgttcctagggccgtctagctagctagttactgtgccgccgccgcctcctatccaagaatgcatgagtcttagacgtgtggcagtaataattgcgtggggtgtagtaaaataataagcacgtttgttgagttgtaatggattcacattatgtgcattcgagacaggtccaaggaattgtatctctaaagtgaaaatttcctttttcaccaaaaaaaaaaaatggacgcgtgggcggacgcgtgggcggacgcgtggg

SEQ ID NO: 262364 - DNA, 405 bp, Zea mays
cggacgcgtgggcgacccacgcgttcgtggtcgcgtggtcggacgcgtggggcatggaggagacgttcgggctgatgcttcgcaggaacgagccgctctaccttgttcctagggccgtctagctagctagttactgtgccgccgccgcctcctatccaagaatgcatgagtcttagacgtgtggcagtaataattgcgtggggtgtagtaaaataataagcacgtttgttgagttgtaatggattcacattatgtgcattcgagacaggtccaaggaattgtatctctaaagtgaaaatttccctttttcaccaagatgaatgcatgtcatactctctcaccggtaaaaaaaaaaaaaaaaaaaaaaaaaaaaaaaaaaaaaaaaaaaaaaaaaagggcggccgc

SEQ ID NO: 262365 - DNA, 992 bp, Zea mays
cgcgaacgcgtccggggacgtgtacgagatgacgcacgacgagctggatttcgagttcctgggaagccggtggggcgggcagtggcgcgtgcagaccaacgtctacggcaatggcagcactagccgcggccgggaggagcgctacctcctccccttcgaccccaccgtcgaggcccacagctactccatcctctgggctcccacccacatcatcttctacgtcgacgacacgccgatccgggaggtgatccggcacccggacatgggcggcgacttcccggcgaagccgatggcggtgtacgccaccatctgggacggctccgcgtgggccacggacgggggcaagtacaaggtcaactacaagtacgcgccgttcgcgtccgacttctcggagctggccgtcgtcggctcccgcgccgacccggtgctccgcgtcccgcgccgggacggcgccgcccaccaggacctcctcgcgctcatgacggccgactacgccgtcgtgacgccgcggaagcgcgcggccatgcgcgcgttcagggcgcggcagatgacgtacacggtgtgctacgacgccgtgcggtacgcggacgggccgttccccgagtgcgacaactcggacgaggagagggagtccttctcggcctggggcgagtccaagaccgtcgtcatgaggccacgcgcccggggccgccgccggggacgcaaggccggcaggggacgggctggcgtgtcaagcagctgacatccttcaaaataatataaatgccagggtctgtcgcgaaagctattggcacaatggttagggatgatggtcgattggtccggtaacgtagtaggtcgattcgttttttatttttatattttttggcgacccatatgcaggctgtaaagctaggtgtagggacggagtactagcagggattaatgcgttatgattctttgattccttgggtggcagctaataaaatgctcaccataagtattgtgcaatt

SEQ ID NO: 262366 - DNA, 2075 bp, Zea mays
tccacgcgtccgcccacgcgtccgcccacgcgtccgcctcactcttcactagcctctgctcctctgaaatggcggcggcgacttcctcttccacctacctcgccatcggccgcaaaaccctaaaccccgccccctccgtagccacagccgccacctccgtctccttccccgccacgcagcacccatgcctcgtcgccgcctccgcggaccgccgccgcgccgtggctgcgaaggtctcgtcgccgtcggtcatcggcaccgccatgccgtcgctcgacttcgagacctccgtcttcaagaaggaaaaggtgtccctggccggccatgaggagtatattgtgaggggtgggagggatctgttcccgctgttaccggaggccttcaagggaatcaaacagatcggtgtaatcggctggggctcgcagggtcctgcgcaagctcagaacttgagagactcacttgttgaggcaaagtcagatattgttgttaagattggtctccggaaaggttctaaatcttttgaagaagcccgagcagcaggattcaccgaagagagtgggacgctgggtgatatatgggagactgtatcaaacagtgatcttgttttgctactgatatctgattctgctcaggctgataactacgagaaaattttctcgcacatgaaaccaaacagtattcttggtttgtcacatggatttctccttggacatttgcaatctctgggttttgatttccctaaaagcatcagtgtgattgctgtatgccccaagggaatgggcccatcagtcagaagactttatgttcagggcaaagagatcaatggtgctggtatcaatgctagctttgctgttcaccaggatgttgatggaagggcaacagatgtagctctagggtggtcagtagctttaggttctcctttcacatttgctactactctagagcaggagtaccggagtgacatttttggcgagcgaggtattttgcttggtgctgtccatggcatggtggaggctcttttcaggagatacacagaacaaggaatggacgaggactcagcatataagaatactgtagagagcatcactggaattatatcgaaaactatttcaaagaagggtatgcttgaagtgtataactccttgactgaagaaggaaagaagcagtttattgaggcctatagtgcagcatattacccatgcatggacatattgtatgagtgctatgaagacgtctcttctggaagtgagattagaagtgtggtgttggctgggaggagattttatgagaaggaagggctccctgctttccctatgggaaaaattgatcaaacacgtatgtggaaggtgggtgaaagggtccgttcaaccaggccacaaggtgatcttggcccactgcatcccttcactgctggagtgtatgttgcactaatgatggctcagattgaggtccttaggaagaagggccactcttactcagagataattaatgagagcctgatcgagtccgtggactcgttgaacccgttcatgcatgctcgcggtgtggccttcatggtcgataactgctccacaactgctcgtttgggatctaggaagtgggcaccacgcttcgattacatcttgacccaacaggcgtttgtgactgttgacaagaaagcaccgatcaaccaagacctcatcagcaacttcatgtctgaccctgtccacggtgccatcgaagtctgcgctcagctgaggcccactgttgacatctcagtgaccgctgatgctgatttcgtgcgtccagagcttcgacagtcttcataagcttgtatggatccgcagtgtgactgcaatggctagtttgtaagaacttaatatgcctgggcttttgaactcttagattgtgcctgtattgctcgtgcttgaggaccagaaaagtaaactcttggcggtgtggtactgttgtgatttgcaagaataaaaataaatttctgttgatcaaaaaaaaaaaaaaaacaaaaataaaagacggcacgggctgtggctcaagttctactactaccgatacaagcaaacctggcaggatcacat

SEQ ID NO: 262367 - DNA, 682 bp, Zea mays
ccaagatcaccttgtggcctggttgaacggaccctttcacccaccttccacatacgtgtttgttgcattaatgatggctcagattgaggtccttaggaagaagggccactcttactcagagataattaacgagagcctgatcgatccgtggactcgttgaacccgttcatgcatgctcgcggtgtggccttcatggtcgataactgctccacaactgctcgtttgggatctaggaaatgggcaccacgcttcgtattacatcttgacccaacaggcgtttgtgactgtttacaagaaagcaccgatcaaccaagacctcatcagcaacttcatgtctgaccctgtccacggtgccatcgaagtctgcgctcagctgaggcccaccgttgacatctcagtgaccgctgatgcagatttcgtgcgcccagagcttcgacagtcttcataagcttgtatggatccgcagtgtgactgcaatggctagcttgtaagaacttaatatgcctgggcttttgaactcttagattgtgcctgtattgctcatgtttgaggaccagaaaaataaactcttggcggtgtggtactgttgtgttttgcaagaataaaaataaatggtttaaactaaatgtctgattcgctatatatgccctttctgatgcgaaataaatggtttgtgacgtgg

SEQ ID NO: 262368 - DNA, 640 bp, Zea mays
ccactcgtccgcctacgcgtccgcctttgcgttcgccctgcgttctcccacgcgtccgaaccaagacctgatcagttacttcatgtctgaccctgtccacggtgccatcgaagtctgcgctcagctgaggcccactgttgacatctcagtgaccgctgatgcagatttcgtgcgcccagagcttcgacagtcttcataagcttgtatggatccgcagtgtgactgcaatggctagcttgtaagaacttaatatgcctgggctcttgaactctcagattgtgcctgtattgctcgtgcttgaggaccagaaaattaaactcttggcggtgtggtactgttgtgatttgcaagaataaaaataattggtttaaaaaaaaaaaaaacaaaaacaaaaaaaaattgacagaaaagagaaaaaaataaaacaaaactaaaaaaaaaaccgattggataaagaagcaaatcgcaaaagcccaaccagaaaaccgattaaagacggccttaagaaaataaacaccaaaaccaagggggggcgcccccggaataattgccaccccccctgcggagagcaaactttttttatttaagggggttataaaagagtggggaaaaaaagggaaaaagtgttctttggggaaaa

SEQ ID NO: 262369 - DNA, 400 bp, Zea mays
accgggtcgaccgacgcgtccgccgacgcgtgggtgtcgccgccactccacctccacctcccacccactcctctcaccgcacgactaaacccgcctccctcgctcctcacccgctccctgtccatccacccatcgcctcgccgccgctctgctgccgtttgctccagctgcggccgaccggggccatggctggcatcgacctcaacaccgtggaggaggaggacgaggaggaggcggaggcgctgcctttgcccggacccggtggccgtggcgccgtgtgcctggagctgtggcacgcgtgcgcgggccccgtcccgccgctgccgcggaagggcagcgccgtcgtgtacctgccgcaaggccacctcgagcacatcggcggcgacgcggcgcgaggagc

SEQ ID NO: 262370 - DNA, 771 bp, Zea mays
gaaatgtcatgtctgtgttcaattatcatccaaggaggggagcgacggcaacaatagcgggaggagacgcgccaccaccagtgcaccacgccaccacccccgccccaatcaacgccgcagcagtagggacgcctataaatgcctaggtgcgtgcgggcactaccactaccagtcagggcaagactcgcagcccggacaaggtaaggcgacgtacggcagcgatggcgccggtggtcatgatgagcatgtgcgtcgtcgtgtcgctggtggcggtgcagctgcaggccacgagcagcgacggcgccacggccacaccgtccgtggtgctgccgccgatgacggtgccccgtgtgcgcggccggttggaggccggtcgtaagctgcaggccgtcgacgccgtcgggatgggcatggactccgtggtgcgtcggacggtggtgctcaccacgatcagacgagcaactcgccctccctgggttacggctcgctccgcccgaacaacgctgtgtgcgggtccagctgcgccggcagacctcctggtgagccgtatctgcatcagatccgcccgtgtggggagtattatcagtgtccgtctacaccgtcttaattagatctaggcggcccggcgtacgtttcatcaaattcaataaacataaatatgtataggtgagaactctatgaaatatatatgaatgtgtcatgtatatgcccgatggattatgaaatatgtatgttatattattctataatagtacccaaaatgtttctccc

SEQ ID NO: 262371 - DNA, 799 bp, Zea mays
ccggttcggaattgccgcatgcgtacaaaaacacaggtagggttaggcgacgcggcggcgagagcgcgagagtaggaggaggcgtcggccatgacggggaaggcgaagccgaagaagcacacggcgaaggagatcgccgcgaagatcgacgcggcgacgacgaaccggggcggcggcaaggtcgggcaggcggatcggctagggcaggacaagggcgggcacgcgaagctggcgtgcccgctctgccgcaccccggcgcccgacatcaagtccatgcagatccaccacgaggcgcgccatcccaagctccctttcgagccggagaagctcgtcaacctgcactcctccacccccgccgccgccgaggccaccacctccaagcccaagcccggggtccgcggcagcctcaagaagtagctggctggcttgcctgcctgactgcctggggtaattcccttcgatttcaatcccatccaccgacccgatctacaatcaatcaaagtaccgcccgccctccggcctgcggtgtactgttagtctgctgctgctgcttcttatcgttgttatattgctgatacatgtctcgcgtgatagatgtgcaactatatatcagtctcgtcgccggcaacactggcatgcttaaacatgtgtcgctgctgctccgtgatgccggcgacggctgctattagtgttaatgttagtgtcgatcgggtctccttgaacaatggcaggaatctgttgcttgtttactttcttctaatggcaagtaaagttccctaattgttacgaagacaagatg

SEQ ID NO: 262372 - DNA, 876 bp, Zea mays
gcttcctctcacgcgtccgaagtagggttaggaaggcggcggccagcggcgagagcgcgagaggaagagcaggaggaggggtcggccatgacggggaaggcgaagccgaagaagcacacggcgaaggagatcgccgcgaagatcgacgcggcgacgacgaaccggggcggcggcaaggccgggcaggcggaccggctggggcaggacaagggcgggcatgcgaagctggcgtgcccgctctgccgcaccccggcgcccgacatcaagtccatgcagatccaccacgaggcgcgccaccccaagctccccttcgagccggagaagctcctcaacctgcactcctccgcccccgctgctgccgccgccgccgccgctgccgccgccgctgccgaggccaccacctccaagcccaagcccggcgtccgcggcagcctcaagaagtaagcttgctgggcttggttggctcgcccgcctgcatggggcgcaattcccttcggtttcaatcccatccgccgacccgatctataatcaatcaaaccgccgccctccggcctggcggctgccgcagtcggcctgcggtgtactgttagtctgctgctgatttccgttgttatactgctggtacatgtgtcgtgtgatagatgtgtcaactatatatcaatctcgtcgccggcagctctggcatgtttgagtatgtgttgctgctctgtggtgccggcgacgatggctgctagtactgttaatgtgatcgggtctccttgaacaatggcataaatatgttgcttgtttactttttcctctaatggcaagtaaagttcatgatttgaaaataaaaaattttttttttaaaaaaaaaaaaaaaaaaaagggcggccg

SEQ ID NO: 262373 - DNA, 408 bp, Zea mays
gggttaggaaggcggcggccagcggcgagaggaggaggggtgggtcagccatgacggggaaggcgaagccgaagaagcacacggcgaaggagatcgccgcgaagatcgacgcggcgacgacgaaccggggcggcggcaaggccgggctggcggaccggctggggcaggacaagggcgggcatgcgaagctggcgtgcccgctctgccgcaccccggcgcccgacatcaagtccatgcagatccaccacgaggcgcgccaccccaagctccccttcgagccggagaagctcctcaacctgcactcctccccccccgctgctgctgttgccgacgacgccgccgtcgccgccgctgccgaggccaccacctacaagcccaagcccggcgtccgcggcagcctcaagaagt

SEQ ID NO: 262374 - DNA, 1903 bp, Zea mays
cccctcgtttgcccacgcgtccgcccacgcgtccggggagagtgagcagccagagaacagggaggtagagaggaggaggaggaggtagaaggcgaaagaaggggaaccaaatcttggacgggaacacatagatttctttggtggaggaaggaggagggcaacaagaggaggttacaggtagcccaatagatctactgctgttgagggagttgatgcaaagctgagttgctgcgcgttggctttctttagagatggcttcagctggtgttgccccttctgggtacaagaacagcagcagcaccagcattggtgccgaaaagttgcaagatcacatgaacgagctaaagattagagatgataaggaagttgaagcaaccataattaatgggaaagggaccgaaactgggcacataattgtcaccactactggtggcaagaatggtcaaccaaaacagacagtgagctacatggctgagcgcattgtaggtcaaggttcttttgggattgtcttccaggccaagtgtttggaaacgggtgagactgttgccataaagaaggttcttcaggacaagcgttacaagaaccgtgagttgcagaccatgcgccttcttgaccaccctaatgttgttgctttgaagcattgcttcttttcaactactgagaaggatgagctttatctgaacttggtccttgagtatgtgccggagacagttcatcgagttgtgaagcatcacaacaagatgaaccaacgcatgccacttatttatgtgaagctgtatatgtaccagatatgtagggcattggcttacattcatggcactattggtgtctgccacagagatattaagccacaaaaccttctggtgaacccacacacccaccagcttaaactatgtgactttggcagtgcaaaagttctggtcaagggggaaccaaacatatcgtacatctgctcccgatactatagggctccagagctcatatttggtgccactgagtataccacagcgattgacatttggtctgctggatgtgttcttgctgagcttatgctagggcagcctttgtttccgggtgaaagtggtgtggaccaacttgtcgaaatcatcaaggtcctcggtacgccaacaagggaagaaattaaatgcatgaacccaaattacacagagtttaagttcccacaaatcaaagcacacccatggcacaaggtattccacaaaaggatgccgccagaagctgttgatctggtctctcggctactccagtactccccaaatctgagatgcactgctgtggaggcgcttgtccacccattctttgacgagcttcgagatcctaatactcgtcttccaaatggccgctttttgccaccacttttcaatttcaagcctcacgaacttaaaggagtcccatcagacattgtcgcgaaattgattccagaacatgcaaagaagcaatgctcctatgttggattgtgaaatgaccgcgccttgagactggaacctgtggttgcaattgtgcatttcccctgggatgtttgacgatcttgaggcatgcgagcctgtcgttgaagatgcaaggttacctacttgtacgacgtacgccaatgcgacctgtgtagctgtgagtagtctaatgttgcagtgacatgtaatggcgcacccccgtcctactaacagatgcttactggagattgccatagctgatcttgtaatttgttatagggcagtatgaatatatttatggtagcttgaatctatttgtggattcacttcgtttttccatgtttccttgtctccagacctggactggactgctattgatttttgtttcagaattcctagctacctgttgcctattgactaaaaaaaaaaaaaaagggcggcggctcgcgatctagaac

SEQ ID NO: 262375 - DNA, 414 bp, Zea mays
tcggttcgcgcccggccgcgggggagggagagggcgaagagtagggggaaccaaatcttgaagggcaaacggagagttctttcgtggaggaggaagggggggacagcaggaggagggtagaggtagctcaatagatctactgctgtcgggggagttaatgcaaagctgagttgctgcacgttggctttcttcagagatggcttcagctggtgtagccccatctgggtacaaaaacagcagcagcactagcattggtgccgagaagttgcaagatcagatgaacgagctaaagattagagatgataaggaagttgaagcaaccataattcatgggaaagggactgaaactgggcacataattgccaccactactggtggcaagaatggtcaaccaaaacagacagtgagctacat

SEQ ID NO: 262376 - DNA, 514 bp, Zea mays
gcgtggtggtggtgggtgctttgactgcaggcctcggcacggtaggcacaaatcattttggccgctgcgtcgcgttgggagcagtattctactgtgcctgcgtcccgacaagcgaaaagaagagacgggggagggtgggagaacggataccgaaagggggaggagagtgagcagccagagaacagggaggtagagaggaggaggaggaggttgagggcgaatgaaggggatccaaatcttggacgggaacacatagatttctttggtggaggaaggaggagggcaacaagaggaggttacaggtagcccaatagatctactgctgttgagggagtttatgcaaagctgagttgctgctcgttggctttatttagagatggcttcagctggtgttgacccttctgggtacaagaacagcatcatcaccagcattggtgccgaaaagttgcaagatcacatgaacgagctaaagattagagatgataaagaagttgaagcaaccataattaatggg

SEQ ID NO: 262377 - DNA, 331 bp, Zea mays
tcgcccactcgttcggagagcgaaagcagctcatatacacaggagggaggtgggagggagtcggagcctcggaggagggagagggcgaagagtaggggggaaccaaatcttgaaggggaaacggagagttctttcgtggtggaggaagggggggacagcaggaggagggtagagaggtagctcaatagatctactgctgtcgggggagttaatgcaaagctgagttgctgcacgttggctttcttcagagatggcttcagctggtgtagccccatctgggtacaaaaacagcagcagcactagcattggtgccgagaagttgcaagatcag

SEQ ID NO: 262378 - DNA, 913 bp, Zea mays
  unsure (1)..(913): unsure at all n locations
cagcctttgtttccgtgtgaaagtggtgtttaccaacttgttgaaatcatcaaggtcctcggtcccccaccaagggaggaatttaaatccttgaccccaatttccccaaattttaatttccaccaattaaaacacaacccttgcaccaggttttttctacaaagggttctcccacaagctctgtagatctggtctctcggctactccagtactccccaaatctgagatgcactgctttggaggcacttgttcacccattctttgatgagcttcgagatcctaatactcgccttncaaatggtcgctttttgccaccactattcaatttcaagcctcacgaacttagaggagtcccatcaggcattgtcgcgaaattgattccagatcatgcatggtggacattgatccgacattggacagtctgatggactcgatttgcaactagaagctgtagatgcaactgtgcaattcgcctaggatgttggacgatcttgaggcatgcgagcctgtcgttgaagatgcaaggttacctacttgtacgacgtacgccaatgcgacctgtgtagctgtgagtagtctaatgttgcagtgacatgtaatggcgcacccccgtcctactaacagatgcttactggagattgccatagctgatcttgtaatttgttatagggcagtatgaatatatttatggtagcttgaatctatttgtggattcacttcgtttttccatgtttccttgtctccagacctggacttggactgctattgatttttgtttcagaattcctagctacctgttgcctagtgcctcccagcttgctcctgtcgattatttgcacactggcgatggtacctgttcttgattgttgctgaaaaaccttttggttgagatgtagtacattgttatttgatc

SEQ ID NO: 262379 - DNA, 1368 bp, Zea mays
ttggaagggattcctcccccatggatccccttgggatacctaatcaccaaatcagctcttagtaagaatattatccttgcacataacattgtttatcgcgacctcggcgggtagattcgccgccgcccacagcccacccggtcgctggggcctccccgtcgtcgccggtcgctcgacattccccgtgccggtccgcgcttccgatccccagcgcttccccgagtcgctgcgtgctcgcgtttccccgagccaagggtcgaaggtcgattcagcgccgtcctcaccggagcttgtccacgcccccttgtcccttcgcgcccgctccttcgccggagaccaccacgctgtccttgagcccgtcttctcgggaaacggcgcttcacgccctgcaagcgggacgaccccgtcccgcatctacggtgaatattcgcctgtgggacgagcccatcccacttctcctcacatccaaccaaacgccagcgagaagaggaccgtcccgtcccgttacggttcgtctctccacccctagttccccaaaccggggcatcgattcatcgaaccctgcccggagacgcgagcaatcatagacaggcatggcgatcgctcggaccggcgtgtacgtcgacgactacctcgagtactcgagcaccctggccggcgacctgcaaaggattctctccaccatgcgcgagctcgatgacagggcacatggcattatgggtcagaccaaagaacagataaagtatattctgggagtatcatcccatgggtatgacaggtcaaacatggatgatgatgagtcggagaggatgaagaaggacattgaagctagccaggacaatgctctgaatctttgcaccgagaaagtcttactggcacgccaagcttatgacctgatagagagccatataaaacgccttgatgaagacttgggccagtttgcagaagatttaaagcatgaagggaagatacctccagatgaacctacagtccttcctccagttccggtggttagcagggatgagaaaaggaggtttggttttagtacacctcaagcatcaaaaaaatttagagagagggaatgggacagggaaaggggtatggactttgatttaatgccccctccaggtagcagcaagaaagcaggtacatctatggatgtggatcaaacaattgatccaaatgaaccgacatactgtatatgccaccagatttcatatggtgacatgattgcttgtgacaatgagaattgtggaggaggtgaatggtttcattacacgtgtgtgggtcttacaccagaaacgagattcaaggggaaatggttttgcccaacgtgcaggaatcttcagtgagaggttctccaaaacc

SEQ ID NO: 262380 - DNA, 1133 bp, Zea mays
gcgtccgcggacgcgtggcaacaaagcaacgcaggcctccggcctccctgaactgacttcagaagtcaccaacgcacccagcacagacagaagaccctcgccggacgctcgctctcgccggggacaactcaatcacgaggccaggatggcccgctacgatcgcgcgatcaccgtgttctcacccgacggccacctcttccaggtcgagtacgccctcgaggccgtccgcaagggcaacgccgccgtcggcgtccgcggcacggacaccgtcgtcctcggcgtcgagaagaagtccacccccaagctccaggactccaggtccgtgcgcaagatcgcgtgcctggacacccacatcgctctggcgtgcgcggggctgaaggccgacgcgcgcgtgctcatcaaccgcgctcgcgtggagtgccagagccaccgactcacagtcgaggaccccgtcaccgtcgagtacatcacgcgctacatcgccggcctgcagcagaagtacacgcagagcggaggggtccgccccttcggcctctccacactcattgtcggcttcgacccctacaccgacaagccagcgctgtaccagaccgatccttctggtaccttctctgcttggaaggcgaacgccacgggaaggaactccaactctatgcgtgagtttctggagaagaactacaaggagacctccggcaaggagaccatcaagcttgctattcgtgcacttctagaggttgttgaaagtggtgggaagaacatcgaggttgcagtgatgacaaagaaggacggtctccgggaactcgaggagtctgagattgatgagtatgttgccgagatcgaggcagagaaggctgcagctgaggctgcaaagaagggtgcctcgaagaacgcctaatttcccgtcttgtgctatggctcccttcaaccctgtgtgtgtgtcccgtttttatgttccatagcaccatcttaactgttctagaaggatgctagatctttaggtgaaactacgcttatatgcctgtgggttaaatgatgtacaatgtgctcgtctacatgccttcttcggaggttttcaatttcgtgtattctgtcatctggacagcgacagttcaaatattgattttacctgattc

SEQ ID NO: 262381 - DNA, 452 bp, Zea mays
cgggtgacagacacattcagcaaacaagcaaaaggcacgaccaccaccgccggccgggaagcaagctcaaaccctaatcgccgtccgccggcgacgccagcacgatggcccgctacgaccgcgccatcaccgttttctcccccgacggccacctcttccaggtggagtacgctctcgaggccgtccgcaagggcaacgccgccgtgggcgtccgcggcacggacaccgtcgtcctcggcgtcgagaagaagtccacacccaagctccaggactccaggtccgtgcgcaagatcgcgtgcctggacactcacatcgctctggcatgcgcggggctgaaggcggacgcgcgcgtgctcatcaaccgcgcgcgggtcgagtgccagagccaccgactcaccgtcgaggaccccgtcaccgtcgagtacatcacccgctacatcgctgggctgcag

SEQ ID NO: 262382 - DNA, 402 bp, Zea mays
gcgtagtatgttgaaagtggtgggaagaacatcgaggttgcagtgatgacaaagaaggatggtctccgggaacttgaggaggctgagattgatgaatatgttgctgagatagaggcagagaaggctgcagctgaggctgcaaagaagggtggtcctagggacacctagtccctgtattgtggtattcctccctttgtgtgtcttgtttttatgttccatagcaccatcttaattgttttagaagaaggatgcttatatggctgtggctgccttgtgacttgtgtgggtctgtgggctgcggggtagttctaaagctctgcagccccgagtgtttatttattaattattgttaaggttgagagaaacccaaaaaaaaaaaaaaaaaaaaaaaaaaaaaaaaga

SEQ ID NO: 262383 - DNA, 1471 bp, Zea mays
cttcctcgccggcgtcgtcctcgccgcactcggatcggggtggtattaaatctccatggtcccgaaggaaaagaaaacgagcactttctcgtgaacagtgggagagtctgttttcagcaaatgggaagcttcgtgatggtgggaagaagtttctcaagaaagttcgcagcggtggcattgagccaagcattaggagtgacgtttggcccttcttactaggagtctatgatttgaatagctctgaagaggaaaggaactctgttaagataaagaaaaggaaagagtatgaaaagctgaggaggcagtgccaacaaattctgaatggctacaagggaaattcgttgaaggcaataactgaacttaatagtgaggtgtgttctagtttagaaggtactgctgatggatcagaatcaccttgttttgaagatgccaatgctatacgtgctcctgtttcactcgaggagctgaagcctgaacagaatgaagttgaccaaccagagaacattccctgtgctgttgttgaatgtattgaagaagatgcagatgagttagcttatgcatatccatgcatagcagagtcagaatcatctgattctgaatcatccgatgaggatgaccctggaaggatgtctgtgtctggcgaggagaactgtgatccagatcctaaatttatcaggagcacttcattcaaggcagatctttttaggtctagcagaaccccagaggacttcgccacatggcaacgcatcataaggttggatgccatccggtcaaacagtgaatggattttgttctcccgcaaccaggctgaagttcccaaggagagagcattgcagtctgcagcatctgttgggttgaaagactatgagcacttggagcccagtatgatttatcacgcggctcgattagttgggttgctcgaagcatatgcggtctacgatccagagattggctactgccaaggcatgagcgatctgttgtcacctatcattgcggtgatggaggaggacgatgaggcgttctggtgtttcgtgggtttcatgaggaaagcaaggcacaacttcaggctcgacgaggttggaatacgaaggcaactgaagattgtctctcagattatcaagcgcaaagattcgcacctgtataggcatctgcagaagttgcaggccgaggactgtttcttcgtgtacagaatggtggtggttctgttcaggcgagagctcacctttgagcaaaccgtgtgcctgtgggaggttatgtgggctgaccaggcagccatacgagccgggatcgggaggtccacctggggaaggataaggctgcgtgctccgccaactgacgacctgttgctctacgccatcgccgcctgcgtcctgcagaggaggaagctgataattgagaagtatagcagcatggacgagatactgcgagagtgcaatagcatggccgggcagctagacgtctggaggctgct

SEQ ID NO: 262384 - DNA, 1316 bp, Zea mays
tgcggacactcgtgcggacgcgtgcgtggaagggcagctaataaggtaaggggcgacgaaaatggctccaacgaccgccaccaaggacgacagtggctacggcgacgagcgccggcgcgagctgcaggcgttcgacgacacgaagctgggggtgaaaggcctggtggactccggcgtcaagtccatcccgtccatcttccaccacccgccggaagccctgagcgacataatttctccggcgcctctgccgccgtcgtcgccaccctccggcgccgccatcccggtggtggacctctcggtgacgcggcgcgaggacctagtcgagcaggtgaggcacgcggccgggacggtgggcttcttctggctggtgaaccacggcgtggcggaggagctgatgggcggcatgctccgcggggtgcgccagttcaacgagggccccgtggaggcgaacaggcgctctactccagggacctcgctcgcaacctgcgcttcgcctccaacttcgacctcttcaaggccgctgcggccgactggcgcgacacgctcttctgcgaggtggctccgaacccgccgccgcgggaggagctgccggagccactcaggaacgtgatgctggagtacggcgcggcggtgacgaagctggcgcggttcgtgttcgagctgctgtccgagtccctcggcatgcccagcgaccacctgtacgagatggagtgcatgcagaacctgaacgtggtgtgccagtactacccgccgtgcccggagccgcaccgcaccgtgggcgtcaagaggcacacggaccctggcttcttcaccatcctcctgcaggacggcatgggcggcctgcaggtgcgcctcggcaacaacgggcagagcggcggctgctgggtggacatcgctccccggcctggggcgctcatggtcaacatcggtgatcttctgcagctcgtgaccaatgaccggttcaggagcgtggagcaccgggtgccggccaacaagagcagcgacacggcgagggtctccgtggcgtccttcttcaacacggacgtgaggaggtccgagaggctgtacggccccattccagaccccagcaagcccccgctgtacaggagcgtcagggcccgagacttcatcgcaaagttcaacaccataggactcgatggccgcgcgctcgaccacttcaggctctagctacctggctacgtttcagattcgtcctttcatttgctttggtctctaaaaccaaacacccccttagtttgttgtggtaataattcctgtatcaattatgtcatacataaaagctaaggaaccttgcc

SEQ ID NO: 262385 - DNA, 466 bp, Zea mays
gtctaaagtcactcgtgattgaaaaaaaaaacaggcaaggaaaatggctccgaccgccgccaaggacagtggctccgccgatcgctggcgcgaggtgcaggcgttcgaggacagcaagctgggtgtgaagggcctggtcgactccggcgtcaagtccatcccggccatgttccaccacccgccggagtccctcaaggatgtcatttctccaccagctctgccctcctccgacgatgcgccggccatcccagtggtggacctgtccgtggcgcggcgcgaggatctggtggcccaggtgaagcacgcggccgggacggtgggcttcttctgggtggtgaaccacggcgtgccggaggagctgatggccagcatgctcagcggggtgcgccagttcaacgagggctctctggaggccaagcaggcgctctactcacgggaccctgctcggagtgctcgcaacgtgcgc

SEQ ID NO: 262386 - DNA, 436 bp, Zea mays
cccacgcgtccgcccactcgtccgcggacgcgtggggcgtggagcaccgggtgccagccagcaggagcagcgacacggcgagggtctccgtggcgtccttcttcaacacggacgtgaggaggtccgagaggatgtacggccccattccagaccccagcaagcccccgctgtacaggagcgtcagggcccgagacttcatcgcaaagttcaacaccataggactcgatggccgcgcgctcgaccacttcaggctctagctacctggctacgtttcagattcgtcctttcatttgctttggtctctaattaataattccaaataataagcccgcggatggacctctgtctgtctgtctgtaatttagtttccaagtttagtttgttgtggtaattcctgtatcaattatgtcataaataaaagctagggaaccttgat

SEQ ID NO: 262387 - DNA, 490 bp, Zea mays
gctgtacggctccattccagaccccagcaagcccccgctgtacaggagcgtcagggcccgagacttcatcgcaaagttcaacaccataggactcgatggccgcgcgctcgaccacttcaggctctagctacctggctacgtttcagattcgtcctttcatttgctttggtctctaattaataattccaaataataagcccgcggatggacctctgtctgtctgtctgtaatttagtttccaagtttaggtagtgtttggttactagggactaatttttagtccctctattttattccactttagtttataaattgcaaaatatggaaactataactctattttagtttccatatttgacaatttagttactaaagtggaataaattggagggactaaaaattagtctctaaaaccaaacacccccttagtttgttgtggtaataattcctgtatcaattatgtcataaataaaagctagggaaccttgat

SEQ ID NO: 262388 - DNA, 2086 bp, Zea mays
ttctcgcgtccgcccacgcgtccgcgggcccgccagaaaagaccctgacagtccgacacccgcaagccacaaagtgcagcctcgttgctacaggaatgctgagaaatgtctgaccttgccggaaagcgcaacctgcgcagtggccgcaactgccaccgcaagcacgtcgaggacgggtaggttcatcggtctcgtcgccgggttttcaggtaaagtcaggtcaggccaactctgtcgaagaaggaacatcgaagaaaggaaggaggtgggcggcaatggaggatgcgatggcggcggacgggaagagcgtgctgcaggggcggtacgagctggggcgggtgctggggcacggcaacttcgggcgggtgcacgcggcgcgggacctgcgcacgggccgcagcgtcgcggtcaaggtggtggccaaggacaagctggagcgcgcgggcatggcggagcagatcaagcgggagatcgccgtcatgaagatggtgtcccaccccaacatcgtggagctgcacgaggtgatggccacccgctccaagatctacctcgcgctcgagctcgtccgcggcggggagctcttctcccgcatcgcgcgcgcggggcgggtccgggaggacgtggcgcgctgttacttccggcagctcgtcgccgcggtcgacttctgccacggccgcggggtgttccaccgagacctgaagctcgagaacctgctcctcgacgaggtaggcaacctcaaagtggcggactttgggctcagcgcgctcgccgggcacgcgcgctccgacgggctgctccataccgcctgtggcacgccgtcatacgtcgcccccgaggtgctcggcgggaagggctacgacggcgccaaggcggacctctggtcctgtggcgtcatcctctacgtgctcctcgttggcagcttgccattccacgaggacaacctcatggtcatgtaccggaagatgcagcgcggcgagttcctctgcccgccgtgggtctcagcggacgcccggaagctcatcggcgagctgctcgaccccgacccgagcacgcgcatcaccgtcgctcgcctcgtcgagacgccgtggtaccggaagccgttgcccgtcctgccgccgctcaacctcaaggagccaaccccggacgcgcgccgcgccacctctgacaaggaagagcccgaggtgctgaacgcgttccacctcatctctttctcggagggcttcgacctgtccccgctcttcgaccagggccgtggcggcggcgtagggaggtctagcgcgggcggcatccgtttcgtgacgcgcgaggccgccagcagcgtggtctcccgtctggagtcgctggtcaccggccgcggagccaacatgcgcgtgacaaagagcggctcgcggggcgttcgtttggaggccgtgtcgcgcgggcgctcgggggcgcggctggcagtggccgcggagatcttcagcgtggcgccgtcggtgctcctggtggacgtgaagaaggacggcggcgacacgatggagtaccggtcgttctgtagcgaggagctccggccggcgctcaaggacatcgtctgggcctccagccaggacacaccgggcgccgcttgatgtcgtcgctgtcgctcctgccaccattattgtccttgcccatcaattgctgttggtgtccgtgtagggggggtcgtgctcgtgcattattgtttggtgacgaagtgatgtttgtttgtcgtttgccactctcgtagttggtttctgctgtggtgcagcggctgctggcagttgcagttgggctgttgcccgcggggcgcgagcaaagcagaatcagcgggaactagcattcgtatcctgcatgcacgcccataccatgtcagctctgaagtgggaagaactgtaacaagtagtagtacgaatgtaccagggtgatgtgctttcgagtcacttgtgtatatattcatttttttatcagcttaccgtgtcagctttgattgagggtgatgagttgtggagtaatgtccacaattacatcttcatatgtatatagaaaaaaaatgcttataaaaataattagacaaaccagattatccctc

SEQ ID NO: 262389 - DNA, 1088 bp, Zea mays
cccacgcgttcgcccacgcgtccggcgccggaggtgttccggaacaagggctacgacggcgccaaggctgacatctggtcgtgcggcgtcatcctctacgtcctcctcgcagggtcgctgccgttcccggacgacaacgttgccgccatgttccggaagatgagccgcggcgactaccggtgcccgccgtggctgtccacggaggcgcgcaggctcatccccaagctgctcgaccccgaccccgacacccgcatcaccatcgcccagctcgtcgagacgccgtgggtcaacaagccgtccgtctcgaggtccgtcagagccgccgccggcggcgcaaccgagcccccggccgagcctgcctcctcggcaaaggacggcggcgacaaggacgagccaccggagacgatgaacgcgttccacctgatctccctctccgcggggttcgacctctcaccgctgttcgacgtggaaggcggtccggcgagggggccccgggagggcggcatgcggttcgcgacgcgggagccggcgagcggcgtcgtctcccgtctcgaggaggtgggccgcccgcggcggcgggcggatgcgggtgaccaagagcggcgcccgcggcgttcggctcgagggcgcggagcgcgggggccgcaagggccggctagccgtggcggccgacatcttctgcgtggcgccgtcggtgctcgtcgtcgacgtgaagaaggacggcggcgactccctcgagtaccgctccttctgcagcgaggagctccggccggcgctcaaagacatcgtctgggcggccgacccccagcccgccgtcgtgtgacgcccgtgctgccgcctgcccgctcattgtttctggatcgcagtggtgccatagtttagtcagtgtcagttccatttccaaagtgattgcgtcactgttctcgattcgataatgatgtgagatctactgtttgtggggggcgtcaagaatatgtatctccctcggcataattgcgttattattattattattgtgaatggtttaatgtggatggtcaaaaaaaaaacaaaccccaaaaaaaaaaaaaagggcggccgctcgcaca

SEQ ID NO: 262390 - DNA, 672 bp, Zea mays
cggacgcgtgggatgcagttgcggtgtgtgattccagcgcaacagcaaatcacctgtacatgacggttgatgggactgagttcttgaaaacagaaaatgtgtttgatttgcagttcattcctgactctagggagttcaaacatcctgctcgagacgccgatacagaagcacctccgagttacaaggaacctgattttgagactcgtgctttgcaacatagcagagttaagctcacctgggatgatgatgaacctgaacgtaagaaagtcttgaggcgaaagttcaatgatgatcagctagatgagctcaacatgtatttagcaagtgatgacagcgcgtcagataatgaaggtgtagacgattctgaggatgaatctctgccaaatgggggatccaaacggaagctaacaaaagaggagaggttggctcttctgctgcaaggagacaaatctgatgaggagcaaactgatgaccaggatatggagattacattcaacacggagcttgacgatcttagtaaacggatcctagagagaaagaacaatgaggagaagaccatctgggagaagcaccaagagacaatgaaagacaaaaggtaggcgacgaagaggggactaaaggacgaagatgatgataccactacatcagcgatgatgagcctgagaatgatga

SEQ ID NO: 262391 - DNA, 1719 bp, Zea mays
gttcttatttcgagcggccgctcgaaaaaaaagaataagaagaaaggaatccctcctacgcggaagcgaagagattcgtcgcctcagccgcctctctgctcagatctgcggcggagcctcgccggcggcctgcgccccgcggcgccgccgatccaagatgccttcgtgcgtgcagggatgctgctgctgctcgtccctgcgccttctcccccgcgacgacgcgctctcgtccccctccgcctgcgcgcaccgcctgaagccttggtcttggcgtgcccaatcccccacctcgtcctcctaacgcttgtccccgcccgctccccaccctgatctacctgtctctacccttccctcctccatttctacatctccccgttgctgctctgctcctgctgccacaagagtattcgccttcaatcgttgctcgcgcctgtcatttcgtgccgcacgccgacttgtttgccgttttcgctgccgtcttctgttggatcggatttgtctggatcgattccaaggtcggatctacgctgctgcgggtcagtcactttatggacggtggttcctgtggtctcgagggagcgtcggtagtgacatctactaccagcactggtattccgcttctgccagagaagcactgcgccttgtttgatgaagcttgtggagccatggcgggcagtaatggtcctgaaggagtgccagtagtgacttctgctgatgaccctccgacccgtgccgatattccatttgtctgcaattcagttgatgaaacctgtgaagccacagggggcggcagtgctcccttggagggtcagatatgtacgggtttctccaagttgatcagcttggaggtgaagaaaggcctccagaagtgtgcgacgttcccaccctcatctggtcagcctcagcaggaggattgttcatgctgccatgtaggtgacgagctcacgtgtgctcctgcctatgggcgatctgtgtccttacctccaactttgaagctggtctctgccatgaaaggaggtcgtgaaaagaacggagtggcatcatcaccaagtgaaaaccgccatgtcaagtgggctcctgatgtgtacgacccccctgtgacatcggtatgccattcagtgaccaacagctatcagcgccggtcaaagcaccgcaagaaggagaagaacaaacagaagaagaggcagaaggggaagtcgaagaagaaccaacaacagagttctgcccagaatccatctgcgccgcaggttcctggtatcgggccgaaaggcgttagcaccactggtggccagtctccagcagacgatctcagcgaacatgaggccgggatcatggactacagcatgggtagccaggaagccaactgtggaagcagcttcttgcgcgagtctgttgctaagatgcacttctcgaccgccgaagcttcctgagaggcgtgcctcagttctgtaaatatgatggacgggatgtgtataaataaacccagcatgctgttttttttcgtcgtcgttgtgtgcgtttgagagctcgcctagtgttttggaacaataatttttggacagactatgtgttctgtatgttttggtcgtcagacatatctatcctcagtccatggctttgcttaacggtttaacctggactcttctgagaagttatggatgttctgaactcaagttataccctgcctaaaaaaaaaaaaaaaaaaaaaaaaaaaaggaa

SEQ ID NO: 262392 - DNA, 821 bp, Zea mays
tcttcacgcgtccgaaaaaaaaagaataagaagaaaggaatccctcctacgcggaagcgaagagattcgtcgcctcagccgcctctctgctcagatctgcggcggagcctcgccggcggcctgcgccccgcggcgccgccgatccaagatgccttctcccccgcgacgacgcgctctcgaccccctccgcctgcgcgcaccgactgaagccttggtcttggcgtgcccaatcccccacctcgtcctcctaacgcttgtccccgcccgctccccaccctgatctacctgtctctacccttccctcctccatttctacatctccccgttgctgctctgctcctgctgccacaagagtattcgccttcaatcgttgctcgcgcctgtcatttcgtgccgcacgccgacttgtttgccgttttcgctgccgtcttctgttggatcggatttgtctggatcgattccaaggtcggatctacgctgctgcgggtcagcatcagtagcgcagcgtggttgtacgtttgcggtgttgctgtatcactctgcgtctctgcaagtgctaaaccagtcactttatggacggtggttcctgtggtctcgagggagcgtcggtagtgacatctactaccagcactggtattccgcttctgccagagaagcactgcgccttgtttgatgaagcttgtggagccatggcgggcagtaatggtcctgaaggagtgccagtagtgacttctgctgatgaccctctgacccgtgccgatattccatttgtctgcaattcagttgatgaaacctgtgaagccacagggggcggcagtgct

SEQ ID NO: 262393 - DNA, 184 bp, Zea mays
cgaagctgcttccacagttggcttcctggctacccatgctgtagtccatgatggacgggatgtgtataaataaacccagcatgctgttttttttcgtcgtcgttgtgtgcgtttgagagctcgcctagtgttttggaacaataatttttggacagactatgtgttctgtatgttttggtcgtca

SEQ ID NO: 262394 - DNA, 758 bp, Zea mays
  unsure (1)..(758): unsure at all n locations
ccggaccggaatacccgggtcgaccacgcgtccgcgcacgccgtcggttctgcgtttcgcgactgagatagccaaccctgcgactgcgtgcgtgcgggcgagcgagcgacgagcaggcagaatggagcgccacgcccagaaccagaagcaggcgccgctagtcctcgcgctgtcctgcctcctcctcctcgcccccctcgtctccgccgtccccactccaagaagcctgcgcctggggggccagcagcagcacccgccggctctgaagctcacttcttctcaggaggcggcgatcgcggcggcgatgaacatgggcaggccgacggcgagggtggccgtggaggtgaacgactaccaaccgtccggccccaacaaccgccacgacccacccaagggcccctgaagagcttgttgaacggcgctcggctggacgtggacgacccaataatgcttctccttcgttgttgtcatctttaccagcagtatatatagagtgctttgctagtgctcttgtattctaccccaccagtagagattaaggatttaaggtagacacaaagttacctagttatatttgtacactggccgataggaacttggaagcacatcggtagtttgtgttgttcttaggttgccgttcgtcagaactgcatgcagatcgatttcatctcctgctgcagctgcaggtgtcgatacagcacctgcagcagatcgagattgttcaccttaattattctgttccaaaaaaaantattaaa

SEQ ID NO: 262395 - DNA, 744 bp, Zea mays
gcgccacgccgagaagcagctcctcgtgctgccctcctgccttctcctcctcctactcgccccgctcgtctccgccgtccccacgccaagaagcctgcgcctggggaggcggcagcagcagcacccgccggctctgaagctcgattcttctcaggagacgacggcgatcgcggcggcgttgatgaacacgggcaggccgacggcgagggtggacgtggaggtgaacgactaccagccgtccggccccaacaaccgccacgacccacccaagggacccggaagaccttgaacgggggcccggctcagctcagctggacgacgacccggccggccaataattcgtcgtcgtcgtcgtcgccgtcgtcgtcacaccggtagtacaaagtgcgtcgcttgtgctagctcctctactctagttctagtagaaattaaggtcgtcgaaacaaagtcacctagctgcgtacctttgtatatatataccggccgcgcgtgtgtgtatggctgtgtgcaagccacatcggtgcagtgggttgtgttgttcttaggctggttggttgctgttcgtcggaaagaactgcactgcatgcagatcgatttcgtctcctgctgcaggtgcccgtacagtgtaccaacagattgagattgtccagcttgttagttctgtgcctctgacgatcttgatatactcctatatcatcatatatagttgtatattcatcagcaaaagcagcatcattgctccct

SEQ ID NO: 262396 - DNA, 1517 bp, Zea mays
ccggcccgacgcacgcgtccgcaaatccccctgtcccgctaggattcccccgaaaccctcccccaaaaccccagagcggagaagagcgcaagatgttcggcttcgggcaccacggccaccacggccagaacccgccggcgcacggcggcgtgcaccagcccaccttcaagatcttctgcaaggccgacgaggggtactgcctcaccgtccgcgacggcaacgtggtgctggcccccgccaacccgcgcgacgagcaccagcactggtacaaggacatgcgcttcagcacccaggtcaaggacgaggagggcaaccctgcgttcgccctcgtcaacaaggccactgggctcgccatcaagcactccctcggccagtcccacccggtgaagctggtgccgttcaacccggagtaccaggacgagtcggtgctgtggacggagagcggcgacgtgggcaagggcttccgctgcatccgcatggtgaacaacatccgcctcaacttcgacgccttccacggcgacaagggccacggcggcgtgcacgacggcaccaccgtggtgctgtgggagtgggccaagggcgacaaccagagctggaagatcctgccctggggcgacgaggcctacgccgcgggaggcagcagcgccgccaacgcgccccgcttcggcggcggcggcgagcccaccgtccgcatctactgcaaggccgacgaggggttcagcgccacggtccgcaacggcgccgtgtgcctcgcgcccaccaacccgcgcgacgagtaccagcactggatcaaggacatgcgccacagcaacagcgtcaaggacgaggaagggtacccggccttcgcgctcgtcaacagggtcaccggcgaggccatcaagcactcccagggcgagggccacccggtcaagctggtgccctacaaccccggctaccaggacgagtcggtgctgtggacggagagccgcgacgtcggccacggcttccgctgcgtccgcatggtcaacaacatctacctcaacttcgacgccttccacggcgacaaggaccacggcggcgtgcgcgacggcaccaacatcgtgctctggaagtggtgcgagggcgacaaccagcgctggaagatcgtcccctggtaaatgtgctgttctgtggctgcactggtcatcaccatgatctggagctttgaaggcatagccacctgtggtcagcagctgctgccgtgttgctagaataaagttggtggcgatcgatcgatctgtggtgatgagtgtccctatctgtgtgtttgtgtttagttccagtcgtctgtgaggaagtcagttatgtttgagtgagaggggtacttcgctcttcggtgaacactgtacttgtcatgaggagagttttcatacccggagtgtaggaactctgtactgtactcggatccttcctttttcatcgaagtgggttttattttatcaaccgtatctaggacgcgtgggcggacgcgtgggcggacgcgtgggcggacgcgtggg

SEQ ID NO: 262397 - DNA, 1433 bp, Zea mays
tcgcgggtcgacacaagcctctaaacagccgtgactcaacacagcacaggcagctcgagagagagagagagagaaagatgtcgtggttcgggcaccaccaccacaaccagccggctcccccggcgtcgggccccaaccaggtgttcaagatcttctgccgcgccaacgagaactactgcctggccgtccgcgacggcgccgtcgtgctggccccggtcaaccccaaggacgaccaccagcactggtacaaggacatgcgcttcagcacccgggtcaaggacgaggaaggcatgccggcgttcgcgctcgtcaacaaggccacggggctcgcaatcaagcactccctcggccagtcccacccggtcaagctcgcgcctttcagcccggaccaggaggacgcgtcggtgctgtggacggagagcaaggacgtgggcaagggcttccgctgcatccgcatggtcaacaacacccgcctcaacttcgacgccttccacggcgacaaggaccacggcggcgtgcacgacggcaccgccgtcgtgctctgggagtggtgcaagggcgagaaccagagctggaagatcctgccgtggggtcccgaggccaactcctccgcggcccacgcgggaggcccgcacgccgtgcgcgtcttctgcaaggccggcggcgaggactacagcctcacggtgcgcaacggcacggcgtgcctggcgcccaccaacccgcgggacgagtaccagcactgggtcaaggacatgcgccacagcacccgggtgcgggacgaggagggctacccggccttcgcgctcgtcaacaaggtcaccggcgaggcgctcaagcactccacggggcagggccaccccgtcaagctcgtgccctacaacccggactaccaggacgagtccgtgctctggaccgagagccgcgacgtcggcaacggcttccgctgcgtccgcatggtcaacaacatctacctcaacttcgacgccttccacggcgacaaggcccacggcggcgtccatgacggtaccgagatcgtgctctggaagtggtgcgagggcgacaaccagcgctggaagatcctcccttggtgaacgaacgaaagaaactactagctggtaccctaataataattctgctggctgcggcgatcccaaaataaaagaggccgggtgcgatgcatctcggacttctcgagtggtgtttgcgtcagacagccagccactgtggggctagtgttccaacatttgtcagcctgcttgcgcgaggaaggggggtcactgactcaagagaagggcctggtcataggctgctgcattatgaatttctgatgatgtcttatgtctgtactctgaatcaactatgtatgagatctcatctcctttctcctactgaatgaatgaatcattattggctttgctttgcttcacctgctt

SEQ ID NO: 262398 - DNA, 1016 bp, Zea mays
gcgtaccggtaccctaggctccacgatcgctcatcaatcgccagaggagttgttgatcgaggtgagtgaggttgaaaagcacaccatcgtcatggacggcggatactacggcggtcgcgatcagcgctacagcggcgggtactacggcggcggtggcatcgcaacgccggggtacgctccggcggtcccgtacgggatgtcgcaggtgaacatcgagggcaacgggtgcgggcgggcgctgccgccgcagccgaccgtgaaggtgtactgccgcgccaaccccaactacgccatgagcgtccgcgacgggaaggtggtgctggcgccggcgaaccccaaggacgagtaccagcactggatcaaggacatgcggtggagcacgagcatcaaggacgaggaaggttacccggcgttcgcgctggtgaacaaggcgaccggggaggccatcaagcactcgctggggcagtcccacccggtgcgcctggtgccctacaacccggactttctggacgagtcggtgctgtggacggagagccgcgacgtcggcaacggcttccgctgcgtccgcatggtcaacaacatctacctcaacttcgacgccctccacggcgacaagtggcacggcggcgtccgtgacggcaccaacgtcgtgctctggaagtggtgcgagggcgacaaccagcgctggaagatccagccctactactgaaccaacggatgatatgaccatcgcgcccatcgatcgtgcacatgcatgcatacgtactagcagaataacaggggtcttatctcccgaggcgtcttttgcatgcatgccagcagttgcatagataaacaggagcgagacaaagggtgttcatgtatattgcagctgtatcactgtatgtatgtgccattgtgccttgtaataatacatataataataaagttgctcggagtgtattaattagaacatacataaatattatactccctccattctaaaaaaaaaaaaaaagggcggccggacgcgtggg

SEQ ID NO: 262399 - DNA, 919 bp, Zea mays
atcgaggtctcagcttcaggaaagggaaggaagcatgttcgggcaccaccacggccacggcgggcaccaccaggccccgccgccgcacgagcagacgctgttcaggatcttctgccgcgccgacgaggcgtactgcctcaccgtgcgtcacgacgccgtcgtcctcgcgcccaccaacccccgcgacgagtaccagcactggtacaaggacatgaggcacagcacgaaggtgaaggacgcggagggccagccagcgttcgcgctcatcaacagggccaccggcctcgccatcaagcactcgctcggccagtcccatcccgtgaagctggtgccctacaacgcggagtacctggacgagtcggtgctgtggacggagagccacgacgtgggcaagggcttccgctgcatccgcatggtcaacaacatctacctcaacttcgacgccttccacggcgacaaggaccacggcggcgtgcgcgacggcaccaacatcgtgctctggaagtggtgcgagggcgacaaccagcgctggaagatcgtcccctggtaaatgtgctgttctgtggctgcactggtcatcaccatgatctggagctttgaaggcatagccacctgtggtcagcagctgctgccgtgttgctagaataaagttggtggcgatcgatcgatcgatctttggtgatgggtgtccctccctgtgtgtttgtgtttagttccagtcgtttgtgaggaagtcagttatgtttgagtgagaggggtacttcgctcttcggttaactctgtacttgtcatgaggagagttttcatacccggagtgtaggaactctgtactgtactcggatccttcctttttcatccaagtgggttttattttatcaaccgtatatatactcgtggttttgctattacgttgcttgct

SEQ ID NO: 262400 - DNA, 1129 bp, Zea mays
cgcccgtgcgctcctcctacgcctgcccaggaggaaccaggctacggcaggtaccgtcccccggctgcagggggctacgcgccgccgtctccgcctgcccaggtggaaccaggctacggcgggtaccctcctccaccagctgcagggggctacgcgcctgctcctgcgcctgcccaggtggaaccaggctacggcgggtaccctcctcacccagctgcagggggctacgcgccgccgcctccgcctgtgcctgtgcaggagcctggctacggcgggtaccgtcctccatctgctgggggctacccggcggggtacgggtacagcaacctgcctcgcgctctggcgtctgaacagaccgtccgcgtctactgcaaggccggcgaagggtacagcctcaccgtcaggaacggcaccgtgtgcctggcgccaaccaaccccagggacgagttccagcactgggtgaaggacatgaggcacagcactagcatcaaggacgaggaagggtacccagcgttcgcgctggtgaacaaggtcaccggcgaagccatcaagcactcgctgggacagagccacccggtacgccttgtgccctacaaccccgagtacgttgacgagtcggtgctgtggacggagagccgcgacgtcgggcacggcttccgctgcgtgcgcatggtgaacaacatctacctcaacatggacgccttccacggcgacaaggaccacggcggcgtccacgacggcaccaccgtcgtcctctgggagtgggccaagggcgacaaccagcgctggaagatcctgccctggtgaacgtgaacagagacgagctagatgaatccaaggaaccttacctagctgctgccgccgccgcctaattcgtcctcctccgctctagctgttatctgtctgtgtcttcgcgtcctcggttcctgaatggacgaataatatatagcatgcatgtacggctagcgaccatgtctgaatgacatcttcgttgctgctgctgctgctactgctacctgtccgtttggtgttctaaaagactctgatgagtggttctgaatgtctgcatttcaagtttgctgtgtgatgttaatgtaccgtgcgtaccataaaaaaacttaaagatcta

SEQ ID NO: 262401 - DNA, 922 bp, Zea mays
tctgtagtcctcgccgccggccttgcagaagacgcgcacggcgtgcgggggtcccggtgcgcaacggcacggcgtgcctggcgcccaccaacccgcgggacgagtaccagcactgggtcaaggacatgcgccacagcacccgggtgcgggacgaggagggctacccggccttcgcgctcgtcaacgcggtcaccggcgaggcgctcaagcactccacggggcagggccaccccgtcaagctcgtgccctacaacccggactaccaggacgagtccgtgctctggaccgagagccgcgacgtcggcaacggcttccgctgcgtccgcatggtcaacaacatctacctcaacttcgacgccttccacggcgacaaggctcacggcggcgtccatgacggtaccgagatcgtgctctggaagtggtgcgagggcgacaaccagcgctggaagatcctcccttggtgaacgaacgaaagaaactactagctggtaccctaataataattctgctggctgcggcgatccccaaataaaagaggcagggtgcgatgcatcgcggtcttctcgactctcgagtggtgtttgcgttagacagccagccactgtgtggctagtgttccaacatttgtcagcctgcttgcgcgaggaagtgggggtgactgactcaagagaagggcctggtcataggctgctgcattatgaatttctgatcatgtcttatgtctgtactctgaatcaactatgtatgagatctcatctcctttctcctactgaatgaatgaatcattattggctaaaaaaaaaaaaaaaaaaaaaaaaaaaaaaaacagccacaaaaaaaaacaaacattcaaacaaaaaaaaagcgagccgcccactctaaaagaatccaacttacttaccctttcttgctacattgtacc

SEQ ID NO: 262402 - DNA, 488 bp, Zea mays
cccacgcgtccggcagcgcctcttcctcgcaccaccaccgtcactcaacacagcacaggcagttcgagagagagagagagagagagagagataaagatgtcgtggttcgggcaccaccaccacaaccagccggctcccccggcgtcgggccccaaccaggtgttcaagatcttctgccgcgccaacgagaactactgcctggccgtccgcgacggcgccgtcgtgctggccccggtcaaccccaaggacgaccaccagcactggtacaaggacatgcgcttcagcacccgggtcaaggacgaggaaggcatgccggcgttcgcgctcgtcaacaaggccacggggctcgccatcaagcactccctcggccagtcccacccggtcaagctcgcgcctttcagcccggaccaggaggacgcgtcggtgctgtggacggagagcaaggacgtgggcaagggctttccgtgcattcggatggtcaacaacac

SEQ ID NO: 262403 - DNA, 641 bp, Zea mays
cggacccgtgggcaaatcccctgtcccgctagcggctagtccgaccaggcgatcccccccccaaaccctcccccaaaaccccagagcggagaagagcgcaagatgttcggcttcgggcaccacggccaccacggccagaacccgccggcgcaccccccggcgcacggcggcgtgcaccagcccaccttcaagatcttctgcaaggccgacgaggggtactgcctcaccgtccgcgacggcaacgtggtgctggcccccgccaacccgcgcgacgagcaccagcactggtacaaggacatgcgcttcagcacccaagtcaaggacgaggagggcaaccctgcgttcgccctggtcaacaaggccactgggctcgccatcaagcatacgcatttgttcaggtgaagctggtagccgtgcaacttggagtaccaggacgagttggtgctgtggacggagagcggcgacgtgggcaagggcttcagatgcatgcgcatggtgaacaacatacgactgaacttcgacgccttatacggctacaagggccacagcgggttgctcgacggcaccaccgtggtgctgtgggagtgtgccaaaggcgacaaccagagctggaagatcctggcatggggcgacgaggacta

SEQ ID NO: 262404 - DNA, 404 bp, Zea mays
gccacctgtggtcagcaactgctgccgtgttgctagaataaagttggtggcgatcgatcgatcgatctttggtgatgggtgtccctccctgtgtgtttgtgtttagttccagtcgtttgtgaggaagtcagttatgtttgagtgagaggggtacttcgctcttcggttaactctgtacttgtcatgaggagagttttcatacccggagtgtagaactctgtactgtactcggatccttcctttttcatccaagtgggttttattttatcaaccgtatctaaaaaaaaaaaaaaaaaaaaaaaaaaaaaaaaaaaaaaaaaaaaaaaaaaaaaaaaaaaaaaaaaaaaaaaaaaaaaaaaaaaaaaaaaaaaaaaaaaaaaaaaaaaaaaaaaggggcggccgcc

SEQ ID NO: 262405 - DNA, 368 bp, Zea mays
cccacgcgtccgcacacgcgtgcgcccacgcgtccgcccacgcgtgcgggctggtgccctacaaccccgggtgcctcgtacgagtcggtgctgtggacggagagccgcgacgtcggccacggcttccgctgcgtccgcatggtcaacaacatccacctcaacttcggcgccttccacggcgacaaggaccacggcggcgtgcgcgacggcaccaccgtcgtgctctgggagtggtgcgacggccccaaccagcgctggaaggtgcgtcccctggggggtcggcgcctgcgcgccgcgcccgtacgctcctcctccgcctgcccaggtggaaccaggctacggcgggtaccgtccccccgcttcaaggg

SEQ ID NO: 262406 - DNA, 423 bp, Zea mays
cccacgcgtccgcccacgcgtccggaggagctgttgatcgaggtgagtgaggttgaaaagcaggcggcgaacaaaggcaccatcgtcatggacggcggatactacggcggccgcgatcagcgctacagcggcgggtactacggcggcggtggcatcgcgacgccggggtacgctccggcggtcccgtacgggatgtcgcaggtgaacatcgagggcaacgggtgcgggcgggcgctgccgccgcagccgaccgtgaaggtgtactgtcgagccaaccccaactacgccatgagcgtccgcgagggaaggtggtgctggcgccggcgaaccccatgacgagtaccagcactggatcaggacatgcgagggagcacgagcatcaaggacgaggaaagctactcggcgatcgggctggtgaacaag

SEQ ID NO: 262407 - DNA, 318 bp, Zea mays
caaatcccctgtcccgctagcggctagtccgaccaggcgatccccccccacttcctcccccaaaaccccagagccgagaagagcgcaagatgttcggcttcgggcaccacggccagaacccgccggctcacggcggcgtgcaccagcccaccttcaagatcttctgcaagtccgacgaggggtactgcctcaccgtccgcgacggcaacgtggtgctggcccccgccaacccgcgcgacgagcaccagcactggtacaaggacatgcgcttcagcacccaggtcaaggtacgaggaggcaacctgcgttcgccctggt

SEQ ID NO: 262408 - DNA, 266 bp, Zea mays
catgaggagagttttcacacccggagtgtagaactctgtactgtactcggatccttcctttttcatccaagtgggttttattgtatcaaccgtatatatactcgtggttttgctattgaaaaaaaaaaaaaaaaaaaaaaaaaaaaaaaaaaaaaaaataaggggggccgcccgaagtgagacagcgccgccgggggttttttttctggggaagggtaagaggaggatggaggttcccacaagaagggtgatataaaaagggggga

SEQ ID NO: 262409 - DNA, 630 bp, Zea mays
agctggccgcctcgcccggcccggtccggaacggccgggccggcccgcgccacccgtggcggcgccgttcactagggttgttcctgatctcgcctcctacttcccgagccacacacgctgccgccgtgagccgccgcccacaaggctaagcaccaaccatggccttcggagctctcgtcacgtcgaggctggccaggtccggccgcacccttgcatctgccgttgcccagggtcccgttgcccagcggatagcacctcctctgctctccaggtttggagcagtagctcgtcttctcagcacaaagccagccgcaacagatgtcataggtatcgatctaggcacaacgaattcctgcgtctccgtcatggaaggaaagacaccacgggtgattgaaaacgcagaaggcgcgaggacaacaccctccattgttgccaagaatcagaatggtgacctgttgattggtatcacagcgagccggcaggcagtaaccaatgcccagaacacaatccgtgggtcaaagcgtctgatcggtaggacttttgatgacccacagacccagaaggagatgaagatggtgccttacaagattgtcaaggcgccgaatggtgatgcctgcgtcgagatgggtg

SEQ ID NO: 262410 - DNA, 1062 bp, Zea mays
ccctcgcttccgctcagggagagacgagagaagtggacgcctcgcctgcctggactcgtctactctagtatacagaaaaaagcagaagagatacgggggacacacgccgcgcttcctggagagaaaaagcagatgacaatacaaagatgtccaagatggcggaggagaaggcggcggcagtgggcggactcggaggagccggggcggcggacgcggcgcagcagcagcagctggcagcaggggaggccgcggcggcgcgggtgcggcccgtggagacgctgcttcgcgcggcaccgctggggctctgcgtggccgccatgaccgtcatgctccgtaaccagcagagcaacgagtacggcgccgtcgcctactccgacctgggaggcttcaagtacctcgtctacgccaacggcctctgcgccgcctactcgctggtatccgcgttctacactgccgtgccgaggcctgccaccgtgtcgcgctcctggctcgtcttcctcctcgaccaggtgttcacgtacctgatcctggcggcgggcgcagcggcggcggagctgctgtacctcgcctacaacggtgacaaggaggtgacgtggagtgaagcttgcggcgttttcggcagcttctgccgtcaggcgcgcacctccgtcgccatcaccttcggcaccgtcctctgtttcatcctcctgtccctcatctcctcgtaccgccttttcagcgcctacgaggcgcccccgtcgtcggcgctcggcagcaagggcgtcgagatcgccgcctacccgcgctgaagccgctggagggaggcctcgttgcaaatctctgttatgcgtagtcgatcatgtaataatggcttatcgcatatatacttcgttgatagtttgctgtcacatatgattagtacagtgctgctgctgctgctgctaaattgtgcttgactgggtaattatatagtttgcatcgttcttgtgtgtcctggatggattgagcttaaaattcttattaaaattcttactacagacgtagtttctgtgcaaaaaaaaaaaagggcgccgcgactagtga

SEQ ID NO: 262411 - DNA, 494 bp, Zea mays
cggacgcgtgggccagagagagccgggtagaacttggctgtctgccctgtctgcaagtacctcgtcttcttcctggagagaaaaagcagaagacaatacaaagatgtccaagatggcggaggagaaggcggcggcagtgggcggactcggaggagccggggcggcggacgcggcgcagcagcagcagctggcagcaggggaggccgcggcggcgcgggtgcggcccgtggagacgctgcttcgcgcggcaccgctggggctctgcgtggccgccatgaccgtcatgctccgtaaccagcagagcaacgagtacggcgccgtcgcctactccgacctgggaggcttcaagtacctcgtctacgccaacggcctctgcgctgcctactcgctggtatccgcgttctacactgccgtgccgaggcctgccaccgtgtcgcgctcctggctcgtcttcctcctcgaccaggtgttcacgtacctgatcctggcggcgg

SEQ ID NO: 262412 - DNA, 457 bp, Zea mays
cgtccggaatgaatgtctgtcctgtctgcatgcactcgtcttcttcctggtgagtaatccgtgagtaagtactgtgaggtcgatgatgcagcaggatacagcagcagcagtgggcggactctgctgaacccgggcggcggacgcggcgcagcagcagcagctggcagcaggggatgccgcggcggctcgggtgcggcccgtggaaacgctgcttcgcgcggcaccgctggggctctgcgtggccgccatgaccgtcatgctacgtaaccagcagagcaacgagtatggcgccgtcgcctactccgacctgcgaggcttcaagtacctcgtctacgccaacggcctctgcgccgcctactcgctggtatccgcgttctacactgccgtgccgacgccctgccaccgtgtcgcgctcctggctcgtcttcctcctcgaccaggtgttcacgtacctgat

SEQ ID NO: 262413 - DNA, 387 bp, Zea mays
atctcagactcagggagagacgagagaagtggacacctcgcctgcctggactcggctactctagtatgcagaaaaaagcagaagagatacggggatgtctaagacggcgggcgtcggcagactcggaggagccggggcggcggacgcggcgcagcagcagcagctggcggcgggtgatgctgcggtggcgcgggcggcgcggcccatcgagacgctgctgcgcgcggcgccgctggtgctgtgcgtggccgccatgaccctcatgctccgtgaccagcagagcaatgagtacggcaccgtcggctactccgacctggggggcttcaaatacctcgtctacgccaacggcctgtgcgccggctactcgctggcgtccgggttctacac

SEQ ID NO: 262414 - DNA, 690 bp, Zea mays
ttcccgggccgacgcacgcgtccggcctgcgtgcccggtgcccgtgcggccgtgacgaacgacactgacgagcaaagcaaaggcaacggagccgagcgagacgacgagaccgcgattgctagctagctagttcgggcagcgagcggggtgagacggctatggcgtgctgctccgccgtcctgcaccatccgctgggcttctcactcaccccgtgctccgcctcccgagccccaccgcgcatccagcgcgtgggcgtggcaactccctcggccgcctccgcccgccctctttctcgcgccaggatctcaccgcgctgcacctactccggtggcgccagcgctgcccctggtcctggggagctacccgcggcggcgctccgacgggtccttgagatgccgggtgcgcaccaggcgcccgcctgctacgacgcgctgagcgcacgcctcgtcgagcgcgccgagttcagggcctgcttcacgagcggtttctcaatctctgccgcacggcttggattaccagatgttggtctcatctcgtacggggaaatgatcgatcaggggcgtctgatgactgaagcagtttcaatccctgtgatcggtgatgcggataatggttacggaaactgtatgaatgttaagaggacagtgaaaggatttattaatgctggttttgctggaattattcttgaag

SEQ ID NO: 262415 - DNA, 777 bp, Zea mays
gcctagcgtcgacagtcgacgcgtacaggaagcgctagaccacccccgccgccgacgacgacgactcagctactcgcctggtgatgggggtcgaactggcgcaaccgaccgccgccgcggctgcggtgaccaccgctgagcaggctcaggatctcatcgacgccgctaggtacgacgacttggaggacgtcgtcgccctgttctccgctggtgtctcgctggactccacagattcgcaaggccgcacagctcttcacatggcttctgccaatggtcaccttgctgtggtggaatacttgattcaaaatggagcgaatgttaatgccaccaacatggagaagaacacaccactccactgggcatgccttaatggacgtatagaggtaatcagggctttgatctcagcgggggctagcgtgagtgctctgaacagccacgagaaaacgccaatggacgaagcggtgaccacaggcaagatggacgtgatcgacgcgatcggtgcggcagtagctcaagccgagctcgacggcgttactgtctcctaaaaggacctgatgagtacctggagctttgaatgacttgcagccttgttcttatctcccagcggttctgtctgtatcactcgcgaacctggatcccccgacgggccagtatccgggcaatatctatactgacggcaatcgcctgttagtgtcattggcttgaagacatgggaggccgacccgacctgtcgttgtaaaccagatgtgcagatgtcaaagatcaggattttctcct

SEQ ID NO: 262416 - DNA, 1228 bp, Zea mays
cccacgcgtccgcccatgcgtccgcaattccccactagcaaccgtccccacaatcctccgacgatgcctgccgcaccgacgctgttgcccccctgcgacgcggaggagccgctgctggcggagtcctccgaccgcttctccatgttcccgatccgtttcccgcagatctgggagttctacaagaaggcggtggcctccttctggacggcggaggaggttgacctctctgccgacgcccggcactgggacgaggcgctgtcccccgacgagcggcacttcatctcccacgtgctcgccttcttcgctgcctccgacggcatcgtgctcgagaacctcgcttcccgcttcatgaccgacgtgcaggtcgccgaggcgcgggccttctacggcttccagatcgccatcgagaacatccactcggagatgtattcgctgctgctcgagacctacatccgcgaccacgtcgagaaggaccgcctgttccgcgccatcgacaccgtgcccgcggtccggcgcaaggctgactgggccatgcgctggatcgacggcggggagcgcttcgccgagcgcctcgttgccttcgcctgcgtcgagggcatcttcttctcgggctccttctgcgccatcttctggctcaagaagcgcggcctcatgccgggcctcaccttctccaacgagctcatctcccgcgacgagggcctccactgcgacttcgcctgcctcctctacgagcttctccgcaacaagctcgacgaggcccgcgtccgcgagatcgtcgccgacgctgtcgacatcgagcgcgagttcgtctgcgacgccctccctgtcgcgctcgtcggcatgaacggggatctcatgagccagtacattgaattcgtggccgaccgcctgctcatggcgctcgggtgcaagaagatgtacaacgtgaccaatcccttcgactggatggagctcatctcgctgatggggaagaccaacttcttcgagaagcgcgtgggtgactaccagaaggcatccgtcatgaacagcctcaacggcggcggcgctgccgaccacgtcttcagcatcgacgaggacttctgagttggcacgcgtaatctatggtgtcggtttaatgttagtatttgcttgtagtttgtaagcgtgatacatgtactctgagccgcttgatgcaatgatgctgtttcattttcaaaaaaaaaaaaaaaaagaaaaaaaaaaaagaaga

SEQ ID NO: 262417 - DNA, 373 bp, Zea mays
ccgaaatcctccaataccccaccctacgaatcttccaacccctccgacgatgccttccgcgccggcgctcgtccccgcgtgcgacatgcaggagccgttgctggcggagtcgtccgaccgcttctccatgttcccgatccggtacccgcagatttgggagttctacaagaaggcggtggcgtccttctggactgccgaggaggtggacctctccgcggacgcgcgccactgggacgcggccctctcccccgacgagcgccacttcatctcccacgtgctcgccttcttcgccgcctccgacggcatcgtgctcgagaacctcgcctcccgcttcatgtccgatgtccaggtcgccgaggcgcgcgccttttac

SEQ ID NO: 262418 - DNA, 464 bp, Zea mays
ctccctccagcccggcttatccgttcgtcgcgcgccccggccttcatctcttgcaagctagcgccaacgggaatgccgttccaattcaaaaactgcggttgaattccccaccagccctataagttccccgcctccttgctcacctccataaaccaacccaaaagccccccaatttcacgctagataaaccataccccaaccctctgacgatgccttctacgccgacgctggtccctccgtgcgacgcggtggagccactgctggcggagtcctccgaccgcttctccatgttcccgatccgcttcccgcagatctgggagttctacaagaaggcggtggcgtccttctggacggccgaggaggttgacctctctgccgacgcccggcactgggacgaggcgctgtcccccgacgagcgccacttcatctctcacgtgctcgccttcttcgccgcctccgacgga

SEQ ID NO: 262419 - DNA, 1090 bp, Zea mays
agttcatgtacttaagctgtcaaagaacattgactacttgagggatcagatgaattccagctactatcacaaggacatgcatgatcctagtgtcaactctgtaacactacagcagcaagacgaagaaatgcctgaagttgctcccatgagttcagagcctgaggttgagaagtggacatcagttgagattgatagagccttagatttaacaaagtctggagtccctgtggaagatatgcagagcaaagtctgtttcaacaagcttgaagatgattcttctgcgactgcaggtccatgtctgactgggagttcaattgcagcttcatcctataatctgatcagacatcaaaaccaacgtagctctactgtgacatccagtcctgatggtcgctacgaaggtgcaccttcaaaagtcgtggatgcgccaaaattggatgcggaatctctttctgtatcgcctttgagagccgcaccgctctcgaatcaagaaaggcttgtgctaaggaagcaagcccttcaaatgaagaaaagacctgtactttccatagggaggaacaatgccatcaccggagttgcaaaaaccataaaaacgcacttcaagaagcaccctcttgctatcgtgaacatcaagaacagagcggacgggactccgattcagcagctgatatcggaactcgaggaggcgacaggatcggtgctagtgtcacgagaaaccaacaaagtgatcttgtacagaggctggggcgcagaagtggcccagaaaagctcaagggaaagtagcacagacgagggcgaaaaggaggtcatatcacctcagctccttgaagctatcaggttagagtgtggactgctccctgccgattcgggatagttggtccggataaccttcccccacagatcccgtgtttcgaaaggatcgtacaatgattgcccgcggatagatccgaagctgcataaacgcacgcaaggtgtgaaaccctccctgctcacgggcatagttgtaagagaagaacaggggcggcggcaggggtactcttaggtattccatgggatgccctttattaggagaactaaatattttagtatagac

SEQ ID NO: 262420 - DNA, 429 bp, Zea mays
attcccgatcgaccgacgcgtacgagacgctgagccgtgacgtgtaccgtcttggacatcgttttgactttttcagaatgttgggctgcgtctatactactattggcccctacttcagcacaatgataacactttggaccgtttatgtattcctctacgggcgcctgtatcttgtcctaagtggccttgatgaagcattagccactggaaagaggtttatacacaacgagcctctccacgttgctctagctccacagtcttttgcgcaccttgggttcttgatcgcgctgcctatgatgatggaaattggtctagagacagacttcagcatatatgcttccttctttctctcttgctcccttttcctcgatgaaaccagtccacgagcataggggttctttagccttttggcaatccagtcttttacgc

SEQ ID NO: 262421 - DNA, 1007 bp, Zea mays
caatacataccttgccagtaccaatctagtgaatgacagaaacacaaagcatatttattttctgatggactgcctgtagagctgtattctcttgatgttcagaaatcatatgagagggcaataatctccgtggagcaactgaatgctattcttagacaggcttctaaaaccaaggaaaaggaagatctcaggaagatagataactggcaatatattagttgtgtcaccctatgggttcggtttctgtgttgtcactataaggattacaatctccatcccttattttctcaagttcttcaagtaataagaggagtggctcacttattcccaggcacaaggtacttaccgttgagactgaagcttgtgcagatgctgaacgagctttccacttgcagtcagatgttctatccaattccatagttgctctttgactgcctagaattaagagaagtttctcagaaagaacaaacacaaagaacaaagatcaacttttcgtctttgttgaaggtgccaaagaacctgctgaaaccaagggattttcaagaggagtgtattctttcagcgattcagattctatcagcacattttgcccagtggagttaccgtgtttccttcccagaagtagccaccattcctcttgtcctcttgaagaggctacatgagcagacaacagttgaatcacttcgccatcctattaagtgtttgatagaccaggtgacggagaacaaggattttatagaaaggaaaagagaggttgtatccttttcaccaaatgataaggcgtcagttgatagcttccttcaggaggagaaggtcagcagaaccgcttcattcactcggttctatgcatccgtagctgaaaaccgtcaaccaaaatgtatgtcataaatctctactactccttatgtctttagtgtaggcgtccacatctctttgttctgccatcgcgcgctccgcccgcgattcccctccccgcgcccgcagaaaacaccaccatcctcgaggcc

SEQ ID NO: 262422 - DNA, 426 bp, Zea mays
cgattttatagaaaggaaaagagaggctgtatccttttcaccaaatgataaggcgtcagttgatagcttccttcaggaggagaaggtcagctgaaccgcttcattcactcgggtctatgcatccgtagctgaaaaccgtcaaccaaaatggagaaaaacactttaaaataccaagggaatttctgagagacatctcacatctggaatcggttggtttccaagtgagggccacgaagaaccacatcaatgtagaacattttagtgcagatatacgccgaggcagctattgtgtaacctctagtgagactgattcctacgagtcctcgagtgctcaacaattttgtacgattgtaaccttaattccgaagtcagctgtcaagtgatggatgaaacttgctgttgcttttgaaaaaaaaaaaaaccaaa

SEQ ID NO: 262423 - DNA, 863 bp, Zea mays
cccacgcgtccgcccacgcgtgcgcggacgcgtgggcgaggcgaggccgggcggcaagctccccaccaacttccgcaagcagctcactgtgcagctgaagaagctcgctgccgccggcaagctgacgagggtgaagaactccttcaagctgccggccaccgacgccaagcccaaggccgccaagcccaaggcacccaaggccgcgcccaagcccaagccctcgccgaaggcgaaggccaagaccgctgcgaagcccaaggcggcgtcgcccaaacccaaggccaaggccaaggccaagcctgtcgctcctgccgccgcgtcgcccaagccccgcgggcgccctcccaaggtcgccaagacctccgccaaggcctcccccgccaaggcagccaagaaggcggctgctcctgccaagaagggaaaggcagcggcggctcctaagaaggtggcaaccccgaagaaggctgctgctgctgccgccccggccaggaagggcgtggccaggaaggccaagaagtagtctgcctgccttgtcgctggcgagatccccccctcaattccgcctatagattcccctctttcatggattttgatccaatcgtaatattgtcagtagctctagattcgtcggtagctccagcatgagtgtcggtggtagttctgtgcctgtaaaaacttgggatagttgatcgcgtgtgatcagccgtcatgctcctccagtctctatgaacaagctaagctataatagtattttgctatcctaaaaaaaaaaaaaaaaaagtcaaaattggctctcttttattttgtatctactactactactcatttgcgagtgagagatggtctgggcacaccattcaatt

SEQ ID NO: 262424 - DNA, 655 bp, Zea mays
acccacgcgtccgcccacgcgttcgcctacgcgtttgacctgcgtccgcccacccgtccgcacccaccggcctccgccgccgacaacagcgtagtgtagtgtagttccggagagggttggggagagtagtagtgatccgcaatgtcgacggaggaggctgttgtggctgaggtcccggtgaccgaggtgccagcggaggtcccggcggcccaggtggccgaggcgcccaaggcgaagaaggcgcccaaggagaagaaggcgcctaaggagaagaagctttccgcggcgaagaagccggcggcgcaccctccctacgctgagatgattgtagaggcgatcgctgccctcaaggagaggaaggggtcgagctcggtggccatcagcaagtacgtcgaggggaagcatggcggcaagctccccaccaacttccgcaagcagctcactgtgcagctgaagaagctcgctgccgccggcaagctgacgagggtgaagaactccttcaagctgccggccaccgacgccaagcccaaggccgccaagcccaaggcacccaaggccgcgcccaagcccaagccctcgccgaaggcgaaggccaagaccgctgcgaagcccaaggcggcgtcgcccaaacccaaggccaaggccaaggcccaag

SEQ ID NO: 262425 - DNA, 292 bp, Zea mays
ctacaatttaaaagagaagagaatgcggtgcaggtccttgaagaaggctgctttcatggattttgatccaatcgtaatattgtcagtagctctagattcgtcggtagctccagcatgagtgtcggtggtagttctgtgcctgtaaaaacttgggatggttgatcgcgtgtgatcagccgtcatgctcctccagtctctatgaacaagctaagctataatagtattttcctatgataaaaaaaaaaaaacttcttaaaactagactaattctagtctctaagatatggatcat

SEQ ID NO: 262426 - DNA, 270 bp, Zea mays
gttctagatcgcgggcggccgctcgcgatctagaactaagacccacgcgtccgcggacgcgtggccaccgcctccgccgccgacaacagcgtagtgtagtgtagttccggagagggttggcggggagagtagtagtgatccgcaatgccgacggaggaggctgttgtggctgacgtcccggtgaccgaggtgccagcggaggtcccggcggcccagtaggccgatgcccccaaagcaaacaaggcacctcttgatacgaacgctcctatg

SEQ ID NO: 262427 - DNA, 885 bp, Zea mays
gtgaccaaactggctgctactactgtatgtcagggcttgcaaatggtggagtggaagtcaagcaaacacctgcaagtcctgtacccaaatcagttgaatcctcacttccacttgtcaagatacccacaccagaatcaagcaaagagaacagcggtgttatgtggatatcctcacctgatcggcttgaagatcctcgaaggccatttcagtactctaacagttctggctctccctgtgtttcagaatcaggatctgacatttatggcaaaagagaggtcatacagaagctaagacagcacctcaagaaacgtgatgagatgatcatggagatgcaaactcagattgctgatcttaagaactctcttaacattcaggtgacacagtccaccaacctgcagtctcaattggatgctgccaatcgtgatctgtttgaatccgaacgagagattcagcatctgaggaagatcattgcagatcattgtgtcacagaagcactctctcatgataaacctttgcaagctgcgcattggcagccagatgccgcaaatgggcattctaatggctatggtgagggttgtgttgatgatgctgacctgcattgtattagcatcgagaagaggaaggtagaagttagagagggtggagatgctcaagaaagaggtggttgaactgaaggaagtcattgagggaaaggactttgtgcttcagggctacaaggaacagaaggtggaactcttctcaaagatcagggagttgcaggaaaagctctcagcacaagtgccaatcatcttgtaagatctatctgtgatactttttagaagattgaatctaagcataatgttgccatgtcccatgagcagcagaaggggtcccgcttcagtgaag

SEQ ID NO: 262428 - DNA, 591 bp, Zea mays
tctccatgcgtccgtgcttatcttctcccgtcccataggttgctaggctcggccgtgtagagcagcaagagcacgccgcgccaagcaacaaagagggaccccgcttccatggaggtggtgggcggcgtgtcgctgaggccgtcgccagcgccggcgcgtatccggactaccctgccacccgtcgacgtaggcggacgcttccttctccgccgggtcgcggggcgccagccggcgaggcgcgcgctggtcgtggaggcccggggcggcaggggctggtcggagcggcagatgcagcagcagcgccgcgcgccgctgctgccgaaaatcgaggacgacggcaacccgcgattcgtcatcttcatccgcaccgccaatgtctacttctggtacccgctcaacatcatcacgggcggtacgacggcgaagatcatgctcgccgccaaggacaacttcctcggcaggtacatctacaaggacacgctcgccaggaacctcgccgccgtcatttacaaagacgaggatgagatcatagacacagcgaaagagcagtaccgtgtgctcaagaccgaaaatgagtttcggtatggctac

SEQ ID NO: 262429 - DNA, 906 bp, Zea mays
tatgcatcagtaagtcagccatctagccctacttactgtaaccaacatgcatgatccacctctgtaatttttatttcctaaatatgtatttttatgctaatttgaatacgctattatgcccaattactagatcgcgcgtatgctctgctttgtaaacatgtagaccaccaaattatacatttttatgttcttccttttatgcttttatactgatttgaattggtcctctcatgatcatgcatcagtacccaatgattcagactcatctaatgcttctgcttccttacatgaatatgcattagcaggtcagtcatctagccctacttactataacaagcatgcattatccaccgatgtgattcttatttctgctaatttaaatgtgttattatgctcaattatcagatctcgtgtacgctccacgttgtaaacacgtagaccaccaatcctacattgtaccaatcctacattgtttttgttcttcctattatgcttttacgatgatttgaattggtccttttcagaacaatgcacccccagtacctagtctactttagagcagtatacgacagatacgcccagtacccccaatttcacatatcagtatagttgcagccaaggatctattcattttcttatcctgctgtgatcctgcccgctggcccgacttcgtccctgggtgcaggaatgagagggtagagctgataagcataatacatgtacggatttatgctctggatgtggagacaagtagaaagtggtttgtggagcattaagttgtcttcatgagattcagcctattcaggtcatgtactcatgtggcacagcctagaggaccaactgaccaagaatactaaagcacataggatgtttagttttctgattttaatttttgaatttctatcc

SEQ ID NO: 262430 - DNA, 586 bp, Zea mays
cggacgcgtgggcggacgcgtgggcggacgcgtgggaaatccttatggccttgactatgttggggggagggttgttgcagccatgaaggcccgcattctcgtcagaggcttcggcatccgcctgcgcctgctgacgctcagtgtgcccgagtcgttggtggatttcagcgacaagcccttgatcatgcactagtacccaatgattcagactcatctaatgcttctgcttccttacatgaatatgcattaacagaacaatgcacccccagtacctagtccactgtagagcagtatacgacagatacgcccagtacccctagtcattcgtgggcattggtaatatcaccacacgctcccggagtcctgctgtgatcccgcccgctggcccgacttcgtccctgggtgcaggaatgagagggtagagctgataagcataatacatgtacggatttatgctcggatgtggagacaagtagaaagtggtttgtggagcattgagttgtcttcatgagattcaggctattcaggtcatgtactcatgtggcacagcctaaaggactaactaaccaagaatactaaagcacat

SEQ ID NO: 262431 - DNA, 526 bp, Zea mays
tttcattcgtccggatgcttctgcttccttacgtgggcataagtcagccatctagccgtacttactgtataatttttatttcctaaatatgtctgtttatgctaatttgaatacgctattactcccaattactagatcgcgcgtatgctccgctttgtaaacacgtagaccacaaaattgtacattttttatgttcttccttttatgcttttatactgagttgaattggtccttacatgatcatgcatcagtacccgttgattcagactcatctaaagcttctgcttccttacatgaatatgcattagcaggtcagtcatctagctctacttactataacaagcacacattatccaccgacgtgattcttattcctactaatttgaatgtgctattatgctcaattatcagatctcgtgtacgctccgcgttgtaaacacgtagaccaattcttctacattggatttttcttcttccttttatgcttttacgatgatttgaattggtctttttttcagacaatgca

SEQ ID NO: 262432 - DNA, 449 bp, Zea mays
ctcagcacttatataatagatttcacaaatcagtatagttgcagccaaggatctattcattttcttatcctgctgtgatcctgcccgctggcccgacttcgtccctgggtgcaggtgattcatgaatatcctgcctgtctgttcagttcatctccggacgagacacgaattgctgagtgcaggtctgttcatgccaaaatcgtacaggaatgagagggtagagctgataagcataatacatgtacggatttatgctctggatgtggagacaagtagaaagtggtttgtggagcattaagttgtcttcatgagattcagcctattcaggtcatgtactcatgtggcacagcctagaggaccaactgaccaagaatactaaagcacataggatgtttagttttctgattttaattttggaatttctatccaaatatagactctttagtatg

SEQ ID NO: 262433 - DNA, 259 bp, Zea mays
ggcccgcattctcgtctgaggcttcggcatccgcctgcgcctgttgacgctcagtgtgcccaagccgtcggtggatttcagcgtcaagcccttgatcatgcactaggttagcacgatcgatccttatctggtacaaatgtcagctccttatttaagtcattagattacatcggagggggaaccaggaaggtccgttttaggaattgccattggttgacaatctgaggtgtacagtcaagatgaatgaaatgtattatgg

SEQ ID NO: 262434 - DNA, 939 bp, Zea mays
ccacgtcatgcaacgcaacattccagggccatgtatcatctataaatggctagctcccacatatgaactagtctctatcatcatccaatccagatcagcaaagcggcagtgcgtagagaggatcgtcgaacagaacagcatgaagatggtcatcgttctcgtcgtgtgcctggctctgtcagctgccagcgcctctgcaatgcagatgccctgcccctgcgcggggctgcagggcttgtacggcgctggcgccggcctgacgacgatgatgggcgccggcgggctgtacccctacgcggagtacctgaggcagccgcagtgcagcccgctggcggcggcgccctactacgccgggtgtgggcagacgagcgccatgtaccagccgctccggcaacagtgctgccagcagcagatgaggatgatggacgtgcagtccgtcgcgcagcagctgcagatgatgatgcagcttgagcgtgccgctgccgccagcagcagcctgtacgagccagctctgatgcagcagcagcagcagctgctggcagcccagggtctcaaccccatggccatgatgatggcgcagaacatgccggccatgggtggactctaccagtaccagtaccagctgcccagctaccgcaccaacccctgtggcgtctccgctgccattccgccctactactgattcatgatatttgggaaatctcctctatccatccctctctatctatatatgtaataatgcagtaagacgacacacattatcatgtgtggtatgaccaataatatatgcatgcataataaagttttggttttaaagaaaaaaaaaaaaaaaaaaagaaaaaaaaaaaaaaaaaaaaaaaaaaaaaaaaaaaaaaaaaaataaaaaaaaaataaaaaatatataaaaaaatataaataacgttaaatataatatcaatt

SEQ ID NO: 262435 - DNA, 1026 bp, Zea mays
gcaggattcaatcaccaaaacctcaccagacgccatcctcgaaatttatcagaggtaattttctccctccatttttcgcattttgttttctccgctttttggttttcagtttgattgctcatcttttcaccaaaatatcaagtagcgtcatacttgaaatttgattgatcatcttctcgatttgatcttttattttctcagaggagattggtcgtctatctggagcactccgcggccatcaacccccacgcttaaggtcagggtttctgttggagcgtcagggcgatggtgtttggggcgttcctttatcaacaaggggtagagaaggaagaaggttaatggagattcggaatgcacttgaaatgattcaaaggggggaaaatgtaaggctcgagtctatcttctatggcggcctcgacattcatgacagacacagggacatgcgccttgacattgacaatatgtcctatgaggaactattagcacttgaggaaaggatcggaaatgttagcactggcctcagcgaggaagctgtgataaagttgctcaaacaaaggaaattttcatcgtggagactaaaagcatctttggacccagaaccatgctgtatttgccaggaggagtacgttgatggagacgatctcgggaggctggactgcgggcacgacttccatgctggctgcatcaagcaatggctggtggtgaagaacgtgtgccccatctgcaagaacaccgcattgaagagcctgaaaccgaacaaaggcccgtacacacccatgttccatgtccattcgatcggtcgcaagatcatttacccgattggtttttactatgcgttttttggttgggaaaattttgccatttcacctgggaaagtggtgggggggtgttggaggtggaagagaagatggcggtccctgtaaactgctgctgctgctgctgcagtaaataatccctggaatttgtctccctgcatttaaacaaaatatttatggctgttataatggacgccgtcgtagggtttat

SEQ ID NO: 262436 - DNA, 183 bp, Zea mays
ttattgcttttattctttaaaaccgaaactttattatgatgcatatattattggtcataccacacatgataatgtgtgtcctctatccatccctctctatctatatatgtaataatgcagtaagacgacacacattatcatgtgtggtatgaccaaaactttattatgatgcatatattattg

SEQ ID NO: 262437 - DNA, 560 bp, Zea mays
ggtggttgagtggggtattgccatggctgcggctgctgctgcggcggcagatagaacggaggcggcatatagaacggaggcggtagatgaaacggtggtgtctggcagccacagccgccgcttgtactggaggcggcgctcgcagcgagcgccaggagagcaagggcaacgatcagcaccttcatggtgtcgagttctccaatctggagtcgatgagctaattgctaggctgacgtactgattcatgatatttgggaaatctcctctatccatccctctctatctatatatgtaataatgcagtaagacgacacacattatcatgtgcggtatgaccactaatatatgcatggtcataataaagttttggtttaatcaagaggctggactgcgggcacgacttccatgctggctacgtcaagcaatggctggtggtgaccaacgtgtgccccatctgcaagcaactccgcattgaaagcctgaaaccgaacaaaggcgacacacccatgttccatgtccattcgatcggtcgcaagatcatttacccgattgctttttac

SEQ ID NO: 262438 - DNA, 540 bp, Zea mays
gtagtagggcggaatgatagcgtaagacgccacaagggttggtgcagtaactgggcatttggtactggtactggtagagtccacccatggccggcatgttctgcgccatcatcatggccatggggttgagaccttgggatgccagcagctgctgctgctgctgcatcagagctggctcgtacaggctgtactgattcatgatatttgggaaatctcctctatccatccctctctatctatatatgtaataatgcagtaagacgacacacatcatcatgtgtggtatgaccaataatatatgcatcataataaagttttggttttaaagaaaaaaaaaaaaaaagggcggccgccctttttttttttttttaagtcaaactctttcttaattttttccaatcctatctaattcatggctaataggattaaccgaacaaggtcttacgcggcatgggcatggatcggataacgcggccctcgtgcttgcctgccaaatccgtcgtagtcaccacctccgtcctcacagcagtccggaagggt

SEQ ID NO: 262439 - DNA, 533 bp, Zea mays
aagctataggagcttgcgagcattgcgggaaaatggtcgccgtagcagcacttgcagaaagaccaaggagcataaggaggcaaaatattttggctgccattgttggtacactattgtgctttctatgttgctagttgctaccgcaccaacccctgtggcgtctccgctgccattccgccctactactgattcatgatattggggaaatctcctctatccatccctctctatctatatatgtcattatgcagtcagacgacacacattatcatgtgtggtatgaccaatactatatgcatggtcataataaagttttgggtataatgaatctatcggccgcttgatgtctatgatggacaaatcaaaacttctcctgtcaggcatgtaaatatttcaaaatctctattcaggctcaaattcatagcacaaaaatagaacccaacaagaccagatatacttgaagccaaacaagactctgaaacatgggtgcaacctgaaggtcaaactggtgatgggcgcactgaattgaatga

SEQ ID NO: 262440 - DNA, 519 bp, Zea mays
gttggttcaggattgccactcgaaaaacatgcagctgcctaactctggctctgagaagggaacagggatggagagcgagagcttagaccatgtacgtaagcgtgtcattgagatgcttgatcaggtgactccagtggtgaaagaaatgttcagttccatggaaagctccagttctgcacaggcggcggcggcagcagcagcttggccggaggatctcccagaaagaagaacactccctcctgttctctgtcgcactacatcccatcatccatcagacggtgacgaggttgcgatgcacacaggacgttgcaaagttgaggcaccggcgcctgggcacgagacagatgagggcgtttgcaccacggaggaggatggccaaaccagcagccgtgaaccgccgtcagctcctattcctaccgctgagtttttaccgctgcagccgacgctgtcgtcggtgtccccacatctgctgtcggcgccgccgccgtccccgatgcccgtggttggcttgtccatgct

SEQ ID NO: 262441 - DNA, 1197 bp, Zea mays
ccacgcgtcaccacgcgtccgggaccgtgggttcgccgccgttccgctcaacctctgcgcggggccctccgacccggccgacttcgtcgtgtccggatcctggagcgacaaggccttcaaggaggccaagaagttctccgccgcctccgtcgcctggtcgggtggggacggcaagtacacggccctcccaccgttcgacgccatcgcccgtacgcccgaggccaggttcctccacatctgctccaacgagaccatccacggcgtggagttcaaggactacccggagccccgcaacaggtcgggcatcctcgtcgccgacatgtcctccaacttctgctccaagcccgtcgacgtctcccgcttcggcgtcatctacgccggcgcacagaagaacgtcgggccctccggcgtcaccatcgccatcgtgcgcaaggacctcatcggcgccgctcagcccatcacgcccgtcatgctcgacttcaagacgcacgccgacaacgcctccctctacaacaccccgccctgcttcgccatctacgtctgcggtctcgtcttcgaggacctgctcgcgcagggcggcctcgccgaggtcgagaagaagaacgcgcgcaaggccggcgccctctacgacaccatcgacgccagcggagggtactacgtctgccccgtcgacaagtccgtgcgctcgcacatgaacgtgcccttcaccctggccaagggcccggacttcgagaagcagttcatcgccgaggcggccaaggagggcatggtgcagctcaaggggcacaggtctgtcggcggcgtccgcgcctccatctacaatgccatgccgctcgccggcgtcgagaagctcgtcgccttcatgaaggacttccaagccaggaacccttgattgccttgtgcttatgatcatttggtattgctactcagtctttcttcctagcataagtgagctcgtgcaagagctgtctcgcgttgcgcactgggatctatctgtagtattagtaccataacgtaacggctactgtattttgcaatgtttttttttctctctcgcttttgttaggtgttcatggaatttcatttctatgtatcaccattgcagttgtaatgtgtttttgctggaaataaggaataaggtagatggccggttgcatcgcctccaagaaaaaaccaccccaagcaaccaaccagaca

SEQ ID NO: 262442 - DNA, 2216 bp, Zea mays
ctctttccactcctctcttaaaccctagccgctgcgcacaacaacctgctactcaatttgatcaaccgccatccattctcctcctccgttgcagctgcggcatccatccagtagtccgaccaatccatggcttcagcgttcgggaccgcctccacttgcggcattaaacatgcacctgccggcgttgcgcttgctgcgcccatgaagcacctttccctcgtctcgccctcgctggtttcgcttccgcgcaagatgaggccgcgaaggaagtacaacttcagggtaaacgctgcaaaggagctgcatttcaacaaggatggctcggctatcaggaaaatgcaaaatggggtcaacaagcttgcagatctcgtcggggttactcttggaccaaaggggcgaaatgtagtcctcgaaagcaagtatggctcacctaaaattgtcaatgatggtgtcactgtggcaaaggaggttgaacttgaggaccctgttgaaaatattggtgctaaattggtccgccaagctgctgctaaaacaaatgacttggctggtgatgggacaaccacttcggttgtccttgctcaagggatgattactgagggtgtaaaggttgtagctgctggtgctaatccagtgcagatcacccgtggtattgagaaaacagccaaagcactagtcagtgaactccaaaagatgtccaaggaggttgaggacagtgagcttgctgatgttgctgcagttagtgcgggaaataactatgaaattgggaatatgatagctgaggctatgaaaaaggttgggcggcagggagtggtcacacttgaagaaggaaagagtgctgaaaataacctctattctgttgagggaatgcagtttgaccgtggctatatttctccctactttgtgactgacagtgaaaaaatgacagtcgagtatgagaactgcaagcttctccttgtggacaagaaaattaacaatgccagagatcttatcactatcctggaggatgctattagaagtggatatccaattctaatagtggcagaggacattgagcaggaagctcttgcaacccttgtggttaataggcttagaggtgcattgaagattgctgctattaaggcccctggttttggagagcgcaaaagtcaatatcttgatgacattgctactctcactggaggcactgtcatcagagaagaagttggattatccttagacaaggcagacaatgcggtcctaggaactgctgctaaggttgtagttaccaaggattcaacaacaatagtgggagatggcactacacaggaggaagtgaacaaaagggtgacacaaatcaagaaccagattgaggctactgaacaagaatatgagagagaaaaactaaacgagaggatagctaaactctctggtggtgttgctgtcattcaggtaggagcacagacagaaactgagctcaaggaaaagaaattgagggttgaggatgccctgaatgctacaaaggcagcagtcgaggaaggtatcgttgtaggtggtggctgtacccttttgaggcttgcatcaaaagttgatgcaattatagagacccttgagaacgatgaacagaaggttggggctgaaattgtaaggaagtccttgagctatccacttaaattgattgcaaaaaatgcaggcgttaatggcagtgtggttactgagaaggttcttgccaatgagaacttcaggtatgggtacaatgcggctacaggggagtatgaggacttgatggctgctggtatcattgatcccaccaaggttgtgaggtgctgcttggagcatgctgcatcggtggcgaaaaccttcatcacctctgatgccgttgttgttgacgccaaggtggctgagcaagcaccatcatctcctgcaaacccaatggcaatgggtggtggctcaggttttgggttctaaattgttcagctgcccttcgttccatcgcagcgacagaatcttagtttcgagatataataataaattggatgatgttagtttcgagatattagttggatgttgttattgttgtctcaaattataaaaaatcaagtgcaagtaaccaagacagctgaaaaaaatagttttgatgagatgctgcttcgtttttcttttctactatattggtgtgttggaaatagttttgatgagatgctccttcgtttttctcccaaaaaaaaaaaaagaagaga

SEQ ID NO: 262443 - DNA, 2148 bp, Zea mays
tgttatgggaagcctgcacgttaccagaggatgcttgatctagctcgttggttgaaagaacatgtaccagaagaagattcctcaccaggaccaggaacaggccttgtgcatggtgattaccgccctgataatctagtttttcatccaacagaggaccgagtaattggcgttattgattgggaactatctactttggggaatcagatgtgtgatgttgcttatagctgcttgccatatattattgatgcagcacccagtgcaaggacttcttatggagggtttcaagatactggcattccagatgggattcctcaactggaagagtacctttctgtatactgctcttttgctgcaagaccctggcctgctgcaaattggaagttctacattgctttttctttgtttcgtggggcatctatctatgcaggagtatatcacagatggactatgggtaatgcatcaggtggtgagcgtgctaaatttgctggtagggttgctaacgctatggttgactgtgcctgggacttcataaatagagtaaatgtcctgcaagaactgccttctaagggttctcaagtcttaggagcatcgtggcaagaatttcacagagaggaagaaagttcaacttctgaaaagaatcaaggaaaatttgttcctagtgaaaaggttatgcagcttcaaaagaaactaataaagtttatcgaagatcacatatacccaatggaggctgagttctacaaacatgcacaatcaacctcaagatggacaattcatccagaagaagaaaatcttaaagcattggcaaagaaggagggcctatggaacttgtttattccgctagacagtgcagcgagagctagaaagctattgtttgaagaccattctcaaatttcccttggaagttcgaataatcttttgctgggcgcgggtcttacaaatcttgaatatggatatttgtgtgagattatgggacgttcagtttgggctccacaaatatttaactgtggtgcacctgatacaggtaacatggaggtcctgttgaggtatggcactaaggagcaacagaagcaatggctagttcctttattggaagggacaattcgttctggatttgcaatgacagaaccacaagttgcatcttcagacgcgacaaatatagaatgctcaatatccaggcaaggagatttttttgtgataaatggaaggaagtggtggaccagtggagctatggatcctaggtgcaaaatcctgatattaatgggaaagacagatttttctgcacctaagcataagcagcagtccatgattttagtggacatcaacactcctggggtgcagataaagagaccattgttagtctttggttttgatgatgcacctcatggacacgcagagattacatttgaaaacgtgcgtgttccagtaacaaatatcctgcttggagaagggcgtggttttgagattgctcaaggaagacttggtcctggaaggttacatcattgcatgaggctagtaggagcagcagaacgtggcatgaatctgatggtagagagggccttaaacaggaccgcatttggaaagaggattgcacagcatggttcctttttatcagatcttgcaaagtgtcggattgaactggagcaggcaaggcttttagtccttgaagctgccgatcaactcgatcgacatgggaacaagaaagcacgtggtatcctcgcgatggccaaggttgcagctccaaatatggccctgaaggtgcttgacatggcgatgcaagttcacggcgcagctggtgtctcgtctgacactgtcttgtcgcacctatgggcaacggctaggacactgcggattgcagacggccccgacgaggtccatctcgggacaatcgccaagctggaactgcggagggctaggttgtaagttgtaactcgagggcgatgtacagctcgcccgtcttgcgaatgaataaagaaggaacatcaccctcgtcatttaacgtccataggtgaatacttagatgaataagcaatgaatgaataaatagtaatgactatataggatgtattttccctactttcagtagcagttactcttattttcaataaaccatatataatatctatctttaataaatcacaccatttactc

SEQ ID NO: 262444 - DNA, 425 bp, Zea mays
ggaacaagaaagcacgtggtatcctcgcgatggccaaggttgcagctccaaatatggccctgaaggtgcttgacatggcgatgcaagttcacggcgcagctggtgtctcgtctgacacggtcttgtcgcacctatgggcaacggctaggacactgcggattgcagacggccccgacgaggtccatctcgggacaatcgccaagctggaactgcggaggtctaggttgtaactcgagggcgatgtacagctcgcccgtcttgcgaatgaataaagaaggaacatcacccgtcgtcatttaacgtccatatgtgaatacttagatgaataggcaatgaatcaataaatcctactttcagtagcagttactcttattttcaataaaccatatataatatcaacctttaataaatcatatcatttactc

SEQ ID NO: 262445 - DNA, 433 bp, Zea mays
ccgtcctgattcccggtcacccacgcgtcccggacgcgtgggccgttgcagctgcggcatccgtcctgttgtccgaccactgccctggcttcagcgttcgggaccgcctccacttgcggcattaaacatgcacctgccggcgttgcgcttgctgcgcccatgaagcacctttccctcgtctcgccctcgctggttccgtttccctgcatgatgaggcctgacagggcagtccagagctaggaagctctcgtttgatgaccattctcaaatctcccttggatggtcgaataatcttttgctgggcgcgggtcttacaaattttgaatatggatatttgtgtgagattatgggacgttcattttgggctccacaaatatttaactgtggtgcacctgatacaggtaacatggaggtcctgttgaggtatggcact

SEQ ID NO: 262446 - DNA, 285 bp, Zea mays
caatcaacctcaagatggacaattcatccagaggttgattgtgcatgtttgtagaactcagcctccattgggtatatgtgatcttcaaacatgcacacctcaacctcaagatggacaattcatccagaagaagaaaatcttaaagcattggcaaagaaggagggcctatggaacttgtttattcccctcgacagtgcagcgagagctagaaacctattgtttgaagaccattctcaaatttcccttggaagttcgaataatcttttgctgggcgcgggcttacaa

SEQ ID NO: 262447 - DNA, 1499 bp, Zea mays
cagttttgatctggacaagagcaccattggcatgcagaggaagctgggttcagatatttggatgcgaatgaacagacctgatggttacagtgaaatgttatcgggatatcaaccacctaatgaaggtgcacggaattcgcagggtttctgttctttacctgatcagattgccgctggacgtcctaatttctggcacactgtaaacgctcattaccaagaccagcaaggcaatcacaatctgttccctggttcatggtccatgatgccttcaagtactggctttgggatgaacagacagagctatccaatgatccaggaagtcggtgggatgtctcagagttgtacaaacaccaagtttgggaatggagtttatgctgcactacctggccgaggcattgatcgatacccatctggatggtttgggcacacgacacccggtggtcgcgtggacgatgcccagccacgcgtgattaagcctcaacctttggtccttgctcacggcgaagctctgaaaatgaagggcaactcgtgcaagctttttggaatccatctcgacagcccagccaaatctgaacctttgaagtctccgccaagcgttgccacaccggcagctgagaagtggatggcagacggaatcgacgcagacaaaagccctgagccgcacaagacgccaaagcaactcggtgctacacaggtggatcctgtcccagagagatgcccacaagcttcaaggggcacacagtgcaaatcacaaggcgggtcgactaggagctgcaagaaggtccacaagcaaggaatggcgctgggcaggtccgtggaccttaccaagttcaacggctacacggagctggtggcggagctggacgagatgttcgacttcaacggcgagctgaaaggctgtagcaaggagtggatggtcgtgtacaccgactacgaaggcgacatgatgctggtcggggacgacccctggaatgagttctgcagcatggtgcacaagatcttcgtgtacacgagggaggaggtccagcgcatgaacccgggcgccctgaactcgaggccggaggacagcggcctcgccaattcgacggagaggggctccgcatctactgctgctgctagagaggcacccggctaccagtccgcctcgtcgcttaactccgacaactgctgatgccttggcagctagctggtcgtcccaagtagtagagaacaaggcaaatgtatccatagatctccttgtagcggagcttaatgcctttttttcccctttctaatatgcattggatgagcccgtagcgcaccgtagtagtatctaaagctggtgttttcctgcagttttggtttctccttctgatgtggcaagttttagctggtcgcacctacctaatgtatgcttagcaaacgaagtcccactaagcgctgtacataactgcccctccctgcatcaactctaatatatcatctgcttaatcgtcaaaaaaaaacggacgcgaaggaaa

SEQ ID NO: 262448 - DNA, 412 bp, Zea mays
cccacgcgtccgcggacgcgtgggtactgctgctgctagagaggcacccggctaccagtccgcctcgtcgcttaactccgacaactgctgatgccttggcagctagctggtcgtcccaagtagtagagaacaaggcaaatgtatccatagatctccttgtagcggagcttaatgcctttttttcccctttctaatatgcattggatgagcccgtagcgcaccgtagtagtatctaaagctggtgttctgagttggttggaccttcctgcagttttggtttctccttctgatgtggcaagttttagctggtcgcacctacctaatgtatgcttagcaaacgaagtcccactaagcgctgtacataactgcccctccctgcatcaactctaatatatcatctgcttaatcgtcc

SEQ ID NO: 262449 - DNA, 629 bp, Zea mays
gaaacattcagtttctagcccagggaagaattcttttcgtgatcatgctgaagagtctaattatgattctattggtgtatctgggagaccatctttacaagcagatcatcaacaattatctcgtagacatgaaaagagaagtccacgaaaattttctgagacttctctgtcaaatggattccatgggcgtgagcatagacattccaataaccatccacctctgccaccaatgccacctccaatttcatccgtgtccatgcaaaatactgattcagttaataggcagtcatcttcgttcagtgctcgagatcgaccaacacctaatccttctggttatcctacacaatcttttgactctagtatgcctagtgctttcacaggccttcagggtcaaactcaatacatgcttgcaggcgctggcagttcatcagcgaatgagttacccaatgtggaggccaagcttctatggaacacatttccagcaaataggatccctctggagaccttcagctcaggtttacctgctcggccgatgccaccccttacaccttattcagctgttgctactcagcacgctacgatgaactctggctctcctgcaaacctgtatagccagggcagtgttgtcc

SEQ ID NO: 262450 - DNA, 464 bp, Zea mays
cggtcgacccacgctgcacgaggagccctgaggcaggtaggaggaggaggggcaagcaggggacgagaggaggcggggtggaggcagagcacttcgtgaggattgcggacactgagccgacgaaggcacggccactgcaagggctgtggaagactttgaacccttaactgttatcagaactacctgtccatgtggcaattgggttaatgaaatgacaagttttctttgtcaagcaaagctgtatggtttggttcctgctatcccttgcacagatcgattctcatagtgttatgtcattgttgattaagagccatgaactgaagtgtactacgcctttggccatactgtgagtcttgaccatgaaccggtgtcagcaggaagcatgctagtgctgaattgcattatgcgaatgggtgcccaaaacaaccctaaagatttgtttaatttcatcggatcttgatact

SEQ ID NO: 262451 - DNA, 390 bp, Zea mays
cggacgcgtgggttttgcatcagatgagaacacttcttgttcagaatggaatacagccgtggaaaaacgtacaggatggtcgagaggtgaagttgttggtaagtttcttattggagaggtgtttggaaattgttgtcgactcaagggcccagatgcattgacaaaattcatggttattattcacaacgctataggaggacaggattatgagaagttccctttttcattttttgacaagaatggaaagtatgtgcaggccttattgaccgccaatacaaggagcaaaatggatggtaaatccattggagccttttgtttcctgcagattgcaagcactgaaatacagcaagcctttgagattcagagacaacaagaaaagaagtgttacgc

SEQ ID NO: 262452 - DNA, 845 bp, Zea mays
gctgactaaggccaagtggtcgtgcgtggacagctgctgctggctggtcgggtgcgtgtgctccgcctggtggctgctgctctttctatacaacgcgatgccggcctcgttcccgcagtatgtcaccgaggccatcacggggccgctcccggacccgcccggggtcaagctgcagaaggaggggccgcgagttaagcaccccgtcgtcttcgtcccgggcatcgtcaccgggggcctggagttatgggaggggcaccactgcgccgaggggctcttccgcaagcggctatggggcggcacatttggtgacgtatacaagagacctctatgctgggtcgaacatatgtcattggacaatgaaactggattagacaaacctggaataagggtcaggtcagtcacaggccttgttgcagcagactatctcgtccctggccgttttgttcgggctgtcttaattgccaatttagctcgtattggatatgacgaaaagaccatgtacatggctgcatatgattggaggttatctttccagaacactgaggttcgtgatcaaactttgagcagaataaagagcaacattgaactcatggtagcaacaaatggtggaaatagggtggtggtgatcccacactccatgggggtcctctattttttgcattttatgaaatgggtcgaagcacctcctcccatggggggcggcggtggtccggactggtgtgagaagcatattaaagctgtaatgaatattggaggacctttcttaggagttcctaaggctgttgctggccttttctcactgaagccaaagatgttgccgttgctagagctatcgctcctgatgt

SEQ ID NO: 262453 - DNA, 1400 bp, Zea mays
ttctttcgcgtggggccaggcagcccccatcatctccagcggcttcttccaaagctccaactccgacgagaaccgccactcctcgaaatctcgaaggattttctgcggcgaaccccttcgtgacgtgacccaatgggagaggcctcgccgtcgatcgccaaggacgtcaccgagttgatcgggaacacgccgctggtgtacctcaacaaggtgaccgatgggtgcgtcggccgcgtcgccgccaagctcgagtccatggagccctgctccagcgtcaaggataggattggctacagcatgatcacggacgcagaggagaaagggctgattactccaggcgtgagtgttctgattgaaccaactagcggcaacacaggcattggactggcctttatggctgctgccaagggctacaaacttacactcacaatgcctgcctccatgagcatggagaggaggatcatattgaaggcttttggtgctgaacttgtccttactgacccactcctgggaatgaaaggagctgtcaagaaagcggaagagatacaagcaaagacacccaactcgtacatccttcaacaatttgaaaatccagctaacccaaagattcactatgagactactgggcctgaaatctggaaagctacagcaggaaaaattgatggccttgtatctggtatcgggacaggaggtaccatcaccggtactgggcgatacctcagagagcaaaatcctaatgtcaagctctatggtgtggagccagtggagagtgctgttttgaatggtggaaaacctggaccacacaagattcaaggaattggagctggttttatccctggagtcttggatgttgatctccttgatgaaactctacaggtttcaagtgatgaagctatcgagactgccaaggctcttgctctgaaagaagggttgttggttggaatctcttctggtgcagctgcagctgcggcagttaggcttgctaagaggccagaaaacgccggaaagctatttgttgtcgtgttcccgagcttcggcgagcgctacctctcatcggtgctgttccagtccatcaagaaggaagcggagagcatggtggtcgagccctagagcacaaaattctgggcttctggcaaactatttcctgagacgttcaccatttccatcacagaaaaataaagctcgggtgccttctgttgatttcgacgtacatttccctgccgatggtgtccagcccactgttgtcgctggagaacacgtcgtttttagacttgtgatattttactactgttttgacactcgttgtatttctgtatatcgcgtcagactgtgaaataaaagcagtacagtgtgtttcttgcaaaaaaaaaaaaaaagggcggccgctcgcgatctagaac

SEQ ID NO: 262454 - DNA, 627 bp, Zea mays
tgaaaacaagcgggctaaaggatgacaccacctgtgttgtagttgacattatcccatccgatcatttgacatcaccacagttgtctccaaagaaaaatcataacaagttgaagtcactttttcgtagaaggtcgcatagttctgttggaaagctcgggggcaagtctgcctccattggttctgtggaggagttatttgaagaaggctctgcaatgttagaagaaaggttgggcaggaatttgtctttgaaagcagtttcagcaccttttcgctgtgcaatctgccaagtggaccaagagcccttcgaagatttgatgagagataatggaggtggttactgctcttccccatgcgctccatggggtggtccatatctctgtttggactgtcggaaaaagaaagatgcaatggaaggtaaaagatctagctgctccacagcatgcaggtgaaacagtcctgcctcatcctcaagcagaaaagaaccgatgagagaggataataagttgctggacccaagtataattgtttgctgaaactaactgtattgccagcccggtaaaagacatatttggctggtagtaagacctaactagtctgttacctgcgcacaatccgaatggaaaattt

SEQ ID NO: 262455 - DNA, 573 bp, Zea mays
gcaggtgaaacaatcaaaatgctgagaaaaaggagcaacgagagacactaaggacgtgtttggtttgcgaattcagttgatccggcatgagctgctcctgcatgaggtcgtccgatgtttttctgggagtgaaccggtgctgcataattgcacttctaacgagcactacatggagtatctgatgtcggacgacacagatctatgatgtaaaccaaacaaatatattaggttcggatataggatcggatgattccggagaccgttgtccggcaaaccaaacacgttgtaaattaaatcgctggatccaagagtatgctgaaactaactgtattgacgaccaaggtttgatgttgttgagctcaaataacttgagcttgtagttttgatgtgccctgtagtgtgccttgtgatggtttttgtgggaataggaaacatgtaaaatactccttgtgttattgcagaattagagctgttgatttttttaattaaaaaaattacatagaaaaaaaaaaaaaaaaaaaaaaaaaaaaaaaaagaaggggaaaaaaaaaaaaaacgacaaaggaatctggg

SEQ ID NO: 262456 - DNA, 516 bp, Zea mays
gggccgaccacgcgtccggcaaaagcatgcagaggattgcctgcagaactggcagcgaagcttgtcgttaagcaagctgggaaaacaagcgggctaaaggatgacaccacctgtgtcgtagttgacattatcccgtccgatcatctgacatcgccacaattgtctccaaagaaaaatcagaacaagttgaagtcactttttcgtagaaggtcgcatagttcagttagaaagcttggaggcaagtctgcctccattggttccgtggaggagttatttgaagaagggtctgcaatgctagaagaaagcttattttcagcttcttcacaaatttaagcagaagttctgccaaacagccagcttctacagcagcttattagttcagctgcttctcagaatacactaaaagcagccaacaagcagaagctgcctttcaccagcttctcagataagctgctttttcaacaagcagcagctgtgccaaacagggccttttatgtaacatataatgtgtgggat

SEQ ID NO: 262457 - DNA, 516 bp, Zea mays
tggaggtggttactgctcttcccagtacgctccatggggtggcccatgtctctgtttggactgtcggaaaaagaaagatgcaatggaaggaaaaagatgtagccgctctacagcatgcaggtgaaacaatcaaaatgctgagaaaaaggagcaacgagagacactaaattaaatcgctggatccaagagtatgctgaaactaactgtattgacgaccaaggtttgatgttgttgagctcaaataacttgagcttgtagtcttgatgtcccctgtagtgtgccttgtgatggtttttgtgggaataggacacatgtagaatactccttgtgttattgctgtattagagctgttgattagtttaataaccatcattacatgagaacaagaaactacggctagcgagaatacgcgacgaagatcagtattggcgtggatgtctgcatgtcctacgagaggtttttctacttcaatctaccggaggtgcagcaggctctgcatgctaacaggacgcatct

SEQ ID NO: 262458 - DNA, 286 bp, Zea mays
tgtctcatggcatgatctccgacgagatattcctggcgatcagccacagctgcgactttgaggactacaccttcaacgaccctcacaacgagagcaagtcatgcaacgacgccatcgcggaagcgaacagcgtagtcggagactacgtcaacaactacgatgtcattctcgacgtctgctacccatcgatcgtgatgcaggagctacggtgcgagaatacgcgacgaagatcagtattggcgtggatgtctgcatgtcctacgagaggtttttctacttcaatcta

SEQ ID NO: 262459 - DNA, 310 bp, Zea mays
gcttcttccaaagctccaactacgacgagaaacggcactcctcgaaatctccaaggattttctgcggcgaaccccttcgtgacggaacccattgggagaggcctggccatcaatcaccaaggacttcaccgatttgatcggcaacactcctttgttgtacctaaacaaggtgaccttgtattcactttctttttatatcgctctaactttctgttattttattctttcttccttactttatataatttggtttctttacttttatttggttttctattttttaatttacttttaaatattgtttatttat

SEQ ID NO: 262460 - DNA, 337 bp, Zea mays
  unsure (1)..(337): unsure at all n locations
aaagctggnacgccngcaggcaccggnccggaaacccgggacgaccaagctacgacgagaaccgccactcctcgaaatctccaaggattttctgcggcgaacccgtacgtttcctatcgctgttctcgcttgttcgcgggggaatcaaaccaaatcatccccttccccccatccgccccttggatttgcagcttcgtgacgtgacccattgggagaggcctcgcctgctttcgccatggtcgttatcgagtggataggtcacttgttccccctttttttttttccctcccccccccttccctttttcccccccttttttttttttttttttattttg

SEQ ID NO: 262461 - DNA, 334 bp, Zea mays
ccaaagctccaactacgacgagaaccgccactcctcgaaattctccaaggattttctgcggcgaacccgtacgtttcctatcgctgttctcgcttgttcgcgggggaatcaaaccaaatcatccccttccccccatccgccccttggatttgcagcttcgtgacgtgacccaatgggagaggcctcgccgtcgatcgccaaggacgtcaccgagttgatcgggaacacgccgctggtgtacctcaacaaggtgaccgatgggtgcgtcggccgcgtcgccgccaagctcgagtccatggagccctgctccagcgtcaaggataggattggctac

SEQ ID NO: 262462 - DNA, 1884 bp, Zea mays
ctcggattcccaaacgccaaaatctcgttgtcacgcccactcatcctctcgcaccgcaccgttcgcttcctttcgtcaactccactcctcttggccgccgcatcacctcctcttcgccgctgccgccaccgctccaccgggcagccagccagccatggatgaggagtacgacgtgatcgtgcttggcacggggctcaaggagtgcatcctcagtggtctcctttccgtcgacggcctcaaggttttgcatatggacagaaacgactactatggaggagattccacctcgctcaaccttaatcagctctggaagaggtttagaggggaagacaagcccccagcacatctaggtgcaagcagagactacaatgtggacatggtgccaaagtttatgatggcaaatgggacattggttcgaaccctcattcacaccgacgtgacaaagtacttgtcattcaaagctgttgatgggagctatgttttcagcaaagggaagatttacaaggtccctgccactgatatggaggctctgaagtcccctttgatgggtctattcgagaagcgcagagcaaggaacttcttcatttatgtccaagattacaatgaagctgatccaaggacacatcaaggattagaccttactagggtgacaactagagaacttatagcaaaatatggtttaagtgatgatacagtggatttcattggacatgcacttgctcttcatagagatgatcgctatcttgatgaaccggcacttgatacagtgaaaaggatgaaactatattcagagtctcttgcgcgctttcaaggaggctcgccatatatctatccattgtatggtctgggtgagctaccacagggttttgcacgattgagtgctgtttatggtggtacttacatgttaaacaagccagattgcaaggttgaattcgatatggaggggaaagtgtgtggtgtcacatctgaaggtgaaactgcaaagtgcaagaaggtggtctgtgatccttcgtatttaccaaacaaggttaggaagattggtagagttgttcgtgcaattgctatcatgagccacccaatccctaatacaaatgagtcccactcggttcaaattattttgcctcagaaacaacttggacgtagatcagacatgtatgttttctgttgttcatacacgcacaatgttgcgccaagagggaagttcattgcatttgtgtctgcagaagcagagactgataacccgcaatctgagctaaagcctggaattgatctacttggttctgtggatgagatattatatgatatttatgacagatatgaaccagtgaatgaaccatctcttgataattgctttgtcacaacgagctatgacgccaccacacattttgagacaactgtaacagatgtcctgaacatgtatacaatgatcactggaaagactgtggatcttagtgtggatttgagtgcagctagtgctgctgaagaatactgatttcagtcataatgtttatcaaagatcacatcattggggacagcacatgaccaaacttcaatgagtggctagtatgagtttagtcggttccagattataccatgccgacttctactgtacctcgtgaatcgtgatgtctattgggcacttgttgctgacagaactgtgcacaatgttgatccaatttgatggatggtggtggttctgttatttactagtcggtcaaaacactaaacggtggccatcatggctgtgtgatgtatcataactgttcagtaaatttgtgttcttctgcccggagttctgctcgatgctattgcgggcggcccgaggtgcttgctctactgtgaatgaatgaagtttgtcacgcatcgtgttcgattttttttaac

SEQ ID NO: 262463 - DNA, 438 bp, Zea mays
  unsure (1)..(438): unsure at all n locations
gggccggaatccccgtgacgtcccacgcgcccgattagttaagtnctgtttatcaaagatcacatcgttggcgacagcacatgacccacattaatgaatggctggaatgcgtttattcggttccagattatatcatgccacatgtactgttctgcgtaatgtctactgggctggcagaactatgcacaatgttgattcaagttgatggatggtggtggttctgttatttactagttagtcgaatggtgcacaacattaaacagtgaccatcatggctgtgtgatgtatcataataactgttcagtaaatttgtgctctgcctgagttctgctcgatgctattgacggcgccctaggtgcttgttccactgtgaatgaaccaagtctgtcacccatcatgttcttcaaagatttttaccaaagatctttttggtctgat

SEQ ID NO: 262464 - DNA, 499 bp, Zea mays
aatgatccccggaaagactgtagaccttagtgtggatttgagtgctgctagtgctgccgaagaatactgatttcagtcatagtgtcatgtttatcaaagatcacatcgttggcgacagcacatgacccacattaatgaatggctggaatgcgtttattcggttccagattatatcatgccacatgtactgttctgcgtaatgtctactgggctggcagaactatgcacaatgttgattcaagttgatggatggtggtggttctgttatttactagttagtcgaatggtgcacaacattaaacagtgaccatcatggctgtgtgatgtatcataataactgttcagtaaatttgtgctctgcctgagttctgctcgatgctattgacggcgccctaggtgcttgttccactgtgaatgaaccaagtctgtcacccatcatgttcttcaaagatttttaccaaagatctttttggtctgatgtgtcagaccggctcttgtg

SEQ ID NO: 262465 - DNA, 2020 bp, Zea mays
ggctcggacgcgtgggttgagccacataccctggaatactttgcatcagttagatctttttcaagcgctagtctcactggtaattgcaagttatcgtaattctggcaagtcgccgcggaagatatctggacaaatgatagtagatttatattgtgatattgggattatagaagacatcaacttgtcataattgttatgtgatgttgttcatggtcttcatcaatttgattttcaacaatcaacattatgagtttggtatcatcttaatgggtatgtcagtggtttcataccatactttggtatctacccatggcattaatttttggctctactttgttgtggctaatgatattatcctggagacccttctacttattgtgcattgaattatcttgtagctcaaaggctgtggtaaggttacaggcttatgggtgacctatctctattagttcatattgacacattttttgttcagtttcatttatccttttcttgtataaatttttctctatcctgacttctagggagaagagattatagaggtggtgactttagagataggtttgataggaggcgctcacctcataggaggcattcccctgatggagattccaggggccatcgctcccttcgtgaccgacggccaaattcccatgaaagggaatctagctattcacggtctcccagtaggaagagtgaaatgaggcatgagaagaagcctgatgatggagaaactaactcatctaggagtctcagtgtctctgacaataatgatgatagaaaaaaggagacactgttaagtggtgatgataaagaggatcacgaaatacagctcaaacaaataagacaggacatggaacttttgcgtgatgataaatctctcttggagataattttggatgagaagaatgctgaagtgcgcaagatttctagcagattaaatgatcttgatctgcagctaaggaaggagaaagaggaatgccacaggatgacctcaaaaattaaaaagttccttaaagcccatgctcgctttttgaaagcacaggaagaattgaaaaggtcacaagctcgttttgagagactcggtgatttacttgcttcagatattctgaaacgtggtgctaatgaagaagtttctagtatcaatgttgatgaagatccaaatgttccttatgaaaggagcccaaatgctgctatagctaagaagagatcaataccatactcaacaagtgaagaagcgaaagccgtgaagaaaagaagagagcgggactctgacacaactaggccagataaatataggtttgaaggtactattgcaggatttgaaaaactaagcaagggaaccgagccaacaaaatctttatatttgaagaagaaactgtgggaagatgaaaaggataagataggcaactttgtctcctcagccaacaccgacaaggtcaaagaatctccggtcaaacatgttttgccctccactggtatggctgctcatgctttggacgatctgtttgaagctgttgaactggaggatagacgtgacacatcaatagaaaatgatgctgatgacgaaactaggtcgcctgttatgcccccacaaccaccaccggtggttaatacttacgagcagtacgaggctgatgatgaggaagtcgacgtggaatgagtagaatgccgagatggtactggaatgagctatatagctctcgcgcctgtgtaaagcattatgtaatatgtatttgatgctggagtttaccttgcataaaaagaatcgtcattaatgatccttggtggatgcggtttaagcactcaacttttttgttaatttgatgaaggcaacatgccctgttacctgtacctaatataccacgtggtggctagctagccagccttgtcagtgccctgggacttttgggtggtcttgttgtgctgttcccggccctttaaaactgatgttttgtaggactgatgttttgtaggagtattatttgaatggtagccgttgatcttcggccgctgatgc

SEQ ID NO: 262466 - DNA, 523 bp, Zea mays
cccacgcgtccgctcactacagggctttgctcctcccaactctcgaaaccctacccacccgatgagagatcgatcggtcgagcgcgaattccccagccgcgagcggggggatcggccgccgcccggggtgctggggcccccgcgccgcgggccggcgtacaagacgaagttgtgcgcgctgtggcagcgcggcggctgttcccgcgacacatgcagcttcgcgcacggacacgccgagctccgccggttccccggatcgcgcacctcgttcccaccccgcgccgggagaagtctgcagaattaggcggcattcttactggttgccttttgatttaactaccattcaaattagcagactcctgagcagatttattagattcaactgctgccagaggataagatgacttttatatagattcttcagttggcatttcaacgatttattgtgacctgtaatgcttgtccctacatcaagaagtgggcatatcagtatcttggatgatgactccactgaatgatgtcc

SEQ ID NO: 262467 - DNA, 484 bp, Zea mays
tcgcccacgcgtacgcccgtcttccccttcctcgccgcctccactacagggctttgctcctcccaactctcgaaaccctacccacccgatgagagatcgatcggtcgagcgcgaattccccagccgcgagcggggggatcggccgccgcccggggtgctgggccccccgcgccgcgggccggcgtacaagacgaagttgtgcgcgctgtggcagcgcggcggctgttcccgcgacacatgcagcttcgcgcacggacacgccgagctccgccggttccccggatcgcgcacctcgttcccaccccgcgccgggagaagagatttctcacctggggacgcttgttgcagtctgcagaattaggcggcattcttactggttgccttttgatttaactaccattcaaattagcagactcctgagcagatttattagattcaactgctgccagaggataaagatgactttatatagattcttcagttg

SEQ ID NO: 262468 - DNA, 720 bp, Zea mays
ttgactcctgggcggacgcgtgggcggacgcgggggggcctttcctcgccgcctgcgctacagggctttgctcctcccaactctcgaaaccctacccacgcgatgagagatcgatcggtcgagcgcgaattccccagccgcgagcggggggatcggccgccgcccggggtgctgggtcccccgcgccgcgggccggcttacaagacgaagttgtgcgcgctgtggcagcgcggcggctgttcccgcgacacatgcagcttcgcgcacggacacgccgagctccgccggttccccggatcgcgcacctcgttcccaccccgcgccggtatacacagccttctctcgtgcccccattatcctctcgtacgcttttcttttcagtcgaatgtttaacctctgagatcgggatcccctggtggtgtagcgttcgttgtagatctggaggtctggttgtatgttcttttcctgcaaatcatgttcctcggattggttttattggtaggttttgttgtaagatgtcactaattctgcaccctaccgtgaatggttgctcatgtaacctatgtgatctatctgtttcggaagaacaacggtatgtgaccattcaatttatgagatgaagaagaaaggccacggtgcagcaaaaaaagggggatatttaacctttttgccatctttatggatggccctaaaccaccagccactgaccatctgtggagc

SEQ ID NO: 262469 - DNA, 257 bp, Zea mays
ctcgagcgaattcggctcgaggataaagagagatttatcatcccgctaaagttccatgtcctgtcttatttgtttgagctgtatttcgtgatgataaatctctcttggagataattttggatgagaagaatgctgaagtgcgcaagatttctagcagattagatgatcttgatctgcagctaaggaaggagatagaggaatgccacaggatgacctcaaaaattaaaaagttccttaaagcccatgctcgctttttg

SEQ ID NO: 262470 - DNA, 1058 bp, Zea mays
cccacgcgtccgcccacgcgtccgcccacgcgtccgcccacgcgtccgcccacgcgtccgcagctctcggcttctctctctcatcggcacacccgagctcgcgccctccttccacgtcgaggtccgagtcctgctttgatggcgaccgacgtggctgagactcccgcgccgttggtggatgcggccccagaggcgcccgccgacgccccggcggcgcctgctgccgacgcgaagccggccaaggccaagaaggccaccgcgccgaagaagcgcgccagcccgacccacccgccgtacgccgagatggtctcggaggcgatcacgtcgctcaaggagaggacggggtccagcagctatgcgattgccaagttcgtggaggacaagcacaaggacaagctcccgcccaacttccgcaagcttctgaacgttcagctcaagaagctcgtcgccggcggcaagctgaccaaggtgaagaactcgtacaagctgtcgtccgccgccaccaagccgaatcccaagcccaaggccgccccgaagaagcccaagaccggcgctaagaagcccaaggccgctgccaagaccaaagctaagacccccgccaaggcgaagcccgccacaaagcccaagcccgccgcgaagccgaaagccgtagtgaagccgaagacacccgccaagcccaaggccaagccagctgccaaggcgaagcccaagaccgccggcgctaagccgaagccacttgctaagaaagccggccgccccgccaaggcggcgaagacgtcggccaaggacacgccagggaagaaggcgccggtggccaagaagtccgctgctgccgcgaagaaggcccctgccaagaaggccgctccctcgaagaaggcggcgaccccggtgcggaaagcgccgtcccgtaaggccaagaagtaaagcggccaagaaggggggcgcgatgttgtaaatttgatatcggaggggctcgggtacactggtcattcagtatctctgcaccttcctcgtacctctgctgtacgtcctatggtttctttcacagataatagtct

SEQ ID NO: 262471 - DNA, 587 bp, Zea mays
gacccacgcgtccgcccacgcgtccgcggacgcgtgggtcccagcgcacagctctcctcatcggcgcacccgagctcgccctctccttcctcatcgaggcccgagtcctgctctgatggcgaccgacgtggctgagactcccgcgccgttggtggatgcggcccctgaggcgcccgcggacaccccggcggcgcctgctgttgacgcgaagccggccaaggccaagaaggccacagcgccgaagaagcgcgccagcccgacccatccgccgtacgccgagatggtctcggaggcgatcgcgtcgctcaaggagaggacggggtccagcagctttgctattgccaagttcttggaggacaagcacaaggacaagctcccgcccaacttccgcaagcttctgaacgttcagctcaagaagctcgtcgccggcggcaagctgaccaaggtgaagaactcgtacaagctgtcgtccgccaccaagccaaaggccgccccgaagaagaccaagaccggcgtgaagaagcccaaggccgctgccaaaccgaaggccaagtcccccgcgaagcccaagaaaaaccaaagcccaa

SEQ ID NO: 262472 - DNA, 808 bp, Zea mays
cccacgcgtccggctcaagaagctcgtcgtctgctgcaagctgaccaaggtgaagaactggggaagctgtcgtccgccacgaagccgaatcccaagcccaaggccgccccgaagaagcccaagaccggcgctaagaagcccaaggccgctgccaagcccaaagctaagacccccgccaaggcgaagcccgccacaaagcccaagcccgccgcgaagccgaaagccgtagtgaaaccgaagacacccgccaagcccaaggccaagccagctgccaaggcgaagcccaagaccgccggcgctaagccgaagccacttgctaagaaggccggccgccccgccaaggcggcgaagacgtcggccaaggacacgccagggaagaaggcccctgccaagaaggccgctccctcgaagaaggcggcgaccccggtgcggaaagcgccgtcccgtaaggccaagaagtaaagcggccaagaaggggggcgcgatgctgtaaatttgatatcggagaggctcgggtacactggtcattcagtatccgagaccgatagctgaggctagtggcgatggaggactgtgttattactactataaactggtggttgtgtttctgtaactggtgaatgatcaagttggaagcttttagtctatcttagatatatcagtggatagtgttttttgtattttcgttttcttttccaatgtgtgttgggtcttgtggattatcctttttttctaatctaatacaatgaagaggcatgtcttttgaagctaaaaaaaaaaaaaaaaaaaaaaaaaaaaaaaaaagaaa

SEQ ID NO: 262473 - DNA, 504 bp, Zea mays
tggtgaagtgcagccgaagacacccgccaagcccaaggccaagccagctgccaaggcgaagcccaagaccgccggcgctaagccgaagccacttgctaagaaagccggccgccccgccaaggcggcgaagacgtcggccaaggacacgccagggaagaaggcgccggtggccaagaagtccgctgctgccgcgaagaaggcccctgccaagaaggccgctccctcgaagaaggcggcgaccccggtgcggaaagcgccgtcccgtaaggccaagaagtaaagcggccaagaaggggggcgcgatgctgtaaatttgatatcggagaggctcgggtacactggtcattcagtatccgagaccgatagctgaggctagtggcgatggaggactgtgttattactactataaactggtggttgtgtttctgtaactggtgaatgatcaagttggaagcttttagtctatcttagatatatcaccccatagtgttttttgtcctttcc

SEQ ID NO: 262474 - DNA, 383 bp, Zea mays
agggcacacctcaagctcgcgcccaccttccacgtcgaggtccgagtcctgctttgatggcgaccgacgtggctgagactcccgcgccgttggtggatgcggccccagaggcgcccgccgacgccccggcggcgcctgctgccgacgcgaagccggccaaggccaagaaggccaccgcgccgaagaagcgcgccagcccgacccacccgccgtacgccgaggtaattggtgccctccctttgatccttctgccgtgccgtgctgtgcgtgcctctccgccgcgtcgggatcgtactgagtagtggatggtcggtgcgcaggatggtctcggaggcgatcacgtcgctcaaggagaggacggggtccagcaggcggtgccagtg

SEQ ID NO: 262475 - DNA, 503 bp, Zea mays
gtcattaccgagtttctgtccggcggttctctgagggctttcttgcgaaagctggagcgtgaaactcttcctttggagaaggtcatttccatcgctctggatatcgcacgcggcctggaatatattcacctccaagggattgtgcaccgtgacatcaaacccgagaacatcttatttgatggagaattctgcgctaaagtcgtcgattttggagtggcgtgtgaagaaaaatactgcaatttgttaggcgatgatccaggtacttatagatggatggcaccagagatgtacaagcacaagccatatggccggaaggtcgatgtgtatagctttggacttgtcttgtgggaattggtcactggttcactcccttatcaagatatgactccgcttcaggcagcttttgccgttgttaataagaacttgaggccggccattccattgagctgcccagcgcccctgaagcttctgattgagcagtgttggtcctggcaaccagaaaa

SEQ ID NO: 262476 - DNA, 551 bp, Zea mays
gtagaggacagggtggccccaggaaaggatgaagtaattggaaggacaatcattgcactgcagcatgtaccccggaggctggatcacaggttgctaaccagccagtggtataaccttgagaagcatgtgattattgatggtgagccgaagaaagagaccaagttttcaagccggatccacttgagaatatgtcttgaaggtggatatcatgtcttggatgagtcaacacattacagtagtgatttaaggccaactgcaaagcccctgtggaaacctagcattggcattcttgaactgggtatattgacagcacagggcctgttgccaatgaagaccaaggatgggcgtggcacaactgatgcatattgtgttgcaaagtacggacaaaaatgggtgcgtaccaggactataatcgacagtttcactcccaaatggaatgaacagtacacctgggaggtgtatgatccatgcactgtggtcacaattggtgtattcgacaattgccacctgaatggcggggaaaaggccaatggtgcgagggacaccagaat

SEQ ID NO: 262477 - DNA, 1935 bp, Zea mays
gccgggaacgtgccgtcgtcgtccgccttcttcgaggcccgcgtgacgatgcgcaagactgcggcgaatgccaagccagcggcggcgtccgggagcccgtggtacggccccgaccgcgtgctgtacctgggcccactgtccggcgagccgccgagctacctgacgggcgagttcccgggcgactacggctgggacaccgcggggctgtcggcggacccggagacgttcgccaagaaccgggagctggaggtgatccactcccgctgggccatgctgggcgcgctcggctgcgtcttcccggagctgctcgcccgcaacggcgtcaagttcggcgaggccgtgtggttcaaggccggctcccagatcttcagcgagggcgggctggactacctcgggaacccgagcctcatccacgcgcagagcatccttgccatctgggcctgccaggtcgtgctcatgggcgccgtcgagggctaccgcatcgccggcggcccgctcggcgaggtcgtcgacccgctctaccccggcggcagcttcgacccgctcggcctcgccgacgaccccgaggccttcgccgagctcaaggtcaaggagctcaagaacggccgcctcgccatgttctccatgttcggattcttcgtccaggccatcgtcaccgggaagggcccgctcgagaacctcgctgaccacattgccgatcccacctctagcccgacaggtgaagccgccgccgctgcagtgtccatagccaccgcaggagactgagatggggggttttgtcaagacccacaagagcaatgcgtacttcaagcgtttccaggtgaagttcaagagaaggcgcgctggcaagacagactacagggccaggataaggctgattaaccaagacaaaaacaagtacaatacacccaaatacagatttgttgtgcgatttaccaacaaggacatcacagcacaaatcatctctgctagtatagcaggtgatatggttcttgcttctgcttactcgcatgagttgccacgatatggtcttgaagttggtctgaccaactatgcagctgcctactgcactggccttctgttggctcgccgtgtgctcaagacccgtggtttagataaggaatatgagggcaatgttgaggccactggtgaggacttctctgttgagccagctgatgagaggaggcctttccgtgctctcttggatgttggccttattaggactacaactgggaaccgtgtctttggtgccctcaagggagctttggatggtggcctggatattcctcacagcgagaagaggtttgctggtttcaagaaggatgacaagcagctggatgctgatatccatcgcaagtacatctatggtggccatgttgctgactacatgaggaacctcgctgaagaggagccagagaagtaccagtctcacttcagtgagtacattaagaagggaattgaggctgatgacatggaagctctgtacaagaaggtccatgctgccatccgtgctgatccttctgtggtcaagtcaaccaagcagccaccaaaggagcacaagaggtacaaccccaagaaactgacatacgagcagaggaaggccagtctcattgaaaggctcaaccaactcaactcctcgggcggcgcagatgacgacgatgaggatgacgagtaaagtttggtcccatcgaagtagtgctatcttatgcggcgatcagtatttgtgctatggcatttatcgctacctgtagtcgtgcaacatgcatttttgtttaagtttgtcgatgcgaacaaagttgtttctgttagtttggagctggagttctgaatatttacttttataatattaaaattggaccgagttgaacaaaaaaaaaaaaaaggggggcacacaagattagagagctagcgagaaactatggcatacgcggtcgg

SEQ ID NO: 262478 - DNA, 2257 bp, Zea mays
cacccacacactccaatccacccttgttcattcctctcccttcctacttggtcagtcgacctctcaccgcaccgccgtcggcccatggcgaccacgaccttccccacctcgaccccattcttcgcggcccaccacggtccccgccggaaccgaccctccatctccgccgcggtctacgcccgcagccgccgatggcgcccgctgcgggtggcgtgcgagaaggtggtaggcatcgacctgggcaccaccaactccgcggtggccgctatggagggcggcaagcccacgattgttaccaacgcagagggggcgcggaccacgccctcggtggtggcgtacaccaagtccggcgaccgcctcgttggccagatcgccaagcgccaggccgtggtcaacccggagaacaccttcttctccgtcaagcgcttcatcggccgcaagatgaacgaggtcgacgaggagtccaagcaggtctcgtatctcgtcatcagggacgacaacggcaacgtcaagctcgattgcccggcgattggcaagcagttcgcagctgaggagatctccgcacaggtgctgagaaagctggtggatgatgcatcaaagtttttgaatgacaaggtcacaaaggcagtgatcacagtccctgcttacttcaacgattcacaaaggacagcaaccaaagatgctggccgcattgctgggctggaggttctgcgtattataaatgagcctaccgcagcatcactagcatatggttttgagaaaaagaacaatgaaacaattctggtttttgacctcggaggtggcacatttgacgtttcagttcttgaagtcggtgatggtgtttttgaggtgctgtctacatcaggtgacactcaccttggtggtgatgactttgacaagagaattgttgattggctcgctggaaacttcaagaatgatgagggtattgacttgctaaaagataagcaagctctgcagcgattgacagaagcagctgagaaggcaaagatggaactgtcatctttgacccaaacaaacatgagcttgccttttattacagctactgcagatggtcccaagcatattgagactactcttaccagggctaaatttgaagagctatgctcagatctccttgacaggctgaggacccctgtggacaatgcccttagagatgcaaagttgcaattcaaagatattgatgaggttattcttgttggtggctcaactagaataccagctgttcaggagcttgtcaagaaaatgacaggaaaggaccccaatgtgacagtcaaccctgatgaggttgttgcacttggagcagctgtgcaggctggagttctgtctggtgatgttagcgacattgtacttcttgatgtgacccccttgtccctaggtttggagacactgggtggtgtcatgaccaagattatcccacggaatacaaccttgcctacctcaaagtcggaagttttctcaacagcagctgatggccagactagtgtggagatcaatgttctccaaggagaaagagagtttgtgagagacaacaagtctcttggtagcttccggcttgatggaatccctcctgccccacgtggtgttccgcagatcgaagtcaagtttgatattgatgctaacggtatcctttctgtcactgctgtggacaagggtacagggaagaagcaggatatcacaattactggtgctagcactctgccaaaggacgaggtggagaggatggttggcgaactgagaagtttgcaaaggaggacaaggagaagcgagacgccattgacaccaagaaccaagccgagtcggtcatctaccagaccgagaagcaactgaaggaactaggggacaaggtcccgggcgacgtcaaggggaaggtcgagtcgaagctgcaagagctcaaggatgctgttgctggtggctccacacagacgatgaaggacgccattagtgcattgaaccaggaagtcatgcagattgggcagtccctctacagccagcagggtgccccaggcgccggacctggtccagctgatgcttctgctggttcagcggcgggcacttccgagaaaccaggtgacgatggcgatgtaattgacgcagatttcactgacagcaaatgactggcatgctaggtttagatgggaggctgttcgctggggatgatttgccgcgagggagagatttgttttgtaggatgtgggtgtactttttggtagatttgcacctttgttcccatttggag

SEQ ID NO: 262479 - DNA, 1151 bp, Zea mays
tttttacgcgtccgaaccggtccagcactttcacgctcagctccagcaatggctgcctccaccatggcgatctcctccacggcgatggccggcacccccatcaaggtgggctccttcggcgagggccgcatcaccatgcgcaagaccgtgggcaagcccaaggtggcggcgtccggcagcccctggtacggccccgaccgcgtcaagtacctcggccccttctccggcgagcccccgagctacctcaccggcgagttccccggcgactacggctgggacaccgccgggctgtccgccgaccccgagaccttcgccaagaaccgcgagctggaggtgatccactcccgctgggccatgctcggcgcgctcggctgcgtcttccccgagctgctctcccgcaacggcgtcaagttcggcgaggccgtctggttcaaggccggctcccagatcttcagcgagggcgggctggactacctcggcaaccccagcctgatccacgcgcagagcatcctcgccatctgggcctgccaggtcgtgctcatgggtgccgtcgagggctaccgcattgccggcgggccgctcggcgaggtcgtcgacccgctgtaccctggcggcagcttcgaccccctcggcctggccgacgaccccgaggccttcgccgagctcaaggtgaaggagctcaagaacggccgcctcgccatgttttccatgttcggcttcttcgtccaggccatcgtcaccggcaagggcccgctcgagaacctcgctgaccacatcgctgacccagtcaacaacaacgcatgggcctacgccaccaacttcgtccccggcaactaagctcaacggctatgctatgcaacttcattgtctttcggatcggagagggtgtacgtacgtggattgattgatgctgcgagatgcatgtgtgtcttttgtttcacgttgcattgcataggcaagtcgagatgatgagttggcgttgtacactaagatgaaccatgtttgtgcaatagtggtggtttttgtttcctgctggttaattgttgatatccattaatttgtttttcttctaaaaaaaaaaaaaaaaactatttttaaataacaaatataatttaaatattaaatattatataactttctattcttttttt

SEQ ID NO: 262480 - DNA, 1275 bp, Zea mays
cggacggtgggcccgcagctcccatcctctcgctcgccaggagaagcagccgccgttgctgctgccgcgtccacagaatggggggtttcgtgaagactcataagaccaatgcgtatttcaaacgtttccaagtgaaattcaagagaaggcgggctggcaagacagactacagggccaggataaggctgattaaccaagacaaaaacaagtacaacacacccaaatacagatttgttgtgcgatttaccaacaaggacatcactgcccaaatcatatctgctagtatagcgggtgatatggttcttgcttctgcctactcgcatgagttgccacgatatggtcttgaagttggtctgaccaactatgcagctgcctactgcactggccttctgttggctcgccgtgtgctcaagatccgtggtttggatcaggagtacgagggcaatgttgaggccactggtgaggacttctctgttgagccagctgatgagaggaggcctttccgtgctctcttggatgttggccttatcaggactacaacagggaaccgtgtctttggtgccctcaagggagcattggatggaggcctggatattcctcacagcgagaagaggtttgctggattcaagaaggacgacaagcagttggatgctgatacccaccgcaggtacatctatggtggccatgttgctgactacatgaagaaccttgctgaagaggagccagaaaagtaccagagccacttcagtgcgtacattaagaagggagttgaggctgatgaaatagaagcgctgtacaagaaggtccatgctgccatccgtgccgatccttccattgttaagtcaaccaagcagccaccaaaggagcataagaggtacaaccccaagaagctgacatatgagcagaggaaggccagcctcattgaaaggctcaaccaactcaactcctccggtggtgctgatgacgacgatgaggacgacgagtaaagttaattgccatcgaagtagtgctatctcaatccagcgatcagcaattgtgtactgtcttatgcggggacctgtagtactgcaataggcatttttgtttaagttttgcgaggtgaacaaaactgtttctgttagtttcgagcttgagctctcaatgtttactctttacattgaaatgctgccgtttggacatgttttttctgagttctacacctgcttgtcttgcttatgtgacggtgcagtattgtgcctttaatatcaacctaatcatggactggttcataaaaaa

SEQ ID NO: 262481 - DNA, 1304 bp, Zea mays
attttcaaggtacagtcctctccatcaggctagcttgtgcttggactctgtcattatctgtagtctaggctacttcaagttatcttgtaaattcattgatgaaatccttcggtttgtggagcttgtgctattaatgaatttacaagataacttgaagtagcctagacaacagataaggacggtgcccccacgcgtgcacgcacgcatacacagcacagagtgaggtaagcatccgaaaaaagctgtgatctgatcgacatggccgccgccaccatggctctcacctcccgcgcgctcgtcggcaagccggcgaccagcaccagggacgtcttcggcgaggggcgcatcaccatgcgcaagactgctggcaagcccaagccagcggcgtccggcagcccctggtacggggccgaccgcgtcctgtacctgggcccgctgtccggccagcccccaagctacctgaccggcgagttccccggcgactacggctgggacaccgcggggctgtccgccgacccggagactttcgccaagaaccgcgagctggaggtgatccactgccgctgggccatgctgggcgcgctcgggtgcgtgttcccggagctgctcgcccgcaacggcgtcaagttcggcgaggccgtgtggttcaaggccgggtcccagatcttcagcgagggcgggcttgactacctcggcaacccgagcctgatccacgcgcagagcatcctggccatctgggcgtgccaggtggtgctcatgggcgccgtcgaggggtaccgcatcgccggtggcccgctcggggaggtggtcgacccgctgtaccccggcggcagcttcgacccgctcgggctcgccgacgacccggaggcgttcgcggagctcaaggtcaaggagatcaagaacggccgcctcgccatgttctccatgttcggcttcttcgtgcaggccatcgtcaccggcaagggccccgtcgagaacctcgccgaccacctcgccgaccccgtcaacaacaacgcctgggcttacgccaccaacttcgtccccggcaagtgagcgagggcatgatgcttgcatgcgtgtaccgtagacgtacgtattcctacgtactgcaggttgcaccagtatttgtgaagggagctttgggagccagagattgtaccgctagtgtatttgtatgcatgctgtggagctgatcaataaaatatgctgtaaatatattatgtcttcatttatgcatactgtacatgattgttctcacgatcatgttgtgagcaacgtcctaaatcaaactgttgacgcttttt

SEQ ID NO: 262482 - DNA, 1199 bp, Zea mays
ccacgcgtccgacccacgcgtccgccaacccacttctgactgaccactgtgccgcgccgtggtcaccggacggacacacagaacgacgatggccgcgtcggcgctgcaccagaccaccagcttcctcgggcaggccctggtctcccgctccgccggcgtcgatgccggcggccgcatcaccatgcgccgcaccgtcaagagcgttccccagagcatatggtacggccctgatcgccccaagtatcttggcccgttctccgagcagacgccgtcgtacctgaccggcgagttccccggcgactacgggtgggacaccgcgggcctctcggccgacccggagacattcgcgcgcaaccgggagctggaggtgatccactcccggtgggcgatgctgggcgcgctgggctgcgtgttcccggagatcctggctaagaacggcgtcaagttcggcgaggcggtgtggttcaaggccggcgcgcagatcttctcggagggcgggctggactacctggggaaccccaacctggtgcacgcacagagcatcctggccatctgggcgtgccaggtggtgctcatgggcttcgtcgagggctaccgcgtcggcggcggcccgctcggggaagggctcgacaaggtgtaccccggcggcgccttcgacccgctgggcctcgccgacgacccggacaccgccgccgagctcaaggtgaaggagctcaagaacggccgccttgccatgttctccatgttcggcttcttcgtgcaggccatcgtcaccggcaagggccccatcgagaacctcttcgaccacgtcgccgaccccgtcgccaacaacgcctgggcatacgccacgaacttcgtccccggcaactaactgactgagcaacgccgtacatgtgtactaccatcagatccatccattcgttcgtccgtccgtcgagtgaacagtgtggtcttctctgtactctacttgttcagatcgtaggcgtgtagtagttgcaccagccggcgtatgctcatgatcgatgtgtgctcatcaatcaatgtcaatggctgcctgctgtaagcggtcgatgtaaactaagcacagacgcatgtatcgtcatcagtggatgaatcaatctatcgatggcctgtgccattcatttttgaatcaataaaaaaaaggccggccgtcgcccacgcgtccgcccacgcgtccg

SEQ ID NO: 262483 - DNA, 1168 bp, Zea mays
acccacgcgtacgcggacgcgtgggcgctatccactactttactcaaagtctagagctagcttttgctttgctcaccagacaaaccgcagcagatggcgtcgacgatcatggccgccacctcccgcatcgtcgcggccaagacgccgtttcttggccagggtcgcgccgccgccaatgccagccccctccgcgacgtcgccgccgccgctgctggcggccggatcaccatgggcaacgacctgtggtacggcccggaccgcgtcaagtacctgggccccttctccgcccagacgccctcgtacctgaccggcgagttccccggcgactacggctgggacaccgccgggctgtccgcggacccggaggcgttcgcgcggaacagggcgctggaggtgatccacgggcggtgggcgatgctgggtgcgctgggctgcatcaccccggaggtgctggagaagtgggtgcgcgtggacttcaaggagcccgtgtggttcaaggccggcgcgcagatcttctcggagggcgggctggactacctgggcaaccccaacctggtgcacgcgcagagcatcctggccgtgctcggcttccaggtcatcctcatgggcctcgtcgagggcttccgcatcaacggcctcgacggcgtcggcgagggcaacaacctctaccccggcggccagtacttcgacccgctgggcctcgccgacgaccccgtcaccttcgccgagctcaaggtcaaggagatcaagaacggccgcctcgccatgttctccatgttcggcttcttcgtccaggccatcgtcaccggcaaggggcccctcgagaacctgctcgaccacctcgacgaccccgtcgccaacaacgcctgggtctacgccaccaagttcgcaccagggtcttaagctagctaccgggccgcggcgtgccaggacattgtgttgtacactactcgtttctgtcgtgatctgtaccatgaacgaatgcaaatattcttgtgctctcccagaaggaacgaactggactagttttgctcttccattccatgtatgctctgtttcagcatatatgtagttgtgtctactgtttttttgcagttgtaaactgatttgcggtcatcgagcaacgtatgtcatgggcctaaaataattgtattaaaatttactttca

SEQ ID NO: 262484 - DNA, 708 bp, Zea mays
  unsure (1)..(708): unsure at all n locations
tccgggtcgaccacggaccgcacgcgacgccacgcgacgacacggtccgggaccgtggctcgcccgcaacggcgtcaagttcggcgaggccgtgtggttcaaggccggctcccagatcttcagcgagggcgggctggactacctcgggaacccgagcctcatccacgcgcagagcatccttgccatctgggcctgccaggtcgtgctcatgggcgccgtcgagggctaccgcatcgccggcggcccgctcggcgaggtcgtcgacccgctctaccccggcggcagcttcgacccgctcggcctcgccgacgaccccgaggccttcgccgagctcaaggtcaaggagctcaagaacggccgcctcgccatgttctccatgttcggattcttcgtccaggccatcgtcaccgggaagggcccgctcgagaacctcgctgaccacattgccgaccccgtcaacaacaacgcttgggcctacgccaccaacttcgtccccggcaagtgagggaggcgccgccggtgacctttaggtgtccggatgcatgtgagcgcacgctggttttcggtttgtaccatgatgtaaactattgttcaatcgacaaggaataattgtgttcattgtcattaaaattcccctctctttttcgttcctgccgattttatctaaatcaggtgtttgataaaaaaaaaaatanataaataaataaa

SEQ ID NO: 262485 - DNA, 824 bp, Zea mays
ctgacgggcgagttcccgggcgactacggctgggacaccgcggggctgtcggcggacacggagccgttcgccaagaaccgggagctggaggtcatccactcccgctgggccatgctgggcgcgttgggctgcgtgttcccggagctgctcgcccgcaacggcgtcaagttcggcgaggccgtgtggttcaaggccgggtcgcagatcttcagcgagggtgggctggactacctcggcaacccgagcctgatccacgcgcagagcatcctcgccatctgggcctgccaggtcgtgctcatgggcgccatcgaggggtaccgcgtcgccggcggcccgctcggagaggtcgtcgacccgctctaccccggcggcagcttcgacccgctcggcctcgccgacgaccctgaggccttcgcggagctcaaggtgaaggagctcaagaacggccgcctcgccatgttctccatgttcgggttcttcgtccaggccatcgtcaccggcaagggcccgctcgagaacctcgccgaccacctcgccgaccccgtcaacaacaacgcatgggcctatgccaccaactttgtgcccggcaagtgagggggtggaggcgccaccgcccaccggccaccgctgcggatatctaggtgttcggatgcacgtgagcgcgcactggttccagtttgtaccatgatgtaaattacttaccgtaccagggttcaatcggcaaggaagaattgttgtgttcactgtcttgggcagtctcttggtccaatatgaatcaacttacacagcatctccaaaaaaaaaaaaaaaacccacgcgtccgt

SEQ ID NO: 262486 - DNA, 476 bp, Zea mays
acgcgtccgcccacgcgtcggcgcacgcgtgggcacgcatactgcatacacaacacagagcatcagaaggagctgcgatctgatcgacatggctgccgccaccatggctatcacctcccgcgcgctcgtcggcaagccggcggctggcacgagggacgtcttcggcgagggccgcatcaccatgcgcaagaccgccgccaagcccaagccggcggcgtccggcagcccatggtacggtgccgaccgcgtcctgtacctgggcccgctgtccggctcgcccccgagctacctgaccggcgagttccccggcgactacgggtgggacaccgcggggctgtcggcggacccggagaccttcgccaagaaccgcgagctggaggtgatccactgccgctgggccatgctcggcgcgctcgggtgcgtgttcccggagctgctcgcccgcaacggcgtcaagttcggcgaggcggtgtggt

SEQ ID NO: 262487 - DNA, 999 bp, Zea mays
cctgcccgttccggaccggcattcccgacccacgcgtccgccttcccctcgcagccgccagccctcaacgttcctaccagctgccaccgcctgttacccgtgatgtctcccgcccttgccgctggcgtggagcccatggccgtcgacgattccgcctccaagaaggccaagcgcaagcagctcaaggccgccgccgccgccgcggaggcagaggcggaggccgcttcggtcaagaagaaagagaagaaagagaagaagcgaaaggtgaaggagccgtcccctccgctcccatcggccgcgtcctctgatgaggaagagaaaagcagcaccagctccgaggagacagcacccgcggcgaaaaaagcgaaggagaagacgaagaagaatgttgatgtctcgtcttcagcctcagatgacgatggcgagatcacagccagcagcgatgaggaccccgcggacccgaacgcgctgacgaacttcaggatatcggagtcgctgaggcagagcctcaggtccaaggggatcaagtcactgttccccattcaggccaccactttcgatctcgtactcgatggcagcgacttggttggccgagcgcgcaccggtcagggaaaaactttggcttttgtcttgcccatattggagtctttggttaatggggcaaacaaggcatctagacggactgaacatggcaggaccccaagtgttctcgttctactaccaacaagagagctggccaatcaggtgcacgctgactttgagttttatggtgcaacatttgggctctctgcatgttgtgtgtatgggggatcaccttatcgtcctcaagaaatggcattgagaagaggtgtggatattgttgttggaactcctggtcgtgtcaaggatttcattgttaaaggaactctcaatttgaaatgcttgaaattccgtgtccttgatgaagctgatgagatgctaaacatgggttttgttgatgatgtcgagctcattcttggc

SEQ ID NO: 262488 - DNA, 628 bp, Zea mays
ctcgtgggtcgtcgcaagcctctacagtgactcgtgctgacgcgtgggcgtgcttatgggcgccgtcgagggctaccgcatcgccggcggcccgctcggcgaggtcgtcgacccgctctatcccggcggcagcttcgacccgctcggcctcgccgacgaccccgaggccttcgctgagctcaaggtgaaggagctcaagaacggccgcctcgccatgttctccatgttcggattcttcgtccaggccatcgtcaccgggaagggcccgctcgagaacctcgctgaccacattgccgaccccgtcaacagcaacgcttgggcctacgccaccaacttcgtccccggcaagtgagggaggcgccgccggtgacctttaggtgtccggatgcatgtgtgagcgcacgctggttttcggtttgtaccatgatgttaactattgttcaatcgacaaggaataattgtgttcattgtcattatttttcaaaaaaaaaaaaaaaaaaagggcggccgggacatcacagcacaaatcatctctgctagtatagcaggtgatatggttcttgcttctgcttactcgcatgagttgccacgatatggtcttgaagttggtctgaccaactatgcagct

SEQ ID NO: 262489 - DNA, 655 bp, Zea mays
tgcaaccggtccagcactttcacgcggagctttagcaatggctgcctgcaccatggcgatctcctccacggcgatggccgacgaccccgaggccttcgccgagctcaaggtgaaggagctcaagaacggccgcctcgccatgttttccatgttcggcttcttcgtccaggccatcgtcaccggcaagggcccgctcgagaacctcgctgaccacatcgctgacccagtcaacaacaacgcatgggcctacgccaccaacttcgtccccggctactaagctcaacggctatgctatgcgacttcattgtctttcggatcggagagggtgtacgtacgtggattgattgatgctgcgagatgcatgtgtgtcttttgtttcacgttgcattgcataggcaagtcgagatgatgagttggcgttgtacactaagatgaaccatgtttgtgcaatagtggtggtttttgtttcctgctggttaaaaaaaaaaaaaaaaaaaaaaaaaaaaaaaaaaaaaaaaaaaaaaacaaaaaaaaaaaaaaaaaaaaaaaaaaaaaaaaataaaaaaaaaaaaaaaaaaaaaaatttggggggggccgttttaaaggacccaagtttacttccccgggcttgcaagataaaagcttttttttgggg

SEQ ID NO: 262490 - DNA, 427 bp, Zea mays
atgcaatctatcacgcgtccgcggacgcgtgggcggacgcgtggtcgtgacgcgtgggcgcgacgcgtggggccgccgccggctgctgtgtccatagccaccgcaggatgactgagatggggggttttgtcaagacccacaagaccaatgcgtacttcaagcgtttccaggtgaagttcaagagaaggcgcgctggcaagacagactacagggccaggataaggctgattaaccaagacaaaaacaagtacaatacacccaaatacagatttgttgtgcgatttaccaacaaggacatcacagcacatatcatctctgctagtatagcatgtgatatggttcttgcttctgcttactcgcatgagttgccacgatatggtctcgaagttggtctgaccaactatgcagctggctactgcactggcct

SEQ ID NO: 262491 - DNA, 339 bp, Zea mays
atcagagccatccattcgttcgtccgtccgtcgagtgaacagtgtggtcttctctgtactctacttgttcagatcgtaggcgtgtagtagttgcaccagccggcgtatgctcatgatcgatgtgtgctcatcaatcaatgtcaatggctgcctgctgtaagcggtcgatgtaaactaagcacagacgcatgtatcgtcatcagtggatgaatcaatctatcgatggcctgtgccattcatttttgaatcgatcaaaaaaaaaaaaaaaaaggcggccgctcgcgaaaaaaaaaaaaaaaaaaaaagggcggccgctcgcgatctagacccacgtgtccg

SEQ ID NO: 262492 - DNA, 702 bp, Zea mays
accggttcggaattcccgggtggacgcacgcgtccgcccacgcgtccggacccacgcgtccggctagggcgggctcgactacctcggcaacccgggcctggtccacgcgcagagcgtcctggccatctgggcgtgccaggtggtgctcatgggcgccgtcgaggggtaccgcgtcgccggcggcccgctcggggaggtggtcgacccgctgtaccctggcggcagcttcgacccgctcgggctcgccgacgacccggaggcgttcgccgagctcaaggtcaaggagatcaagaacggccgcctcgccatgttctccatgttcggcttcttcgtgcaggccatcgtcaccggcaagggtcccgttgagaacctcgccgaccacctcgctgaccctgtcaacaacaacgcctgggcctacgctaccaacttcgtccccggcaagtgagcgagggcatatacatacttgtatgcgtgtaccgtagacatacgtattcgtatatgtactgcaggagatgtaccagtatttgtgaagaagggagcatgggctcagagattgtaccagtagtgtacgtatttgcatgcatgctttggtccttgtggacattatcaatgaaatatgctgtaaattatacatacgtctttaataatgcatactgtacatgatttgctctggcaaaaaaaacaaaagaaaagggcggccgc

SEQ ID NO: 262493 - DNA, 490 bp, Zea mays
gggtcgtcgcaagactctatagtgacgtcgtattacgcgtccgccccctcggcctggccgacgaccccgaggccttcgccgagctcaaggtgaaggagctcaagaacggccgcctcgccatgttttccatgttcggcttcttcgtccaggccatcgtcaccggcaagggcccgctcgagaacctcgctgaccacatcgctgacccagtcaacaacaacgcatgggcctacgccaccaacttcgtccccggcaactaagctcaacggctatgctatgcaacttcattgtctttcggatcggagagggtgtacgtacgtggattgattgatgctgcgagatgcatgtgtgtcctttgtttcacgttgcattgcataggctaagtccagatgttgttgttggctgttgtacactttagatgtacctatgtttgttgctattgtggtatttttttatttttgttttgttattattatttatttgttttattttt

SEQ ID NO: 262494 - DNA, 606 bp, Zea mays
gtgggtcgtcgcaagcctctacactgagtcctactaggccatctgggcgtgccaggtggtgctcatgggcgccgtcgaggggtaccgcgtcgccggcggcccgctcggagaggtggtcgacccgctgtaccctggcggcagcttcgacccgctcgggctcgccgacgacccggaggcgttcgccgagctcaaggtgaaggagattaagaacggccgcctcgctatgttctccatgttcggcttcttcgtgcaggctatcgtcaccggcaagggccccctcgagaacctcgccgaccacatcgccgaccccgtcaacaacaacgcctgggcttacgccaccaacttcgtccccggcaagtgagcgagggcatgatgcttgcatgcgtgtaccgtagacgctgcaggttgcaccagtatttgtgaagggagctgtgggagccagaagagattgtaccgctagtgtatttttgtatgcacgctgtggagtggagctgatcaatgaaatatgctgtaaatatattatgtcttcatttatgcatactgtacatgattgttctcacgatcatgttgtgagcaacgtcccccacgcgtccgcggacgcgtggg

SEQ ID NO: 262495 - DNA, 301 bp, Zea mays
gagtgaacagtgtggtcttctctgtaccccgcgggttcagatcgtaggcgtgtagtagttgcaccagccggcgtatgctcatgatcgatgtgtgctcatcaatcaatgtcaatggctgcctgctgtaagcggtcgatgtaaactaagcacagacgcatgtatcgtcatcagtggatgaaaaaaaaaaaaaaaaaaaaaaaaaaaaaaaaaaatataaaaaaataaaaaaaaaaaaaaaaaaaaaaactctaaaaacccaaacaaacaaaaaaaaaaaaagggccgcccgttcgcaattaaa

SEQ ID NO: 262496 - DNA, 254 bp, Zea mays
gacccacgcgtccgcccacgcgtccgcggacggtgggcgaagtagtgctatctcaatccagcgatcagcaattgtgtactggcttatgcggggacctgtagtactgcactaggcatttttggttaagttttgcgaggtgaacaaaactgtttctgttagtttcgagcttgagctctcaatgtttactctttacattgaaatgcttgcgataaaaaaaaaagaagagcaaaatgacaaaactaaaggacaaataa

SEQ ID NO: 262497 - DNA, 204 bp, Zea mays
actagttctagatcgcgatctgccgcccgttttgtttcctgctggttacaaaaaccaccactattgcacaaacatggttcatcttagggtgccacgccaactcatcatctcaacggctatgctatgcaacttcattgtctttcggatcggagagggtgtacagtacgtggtttgactgatgctgcgagatgcatgtgtgctttt

SEQ ID NO: 262498 - DNA, 1974 bp, Zea mays
cccacgcgtccgcccacgcgtccgctcggctgcctcccgcagccgcccgctgctccggtccttccgaacgctggcctgttcttccctgcctttggcccattcgtcaggcggcccctccgcaggcgacgcaggcgcgggcacgacggcgcgtggccccgactacgtagacagctaaccggtctccgcctccggcccttctcctgtcgcccgattgagtcgctgctgcaactgccaacttcacccccggcgagctcaccacagtcttccggaaaggtgctatcaatttggaagatggcagatgaggagcaggccccaagctctaggaaaagggttgcaggtacccaaatcaacaaggataatccggaacctgatgatgaaggaacagaacaagagatgggtacatttaagaaagctactgaagaagttatggcaacacggaggattgtaaaggttcggcgccagcagacgtcatcagcttcttctaaccctttctctgcaatcagatttgcccccactgattctagtgctcaaacaagtgctcctgtcccagaggtccaaccttcagatgtcaaagttgacgagggaagcaatggtagcgggaaagatactttgtctctgcccgacaagactgctggctctggggtaaatacggactctagtgcctcaactgaagcaccacctcagcctgttgaaaccagtgacaaggcagaagacacaaaggacgaatctagtggagacaaagtggtagttggagaacccaatgaaggcagttgcatgccatctgaagttgagggcaaaacaaaagagggagatgctgaagaaaaggaaaggacagatgaagctggaaatatcgataaaattagcaaggatgacactgggaagaaagatggagatgacactgagaagaaagatggaggtgatgatactggaggtgaatcagagcagaaagggcaaacaccatcagcaacaccccttttctcgtttaagaatctgtcaagtggtcaaaatgctttcacaggtctgaccggaactggattttcaagcacatcattctcgtttggctcagcctctaaagatggctcaagtgctggtcccctatttgggctgaaagctgatggttcttcgttcccttcttttaatcttggtgctgccaccaatgggggttctgccacagctcttgctacttcagcagaggcacccaagatgtttgctatgacagagggccctgtcgaaaccggtgaagaaaatgagaaggctgtattcagcgctgattctgctttgtacgagtacttagatgggggctggaaagaaagaggaaaaggtgaactgaagctgaacgtccccgtatctggcggcgagcgagcccggctcgtcatgaggacaaaaggcaactaccggctggtcctgaatgcaagcctctacaacgacatgtcgctcaaggacatggacaagaagggcgtgacatttgcctgtatgaacagcattggggagtcgccgagcagcctcgctacatttgctctgaagttcaaggacacggccaccagggaggaattcaaggatgcggtggagtctcacaagacaagcaaggcacaggaactgccgctgaagacgcccgagaactctccgaaggcagcagaagtctgaagccgcacccgagtcacgcttgctcgtgtcttttgtacgtgtccaggaaggaaggaactgagagagtttctgttgttgcggagtttttaagaatgtcgcgtcatgacatgatgtcctgagttgtattttgcgtacgggttccctagtgctgtttttgggaacttaccattactacaggcgcataatcttgggatcctggacaagggactcgttttatctatttgctcgtcttgtgctccgttatgttctatcggttaagctgcgcgtgacgctattatgtcatgaataaatgtatgcaattatacaaaaaaaaaaaaaaaaaaagaacga

SEQ ID NO: 262499 - DNA, 637 bp, Zea mays
tgctggtacgcctgccggtaccggcccggccttcacttgctggaccgacccactcgttctgtcaccattaaactggtaactaatggatcacttgcgcagggatgatcctttgatgaacggtggaggataatggaaaatcaaggtttgcttgtctgaggagcagagcgatgctggcaaacttagcacaggataaatctagagcagcaagacggaggtgaatcacatcagaaagacgctgataacaaagggcagacatcatcagcaacatcccttttctcgtttacgaatctgtcaagtggcccaaatgctctcaccggtctgactggaactggattttcaagcacgtcattctcgtttggctcagcctctacagatggcccaagtactggtcccctgttcgggctgaaagctgatggttcttcgttcccttcctttagtcttggtgctgccagcaacgggagttccgccacagtgcttgctacctcagcagaagcacccaagaaatttgctatggcagaaggccctgtcgaaaccggcgaagaaaacgagaaggctgtatttactgccgattctgccttgtatgagtacctagatgggggctggaaagaaagaggaaaaggtgaactgaagctgaacg

SEQ ID NO: 262500 - DNA, 629 bp, Zea mays
  unsure (1)..(629): unsure at all n locations
ccctcttttccgcccactgattctagtgttcaaacatgcgcccctgtcccacaggtccagccttcagatgttaaaggtgacgagggatgcaatggtactgggaaaaatactttgtctgtgccagacaagaatgcaggctctggtgtaaatactgactccggtgccacaactgaagcaccacctcaacctgttggaaccagtgacaaggcagaaggcacagaggctgaatctggtggagacaaagtggtagctggaaaacccaacgaaggtagctgcatgtcatctgaagttcagggcaaaacgaaagagggagatgctgaagaaaaggaaggggcagatgaagctggaaataatggtacagttagcaaggatgatactgagaagaaaggtggaggtgaatcggagaccaaggattgcttgtctgaggagcagagagatgctggcaaaattagcatggataaatctgagcagaaagatggaggtgaatcacatcagaaagacgctgataacaaagggcagacatcatcagcaacatcccttttctcgtttacgaatctgtcaagtggccanaatgctttcaccagtctgactggaactggattttcaagcacgtcattctcgtttggctc

SEQ ID NO: 262501 - DNA, 383 bp, Zea mays
  unsure (1)..(383): unsure at all n locations
aacccgggattcaacccgnccgcgggaggcccctccgaagggggcgctttaacaggcccttcaggtcggacacggcggcgcgtagtcccgactacgtaggcaggttgccggcctccgcctccggcccttcccctgcgccccgactgagtcgctgctgcagccgccaacttcacccgcggcgagctcaccacagccctccggaagtttgttttaggggctatcaacttcggagatggccgatgaggaacaaaccccaggctctaggaagagggttgcaggtacccaaatcaataaggataatcctgagcctgatgatgacgaaccagagcaagagatgggtacatttaagaaagctactgaggaagttatggcaacccggatca

SEQ ID NO: 262502 - DNA, 1011 bp, Zea mays
cttggctttccccagtccccactcgcccaccatgacacttacaccgttcgaagcaaaaagagcgaacacgagcacgaacacaagcgcagagcagccaagcgccacacacacgccgacgcgaaccaaccaaccagctggtagtaggttcgccgcgctgacgatgatgcctcgccgcgcccttctcttcgccgcggtgctcctcgcggcctccgccgccgcggtctccgggttccacctgggaggggacgagagcggtctcgtgaggggtgtgctcgccgcgctccgcgagcgagccgaggccgaggacgccgctcgcttcgccgtcgcccactacaacaagaaccagggcgccgctttggagtttactagggtgctcaaatccaagcggcaggtggtgaccgggaccctgcatgacctgatactggaggcagctgatgctggaaaaaagagtgtgtacagagcaaaggtttgggtgaagccgtgggaagatttcaagtctgtcgtcgagtttcgccttgttggagactctgaatctgaacccgagccttctgttgcttctgatgttagctctgggcaagcaattgccaaactctctcttgaagcagatattgtacaagaagaggctcgcctgcacaccattgagaatgatgggctttccggcgatttcacatcatcatcttaggattccaggcaaggatggaaagcgtaaaggtttaaaatgaagatttaggtatttagagtatgtcaagctgaaatgctttgccttgtttattggaatatgtatgtttcgtttcaaacgtgggagcatagaactgtatatttcggtatttcacactgttcatttccatgtctgtatataaggaggttcttctggctatatatatatattttgatcctcaagtactttttctctgtcttctgtgtactttagagaatcagtcctgccgcgtctttggttagtgtgtaatatggaatagaggatgacaatatttaaagataagaagttattag

SEQ ID NO: 262503 - DNA, 941 bp, Zea mays
gccacacgccgacgcgaaccaaccaggcaaccagatggtagtcggttagctaagctcgggatcggaggagaggtgccccgcgaccctgacgatgacgatgcctcgccgcgcccttctcttcgccgcggtgctcctcgcggcctccgccgccgcggtctccgggttccacctcgccggggacgagagcggcctcgtgaggggcgtgctcacagcggtccgcgagcgggccgaggccgaggccgaggacgccgcgcgcttcgccgtcgcctaccacatcaggaaccagcgtgctgctccggagttcactagggtgctcaaatcgaagcggcaggttgtgaccgggaccctgcatgacctgatactggaggcagctgatgctggaaaaaagagtgtgtacagagcaaaggtttgggtgaagtcgtgggaagatttcaagtctgtcgtcgagtttcgccttgttggagactctgaatctgaacccgagccttctgttgcttctgatgttagctctgggcaagcaattgccaagctctctcttgaagcagatattgtacaagaagaggctcgcctgcacaccattgagaatgatgggctttccggcgatttcacatcatcatcttaggtatgatttcatctctttttatcttcttgtgcaacgggtgccacttctggtctcttgctatttggttaaccgacctatgatcacacgagccaaggacaggctgccagtgatcccaatgactgtaaccatgatttgttttgatcttgcattggtatcttgtatagtaatggttcagtgcatgatgcaaactaaacaatgtctatatagttgcttttatctttgccatggctattgtgggaactgggaagtatctagtcctgatgtgggaccttatatgttggcatctggaagatggtttttactggatggatactgttag

SEQ ID NO: 262504 - DNA, 705 bp, Zea mays
gggaggggacgagagcggtctcgtgaggggtgtgctcgccgcgctccgcgagcgagccgaggccgaggacgccgctcgcttcgccgtcgcccactacaacaagaaccagggcgccgctttggagtttactagggtgctcaaatccaagcggcaggtggtgaccgggaccctgcatgacctgatactggaggcagctgatgctggaaaaaagagtgtgtactccgcaaaggtttgggtgaagccgtgggaagatttcaagtctgtcgttgagtttcgccttgttggagactctgaatctgaacccgagccttctgttgcttctgatgttagctctgggcaagatattgtacaagaagaggctcgcctgcacaccattgagaatgatgggctttccggcgatttcacatcatcatcttaggattccaggcaaggatggaaagcgtaaaggtttaacatgaagatttaggtatttaaagtatgtcaagctgaaatgctttgccttgtttattggaaaatgtatgtttcgtttcaaacgtgggagcataaaactgtatatttgggtatttcacactgttcatttccatgtctgtaaataaggaggttcccccgcccatataaaaattttccccccccaaaaaaaaaaaaaaaaaaaaaaaaaaaaaaaaaaaaaaaaaaaaaaaaaaaaaaaaaaaaaagggcggccgc

SEQ ID NO: 262505 - DNA, 508 bp, Zea mays
tgctgatcagagtaaagcaaagattcttatgtatcatattgtgaagacaccgagatcggtgtacaaaactgtcccaaactgtgagccttgccggcctctccaaaggtcacctatcgaaggtttctatctagctggtgattacacaaagcagaaatacctggcttctatggaaggtgcagtcctatccgggaagctttgcgcccagtccatagtgcaggattatagcaggctcgcactcaggagccagaaaagcctacaatcaggagaagttcccgtcccatcttagttgtagttgcctttagctatcgtcatccccactgggtgctatcttatctcctatttcaatgggaacccacccaatggtcatgttggagacaacacctgttatggtcctttgaccatctcgtggtgactgtagttgatgtcatattcggatatatatgtaaaaggacctgcatagcaattgttagacctttgggaaagcaaaagcgacaaagagatctcagat

SEQ ID NO: 262506 - DNA, 1650 bp, Zea mays
cacgcgtccggggctgctccttcctcccagaggaagcgtacaaacctggaggggaactgcccgtctcggcggctgacccgtccacctcctttactctttccccctcgtgtccgccgctacacgcgccgccggaaccctagcctccgccgccacaggcagccgggatggagaaaggagcctcggaggcgtcgcccccttgcgctcgctgcggcaagcccgctcagcttcaatgccccaagtgtgtcgaacttaagttaccgcgtgagaacgcagctttctgcacacaggattgttttagggcagcatggagctctcacaaatctgttcacccaaagcctggtgcaccggcatcccagcagtctccagaaggttggaaatattgtttgagaaaagggcgggaacgtgcattgcaacttcctcgttttgattggacaggtccattgagaccacatccaatatcaaagatgcgtgtggtgccagatgaaattgagaagcctgattgggcgcttgatggaactcccaagatagaaccagatagtgatttgcagaaaagagtagagattaagacccctgaactcatagaaaggatgagagtaacatgtcgaattgcaagagaggttttagatgcagctgctcgtgtaattaaaccaggaattacaacagatgaaattgatagagtcgtccatgaagagacaattgctagaggtggatacccatctccattgaattaccatttcttccccaagtcatgttgcacgtctgtcaacgaagtcatttgccatggaattccagatgccaggaaacttgaggatggtgacattgtaaatgttgatgtaactgtatactataaaggtgttcatggtgatttgaatgagacatattttgttggaaatgttgatgaagcttccaaacaccttgtacgttgtacctatgagtgcttggagaaagctattgcgatagttaaacctggagttcggttccgagaggtcggagaagtcataaacagacatgtttcgatgtcaggtttatctgtggtgaaatcttattgtggccatggcataggggaactgtttcactgtgccccaaacattcctcattattcaagaaacaaggccgttggtatcatgaaagctgggcagacatttacaattgaaccaatggtcaatgcaggggtttggaatgatcgtctgtggcctgacgattggactgcagtgactgcagatggtaaacggagtgctcaatttgaacatacacttttggtgacagaaacaggatgtgaagttttgacggcacggttaccctcatcaccggacgtttttccatggttgaagaagccgtgatggggaacgccaccaacagcaacaagtgatactgttacactgggtcagcaaaaagttttgttctgctctatcagtcggccaaagctgaaattttcaaatattctagatcagagtgattagcatgctactgctgaacagtcgcagcaattgtctatcctgcggaactatttatgggactgtgtattgttaagtcggttttctccgagttatacgagacgtatggcttcttgatatgtgtcaccaatatgattatgccatccagtttacttttgatttcacagaacacaatttccatcatttcgagtaggtt

SEQ ID NO: 262507 - DNA, 462 bp, Zea mays
ctgcagtcaccacagatggtaaacggagtgctcaatttgaacatacacttttggtgacagacacattatgcgaagttttgacggcacggttgggctcatcaccagacgtttttccatggttgaaaccgtgatcgggcgacccgaacagcaacaagaaagtgatactctttatcagtcagtcaagctgaatattttcaaaattttcagaccaaacagtgataagcatgctactgctggacagtcgccctaattgtctgtcctgcggaattgtttctgggagtgtgtattgttaagtcggttttctccgagttatacgagacatatggcttgagttgtgtcaccaatatgcttatgccataggactatcagagtttacttttaatttcagagaacataatttccatcaatttcagtaggttcatttttaatgaaaaaaaaaatataattatttattaaattaat

SEQ ID NO: 262508 - DNA, 522 bp, Zea mays
  unsure (1)..(522): unsure at all n locations
tttgaacatacacgtttagagactgcagnccaatgatcggctctggcctgatgattggactgcagtgaccacagatggtaaacggagtggtcaatttgaacatacacttttggtgacagacacaggatgcgaagttttgacggcacggttaccctcatcaccagacgtttttccatggttgaaaccgtgatcgggcccccccacagcaacaagaaagtgattctgccaaaccggggctgcaaaatttttgttctactctttatcagtcagtcaagctgaatattttggaaattttcagccccaacagtgataagcatgctcctgctgggcagtccccctaattgtctgtcctgcggaattgtttctgggagtgtgttttgttaagtcggttttctccgagttatccgagacatatggcttgagttgtgtcaccgatatgcttatgccataggactatcagagtttacttttaatttcagagaacataatttccatcaatttcagtaggttcatttttcatgg

SEQ ID NO: 262509 - DNA, 246 bp, Zea mays
tttctcaaagcagggtccctccgtaggtcccatggtttgtgtgacttgtgagagagaacaaggccaaacactgaaacacatctcgtggagtcggagccctgacccagcagcgccaagatccgggaccgggagagggacctgctccctggggggtgccctttttgaggcgtgctgaaatcactacaaactttacaagattcccctacaatggcgagcgatccgtcgacgttcttgccaatcggggtg

SEQ ID NO: 262510 - DNA, 955 bp, Zea mays
gttcccaatatgtcattcgagtatgtagactcagaaatccatgaagatctacataagatcattaagtactcctgcggtgaaatctgcaattcttcagatcaattagataaagtgatgagaatatggacaacttttctggagccaattttgggtgttcagcgaaaacatggctccgaggatcctgacctagttaagtcaaagagccgaacaacaaaatcgggtattgcaaatgttggggaaagcaacactggagctgggattgtctccaagcataacaacgatgatgaaagtgaacaagggccgtcttctcgggctagattagcaaatggagttgcagcgggcactcaaaatggtttccatgatgcagatcgaattgcccgtaaaggtgaagaaccatcaaacgctatactaaatggaagagtgcatggtgctgtctctgcagatgaaacactttccctgatcacacaaaacattgcttctaccgagcgaccagcagaaaatgctgctgctgttaggactgagcaacataaggcgaacttggtacttacgccaggcatgaatgcttctagaagttctcatgatgcagttgaggtggctggtgaaggcaagactggcaatgaaacattgctttctgccgagggaggggagaggttgggaccatctttaaatggcaccagcgagggaattaaagggcgcctaaataatgatggttctgcaccccatatttcaaaagttgaaagagaagagggtgaattgtcgccaaacggagattttgatgaggaccattttgttccttttgaagatggaacatctaaaggaaaggaagattctacaagcagaccattccatggtaggcctggggaagtggtgccatctgctgaggcagctggtgagaatgatgctgatgctgatgatgaaggtgaggaaagtgctcagaggtctactgaggacagtg

SEQ ID NO: 262511 - DNA, 447 bp, Zea mays
gctggatgaccaggaagaagaggaagcggttcaagcaccgccgtgcgagcaccagcttctgctgggagcgcttccgtgctgatgctgttctgtgatacggcgctatcctcgccgagcttattcctcgacttccaacctattcaccaccgctgtcagaacccttcttgtgacaaaaagttaagcgagcgtcttcttgaccttgcaagactttttgtccggagataatctcctacgaattaccctcttgcatcttgcgactacctctcctcgtctcgcgcctgtcgatccttccatccctctcgtccccgtctatccctcttgagcttggaacactctcgcagctagtagtagctatatattattggtttcctttcacctactttcgcatgaactactctgctatttgctgtaataaagctaagttttccggtgcattgttcttttgca

SEQ ID NO: 262512 - DNA, 551 bp, Zea mays
gaaagcaagacccacccatctccggcaaatttgaccggaccagagcaaagtaattcgactttgaaaggtcatccggatcaacaagtgaattcaatggcagtgctcggcaaccaagtacagcctttgactaaccagacgtcgcttgagttggattctcctccaaatggcaccttggctctggtaacagatgccaaaaagtccacatctggagctggagatgatggcagcaacagcacctcaccctccactcatgtggacaagaagacggacggcggagatggtcccaaagaagacgtggatgtgtccactaaaataatgaataaggcaattagtgaagatgaagttgttccagagtgataaggagatccaagatctcgtgtcagcttctggtgtgacctgtaagtttgtaggacttggtttatctcctagacctggagatgcaatgcaagcaggctatcttgttgcaccctttttttgtataactagtaactggcacgtgccctacgcttgtagatttttttttgcaatataagtagaaaaaatcgcaatat

SEQ ID NO: 262513 - DNA, 579 bp, Zea mays
gtgaattcaacagcagtgctgggcaaccaagtacggcctttgactaaccagacgccgtggcccgagttggattctccaaatggcaccttggctctgccaacagatgtccaaaagtccacatctggagctggagatgatggcaccagcccagtggccaagaggccggacggtagagatggtcccaaagaagacgtggatgtgtccccgaaaataatgagcagggcaatcagtgaggatgaagtcgttccagagtgacaaggagttctctcttgccggcttctggtgtaacctgtaagtttgtaggacttggtttcgtctcctagactagacttggagatgcgcaagcagactatctcgttgtgcacgccttttgtgtaagtttgatagatgtctgcttttgtactggcagttagtagtccatcccaatgatctgggtcgagtggagaacaagaagcatgtgtacccccaggaatatgtgtagcgattctgcagctcttgaagcttcgctgctcgaatcaaatgccaaagtaggcagctaaataccatctatcaatgaaatgtccatgcccatcgctgccc

SEQ ID NO: 262514 - DNA, 1150 bp, Zea mays
gcagccgtctccaacggccgatccatgcccgtctggcgtcttcctcagtcgcgggccgtcgttgaggtcgacagcgacgggcatggcggcggcctcttctgcggcgccggcgaggcacagctgcgcaaagctctcggtcccagtggaggaccccaaagcagtgacagcgggcggtggcaccgtctttgtcaaagccacgtggctgccgtcccgcttctccctcgccgtcaccgacggtgccggcgcctgggtcgccgacgcctccgaccacgaggtgcgcctccgcgccgagcagtgggatcagcccgtcgccgattacatcgccctcgccgagcgctacctcgccttccaacagcctggttccacgtattccttccatgacgccggcaaaggccaacgcaggctcgcttggacatttgaaagacaaggtaccaagttggaatggcggtggaagctgcagccttcaccaaacacgcagcagactatatctgagatcctggattttcttatggatgcaaatatacgcttaagtgaagaggttgtgaggaaaacacaatcctttgacaagttgaaacaagaagctgagaagtgcttgcaacaaagtgagagatttaacaatgagaaagctgagttcgaacaagccgccttttcaaagtttgtggccgtgttgaattcgaagaaggccaagctcagacaactcagagataaagttgtggagctcgaacccgctgtcaagcctccaaaggaggaggcaggtcaggagcaggatgaggaggaggagaactcaacggaccggacagagctcttcgagggagagaatgacaaagaagcaagcgccaaggatgaacactccggcgagacaggcagcggcaacgttcctacttctcctggggaatcggcagctacctccagaggaagaggacgagggagaggtcgtaagaaggcaagaagataggctgtctagactgacaatagcaggtcctactcggaaattcgctagtcgtcctggtgtgcctttagccggctagtctcatttccaagagcacgtgtctttcatgtaccttcgtgttcgcgtgctgttggcaggcagagtattgcctgtgaaactgattgtgcgtctgcttcgtctcatcagtggaaaatattttct

SEQ ID NO: 262515 - DNA, 455 bp, Zea mays
gctcgcttggacatttgaaagacaaggtaccaagttggaatggcggtggaagctgcagccgtcaccaaacacgcagcagactatatctgagatcctggattttcttatggatgcaaatatacgcttaagtgtatgtccctttgcttcacctcttcactttttcagcctagcccgcgattctgaaacaggtttgccaatcgctaagctctgcttatgttgatgaccaagggatgaattggttcttgaggcgcagatgaatataaacttgatttccctgaattattcctaccaaagctactgaaccacttcagcacgtttcttacttggccctaaatttacggaattctctatattttcctcactttaggaagaggttgtgaggaaaacacaatcctttgacaagttgaaacaagaagctgagaagtgcttgcaacaaagtgagagatttaacaatg

SEQ ID NO: 262516 - DNA, 1229 bp, Zea mays
cccacgcgtccggccgcgaggagccagccagccatggtcgtcccagtcccgccgccgcctgtcctcgcttcccacgtggccgtccgggccgcggcctccgccatatcccacggccgccgggtcctccttaacggcgaccacccgccgcaggtcgcggccctcgggcgcggcgactgggtcaagctcatctgcggcgccagctttgaggatgcagctgatgtcaggaatctctcccttgtctacactcttgctggagtggattgcattgattgtgcagcagatgcatctgtggtgggagcagtgaatgaaggtattgaagtagcagcatcaattgtaccaacagttcaaaggccttggctgatgattagtgttaatgatgattgcagagatcttcatttccgtaaagctgagtttgatcctgatgattgcccactggattgctcaaagccatgtgagaaagtttgcccagctgatgcactatcactaaagcatcccatggttgatggagagcgcacactatctgatcccttacgtggtaaatatgagggtggtgtaattactgagcggtgctatggatgtggtcggtgcttgccagtttgcccgtatgacagaataagagctgtgtcctatgttcgagaccctactatgactgctgaattattgaaaagcgatgatgttgatgcaatagagatacataccactggaaaaggaactgatatgttcaataccctctgggcaacttgagtgggtccatcaataacgtgaagctggttgcagttagtcttcctgatataggtgaatcaactgttgatctcatgaacgcaatatacacaataatggagtcccattttaaagggtataatctttggcagttagatggccgacctatgagtggtgacattggccgaggtgcaacaagggagacagtttcttttgccgctcatgtggcttcaatgtcagaaagacctcctgggttctatcagttggctggtggcaccaactcatacactgttgattacttaaagaaagctggtcttttccaatcatcaaattggaattcagggaccgcaacctctgaagtggccagttctcaccaagctttaataggagggattgcttatggtggctatgctcgcaagatcgttggacgggttttgcgcaaaatactgcaacagtttggccgtgtgcacatcgaggatcatcctgatcatctactggaggctctacaa

SEQ ID NO: 262517 - DNA, 882 bp, Zea mays
gacagctgctgctcgccctctccctgtctcctctctatttcccagccacggtttccccttcccccgtccgcacgttagggcacgaggcaaatctgtggccctctcctagtctcccgaagtccgactcagccgtctcccatctcccgctcgctcgaactcgggttggggaggcacggagtcactgaccccttcgcgtttggcggtgcccctgcaccggctcttcgtctaaggtgtagtcaagctgccggccacgcccggcacccccctatccagtacaaggccttctccgagatccagtacaaggtcgtctccaagatccagtacaaggtcgtctcctccaagatctgaccccgacgctagtgagaagggaagagagggtggacgaagtgggggaggatgagcgaggagaggccggtgccgcggcgggagagcccatggggtcttcctgagggcgacacacggcagcccaaggctcaccgctgcaacgaccgcgccgaggacgtcgtccaggcttgctttgaagggaacccattcaagacagttccaggcccatttaagctcttctggcaatgcatgcgctcaaaacctggggaggaaccaaccgagccctatacctacctgcagctagatcctccgagaagggtggaagtgaatctggagcaaacaggaagtgaaccttgaacgagcatgcctagtttaccatctcgtgccgatgtgtcttcacctttcgagcagactttttcctcctagggatcacatcatgtgagcacaaagctgcatatgtttggatgtttatataatctacctaataaaccatgatccgtagagctgcctgtccaggctgccaactccttgaaagttgctgatgctggtgtaagaatt

SEQ ID NO: 262518 - DNA, 386 bp, Zea mays
cacactagggcacgaggcaaatctgtggccctctcctagtctcctgaagtctgactcagccgtcgcacatcgcacgctcgctcgaattcgggttggggaggcactgagtcactgacgtcttcgcgttaggcggtgcccctttaccggctcttcatctaaggtgtagtcaagctgctggccacacgcggtacccccctatccagtacacggccttcgccgagatccactacaaggtcgtctcctcaaagatctgaccacgacgctagtgacgacggaatagtgtgtggactaagtgcgggaggattagcgaggagaggccggtgccgcggcaggagagcccgtggggtctgcctgagggcgacacacggcaggccaatgctcaccgc

SEQ ID NO: 262519 - DNA, 617 bp, Zea mays
gaattcccgggtcgacccagcgcgtacggcagacactggtggtggtgtcctcctccttctagctatggttgcctccgctcgtcgccgtgcggggcggtagctttcggatccccagcacagcgaggatgacattgaagacatccaaaagcttcaagctggccctcccttggatgaaatgtctattccatacatttcgagggacttgttacacgcaattgagtatctacattctgagggactagttcgcaatcgagggccgcaagttaaagcatcaggtcaatggtcccgccaacaattaaaccagatggcggattggagcttgatgttgggatgatgcatgcacctttcaagtttcagaatgttgtcctcaaatgcagcttgtggttgttgaacctattctacttgcttctggatttaagttatagtttattaaacatatttgatgtttaatacttgtgtcggatgatttatgcttcaattatgtggatgctagaaaaaaaaaaactacaaaagcaaactgatatatgaaagagaacatgacaaacatggagataaccctgatgcccccacctgctagtgctgtcgcttgaaacgaagaacacctccctagttcttga

SEQ ID NO: 262520 - DNA, 697 bp, Zea mays
cccacgcgttcgcccacgcgtccgaaaaaaccggccccaccgttcgccatgagcggcgaagcagaatgcgcagctccagccgccgccgcgccggatggggcgggcggcggcagggtggagatcgacacgtccgcgccgttcgagtccgtgcgggaggccgtcgaccggttcggtggcagcgccgtctggagctccgacctcgtcaggcgcatgttcgcgccctccaagaaacatgaacactctgaccaagctgcagaggccatcaacgccgaggagcaggctgcacagctagagaacgagctggcagttaaagaaagggagactcttgatgtgctcaaggagctggaggcaaccaagaagatcatagcagacctgaaactgaagatacggaaggaagccactgaaacatcccctgaagaggctgctgaccaggtttctgaggcgggagctcaacagcagaaacctgaaaacaccaacattgatgtggtggtggacatggaaggtgtagcaggagaaccattcaggttcggttccggtggatctcgagcaggcgaaggcaaacctgaacagagctacatgtgatctggctgcggtgcgggctgcagtcgagctactgcgaaacagcatagcgatagagaaagtgttgcttgacaaaacctagagcagctctctttgatccttcgcggttcttcttgga

SEQ ID NO: 262521 - DNA, 987 bp, Zea mays
tttccttcgcgtccgcccacgcgtccgaggaaatgcccctacctgttcacagtgactggcctcccgactcgactctcctccccctatctctattcctttctgctgagctcaggaaatcccctctggtctccccgtcccccattccacccgccgccgccgacgcgccgcgcctgttcaagatgaatgtggagaagctcaagaagatggcgggtgctgtgcgcactggaggaaagggcagcatgcgcaggaagaagaaggcagtccacaagaccgcaaccaccgatgacaagcggcttcagagcacgttgaaaagaattggagtgaacactattcctggtattgaggaggtcaacatcttcaaggatgatattgttatccagtttcagaaccctaaagtgcaagcatccattcctgcaaatacatgggtggttagtggagtaccccagacaaaaagtctgcaagaccttctgccatcaattatcaaccaactgggccctgataacctggacaaccttaagaagctggctgagattttccagaggcaggtacctggtgctgaagcagctgcacaggatgatgacgacgtccctgagcttgtccaaggagagacatttgaggaggctgcagagaaggagcctcaactggagcaggatgagaacaaagaatcgtgattttgttgtgaagggtcgtcggtttaattgttggcatcagccttgcgagagaccctacctgctcatctggcgtgcctctttacatgtgctccagctttgtgtcaagtgtgcttcgggttcgaaaagcattactgcattatgttttctgaagacagtgtaggcatatattttcctcgagccatagtgagtttccgcatatgtttgctttctcggcgtccagcagcagttccatatacagaccaaatttgcaacaagaaaaatataagatttttgccagaaaaaaaaaggaaaaatcttccttaaaaaaaaggggggg

SEQ ID NO: 262522 - DNA, 761 bp, Zea mays
gggaccgttcggattccgtttgatttcgcgccgggatgctacgaagatggcgggtgctgtgcgcactggaggttagggcagcatgcgcaggatgaagcaaggcagtccacaagaccgcaaccaccgatgacaagcggcttcagagcacgttgaaaagaattggagtgaacactattcctggtattgaggaggtcaacatcttcaaggatgacattgttatccaattccagaaccctaaagtgcaagcatccattcctgcaaatacatgggtagtcagtggagtaccccagacaaaaagtctacaagaccttctgccaacaattatcaaccaactgggccctgataacctggagaacctcaagaggcttgctgagcatttccagaagcaggtacctggtgccgaagccagcgccagtgcagctgcccaggatgatgacgatgtccctgagcttgtcccaggagagacatttgaggaggctgccgaggtgaaggaggtgcctgaagcggaaccggaagagaagaaagactcgtaattttgttgcgtgtcatatccattgtttgtgaagggtcgttgtgtgtttaccatacaccatgggagagacctggtcatctatgaacccctgatgttcctcattcgtttacatgtgctccagtttcagtttcttatttacctgggttttggtccaaacctgacaactcagcatttggtttggcgtcaattgtgctttatgttccaaaaaaacattactgcagtatggatt

SEQ ID NO: 262523 - DNA, 677 bp, Zea mays
atctgcttcctgctgagctcaaaccccttccgcctccccatcaaccattccatccgccgccgccgccgcctgcgcaagatgaatgtggagaagctcaagaagatggcgggcgctgtgcgcaccggagggaagggcagcatgcgcaggaagaagaaggcagtccacaagaccgcgaccaccgatgacaagcggcttcagagcaccttgaaaaggatcggggggaacaccattcctggtatcgaggaggtcaacatcttcaaggatgatattgttatccaattccagaaccctaaagttcaagcatccattcctgcaaatacatgggtagtcagtggagtaccccagacaaaaagtctacaagaccttctgccaacaattatcaaccaactgggccctgataacctggagaacctcaagaagcttgctgagcatttccagatgcaagtacctggtgcccaaaccagcgccagtgcagctgcacaggatgatgacgatgtccctgagcttggccgaggagagacatttgaggaggctgcggaggtgaaagaggtgcctgcagcggcaccagaagagaagtaaagacttgtatatttcaccccttcatatacccattgcttcggaaggggctcccacagtcttacccttgcgcccccgacaaattgcgtatatacttattg

SEQ ID NO: 262524 - DNA, 1276 bp, Zea mays
caactcctttccgtccaaaacacttcccagccctccacgcaccccgctgccgcgactcgaacttaaaccctagagccgccggcccggtcgcgctaccgaccccaaatctcaaatcacccggagagaactcgctcgcgaaggctgaactcatggctcgcgtcttcgttgggaacctggatccgcgtgtcacggcgcgggagattgaggacgagttccgcacgtttggggttctgaagagtgtatgggttgctaggaaaccaccagggtttgccttcattgacttcgatgaccgcagggatgcacaagatgccattcgcgatttggatggtaagaatggttggagggttgagctgtcaaccaaagatggtggtggccgtggccgagaccgtaatggttctgatatgaagtgctatgagtgtggtgaagctggccactttgcacgtgaatgccgcttacggattggttcaggaggcttgggtagtggaaggcgtcgcagccgaagtcctagatatcgcagccgcagccgcagccgcagcccaagatatcgaaggagcccaagctatagcagaagcccgcgagatcgttctcctaggaggcgaagttacagcaggtcgccactgggatctcctgcacggagtctcagcaggtcaccgccgctgccgccgcctcctcccagaaataacagcaggtcaccacctggagcccgagaagtgagcaggtcgccgccgccacctcctcccagaaataacagcaggtcaccaccggcagcccgagacgtgagcaggtcaccaccggcagcccgagacgtgagcaggtcgccaccaccacctcctgatgccagaagaagctatagtggatccccaggacagcagccacaacgcgacgagtccccatatgccaatgacgcctgagattctcttagctgccccaagatgctggaaaatgctagggggcccagcatgttttgcccatgcggtcggtacaactgtaattctataggatccagtctgagattttgctcgtgttttgggtttcccttgacacaccgctgctgataccattgtagagggaggagcataacgtttccgtttcgagtattgactttgggcacttatagctgtcaagacatgacctggttcttgttagatttgtatcactagattgcttttgaattcgaacgaagtgttaatcgtgggctatgttgagatatttgtctaccttttcaggacgctttcgaagaaacattttcctaaaaaaaaaaaaaaagggcggccgc

SEQ ID NO: 262525 - DNA, 1410 bp, Zea mays
cctcactctactctgcgcgcgactcgaacttaaaccctagtgccgcagccccggtcgctccaccgaccccaaatctcaaatcagcgggagggaactcgcacgcgaaggcaaatacgctttagatcccccattgcttctggctactaggccagcgcgcctcgattttcttctccgttttggtctaattcgctgaactcatggctcgcgtctacgttgggaacctggatccgcgtgtcacggcgcgggagatcgaggacgagttccggatgtttggggttctgaggagtgtatgggttgctaggaaaccaccagggtttgccttcattgactttgatgaccgcagggatgcacaagatgccattcgcgatttggatggtaagaatggttggagggttgagctgtcaaccaaagatggtggtggccgtggccgagaccgtaatggttctgatatgaagtgctatgagtgtggtgaagttggccactttgcacgtgaatgtcgcttacggattggttcgggagggctgggtagtggaaggcgtcgcagccgaagtcctagatatcgcagccggagccgaagtcgcagccggagcccaagacatcgaaggagcccaagctatggcagaaggagctacagcccacgagatcgttctcctaggaggcgaagttacagcaggtcgccgccactgccaccaccgcctcctagaaataacagcatgtcaccacggggagcccgagaaatgagcagatcgtcaccaccacctcccaaaaataacagcagttcaccacgggaagcccgagaaatgagcagatcgccaccaccacctgccaaaaataaccgcagttcaccacgggaagcccgagaaatgagcagatcgccgccgccaccacctcccagaaataacagcaggtcaccaccgggagctcgagatgtgagcaggtcgccgccaccacctcctgatgccagaagaagctatagcagatccccagaacagcagccccagcgcgacgagtccccatatgccaatgacgcctgagattctcttagctgccccaagatgctggaaaatgctaggggcccccagcatgttttgcctgtccggtcggcacaactgtaattctgtaggatcgagtctgagattttgttccagtgttttgggtttcccttgacacatcgctgctgatacaattgtggaggcaggagcccaacgtttctgttttaagtattgactggatgcctttgggcgcttgtagttgtcaaggcaggacctgatttgtgttaggcttgtattactagcctgcattcgaatttggagaaagtgttcatcgtgctgttaagacaaaaaaaaaaaaaaaaaaaaaaaaaaaaaaaaaaaaaaaaaaaaaaaaaaaaaaaaaaaaaaaaaaaaaaaa

SEQ ID NO: 262526 - DNA, 371 bp, Zea mays
ggtttcgactcgaacttaaaccctagagccgcagccccggtcgctccaccgaccccaaatctcaaatcagcgggagggaactcgcacgcgaaggcaaatacgctttagatcccccattgcttctggctactaggccagcgcgcctcgattttcttctccgttttggtctaattcgtgaggaatttgggttttctcggtggagcttggttccgctccgccttggagtggatttcggtgacttctttgttcagattgtttcgctcttgcaggctgaactcatggctcgcgtctacgttgggaacctggatccgcgtgtcacggcgcgggagatcgaggacgagttccggatgtttggggttctgaggagtgta

SEQ ID NO: 262527 - DNA, 919 bp, Zea mays
agctggcaggcacatgacacatcgccccagccccaagtccaaagccgcgagaggcaggggcgcacaaaaccctagccgccttcccgtccttttcctttcataaaccccaagccgcgccgcaatagctcgccccctcgttcgccgcctctcctgctcctaccgcagctctccctcaggtttagtgttcgcaatggcggccttcaacaagcttggtggccttctaaggcacagtgctctggtgagcggtatcactggtggctcttctcctgcagtgttcaatgctgcacggctcatgtctaccaagctatttattggtggtcttgactggggtgttgatgacgtgaaactaagagaagcatttagcagctttggagaggttactgaagcgagggtgatcacagacagggagactgggaggtcaagaggctttggctttgtgaactactccgacagtgatgctgccaaggaagctatttctgcaatggatggcaaggaaattgatgggcggcaggtacgtgtcaacatggctaatgagagacctgctgggaaccgtggtggtggcggctatggtggcggcggctatggaggtggtggctacggaggtggtggcggctacggaggtggtggctatggtggtggcagccaaagctatgatgcttgaggggggcaggatcctattaagtgcattatcaaccaagatatttgaaataatgaactttaggacttggtatgacgttttatgttaagcgttgtcaggttttgctattcgtgttatgctgaattgttggaactcctagatgcagaatcttacgtattggttttggttccttcgagaagtgcaaatgcaagacgcatctattcccattgagtgaatacaggactaccacatgaagtatttgcttgaaaatttgcttagctt

SEQ ID NO: 262528 - DNA, 1511 bp, Zea mays
ccggaattcccgggtcgaccgacgcgtgcgccgacgcgttttgctacaccaccacacccacaccccatcccagcacacaacaagcagcctggtttacggtagctgctagcaaaacaatggagaaccctgctccgagcatcgtagtggccatcgccgcacccgtggcggcggagttcgtgaagctcaccttccgtgccctgtatatgcgccgggctggtcctggcagcagggagatgactgtgccgggaaggccatccgaccagctgggcaggagagtcgtcactgacagccccgtgtacgacggccgtggcgccgacgcccgcctcgtggctcgcatacagggagtcacggtcctggtcggtaacgcagacgccttgttcaccatggtgttcgaaaccgacaggctaaagggctccacgctcgtcatcaacggaatggtcacggatgggtcagacgaatgggcgatctacggcggaaccggggtgttcgccatggccaccggtgtcatgaagagaagaaaccttgccggcggtagcaacgacgggaactctgacgagcttgccctggaagttttctgcccggtgtttggcgcatcacagcaaccaattagcaagcagcaggagtccatctcctccgtcaccaagatcggactatggggcggacagggagggtcggcacaggacatcacggcagagcagccaccacggcgtctgcacagcatcaccgtccgcgctggcgttgccgtcgactccatcgagttcacctacaccgacgacgctgggcagaggcgcactgctgggcggtggggtggacttggcggcaatgttcgaacgatcgaccttggcgacgcagaggatgtcagggaagtctcgggaacatacggcgcatttgaaggtgccattacgctgacctcgctcaggctcgtcaccagcagcagaacctggggcccctggggggtcgagaacgggacgcgtttctccatcacggcgcccaacggcagcagcatcgcgggattctatgcgcgggcgggaaccaggctcgtcgacgctatcggtgtttacatacgtccagtggtgccaggcaggcctcggtgaacaagcgagccgagctcgctcgtattacgagctgtaggattatggttcggcttgacttgatgtaggctacctgctacatcatgctcgattcactatcctttaattcggtcatcgtcgtcgtcttgtctcgtgtcaaataaagctctcttgtgcctatatacggctctcatggttgtgccgtgtctctatatgttagtgtttatgtatatgtggagatcaaataatggccttgcaataatatgatcaaagactcactatgttaatgataatttcattttatatattgaggatcttttcaaactgctgaacgagactgctctcctgaccttcggcttcaatctggatgaccccaacaccttcggaaaccggatccaacgggtgctcaaactcggggttcccatctttcaagaccagcct

SEQ ID NO: 262529 - DNA, 1314 bp, Zea mays
cccacgcgtgcggaagaacacagggcacacgcactacacgcacggcacgcagatacatatagagagaggttagctatagcttgcacatctatttaactaactaactaactggctagctagctcgatccgcagagcaaagcgaaagcagcaagaagcaaagcaatggagaaccctgcgagtgtgctagttctaccagcgcagttcaccaaactcaccttcggaaacctgtacatccgccgggccgggccgggcagcagggagataaccgaggagggcaggtgcgacctggacaagagatacgtgagtgacttccccgtctacgacggccgcggccccgacgccagccttgtggcccgcgtgcaggggatcaccagcgaaatcgggaacgcgcaccaactgttcgtcgttgttttcgacaccgacaggctcaagggctccacgctcgtcaccaatggcgtgataacggccgggtctgacgagtgggcgatctacggcggtaccggggtgtttgccatggcgaggggcgtcataaggagaaggtatctcgccgacagggccggcgggaacactgatgagctcaacatggatgtcttctgccggccgtttggctcacagtcagagctgcaagataagatgcaggtgcaggggcaggggcagggctctagcgtcaccaagattggactatggggtggaccgggagggtcggcacaggacatcacggcagagcggccaccgcagcgtcttcacagcgtcaccgttcgtgctggcgttgccgtcgactccatcgagttcacctatactgacagcgctgggcagaggcgcgccgctgggcgttggggtggacttggcggcaatgttcgaacgatcgaccttggcaacgccgaggatgtcagggaagtctcgggaacatacggcgcatttgaaggtgccactacgctgacctcgctcaggctcgtcaccagcagcagaacctggggcccctggggtgtcgagaacgggacgcgtttctccgtcacggcgcccatcggcagcagcatcgtgggattctatgcgcgggcgggaaccaggctcgtcgatgctatcggtgtttacttgcgtcagatttaattcgaataatagcaggggagctactgctagctacgtacctgctccatcctccattatcctttatttcaattcgctcatcatcgtcgtgtgtaaattaaataaataaagctcttgtgcccatattaaatttacttgtcatggtcgtgccgtgtcaaaaaaaaaaaattttattctaatataatatataaaaaatttataatgtttact

SEQ ID NO: 262530 - DNA, 1258 bp, Zea mays
cgagcatgcacgcacgctgatcatccatctataaatacgccaattagcaaactagggcggctcgcggcaggccaatggagaaccctccgagcatcctagtgactcccatggctccggccatgtcggcgcagttcacaagaataaccttcagcaacctgtttgtccgtcgggctggcccaggcagcacggagctgaccgtggagggaaggccatccgaccagctgggcaggagaaacctcactgacagccccgtatttgacggccgtggccctgacgccagcctcgtggctcgcgtacagggagtcgctacccagatgggcgacgtgcgccagttgtacaccgtcgtgttccaggagaggccgctcaagggctccacgctcgtcaccgaaggcgcgatgacagaagggtcagacgagtgggcgatctacggtggaactggagtgttcgcgatggcgagaggcgtcataaggagaacgtttcttgccgacacgagcggcgggaactccgacgagcttgccgtggaggttctctgcccggtgttccgcccggcggcgtttggctcatcgtcgtcacagccagcagcaaaggacatcagctccaccgtcgtcgtcaccaaggtcggagtgtggggtggagagggagggtcggcgcaggacatcgcgacgacggagccgccgaggcgtctgcagagcctgaccgtccgcgccggcgttgccgtggactccatcgagttcacctacagtaccgacacaggtggccagacgcgcaccgctgggcgatggggtggacttggcggcaacgtccggaagctcgatcttggcgacgctgaatacgtcaaggaagtttctggaacgtacggcgcattcgaaggtgcgactaccctgacctcgttgaggattgtcaccagcaccgccagagcttgggggccatggggcatcgagagcgggacacgtttctgcatcaccgcacccatcggcagcagcatcgtgggattctatggacgcgcgacgaccaggctcgtcgctgcgatcggtgtctacctgcgccaactttagtctggttgcagcagcaggacgggtactacagatatatatgctagataaaggtcttatatatatgtcatatgacctatcatggtcttatatgttcgatcgtcgtcgtgtctgtatgtacatacatggctgtcaaataaagctctttgcattctgataaagaaacaaaccaacaaggcacaacagctgcaacaactcaagcaaag

SEQ ID NO: 262531 - DNA, 1275 bp, Zea mays
ctcgagccgaatcggctcgagaatagaagaagaagacgacgacggcggcggcaccgcgacgtaggtgcatcacgctagctgtagcttgcagagcgtcgtctgtaaatacgtagcccttccacaagcgaggcaaggggggagagcatcgtcagctagcagagagagtgcgtacaactaagcaatggcggagaaccctgctccgagttccccgctagtgacttctcccgacgccgctgcgccgcctctgccagcggagttcaccaagctcaccttccgtagcctgtacatccgtcggacaggtccaggcagccgggagatgactgtggacgggaggccgtctgaccagctgggacgacggttcgtgagcgactttcccatatacgatggccgtggctccggcgcccacctcgtcgctcgcttgcagggagtcactgtccaaatcggcagctcgcaccagctagtcagcatcgtcttcgaggccgagaggcttaagggctccacgctgctcaccaacggagtgataacggatgggtcagacgagtgggccatctacggtggcaccggggtgttcgccatggccaccggtgtcatacgaagaaggtttctcgccggtagcaacgacgggaactctgatgagcttaccagcatcgaagttttctgcccggcgtttggctcggcacaacaacagccaaacaagcaggactccgtctctgtcaccaagattggggtatggggtggaggtggagggtcggcgcaggacatcacgacgacggagccaccacagcgtctgcacagcctctccgttcgaactgggtttgccgtcgactccatcgagttcacgtatactgatagaggtggccagaggcgcactgctgggcgatggggtggacttggcggcaaccttcgaacgatcgatcttggcgacgccgaggttgtcagggaggtctcaggaacatacggcatgtttgaaggcgccaccacgctgacctcgatcagaattctcaccagcagcagaacctgggggccatgggggatcgaggacgggacacgtgtctgcatcaccgcgccgatcggcagcagcatcgtggggttctatggacgctcgaccagcaggctcgtcgctgcgatcggtgtttacctgcgtcaacaactctgatctggtcatctagctatcatcgtcgtccggtgctgtcgtatgtgtgttcatgtcaaataaataaaagtggtcttgtgtcaaaaaaaaaaaaagggggcgccccctaattgggagcctgg

SEQ ID NO: 262532 - DNA, 872 bp, Zea mays
gcatgcaagcggcttgcattgttcgtttgctcgatcgttgcaggtaatggagaaccctgctccgagtatcgtagtgccccccatcgccgcacctgtatcagcgaacttcagcagactcgccttccgcaacctgtacatccgacggacgggtccagacagcagggagatggtgactgtggagggaagaagaggctctagtgatcagacaggcgacatgaggtacgtgagtgacttccccgtctacgatggccgtggctccgacgccgtcctggtggctcgcgtgcagggcgtcacaaccacgttcgggaactccaaccagttcttcaccgtcgccttcgaggccggcagggctcaagggctccacgctccttaccgaaggagtggtgacggatggatcagatgaatgggcaatctacggcgggaccggagagtttgctatggcgagaggtgtcgtcaaaagaaggtaccttgccgatagggatggcgccgggaacactgacgagctcagcatgcaggttttctgcccggtgtttggctcatcacagcaaccaaacaagcaggactccagcatctctgtcaccaagattgggttatggggtggcgaaggagggtcggcgcaggacatcacgacgacggagccaccgcagcgcctgcacagcctcaccgttcgtgccggtgccgccgtcgactccatcgagttcacgtatactgacagaggtggccagaggcgcgctgctgggcgatggggtggacttggcggcaaccttcgaacggtgagcagagcagcaagtccctacgaccctacctacctttgattcatgcagcatgtatatcttcctcatgcacatgcgtgcagatcgatcttggcgacg

SEQ ID NO: 262533 - DNA, 585 bp, Zea mays
gctgctcgcctgcgggtacgtctccggacttcctggctggacccacccacgctttgtttcgtgggtggcggccttgactggggtgtggatgacttgaaactaacagaagctttcaacagctttggagaggttactgaagcgagggtgaccacacacagggagactgggaggtcaagaggctttggctctgagaactactccgacagcgatgctgccaaggcagctattcctgcaatggatggcaaggaaatagacgggcggcatgtacgtgtcaacatggctaatgagagacctgctgggaaccgtggtggtggcatctatggtggcggccgctatggaggttgcatctacagcggtggtggcggctactgaactggttgctattgtggtggcagccaaagctatgatgcttgaggggggcccgatcctattaagtgctttatcaaccaagatatttgaaataatgaactttaggacttggtatgacgttttatgttaaccattgacaggttccgcgattcctgtccagttaaaacgtccgaactcctatataaaaaatatcccgtattggttttggttccttcg

SEQ ID NO: 262534 - DNA, 591 bp, Zea mays
cggacgcgtgggcggacgcgtgggcggacgcgtgggttccccgtctacgacggccgcggccccgacgccagccttgtggcccgcgtgcaggggatcaccagcgaaatcgggaacgcgcaccaactgttcgtcgttgttttcgacaccgacagctgttcgtctcgccctgcatatgcgtctccctcccccccggctcaagggctccacgctcgtcaccaatggcgtgataacggccgggtctgacgagtgggcgatctacggcggaaccggggtgtttgccatggcgaggggcgtcataaggagaaggtatctcgccgacagggccggcgggaacactgatgagctcaacatggatgtcttctgccggccgtttggctcacagtcagagctgcaagattaggtgcttctgcaggctaataaccagcggcggccgttctgccgtttggagctgaatatgttttgttggatatataacatactcctatatgaatctttgcgcatatagatgcaggtgcaggggcagggctctagcgtcaccaagattggactatggggtggaccgggagggtcggcacaggacatcacggcgga

SEQ ID NO: 262535 - DNA, 370 bp, Zea mays
atcacggcgcccaacggcagcagcatcgcgggattctatgcgcggtcgggaaccaggctcgtcgacgctatcggtgtttacatacgtccagtggtgccaggcaggcctcggtgaaccagcgagctagcccagtctgatcgactcagctcgctcgtattacgagctgtaggattatggttcgccttgacttgatgcaggctacctgcttcagcatgctcgattcactatcctttaattcggtcatcgtcgtcgtcttgtcttgtgtcaaataaagctcttaattgtgcctatacacggctctcatggttgtgccgtgtctctatatgttagggcttatgtatatgtggagatcaaataatggccttgcaat

SEQ ID NO: 262536 - DNA, 572 bp, Zea mays
cccacgcgtccgcccacgcgtccgaggtaatctggtggtccgatgcgcggaagttttgttctgttgttttggctataataaaattagccttcatttattggaagtgcctttactttctgaagttttcaaaggggagggaaggaaaattgatgggcggcgggtccgtgtaaacatggttaatgagagacctgctgggaaccgtggtggtggtggctatggcggcggcggttatggaggtggtggctacggaggtggcggcggctacggaggttttggctatggtgggggcagccaaagctatgatgcttgaggggggcaggatcctattaggcgcattatcaaccaagatttttgaaataatgaactttaggacttggtatgacgttttatgttaagcgttgtcaggttttgctattcgtgttatgctgaattgttggaactcctagatgcagaatcttacgtattggttttggttccttcgagaagtgcaaatgcaagacgcatctattcccattgtgtgaaaaaaaaaaaaaaaaaaaaaaaaaaaaaaataaaattaaaattaatataaa

SEQ ID NO: 262537 - DNA, 385 bp, Zea mays
cggacgcgtgggcggacgcgtgttcctaaggcgcgatgacggaagggtcagacgagtggtcgatctacggcggaactggagcgttcgcgatggcgagaggcgtcataaggagaacgtttcttgccgacacgagcggcgggaactccgacgagcttgccgtggaggttctctgcccggtgttccgcccggcggcgtttggctcatcgtcgtcacagccagcagcaaaggtgagagcgagcgagcgagcgagaaaccgtttctccttcttgctcatcatatcatccgatgaacaacactgggatggtcatggatggatcatggatggatggatggatgcaggacatcagctccaccgtcgtcgtcaccaggtcggagtgtggggtgg

SEQ ID NO: 262538 - DNA, 597 bp, Zea mays
cggacgcgtgggcggacgcgtgggcggacgcgtgggctcacttcaggtggagcctataagggcagcgccgaggtcacccagaacaactgccgcaccgacagagccaatctcatctcttctgccccatggattaagatcccctacccactgcaatggggtgcgccgaccttcaacgccggccagtcatttgggattgtgtctgctgttttggtctcgctggtagagtccacagcctcctacaaagccgctgctcggcttgcgagtgcgactccacctccggctcacatcctcagcagaggcattgggtggcagggaatcggcatcctccttgacgggctctttggaacggggactggctccactgtctcagtggagaacgtcgggttgcttgggtcgacaaggatcgggagccgacgggtcatacagatctcagctggcttcatgatctttttctccatgctggggaaatttggagccttgttcgcttccatcccgttcaccatctttgcggccgtgtactgcgtcctgttcgggctagttgctgcggtggggctgtccttcctacagttcactaacatgaactccatgcgcaacctc

SEQ ID NO: 262539 - DNA, 769 bp, Zea mays
tctttttccttatccggtgtcgtgcgcatgtgagatctagggagaggaagaggaggaagggttgtggggaccgggggtgcaagatggcggattcacctgcaactacaagaaaagaaagagcgagagatttacagaaaccttcagagccgcggaggaggaggaggagattaggaggatctctacggcgctgacggattagttaaggaacgaaatatcacatcgtgtccggtaaccagattcagatgtgggcaccatgcgtgggtgcagggccaggccgaggtgaaagagattcgacgattgagaatacatcaaagaataaaaatgtggaactcggattttcagatgaagagcgtgaccaagaatttcctgattttccatcatttattccattcttacctcctctgagtgcagctaacctaaaggtctactatgccacacgtttcaccatcatagttgggataatggtgttcggtggttttcttgcaccaatcaagttaaacttggtctaggggcacatcttatgaagactccatccgcagcattcatctgtcgatgtagttgagaagtgcactcaggttatacatccagtaaagagcaagacatttgaaagcttatgggccagctgtgttgctattgatgcaagcgaaagttggctgatgaattctctatgcctacttctagagtgatgttcaaagaggttgacgctccttcaccatccccagctttgtgaaatggaccacgggtagccatttaagatgacaaagccaca

SEQ ID NO: 262540 - DNA, 751 bp, Zea mays
  unsure (1)..(751): unsure at all n locations
cttagccggagtcgagcgtggggataactttggagaggcagtggttgccttgccgccgccaccgggggtgcgagatgacggattcacctgcaactacaagaaaagaaagagtgagagatttacagaaacctccagagccgcggaggaggaggaggagattaggaggatctctacggcgctgacggattagttaaggaacgaaagatcacatcgtgtccggtaaccagattcagatgtgggcaccatgcgtgggtgaagggccaggccgaggtgaaagagattcgacgattgagaatacatcaaagaataaaaatgtggaactcggattttcagatgaagagcgtgaccaagaacttcctgagtttccatcatttattccattcttacctcctctgagtgcagctaacctaaaggtctactatgccacacgtttcaccatcatagttgggataatggtgttcggtggttttcttgcaccaatcgtaagtcacagttctcagttttggaaccaccgatggttattgtcatagttttgttttgccatatatagattgctttgaatgcttaacaagttgatgtgctctcatgcggctggaagttaaacttggtctaggggcacatcttatgaagactccatccgcagcgttcatctgtcgacgtagttgaggtactaccactttttcatggtccattaatgtatcaaggttcatctagcaacagttgggactgctaggatctggngtgcgcaatg

SEQ ID NO: 262541 - DNA, 1117 bp, Zea mays
cggacgcgtgggcggacgcgtgggcggacgcgtgggcggacgcgtccgcccacgcgtccgcccacgcgtccggagcgatcccactcccgatcagcagctgatcgctcactcttgcagctcgatcattctttagctgctctagctctagccctagctagtagctagccactcggtcgtgtagtcatcagccttctgatcgtcacccatggccactgccgaggtccagaccccgaccgtcgtggcgaccgaggaagcgccggtggtggagaccccggctccgcccgccgtcgtgcccgaggaggctgcccccgccgccgaggccaaggtggaggagccagctgccccggcggagaccgagccagctgccgccgctgagcccgaggcggcccccgtggcggcggaggaagagacgccaaaggaggaagagacggcaaaggaggcggagccggagccggagccggcggcggctgaagaggtgaaggaggaagcggcagcgcccgctgccgagacagaagcagaaccggcagccgctgagcccgaggctgctgctgccgaggagcccgcggcggctgagccggccgctgaggagcccgagaaggccgagccggccgctgaggtggccgagaaggccagcgagtgaggccgtgcgccgtacgcgcactgcagcggcggacagcgggtcgggagatcgatgtctcagcgtgcgcgcgtggcgtgccagtcgcgtcgcgcgcgctggcgcctactgttcagtagaacgcgaacgcgacggtttctctccatctctctgtgtgtgacagtgtgtgtgtcgtagctatagcagtgcccggtgcggactgcgagtggcatgggctaaataaagtgtgcgtcgtctggtctggtggtggtagtggggcgcggtgccccatgtgtgccgctgcagcttgtgtctctgtgttgcttcatgttctctgtctatctactctcatgtatggcagtttgggtacggccgggtatatcaagcatgttccgtcttctttggttaaaaagttggctgcgttgtgggggtatgattatggatatgatcttctttatagatgcagccagttgttcaaaaaaaaaaaaaaaacaagcaagc

SEQ ID NO: 262542 - DNA, 777 bp, Zea mays
cacacgcgtccgcggacgcgtggagcgatcccactcccgatcagcagctgatcgctcactcttgcagctcgatcatactttagcagctctagctctagccctagctagtagctagccactcggtcgtgtagtcatcagccttctgatcgtcacccatggccactgccgaggtccagaccccgaccgtcgtggcgaccgaggccaaggtggaggagccagctgccccggcggagaggtgaaggaggaagcggcagcgcccgctgccgagacagaagcagaaccagcagccgctgagcccgaggctgctgctgcggatgaggagcccgcggcggccgagccggccgctgaggagcccgagaaggccgagccggccgctgaggtggccgagaaggccagcgagtgaggccgtgcgccgtgcgcgcactgcggcggcggacagcgggtcgggagatcgatggctcagcgcgcgcgcgcctacatggcacgggcttgctgttcagtacaacgcgaacgtgacggtttctctccatctctgtgtgtgtgacagtgtgtcgtagctatagcagtggctgtcgcgtggactgcccggtgcggactgcgagtgacatgggctaaataaagtgtgcgtcgtctggtctggtggtggtagtggggcgcggtgccccatgtgtgccgctgcagcttgtgtctctgttttgcttcatgttctctgtctatctactctcatgtatggcagtttgggtgatcttctttatagatgcagccagttgttcatcg

SEQ ID NO: 262543 - DNA, 552 bp, Zea mays
cggacggtgggcggacgcgtgggctttggcgcacgcgcgggagcgatcccactcccgatcagcagctgatcgctcactcttgcagctcgatcattctttagctgctctagctctagccctagctagtagctagccactcggtcgtgtagtcatcagccttctgatcgtcacccatggccactgccgaggtccagaccccgaccgtcgtggcgaccgaggaagcgccggcggtggagaccccggctccgcccgccgtcgtgcccgaggaggctgcccccgccgccgaggccaaggtggaggagccagctgccccggcggagaccgagccagctgccgccgctgagcccgaggcggcccccgtggaggcggaggaagagacgccaaaggaggcggagccggagccggcggcggctggagaggtgaaggaggaagcggcagcgcccgctgccgagacagaagcagaaccagcagccgctgagcccgaggctgctgctgcggaggaggagcccgcggcggccgagccggtcgctgaggagcccgagaaggccgagc

SEQ ID NO: 262544 - DNA, 1052 bp, Zea mays
tcgtccacgcgtccggagcgatcccactcccgatcagcagctgatcgctcacgcgggcagctcgatcattctttggctgctctagctctagccctagctagtagctagccactcggtcgtgtagtcatcagccttctgatcgtcacccatggccactgccgagcctcctgcgttaataaccacggaggatgctaagattaatttgtactcgcgccgtgcgtgcacgtgtgcgcaggtccagaccccgaccgtcgtggcgaccgaggaagcgccggcggtggagaccccggctccgcccgccgtcgtgcccgaggaggctgcccccgccgccgaggccaaggtggaggagccagctgccccggcggagaccgagccagctgccgccgctgagcccgaggcggcccccgtggaggcggaggaagagacgccaaaggaggcggagccggagccggcggcggctggagaggtgaaggaggaagccgcagcgcccgctgccgagacagaagcagaaccagcagccgctgagcccgaggctgctgctgccgaggagcccgcggcggctgagcccgaggctgccgccgccgaggagcccgagaaggccgagccggccgctgaggtggccgagaaggccagcgagtgaggccgtgcgccgtgcgcgcactgcggcggcggacagcgggtcgggagatcgatggctcagcgcgtggcctggcagccttgtcgcgcgcgcgcctacatggcacgggcttgctgttcagtacaacgcgaacgcgactgtttctctccatctctctgtgtgtgacagtgtgtgtgtcgtagctatagcagtgcccggtgcggactgcgagtgacatgggctaaataaagtgtgcgtcgtctggtctggtggtggtagtggggcgcggtgccccatgtgtgccgctgcagcttgtgtctctgtgttgcttcatgttctctgtctatctactctcatgtatggcagtttgggtacgggtatatcaactatcaagcataaaaaaaaaaaagggcggcagatagcgatctagaactag

SEQ ID NO: 262545 - DNA, 392 bp, Zea mays
cgagctcgagcgatcccactcccgatcagcagctgatcgctcactcttgcagctcgatcattcttagctgctctagctctagctctagctctagcctctagccctagcccctagctagtagctagccactcgatcgtgtagtcatcagccttctgatcgtcacccatggccactgccgaggtccagaccccgaccgtcgtggcgaccgaggaagcgccggtggtggagaccccggctccgcccgccgtcgtgcccgaggaggctgcccccgccgccgaggccaaggtggaggagccagctgccgccgctgagcccgaggcggcccccgtggcggcggaggaagagacgccaaaggaggaagagacggcaaaggagccggagccggccgcggc

SEQ ID NO: 262546 - DNA, 569 bp, Zea mays
aggataacctgcagtcgcccccaaatttccccgaaccaaatcactcccaccgtctccacagcaaccagcacacatttccctttggcggatcgaaggaaggaaggaggagatgggtggcggcatggaggtgcacaaaaaccggtggatcgaagagtggaacgccggccgggagaacctcgagttcaacttccgctggacccgccgcagcctcgccgtcgtcggcctcttcggcctcgctgtccccatcctcgtctacaagggcatcgtccgcgaattccatatgcaggacgaggatgcaggtcggccatacaggaagttcctgtaagcggcgtccagggctgcaggagacgtcgatccctcgaccggggctgcgaggaggggagtttccattcagtttgtgtcggtattgttttagtctgaatctgatggagcagtttggaatgctgaactattgtgcctgatccaaatgaataaggtgtaatgactcgtcttttcaattactgaaactgaacatgtttgaatttatctggtcacttgtatggtaaaatagcagcgttgtcaattgtcat

SEQ ID NO: 262547 - DNA, 517 bp, Zea mays
ttccacgcgtccgcggacgcgtgggtggagttctgccctggaggtgacctacataccctaaggcaaaagcagcctggcaagtatttccctgaacaagctgccaagttttatgtagcagaggtgcttcttgctctggaatacctgcacatgcttggtatcatataccgtgacttaaagccagagaatgttcttgtgagggaagatggacatatcatgctgtcggatttcgatttatccctccgatgtgctgtgagccctactcttctcagatcttctaaccccagtggggataaccaaaagggcaacccagcttactgtgtgcagcctgtgtgcattgagcctgcctgtatgcagccttcttgagtcacgacaaccacatgcttatctcctcgctctctctctgccaaatccaaggaggaaatcgatctactggcaaaggcagactctgcaaaataggtcagaccactttctgagcttgttgcataagtcgcagatgcaaggtctatgtcctatggtg

SEQ ID NO: 262548 - DNA, 955 bp, Zea mays
cggacgcgtgggcggacgcgtgggcggacgcgtgggcggacgcgtgggcggacgcgtgggcgcgctcggcgcttccccacccaaaaaggaaaaccaaccaccactcccaccaccctccgcctccgcctgcgccacagctgccgattcgaaagccctcgtcctgacccctcgcaaaaccctagctccaaccaccatgaagggcaaggccaacgcctccaagaaggatgagggcaggctccgggccggcggcggcggcgccggaaagcgcaagaaggccgccgcgagcggcaagcccaagcgccctccctccgccttcttcgtcttcatgtctgaattcaggcaggagtaccaggcgcagcaccctggcaacaagagcgttgcggccgtgagcaaggcagcaggggaaaagtggcgctctatgtcagagcaagagaagcaaccctatgtggaccaagctgggcagaagaagcaggactatgagaagactaaggcaaatattgagaaggagagcacaagctcaaagaaggctaagactgatgacgacgatggctcgaagtccgaggtcgatgatgaggatggcggtagtgacgaggaaaacgacgacgacgagtaaatagtatctccgctgtcgtgaggtagcaaatcgattgttaggtccccaattagctcactggtttgctgcctttaaatgttaagttgtttcaaacaggtgtttatgaaggggatctattagtttcgcgatgtcgttagtttagtgcattagcaaagaaaaagccgaatgctgctagctgttctgttgcttttcttttgctaaccacttgtgtcacaactttctgtacctgcttcattgactaatctagtgactagtcagttattggttcaaaaaaaaaaaaaaaaaaaaaaaaaaaataaataaaacaacaaaacaagcatagaaaaactgataaccaacaag

SEQ ID NO: 262549 - DNA, 410 bp, Zea mays
  unsure (1)..(410): unsure at all n locations
tcacaacgttaacaaagcagctcacttcaggtcaattcagccatgaggggcgaggtcccatcantacccatgtttttgctcctcctggccttgggtgctgaggccgacctctgcgtcacgcgtagcaggaccttcaaagggtggtgccaccagagcgagaactgcatcaccgtgtgcaagagcgagggcaataccggcgggttctgcaagctcggggcttgcatgtgcaccaaagagtgtgtccgaagtactgacgctgctggtgctaataaagccccacagccgcattttgagttgatgagtagtaattgaagaattattgttttggtcttttccttttatctactttattttccttttttttcctttatcttctattctatttatattaatttttctctattcctttt

SEQ ID NO: 262550 - DNA, 412 bp, Zea mays
caacaaagcagctcacttgagttcaattcagccatgaggagccaggtcgcagcagtagccatgtttttgctcctcctggccttgggtgctgaggccgacctctgcgtcacgcgtagcaggaccttcaaagggtggtgccaccagagcgagaactgcatcaccgtctgcaagagcgagggcaataccggcgggttctgcaagctcggggcttgcatgtgcaccaaagagtgtgtccgaagtactgacgctgctggtgctaataaagccccacagcagcatttgagttgatgagtagtaaagaagaacgcttttgttatgccagcgcaagctctagaattcgaggccgagatgaccaaaaataaatgattttgttactctattatatgagcgaatatcgggtgtggttgttctc

SEQ ID NO: 262551 - DNA, 459 bp, Zea mays
attcccggtcgaccgactcatacttccactcgtacttccactcatcctcacacttttacggtcctagatctcgatctgggaccagtcggcattttcacagagtctacattgcccatatatctctctattagattcacgcgcagcaactcggagattcacactccaccattgactctccatcgaacctacctatatcctcccaatcaagccctttcgcccatctgcgcctcgcaaccccatcctacaatcgctacacctacattccgcgccttcatctcccgcatctcctcgtctctccatcacaccttctcacatcgcctaccgtgtactgagctcatcatccctaacttcatgtaccgacccgacaccctcgccgaagcatactctccaatccgctagaacttcccctactttcacgtcaattacctaaccctaatccagtactcgctagcggactct

SEQ ID NO: 262552 - DNA, 413 bp, Zea mays
cgaccctacaaagctgcgatcaggtgtagtcgtgtagagcggcggcggcgtcgtgcgcggggcgctgtggtgaagggcgaactgagaacactaggcagccagaggcacttagccgagccgcgagtcgacaggaggatcggaggccggcgagtggttggcgcaagttgtcaggggcgtcgccggagtcgagcggcagcgggcggcctggagcgggggcgatggggcgctacgagctcgttcgcagcgacgacgcgcctgccatcgccggggatctggaggctggcaccgccgcgccacgcgacgactaccccaaacgccgcgggtccgcgccgtctccggcgccggcgccgactcggcagcgcctcgtctcgctcgacgtgttccgtgggatcaccgtgctgcttatgatcatc

SEQ ID NO: 262553 - DNA, 595 bp, Zea mays
ttataaccattacccgcaccagaacccctggttcaatggtgctggcgccccccctgtggctaatggtaggggggggagttacactttctcggccgccatcggagggctgctcccgttgctgagcttccaggtgcacggattcccgcaggcgactgcctatgggcctgctgcagggtttccttatgggtacggccattctttccatgggtggcatggccatggcttcccgcgccaggcaccacaaggccagcaggtcgatgcgtacttgaaggtgctgctgctggcagttggtgtgcttgtaattgccagcctaatcgcattttagattatgtatggctggcgatgtcgctgatccttgttggtgtgtaccgtagttctagcatcattgcatcttagatggctcccaaagtttgatgtcaatgtgtagagtattgtggatgcttcggctagtaatagtacttgtgataattggtggcagctgttattcattgtgtaaagttgctatcgaaaattataggtgcatctgttgtgttcatgccttgaactttggtcatgttcatatttcttcaatgaagtttccctggaatgttctgtt

SEQ ID NO: 262554 - DNA, 406 bp, Zea mays
gctgcagggtttccctatggatacggccattctttccatgggtggcatggacatggatatggcttcccgcgccaggcaccacaaggccagcaggttgatgcgtacttaaaggtgcttctactggtagttggtgtgcttgtaattgccagcctgatcgcattttaaattatgtaaggctggcgatattgctgatccgttggtgtgtaccatagttctagcatcattgcatcttagatagctcccaaagttcgatgtcagcgtggagataagtagacaagttgtgataattggtggcagctggtattcattgcgtaaagttgctatcgaaaattataggtgcatttggtgtgttcttgcgttgaactttctccatgttcatgtttcttccaagaaaaaaaaaaaaaca

SEQ ID NO: 262555 - DNA, 702 bp, Zea mays
gcacacagcgccgtcttctggagcagcgtccgaaagtgtgtggagaacctgcccgatccctcccgccgcctccgacctcaccgtcggcgggctcagcttgttcctggggtctgatcagccatgttcaagaaacctgttgatgtgaaaaccatacagcgcttgtctggggcagacaaaaagaagctaagaagaactgccaagggaaggtttccacaggcttctgatgctgaccttgatgccatccttcctcccaaggctgagataacagttgctaagtacccgaaccatgttcttgtatatggcatagagggagagttcccaatgattttcaacactgacgcaagaggtcatgaactgtttcctacagtttatgcgctttggaaggtcccccatctgttgccagcttttacgcttaaaggtggtgaggtttcacgtttcgtgattggtggcgctgatctgatgtttcctggtatcagcatacctccagaagggtttccatcttttgaagctggccaaccatgggcagtaaaagtatcctgggaaccctgctgcaattgcgtgttgggagcacaactatgaggcgtactgaagctgtgaaggcacgactacgtggcaaggctttaacgtagatacatcactacatggatatgttatggcattcggttgatggttgttttgttcctaatgaaggattttttgatg

SEQ ID NO: 262556 - DNA, 929 bp, Zea mays
tcggaattctctggtcggcggacgcgtgggttcaggcttggagaaagaagaaaggcatagcagcgggcagcggcatgggcaccagccccgtcatccctgcgacgatgctcttcgtcgctcttcttgtcgctgtctgcttcggcgccaccgccgccaggtccagccacgcccgccacaccgacgccgacgacgcgattcgtctccccagcagctttggcgctggtggtcgaccgtggaattgctgcgactccgctatcaaggacgcctccctgccggcgtggcgctgcaacgacgtggtggacaagtgctccgccgactgccaggactgcgaggcgtcgccggccggcgacggcttcgtctgcggtgactttatcttaagcctgaccgagcccccggtctgcacaccgaggccgtgggactgctgcgacagcgtggcctgcacaagggactacatccccaactgcatgtgcctggacaaggtggagtcgtgctcgagcaactgcgaacggtgcgagtttctgtatcattcggaccctcctcgcttccaatgccgagacatcttccacggctatcctggtcccaagtgcaggacatggatcagtacgagcaactagctcagctcagctacttgctaaaagtagcgtagcgcagcgcgcgcggctacttgctagtatacgtacgtccacaaataaaaataaaagtggctagcgtacaaagctaacatctggttgttcgtcccgacatggacgattagcctagctcgatcgctagctgctgccactctcgttcgatttaatttcatccccatgtgtggcggtgtagggagtgtggatatgatcatccaataaagtagtctactgaaaatgaatagtcgttgatcatattaatatacatccatctcattttgttaaaaaagaatgaggtcgtgc

SEQ ID NO: 262557 - DNA, 881 bp, Zea mays
  unsure (1)..(881): unsure at all n locations
gcgccctcgcgtacgcccacgcgtccgcccacgcgtgcgcccacgcgtccggccaacaactaaaggcaggcgcggcacaccgcgacaccgtaccggcctagacacttggagaaaggagaagcagcgcagcggcatgggcaccagtcccgtcatccctgcgacgatgctcgtcgtcgctctccttgtcgctagtagtactgtctgcttcggcgccaccgccaccgacaccgacaccgacggcgccattcgtctccccagcagctctggtgctgttggtcgaccgtgggagtgctgtgactatgtcaccaaggagccgtttatcaggccgccccggtggcgctgcaacgacgtggtggacaagtgctccgccgactgccaagagtgcgaggagtcgccggccggcgacggcttcgtctgccgtgactggatcttcagcctgctcgagcccccggtctgcacacccaggccgtgggactgctgcgacttcgccgtctgcacaagggactacatcccctactgccagtgcggcgacgtggtggagtcgtgccccagcaactgcaaagcgtgcaagcttgtggagtcggaccctcctcgctaccgatgcctagacgtcttccacggctatcctggtcccaagtgcacgccatggatcagttagagcaattagctcagctcagctacttgctaaataaataaataaaagtagcgcagctcagctacttgctagtacgtagtacgtccccaataaataaataaaagcggctagcgaacaaagctgtcccccctgggtgttcgtcccgacatggacgatcagtcgattagactagctncatcgctagctgctgctactctatntcgcgcaatcgtgcgtcattaaatat

SEQ ID NO: 262558 - DNA, 441 bp, Zea mays
acatcccctactgccagtgcggcgacgtggtggagtcgtgccccagcaactgcaaagcgtgcaagcttgtggagtcggaccctcctcgctaccgatgcctagacgtcttccacggctatcctggtcccaagtgcacgccatggatcagttagagcaattagctcagctcagctacttgctgaataaataaataaataaaagtagcgcagctcagctgctggctagtacgtagtacgtccccaataaataaatagaaccggctagcgaacaaagctaactcctgtttgttcgtcccgagtcccgacactctttcgcgcaatcgcgcgtcattaaatataaataataactagctatatacccgtgcgttgcaacgggggacacttgtttacacataggtcattgtttagtgataatatcaagaatcaactcaacaatcataac

SEQ ID NO: 262559 - DNA, 888 bp, Zea mays
agttcttaaaaacgatcataagtttcggcaggtaactcaagaacagaagggagaagtccaacactatgggctatcaatttactcgtgggatgaatttctgtccctggcggctgaccaagaatttgatcttccagtcaaggagacggcagacatatgcactataatgtatactaactggaactactggtgacccaaaaggagtactgatatcaaatgctagcattatttgtctcattgcaggtgtggaccggttgcttaactatgtaaacgaagagttggcagaaagcgacgtttacatgtcttacgttcctcttgcacacatctttgatcgtgttgtggaggaattgtttattttccatggtgcctctattggattctggcaaggggatgttaagctactagttgcatcgatatcggcgtgctgaaaccaacaattatgtgtgctgttcctcgtgttcttgatcggatattttctggactacaagctaaaatttcctctggtgggtttttaaagagtacaatgtttaatcttgcttacaaattcaagcagtttagaatgatgagaggagctaagcacaatgaagctgcttccatatgtgacaaagtagtttttagtaaggtgaaagagggtcttggtggaaatgttagagttattttatctggagctgctccacttgctacccatgttgaagaatacttgcgtgtggtcacatgtgcacatgtcgtacaaggatatggcctcacggaaacttgtgctggatctttcgtctcgctaccagatcaaatgtccatgataggaactgttggccccccagtgccaaacatcgatgttcgtctggagtcggtcccagaaatgggttatgatgcacttgcgagcaaacctcgtgg

SEQ ID NO: 262560 - DNA, 1107 bp, Zea mays
ccggctcacgctcaccccgcctgctctctcattctcgacgatggctgggcgaccgccgccgtcctacgccaggtatcccgcgcttcaaggcggcaggcccttcgccggcgaagagcacccatcagattcccgagttgtttatcccagttatcttgcacccgagggctccgtagcatcttattatgcttcaagacctgttctacctgttggatcagatgttcttagaaacgatgtaatttctcaaccaagaacgcatggttatgatggtccagcaagagtgaccaatcctgctttggctggcctgactggactacctgctggagttacggcacgggggcctagtgctctggaagacccgtctttggctggtctgagtggattagctccagtccgggcaacaggcggagctacggcacgagggtctggtgctttggaagacccgtctttggctggtctgagtggactagctccagccagggcactgggacctagagctttgaaagaagaactggatgttgttgggagaagttcttcagtaggcagaggtgctagcattccagatgttgagcaccacagctcaattccaagctttgatggaccctcagaaaatgaatccaacattctttttgttgattgtcttcctactgattgcacaaggagagaagtagctcatttgtttcgttgttttcctggcttcaaggacatcagagtagtgcacaaggaacccagacgtagtggtgacaaggcctatgtcctgtgctttgtggagtttgagaacgcgaaattcgcacgcactcccatgcaagctttacaagggtaccgcttcgatgaccggaagcctgacgaccggtgtctcgagatccatttcgcaaggttcccgttcgctctgcctggcgccggcgccggcgccgcccgggaccacaggaaacggtagctggtagcagcgtggcctgcgcagtgggccctgcagtagatggcctgcgatcaacatgtatggtatctgtatgcgcctgttttgttgggcagttagatgaagtcccctactatcagtagtagtctcctgtgaccccaacacgtggaatgataagactgcctccttttttttcc

SEQ ID NO: 262561 - DNA, 893 bp, Zea mays
tgggggatcgaggccacgccgctgcgtgggcgggtgggcgcgcgtctgacgtgccgtgccgtaccatggctgccaggctgcgccgctcgcctatatcctcccctcctcccccgccttccctctgcatctccctctacccgccgccacattcatcagtagaaaccacctatcctgcctgctctacctacctccgctccccagccatgacggtgctggacgccgagtcgcggttccatgtcctggcggtggacgacagcatcatcgacaggaagctcatcgagatgctgctcaagagctcgtcttaccaagtgaccacggtggattccgggaacatggcgctggagctgctggggctgagggacaacggcgcggaggacgcgtggccgccgtcatcctcctcctcatcttcgtcgtcgtcctcccctgaccatcaggagatcgacgtgagtctcatcatcactgactactgcatgcccggcatgacaggatacgatctgctcaagcgagtgaaggggtcctcatcgctcaaggacattccggtggtgatcatgtcgtctgagaacgtgcctgcccggatcagcaggtgcttgcaggatggcgcggaggagttcttcctgaagcccgtgaagccggccgacatgaagaagctcaagtcacacctgctgaagcggaagcagcccaagcagaagaacaagcctcaggcgcaggcggtggagtctcctgagcagcagctggacccgcatccgcagccggtgcacgagccggaggaagccgcagcagatcgcaacggcgtcaacaagaggaaggcagcggccatggaggaggggctgaccgtggtggtgacggcgccggagagcaccaagccgaggaggctgtctacgaacaagctgact

SEQ ID NO: 262562 - DNA, 430 bp, Zea mays
cgtctcgtccgctctgggcttggcgcgatgtgagcgcttttttttgcctcagaaaccaaggtgcttgcaagacggcgcggaggagttcttcctgaagcccgtgaagctggccgacatgaagaagctcaagtcgcacctgctgaaacggaagcagcccaaggaggcgcaggcgcaggcgcaggcgcaggcgcagcagggacaggcggtggagctggagcctgagcagcagctggacccgcgcacgcagccggcgcacgacgcggaggaaaccgcggcagagccgccgccggccgcatccaacggaaccaccgatggcggcaacaagaggaaggcggcagccatggaggaggaggggatgctggccgtgatgacggtggcggcgccggagagcagcaccaagccgaggctgttcaccaccaccagcagcctg

SEQ ID NO: 262563 - DNA, 475 bp, Zea mays
aagggagatcgacgtgaatctcatcatcactgactactgcatgccaggcatgacaggatacgatctgctcaagagagtgaaggggtcctcctcgctcaaggacattcctgtggtgatcatgtcgtctgagaatgtgcctgcccggatcagcaggtgcttgcaagacggcgcggaggagttcttcctgaagcccgtgaagctggccgacatgaagaagctcaagtcgcacctgctgaaacggaagcagcccaaggaggcgcaggcgcaggcgcagcagggacaggcggtggagctggagcctgagcagcagctggacccgcgcgcgcagccggcgcacgacgcggaggaaaccgcggcagagccgccgccggccgcatccaacggaaccaccgatggcggcaacaagaggaaggcggcagccatggaagatgacgggatgctggccgtgatgaccgtggccgcgccggacagcagc

SEQ ID NO: 262564 - DNA, 396 bp, Zea mays
ggctctgcgtgtgacgtgccgtgccatggcgctcgccctcgcctatatccccagcctccctcgccccgccgctggccgccggattcagtaaaaagccacctaccctaccctcctgcgctggtactacttactacttagccaggccaaggagcccaacgagggggaacgctgcggtaggcgcgcgctgctcgtcccaccccacgccgccatgacggtgccggatgccgagtcgcgcttccatgtcctcgcggtggacgacagcctcgtcgacaggaaactcatcgagatgctgctcaagacctcgtcctaccaagtgaccacggtggattccgggagcaaggcgctggagctgctggggctgagggacgcgtcgtcgccatctccgtcctcgcctga

SEQ ID NO: 262565 - DNA, 779 bp, Zea mays
agcggcctagattcggttgcctcggaccgggatgaatcctggcgtttcaacagagtatatataaaactctattattgacagaatggtccggaaacgagtcgtatccgccgccgcagccatccgcttcttctcttcggttcagctctcgagtttccaggatgaaggtaatagctgcctacctgcttgctgttctgggtggaaacacttccccgactgctgatgatgttaagagcattctggaatcagttggtgctgaagctgatgaagaaaaactagagttcctgctcacagaactcaaagacaaggacataacagaagtgattgcagctggaagggaaaggttatcctctgtgccttcaggtggtggtgcaattgacatgggagctccagcagctgtagctggcggtggcgcagcacctgctgaagaggcaaagaaggaagaaaaggttgaagagaaggaagagtctgatgaagatatgggtttcagcttgttcgattaaaacaccactgccagtttacagtttctctcgcgaatggtctcacaatattcgctggtttccacaaaataagattgtcaatagctactacgtacttatgctattctgcatgtgatgtacgagtgtgcatcttcaagaatctttaagttgaatggtcccataataatattgataacaatgtaaattgtatgtcctgtacgtactttggtatcgcgacatctcagtgtgcatcttcaaggatcataagttgaatgttatcattaaggtcagtttggttcagat

SEQ ID NO: 262566 - DNA, 1054 bp, Zea mays
gaagcaacataacgctggcatggctgaagcagggaaatctgactcctctgatggtcctacaaccaaccaagaagaatttcgtcaggaaattcgcagtataattcgcgatgaatttgaaaaatactgtagaacacagcccattcaaaactctgtgagcacaactgaacacagaaaacttcatgtggctgatgaaccaacggcactgaaatccaaggacatgaagatggctaattcaggattgacaaatctgcacaaccaagcaatgacgtatgcaaggctatctgaagccccaggacttaagatgggttcttccttgagtgggaactaccaagatcaatctaaggagatggatgggctgctaactgtactgccaatatcagctgaaagtgctggattacttccaagccgcccagataaaccaacaggctcagatctagtccttgaggctgtgcttgaagcggaagttgcggagaacgctaaactgtttgtgtcgcagcctcatgatcagctacctaaggaatgaagacgaagatgatgtgcttgaagacgttgcaaacaggaccaaactgttcagctgacagccgcatggtcagttgcctacagagcgatgatggtagtttttgatccttaacaggatttggcatactaggcctgttttgtagagctctagaagttgatataccgatctggcgtccagcaccagcggtgtagcttgtagtcttgtaccctcaggcctcaactagccagctaggattcggatgccatggtagaaactggcgacatagcttgtagcctcaactagccaggtaggtttggctgccatagttgaggtaaagctgtggccggtgggcacgtagcttgtggcctcaaaaggagcaagaaagaaaaatagagtaaattagttgtggttatcaatgtgcatggtgattttaaagcttttaaggatgtcatctgtattctgtgtcctcgcaacactgatattctttgcaactctgagtagagagatacacggaatgttcagcttttcagatccattcatggtagtgttgttttt

SEQ ID NO: 262567 - DNA, 965 bp, Zea mays
attgctttgttgatatttactatattgcagtcagtgaacgtaatgtttcagtatcgttggattgcttatgtgtccatttccattggatcttgctttgttgtcatcttcttggttggaaccaaagagccaggatcaattcggcactgtgtagataagagtctttccagaatttcatggacctactggttcaagaaagtattgtactaccaagttgctctagtctatactctgactagactggtgactaatgtttcacaggcatttcttgctttctatgtaatcaatgatttagaaatgagtcaatcctccaagcattggtacctgctattatctacatctgcagtttgatagtatctgtaatattacaggagactagatggtcaagttggcgtcttaagctttacttttcagctggcgcagtgctttggatattgtcaggtcttggaattgtttttctaccgagcagaatgcacaacctcatgtatgctatttcaatcataataggagctgcgaatgcacttatgacagtgacaagtattagcatggaaggtgttttagtccgtcaagatctaaatggttgtgcttttgtgtatcgctcgttaggttttgttgacaaagtttcatgtggagtagttctgtatattcttgagtcctatcaaggaagtacagagatcagatcaaatttaggaacagcatttggctattcaattacaagacttggcttgggcttagttccagctgtctgttcgctgctttcatcaatagtggcttataccatggacctccctgaccctgatactcggcggagacctttggtggagccccttctagtataacttcactggtgacctgttacagtttcatcctgaacatttacattaattgctcgatagaatgacactgctgctggagcctgaagatactactgacattataggcaaaggagcaatcgggtacctctggtc

SEQ ID NO: 262568 - DNA, 663 bp, Zea mays
cggaatacccgggtggacccacgcgtccgcgccgcagacccctccccttcgcttccttccctagcgccgacgcccaccagacgagatggccccgaagaaggacaaggccccgccgccgtcgtcgaagccggccaagtccggtggtggcaagcaaaagaagaagaagtggagcaagggaaagctaaaggagaaggtaaacaacgcggtgctgttcgaccaggctacctacgacaagctgctctcggaggtgcccaagtacaagcaaatcaccccttccatcctctccgagcgtctgaggatcaacggctcccttgctcggagggccatcaaggacttgatggcgcgtggcctcattcggatggtctcggtccactcaagccagcagatctacaccagggcaaccaatacataaggatggggaagaggtctaaaatgcattgtctgccctctctgcaggaggagctcgtctttagaacagttgccatctttgtcaagagttgccaatgttatgttactggtgatgagttccaggtgacggcaacattttagagattttgagtatttctattagttggtactatggtttgccaattataagttacttggcctaaatggtttttgttttatggatctatggtattttacatgatttaaatcaattct

SEQ ID NO: 262569 - DNA, 627 bp, Zea mays
tcccgggtctgcccacgcgtacgcccacgcgtcgccgccgccgctgcagactcctccttttcgatcccttcacaaagcgccgccgtcgccccatcgaacatggctccgaagaaggataaggccccgcccccgtcgtcgaagcccgccaagtccggcggtggcaagcagaagaagaagaagtggagcaagggaaagctaaaggagaaggtgaacaacgcggtgctgttcgaccaggctacctacgacaagctgctctctgaggtgcccaagtacaagcagatcaccccctccatcctatccgagcgcctcaggatcaatggctccctggctcggagggctatcaaggacctgatggcgcgtggcctcatccggttggtctcggttcactcaagccagcagatctacaccagggcaacaaatacctaaggatgggattcccttgtttgccctctctgtaggagctcgtcttctttagaacagttgccatctctgtcaagagtttgctaatgctatgttagatgagtttcgctcggcgcgcctacctataccttatctggcctcaatagcttttttctatggaaatctgccttgaaacatctgatccgtgattaaaaaaaaaaaaaagaa

SEQ ID NO: 262570 - DNA, 609 bp, Zea mays
cccacgcgtgcgccgacgcgtccgcccacgctctggactagggaaagctaaaggagaacgtgagcaacgcggtgctgttcgaccaggctacctacgacaagctgctctctatcgtgcccaagtacaagcagatcaccccctccatcctatccagagcgcctcaagatcaatggctccctggctcggaaggctatcaaggacctgatggcgcgtggcctcatccggttggtctcggttcactcaagccagcagatctacaccagggcaacaaatacctaaggatgggattcccttgtttgccctctctgtaggagctcgtcttctttagaacagttgccatctctgtcaagagtttgctaatgctatgttagatgagtttctcacgtggctgaaacgtttcagagagtttgcgttagtttggcttgcctattataccttatctggcctcaatagcttttttctatggaaatctgccttgaaacgtctgatccgtgattatgcgactctatctaaactactgttatgctgcaattctgtcaacttgtctgaccaccaagtctgatgaataaactcccgtataaaaaaaaaaaaaaaaaaaagaaagaaaaa

SEQ ID NO: 262571 - DNA, 459 bp, Zea mays
cccacgcgtccgttcacgtcagcgcctccaccttcctccccagccgcaagcagagcaagaaccggagctggggatcgattccgcgccgcctgatctgcgatcgggactcgatcgtgcataatccgaggttcttcctctctgtcgtctccgatccagacgggtgtgcctggtctgcatcttcatcctctgcaagaaatcacacatctcgtggcgcaccttgcatcagccgcggccggcacctctactctcgcccgccccctatgtcgtaagcgcgcaatcagaactcccgatcacccgcacgctggtgcgccagtgtcgtcttcgccaccatgaactccatcgagcccttcaacaggctggtgaagctggcggcccgcgccttctacgatgacgtctcaatgaaaggcgacaaccagcccaagacctcccgcggggacaaccgcggcatggtcgtcgtcg

SEQ ID NO: 262572 - DNA, 567 bp, Zea mays
ataaaaaggtcaggtatcatagcaggaagaagcttgcggagcataggccaagagttaaggggcagtttgtaagccagaagctgaaagcagctacagcaacggcagccgaaactgactcgtgacgggcgctagtccagaacaactgtaattttggctcttcccttcccgcgccaggtgtgggcgattggactggtaagtctgaaggctggcagaagtttttttttcttccttccatggttagcctttctgtacaaaggtgaactctatgtcgggtgtttgttggcatccaagccttattttttgcgaggtacatcaagttgacaaaatgttcggagggatagggtgaaaacggtgcaagcgccatatttcgtccatacgcttaggtgtttgtggagtgtgaaagcagagcctgttcagcatattccccaccccttctgttgccattacaattgtagtaacttgtaattaccactatgacaaaagtagaccctgttgtagaacttacagccagcaggtcttttccatatggggcaggagcattttatttattaattggttggtcctatg

SEQ ID NO: 262573 - DNA, 498 bp, Zea mays
accggtccggatttcccgggtggtcgcagacctcaggccacgagtgaacgatcagacggatagcaaacatctaaaagctgctacaacaccatcgggcggggctgtctcctgacgggcgctagtccatatcaactgttatttgggctcttcccttcccgcgccaggtgtgggcgatcggtactggtaatactgaaggctggcagaagttttttttacttccttccatggttagcctttctgtacaaaggtgaactctatgtcgggtgtttgttggcatccaagccttattttgcgaggtacatcaaggttgacaaaatgttcggagggatagggtgaaaacgctgcaagcgccatattttgtggagtgtgaaaacagagcctgtacagcatattcaccacccatttttgttgccattacaattgtagtaactttgtaattactactatgacaaaagttgacactgtcgttgaacttacatacagcaggtctttttcttt

SEQ ID NO: 262574 - DNA, 1140 bp, Zea mays
tccacgcgtccgccgcatcagtgtctggctcacctcacctgcagcaggcctcgtctcggtcatccagcgcattgctctcaatcgctgcagcgcatccagtccaaacacacaccggtcgaatcgagcaatggccgcggggctgcaggtgttcggacagccggcttccaccgacgtcgccagggtgctgacctgcctcttcgagaagaacctcgagttcgagctcgtccgcaccgacaccttcaagaagtcgcacaagctccccgagttcatcaagctgagggatcctaccgggcaggtgactttcaagcacggtgacaagacaatcgttgattccaggactatctgccggtacctgtgcacgcagttcccggacgacgggtacaagaagctgtacggcacggggtcgctggagcgggcgtccatagagcagtggctgcaggcggaggcgcagagcttcgacgcgccgagctcggagctggcgttccagctggcgttcgcgccgcacctcaaggacgtgcgccccgacgaggcccgcgtcgccgagaacgagaagaagctgcacagcatgctgggcgtctacgacgacatcctctccaagaacgagtacctcgccggcgacgacttcacactggccgacctctcccacctgccaaactcccactacatcgtcaactcctccgacaggggcaggaagctcttcaccgccaggaagcacgtcgccaggtggtacgacaagatctccacccgcgactcctggaggcaggtcatcaagatgcagagggagcaccccggcgcgttcgagtgatcggtcggcggtctacgcctctgcatgcatgcgcgcgtcgcggcgtgttcctcgtcgtcgccggcttcgtggtcgtcaggcttcacaccgtggtgtgtggttgtcgagttcgtcgtatttcgtatcgtatcgtatcgtatcgtacgtacgtcctgtgggctaaaataacgtgaagcctgcgcctgcctacggtgtctctcgtgtcttcctttcgctgcatatataagcagtgtctttttctgggtattgtatggtgacctaatcatcaactccttttgcaatattggccaattcaataaaaatatgtccgggcaattattttgctcgttcgccct

SEQ ID NO: 262575 - DNA, 1082 bp, Zea mays
  unsure (1)..(1082): unsure at all n locations
ccgataagaaaacaatttcagaaaagttccagttagtacaaaccattcggtcgtggtaaaagtaacatttgaaggaaacctcatcctctccccatttgagatattccctcgctcgctcagcagcaggaggcagcggctgctgtcaacaacaactggctgtccgacaccgcatttaagcttcaccctcccctggggcctcctccactaaaactcggatagatctcagtgcagtgcttccctgttccctccatcaagaaacagcaaagatccagtgcagagagagagagaagcgccatggcactctgaacaagaaaagaaagagctagagagatctcagtcagccagtctctcacaacacaatgccggcaaccaccaagccgatcttgctcccaagggcgtgggcagcagcgccactcctcctcctgctgctgctcgtcctgcacgggagaggaggccactgcgtcggcatggaggcggcggagctggagatggactcggaggcgcaccggcggctgctgtgggaggcgaccacggggcggaggtacatcagctacgacgccctgcggggcgacgtggtgccgtgctccaggaccggggtgccctactacaactgccggatctcgaccaccgccaacccctacacccggggctgcgagagcatcaccaggtgcagggacgcggatccctaggctcttgctttgcttgctccatcgccttgcaaagggtggggcggctgctcctcgctccttcgacgcgtgcagggcggggttgctgcaaatgcttactaaatgaagtgtattttattctgtcttcttctttgttctttcttcctcttttgtttgtcttggtcgtccttcctcctttgccgggatatttagtaagtgtagtaatgaagcactaatactaatggatgaatctcgtgtgcaagatgttgatgagcaatgctacagattaccggagagacttcattgagctttcagattcttcaaaaaaaatgtttttggggaatatgcaactgatgaggtgatattttttttaagaaaattaaccaatnnnnaaaaaaaaaaaaaaaaaaaaatata

SEQ ID NO: 262576 - DNA, 453 bp, Zea mays
cccgggccgacccacgcgcccgccaacccgtgctcaacgaaaaaaaaccggggcggcgaaaaccctcgaaccctaatccttacgcccctcatggcggacgctgatgcggcgctgccaacgccgcctccggaggtagtagcccccgaggagcatcccgtgggcgccgaatccaccgtcgccgcgccggccgaagtcgataacaagcggaagctagaggaggtcagcgccgacgcggaggtgaaaggcaccagcgaggacgccaagcgcccgcgcgtggacggcgagcccgacgccgcaacaggggttgagcagcaaatcgatgggtcctccgtgaatgcggatcccgcagctccggaggataaggctgctcttaacgttggcgcagcaatggatggtgataatgacacgcctgctcccgctcccgctccagactcgcaggcggtttctgacgag

SEQ ID NO: 262577 - DNA, 593 bp, Zea mays
acaaaaccatatgcttgcaatccgtgaagcttgtctaggtaccctccaagcatagagtttgatgcaaaacgtcgggaggagggagctcgaaggcaaggtgttacttggaggaaagcagcataaacatgatcctgaaaggagaactagagaatcaagagcagtccctgcccctgatgcaaatgcagaattagtgtcatcattgcagaaaaggcgagcccaagctaataccaggagcaggagtgagatgttcaatccctgcaaagaagactccgcgtccggattccgaattgaaccaccccgtccgactcctggtaccgagtcttccgaagacccgcaacatgcctacccgaccaggatctttcattctgggcctttagttaatcagagccagccatcaaaggctggaggtggcaaaaatgatgaacctcaggtccctggtgttgcgaaccaccctgtggttgtgtcgtctagatcaggtccccgggcagacggtagcggccggacaatggtcgctcaagctggagcatttgctcatgggcggaggctgtcggagtccatcaatgagcatttcagtaacagtgggaagtacgatc

SEQ ID NO: 262578 - DNA, 443 bp, Zea mays
ggctggtttgctctgatctgctctgctactcgcctcccttacctggccttcgcctcccccagccagccaggaatcgccaccggcggaagccaagcatcgtcccagcaccggatcgattccgcccgcccgcccggccggtccatggatccggcggccgagccggcggcgtggccgccgtggacgtcgctcctgctgcgggcgctgagccggcggcggacctgggtggcgctcttcctcgccgtctacgccgggctgctctcgtcctcctggtccctgctcgcctccgtccccgcccccgcctactccgcctcctcggcgtccgcggcgcccgcctggcccgccgcgctctacgcgtccgtcatgtacggcgccgagttcggcctgctctccatggccgccgcgctcgccgtcgccgagcccgccatgctcgtcacctggaccac

SEQ ID NO: 262579 - DNA, 2004 bp, Zea mays
  unsure (1)..(2004): unsure at all n locations
cccacgcgtccgcccacgcgtccgagagcgccagggtttcaggcttccacgaatctccccgccgccctcaattcccctcggcgccgccgcctcctcccctcgcttcggtcctcggttagttaaccatccaggttctgtcaagatgtctgatagccatgagactgacaggaacattgagatttggaaaattaagaaactgatcaaggcattggaatcagccagaggcaatggcacaagcatgatctctctaatcatgcctccacgtgatcaggttgctcgagtggctaagatgttaggtgatgaatatggtactgcttcgaacatcaagagtagagttaatcgtcaatctgtgttggctgccatcacctcagctcagcagaggttgaagctctacaacaaagtgcctcctaacggattggttctgtacactggaactattgttactgaagacggaaaggaaaagaaagttactattgattttgagccattcaagcctatcaatgtgtcactctacctttgtgacaacaagttccacactgaggctttaaatgagctcttggaatctgatgacaagtttgggttcattgttatggatggtaatggtactctttttggcacactaagtggcaatacccgtgaagtgcttcacaaattcactgttgacctcccaaagaagcatggtagaggagggcagtctgctctgcgttttgctcggcttcggatggagaaacgccataactatgtccgcaaaacagctgaacttgctacccagtttttcatcaatccagctactagtcagcctaatgttgcaggattgattcttgccggttctgcagattttaagactgagctgagccaatctgacatgtttgatcagcgactccaagccaagatacttaatgtggttgatgtttcgtatggtggcgagaacggtttcaaccaagctattgaattatctgctgagattctagcaaatgtgaaattcattcaagaaaagaagttaattggcaagtattttgaagagatcagtcaggatactgggaaatatgtctttggtgttgatgacactctgaaggctcttgaaatgggtgctgtcgagaccctgattgtgtgggaaaatctggatatcaacagatatgtgatcaagaacagtactactggggaaattattataaaacatctgaacaaagagcaggaagctgaccagagcaatttccgtgacccatctaccaatactgatctcgaagttcaggaaaaaatgtctctcctggaatggtttgccaatgaatacaagaagtttggttgctcgctggagtttgtgaccaacaagtctcaggagggatcccagttctgtagaggatttggtggcattggtggcatgttgcgctaccagctggatatccgttcttttgatgagctttctgatgatgacgatgtgtatgaagactctgactagcaatcagccaatctcatgccagtgctggcccatggaaggacgcaacagctcgacctcgccatacctacgcaggagcacacgaaaagcaactatccaaggattaatgggcatgggccagcgtcatcctcttcaagaggagcttaagactaagatgattttgagtcacaatcatgggagtaacgtgacaagaagataccctactatatcacaattattccagtaatgcgtcgagaagataccgttgtttaagtgcacaaaccaatacagtgacgtgccaagaagttaccgtattttaaggatgtttaattttcagtattcgtcggggtagtactgtgtcagaaacttatttgtacctaaaaaggccaaatattgccgttgccttggtgctttatgctatgttatcgtcttttgtgagtctgtgtgctaaggttgttgcttaatgctttgtgactcgcaagctgctactcttgcaatttttgcaacgacgaaactttgatatggagtcctnaaaaaaaaaatagaattataatatatatttatttttattt

SEQ ID NO: 262580 - DNA, 328 bp, Zea mays
cccacgcgtccggacgcgccagggtttcaggcttccacgaatctccccgccgccctcaattcccctcggcgccgccgccctcaattcccctcggcgccgccgcctcctcccctcgcttcggtcctcggttagttaaccatccaggttctgtcaagatgtctgatagccatgagactgacaggaacattgagatttggaaaattaagaaactgatcaaggcattggaatcagccagaggcaatggcacaagcatgatctctctaatcatgcctccacgtgatcaggttgctcgagtggctaagatgttaggtgatgaatatggtactgc

SEQ ID NO: 262581 - DNA, 1210 bp, Zea mays
attcggcttgtacacgcctccgccaccctaccaactactcaataaccctagctaaaccccacgccgccgcggcgacctcctccgccggcaggatggacagcctcaggggagccaagttgccgggcgtgccgaagggcgggagtgcgctcgtgaaggtggcgctgctcggcggcgcggggctctacgccgtcctcaacagcttctacaacgtcgagggcggacaccgcgccatcgtcttcaaccgcctcgaggggatcaaggacaaggtgtaccccgaaggaactcacctgatgatcccgtggatcgaaaggccgatcatctacgacgtccgcgcccgacccaacctcgtcgagagcacctccggaagccgcgacctccagatggtgagaattggtcttcgtgtccttactcgacccatgccagaccagctacctaaaatctacaggaacttgggggagaacttcaatgagagagttctgccttcaatcattcatgaaacactcaaagctgtggttgctcaatacaatgccagccagctgatcacccagagagaggctgtgagcagggagattaggaagattctgactgagagggccaacaacttcaatattgctctggatgatgtgtccatcacaagcctcagctttggaaaagagtttactcatgccattgaagccaagcaggttgctgcacaagaagctgagcgtgccaagttcattgttgagaaggctgagcaggacaagcgcagtgcagttatcagggcacagggtgaggctaagagcgctgagttgattggccaagccattgccaacaaccccgccttcctggctctgagacagattgaagctgccagggagatctcccacaccatggcggcctccagcaacaaggtgttccttgattccagggaccttctgcttggtcttcagcagctgaacgtgggggccaagcaaaagaagtgaagcggtcgtccccaggccatcgtggatgagagtagtttcaggcgatggttttatctgttacagaatgcgcgtgcgcgggaatgaacaaagtggcaccatgttgcagtctgtatgtactgacaagtttgtctatcgatctttgattctctgctcttgtaagtcgtgactgatgaatctgttgttgcaattgccttcctggaggcttgctctgatgcgtgtaacagcccaaaaaaaaataaaaaaattaa

SEQ ID NO: 262582 - DNA, 392 bp, Zea mays
cttgatatttgcacccactaacaaaatttatttctgtgtctcagtcctttgcgaatatcagatggtactttgctgcaggtccttgacagattttgtttcttttttccttatcgtgcagtgacaaaggttattttcagggggcaaagctgatggttataatttttttccatagttggcaggtgtattttcaagggatgttgcttgagcccaaatggatgacagcagatgtgtgatatgacgtgcgctcagcttctccaacacactgattcttgaatgcattaagcatagtgcacaagcagttattcatgataagaaatcttttgctcatattcatagaaggtgctctcaaagacattgaaggacctctcagagatattgagggaactcttatc

SEQ ID NO: 262583 - DNA, 470 bp, Zea mays
cggaatttccgggtccgacccacccgtccgaagttcgtgtctgtagttgctaccatttctctactctctacgtatgtaatttattcgcgggaatatttattgaaatgttggtacggacgacagaaaaacaaagggagaatcaggggttgttggattggattgtagcctgcgccaccatattttaacttcaaatccgttgagatatgcttctttttcgggtctctttgtttccttcctccttttgctggagccactgactttgatgtctcaccaccatttcttcattgcattcccttttctctcaacttgaggcatccttgtgtacacaagatctgcctacgtgtttcaggttcttgattctgtttatatgcagtcggaagctttatgcggttaggcccagctgatttgttgttgtgttgtttcttgtacagctgatctaaaccaggcgcaactgtgaaacaatggcgaca

SEQ ID NO: 262584 - DNA, 539 bp, Zea mays
gtctgtattctgtcccatatacaagcacatgttgaagatcattggtgccggggagttctatgaacaggagaaacccctttcccttaaagatttgaagtccttggttctcattttaaaacaggcattatggcaacttctgtgggttattccatcctcgtctactcagaaagtgtcacccaacccttcaggccttaaaaagttgtcagtggagaatgtcaggactagagctagggttgggttatctgaacttctcacacagttgctagactggaacagccgactaccattcactgctgcaagtgatttctattctcaagaagctacgagcgaaaattttgtgtctcaagcaatacttggtaatactcgagcatcagagatcataaagcttgctccttttttggctccatttaccagtcgagtcaaaatattcacttcccaattaacgtgttctagacaatcaacatcacattctgcattgacaagacagcggttcaaaataagaagaagtcgacttttggaagatgcttttgatcagctaa

SEQ ID NO: 262585 - DNA, 447 bp, Zea mays
acccactcgtccgctcttcgcctttccttctcccatctctctcgacgaggctcgccatcgccgctattcccattcgccctcccctcctcttctccaccccccgcaaaaccctagccgccgacccctccaatcccctaccagcgcccgattgccggccccaatcgagctagggctcgccaatttctggccgagctcgttgaaatttcggccggtcttttctggtgaatcctttggtttatcctgaggggatattttgatttctgcggcgcacgatggggagcagaagggaggaggagaggaacgagaagatcatccgcgggctcatgaagttgccgcccaaccgcaagtgcatcaattgcaacagtgtggggccacagtatgtgtgtaccaatttctggaccttcatttgcctgtcatgtagtggaattcaccgtgaattcactcacc

SEQ ID NO: 262586 - DNA, 2195 bp, Zea mays
tcgcctacgcgtccgcccacgcgtccgctcgcctgcctgcctacaagtctcctcccctccccgtgcctccctcgggcctcgcttctcgcgctcttcctctcctgcctccgcctgcctccaggctccaacaacccgggagggcgccgtccgcccccgcctccgggagcgatgatgatcgcgcgacgcctgctccgacccaatgcccccgcccaggcaaccagcttattgaagcatgtaactggcaccgcaagtttgcaaggcaatgcggatagcttgttggatggtacagtcagacattttggctcagcaccgtctgcccagcctgaagaaaatgggttcaagggccacggcatgctggcgccttttacagctggctggcagagcaatgatttgcaccctctgatcattgagagatctgagggttcctatgtctatgacattaatgggaacaagtatctggactctcttgcaggattatggtgcacagctttaggtggtagcgagcctcgattagtcaaagcagctactgagcaattaaacaaactacccttctaccattccttctggaaccgtacaacaaaaccttcgttggatcttgcacaggagatccttagcatgttcactgcaagggagatggggaaagttttcttcacaaacagtggttcagaagcaaatgactctcaggtcaaactagtatggtattataacaatgcattggggaggccaaacaagaagaaatttattgcgcgatcaaaagcatatcatggatctacattgatctcagcgagcctaactgggtgagtactgtcatactagaaaagctggtatgccagcataacatatactccaacgagactcataaatagatctccaatactttcctgattgcaactctatcgtagtcttcctgccctacaccagaagtttgatctaccagcaccttttgttctgcacactgactgccctcactactggcgatatcatcttcctggcgagacagaagaagattttgcgactagacttgccaccaatttagagaatctcattctcaaagaaggaccagaaacaattgctgctttcattgctgaacctgtgatgggtgctggtggtgtcatccctcctccaaagacctattttgacaaggttcaagcaatcgtgaagaagtatgacattcttttcatagcagatgaggttatcactgcatttggaaggctgggaactatgtttggatgcgattactataacatcaagccagatctagtttcactggccaaggctctttcaaacgcctacgtacccatcggggcaactcttgttagcccagagatatcagatgtgatccattcccagagcaataagcttggttcatttgctcatggattcacgtactccggccatccggttgcctgtgctgtggccattgaagctctgaaactttatcgcgaaagggacattcccggccatgtcaagcaaatcgccccaaagttccaggacgggattagggcgctggcagacagtccgattatcggggagatacgtggcttggggatgattatggggaccgaattcacaaacaacaagtcaccgactgatctgttccctgccgaatggggggttggtgccatcttcggcgaagagtgccagaagcgcggcatgctggtcagggtcgctggcgacgccatcatgatgtcgccgacgctgatcatgacgcccggcgaagtcgacgagttggtgcgcatctacggggaagccctcaaggccacggaggagagggtggcagccctgcagtccaagaagaactagccaaaagggcggcgacgacgataacgataaacgccgggcgacgacggaccatatttgatgtacaggtgaataaacagccaagttcgtggctgcgagatggcaatagcgcgccggtctatgttcttgctctgtcgccaagcaaatggtggctcaactttttaaacatgtcatagatgtttttttcttcccttcctttcccttaaggaatggcaatacatctcaaatgtttgctgccctgtagttcctgaagataatgggtttcgtgtatatcgtgagtattagtagtgttcggatacatagctttgtaaaggcaaagcaataataaagtgaaggaactgcagtttcgagtctgcaagcataaaaacaaaaaaaaaaaggaaaaaaacaaagaa

SEQ ID NO: 262587 - DNA, 1034 bp, Zea mays
ttctttccacgcgtccaaatgactctcaggtcaaactagtatggtattataacaatgcattggggaggccaaacaagaagaaatttattgcgcgatcaaaagcataccatggatctacattgatttcagcgagcctaactggtcttcctgccctacaccagaagtttgatctaccagcaccttttgttctgcacactgactgccctcactactggcgatatcatcttcctggcgagacagaagaagattttgcgactagacttgccaccaatttagagaatctcattctcaaagaaggaccagaaacaattgctgctttcattgctgaacctgtgatgggtgctggtggtgtcatccctcctccaaagacctattttgacaaggttcaagcaatcgtgaagaagtatgacattcttttatagcagatgaggttatcactgcatttggaaggctgggaactatgtttggatgcgaggactataacatcatgccagatctagtttcactggccaaggctctttcaaacgcctacgtacccatcggggcaactcttgttagcccagagatatcagatgtgatccattcccagagcaataagcttggttcatttgctcatggattcacgtactccggccatccggttgcctgtgctgtggccattgaagctctgaaactttatcggtatgtatgccgcgccgcgctttccagaacacgtattcgagtgttatttatctgtttgttcctgacgaatggtttgcaaaaaaaaataaaaaaaaaataaatggcgtcagcgaaagggacattcccggccatgtcaagcaaatcgccccaaagttccaggacgggattagggcgctggcagacagtccgattatcggggagatacgtggcttggggatgattatggggaccgaattcacaaacaacaagtcaccgactgatctgtttcctgccgaatggggtgagtcaatgtagcagctacagccagtacacaaaatggcatggccatgaggccatgctgtgttcccctgccc

SEQ ID NO: 262588 - DNA, 393 bp, Zea mays
gatccttagcatgttcactgcaagggaaatggggaaagttttcttcacaaacaatggttcagaagcaaatgactctcagtgcaaagcaatccaccacaaccacgacgcgaaggactccaagctacaatttctgcatcactaaaacaaaaaaacaacagtaatgcatccaagttctgaacctggaacactatgaagatgcaagggcttgctgcatatggatatttgttttgcttattggttatttgtttaggatctagatcaccgatggctatgagtcatatgtaaatatatttttatcctaccaaaagtggctcgaacatatattatatatgaaactatggatcaacttcttgtaatgctactattgatttttaatatatattatttttgctt

SEQ ID NO: 262589 - DNA, 424 bp, Zea mays
catgacgcccggcgaggtcgacgagctggtgagcatctacggggaagccctcagggccacggaggagagggtgtcagacctgaagatgaaatccgagaagaactaaccaaaagggcgaggacgacgacgataacgcctggcggcaacggtagcagctgatgtacaggtgaataaaatggtcgtgactgcgagatggcaataatgcgcgggaatggtcgacggtcgtctctgatcttggagtgcaaggtcaagctgctcggtcgctaaacaacggtggctgaacttttaaacgggacatagatgtttttttccctaagcaatggcagtatctcaaatgtttgctgccctgtagtttctgaacataaagggttagcagacgttataaaatttaaattttatcgtaaaaaaaaaaaaaaaagggcgg

SEQ ID NO: 262590 - DNA, 1188 bp, Zea mays
gaaggcactatcgctttcagtaagaactggctgtctgaaaataagaaacccaaaaccccaaaggaggataaaaagcgaccccgggaggatgatgatgtcgcgactgaggaggatcgggttgaggatttggccttgagctcagatgaagaggatggcaacaatgaggaagcagacgatggctttgttccggctgacgttgatagtgatgaagactttgtagaccctgacagcgattataagatacaaaagaaggcgaagctgaagaagaggaacaagcgccagccatttctgcacaaggcgccctctagaacaaaaagtaattcagggcccaagaagaaggccagacattagttatgcctgatagggcttggcaaatatgctgccgttgtgatgtatgcttctgagttccgaccgataataatttttccactcacccacgcgtccgagcaccttcccaaaaaaatcccccattttcttcgaggcgaggagagcgtgaaagacagggcaccggcagcgacgatgtcggggcgcggcaagggcggcaaaggtctgggcaagggcggagcaaagcgccaccgtaaggtgctccgtgacaacatccagggcatcaccaagcccgcgatccgtaggctggctcggaggggcggcgtgaagcgcatttcggggcttatctacgaggagacccgcggcgtcctcaagatcttcctcgagaacgtcatccgcgacgccgtcacctacaccgagcacgcacgccgcaagactgttaccgccatggacgtcgtctacgcgctcaagcgccagggccgaaccctctacggcttcggaggctaggctggatgcctcttctccttgctgtcgtggatgcctgtttgttgttagggttatttcgtttagttccttgtctgtgacgtgttggactattgttagtagtattcttgaagttgtgtttcgaatgtaatccaatcttatcgttcgagaattgaaatgattcctgggcaacattttgcaggcaatctcgttcgagagttaggtccattatatctgttaagattttttttccatacagcattgactatgtatgaagcccattccatcctgaaaaaaacgaattaaaaaaaaaaaaaaggcaaaaaaaaaaaaaataaatcaaatcgatggaaaattaatactaacaagacttaattttgt

SEQ ID NO: 262591 - DNA, 659 bp, Zea mays
cccacgcgtccgcccacgcgtccgcccacgcgtccgcggacgcgtgggcgaaggcggcgatccggaggctggcgaggaggggtggcgtgaagcgcatctccgggctgatctacgaggagacccgcggcgtgctcaagatctttctcgagaatgtcatccgcgacgctgtgacctacacggagcacgcccgtcgcaaaaccgtcaccgctatggacgtcgtgtacgccctcaaacgccagggccgcactctctatggcttcggcggctaggttaggtgtgggtaattgcctgtccaggtgtctcggatctgtggtactagtttggctgccttcctgtgttcgtattgtagtagttgtggtagctggttgctttgtcgtcctgtagtcgtgcttctttgggtctgtaagaaccgctggttcgatgggattggattggacggtgaagtaggaatgttggcatgttagacttttctccaacgtagcgttgcctctaatttgatctctcaatttattttcaattggggtgcactgtaattcttcctgtctaattcaaatcccctttctgaaattttgtgacctcccaagttttggccccaaatcaaaaaaaaaaaaaaaaaaaaaaaaaaagggcgaccgcgccgggaattgcgattcggtacc

SEQ ID NO: 262592 - DNA, 475 bp, Zea mays
ccaacgcgtccgcggacgcgtgggcggacgcgggggctagtctcctcttcgcacgagcgcaacaccatccacccaccagttcgaagcggaggcgaccggcaacctgcggcggagatgtcaggcaggggcaagggcggcaaggggctcgggaagggcggcgcgaagcgtcaccggaaggtgctgcgcgacaacatccaggggatcacgaagccggcgatccggaggctggcgaggaggggtggcgtgaagcgcatctccgggctgatctacgaggagacccgcggcgtgctcaagatctttctcgagaatgtcatccgcgacgctgtgacctacacggagcacgcccgtcgcaaaaccgtcaccgctatggacgtcgtgtacgccctcaaacgccagggccgcactctctatggcttcggcggctaggttaggtgtgggtaattgcctgtccaggtgtctcggatctgtggtacta

SEQ ID NO: 262593 - DNA, 710 bp, Zea mays
cccacgcgtccgcccacgcgtccgcccacgcgtccgcccacgcgtccgcccacgcgtccgacccaatctcccctacaccagaaaaatccccagttctttggtccgcgtcagagaggcggcggcgatgtctgggcgcggcaagggcggcaagggtctgggcaagggcggcgcgaagcgccaccggaaggtgctccgcgacaacatccagggcatcaccaagccggcgatccggaggctggctaggaggggtggcgtgaagcgcatctcggggctcatctacgaggagacccgcggcgtgctcaagatctttctcgagaacgtcatccgcgacgccgtcacctacaccgagcacgcgcgccgcaagaccgtgaccgccatggacgtcgtctacgcgctcaagcgccagggccgcaccctctacggcttcggaggctaggctaggcgcctcttcgtagtcggggactggttaggggacatgtctctgtgtgatgctttctgaggtagtattgctgcaatagctgtgtaatccatcgcttctgcaatgaagcgctttgaagcatgctacgtatgttgtgtctgtgggtgattgtatttctggtagtaacagtgattcttcctgaattttggataatacaagctcattcacagtattaaaaataaaataaaaaaaaaaataaaatatttattaaatttatttatatataatatat

SEQ ID NO: 262594 - DNA, 605 bp, Zea mays
tatgacgtcgcatggcccccttccttagcctgggaacgcgtccgcacaggctcaccccaccaacagcaagcgaaaatctcccgatcccctctagtctccgcggcgaagatgtcggggcgcggcaagggcgggaagggcctgggcaagggcggacgaagcgccaccggaaggtgctccgcgacaacatccaggggatcacgaagccggcgatccggcggctggcgcgcaggggcggcgtgaagcgcatctccgggctcatctacgaggagacccgcggcgtcctcaagatcttcctggagaacgtgatccgcgacgccgtcacctacaccgagcacgcgcgccgcaagaccgtcacagccatggacgtcgtctacgcgctcaagcgccagggccgcaccctctacggcttcggcggctaggctatgccggtcgcgctcgcgcctcgctgtcgtcgctgcggttcttgtttctgcaattcgcaaggtgtggcttgacggggaaaatgctggttaatgtagcactagatcaagcatgttgtgcgtgtctgaagaaatgccaattgtgacttgctgtttgttcaaaaaaaaaaaaaaaaaaaataaatt

SEQ ID NO: 262595 - DNA, 601 bp, Zea mays
cggtcgacaaatccagtaactcgcatcttcctccgtgatccaagttctagcagcgcagcgctcggtttcggcaatgtcggggcgcggcaagggcggcaagggtctgggcaagggcggcgccaagcgccaccgcaaggtcctgcgcgacaacatccagggcatcaccaagccggcgatccggaggctggctaggaggggcggcgtcaagcgcatctccgggctcatctacgaggagacccgcggtgtgctcaagatctttctggagaacgtcattcgtgacgccgtcacctacaccgagcacgcccgccgcaagaccgtcaccgccatggatgtcgtctacgcgctcaagcgacagggccgcaccctctacggcttcggcggctaggtcgcttcctcatctggtggcgaactgcatctgtgtcggcggtggtcgtgttgtgtgcctaatctagtgtagtccgttctctatatcgtcgctgtgttctgtggtgtcttgtagtccatttcctgcaataccaacttgccattatcaatggaaaaccctgtttcattctcgacgtgcctagttctgattttgttttgttctcgttattgtcggatg

SEQ ID NO: 262596 - DNA, 680 bp, Zea mays
ccccccccgccgaccgcggcgagttcaaatcccacaatcttcttgtagcacaccactgtcttcgtccaactcggcggcgatgtctgggcgcggcaagggcggcaaggggctgggcaagggcggcgcgaaacgccaccgtaaggttctccgcgacaacatccagggtatcacgaagccggcaatccggaggctggcgaggaggggcggcgtgaagcgtatctccgggcttatctacgaggaaacccgcggcgtgctcaagatcttcctcgagaatgtcatccgcgacgcggtcacctacaccgagcacgctcgccgcaagaccgtcaccgccatggatgttgtgtacgccctcaagcgccagggccgcactctgtacgggttcggtggttgagcgcatctcttccctcgtctgcagcggctgccggtggcgtttcctcagttccctctgccttgcttggcttgatgtagagagttatcagattaaaatatctctgatgtgcttcgttattgggtggaatcatgtgtcccagcagtgctgggaaatcgagatcaagatgtatctttctttgcagtaatgaaatgttaaaatcgagatccaaaaaaaaaaaattaacattaaaaaaaaaaaaaaaaaaaaaaaaaaaaaaaaaaaaaaaaataaagggcggccgcccgggaat

SEQ ID NO: 262597 - DNA, 591 bp, Zea mays
tagtacagtccgagctcccagcaccagtccccaattatttggcctccgtcagagaggggagaaagacccgttcgaggcggcggcgatgtcggggcgcggcaagggcggcaagggtctgggcaagggtggagccaagcgccaccggaaggtgctccgcgacaacatccagggcatcaccaagccggcgatccggaggctggctcggaggggcggcgtgaagcgcatctcggggctcatctacgaggagacccgcggcgtgctcaagatcttcctcgagaacgtcatccgcgacgccgtcacctacaccgagcacgcgcgccgcaagaccgtcaccgccatggatgtcgtctacgcgctcaagcgccagggccgcaccctctacggcttcggaggctaggcgcctcttcgtagctggggaatgcttagggtgatacgtctctgtcgctgtgggtcgtagtgttgctgcgttcctggatgtaatccatttttttttctgcaatgaagagatgctggcaagcatactacctgcaaaaaaaaaaaaaaaaaaaaaaagggcggccgtcgcaaaaaaaaaaaaaaaaagggcggccg

SEQ ID NO: 262598 - DNA, 672 bp, Zea mays
cccacgcgtccgcccacgcgtccgcccacgcgtccgcccgcaggtccgcccgcacaacggcacgattctcctcctccgtccgcgtagctctcggtttcggcgatgtcggggcgcggcaagggcggcaaggggctgggcaagggcggcgccaagcgccaccgcaaggtgctgcgcgacaacatccagggcatcacgaagccggcgatccgtaggctggccaggaggggcggcgtcaagcgcatttctgggctcatctacgaggagacccgcggcgtgctcaagatcttcctcgagaacgtcatccgcgacgccgtcacctacaccgagcacgcccgccgcaagaccgtcaccgccatggatgtcgtctacgcgctcaagcgccagggccgcacgctctacggcttcggcggctaggccgcctccccttctgatgctttgatgtgacggccgtggtcggttgtgtgtctagttggccggtctactgtagtttgttctgtatcttcgtttcgaggtgttccagtttctagcccatttggtgtaatattttcactgctattatcaatggaaagccctcggttctatccccattgttctggatcaaaaaaaaaaaaaaaaaaaaaaacaaaaaaaaaaaaaaaataaaatattaaattaaataaaataataatattt

SEQ ID NO: 262599 - DNA, 639 bp, Zea mays
cgtttaccgccgccgacttctgattctaccaccacccgcctcctctcgagttcgatctgtttgctcccccagacatgtcgggccgcggcaagggaggcaagggcctgggtaagggcggcgcgaaacgccaccgcaaggtgctccgcgacaacatccagggcatcacgaagccggccatccggaggctggctcgcaggggcggcgtgaagcgcatctccgggctcatctacgaggagacccgcggcgtgctcaagatctttctcgagaacgtcatccgcgacgccgtcacctacacggagcacgcccggcgcaagaccgtcacagccatggacgtcgtctacgcgctcaagcgccagggccgcaccctttacggcttcggcggctagggcgctaggctaggccatgctcgacccgccccccactctccgctctggcgtcgtcactggttccttgacccctgtgcgggtcggtcggtggtgctagggtcagcagttgtctggtgtctgtagcctctctggctatccgttctttggtgtgaaatggaattccaatcgtgtgggaatggatctctgttcgattgttcaattggcccatattccatctttggatcttagttttgccctaatggcgcaagccttt

SEQ ID NO: 262600 - DNA, 622 bp, Zea mays
cccacgcgtccgcccagcgtccgggctcaccacaccaaccagcaagcaaaaattccccaatcctctcgtctccgcggcgaagatgtcggggcgcggcaagggcggcaagggcctgggcaagggcggcgcgaagcgtcaccggaaggtgctgcgcgacaacatccaggggatcacgaagccggcgatccggaggctggcgcggcggggcggcgtgaagcgcatctcggggctcatctacgaggagacccgcggcgtgctcaagatcttcctggagaacgtcatccgcgacgccgtcacctacactgagcacgctcgccgtaagaccgtcaccgccatggacgtcgtctacgcgcttaagcgccagggccgtaccctctacggcttcggcggctaggcctgccgccccgcgcctcgccgtcgctgcggttctggtgttgctgcagttcgcaagttgtttgtgtgggggaaatttgctagatactgtagaactgcagtgcggtatgctgcacatggtgtgtttgtctgaagaaatgttgtcattgctggcttgctctggactcaaacatgctccattttgtgttcactgtgctttcgtttggacaaagcgatccatttcactctt

SEQ ID NO: 262601 - DNA, 680 bp, Zea mays
cccaagcgtacgcccacgcgtccgctcttccatacgaccataccctacctccaaattcccaattgtcaacctctcctcagagttcgagtgaccatgtcggggcgcggaaagggcgggaaggggctgggaaagggcggcgcgaagcgtcaccgcaaggtcctccgcgacaacatccagggcattacgaagccggcgatccggaggctggcgagaaggggcggcgtgaagcgcatctcggggctcatctacgaggagacccgcggcgtgctcaagatcttcctcgagaacgtcattcgcgacgctgtcacctacacggagcacgcccgccgtaagaccgtcaccgccatggacgtcgtctacgcgctcaagcggcagggccgcaccctctacggatttggcggctgaggggtcaggggtgtccgccagctgctgctggtcgtggcagaagtcttgggtcgcggtcacgaaatggagtgattcgagagtattcttgcccatgggcttagtttcgtaggcttatcactctagactctagtgccttggtccagtagtagcatacgacttgtactgcatttctttgttctgaacctctaaatatgatgaaatgtggattcacttgatctcccagccaaccaaaaaaaaaaaaaaaaaaaaaaaaaaaaaaaaaaaaagggcggccg

SEQ ID NO: 262602 - DNA, 549 bp, Zea mays
aagacctccaattccctcgtagcagcagcaccagtagagtctccttcctctccggcggcgatgtctgggcgcggcaagggcggcaaggggctgggcaagggcggcgccaagcggcaccgcaaggtgctccgcgacaacatccaagggatcacgaagccggcgatccggaggcttgcgaggaggggcggcgtgaagcgcatctccgggctcatctacgaggagacccgcggcgtgctcaagatcttcctcgagaacgtcatccgcgacgccgtcacctacactgagcacgcccgtcgaaaaaccgtcaccgccatggacgtcgtctacgccctcaagcgccagggtcgcaccctgtacgggttcggcggctaagcgcgccctctccatctgggggtgggcctagtactggtggcgcttctcctttgggttccctgttctgtgctttccattctgtgggaaggtaccagattcctagatctatgtttcgatccggtgtttggtggtccatgtgatgtcgtgtagtagtacaaagagttccaactcctagtt

SEQ ID NO: 262603 - DNA, 639 bp, Zea mays
tacaccagaaaaattcccagttctttggtccgcgtcagagaggcggcggcgatgtctgggcgcggcaagggcggcaagggtctgggcaagggcggcgcgaagcgccaccggaaggtgctccgcgacaacatccaaggcattaccaagccggcgatccggaggctggctaagaagggtggcgtgaaacgcatctcggggctcatctaccaagagacccgcggcgtgctcaaaaacttttttgagaaccttaatcgggacccccttacctaaacgaacaacccccccggaagaccgtgaccgccatggacgttgtctacgcgctcaagcgccagggccgcaccctctacggcttcggaggctaggctaggcgcctcttcgtagtcggggactggttaggggacatgtctctgtgtgatgctttctgaggtagtattgctgcaatagctgtgtaatccatcgcttctgcaatgaagcgctttgaagcatgctacgtatgttgtgtctgtgggtgattgtatttctggtagtaacagtgattcttcctgaattttggataatacaagctcattcgcagtagtttctgatgtaatcatgtcttatcgtttgagagatgaattgcttttggcagcctttgctggt

SEQ ID NO: 262604 - DNA, 380 bp, Zea mays
  unsure (1)..(380): unsure at all n locations
cggacgcgtgggctcgccgcaagaccgtcaccgncatggatgttgcgtacgccctcaagcgccagggccgcactctgtacgggttcggcggttgagcgcatctcttccctcgtctgcagcggctgccggtggcgtttcctcagttccctctgacttgcttggcttgatgtacagagttatcagattaaaatatctctgatgtgcttcggtattgggcggaatcatgggtcccagcagtgctggggaatcgaggatcaagatgtatctttctttgccagtattgaatggtcaaaatcgagatcaagatggatctttctttgcaagtaaagaaactttgctattgcgcccactgttaggctaatcacaatggaggtttcatg

SEQ ID NO: 262605 - DNA, 874 bp, Zea mays
cccacgcgtccgcggtaccgtggctagttctagatcgcgggcggccgctcgcgatctagaagcctcgcgtcgggaaattttcttgggcgttcttcggcttcattgtcacaaggttcgagttcgtcaccgtctagtacgactgtgcgagggaggaagaggcgaggagaagatgcagatcttcgtgaagaccctgacggggaagaccatcaccctcgaggtggagagcagcgacaccgtcgacaacgtcaaggccaaaatccaggacaaggaagggattcccccagatcaacagcgactgatattcgctggcaagcagctggaggatggacgcacgctggctgactacaacatccaaaaggagtcaactcttcatttggtcctcaggcttaggggtggaaccatgatcaaggtcaaaactctcactgggaaagagatcgagatcgacattgaacccactgactcgattgacaggatcaaggagcgtgttgaagagaaagaaggcattcctcccgtgcagcaaaggctcatctatgctggtaagcagcttgctgatgacaagaccgcaaaggactacaacatcgagggtggatctgtcctccatcttgtccttgctctgaggggtggttactagtctaaacctgatgaactagcagtcagataaactgttgtgttggctgcgaaatgtgcaggcctgatgttgaacttgcaaggagataataacaaattatcagctttgcgcctgtgcccagtggaaggggctgtcttccaagttattgtctgatatggaattgttccagattatcatgtctcggcgtttacccattattattatttgatttgaaccttactgtgttagtcagttttcatacttaaa

SEQ ID NO: 262606 - DNA, 1109 bp, Zea mays
cggacgcgtggggggattctcgttttaaactcatgaccctcatgcatcttgcacgggctcgggcacgggcaccggcacggcacgggccacggttataaataaccacacaccctcaagggctgaaccgaaccaagcagtaacattaatcacccactctactactcgaagttactaccagcagcttgcttcaacagtagaagagagcgagccgaggatggcgtcaccgaagccctcgtcggcggccctgctcctcctggcggcggcggccgtgctggcgctggcgcgcgcggacctgacgcacgacaactgcgtgaagaacaagaaggtgacggtgcagaacctgtgcagccacgacgtgacgctgacgctggagccgctggccaacagcccgccgctgttcgcgggcacctacacgctgcacccgcgcagccacgccgagttccccgtgtgctggtggacggggcgcctgcgcgcgcccgacgccgcccaggtggagttccacgtcggcgtcgacggcggctccttctacctggcccccaacgcgcagccgggccagcgcgtcccggtctccgtcaccccgcacggctcgccgctgcagggccgctgccccgccgtcggctgcgccatccagggccgctgctccgtgcaccaggtgcccagcggcgactgccgcaacgtccaggagatgaagatcatctactgcaacccgcacgtgtgatgcgatgcggacatggggtcgtcgcgccatctcgcgacctgtgttgtgctttctttcatgtcgccgtcgccgtcgtgtgtccaaccgccattgtcgttaggttgttgttgattagccgtttgcttcgctcagtagcctcgctctccagtgtattatcactcgcatcgcatgcatgtgatgtgagccactgcacgcgtgagtgtcacatgagtcgtcgtcctgtctcgtctcatgtgtttgaaattgtaggcagcagaggatcgagatgcgtgtctgctttgttcgtgttcactgctgtcagtctgtcaccgagttcaataatttagctttgtttcatcgggaaattgaatggaaaaaaaaaaaaaaagggcggccgctcgcgatctagaac

SEQ ID NO: 262607 - DNA, 627 bp, Zea mays
cccacgcgtccgctttctctctcttcacactcgcctcgccattaaagctccaaaaaagaaaaaaaggctgcgaaaaaaatcatcttctcttctcctaaaatcttccacctttaaccgtccctgtccgcgaatttctagatgccccgatcgcttccgattttttcctggatttctccgattttttgaagtatttttccttggggacggtttcattgccattcctcgacggggttagggtttgcggggatgagggtgcacggcgaggtgtcggacgatgaggcggccgtggctgtggttggggaaacggtgccctcctcgccgcctcccgcctacgtggtgcagccgctggtggtggggtacgccctcaccaagaagaatgtcaagagcttcctgcagcccaagctgctcgcgctggccaggaagaaaggcattcatttcgtatcaattgattgagacttttggggccccctctctgaacaaggtccattggacatcattttgcacaagcttactagtaaggagtggcagcaagttttggaggactatcgtgaagagcatccagaagtgactgtccttgacccaccaaatgctatccaacattttgcacaattcgcctatcaattgcta

SEQ ID NO: 262608 - DNA, 667 bp, Zea mays
ttgtcttatcaaactgccccctcgggctatgatggaagaggtgtacctgagcgagctctggaagtattccctcgtaccagttcgtatgggtatagttccatgcaggtcacggatgatggctatggaggacttccatcctatgcatcaaaggcatatgaagaacatgtaccacgtttggaaatgactgtacctgctagtggcatctcaaaagtaatgggaaaacatggcacaaacttggacaacattagaaagatttctggagctcacattgaaattattgaaccaaaatcctctcgtcatgagcatattgcttacatatctggaacctctgaacagaggcattcggctgagaatttgatcaaagctttcataatgtctacctaagattccttctgtggtctgagaacaccatttcatcaatttgatctcttttgacttctgctatccatagtttccctgggtttgtgaacatcaaacgtagtgttttctcccacctgtccgagttcccaatgaatactgggcatatctgagcaaggtgtactccagtggtagacaaggcactctatgttccttagatcttcaactgttacctatttatgttggcatacttatcataattcgcgtgtcttactctaaattatctcaatgactggaccagttgctgctt

SEQ ID NO: 262609 - DNA, 1194 bp, Zea mays
cgcctaggcgagcccgtgcgctggttggcctcccggacgcggccgcggcgggcgatggggtcgtcggcgccggtgagggcggcgggcggtacaagggatcccggcgagaacccggcggtggggaggctgcgggagctcttcacaggcgacgcggcagatgggtgggagaagtcctgggagtttggtgtgaccccatgggatttgggaaagccaacacctgtcattgaacatcttgctagatcaggaacactcccaaaagggagagctttggttcctggatgtggaatgggatacgatgtggtcgctcttgcaagccctgaacgttttgttgttggcttggatatttctgatatggctgttaagaaggctaagcagtggtcatcctctttgcccaatgcagattattttacttttctggctgaagatttcttcaagtggataccaagtgaacaattcgaccttatatttgattacacgttcttttgtgcacttgacccgagcttaagggtggcttgggcagagacagttaatcggcttctaaaaccagatggagagcttcttaccttgatttatctgataagtgattgatcaagagggaggaccaccgtacaataatacagttgctgactatcagaaggtactggaaccactgggtttgaagtctgttcttatggaagacaatgagctagccattaaaccacggaagggatgtgagaaaattgggcggtggaagagatgcgcacaccaatcatctctgtgagagaaagcagtggtattttcctaaccaaagaaatagaagaagaatagaccatgtagctgcctcaattatcggatacttcggtgctcctgctccgtcacctttagtcgtcaatgaaattctagcttcaattggggagatgcatagagatctcagttgcctagaggtgtcgcctttagtggctacctgagtacctgtgccactacattcattgcttttaatatggttcagtcgtgaattgtttggatgtaattgcttaattatgaattctgtttgatcgagtagttttgcatggattgtgctggttttggtaagccttgtgcttactaataccatttgaccttcttttctcttctcttgatgaaaaacatgtgttacgggaaaaaaaaaaaaaaaaaaaaaaagggcggccgctcgcgatctagcccacgcgtccg

SEQ ID NO: 262610 - DNA, 430 bp, Zea mays
cagacggcgggccgaggatgcgagctctcgcggcagcagcaactgcagtcgcggcgcctacccccacgcgcctccgcctcccgctcctctcccgcaccctgcgctctgtgttgtctacttagccaggtcactgtagaagctcttattcctccaggctcctacggttctcgtgcagtgccaccaccatgggagatgagacctcaacctcggttgctccccaggaacaggaatccactgtgcaggctgggagtgtcaagcaacagctctccgggctggtccttatgtccctccgggctactgtgcctgagggggaggtagaaccgatggttgaagcttcagcaaagtttgctgactaccaatgcaacaatgctatgggattatggtccaaggttaaaggatctggaaccagtttcaaaaaccctaatgccat

SEQ ID NO: 262611 - DNA, 538 bp, Zea mays
cccacgcgtccgacgtcactaccgtcccagaccagccgcgtacgcctgcccctgccctcggtcgcgatggaccagggccacctcatggacagcctcctcgtcccgtcctcccgcgccgccgcgacgaatggcccccaccaccgccgcgccacgctcgcgccgggaactggcgccggaggcccatgtggcggagccggcggcgtgtccatcgacgtcaacggcctgaagcggcgtggcggcgggaggcgctcgtgggtgcgcgtggacgcggcgacgggcgccgcggaggccgtcgaggtcgccaagccggcgttgatgcggcggctggacctgcccgcgcgggacctccgtctcctcgaccccctcttcgtctacccgtccgccatcctcggccgcgagcgcgccgtcgtctgcaacctcgagcacctgcggtgcatcatcaccgccgatgaggcgctcgttctgcgcgaacccgacgccgctgggggcgccgcagcggaggaggccgtgaggaggtacgtcgacgagctgcagcgac

SEQ ID NO: 262612 - DNA, 772 bp, Zea mays
cactatccaagattccttttacttcaatgtgctcccatttgctgaggacatcagagagtttcagtttcggtccttcagcagcctgccatcatcatctcagcccactgaagaacaacaagaagctgcagataacctactgaagatgttagacctagcaccacctggaagagaggtcctcaagcctgagtttacgccaaatcccatcttggagagatgttacagttaccttgatctcaagtcaaagcagccagatgcaaatgtcccaccgcttgaaagatctctaagggggataaccgaaccctgatcctgatgtggttggccaacaaacacaattaatccagaatttaagcaaagcttttgtgctgaaggagaaccccaagaaaaagaaagcacgaacacaggacttgttggcatatactggtgcaggtgatcaagctaaatctgtagaggacagagttctggaaaatacacatccttcaacagagagtgttgtggcaatcagagattcaaatccagttcaagattttgaggccatgctggctaagagatctagctcaacatggactcagaaggctattggagatatgcagaattacatagcagctttgttacagaactccagtgatgggggcaactatcaaaaagcacttgaatgttttgcttctctgcggaaggcctgtattattgaacaggaaccacaagaattcaaccagttcctaacgaacatttacgagagattgaaggaaggtgatgctgccaagttctttcaact

SEQ ID NO: 262613 - DNA, 1031 bp, Zea mays
gacgtggtctacaagtagctgttgctggtattcccaagactactgataatgatatagcggttatagacaagtcatttggttttgatactgctgtagaagaagcccagcgtgccattaatgcagctcatgtggaagcttcaagtgctgaaaatggaataggtttagtgaagcttatgggtcgctatagtggatttattgccatgtatgctactcttgcaagcagagatgtggactgctgtttgattcctgagtcacccttttatttggaaggggagggtggactatttgagtatatagataggaggttgaaggagaacaatcacatggttattgttgtcgcggagggagcaggacaggatcttattgctcaaagtatacctgctgcagatcagcaagatgcatctggaaataagctgcttcttgatgttggtctctggttgactcacaagattaaggattattgcaagagcaagaagatggagatgactattaaatacatagatccaacttacatgatccgtgctattccaagcaatgcatcagacaatgtctattgcaccctgctcgcacatagtgccattcatggtgcaatggcgggatacagctttacagtcggaatggttaatggcaggcatgcatatataccatttcatagggtaacatctacaaggaacaaggtgaggataactgacaggatgtgggcgaggctgctgtcttcaaccaaccaaccgagtttcctgagccagaaggacatcgacgcggccagagaagccgacaaggcggccaaccgcatgaagagcagagaggacgcgaagaagcaatctacaccagtgttggcaaatggtgagaaatagtgtgcttttgacggttctttgttgtatgcagtagctgctgcaagctggctgagatcagtaggccaaaactgcgaggtcgatgagttttacttccatttgcatgcgaacagaattcacgtaataaaagcttcatagtgtgtatttgcgttagtaaagagagaccgccgcgggttttcc

SEQ ID NO: 262614 - DNA, 701 bp, Zea mays
cgccggctttaaaaacgcacacaagcgctaaaaccctctccaccgtccacctcagctcccatatccgctcccctacctctccagcatctcccgtccacccgtcgtcctcctagctcctctactcgccagtcgccatgggcaagattaagatcggaatcaacggcttcggaaggatcggcaggctcgtggccagggtcgccctccagagcgaggatgtcgagctcgtcgccgtcaacgaccccttcatcaccacggactacatgacctacatgttcaagtacgacaccgtccacggccactggaagcacagcgacatcacactcaaggactccaagacccttctcttcggtgacaagccggtcaccgtctttggcatcaggaaccctgaggaaatcccgtggggtgaggctggcgctgagtatgtcgtggagtccaccggcgtcttcactgacaaggacaaggctgctgcacatctgaagggtggtgccaagaaggttgttatctctgccccaagcaaagatgcacccatgtttgttgttggtgtcaatgaggacaagtacacctccgatgttaacattgtttccaatgctagctgcaccacaaactgccttgctccccttgctaaggtcattcatgacaactttggcattattgagggcttgatgacaactggtcatgccatcactgccacacagaaaact

SEQ ID NO: 262615 - DNA, 491 bp, Zea mays
cggatgctagggcggccgcgtgggcggacgcgtgggcgggggcgtgccgctgcctccgcctctcgagtctcgtccacccgtcgtcctcctagctcctctactcgccagtcgccatgggcaagattaagatcggaatcaacggcttcggaaggatcggcaggctcgtggccagggtcgccctccagagcgaggatgtcgagctcgtcgccgtcaacgaccccttcatcaccacggactacatgacctacatgttcaagtacgacaccgtccacggccactggaagcacagcgacatcacactcaaggactccaagacccttctcttcggtgacaagccggtcaccgtctttggcatcaggaaccctgaggaaatcccgtggggtgaggctggcgctgagtatgtcgtggagtccaccggcgtcttcactgacaaggacaaggctgctgcacatctcaagggtggtgccaagaaggtgttatctctgccccaa

SEQ ID NO: 262616 - DNA, 542 bp, Zea mays
gagaaaggcaggcggaggcggacaggccacccccgcacctcattccacaattatttgcgcccgtcccatgtcagtcggctttaaaaggacacgagcgcttaaacccccaccccatatccgcatccgctgcctccgcctctcgagtctcgtccacccgtcatcctcctagctcctctactcgccagtcgccatgggtaattcctcgctcccggattcagcgcaagattaagatcggaatcaacggcttcggaaggatcggcaggctcgtggccagggtcgccctccagagcgaggatgtcgagctcgtcgccgtcaacgaccccttcatcaccacggactacatgacctacatgttcaagtacgacaccgtccacggccactggaagcacagcgacatcacactcaaggactccaagacccttctcttcggtgacaagccggtcaccgtctttggcatcaggaaccctgaggaaatcccgtggggtgaggctggcgctgagtatgtcgtggagtccaccggcgtcttcactgacaagggacag

SEQ ID NO: 262617 - DNA, 251 bp, Zea mays
cctcagctcccatatccgctcccctacctctccagcatctcccgtctccgtcgtctcgtctccgctcctcacctcgccgccagccatgggcaagatcaagatcggaatcaacggtttcggaaggatcggcaggctcgtggccagggtcgccctgcagagcgaggatgtcgagctcgtcgccgtcaacgaccccttcatcaccacggattacatgacctacatgtccaagtacgacaccgtgcacggccaat

SEQ ID NO: 262618 - DNA, 1100 bp, Zea mays
taagcataatgggtggatttatttaaagatatatggcggtttttgaagatacagtcttcaatctgtgatcttgttgccgttgccaggctattaaatgccactctggttattcctgagatacaagcaacaactggtacaaaaggcatcagttcaaagttcaaaagcttttcttatctatacgatgaagatcatttcatacattcactgtccagtgatgtggttattgtgcatggcttgccaaaggatcttagagaggctaggaaaaagataaaatttcccacagtatctcctaggaattctgctactccagaatactacatcaaagaagtattacccagacttgtaaaatcaaaagttcttgggataattgttaatggaggtaattgtcttcagtcaattctccctgcaagtttggaggaatttcagcagcttagatgcagggtagccttccatgctctgaggttgcgccctcaaattcgggctcttgggagccaaatagtaggaagattgcgagcatctggccgtccttatgtggcctatcacccaggactgcttagagatactctagctttttatggttgcgctgaactgttccaggatattcatacagagcttattcagtatagaaggaatcagatgattaaacgaggaacagtaaaggagcagctagcagttgattcagtgtccaggaagatggctggtttgtgtccactcatgccagaagaggttggacttctacttcaagcagtaggttacccaccaactacaataatattcttggccggttctgagacttttggtggacaaagaatgcttattcctctacgagctatgtttcggctaacctagtagaccgcacttcattatgtagtcagagggagctgtttgatttagttgggccagaagatcctcgaaccccagatttgccacagcctccacctccgcaaggccattctatgcacatgagaaggaaggctggtatggttggattggtgagaatgacacagaaccggatgcttcactgatcgagttcaggaggcaagcacaccagttgctctgggatgcacttgattattttgtttctgttgaagctgatgcct

SEQ ID NO: 262619 - DNA, 302 bp, Zea mays
agctgtttgatttagttgggtcagaagatcctctaacctcagatttgccacagcctccacctcccaaaagtgaaaaacaactcattgaagaatggaagagagcagggcctcgtccaagaccgctgcctccacctcctgcaaggccattctatgcacatgagaaggaaggctggtatggttggattggtgagaatgacacagaaccggaggcttcactgattgagttcaggaggcaagcacatcggttgctctgggatgcacttgattattttgtttctgttgaagctgatgccttcttccct

SEQ ID NO: 262620 - DNA, 413 bp, Zea mays
cccacgcgtccgctcctggagagctcctcctcccggatgccatccccgtgacgctcccagccgccgcgcccgacgccatccccacgagcgccttctccgacgccgtctccgctccgccgcattctccgacgccgtctccgctccgccgtcttctccgacgtcgtcaccttcccctcgacaaggttgcttagaagcagtgtgcagtgatgcgaggcatggatgcgagagtgcaaagtggaagcaacacatgaagtcgacatggagaaggaaaatgcaatgacagtccacatgaaacttgggaaaaaagaattaaatcccaaagttcctaatgaagagacttggaaattttttacaggtttatgttatatcggctatctatctgtgtgaatggagatgaccttgctggatggatt

SEQ ID NO: 262621 - DNA, 708 bp, Zea mays
  unsure (1)..(708): unsure at all n locations
gtgcgaaacgtttcacgtgagcaaaccggggcgtattcctctctctttcctcaacctcatccgagtggctctccgtgtgctgtggcggcggcggcgcccggctctgctcggacggactccaccgaaggctcggctcccctcggactccacctgcgacggccggccctctgcctgcaccgacggtgcccggctccctcggcatccaccagcggtgcccgactccaagaaatgtacaagtcacggctgcaggagctgtgccagaagcggcgatgggcgccgccgttgtacgagcctacccgagagggtcctgcccacgcgcccctcttccgcgccactgtcgtcgtgaatggcgagaggttcagttcccgggatgaaggggagaagtcactcaaggaggcgtacaacctcgcggcgatggccgccttcgacaacctcatcgcgctcccggccgcggcccttgcccctgccccggctgctccagcgccgccctcatccgagacccagcttccttacaagagtcagttacaaatttatgctcagaagcgaggcaaactcctgccttcatatcgtcgcattcatggaggttctcttcatgcacctctatttaagtcagaagtacccatagatggtcaaacatttgagagcccagagtactgtcacacaatgaaggaagctganacagttgctgcaaaagttgctctgatgtcc

SEQ ID NO: 262622 - DNA, 1243 bp, Zea mays
gactttaaacgtttcacgtgagcaaacctgggcgtattcctctctctttcctcatcctcatccgagtggctctctccttgtgctgtggcggcggcggcgcccggctctgctcggacggactccaccgaaggcgctcggctcccctcgggctccacctgcgacggccggccctctgactgcaccgacggtgcccgccccccctcggcatccaccagcggtgcccggctccaagtccccgccgccactccgaccgtcctctagcagctccgtccggtggtccggccagctgcctagctccctccgaccgtccggccagcatcgcctcctgctcgcggcctcgctcagctcctccgccctctgttgagacgcagatcttggtgcggcagggcaccacagaggctgtgcgtgtgttggtggcctggtgctagcaaccgagagccagtgtccagcctgccagctcagcccggcgccaaccgcccagcggctggctcgggcagcggccagtggccaacagccgacaaccatacctcgtttcgtcggcgttcctccgccgctgcccccaactatgcaccctgttccagtctccacccagccctttaccgcaactcctgcaaaaaaacttgtttcaaggagcactgctgtgaggaaggccatccattttgtcaacctgcggacagctggaaggtctagtggaaacctggctatgaactccgtaccgaaaccagcacttgggtccgaaacatcttggagggaggattttgctgtgggggataaggatgctgtggtcattgttgatcatgggtcaagacgccaagaatccaatctcatgctaaatgactttgttgagatgttccgggcgaagactagctatagtattgttgaggctgctcatatggagctagcggagcctactataaaggatgcttttggaaaatgtgtgcaacaaggagcatcacgagttattgtcagtccatatttcctttcccctggacgacactggaagcaagacattcctgctttagcaccgtaggcgtcaaaggagcactgaaatataccctatattgccactggccctcttgagctgcatgagcttatggcggatatcatgacatgatcgcatcaagtactgcctgcgacatgatgcgggggatgtcgatgagtgtacagagtgtgccggaactggcacgtgcctactgtgctcgtgatggagcattcctgggaatggatcctggagaatactaga

SEQ ID NO: 262623 - DNA, 415 bp, Zea mays
ctcagggccatatggagcagctcgaggcgtctgcacaccaccagcagcttgatcagtacttaccgatgttcgatctaccacccaagatcctatgcagagtagtcaacgtggaactacgggccgaagctgattcagatgaagtttatgctcaaattatgttgcagccagaagctgatcaaaatgaactcaccagcctggacgctgaaccacaagaacgtgaaaaatgcactgcccattccttctgcaagacactgacagcttcagatacgagcactcacggcgggttttctgttcttcggaggcatgctgaggaatgtctttctcagctggacatgtctcaaaatccaccttgccaagaactggttgccaaagatcttcatgggactgaatggcattttcggcacaattttcgagg

SEQ ID NO: 262624 - DNA, 1125 bp, Zea mays
gtacgtcggattccgggtcgaccacgtccgcgacgtgtcggacgcgtggcggacgcgtggcggaccgtgggtaaataagcggatatgggcactgttgtaatggagcaaaatagaggctggcactatcagagagggtgacagtttattgattatgccaaacaagtctcatgtgaaagtcattggtttgaacttggacgagagcaaagtacgtcgtgctggacctgctgagaatgttcgtgtcaaattgtccggagttgaggaggaggatgtaatggctggttttgtactttcaagtgtcgctaatcctgttggtgccgttagtgaattcattgctcagttgcagattttagagttgcttgacaatgctattttcactgccggctacaaagctgtgttgcatattcactctgttgtcgaagagtgtgagattgttgagctcatagaggaaattggcatgaagaaaaagaaagaagaagatccaaagaagaaaaagccaaagaggaagcctctttttgtgaagaacggtgcaattgttgtttgccgcattcaggtgaataacttgatatgcatagagaagttctctgatttccctcagcttggaaggtttacacttagaactgaaggaaagacggtagctgtaggcaaagttgttgatattccgcctgctggtagcccaacattctgagcttaagtcaattttgaacaggatggataatcatgaagcagtgcgttcgcttaagatacttttttttgggaagtgagattagttgttgaggttagattttttttcagtccatcttgagaatggtctatgcctttatggtttaggctagcaagtcttagattggttgcataaaattacatctctggttacatgtgaggttgtaaaatcagtatggaattatggatgagtgtaccaaccttaatgtacccgttcaagattgtggtggcatttttgcgtacaatgctgtaactgtacagttgtgtgtgaagtcaaatgggcaggctgcattactcggatgtgcagcgtcgtgtcacacctggttttaagggtaaaaccgaatgcataacatatgtgtgctaggatctattttaacatatatgttgacatcatgagtgtaatat

SEQ ID NO: 262625 - DNA, 161 bp, Zea mays
gtgaggttgtaaaatcagtatggaattatggatgagtgtaccaccataatcgtgaacggggacattcaggttggtacacgcatccataattccatactgattttacaacctcacatgtaaccagagatgtaaagatggatgagtgtaccaaccttaatgta

SEQ ID NO: 262626 - DNA, 352 bp, Zea mays
accgccggagcctgatttaccatcactgctgctggtcgtaaccggtcgcggctctggtccttggatagggcaaggggctgcatagagagcacatggcctgttggagcagtacttgatgccgagttttctagcagtgttctggaagatcccgttgcgctctgaccatccaacgaaaaccagatacttgtgcctgcctggtgattccggagcccaaacaacttgcccaacgctcaacgatgttgggacgcctttaaccgctaccacttcccctctggaaatgtcaagaacaaacagtgagggtcttcctttcttggagtacgttcaccccagtcctcctcccacacgccctgcc

SEQ ID NO: 262627 - DNA, 442 bp, Zea mays
cggacgcgtgggcggacgcgtgggccagatgcaaatgcaagtgtcttttatggtaggatgaagcgtctttgtgaaactgagcttggtttagtaactcaatgttgtcaacctaagaatgtttttaaaggtggccgacaatatctccaaaacctggctcttaaaattaatgttaaggttggtggccgtaatacagttctcgaagatgctttaaataggagaatacatttgttaacagatttacctacaattatctttggagctgatgttacccacccagctccaggggaagatgcatccccgtctattgcagcgagatggtgtcagtgaggggcaagtttttttttaagccaggtcttgctttatgaagtggatgcaattcgaaaggcgtgtgccagcttggaagagggctacctttcttcaattacattcattgtggtgcaaa

SEQ ID NO: 262628 - DNA, 1694 bp, Zea mays
tcgcgatctagaagcacgaggctgcgagcgagacagccaaggtgctcatcgactccagccagccgcccaaagccagccgcccaaaaatccaggcgcaaatcacaacctcgcatcctcttctgtcccgtctccagctcttcgttcgttcccctctcgccgcccgtctcccccgcggtcgaggagccgccaatagcaaggagagggtttcctcctccctccacggctccaccgagctccccgatccctccgccccaaatcccacacacccggttggccaccgcctcgccatggatttggatctgtggatctccaaggtcaaggagggtcagcacctcgccgagcacgagcttcagtccctctgcgaatatgtgaaggagatcctcatcgaagagtcgaacgttcaaccggtgaatagccccgtgacggtttgcggtgatatccatgggcagttccatgacctaatgaagctcttcgcgacggggggccacgtcccagagacgaactatattttcatgggtgattttgtggaccgtggcttcaatagtctagaggttttcaccatcctattgctactaaaagcgaggtatcctgcacacatcacccttctgcgtggaaatcatgaaagtaggcagttgacacaggtgtatggtttctatgatgagtgtcagagaaagtatggcaacgccaatgcatggaggtactgcactgatgtttttgattaccttacgctatcagcaatcattaatggccaagtcctctgtgttcatggtggtctttctcctgatgtacgcactattgaccagatacgaacgattgatcgcaattgtgaaattccccatgaaggccctttctgcgatcttatgtggagtgaccctgaggagatagagacatgggctgttagtccccgtggagcaggttggctgtttggatcgcgagtaacagcagagttcaactttgttaatggtatcgagctagtttgccgggctcaccagctggtccaggaaggcttaaagtacatgttccaggagaagggccttgtcactgtgtggtctgcacctaattattgctacagatgtggcaatgtcgcttctatattaagcttcgatgagaagatggaaagagatgtcaagttcttcacagagacagaggagaacaaccagatgcgaggcccaaggaccgcagtcccatatttcctctgacttcaattgtacaattttagaagtctacattcgaatctgtaagggctaaagatcagtcagatgtgtttattgttgtaggtccagatcatagtgcaatctgatgcgtttgatttctcttttccttttaaccacatgtacaatagaccatccggacagtctcatgctcctgtatcccttcggtgacactgccaaagttttgtttgtgattttgttcccgtgctatccaaaaaaaaaaaaaaaaaaaaaaaaaaaaaaaaaaaaaaaaaaaaaaaaaaaaaaaaaaaaaaaaaaaaaaaaaaaaaaaaaaaaaaaaaaaaaaaaaaaaaaaagggtaaacgttataaaggatccaaccttaagcaacccaattatgcaacgtaataaatcttttttactggcaccaaaatcaaattaattggccgtggtttaacaacatctaaactggaaaaaccctggtgttaccaaactaaatacgcttgcactaaatgccctttt

SEQ ID NO: 262629 - DNA, 646 bp, Zea mays
aaaaaattttggaatcttatgctaaatcatggacgtctggtgtcctggacaaagctttacagcgtgattccatggccttcacattggcaaagcatcacctttcaggctttgtcttccagtccagcgattctggcacaatgctgcgaaaaaaactggtcaaatcgcttatccggtgctatgcacagaagcggcatcatgaggttatgcttaagtgcttcgttcagcaaggcatcgcacaggattccaagagcagtgagcttgaccggagatttgaaatcttgaaggatgcttgtgagatgaactccaacctcgtaggtgaagtccagagacttttgccaaaggcatgtcttggccaatgaagccagatatttaagtgtgtcattaacttggcagcgttagttgttgggaaagctcgacaaagtggcccaaaatatgcaactgaggaaactcacggtcggggctagtggttacttttaattttgatgaagggaacgccgagcacgcagcaaccctgagtctaacctggctatggttaggctgctcttagcagagcatgcatatggtcatgtaaacagtagaccaccctgtctattgagtgaagtttgaaatagactttatatatagcattaggcttcctttgattcct

SEQ ID NO: 262630 - DNA, 458 bp, Zea mays
gttatgctttactaatcgtcctgccctttctctctaatttccccccttctcctttcgctgcttgcttgtggctgtgacaggaatactagaagccaaggaaaagtgatgttggatttataggagaaaaaaaaggagattgagtggcagcatagtggtagctcccactgtcttttggtcttttagtccctacctttttaggggataggtctacttaaccacaagaggagaagatgccattagccttgattaagaaaacggcggcatatgcaatattatcgccagatataagtatatatatattatatatacaaataatcccctagtttctagtatatatatagtatctgtacttagtatttaacagtagcaggtaacgtcagcccaaagatttttactgtgacaaggtcctacaactacagccacctccactaggtttaccaaatgtgaggttaatccac

SEQ ID NO: 262631 - DNA, 1376 bp, Zea mays
gccacgcgtccgaccacgcgtccgtccacgcgtccggccacgcgtgcgcgcacgcgttcggggacgcgtgggcgcacttgttacatttggagagccataatgcatttgggctttcagacagtgaagaatcacaggaacctaccaagcgacgcaatagactgggttcagcaggccttgcaccgtattacgccaatatcatcagtcagatcgatactcttggttctcgttcaagctctgttcctccaaatacaagggatgcattataccaaagtttgccaccaaccataaagtcatctctccgttctaagctacactcctttggagtcaacgaagagcctactgtttctcaaatcaaggctgaaatggagaagaccctgcggtggcttgtccctattgcaagtaacaccaccaaggctcaccatggtttcggttggggcggaccgtgggcaaatactgggtcagatgtgaactgcaagccaaatgggcagatagacctgatccgaattgacacactgtaccacgctgacaaggagaagactgaagcatatatcctcgagcttgttatttggcttcatcatcttatcagcctatccaaaactgcaaatggtgaaaggtctccaatcaagtctcctgttcggtctcctacacaaagaggggcctcaatcacattgtctccaaacaaaaacagcagcaattcatcatcctcttctgacgcaagaagatcaagatatgctaagggatgtcaagtacaggaaattcatccctggtataagcaaaagccaggagtttgacactaaggaaaggcataataagcaaagcaggttaagcaaaagtaatagccattcaccaagcagtggcaaccggaaagagacgctatcaatcaggaggctgcttcctgtgatcgactttgagatcgacaggataaaagcccttgatatgatcgacagagttgacgatctgagagtacaatgatgaacctagattaagcaatggcaaagtgaaaaatgcaccctcaatctatgatcctgaaaatcaagattgcttgaaagatacaagtaatcagctgagctgaattggcatgctgtcagcacttctgcagcaatgtccctgcttgaggtgaacaggcatcatggtgccggtttgaaggccccccgagggttagagatggtggcatcatgttctggccaactttgtatgatatatggcagggttaataggaaagtgaaattttattgtaaaaagggatttgttgtgttacttagctcatggacaaggaaatccaagttttgagaagggcggaggcggctcaaagatctagctgcccttcttgctgttttggttagttctatcaaatccatgaactagtgatcccgctt

SEQ ID NO: 262632 - DNA, 653 bp, Zea mays
  unsure (1)..(653): unsure at all n locations
cggacgtgancgtgacgcgtgggactcaaccgctcgaaattcgggggaagcaagcgagagcagcagcaagcctcatcgggaagtggagagatggaggcggcgggtcgcctcctcctcctcatcgtctcctccctcctcctgctcctctcgccggagcggccggcggaggccgcgccgccgcgaatccagccgctcgccaccgccgcgctgagccgcctctacgacacctccaactacggcaggctgcagctcaacaacggcctcgcgctcactccgcagatggggtggaacagctggaatttcttcgcctgcaacattaacgagacggtcatccgcgagacagctgatgcgctggtgtccacgggactggctgcgctgggctacaacttcgtaaatatcgatgattgctggtcatacgtgaaacgaggaaagcaggatcaattgctgcctgatccaaagactttcccttcaggcatcaaagcccttgcagattatgtgcatggaaaaggtctgaaacttggtatatactctgatgctgggaaatttacttgccaagttcgacctggatcactcggtcatgaaaatgacgatgctgcgatctttgcttatggggtattgattacctgaagtatgataactgctacaatttggga

SEQ ID NO: 262633 - DNA, 439 bp, Zea mays
cggacgcgtgggataactcctagcatgatagaaaatgttactgacctggaagcggagaggtggatttttaaatcgggttttgtccagtggttaatagctctgatactaggaacatatttcaaggttggatcatcgtatatagcactcatctggcttgtttctcctgcttttgcatatggttttttggaagctactctctcccctgttcggctacctaaacagcttaaggttgtcacgttggttgtgggtttggttgcaccagttgtgtcttctgctggtttggctgttcgtatggcggatgtaattgttggaagtatactacgtattgacaggaatcctggcggactaccagactggcttggaaatgtaatagtttcggttgccattgctgctgtcgtttgttccacgtttgtgtatctgctttcatacattcatatct

SEQ ID NO: 262634 - DNA, 544 bp, Zea mays
cccacgcgttcggtgtcatgctacactctaataataaacgagacttgctgtcagcaatggcaagcttatcaaaagaagccaaacaagatgcagctgttaagcatgcccttgcagttcatgcttctgttttatctggcaattacgttctatttttcaaactgtacaagaaggctcccaatttgaactcatgcctcagggatctatatgtggagcggatgcgcttcgaagctatgaaatgcatgtctaggtcatatcgcccaactgtacctgtgggatatgttgcacagattttggggttcatgagaactgatacaggctgtgcaactcaatggggagggggatgatggattagaagaatgcgaaaaatggttgaaagcgcatgggatagttctttcagaaggtaacagtggggaatcacaaatagacatgaatgcttcgtcttctacactttacatgccatatccagataatgcggttgcacatggtgatgcatcacttgctgttgatgactctttggcacggactgactgacatcttaaaaggt

SEQ ID NO: 262635 - DNA, 693 bp, Zea mays
aacaaggaaccaccattttgatgcaaaggttagcatctgcattttactcgagttacatgtgactccgccccccctttcccggggtgcctttgatttgcgacatccaggagcagatgcgacaggatcacaagtaggaggagctgcgacgatgctgtagcgagagacatgggtgccgaggtcgttgtgctgcggtggtggcaggacaggaaggaaacgaaaaagcaggagccagggttgttcaacaacgtgaccgagtcgctgaggcgaggaagagtaaggtgaaggcactcgtcgacgcctttgagactgacagagcgtcatctcgctgcaggaaaccagcaagcctgctgctgctccagctatgaaagtaggtgtcgtgccatgagtgcttcttgacctgcagtgtgcatgatcacctttcttggaattttaaactttttttggttgttagtgaccgtaaaagtggcgcttgttgaggtttgctcgttcccatgtaaactgacttttctcatgggagttttcatacttttgtagtgctagaaaaaggaaagtctgtacaggttttgtgtctatgcaaggcttgagaagttggcattgtactgataagtgataagtaaacaagttattgtaatgatttaaactagattgttctgaaaggaaatggaatgcataaagcaaattaaactttgtatt

SEQ ID NO: 262636 - DNA, 1570 bp, Zea mays
gaattcctgggtcgaccgacgcgtccgcccaggcgtccgccctccacccctcgcgagctctccaccccgccgccgcccatggtggccgggccaccaccaccggcgcagtgtgccaagcacttcgctgctgggccgccgccgccgccccaagctggtgctgggcgccgcacgccgaccccgccctcgtctggatccggcgggaacgggtgcgaagaaaataaaaccatttgggtcggtgacctccagtactggatggatgaaaactacctacataactgcttcgggcccagcggcgaggtggttacaataaaagttatccgcaataggcaaacaggacagtcagaggggtatggatttgttgagttcttttctcatgcatcagcagagaaagctcttcagaattttactggtcatgtgatgccaaacactgaccggccatttaaattgaactgggcatcgtatagcatgggtgaaaagcgatctgaagtggcttctgatcactcgatatttgttggcgatctagctgctgatgtcactgatgaaatgctgctggagcttttctccagcaagtaccgctcggtgaaaggagctaaagttattattgatgcaaacacaggccgttccaggggctatggatttgtcaggtttggagacgacaacgacaaatctcatgccatgtctgaaatgaatggtgtatattgctctacgaggccaattcgtataggacctgcgactcccagaagatcttcaggtgattctggctcctcgactcctggtcattcagatggtgattcttctaacagaacggtatatgttggtgggcttgaccccaatgtcagtgaagatgaactgagaaaagcctttgccaaatatgatcttgcctctgtgaaaattcctctaggaaagcaatgtggctttgttcaatttgttagcagaactgatgctgaagaagcactacaaggattaaatggatcactcattggaaagcaggcagttcgcctttcatgggtccgcagcccatcgcataagcagtctaggggtgactccgtcaacaggaggaacaacatgtactatggcacaccattctacggcggatatggctatgcctccccggtgccacacccaaacatgtacgctgcagcgtatggcacgtacccgctatatggcaaccagcagctagtgagctagagagctcccctccgacgtgtcccctctgacgggaaacaaaggttttggtccggtgagcatagtagcgtcaggtgagaaggtgcctttataaggctgtcctaagaagtgggcgagatatgttgttgcatcgttatcgttatggtgcctgtaactgttgtgtgtgccgtgtgcgtccggaagaattggatggaatggaactcgtggcttgttgtagtacatcagagagtcatgttattctttcaagaaattttgacttggtaataaattaaactattgtttgtgcgtccgggcagcccttttaaaaaaaaataaaaaaaaaaaaaaaaaaaaaaaagaaaagaataaagaaacaaatacaaaaacgaaaaagaatcaagaagaa

SEQ ID NO: 262637 - DNA, 598 bp, Zea mays
cccacgcgtccgcccacgcgtccgcccacgcgtccgcccacgcgtccgcggacgcgtgggccctcgcgagctctccacccctccacacgaccctcctcggcggcggcggcggcgatgcagatggcggcgaccaccaccgagtcccaggcggccgtgccgcctcaacaccctcacgcccacccccacgcgcccccgcagcatgctcacccgcaccaccacatgccgcagccacggtgggtcgtcatcccgtacccgccgccgccgcccatggtggccgcgccaccaccgccgccgcagtttgccaagcacttcgctgctgggccgcccccgccgccccaagctggtgctgggcgccgcacgccgaccccgccctcgtctggatccggcgggaacgggtgcgaagaaaataaaaccatttgggtcggtgacctccagtactggatggatgaaaactacctacataactgcttcgggcccagcggcgagggtggttacaattaaagttatcccgcataggcaaacaggacagtcagaggggcatggatttgctgagttcttttctcatgcatcagcagagaaagctcttcagattttactg

SEQ ID NO: 262638 - DNA, 421 bp, Zea mays
ttggtatagtatcaggaaaacgacctagtgcttgaaaaaaaatcagtgtatagctggcactgcatgtactgaactggcataaacctctctacatttactccttgagtaactttttagctaggttccttgccgcaaacttgctatatgctattccacggatagtcaatctaaaccaatttaatgtttccagagcatgttatgtgttatgtaccatgatgttgctcatgttttgtgtaacctctctagtttctatgatctgttcactgaacttgatgactactgtactcaggtgattctggctcctcgactcctggtcattcagatggtgattcttctaacagaacggtatatgttggtgggcttgaccccaatgtcagtgaagatgaactgagaaaagcctttgccaatatgatcttgctct

SEQ ID NO: 262639 - DNA, 550 bp, Zea mays
actcgcgccagtcgaatcacaaatcaagcacaaaccacgcgtccagcgcggttctagcagaagaggtagctgaagacgccgacgacgagtagggccgcggcaaggggcccgacgtccgcggcgtcgaaggcgggggccggggcgggggcctcggcggctgcggcggacgccacgagcgcggcggccatggcggcgacggcgacgaacttcatcctgaggccggccatctgcgagtgtgtagtgtagctagcgagtcgggtttttattgggccgcgcgggatctctctacgagagtatgaagcagtagaagtgtagagagatgcgcgcaggcggccgggccgcctcaacaccctcacgcccacccccacgcgcccccgcagcatgctcacccgcaccaccacatgccgcagccacggtgggtcgtaatcccgtacccgccgccgccgcccatggtggccgcgccaccaccgccgccgcagtttgccaagcacttcgctgctgggccgcccccgccgccccaagctggtgctgggcgccgcacgccgacccc

SEQ ID NO: 262640 - DNA, 431 bp, Zea mays
actaactgccaccgacgcgccctcgccgcgatgatctccctgctccgacgcgccctcgccgcctccgcctccgcctcgtatccggcggccacgtaccggagactcctcgtcgtcgtgccactctctccgcccgcggcccctccaggcccatgccaggcgcccgcggcagggtcgcaggagccgccgaggcgggcgttccactgttctacgccccccctggggttcaggtccacccccgcgtcgtgggccggtccctatccgggggagggcgagggcgagggcgtggatacgggggctgagaaggggctggagatcgcgaggctggggacctctccgcggatcgtggagaagctcgccgcgcggggcatcaccaggctcttccccatccagagggctgttcttgagccagcaatgcaaggaaaagacatgat

SEQ ID NO: 262641 - DNA, 686 bp, Zea mays
acggacgcgtgggcgaaaaaaaaagatgaacagggagggagagaggaaaaagatgaacatgacaggacctcgtcgctaaaaccctagcgcagcggcgcgggagcggatgcaccttgccctgatcatctcccgcattcgcctcttgccgaccgccatgcccagcacccgctccgcctccgcctccaggctgctggtccgcgctgacaacagcccagttgcacgagaaatcaaacgtgaatccagtgtttcttttgacactcccaagcccgaagcaactgtctctgttaagcggagaagggtgaagcgagaacttgaagtaaatgggcagcatcataagaagcaggtccctgacattgaggattttatatacgaaaaggccaagacattgacatcgtcaagtaaggccacggcatctttggtcaaggtggagaaaaaggtcggagtttcttcagttataaaagttggagctccagataactgggtggcagttcttggaggcattaacagcatgaggttatctggtgaagcccccgtagatactaagggctgtgaaaaagccggttctctccttccacccaaggaaagaagattcgcagttctgatatcaactatgatgtcaagccagacaaaagatgaagttacacatgctgctgtggaacgcctttatgaaaacgcatacttgatcc

SEQ ID NO: 262642 - DNA, 798 bp, Zea mays
gacggatgcatccacgcatccgcttatgtccatgtacgataagatacccaatgtagtcatttgcgcagttggagctccagagaactgggaggcagggcttgggggcattaaaagcatgaggttatctggtgaagcccccgtagatacgaagggctgtgaaaaagctggttctctccttccacccaaggaaagaagatttgcagttctgatatcaactatgatgtcaagccagacaaaagatgaagttacacatgctgctgtggaacgcctctctgaaaacggtttacttgatccggatgctatagtgaggactgatgagaccacgcttgcgaatcttatcaaacctgtcggaattttcccctatcagcgaaaggcgcagttcataaaagaagcttctaaaatttgccttgagcgctttggaggggatattccggattctctgaatgaactgcttgctctgaggggagttggccctaaaatggctcatttggtgatgagcattgcttggaagaatactcaaggaatctgtgttgacactcatgtgcatcgcatttctaaccgacttgggtgggtttttcgggaagggacaagacagaaaactacgacaccagaacagacaagaatttctctagagaaatggctacccaaggatgagtgggaacctcataaatccctcactggttggatttgggcaaactatctgtactccactgaggcccaaatgcgataagtgtggcatcaacaacctttgcccttctgctttaaggaatcatcaagcccatatccaagcaaagaaac

SEQ ID NO: 262643 - DNA, 747 bp, Zea mays
actagttctagatcgcgggcggccgcccccacaccgtctcctccacaacacgctcctcacctcgcggcgactcttgccaagcattcctccgcgaaaaacgcatccgctccaaggggagttgatcgagaagcgttggtggacatgggtcagatccagtactccgagaagtacttcgacgacacctacgagtacaggcacgtcgtcctcccgccagaggtcgccaagctcctccccaagaaccgcctcctgtccgagaacgagtggcgcgcgatcggagtgcagcagagccgcgggtgggtgcactacgcgatccaccgcccggagccgcacatcatgctgttccgccgcccgatcaactaccagcagcagcaggaggcggctgccgcgcagatgctggccaagtgagcccctggtggccagggcggcgaccaggaacgtttaaaaccctaaccccctttccatctctaaaaggggcgtcgctgttctgttgatcaattcctctatgctgttagttggaaacttcgggtgtagttggtggatttgctggtgtgtgccttgtgttcgtggaaattcctgtgaaggaactgccatgtgttaggctgttaccatgcccattttcttaatactatgtgttgactgtgatcaagaaaaaactccggcactgatgatatttaatctgtttgatgtgatcaaaaaaaaaaaaaaaaaaaaaaaaaagggcggccgtcgcgatctagaactagtcct

SEQ ID NO: 262644 - DNA, 771 bp, Zea mays
gccgacgcccgttgccttctcaccacaaatcctccaatttcttgtcttctccgcgaaatgttcctctgtctgtcgtgtatttgttctggtcgtttcccgattcggtagttggcttggggatttcactgcaagtctagggattttctgtagggaagttgatcgagaagtcttggtagacatggagcagatccagtactccgagaagtacttcgacgacacctatgaatacaggcacgtcgtcctcccgcccgaggtcgccaagctcctccccaggaacatccttctctccgagaagcagtggcggttggtgggtgtgcagcagagccgcgggtgggtgcactacgcgatccaccggccggagccgcacatcatgctgttccgccgcccgatcaactaccagcagcaggaggaggaagcggctgccgcgcatgtgctgcccaagtgaagcctctgctggcgaccaggaatgttaaaaacccctagccctcttttcatctctaaaaggggcgtcgctgttgtgttgattaatccctctggctgttgattggaaacttgggatctagttgggtcgacttgctggtgtgtgccttgtgttcgtggaaattcctgtgaaggaactgccatgtgttaggctgttaccatgcccattttcttaatactatgtgttgactgtgatcaagatggcactcatgcagggatgatatttaatctgtttgacgtgatctttgtaatggtgtgatctggttagtagcactgatatcatgtttaatc

SEQ ID NO: 262645 - DNA, 2047 bp, Zea mays
aggtgctgcaagaatggcgggagcaggcgggcctgccgctcggctcctggtggctgcacctgctgctgctgttcgcggcgcgcggcctcacctaccagttctggttcagctacggcaacatgctcttcttcacccgccgccgccgcgtcgtcgccgacggcgtcgacttccgccagatcgacgccgagtgggactgggacaactttctcgtgctgcaaacgctgattggggccacggtggtcaacagcccactgctcccgggcctgcggcagctctgcctgtgggacccgcgcgggtgggccgtcgccctgctgctgcatgtgggcttctcagagccggtcttctacctggcccaccgggccctccacagggccccgttcttcgcccgttaccacgccgcgctccactcctcgggcgtcacccagccgctgacagccgggttcgggacgccgctggaggtcctgctgctgactctggtgatgggggccccgctggcaggggccttcctggtgggggccggctccataggcctggtctacgtgcacgccctcgccttcgactacctgcgcgccatgggttacagcaacgtggaggtcgtgtcgcccagggtcttcgaggcgttcccgctgctcagatacatcctctacacgccttcgtacctgagcctgcaccaccgcgagcggtgtcgcaacttctgcctgttcatgccggcgctggacctggcgggcgggacgctggacgagcgggcgtgggcgctgcagcgcgcggcgtacgacggggggccgggcggcggcgcgctggggacgccggagttcgtgttcctggcgcacgtggtggacatgatgtcgtcgatgcacgtgccgttcgcgctccggtcgctcagctccaccccgttcgccaaccacttcatcctgctcccgttctggcccgtcgccttcggcttcatgctgctcatgtggtgctgctccaagaccttcgtcgtcagcttctactacctccgcggccacctccaccagacctggtccgtgccccgctacggcttccagtacttcctgccggcggcgaagaagggcatcaaccagcagatcgagctggccatcctgcgggccgacaggatgggcgtcaaggtgctcagcctcgccgcgctcaacaagaacgaggctctgaacggaggcggcaccctgttcgtgaacaagcacccggacctgcgcgtgagggtggtgcacggcaacacgctgacggcggccgtgatcctgaacgagatccccagcaacgtgagggaggtgttcctgaccggcgccacctccaagctcggcagggccatcgcgctctacctctgcaggaagaagatcagagtcctgatgttcacggtgtcgtcggagaggttcgtgaagatccagagggaggcgccgccggagtaccagcagtacctcgtgcaggtgaccaagtaccaggccgcacagaactgcaagacttggatcgtgggcaagtggctgtcgccgcgtgagcagcggtgggcgccgtccgggacgcacttccaccagttcgtggtgccgcccatcatcggcttccggcgggactgcacctacggcaagctcgccgccatgaggctgcccaaggacgtgcagggcctcagctcctgcgagtacacgatggagcgcggggtggtgcacgcgtgccacgccggcggcgtggtgcacttcctggaaggctggggccaccacgaggtgggcgccatcgacgtcgaccggatcgacgtcgtctggaaggcggcgctcaagcacgggctggcgccggtgtgatcatatcgcatcgtcgagccgcaccgcgcgcgcggtttgttttgcagcggctacctacctagctgcatatgcttgccaggccggggtccagccgccgcggttctgtgtgcatgcatgcaacagcccagcagaccacgggctaccgtgcgtggctaattcttgtactagtactactcctgctgtatgtaccgtgccgatggggcgatgggttaattaaagtcctctcgactacgccccgccgatgc

SEQ ID NO: 262646 - DNA, 653 bp, Zea mays
cccacgcgtccgcccacgcgtccgcccacccagctgcctgtttgattccgaggcggggatgacgagcccaatggtggccaccccggtccagttccacacaaccggccgcctcagcttctgctccttttcctttcccagcgcatcagggaggcggcgattcgcggcggtgagggcgtccgcggagacgatggcgacggagaagctgggcatcaaggtggagcgcaacccgcccgagtcccgtctctccgagctcggcgtccgccagtggcccaagtgggggtgcgagaagagcaagttcccgtggacctactccgccaaggagacgtgctacctgctgcaggggaaggtgaaggtgtaccccgaaggccacggggaggagttcgtggagatcggcgcgggagaccttgtcgtcttccccaagggcatgagctgcacctgggacgtcgccgaggccgtcgacaagcactacaacttcgagtagccgccgccgccgactagccctgcggcgctcgatgtagacttgctgtgctcttggactctgaacctatgatgctccactccagagttaacataccgtgtaataaagctcccgattacgggactacaatgctgtactatctgtttcagattccgttccgttagctgtgataaga

SEQ ID NO: 262647 - DNA, 410 bp, Zea mays
  unsure (1)..(410): unsure at all n locations
aattcccgggtcgacccacgcgtacgcccggtccagctccgcagcaccggccgcctcagcttctgctgcttccccagcagcgcatcggggacagcccccagtcggcggcgattcggggcggtgacggtgagggcgtccgcggagacgatggcgacggagaagctgggtatcaaggtggaacgcaacccgccagagtcccgcctctccgagctcggcgtccgccagtggcccacgtgggcgtgcgacccgccctcctccctcctcccgggcgtctcggtctctgttctcgcccgcggtcctacgctgctacactgcgcccgtgccctgacggcgaatccgcgctggtgaatgaatggatgggtccgtccatcaggtggnggtgcgagaagagcaagttcccgtggacctac

SEQ ID NO: 262648 - DNA, 1071 bp, Zea mays
agaaggctggtaccgcggtgcatggtactcggtctcggatattctccgggatcgactccacgacgtcacgttctttaaccaataagtgcagcaccagctgtgggccctgtttctgataaacaggccagcgctcccaaggggaactctgctgagcttcagaagaaaacaatagctctgcgcgggcgcgtgggcggcatacgtattttagatgaagcccatcaatgtatcgtggagctgcagagtcctgattactacccagaaattgttaaagaagctgtcaatcttgccctagataaaggcaccaattttgttgatcctcttgttaggctactggagcatttgtacacaaagaaaattttcaagactcaagacctggaatccggttgcttgttatacggtactctgctggatgacattggcattgaccttcctaaagctccagcacaatttggtgagatcattgctcgcctgactttgttgggtgccttgagatttgaagctctggaggttattttaaagaaaatggaggatacctacaaccgcaaagcagtttctaatgctgtcaagaaaaccttggaagcaaacccatcgggccagacaatcttaggctcacatgctgctgtaatagacgcttgcaacagccttttggaataatcctcttagcagctttggccaaccaactttttcagatgctgtctcttgcgaaagacagtgtcgtgtattctctgtagcttagatgtccaaggaacgcagtaccaaagatgcgaggaacagccagttttgggctgtataattttgcgagatcagatgagtgttaatttattattattattattgtttggaccaggatggaaagaaagaagccatggattttacccttgggcgaccagcttattttgctggaggccccagatgaacaaggctaaatatatgatgttttcgtgtccaaaaaaaaaaaaaaaaaaaaaaaaaaaaaaaaaaaagaaaaaaaaaaaaaaaaaaaaaaaaaagaaaacagaaaaaaagagaaaaaaagtgagagattcaaaaacctacagagacatccaagca

SEQ ID NO: 262649 - DNA, 2954 bp, Zea mays
  unsure (1)..(2954): unsure at all n locations
cccacgcgtccgtctcacgcgtccgctcctctcttccccgaaagagaggtcgcggacggaacccttccaccctcacctcatcccacaaccttcgattccttcacgatcttacctcgcgcgctcgccgattcctcgatcgagtcccgcgcgattcgctttctggtcggattctctcccccgaagcatgcagccggaccagcctgtgatcagcttgcgccccggcgggcggcggcggcccgcgcgccggccgcctcttctcccccgccttcgccacctccgtctctggagacttcctccgcccgcacggcgggggcgcctccggcatctccaagatcggagattcacattttgagccacgtgagcgtgttcgatacacaagagatcaacttctcgagctgcgtgagattgttgatgtgtctgaggaaattttaagaatcaagcaagagattgatgtagagcttcatggtgaagaccagagctgggttcgcaatgattcaactgttcaaggacaagcacaagctcaaacacaagcacagaatcgctatgctgagactgatagccgtgattggcgtgcacggtctgcacagctgactccgactaatgaagaaaaatcttgggacaacataagggaggctaaagaagcctatgcctctagcggtaggcagcaagagcaagctaacaggcaagatcagttaagctcccagtttgcttcgaaagctcaggttggccctacccctgctcttattaaggctgaagtgccctggtcagcccgaagaggcaatctctcggagaaagaaagagtcttgaaaacggtgaaaggtatactgaacaaacttacaccagagaaattcgatcttttaaagggtcaactaatggaagctggaattactactgctgatatattgaaggatgttatatctctcatatttgagaaggcagtttttgagcccactttctgtccaatgtatgctcaactttgttctgatctcaatgaaaagcttccgacattcccttctgaagagccaggtggcaaagagatcacattcaagcgtgtgatattgaacaattgtcaggaagcctttgaaggtgctagcaacttaagagctgagatttctaaattaactggccctgaccaagggatggaaagaagagacaaagaacggttggtcaaacttagaacacttggaaatattcggctaattggtgagctactcaagcaaaaaatggttcctgagaagatagttcatcacattgttatggagctattggggtctgggactgataaaaaaccatgccctgaagaggaagatgttgaggctatctgtcatttcttcaatacgattggtaaacagcttgacgagaacacaaagtctcggcggatcaatgacacatacttcatccagatgaaggagctaacaatgaatccccagcttgcaccacgtttgaggtttatggttcgtgatgtgattgatctccggtcaaataactgggtgcctcgacgtgaggagattaaggccaagacaatcagtgaaattcactccgaggcagaaaagaatcttggattacgacctggagcagcatctggcattaggaatggccgtagctcaccaggaggagcccttttgcctggaggggcatttccaatgaatcggccaggaactggaggcatgatgcctgggatgcctggttcaagaaagatgcctggaatgcctgggttggacaatgataactgggaagttccccgttctaaatcgatgccaagaggggactcgattcgcaaccaggggccgttgcttaataagccatcaacagttcacaagacatcatctattaacacgaggcttcttcctcaaggcagtggcgcaggactaattggcaagagcgcacttttgggaactggtgccccaccatcacgtcctctcagctttgggcctgagcccacacctcaaattacaccatcaccaaaaccattaagtgcagcaccagctcttgcccctgctcctgataaaccagccagtgctcccaaggggaactctgctgagcttaagaagaaaacaatagctcttcttgaggagtatttcagcatacgtattttagatgaagcacagcaatgtatcgaggagttgcagaatcgtggttactacccagagattgttaaagaagctgtcaatcttgccctagataaagggaccaattttgttgatcctctcgttaggctactggagcatttgtacacaaagaaaattttcaagactcaagacctggaatccggttgcttgttatacggtgctctgttggatgacattgggattgaccttcctaaagctccaacgcaatttggtgagattattgctcgcctgactttgttaggtgccttgagatttgaagttatggaggagattttaaagaaaatggaggataccatgtaccgcaaagcagcttctgatgctgtcatgaaaaccttggaagcaaacccattgggcagacaatctaggctacatgctgtgaatagacgcttgcaacagccttttggaataatcttcctagcagctttggcctaatcaacgcttttcagattctgtatcttgcgaaagacggtctcgtgtattctctatagtttaggtgtcaaggaattgaggaacagaccaattttgagctgtataattttgcgagatcagatgagtgttgattgttattgtttcggccaagaaggaaagaaagaagccatgaattttggtcttgggcgaccagcttaatttgcaggagtcctagatgaacaaggctaaatatgctgttactatgtccacctaaaatgttgttagttattttcctgcgactacacatttttgtaacgttgtactatggttttggaatgttttattgggtacaatatattgtgttatttaggagtcaaaantttatatattaanntattattttttataaattatata

SEQ ID NO: 262650 - DNA, 399 bp, Zea mays
actttttcagatgctgtctcttgcgaaagacagtgtcgtgtattccctgtagcttagggccttgtttgggagtaagggtaatagaggggattggaggggttagaatcccccactattcaattttaaatagtagaggattatagccccctcaatccccttcatttcacttgctcccaaacgagccctagatgtccaacggacgcagtaccacagatgcgacgtacagccagttttcggctgtataattttgcgagatcagatgagcgttcatttattattattattattgtttggaccaggatggaaagaaagaagccatggattttacccttgggcgaccagcttattttgctggaggccccagatgaacaaggctaaatatatgatgttttcgtgtcc

SEQ ID NO: 262651 - DNA, 580 bp, Zea mays
tattcctcctgggtcgtcctcgtccgaggcgatactccgatgccggcgtgtggctagccggtctcggcgtggcacaccgcctgcccttctctcatcctttaaatacggccccggccagccggccttgccatccatctatcatccatcatcaccagctagcacctcctttcccacgactcccgagctagcgctctgcgtgtggcgcgcggcagcatggcgactgcgaacgggagcagcaaggggtcgttcgaggtgcccaaggtggaggtcaggttcaccaagctcttcatcgacggcaagttcgtcgacgccgtctccggcaagacgttcgagacccgggaccctcgcaccggcgaggtgatcgccagcatcgcggagggagacaaggccgacgtcgacctcgccgtcaaggccgcccgggaggccttcgacaacgggccctggcccatgatgacgggatacgagcgtggtcggatcctccacaggttcgcggacctgatcgacgagcacgtggaggagctggcggcgctggacacggtggacgccggcaagctgttcgccgtgggcaaggcgcgggaca

SEQ ID NO: 262652 - DNA, 459 bp, Zea mays
gggaaaatgtctcgctcccttcataacagattaagcaagacagaaacaaggcacgtgcgtgaagcaaatcctggaaagcgttctaagcctagtaatattgttgctaatgtggcatcttttatacctcttgtgaagccaaaggtgcaaccaacaacatgtgtgaaaaaagatgttagagtgaaagcacttgagacagctgaagctgcaaaacgtcttgaagaaaagaaacgaagtgaacgtgaaatgcgcaaagcagcagcaaaactagagcgtgagaaactgaagcaagagaaagagttaaagcaaaaagaggaagaggaacagaagaagaaaagaggtgctgatgtggcaacaaggaagaggcagagggatgaggaggaaaggagggagaaggagagaaaaaggaaatgcattgaagaagctcgaaaacaacagaagcgacctattgaaagaaaacat

SEQ ID NO: 262653 - DNA, 1192 bp, Zea mays
ttttcttcctacggtctcgcggtattgcgcttctcgtcttctctaatctctttgcctccctccaccaccagtccaccaccactgctacccaaccctcgcttccccaaaccctagccaagggacacggtggccggcgatggacggcgacggaggaggcgctggtgcgctgcaccaccacacgcgctcacccgaggacgtcttccgcgatttccgcgcgcgccgagccggcatcgtcaaggcgctcaccacggatgtggagaagttctatcagcagtgcgatccagagaaagagaacttgtgcctttatggtttgccaaatgagacttgggaggtcactcttccagctgaggaagtacctcctgagcttccagaaccagcactggggataaactttgcccgtgatggaatggtcgaaaaagactggttgtctctagttgcagttcatagtgatgcatggctcctgtctgttgcattctattttggagctcgttttggatttgacaaagatgccaggagaaggctcttcaccatgattaacaacctgcccactgtttatgaagttgtgacgggggttgctaagaagcaatcgaaagcccccaacggcagcagcaaaagcagcaaacctaactctaaaccatcaaaactgaccaattctaacagtaagcccgcgaagccagcccacccaaaagaagaggaggacagcggccgggaggacgcagaggaggaccaggcgtacctgtgtgggtcctgtggggagagctatgcgaacggggagttctggatctgctgcgatgtctgcgagaagtggttccatggcaagtgtgtccgcatcacccctgccaaggcggagcacatcaagcagtacaagtgtcccagctgcagcaccaagcggagccgagaatgacggcaccctgggaacaggacctgctcccagttaacggaagcattttagaatccttaggagctatgaagcggtgtcattagaaccgcttcacctgtttagcgtaccggtgcgcgtgccggctgttgtatcttctctcgacgtgtgttgtaaactgggcagggacatggtagctagtggtgatgtgttgtgttagcaggctgactgctgtcatcgtagtgacggatgaactgctggcgtttggaaactcgtgttcggtaattaagtgctgcttagtgtgataatttcctc

SEQ ID NO: 262654 - DNA, 350 bp, Zea mays
gcacatcaagcagtacaagtgtcccagctgcagcaccaagcggagccgggaatgacaggcgccctggggcaggactcgctcccacttgacgaagcatttagaatcattaggagcagtgaaagtgtgaaactgtgtcattagaatcacttcctctgtttagtggaccagtgcgtgtgctggctgctgtatttttctcgtcgtgtgttgtacactggtagtaatggacatggtagctagtggtgacgtgttgtgttagcaagcaggctgactgttgtcatcgtagagtcggatgaactgctggagtttcgacccacatgttcagtaatccagccatgtttagcgtgtatgat

SEQ ID NO: 262655 - DNA, 504 bp, Zea mays
cctatgtgtgcgcggacgccagggcgagcaacagcgggcaagcactaaagtgttccgcgctcggtactttggcttcgggagtcttgacctagcgcagccgccaccacagcgctgtccctgccgcgatagctccgcgtcgccgctcaacggaggccgacgaggcgatgagaagcggaggccgagcagtcgcacttgcaggttcagtcctgcttgtccgcagtccacagttcgccctctatcctctgctgtgggatctgcagtaccatctgcttcggcctcagcactgccattcgcttcagcctctgcactaccgtccaagtcaagtcgctgtatcaccttagcccatggacgctcccaatgccttgatggcttgacctctgatggagaggaagtaaggtgagaaatcacgattgtttgttgactttgtgaggccgtaaaaattgagatgtatttttaatatttttgtaatactaaccatgtcaaatatgtctacacggttggatg

SEQ ID NO: 262656 - DNA, 1076 bp, Zea mays
ctctgctggccagctcgccttcgtcttcttcggcgggtgcccgcgcacctggaccggcttctcctccgccgccttcgccgacctcgccgccatcgtcaggctgtcgctgtcgtctggcgtcatgctctgtttggagctgtggtacaacaccatactggtgctgctcactgggtacatgaagaacgcagaggttgcgctggacgccctctcaatatgcctcaacatcaacggctgggagatgatgatttccatcggctttctggcggcaaccggagtacgggtggcgaacgagctgggagccgggagcgcgaggagggccaagttcgccatctacaacgtggtggccacctcctccatcatcgggtccgtgctgttcgtgctgttcctcctcttccgcggaggcctcgcctacatattcaccgacagccaggcggtggcggacgcagtcgccggcctctcgcccctgctggccttctccatactgctcaacagcgtccagccagtgctgtcaggcgtcgctgtcggcgcgggctggcagagcgtcgtcgcctacgttaacatcacttcgtactacctcatcggcatccctcttggagccgtgctgggctacgcgctggggcttcatgtgaagggcatctggatcggcatgctgctcggaacgctggtccagactgttgtgcttctcttcataacgttgaagaccgactgggaaaaacaggtggaggttgctcaagagaggctgaagagatggtacatggaagagaacagaagactccaggggtccagacgaaacccttaggccggccctcagctccactgtgtatctctagttttccactcaccacgagaacaaaacgagggagacgactgctccacgtacaggccgatcgaggctgaaggatcatctctgggctgtatggtattgtagacacaaataatcatctgggctgggctgggcatgcaggtaatagtggtgtgcactagttctgaggttatatctctgccttgttcatcttaattcgatctgccggtgtcttgttgattagaacaatcccagctagttgttactgcattgc

SEQ ID NO: 262657 - DNA, 782 bp, Zea mays
gaattcccggctggacgcacgcgtccggggcgacgatgttccgtgactcttcgatttgcggtccgttgggggagggctggccaaggacggctacgtggaagcgagaaattacctgtcggcgcctctgaaccttctcaccgactactgggattcaagccacgggatggagtcctcccctgtgggcgttctgcagaagacgaccgccttcggatcggtctccagcagtacagggagcagccctagggttgagaaccacggcgcctacgacggtttcggcaacctgcgggatgatctcggctcaattgtagtgcgccatccaagcatccgcctcgtgtgagcctttctgagttctgaccatggaaaactgcaacaagacggcggcccgcagccatagaagtgggcatatgggctactatgctaatcctcaaagcgtgagggggggcatttacctcgtagtttgtcatttgagactgatctcctgttttttgtcacttcagttcttcttttgcttccctttttaacttggctttgtaactttcaccttccttggatcgtgaaaagcgctgtggtgtgtggtgtggatggatttggtgcgccgctgatgcatatcatcatgtgatagaagaagccagtatccgtcgaggattactgcgagtatcgcctgtttgttgttcatacgtcatactgctgcactgcacttcactgtttgtgtgcccgttgttgcattgtatggttcggttatattaaattacaaacaggtcgtaaggccccccctttagatt

SEQ ID NO: 262658 - DNA, 1687 bp, Zea mays
taccggtccggaattcccgggcagatatctggctgcaccagattgacatcccttaatagttttgtgaagcctacggtagaaagaattgtaactttcagagacaatgaagacccttctcttgtggaacttctgtttcagtttggtcgttatctactcatttcgtgctcaaggcctggaacccaaatttccaatctacaagggatatggagcaatgacacttcaccaccatgggatgcagcaccccatccaaatataaatctacaaatgaattattggcctgcgcttccttgtaatcttagcgagtgccaagaaccactgtttgactttattggttccctctcaatcaatggagctaagactgcaaaagtgaattatgacgctagtggttgggtcagtcatcaagtcacagacttatgggcaaaaacatcaccagatgctggtgatcctgtatgggctctatggccaatgggtgggccttggcttgcaactcatctctgggagcattactgttttactttggacaaacattttttagagaaaacagcgtatccactattggaaggatcagctaggtttttgttggattggttaattgaaggacacaggggatatttggagaccaatccttctacatctccagaacattattttattgctccagatggtaaggaggcctgtgtgagctactcaacaactatggacatctcaattataagggaagttttctcagctcttatattgtctgctgacattttaggtaaatccgacactaatgtggtgcagagaataaaaaaagcactgccaaatctcccaccaatgaaagttgctagagatggcacaatcatggagtgggcacaagactttcaggatcctgagattcatcacagacatgtgtctcacttgtttggtctttatcctggacatactatgtcacttgaggaaacacctgacctctgcagagctgttgccaatagtctttataaaagaggtgacgaaggcccaggctggtctacttcatggaaaatggtcctatgggctcgccttcacaacagtgaccatgcatacaaaatgatactgcagctaatcactttggtggatccagaacatgaggtttcaagagaaggaggcctatacagcaatctgttcactgcacatccacctttccaaattgatgcaaattttgggttcccagctgcgttgtcggaaatgctggtacagagcactgggaccgacttgtaccttctccctgctctgccccgcaacaagtggcctcaaggctacgttaaaggtctgaaggcccgaggtggtgttactgtaaacatcagctggaaggaagggagcctccatgaagctctgctatggtctagcggcgggcagaataccctttcaaggctgcactacggggaccagattgccaccgtcagcctatcatcgggtcaagtttacaggttcagcatggatttgaagtgcttgaagacttggcccctgtgatagcacacatttgctgaaatgaaagatacgattgattgtgcaaaaattcatgaaaacttctggctggcaagaaaataatcgatttcatacatcaatcataacacgtatcatatttcttatttcccgtgcatgtgcagctccttctcactgtatacatgtgtactcgttgcccgtgccaagtgctatacagtgcacg

SEQ ID NO: 262659 - DNA, 1306 bp, Zea mays
ggagagcacacttccgtgctcaaaagaaaaggcaagctactgcaataatttcagctagcaaatgtaacttacgcctgtacattttaatatacaatgccaaaaatacggtacaacatccgcgtcgcaccggggtcctgtcaatgtaaatttactagagggacgaatgaggcgtgaaaaaaatacgatatttaagcaaaatccagagttgcgctcaggcaagcatttaggaacgcaatgaacgggttggggcacttcttttaacttcccatgggttacaatttcaatttgattttctctgaccatttgaatatatctgaataaacctggtcgccaccaatttcctcaccggttgccccggcagctatcctgatgatgtcctcgatcaaagcgaagttccccattatatcaacatgtgcaccgctctgagtgcccctgccttccaggagagttgagggtggtgaatggctgtactctctcacgtaagtcttgctgccggcagggttgaaacgagttttgccacgccacccttttgcacacatgtagcccgcactaagaactggaacagtttcatcaccatcggctaagtaaacaccccctttcaagcagctattttcctccccgccttcagccgaggtgtcaattcggaaaggtatataacattctgcctgtggggccaacttatagacatatgccctttcagtaggaatgcctactccgtacatggaaattatttccatgtcaggagcattcggtagctttgtttccaaggggtttgaccaatatttgtaatgttgatatttcggatcatccaagttatcagcaattccatatgaaaagtggacatttccacgctgcatcatccttggagcaacaaagtgaagaaggtctacaacagaactagcagtgtaaactttgtagtctgcgactgcctttattccaccccatcctaattcgtgatactctgtccagatctcccggcatgacgtatttgaatgggcgatattattacctttaacagcatcacgaaattctatctgctcaatctctgaagaaggtgcttctgctacatctttaccaaaagataccagccttccatagttaataggttcaggttgaacctcgatatttcccccattgctatccttagaaaccccagtatcgttggctttgtgcttcttagctttacattcaatgccatcttctggagaccaatccagatttccccaaattgtatcaccacctttaggaatcattgacattgttgaatcccatgttcgggtcatacgcatcaaatggcgcaaagttt

SEQ ID NO: 262660 - DNA, 1462 bp, Zea mays
gcaggaaactcctcaccacgcacatgctcagcaccaagaaggtgcagtccttccgccatggccgacaggaagaggtgcggctcgtcatggacaagatccgcgcggctgccaccgccgcgccgccggcggcggttggacctgagcgatctcctgtccgggtacaccaacgacgtggtgtgccgcgcggtgctgggcgcgtcgcaccggaaccaaggccggaacaggctgttcagcgagctgacagagatcaacgtgtccctcctcggcgggttcaacctcgaggactacttccccccgaatatggccatggcggacgtgctcctccggctggtgtccgtcaaggcccggcggctcaaccagaggtggaacgacgtgttcgacgagctcatccaggaacacgtgcagagcaggccctccggcgagagcgaggagagcgaggcggacttcatacacgttctgctctccatacagcaagagtacggcctcactacggacaatctcaaggccatcttggtggacatgttcgaggcaggtatagagacatcttacctgacgctagagtacggcatggccgagctcatcaacaacaggcacgtcatggagaagctacagacggaggtgaggacgacgatgcgctcgccggacggcaagaagctggacatgctagcggaggaggacctcggcagcatgccctacctcaaggcgaccatcaaggagacgctgcgcctgcacccgccggcgccgttcctcctcccgcactactccaccgccgactccgagatcgacggctacttcgtcccagccgggacgcgcgtcctcgtcaacgcctgggcgctcgggagggaccgcacgacgtgggagaagccggaggagttcatgccggagcggttcgtgcaggaaccgggcgccgtggacgtccacatgaagggcaaggacctcaggttcatcccgttcggctccggccggaggatctgccccgggatgaacttcggattcgcgaccatggagatcatgctggccaatctcatgtaccattttgattgggaggttccgggctctgcagcaggggtgtccatggacgagtcctttgggctgacgcttcgccggaaggagaagcttctccttgttccaaggattgcttcctgataatcctacatctgtaaaacttgtgtcttgctagctgtaccgggaacaagattaaataatgcaaggaataaagtgactctgttcttcgtcagtaactatatattgtaggagtcctgatgatgaataatgggatgtcgtgatttgttgcaactagtattattggtgatatttctatgtaaaaagtggtgtagcgatgtatgtaaaatattatatttgtcagatctttttataccaataaaaattaatcaaaaaaaaaaaaaaaggggggcggcagctcgcgatctagaactagcggacgagtgggcggacgagtggg

SEQ ID NO: 262661 - DNA, 2510 bp, Zea mays
  unsure (1)..(2510): unsure at all n locations
cccacgcgtccggtctaatgtaccttcttcagtcatatctagccaaagcatgcacctcggagtccttgcgactgcatggcacgccattaacacgaatccatgttcactgtctactacaagcctaggacgagcccttcagagttcatcataccgtacgatcaatatatggagtcggtaaaaaataattattctattggcatgagattcaggatgaggtttgaaggagaagaggcgccagagcagaggtttactggtacaatagttggctgtgaaaatcttgacccactatggcctgattccagttggagatacttgaaggtgcgctgggatgagccttctactatcccgcggccagataaggtctctccctggaagatagagcctgcttcatcacctcctgttaatcctctccctctttctagaggaaaaagacctagacaaaatgcacctccaccttcccctgaatcatctgttctcacaaaagaaggtgcaaccaagattgatactgattctgctcaaacaccacaccaaaattcggtcttgcaaggtcaggagcagatgaccttgaggaacaacctgactgaaagcgctgattctgattccactgttcagaagccgatgatgtggtccccatcactcaatgggaaagcccacactcattttcagcagagacctgctatggataattggatgccattgggaaggcgtgaaaatgacttcaaggacacccgttctgccttcaaggatgcccgcaccgcctctcaatcatttggagatacacagggtttttttgtgcaagcttatgatgacaatcatcaccgtctctctttcaaaaatcagggttcaactcatcgcttcgcagatccgtacttctatatgcctcaacaatcgtcagtgacggttgaatcaagcacaaggacacaaacagcaaacaatgacttgtgtttctggggtgaccagaatgctatgtacggcaatccaagtgaccaacaacagggtttcaactttggacaaaacccatcaagttggttgaaccagccatttccccaggttgaacagccacgagtggtcaggcctcatgcaacggttgctccatttgatctggagaagactagagaaggaagtggcttcaagatttttgggttccaagttgatacaaccagtccatctcctgtccaattgagctctccattgcccgctatccaggagcatgtgttacaaactcgaccatcggcaccggtgaatgaattgcaacctgtgcaaattgagtgcttgcctgagggatctgtaagcacagctggaactgcaacggagaacattcagcaagccccgcagagttcaaaagatatccaaagcaagtcccagggtgcttcaacaaggagctgtacaaaggttcataagcaaggagttgcgcttggccggtccgtggacctctctaaattcaccgactacggtgagctcaaagcggaactagacaagatgtttgagttcgagggcgaattggtatctgctaaccggaactggcagatcgtttataccgacaacgagggtgatatgatgcttgtcggagatgacccgtgggaggagttctgcaacatagtgcgcaagatctacatctacacgaaggaggaggtccagaagatgaactcgaaatcatccgtgccgaggaaggaggaacccccagcagcaggcgaaggctgcgccgccgccgccgcaaacgagtaggatgtctgcctgcactgcagcaagcagttttagatgactaggtcgtgtggaggaagccgacgatgatgcatgcgtgatgaacccgttccttgtgcaggaggtggtgccagcccgggtcccagggaagtaaaaactcctgagatcttttgcttgtccgttgcagccccatcccccgtccgtttgggttttagttgggaacgtagaaactactgtctccgcctgcttctccgaagctcgctgttggtagcaagttttattgctagtattattgttattgctgatttgctcccctctgcctttgcgatgtaaatatttgtgtacccagccccagccccagccccagccccagcttgtagtgagcagtaacaagcagtagcggtaccttcggtattaaccggcagctagctatttcgcggcattttaatccctgtaagcgtagctctgtggcgtgagatagatgacaaacactgggtatatgtatgtctgatctttctcactgaatgtaccataaagagttaatataggagctgaccctgtgaacccgcgtgatggatgcatatgcttagtgcaaacctgcattttgtctctatttgaccatctgtacacgcatgatcgccttgcttgcctggtgtctggtctgctgatggcagcgcaaagcgaaaggcaaatgcattgaagggaaggcaagtggaggttggagttgatgctgncgngtgcgggcgcgatttgctgtncctttncggtgtgcggtgttgactgacgcgcgcgagcacgaaactggggga

SEQ ID NO: 262662 - DNA, 984 bp, Zea mays
ctgacgcgcagttccggaattcccgggtcgacccacgcgtccgtccacgcgtccgagcatgtgttactaactcgtccatcggcaccggtgaatgaagtgcaaccgtgtccatattgagggcttgccgtgagggatctgtatgcacagctggaactgcaacggagaacattcagcaagccccgcagagttcaaaagatatccaaagcaagtcccagggtgcttcaacaaggagctgtacaaaggttcataagcaaggagtcgcacttggcaggtcggtggacctctctaaattcaccgactacggcgaactccaagcagagctggacaagatgtttgacttcgagggtgaattggtatctggcagccaaaactggcagatcgtctataccgacgacgagggctatatgatgcttgtgggagacgacccgtgggaagagttctgcagcatagtgcgcaagatctacatctacacgaaggaggaggtccagaagatgaactcgaaatcagctgcgccaaggaaggaggaatctccggcagcgggcggcggaggaggttgcgccgccgccacaaacgagtagtatggtggtttgctcttggtggcaagttgaggccaaggttttactactgctattgttattgctgatttgctctccccgccttccggtgtaaatatctgtgtgtacccagtcccggccttgtgctagtaagtagcaagcagtgttaccttttggtattttaaccagcagctaagttcgcggcattttagtccctgtaagcggtaagcagctctgtagcgtgagatagatggccaagcgccggtacgtacgtgtagtgtctggtcttctcactgagtgtactataaagagttaatataggagctgaccctgtgaacccgcgtgatggatgcatatgcttagtgcaaaaaaaaaaaaaagatgaaaaaaaaaaataacaaaagaaaacaaaaaaaatcaaagactacaa

SEQ ID NO: 262663 - DNA, 457 bp, Zea mays
ccgttctgccttcaaggatgcccgcaccgcttctcaatcgtttggagatacacaggggttctttatgcaagcttatgatgacagtcgtcaccgtctttctttcaacaatcagtttcaagatcagggttcagctcatcgctttgcagatccatacttctatatgcctcaacaaccttctctgacggttgaatcaggcacaaggacgcaaacagcgaacaatgacttgcgtttttggagtgagcggaattcgatgtatggtaatccaagtgaccaacagcagggtttcagctttggggcaaacacatcaagttgggtgaaccagccactttcccaggttggacaggcacgaatggtcaaggcggattccaccggtggtccatttggtttaaaggagacttgagaaagccatgggttcaaaatatttggtttccaaggtgattccacccattcattaact

SEQ ID NO: 262664 - DNA, 345 bp, Zea mays
accacgcgtccgctcctctagctgcatccttgtactagagctgggcggaccccgcggctattgctcgcagtatgcttagattccgcaaacggaagcatcaggcttgttatggtaacggttattggagcagtccttggctttttcattgggatttcattcccttcggtcagcataacaaagcttcactttccagatagctttatttcgtacattgaagacaaagacgctggactcacgacccaagctatactcaatcatgcttggacttctgccagaaacgcaaggggaaatggtaccgaaccgacttcaaacagtaccttaaagatttatgtcccaacgaacccc

SEQ ID NO: 262665 - DNA, 438 bp, Zea mays
gcactatgttatattgtctaaaaatgtccttgctgcttctgttgtcatcaactcaactgttagtagctctgaggatactgaaaatatagtctttcatgtactaactgatgctcaaaatttttatgccatgaagcactggtttgcaagaaactcctacagggaatcagctgtgaatgtcataaattatgaacaaattattttcgagaatttccctgagtttggaacccagcagttatatttgcctgaggaatttcgtgttttcatcagtagccttgagcggcctactgagaagagtagaatggagtatttatcagtgttcagtcactcacatttctttcttgcagaaatattcaaagatttaaagaaagtaattgtgttggatgatgatttggtcgttcaacatgatctctctttcttggggaatcttgatatgggaga

SEQ ID NO: 262666 - DNA, 558 bp, Zea mays
cccacgcgtccgctctctgtttcatctcgccagctttgcgggaaaagagacaccagggacaagccccgcctcctctcccgagtcctgacgtgccccttttgctccggccccacttcctcgcaaaaccctaacccctcgatctcccaagatggcgtcgcagccgccgccccctgccgcagccgcggcatctggagctccgccgccggcacaagtggtgggcaacgccttcgtgcatcagtactacaacatcttgcaccagtcgccggagctcgtctaccgcttctaccaggaggccagctgcctcgggcgccccgccggcaccggtgccgacggcatggacacggtcaccaccatggacgcgattaacgacaagatcgtgtccatgggtatcgaccgggcggagatcaaggcggtggacgcgcaggaatcgctctgtggcggcgtcagcgtgctcgtcatgggtcatcttacggggaggaacagcgtcagccgccagttcgtgcagtccttcttcctcgcgccgcaggagaagggctactttgtgctcaacgacatact

SEQ ID NO: 262667 - DNA, 521 bp, Zea mays
cgtgtcccgactcccgagtcccgtcttctgccccgttcgctccccctcatcgcaaaaaccctaacccctcgacctctcaagatggcgtcgccgccgccgcctcccgccgcagccgcagccccagccgccgcggcgtccggaccgccgccgccggcgcaagtggtgggcaacgccttcgtgcatcagtactacaacatcctgcaccagtcgccggagctcgtctaccgcttctaccaggagtccagccgcctcgggcgtccctccggcaccggcgacgacggcatggagacggtcacctccatggacgcgattaacgacaagatcgtgtccatgggcatcgaccgggcggagatcaaggcggtggacgcgcaggaatcactctgtggcggcgtcacagtgctcgtcatgggccaccttacggggaggaacagcgtgagccgcgagttcgtgcagtccttcttccttgcgccgcaggagaagggctatgctgttctgtacgacatattgcgctacattggaga

SEQ ID NO: 262668 - DNA, 421 bp, Zea mays
ggttcggaattcccgggtcgacccacgcgttcgcccacgcgtccgcgtacgcgtgggtttagagctcatggtgcagaggtatttcgctattagtagatatgataaaccagcgccaaacagtgcatctatcctatgcgcttaacctactggtcgcgaagccccagacctatatcatcaaacgtggcaaaacatcacaatttatcaaattacagtttagcactttccctaaaaaacaaattgtgttgcaactgttttggattctggtgcataacactcaatcatttgtcacatcatcatcacatcaaatttgggtcgaaaagactcctggctgcggtggaagactggttaggtttggctcgcgacttcattccctcctcaacagcatcccttccctgtagcaagctatcactgaacattgaga

SEQ ID NO: 262669 - DNA, 1182 bp, Zea mays
gttctgctgtgcaaacgactgctagttcccctttccccgcatgatctctgccccttcccctaccttctcttgttcttgcttgcacgacccttttccttgtgcgctagctgccgcttcttcttcgtcttcctggagctccccgcatccacacatgccccaagaaccagacaataaaacaacacggaaccatcggagtctttttctactactatttccagcgatttgattatatggatgtgtgcacaggtgcacgtagataggtacaatagaagggagattatagctagctagaggcagcgagcagctcggttgctgggacacgcgatcgagctacagcaaagaagactgcagggtggcgcggcgggcatggaggatctgtacagcatccacccggggatctcgcgccacggggcggcggcgactagcgaggcgtccggggtcgccggtggaccgggctcacccccgcccccgcccccgccggcggcggatctgacggagctggtcaaggcgcagatcgccgggcacccacgctacccgtccctcctctccgcctacatcgactgccgcaaggtgggcgcgccgtcggaggtggccacgctgctggaggagatcggccgggagaggtgcgccgccgcctccgccggcggggaggtcgtcggcatggaccccgagctcgacgagttcatggagacgtactgccggttgctggagcggtacaaggaggagctgtcgcggccgttcgacgaggcggcgttcttcctcagcagcgtcaggacgcagctcagctccctctgcggcggcgccgcctcgctctccgtacacaagggttgtcttaccgccgcaagtcgagtttttttgtaagatgaaatggttggagtcctctgaagacgagccatgctcaggcgacacagacgcgacgacagacccagggcaggagcacagctcgcgcctggccgaccgcgagctcaaggagatgctgctgaagaagtacagcggctgcctgagccggctgcggtccgagttcctgaagaagaggaagaaagggaagctgcccaaggacgctcggtcggcgctgatggactggtggaacacgcagtaccgctggccgtaccgtacggaggaggataaggttaggctggcggacatgactgggctggacccgaagcaggtcgacaagtggtt

SEQ ID NO: 262670 - DNA, 1287 bp, Zea mays
ctacccggaacttcaggcctgaaagtctccttggagaagggggttttggatgtgtttttaaagggtggattgaagaaaatggaactgcacctgtgaaacctggtacaggtctcacagttgctgtcaagacgctgaaccatgacgggcttcaagggcataaagaatgggtggctgaagttgattttcttggaaatcttcaccatcccaatttggtcagattgattggatattgtgttgaagatgaccaaaggttgctggtctatgaattcatgcctcgtggcagtttggataaccatctttttagaaggtctcttcctctcccatgggcaatcagaatgaaggttgcactcggagcagcaaagggtctggctttccttcatgaagaagcagaaagaccagtcatttatcgcgattttaaaacatctaatatactgctggatgcggagtataacgcaaagctctctgattttgggcttgcgaaagacggacctgtaggtgataaaactcatgtctctactcgagtaatgggaacctatggatatgcagcaccagaatatgtcatgactggtcatctgacatcaaagagtgatgtctacagcttcggggtcgtgcttcttgagatgatgtcagggcgcaggtcgatggacaagaaccgcccgaacggggagcacaacctggtggaatgggcacggcccctcctaggggagaggcagcggttctacaagctggtcgaccctcgcctggagggcaacttctcggtgaagggcgcgcagaaggcggcgcagctagcgcgcgtgtgcctgagccgggaccccaaggcgcggcccctgatgagccaggtggtggaggtcctgaagccgctgcagaacctcaaggacatggcgagcgcctcctacttcttccagacgatgcacgccgagcgcatggcgcactcgagcagcatgaacggcaggagcagccacggccacggctcctccaaggcacagagcccgttcgggcggaacgggcagcagcagcccgtgcggagcctctcggacgggccccgcgcctccccgttccgctactcgccgaagccgaacgtgaaatgatgaggcacctggtccgggccgtgggcgtcgaagtcgaaccccattcgttgatgtgtgttgtgtacttgtgtagattgacatatgcacaaaggaaaagatgtaggcgaaagaggaggtgtaggttgaatgaatgctgatggatcgttgctatatatttttgcccccaaacaaggcaggtttaggtgtttttagccttgcc

SEQ ID NO: 262671 - DNA, 413 bp, Zea mays
cccacctcccgcattcgtgaagaacgactgaacgagccgccactcgcccgtccgactccggctccggccagctgcctccgtccctccgtcgagctgcccgtccaccttcgtccctccggcccaggcgagcagaattccgcccccacccgccccgagccgagcagcagccagcagagccgcatcgccgccggggaaccctgagttgccggtccgcccccctgagaagatttccgtcccagcagcatagccgcagctccgccgcccgtcgcctcaaggcaagtcccgagcgccctgtcacaggccccaggtagagtttcgtatcctctgcaaaatccaaatctaatccgattttggtaagatttaatctaatccaatggattttcgatgacccttaactaaggttttttttcata

SEQ ID NO: 262672 - DNA, 1913 bp, Zea mays
ccgctcctctccctgctcgctgcacagggactcggcctccgggacggcagacccacaagcgccacacgctctcgcagtacagcagcattatcagggagcgtgccgtgggagtgggaggttgcctcaggtgcggagcagtcgccggcggcgaccatcggtgtctgagatgaaggagagaggcggctctagggcggcagtggacgagcgctacgcgcagtggaagtcgctcatccccgttctctacgactggtttgccaaccacaacctcgtttggccatccctctcctgccggtgggggccacagtttgagaaagctacctacaagaatcgtcaacgcctttacctatctgaacagaccgatgggagtgtgcctaatactctggttatcgcaaattgtgaagttgtgaaacctagggttgcagctgctgaacatatctcacagttcaatgaggaagcacggtcaccttttgtaaagaagtacaaaactatagttcatcctggtgaggttaacagaatcagggaacttccacagaacagtaagatcatagccactcacactgacagtccagatgtacttatttgggatgttgaagcacaaccaaatagacatgctgtcctaggagcaagcgagtctcgccctgatctgatattaacaggacataaggaaaatgcggaatttgcgcttgccatgtgtccagcagaaccatatgtcctatcaggaggaaaggacaaatttgttgtcttgtggagcatccaagaccacatatctgcccttggggattcctcgtcttctcccggagcatctggcagcaagcagtctggcaaaattgcaaatgaaaaggagagtcctaaagttgatcctagaggtatattccatggccatgacagtactgttgaagatgttcagttctgcccttccagtgcgcaggagttttgtagtgtgggtgatgatgcttgtcttattctgtgggatgctcgaactggcactgacccagctgttaaggttgagaaagctcacagtggagatgttcattgtgttgattggaatccccttgatgttaactatatcttaactgggtctgccgataactctgtccgaatgtgggatcgtcggaatctgggttcgggaggagctggttctccaattcacaaatttgagggccataaagctgctgttctttgtgttcagtggtcacctgacagagcatctgtttttggaagttctgcagaagatggtttcttaaatgtttgggaccatgagaaggttgggaagaagaaaaattctaatgtcccagccgggcttttctttcagcacgctggtcatagggataagattgtagacttccactggaattcgtcagatccttggacaattgtcagtgtctctgatgatggcgagagcactggtggaggtggaacactgcagatttggcgcatgagtgatttgatctaccgcccagaggatgaagttcttgcagagctggagaatttcaaggctcatttggccagctgtgcaccgaagaattgagtcatgtgggttacctgcggaatgcaatcctgtggaaactgagtaggtgatgtagtttcatggccataagtatgagccccagttgacattgaatctgtcctctgatgctcctagagctgtacccttgaggggcttgtgcttttgtgagcttgtgttaaacctgctgtacgagtaaactagtatgtccgcaaacgcgtcagagccggatgtctgtgggccagctattgggatactgccggatatcgtcaacaattgttccagattggtgtattggatctaatgagattgtcagcaattgcttgtttttatggcttcaaaaaaaaacaaacaaaaaaccacaaaaaaaaaaaaaaaaaagggcggctgctcgcgatctagaactagt

SEQ ID NO: 262673 - DNA, 494 bp, Zea mays
ctatgctctcctctccctgctcgcagtcagagcacagggactgcctccggagaccggagcaggccgcaagcgtccaggttcgagacgccagcacgctctcgcagtacagcagcattatcagggagcgtgccgtgggagtgggaggttgcctcaggtgcggagcagtcgccggcggcgaccatcggtgtctgagatgaaggagagaggcggctctagggcggcagtggacgagcgctacgcgcagtggaagtcgctcatccccgttctctacgactggtttgccaaccacaacctcgtttggccatccctctcctgccggtgggggccacagtttgagaaagctacctacaagaatcgtcaacgcctttacctatctgaacagaccgatgggagggtgcctaatactctggttatcgcaaactgtgaagttgtgaaaccaagggttgcagctgctgaacatatctcgcaggttaacgaggaagcacgatcacctt

SEQ ID NO: 262674 - DNA, 669 bp, Zea mays
gaagaagaaaaattctaatgtcccagctgggcttttctttcagcatgctggtcataggtttggggtctgtgtcagatgcaaaaactaacccttcacactcatgcttctatttttaccatgcatttcataattcatgttgtacatgtcggcagggataatatcgtagacttccactggaattcgtcagatccttggacaattgtcagtgtctcagatgatggtgagagcactggtggaggtggaacactgcagatatggcgaatgagtgatttgatctaccgcccagaggatgaagttcttacagagctggagaatttcaaggctcacctggccagttgcgctccgaggaattgagtcatgtgaaaactctgagtaggttatgtagtttcctggccctaagtagtttcctggccataagtatggccccaattgacattggatctgtcttctcatgctcctagagctgtacccttcgaggtgcttgtgcctttgtgagcttgtgttgaaccatgttgtatgactaaatagtccgcaaacgagtcagctggatggctaatctgtaggccaactattgggatattgttggatattatcaacaaccggttcagattcgtgatgaaaaaaaaaaaaaaaaaagggcggccgctcgggaatacggacggtacgtgc

SEQ ID NO: 262675 - DNA, 439 bp, Zea mays
gtcagatccttggacaattgtcagtgtctcagatgatggtgagagcactggtggaggtggaacactgcagatatggcgaatgagtgatttgatctaccgcccagaggatgaagttcttacagagctggagaatttcaaggctcacctggccagttgcgctccgaggaattgagtcatgtgaaaactctgagtaggttatgtagtttcctggccataagtatggccccaattgacattggatctgtcttctcatgctcctagagctgtacccttcgaggtgcttgtgcctttgtgagcttgtgttgaaccatgttgtatgactaaatagtccgcaaacgagtcagctggatggctaatctgtaggccaactattgggatattgttggatattatcaacaaccggttcagattaaaaaaaaaaaaaaaagggcggccgccg

SEQ ID NO: 262676 - DNA, 318 bp, Zea mays
ccccgctcctctccctgctcgctgcacagggactcggcctccgggacggcagacccacaagcgccacacgctcgagactgtgccgtgggagtgggaggttcctcaggtgctgagcagtcgccggcggcgaccgccggtgtcggagatgaaggagagaagcggctccagggcggcggtggacgagcgctacgcgcagtggaagtcgctcatccccgtcctctacgactggtttgccaaccacaacctcgtctggccatccctctcctgccggtgggggccacagtttgagaaagctacctacaagaatcgtcagcgcct

SEQ ID NO: 262677 - DNA, 1405 bp, Zea mays
ctgcacgcggtgcggcgggccgacgacaactggtacctgtggcgatagcagattcagccatatgaaaactcgttccagacatctggaactccggggaggcaccagtgcgtgcaatccgcgtaactggctgggtctgcgatttgctctttcgtcagaggagcaaactgtttcctgtacaccgtaggatgcccgtccttgcggtagtcagacagctcggtgatgttcagtatctgaacatgtatgcctttcggctccaatgttcgaaagtagtgcttagctttggccatcaagctgtagtctgtagttgcagctttgtatccggttttgtagatcggctctgtttcgttaaggcacttgttcttgtcttctccgccccagttgctagcccaggaatgtgttggtgacgatcctgcgaaaaatatcctagtcttgttcttgtcaatattctccgccagccattcggttagtttcttgagagctatctcgaaaccatcgaccatttccatctcgtctagctttgcatcaccatcttcgaatgaaccatacatgaccttcatcctcatgtcatccttctgcttcctccaccacaggtaagaattgaagacaatgatgtcggcatccctccagacactggcatgcttctcaattctgtctgcccttatgatccggtactccacccggtggataatggggttgtcgctgttagactccaccagtagtggtgaccagtagaaatctatcgttgcgttgtattccaatgccttgaaggagatgagtgagccattgaaggtgcgtatcttgagcctgtcgtcaggtattgaggcctccaccatgcacacgagagagacccattggttcctgttgactgagtcgcccacaaacaccattctcttgtttctcagattttcaagcagcttgatggcatcaaatcttgggaggtcgcatccatgaccatgaggctgccatctccagtgctggtacatggcatccttcctgccatacttgtcacaggccacctcggggaagatgaaggagcacttgagcccgctgtacaatgggcgggacacgttgtcgtagacccaccttcccctggaccagttgcactcctcgttgctggcgtccccctcttgggttgtccctcttatcgccggttcttgcagcccggattccagcttcacctgcacttcttggcgtccatgctcgactgccacttgcacttgctcttcctggcctctgtcgaggaggaacacgatggagctggctaggatgaagaaagccaccaaggaggtcacgatgctcctaactccaaccggagagtggagcaccgtcatcttgccaccacctgctgtatcgccttgtgactggcctctggtaggaagtgggacgacccggggaaacgggaccg

SEQ ID NO: 262678 - DNA, 345 bp, Zea mays
  unsure (1)..(345): unsure at all n locations
ccatctccagtgctggtacatgacatccttcctgccatacttgtcacaggccacctcggggaagatgaaggcgcacttgagcccgtcgtacagcggccgggacacgttgtcgtacacccagcgcccccgagaccagctgcactcctcgtcgccgccgccgccccgccagctcttatcgccgattcttcttggagcccggcttctctgtcgaggaggaggaacaccacggagctggctaggatgaagaaagccaccagggaggtcacgatgctcctcactccgaccgccatcttgccacctgctgctgttaccaccttgtgactgccctctgtctgcttcatcctn

SEQ ID NO: 262679 - DNA, 1753 bp, Zea mays
cccacgcgtccgcccacgcgtccgcgaattttccttctccccgtctcctcgccgtcgctccttcggcccttcctctctcccatctcggctagggttaggtcgtctcgccaagtcgccatgatgcagcagcccccgccgcagcagccgcagccgggcatggcgccgcctccgcctccgcaggctgctggcgggcagccaccgcagtggggtgggatcccgccgccgatggcgcagcagtacggcgcaccgcctccgcagcagcctccggcgatgtggggccagcctccgccgcaggcgcactacgggcaggcaccaacccctcagcagtactacgccgcgccgccggtgccggtgcaggcgccagccgcccccgctgcggcggacgaggtcaggacgctctggatcggggacctgcaatactggatggacgagaactacgtcttcgggtgcttttcgaacactggggaggttcaaaatgtgaagctcatccgtgacaagaattcagggcagcttcagggttatggttttgttgagtttacaagccgtgcagctgcagaacgagttcttcagacatacaatggacaaatgatgccaaatgttgacttgacatttcggctgaattgggccagtgctggtgaaaagcgcgatgatactcctgaatatactatttttgttggggatttggctgcagatgttacagattacttgttacaagagacattcagggttcattatccctctgtcaagggtgcaaaagttgtgactgataaattgacaatgcgcacaaagggttatggatttgtgaaatttggtgatcctacagagcaagctcgtgcaatgactgaaatgaatggaatgccttgttcttccaggcctatgcgtattggtcctgcagcaagtaggaaaaatacaggaggtgttgttcaagagagagtaccaaattctcaaggagctcagtctgagaatgatcctaacaataccactatatttgttggtgggcttgaccccaatgtcactgaagataccctaaaacaagttttttctccttacggtgaagtcgtccatgttaagatccctgttgggaagagatgtggttttgttcagttcgttaccagaccttctgctgaacaagcgctgctaatgctgcaaggggccttgattggtgcacagaatgttcgactttcatggggtagaagcctgtcgaacaagcaggctcagcctcagcaggaatccaatcaatggggtgcggctgctggtgctggtggctactatgggggctatggacaaggttatgaggcttatggcagtgggtatgcacaaccccaggatcctaacatgtatggttatggcgcttatggtggttatcccaattaccaacagcaaccagctgcacagcagcaacagcaacaacagtgatgcctgtttgctcgggtaggtcattgggttgtcgcgacggaattaattaaatattatttcaggacactctcatattgcattcttgtcaattgaggtggttttgaaaggctcctgattttgatggccccatggcacggtttcatctatttattagtatatgactatgttatgtctatgaacaagtggtgctcaactgtgattgctatgttgaggcatgcttcgtagtttccttccagacttgtcttatatattgttctctcttttactctgtattgttatctctaaaagtgtgtattgcatatctaaaaaaaaaaaaaaaaaaaaaagggcggccgca

SEQ ID NO: 262680 - DNA, 456 bp, Zea mays
catgtatggttatggcgcttatggcggttatcccaattaccaacagcaaccagctgcacagcagcaacagcaccaacagtgatgcctgtttgctcgggtaggtcattgggttgtcgcgacggaattaattaaatattatttcaggacactctcatattgcattcttgtcaattgaggtggttttgaaaggctcctgattttgatggccccatggcacggtttcatctatttattagtatatgacatatatgcgctgtgaacaagtggcgctctactgtgattgctgtgttgagacatgctttcttagtttctttccatgtttctcggatctgttgtgttacctttattactgtgtatttgcatatctactgtgatgctatatatgcactgtgccgtttgtttcctaaaaaaaaaaaaaaaaaggcgcgcccgcccgggaatccggaccgtacggca

SEQ ID NO: 262681 - DNA, 1134 bp, Zea mays
tccggaattcccgggtcgaccgacgcgtccgcggacgcgtgggttcattgaagattctgtgagcttcatggcacatgggggtggtggggatacttatgcagcagtgaagaagtaccttggccgtatcctttctgaggtggtggatgcttccattcaaaaacttgttgattcaggcagtggtctaagtgtgtcccaggcaatgcaggtcgctgctaacatgtctgtgatggagcgggcatgtgagttcttcacacgccatgctgcacaactgtgtggtgtgccgctgcgtgctgtggaccgtggtcggcgggacttcccacttcgcaggtcacgtgatgctgcggaggcgctcctgctgcggctcctgcgtgctaaggttgatgagttcatgcggcaatctgatggtgttaactggatggctgatgacgctcctcctggcggcaatgagtatgcgaatgaggtcatcatctaccttgagacgctcacatcaacggcacagcagatccttccccttcccgtgctccgccgtgtacttgtggcagtgcttgcccacatctctgaaaggatcattgagctcttcttgaacgattcagtgaagcggttcaatgccaatgcggtcactggtatagatactgatctcaaaatgtttgagacgtttgcagagggcatgtctagcctgtttgtggactcaggtcaagaatctgcaaaaaatgaaatgaaggctgcactagtggaagcaaggcagctagtgaatcttcttatgagcaatagtccagagaatttcctaaatccagtgatccgtgagaagagctataacaagctagattatagaaaggttgcaatcatctcagagaagtttagagatacctcagagagttatttctcaacatttgggacaaggggtgccaggcagaacccaaagaagaaatctctggataccctgatcaagaggctcagagaagccagttagatatcctccctgctgtaagattatatacatgcaactggcttctcacatcctgattttttcatgaaagtctgtatctagtttgtgttatgcgcgtatcttgttaatcttgtgctgtaactttgctgttgttagattctatgtgtcaaatgtgcggatatcttcct

SEQ ID NO: 262682 - DNA, 544 bp, Zea mays
cgactccaatcgcaattcgcaattcccagccccattccccgtcgcccggtcggaagcaccaccagctaccagggatgtctggcgaggaggaggagaacgccgcggagctcaagatcggcgaagagttcctcaaggccaagtgcctgatgaactgcgaggtggcgatcatcctggagcacaagtacgagcagatccagcagcacgcgtcgtcggagtcggacccgtcgtcgcaggtgtcgcaggtgttcgagaagtcgctgcagtacgtgaagcgcttcagccgctacaagaaccccgacgccgtgcgccaggtccgcgagacgctgagccgctacggcctcgccgagttcgagctctgcacgctcggcaacctctgccccgacaccagcggcgaggccaccgcgctcgtcccctccctcaagtccggcggcaggttcgtcggcgaccccggggacgagaagatcgagaagatgctcaacgacctctccctcatcaagaagttcgagtagaagcggagccctctcttctcttctcttcttttctc

SEQ ID NO: 262683 - DNA, 1005 bp, Zea mays
cggacgcgtggggcatgcagcagttgtgtactgggtcatcttttcaaattctctggagtgaaaatcagctgaaaagcaacaaggagtatggggatgggttgtacgatttcttagcgttggtcaggaccgaccaagaaaagacagactacatgttcttggacgatgttgactatcttgtagaggagaatgcagcagatgacacgtgcttatctcccgagccagatgggacccttggtaagcctacctttgaggataattttgaagagcaaaatattcagaaaggcagctcatgggaaattggcataacaacgaactcaagttgggaacagaatgctagtgctgtgaatgattctgctgactggggaggctggagtagaggaggtggagctgctgcaaagccagcagatcaagataattcatgggaagtgcatgctaaggcgcaggacaattccaccactgattggggaggctggagcgttgagaagccaacaggtgaggcaacatgtttctggagaaccagctgaaacagatacttgggctgataagggcgctaaaatggaatcagatgcacgtgatgggaattgggagaagtccagcactcctgaggcatctaagaaaaatgacccatcagaaaatacatgggacaaaagaaaaggagatggaggtgatggtgcgtgggggaacaggtctgatgatggccatggcaattgggagcatcccagcaattggaatgggcagagtttggatgtagatcaggacacatggggaaacgccaggggaaaaaagaaggcagatggtaactactgtcaatgggaggagcagccaagcaattacaaacagaagaagacaaatgctgatcatgattcctcctataacaatgtgatgccgtcatcagaaattgcttggaatgctggagagggaactggaagaccaaatgccaagtctaatgcagaatccagttggggtgaggaagataagacggagtttaatggtggcactacagat

SEQ ID NO: 262684 - DNA, 1092 bp, Zea mays
cagaaaccacatcatagaggtactctcggcaaatgatctagactgtgacgatctgagctcaatctgtgaagcagacactatggttctcagcaattacatagaggagatcatcgtatcagctgtctcctaccacttgattcacaacaaggaccctgaatacaggaatggaaagctcatgctatcatctaaaagtttgtcccatggtctaagcattttccaaggtagccatggtgggaaagacactctgaagttggaagaaacgaaggaagttccagacaatgagtttgaaaagcgtatcagaccagaggtcattccggcaagtgagataggagtgacattcgatgacatcggagccctggcagatatcaaagagtctctccaggagctggtcatgcttcctcttcgacggcccgatctcttcaaaggagggctcctgaagccgtgcagagggattctgctgtttgggccacctggaaccgggaagaccatgcttgccaaggccatagcgaacgacgccggcgccagcttcatcaacgtatccatgtccaccatcacatcgaaatggttcggagaggacgagaaaaatgtccgggcactgttcagtttggctgccaaggtagctcccaccattatttttgtggacgaggtagacagcatgctggggcagcgcgctcgctacggcgagcatgaggcgatgcggaagatcaagaacgagttcatgagccactgggacggtctcttgtcaaaaacaggcgaaaaaatcctcgttctcgccgcgacgaataggcctttcgaccttgatgaagccatcatcaggagattcgagcgcaggatcatggttgggcttccaactccggagagcagagagctgatcttgaggacgctgctttcaaaggagaaagttgatgaagatattgatttcaaggaacttgcggccatgacggaaggatacagcggcagtgatctcaagaatctctgtgtgactgctgcttaccgccctgttagggagctcctgaagatagaaagagagagggaactggagcgaagggaaaaggagtcaaaagacaaggcggcggcggcggagaattcaga

SEQ ID NO: 262685 - DNA, 401 bp, Zea mays
cggacgcgtgggttccaactctggagatctgagagctgatcttgaggacgctgctttcggagcagaaagttgatgaatatgttgatttcaaggaacttgcggccatgacggaaggatacagcggcagtgatctcaagaatctctgtgtgactgctgcttaccgccctgttagggagctcctgaagatagaaagagagagggaactggtaacagctctgtcttgctgctctaaccgaatatccctgtactgatcctgcaatacacgtcgaatgaacttgatgggtgtctcaggagcgaagggaaaaggagtcaaaagacaaggcggcggcggcggagaattcagaagccccggagagtgagaagaaggagagctcagaaaccaaagaagcttcgaagagcac

SEQ ID NO: 262686 - DNA, 404 bp, Zea mays
gcgagcgcaacatgcaaacacgtccaatctggtaccgaggttacaggcgttgcagttatagccccttgatctcatctccttgtccctggtagggttggttcagttctatcacaagcttcgctctgtttttttttttatattcaccttcattgagaagattgtagagtaccataggctgagggaatagctcgcttgttgaatcccagtgttttagtccggtttagccttagccatgaatgtaaaaatgttgtaaaattgtcagcctgccttacaactccttccatcaaggcaaaacgagtgcaatttcttcacgacaggagctccacggctggaaacctcagacccgtgcctcgcttccttaactgcaaagagaagctccttgccttgggatggcgatctggcac

SEQ ID NO: 262687 - DNA, 2463 bp, Zea mays
gctgaccctacagaagagatgacagaggaagagaagaagctgcatgacaaggttgagttgattagagtaaagtttctgcgtctggtttacagattgggagctactcctgaagaaacggttgcagcacaagtgctgtaccgtctgagccttgctgagggtatccgacatggcaggcagacgaaccgagcattcagccttgataatgcacggaggaaggccttacttcttgaagcagagggaaaagaggatctgaacttctcatgcaacatacttgttctaggaaaaactggagtcggcaaaagtgcaactatcaattctatatttggtgaagagaagtccagaactgacgcctttagctcagcaaccacaaatgtgcgggaaattgttggtgatgtggatggtgtcaagattagaatcattgatacacctggccttcgacctaacgtgatggaccagggatcaaacagaaagattcttgctgctgtcaagaactataccaagaaatgtccgccagatattgttctatatgtggatcgtctggatagtctgagccgtgatctcaatgatttgcctcttctgaagactattactgctgttcttggctcatccatatggttcaatgccattgttgcactcacacatgctgcgtctgctcctcctgaaggcctcaatggtgctcccatgacatatgaggtcttgatggctcagagatcccacatcatccagcagtccatcaggcaggctgctggagatatgcgcttgatgaacccagtagcccttgttgagaaccatccttcgtgcaggaaaaaccgtgagggccagaaagtgcttccgaatggccaaagctggaggcatcagatgctgcttttgtgctactcctcaaagatattatcagaagccaactcacttctgaagcttcaggatcctaatcctggaaagctttttggcttccgtttccgctccccgcctcttcctttcttgttgtcctcactcttgcagtctagagcccaccccaaactttctgctgagcagggtggcaatgaaggtgattctgatgttgaattggatgactattctgatgtagaacaagatgatgacgaagaagaatatgatcagcttccacccttcaagcccttgaccaaagctcagcttgcaaggctcacaaaggagcagaagaatgcttattttgatgagtatgactacagggttaagcttctccagaagaaacaatggaaggatgagatccgcaggttaaaggagatgaagaagagggggaaaactgatctggatgattatgggtatgctaatatcactggtgaggacgatcaggatcctcctccagagaatgtgtcagttcccttacctgacatggtactgcctccttcatttgattgtgacaatcccacataccggtaccgctttctggagtcaacctcgactgtcctagcaaggcctgttttggatgcgcatggatgggatcatgactgtggttatgatggagtgagcgttgaagagacactggctatccttagcaggttcccggcaaatgtagcagttcaggtcaccaaggacaagaaggaatttagcatccatttggactcttccatcgcagcaaagcatggagagaacacatcatcacttgctggttttgatatccagactgttgggcgccagcttgcctatattctccgcggcgaggcaaaaatcaagaacatcaagaagaacaagaccacaggaggcttctcggtaactttcctgggcgacattgtggcaactggactgaagattgaggaccagctctcccttgggaagaggttgtcactagttgctagcactggcgcgatgcgagcccaaggggacactgcatatggagctaacctggaggcacgcttgaaggacaaagactatccgatagcccagtccctctcaaccttgggtctctctctgatgaagtggcgtcgggaccttgctctgggcgcaaacttgcagtcccagttttccatcggaagggggtcgaagatggcagttcgacttggtctgaacaacaagctgagtgggcagatcaccgtcaggacaagcacctcagagcaggtccagattgcacttctgggtctcgtaccggttgcagcctccatttaccggagtttccggcccagtgaaccatcctttgcttattagcttgtcaggagtctcagtttaattatttcatgatcacatcgtttctcttagcaattttgcttttcatatcaaccatgtttcctgctgtttcagttcactcctttgtaattggcagatcgtttcctatcataattttgggtgaagagggttgcgagatttatctggaactatagctgaataaataatgtggagggatgttgatccttgtggttatcaatctattacagaaaaaaaaaaaaaaaaaaaaaaaaaaaaaaaaaaaaaaaaaaaaaaaaaaaggggggg

SEQ ID NO: 262688 - DNA, 551 bp, Zea mays
  unsure (1)..(551): unsure at all n locations
cggcaggtttctttttcgtaattccttttttttacccacgcgagcggaacaacgcttattttgacgagtatgactacagggtcaatgcttctcctagttgaaactttggaaggatgagatccgcaggttgaaggagatgaagaagagggggaaaactgatctggatgattatgggtatgctaatatcgctggtgagaacgatcaggatcctcctccagagaatgtatcggttcccttgcctgacatggtgcttcccccttcatttgattgtgacaatcccacataccggtaccgctttttggagtcaacctcgactgtcctagcaaggcctgttttggatgcgcatggatgggatcatgactgtggttatgatggagtgagcgttgaagagacactggctatccttagcaggttcccggcaaatgtagcagttcaggtcaccaaggacatgaaggaattcagcatccatttggactcttccatcgcagcaaagcatggagagaatgcatcatcacttgctggttttgatatccagactngttggcgccagc

SEQ ID NO: 262689 - DNA, 310 bp, Zea mays
accggttgcagcctccatctacaggagcttccggcccagtgaaccgtccttcgcttattagcctgtcaggagtctcagtccaattacttcataaccatgtggtttctcttggcaattttcttcttcacatgaaccatgtttcttgctgtttcagtttactcccttgtaattggcagatcgtttcctcccataattttggctgaagagggttgtgcgatttatctggaactgtagctgaataaataatgtcgagaaatgtcccatccttgtgtttatcaacaaaaaaaaaaaaaaaaaggggggccgccga

SEQ ID NO: 262690 - DNA, 838 bp, Zea mays
cggacgctgggaaaaaaaaaaaaaaaaaaaaaaaaaaaaaaaaaaagccagagggcagacgctgatccgctctacagagcctgtgtggaaggatgccaaaaaacaggctccctgaaggaggcttctattaaacactgtatggtgccaaccgatggccagcctgctgacaaatcgtggtacgcgcacgagccgctgtacttgcaatggaaggactggaactgcaagagcgaatgcagataccactgtatgatggaaagggagggcgaaagagcaaagcttggccttcagcctgttaagtatcatggcaaatggcctttgaaacgcgcctctgtgtttcaggagcctttatctgcagctctctccgctcttactctcgttgtgcaatttaatgggtggctatcgttcttcctcttgctttattataagcttcctctacggccagaaactcacaagacatactacgaatacactggcctgtggcacatctatgggctccttgccatgaattcatggttctggagtgccatatatcacagttgtgacacaatttggacagaaaagctatatttttcatcagatgctgcctttctagggtattccctcattttgacgatagttggtgagcatgtagtagcaagtttcatgggctctggtagattaactgacctttgtgtgttccattagcctgtgaagttcgaaactggtcatattgctaagaattctaggaggttactattagggcctagagtaaatgactacgtgctgatgaaaatctgttcagattaatcattctggaacttgtactaacaattgaagcaagtggagcatagcaccaatt

SEQ ID NO: 262691 - DNA, 827 bp, Zea mays
ggcacatctatgggctccttgccatgaattcatggttctggagtgccatatatcacagttgtgacacaatttggacagaaaagctatatttttcatcagctgctgcctttctggggtactctctcattttggcgatactgcggacttcaagtttaagagacgaagcttctagagtcatggttgccgctcctattctggcatttgtgacaacccacattctgtacctcaacttctatgagcttgacaaaggcctaaacatgaaggtttgtactgtgataagcattgctcagtgtctcctgtgggcactgtgggctgtcatgagtgggcatcgttcgcggctcaagatcatatctgtcgccgtcggaggtgcggttgcagtacttgtggaagcctacgacattccaccgcgatggggatatgtggatggccgtgctatatgccttgctgtggctatccccctttcgtacctttggtggagctttgccaaggaagatgcggagatgcgaacgtcagcaatcctgaagaaggcacgttaacaagtcgcctgtgtgataatttcatgcctgcgcccagccattgtaaagataaaagtttcacttgtaatcttaggtaactactaacttagcatgtgaattaccgtcttatttttgttccacgatgttcttgtcccagttcagaaggccatgttgtttaaggggccacttctattctttaatttatacagcaactgccacttggtaggctcgtgctcatcacctataatctcacaagattgttcccatgggttatcagtgagtggctatcacaataatgtctttttttaacac

SEQ ID NO: 262692 - DNA, 567 bp, Zea mays
ccctctcgtttgcctttacctcttttgctttcgcctagtttctctttccctttcgatcggttgatgtgacagtcttgtcatcataggcacaccactccttgaccgcatcagtgaccggtgggactgagcactgactgcagtcgcgttgctctgcgcttcttcctggctggtgtcggcgaacagcagcaggaggaggcgagaagaatcttgggagcttagctcgcaatgccgaggctgtattcggaggaaggagcagctgctgacgaggctaccgccgccgcggcagtgaggctggccaacaagatccggaagcgccgcgcggtgtcgtcgtcggggggctcggacccggcggcggtggggaggaggctgcggtccaggcggcccgcggtgcggctgccgcggcaccggaccagcgcgggcggtgacatgtcggagtcgccccggagccggcattgtcgaggcagcggcaaccgtgtcgccgaagggacgctgccgtccgcgtaggcgaggaggctcgacgacgcgttctggcagaacatggacagcggtggtctgcttgtaggggac

SEQ ID NO: 262693 - DNA, 491 bp, Zea mays
tcgttctacccgtccgtgctacgattccaacctttacctcttttgctttcgcgatgtttctctttccctcatgatcggcttgatgtgacagtcttgtcaccataggcatcactccttcttgaccgcatgcgcatcagtgaccgaccggtgacactgagcactgacggcactcgcattgctccctgctccttcctggttggtggtgttggtgagcaggacgagcacgaggaggaagcaagaagaatcctgggagctcgcgatgcccaggtggggggacgcggaggaaggagctgctgctgacgaggctgtcgcggcggcagcggcagtgaggctggccaacaagatccggaagcgccgcgcggtgtcgtcgtcggggggctcggacccggcggccgggaggcggctacggtccaggaggcccgcggtgctgctgccgcggcgccggaccagcgcgggcggggacatgttcgaagtcgtcccgtggccggcat

SEQ ID NO: 262694 - DNA, 408 bp, Zea mays
actgcccacgcgtccgcggacgcgtgggtggcgatgcgccgcctgagcagaagctccaaagcctcatgaggggagcacgggccagagccagcactcgcagcagctgatcgaccgagctcgtacaggcgcgccaggcagcacatcaatgggcacaccactccttgaccgcatcagtgaccagtggtgctgagcactgactgcagtcgcgttgctctgcgcttcttcctggatggtgtcggcgaacagcagcagaaggaggcgagaagaatcttgggagcttagcttgcaatgccgaggctgtattcggaggaaggagcagctgctgacgaggctaccgccgccgcggcagtgaggctggccaacaagatccggaagcgccgcgcggtgtcgtcgtcggggggctcggac

SEQ ID NO: 262695 - DNA, 936 bp, Zea mays
cggacgcgtgggaaagggctcctagcgattcaagtggtggcagtccggcttcacctcaggcatcatagagaagcccagagactattctgtctgcccctaggtgcacgacaacaggagcagtgtgttctggtgatgcaattagtaagcatagtagtgttcctcttgttgagaactgcaccactccgactgtagcagtgtgcacaactttgaagcgcgtagctgagaaggttggttcagagctagttggaagtgaaaggctggggagcaacaacagtgcggaattgttggacagtatggaaaaggaggatgtccttgctgcaaatgttcgttttggcgggaatggagttgcgcatggtggccttccacaagagttagaggtatgaacacgtgtacatcgtggaagtcgtcactgagggctagtggtatcaaccacacaagattggggaaaaagtggcgcaaagatggataagctctaccccctcgctggagggaatggtaagtagctcaactcacaagtttccttctggacacagattcgcaattacgggggtttctatgatgatggatgatgggagattatcggatatcatgtcttgcacaacggcatggcaaaaaaaaaacgacgaagaagattttgtggaaggccatggtcgaatgtcatgtcttgctggtacactctagatgagcatgaaccttaagttttcgtttttttttaacttgttgagcagctgactcttgtgtatgaactgagctgcagcgggcttccctgagttgacttgtttgggtctgagatgcttctgccatgttctaggtctagaatagaactagatgcggtggtgtgttctctaccctaagtccccttttgtgccctttccttctgtaatataagatccttgcctgtttaaaaaaaaaaaaaaaaaaaagggcggaggccgt

SEQ ID NO: 262696 - DNA, 350 bp, Zea mays
acccacgcgtccgatgatgggagattatcggatatcatgtcttgctggtacactctagactgagcatgaaccttaagttttcgtttttttttaacttgttgagcagctgactcttgtgtatgaactgagctgcagcgggcttccctgagttgacttgtttgggtctgagatgcttctgccatgttctaggtctagaatagaactagatgcggtgattttgcattgtctcctgttgcggtgcggatcgttctttactacccccgtccggtggtgctctacttcgagcatgatcggcagatgaactcctaccgttgatatctctttgtgaacagaagggtctcaataaccag

SEQ ID NO: 262697 - DNA, 269 bp, Zea mays
aagcgcgtagctgagaaagttgtttcagagctagttggaagtgaaaggctggggagcaacaacagtgcggaattgctcgcgagtatggaaaaggaggatgtccttgctgaaaatgttcgttttggcgggaatggagttgcgcaaggtggccttccagaagagttagaggtgatgcttctggtgcacccttctcctgtttatgcgctgtctaacatgatctgaacattctctttcgactattgtttttttgatgtataaagccaaacaat

SEQ ID NO: 262698 - DNA, 639 bp, Zea mays
  unsure (1)..(639): unsure at all n locations
gggagcaacaacagtgcggaattgttggagagtatggaaaaggaggatgtccttgctgaaaatgttcgatttggcgggaatggagttgcgcaaggtggccttccagaagagttagagccaaacaatacgattgaagcggtttcttgagctgatgcatggttagtggcatcaaccacacaagattggggaaaaatggtgtagagatggataagttctacccccttgctggagggaatggtaagtagctcaactcacaagtttccttctgtgacacagattctcaattacaggggtttctatgatgatggatgatgggagattatctgatatcatgtcttgcacaacggcatggcaaaaaaaaaacgacgaagaagattttgtggaaggccatggtcgaatgtcatgtcttgctggtacactctagatgagcatgaaccttaagttttcgttttttttttaacttgttgagcagctgactcttgtgtatgaactgagctgcagcgggcttccctgagttgacctgtttgggtctgcgatgctcctcccatggtttatgacaacctgtgcgcaatatttttattttcataaattgcataactgtgtttggcccggttccccattgaaaaaagaatnttcatg

SEQ ID NO: 262699 - DNA, 577 bp, Zea mays
agcaagctctctccccattggccatatctagctcgtagtctacactgcctctaaaccttgacatttcctttgtattcccctttccaatttgcagtagtttgtaggtagtccgcaaggtggctttttcttgcagcaatggcggccaaggtttgacaaggcatgacgtcctgattaagccccctcgcggcagccaccagatttgttgcagcgtgagacaggagctgcggctgcggaggaagtgagcaaaagcatggatctttccggcacgcagggcgagctgccgatggcaacaatgcacgccggcgggtcgccgtacctggggctgcaccacgggcacccacagcagcacaaccatggcgcgaacggccggcacatgtcgccgccggatgtggtggccgaggaggccaagaaccggcagctggcggtggtgcccgtgggcacaggaggcggaggcggtgcatggttgaggtaccgcgagtgcctgaagaaccacgcggctgccatcggcgggagcgcgacggtcggttgcggtgagttcatgcccgcgggcgaggaggggatcgctggacgcgctccg

SEQ ID NO: 262700 - DNA, 338 bp, Zea mays
cttggcccccctcttggaagccggaacttcctggcttccttcttggaccacggttgcggccggccaaaaccgctcgccggtgtgctcccctccccccgcgccgctggcgccgccggagcgagggggactgcccaaaccctagtgggagttggagactaggaggaagggcgcgagatccggcggcggccaccccgatgggggacttcaacgtcgcgctggtgatcgtggcggcggtggtcagcgtgctggtgctgctcgtcagcgtctacctgctcgtcaactaccagcaccccgacgacgtcaaccaggcctacttccccaagctcgtcgtcgtgctc

SEQ ID NO: 262701 - DNA, 2490 bp, Zea mays
cccacgcgtccgctcacttgactcctcagctttgactcctcagctaccacccccgtctcccccctccatgtgggcggcctcgagctctgcttaaatcacagctgtgttcgtttgttgggtgatccgcccccctgtcggattctttcacctccgagctctgggacagggagatctgtggtgtcgcagcctcgcctttgttgtacgcgcgcgtgtgggcactcagcagcaccttcagaaatggattttttcacagagtacggcgaggggagcaggtacaagatagaagaggtcatagggaaaggcagttacggtgtggtttgctctgccttggacactcatactggtgaaaaggtcgccataaagaagataaatgacatctttgagcatgtgtctgatgcgacaaggatacttagggaaatcaagttgcttagactcctgcggcatccggatatcgtggaaataaagcatattctacttcctccatcaaggagggaattcagggatatttacgtcgtgtttgaacttatggagtctgatttgcaccaagttataaaggctaacgatgacttgaccccagagcattaccagttcttcttgtatcagttgcttcgaggtttgaaatacatacacacagcaaatgtatttcatcgagatctcaaaccaaaaaatattctggcaaatgctgattgtaagctcaaaatatgtgattttggcctagcaagagtagctttcagtgatactccaaccgccatcttttggacggattatgttgcaactaggtggtaccgagcaccggagctgtgtggatccttcttctccaagtatacaccggcgatagatatatggagtattggctgtatatttgcagaattgttaactggaaaaccgcttttcccggggaaaaatgtggcacatcaacttgatataattacagatctcctgggatcaccttctccagatgcaatatcgaggattcgtaatgaaaaggccaggcgctacttgagcagtatgaggcgaaaaaagcctataccgtttacgcaaaagttcccaaatgcagatccacttgcactatgtttgttagagcgaatgctcgcttttgagccaaaagacaggccaagtgctgaagaggctcttgctgatccttatttcaagaatatagccagtgtggatagagagccttctgcacaggctgtcacaaagcttgaatttgaattcgagaggcggagagttacaaaggaagacataagggagcttatatatagggaaattcttgagtatcatccaaagatgctgagggagtttcttgagggaactgagtcaagtggtttcatgtacccaagtgcagtagatcattttaaaaagcagtttgcataccttgaagaacattatgccaagggatctacaggaactccacctgagaggcaacataattcattgccgcggccgtctgttgtctattccgacaaccgatcacaaaccacagccaacatcaccgaggatctttccaagtgtatgctcagagaaaatacacagaagacacatccatattctgcttctgttgcaagtaaatttccaccacatgttcctcaaggtgatgctgcaaggcctggtaaagcagttggttcggtgatgcagtacaccccatgtccagcgcctgctgccgagcgatatgagcaacgaagaatcgctaggcacccagcaattgccccaaacaatatcccttctggaagctcataccccagaagaagccagacctgcaagagtgagacaggtgatgcccaaagccatatggatgcgaaccaagctcggcagccaaggccatatgcagccaacaaactacctgctaccgttgatagtcgtggtggtcactggtaggatttctgcggtgcaccagaaagccattccaaaccgtttcttaacatgttatcagtatcgattacttctgctgagtgctacattattctgacaaatccagaaatgtagggctgtgcagatttgtgttctttttccggatacctgaataccgaaagactgtacaactgtagtttctgattcccactccttgtcgctattcaatcgctaaaggatctgtccctggtggagaagaaccggcagattcaatgcaatgttcttgactgacgtcatggattttgttcttcaacctggtagctctgaagacgaattgaatagctgctagtttctgctaatcatctacagtcaggtgcagagtgttctgggagctagttctgaacatcactgtcacgctgtaatctgcacgttcctgagctcctaacttctaagcatgccactaccgtatccctttgtaatttaatcagctgtaccatccagtactctgtttacatttgtagaaacgctctgcaaagaagctattatgtgggagtttctttgctattattataaatgttctgttgttataaatgttaagtttttgtttattataaaaaaaaaaaaaaaaaaaaaaaaaagaaa

SEQ ID NO: 262702 - DNA, 872 bp, Zea mays
atcgtcgatatattccccagcacccccgttcccgtccgcgggacgcgtgggccgcgtgcgaaccaagcagaccacagcagaagaagcgtagtcgtcgccggaaggaaaggcgcggagcaagatgtcgtggcaggcgtacgtcgatgagcacctgatgtgcgagatcgaaggacagcatctcagcgccgccgccatcgtcggtcacgacggcagcgtttgggcgcagtccgagagcttccccgagttaaagcctgaggaggttgctggtatcataaaggactttgatgaacctggtactcttgcaccaactggtcttttcgttggaggtacaaagtacatggtgatccaaggtgaacctggagttgtcatccgaggaaagaagggcactgggggcattactatcaagaaaaccggcatgtccttgattattggtgtctacgacgagccaatgactccagggcaatgcaacatggtggtggagaggctcggcgattacctgatcgagcagggcttctaaaagttcgtcataatctgttttggtcatttgggcaccaaagtttgcgcctcatttggttctgtaatccgtgggctcgtgcatgtacttggcgtattgcatgcagtgaataatttagcttgggtttgtttgttgggggcagtgttggggacggatttggattggggtttatgcttggcatcgcgtcgtatcgaaactcagctgctgtttcgctgagtaatgtacatttccctggtaatggtacttgtggactctgctgcttttatgggaacgagtgcattttactgccaaaaaaagaaaagatattgaattattcccgtagtgtattaaatattggatgcaccagattgtttgtaac

SEQ ID NO: 262703 - DNA, 812 bp, Zea mays
gaagagacagacggaaagaacaccggaggcggagagccacaggaggaggagctcgagggacgacgaccagctgaattaggactggagggggcagacgacgtcgtcgtagcggcagcagcaggagaagggaagactcaaacgagggatctccgagagaggagtgtggtaggcaggaagaaagaataaggcgagccgagagccattcgcatggaggcggcgatggatctgatgcggcggatgccgccacggagcgcggagacggcgctcaacgcgctgctctccctcctccccgaccactccctcgacctcctctcccaggtcgacctcccgctccaggtttgcatggataaggagagcctgaaggaatacattctatgcgaatataaccgtgatgctgactcctaccgatctccttggtcaaacaaatatgacccccctttggaagatgggacagttccttctcaagggatgaggaatcttgaggttgaggcaaacgaagttttctcagtgtatcgtgaccagtactatgaaggtggcatctcatctggttacatttgggaggatgaagataatgggtttatcgcatgcttcttaattaagaaagatggacaaggaaaaagagggtacatgcagattggttcatgggatgctattcatgttgttcaggttggtcctgaagaagaagttttgacacattactgcttgaacagcactgtgatgctctcattgacaacagacgacaagcagtctggaaccctcaacctgtctggatccgatagacggcagatgagtatgactctagctgtagctga

SEQ ID NO: 262704 - DNA, 615 bp, Zea mays
  unsure (1)..(615): unsure at all n locations
cgtactcggtccggaattncccgggtgcgacgccacgcccgtccggtggcaccttggagtngcattacnnntatcaagtataaaccttgtgcatgtnnccttgattattttcggtatcgtaggtgatgatgccaattgacgtcgcagggcgaggtgcgaatatngnngtggtggagaaggctttcggcgattaccctgatacgaaccaagggcgttctaaagtttgtcattaatgcctattttggtcatttgggcaccttaagtttccgcaccccatttggttctgtatatatgtgggccttgtgcatttgtgcttggcgtatttgcatttgcagtgaataatttaaatcttcgcgttggggttggtgacaattgttgggaacccggttttgaattggggtttatgcttgccatctcctcatatctcgaactcagctgctgtttcactgagtaatgtacatttccctggtaatgggacttgtgcactctgctgctttttgggaaaaaaaaaccaaaaaaaaaaaaaaaaacaccaaaaaaaaaaaaaaaaaaaaaaaaagggaaccgctcgcgatctaaaaccccaaggggtcgcggaaggcttggttcgncccg

SEQ ID NO: 262705 - DNA, 729 bp, Zea mays
ttctttgtgcgaaccaagcagaccccagcagaagaggcgttgtccacaccggaccaggaggaacagcgaggagcaacctgtggcggcatgcgggcgtagacgaccacctgctgggcgacatcgaaggccagcacctcagcgccgccggcatcgtcggacacaactggagcctctgggcacagaccgagaacttccccgagttaaagcctgaagaggccgctgggatgataaaggactccgatgaacctggaactcttgcaccaactggcatttttgggggaggtacgatgtacatggtgatccaaggtgaacctggaggtgtcattcgaggaaagaagggcactggaggcattactatcaagaaaactggcatgtgctggattatcggtatctatgatgagccaatggacactccagggcaactgcaatatggtggatggagaggctcggcgattacctgatcgaacagggcttctaagggggtgtttggtttgaggaatcactccatccaaaatgtggtggtgcatcatggatccattcctcaaatctagtctgatgaccccattcctcatattagtactaactgctttactataaggaatgaggtgatgatggatcaactcattccattccacaaaccaaacaaaaaaagtgaggagtgagaagatgattgactagctcattcctcaaaccaaacagtctataagtttgtcataatgctttttggtc

SEQ ID NO: 262706 - DNA, 372 bp, Zea mays
cgctctgacgcgtgagcggacgcctgggcgagcccgtgggcgctaaccaagcagaccccagcagaagaagcgaatccgccgccggagcacgaggaagagcgagcagcaagatgtcgcggcaggcgcacgccgatgaccacctgctgtgcgacatcgtaggccagcacctcagcgccgccgccatcgtcggccacgacggcagcgtctgggcacagcccgagaacttccccgagttaaagcctgacgaggccgctgggacgataaaggactttgatgaacctggaactcttgcaccaactgggctctttgctggaggcacgaaggacatggtgatccaaggtgaacctggagattccatccgaggaaagaaag

SEQ ID NO: 262707 - DNA, 460 bp, Zea mays
acgacgagcctctccaccaccatgttgcattgccctggagtcattggctcgacgtagacaactataatcaaggacaatgcaacatggtcgtggtgaggctcggcgattacctgatcgagcagggcttctaaaagttcgtcatgttctgttttggtcatttgggcaccaaagtttgcgcctcatttggttctgtaatccgtgagctcgtgcatgtacttggcgtattgcatgcagtgaataatttagcttgggtttgtttgttgggggcagtgttggggacggatttggattggggtttatgcttggcatcgcgtcgtatcgaaactcagctgctgtttcgctgagtaatgtacatttccctggtaatggtacttgtggactctgatgcttttatgggaacgagtgcattttaaaaaaaaaaaaaaaagtaaaaaaaaaaaagggcggccgcccctaaagg

SEQ ID NO: 262708 - DNA, 699 bp, Zea mays
cccacgctttctttgcactggaggcattactatcaagaaaactggcatgttcttgattatcggtatctatgatgagccaatgactccagggcaatgcaatatggtggtggagaggctcggcgattacctgatcgaacagggcttctaagtttgtcataatgctattttggtcattgggcacttagctttgttagactacattgcaatttttacttgaatgacatgtatgtttaaaggacaatggtgaagataattctaaatgcatgcatatagaagctttctcttcatttggtcatatattcttcaaggcctgaaatattagagagttacatagctaaatgtactacatgctacgtgaaatggtacatttaagtagagtgcaccccaataggctttacattgcacttgcgtaagttttctccttttcaccagcacctaatttaccacaggtggaacaaataggtaatcttcaagatgaaagacaagatcgctacacaatgcacacaatagctcaggctcatgtgtgtgttgcatcccacagtctcatgcagcatggttacttacagatattcatgaatagacacgtgcacttgatgcttctgggatcttcttactgcctagaggaccgagctctactttgtacagactgcgatgatgctatacacacagtgaatttctctggatcagtacatcagagat

SEQ ID NO: 262709 - DNA, 510 bp, Zea mays
ggaattgccgggtcgacccacgcgtgcgcccacgcgtccgcccacgcgtccgaagcagaccccagcagaagaagcgaagtcgtcggcggagcacgaggaagagcgagcagcaaggtgtcgtggcaggcgtacgtcgatgaccacctgctgtgcgacatcgaaggccagcacctcagcgccgccgccatcgtcggccacgactgcagcgtctggtcacagtccgagaacttgatcgagttaaagcctgaggaggttgctgacatgattaaggactttgacgaacctgttaactacaggccaacatggtccaaggggaagaggtatccagtacacagggatccttgtctggaccacaacaaccatgcgaaaggtgagagtttcgatctgggcaagtacatttgacagcactttgaaggcccatcgttggtcccataggatcctttaataaagcagttcgctgaagagctgcttgcatatactgatgcctttaacaaagtcttatactttttg

SEQ ID NO: 262710 - DNA, 436 bp, Zea mays
tgatgaattagagacagcacttatggagatggttaagcaagataacagacgcgaattaagtgcaaaggtcgagcaattggaacaagagttatctgagcttaggcaagctcttgcggacaagcaggaacaggaacaagcaatgcttcaggttctgatgcgtgtagagcaagaacagaaagtcacagaggacgcccgtatctttgcagagcaagatgctgctgctcagaaatatgctgcacatatacttcaggagaagtacgagggagctatggcttcacttgctcaaatggagaacagagcagttatggcagaaactatgttagaggcaaccattcagtaccaatctagtcagcagaaagcacagcttccatcgccctctccttctccaaggaccccaactcgagatgcatcaccaggccaagggaaccaagattca

SEQ ID NO: 262711 - DNA, 471 bp, Zea mays
cccacgcgtccgcccacgcgtccgctcgaggcctcgagcaatagtaagatctgactgatctcgtgagctgcctctccagtgtgctctgtagcccgcgcagatcagtgatggccttcggcggcgatgacggtagcggcgggtctggcgaccgggccgggcagccgtgtgactcggttcgccaagtcgacggcggcgtcggtgacgcccgtgaggccgggcaagacgcacgcgcttgtcgcccctggacaacgccatggagcggcacacggtgcacgtggtggtctacctccgcgccgcgccgggcctggacagggagcagctcaaggagtcgctctccgaggtgctgtcgctctacccggccatgaccggccggctcacgcgcggcgaaggcagcgcggacgccgaacctgcgcaccggggttgggtcgtgaagtgcaacgacgccggcgtgcgcatggtggatgccagggc

SEQ ID NO: 262712 - DNA, 766 bp, Zea mays
cccacgcggcgccatccctcactctcctccgaagccatcgtccacgtcccagcctccccggactctaggggcagaagctgcagcgtcgagatggtgaaggggcgcacggggcagcgcgtgaggctctacgtccggggcaccgtccttggatacaagcggtccaagtcgaaccagtacgagactacgtcgctggtgcagatcgagggggtgaacaccaaggaggacgtcgcgtggtactgcgggaagcggatggcctacatctacaaggccaagaccaagagcagcggcacccactaccgctgcatctggggcaaggtcgcccgcccgcatggcaactccggcgtcgtccgcgccaagttcaggtccaacctgccgccggaatccatgggccgtaaggtcagggtgttcatgtaccccagcagcatctaaagataatctgaatgtgtggaggacccttttcttctagattttatcttcagctgtccttgtaagggttgtgttcaggttgagagttagcaggttgagctgtctatctgagaaccatttaaagttctctgagttttggtgttatggatcactggaagtattatatgaagtttaagttagaactaatttgtttgccatacttttgtatgatgactctttaatcgcataatatgctcttattgcatcttgatcaacggttctgtgatttcatgagcccatctccggctccatggtcacgcgatgttgtatttcaagagctttggatgtgcggttttgcttc

SEQ ID NO: 262713 - DNA, 663 bp, Zea mays
tgtcgacccacgtcgtcctggtgcccgtatccggcggcggaagcggaagcggaaggaagcaggcggccaccatggtgaagggacgcacgggacagcgcgtcaggctctacgtccggggcaccatcctcggatacaagaggtccaagtcgaaccagtacgagaccacgtcgctcgttcagatcgagggggtgaacaccaaggaggacgtcgcgtggtacgctggcaagcgcatggcgtacatctacaaggctaagaccaagagcagcgagacccgctacaggtgcatctggggcaaggtcacccgcccgcacggcaactcgggcgtcgtccgcgccaagttcaagtccaacctcccgcctgagtccatggggcgcaaggtcagagtgttcatgtacccgagcagcatctaaggttttgttggagtaaagatggactagaaatggccatgcgtttatttctcacttttctctgaacttaaaatgccatgtgttggtaacttagattgttcaagtgctgaacctgtggaagttgtgccaaaatttgttgtcgaacggatgaactattgtcgtaatgttatgccagcagcagatcttaattaaaccagttaaccgcgccccacgaaaaataacctattcaatgttggaagtgattcttttggcatca

SEQ ID NO: 262714 - DNA, 449 bp, Zea mays
gacccgctacaggtgcatctggggcaaggtcacccgcccgcacggcaactcgggcgtcgtccgcgccaagttcaagtccaacctcccgcctgagtccatggggcgcaaggtcagagtgttcatgtacccgagcagcatctaaggttaggtttttgttggagtaaaggtggactctaaatggccatgcttagttcttctctctgagcttaaaatgccatgtgttggcaacttagattgttcatgtactgaacctgttgaagttctaccaaaatttgttgtcgaacggctgaacagttgtcctaatgttatgctataaacagagcttatttccccccgtgccatcgctgtatgattgcagtattttttctctcgccaaatcttatagacatattgggcggcaaaaaaaaaaaaaaaaaaaaaaaaaaaaaaaaaaaaaaaaaaaaaaaggg

SEQ ID NO: 262715 - DNA, 328 bp, Zea mays
cctccggctggagtcaatgggcgccaagctcagagtgttcatgtaccggagcagcatctaaggttttgctggagtaaagatggactagaaatggccatgtgtttatttctcactttgctctgaacttaaaatgccttgtgttggtaacttagattgttcaagtgctgaacctgtggaagttgtgccaaaatttgttgtcgaacggatgaactattgtcgtaatgttatgccagcagcagatcttaatttgccccgttaaaaaaaccaaaaaaaaaaagggcggccgctcgcgatctagaactagcggacgcgtgggcggacgcgtggg

SEQ ID NO: 262716 - DNA, 324 bp, Zea mays
cccgcctaagtccaaggggggcaaggtcaaagtgttcatgtacccgagcagcaactaaggttaggtttttgttaaagtaaaggtggactccaaatggccaagcttatttcttctctctgagcttaaaatgccatgtgttggcaacttagattgttcatgtactgaacctgttgaagttctaccaaaatttcttgtcgaacggctgaacagttgtcccaatgttatgctataaacagagcttatctttccccgtgccaaaaaaaaaaaaaaaaaaaaaaaaaaaataataaaaaaaaaaaaaaaaaaaaaaaaagggcggccgca

SEQ ID NO: 262717 - DNA, 301 bp, Zea mays
acggccggacggacccacgcgaccgcactctccttcgaagccatcgttcccgttttaagctatccagaatctagatgcggaagcgggagcttaattatggtgaatgggcgcacggagcatcgcgtgaggctctacgtacagttcaccgtgcttggatacaagcggtccaagtcgaaccagtacgagaccacgtcgctcggtgcatgatcgagggggtgaacaccaaggaggatgtcgcgtggtacgatttcgacctcatgtagccaaggatggtggcccggcgtagagccttacgcgctgt

SEQ ID NO: 262718 - DNA, 1541 bp, Zea mays
cgcatccacgcgtccgcaagaaaactagcaaagcgcatgggggcaaatctaatccttcttggcgcacgaggaatccagatgaatcagctttggtggcaccaaattctgttgagcaagcagacgtctcttatgaatcaaaggaggttcagaacttcacctatcagaagcagcctgttgaacttggcaagcaagatacacagttaaaattcaatgtagatgctgctgctgaaaatagctcagctccagttcaaacagttccgctatctgtcggtggcgcaaaacaacatagtgcagctaacagacaaaggcgacagcatgttaaggctcaaagaaatgaagcaagtggctactcaaatgagagcaaaggtagagagggcaagaatgatgttgtctatcaatcagcaacaccggtcatggattcgaactcatccaatcacaggaatgtgccaagatctgatgtgaaaaacagcggcgtagtttcacactctagagcctggaagccgaaaaccaattcccatcctcaggacagctcagacggcaagattgctgttgacgggcaagtggattcccatggtggtaggcttgagatgaatacgtccaaaggatctgatacaattacccatctagtgaccagtagtgaaccgacgaaaaggagtgatggcaaagaggtctcacacagcaaacatgagaacctggcacgggaagatggtaaccagaagggtgagactgaacaggagcaggctaatcctacactacgtcgccaaggccagcccaatgcaaggtaccacaggggaggtgggtcacacaggggaagggggggttatgacactgggaggccaaaccatgtcacaaatgtggagaggcggaagggtggcagccatcttgaataccagccagtcggaccccaaaacaaagctgcagacttccaacagagcctgggcatggaagaacgaaccgaggggcctcctgcttctggacaagcgttcaggcagcgtggacacaacagggggctacgcccagcaggccgctttgtccagcgaaaccctgcttctacgcctaccactaattctcaccaaaatgaataatcttccgcggctgccacatccactgagcttcaggaactcgcgcttgttggtggcgtttcacaacagataggtttggatgcgcggcaggtgtccttctacgactaaactctactggtggtgagcattaggatcctgtaatgataatagtctttgtcccaagggcacctggaccctcacgtgtgattgtgggaatttgcctttgttggatgcaatgttggaacgtgtactaacagagttgttgtgtttgagaacttgatttaaatgttagcctttgatgctaatgagaacagaaagtgttggtttttgcccaacttcctggcctcagtggataatatgctggcatcaccatagcacgctggcgttttatatttgttggcgaaggtgttcatggcaatttgttttggatcgactggattggatcgccgaaataatcaaatcgtatgtggttattttgat

SEQ ID NO: 262719 - DNA, 779 bp, Zea mays
ggtttcttcttgagtttttgggttcatgggcttgcgtgtgagacgtgctgtgtcaaggggggcgcaatccagtgtcccagaggtcacgtggctcacacaggggaagggggggttatgacactgggaggccaaaccatgtcacaaatgtggagaggcggaagggtggcagccatcttgaataccagccagtcggaccccaaaacaaagctgcagacttccaacagagcctgagcatggaagaacgaaccgaggggcctcctgcttctggacaagcgttcaggcagcgtggacacaacagggggctacgcccagcaggccgctttgtccagcgaaaccctgcttctacgcctaccactaattctcaccaaaatgaataatcttccgcggctgccacatccactgagcttcaggaactcgcgcttgttggtggcgtttcacaacagataggtaaatgtgtctttgaggcctgtacagggagcattctcaaatctctgtcccttcgatggctaatgttttaaggttagcaggtttggatgcgcttgggtgcgcggcaggtgtccttctacgactaaactctactggtggtgagcattaggatcctgtaatgataatagtctttgtcccaagggcacctggaccctcacgtgtgattgtgggaatttcgcctttgttgggatgcaattgttggaacgtgtactaacagagcttgttgtgtttgagaacttggtttaaatgttagccttccccgctaatgagaacagaaagtgttggttttagac

SEQ ID NO: 262720 - DNA, 674 bp, Zea mays
agattgccagggttgaggcagaatgccgcatgctacagcatctgacgcggaaagcaacactgatcaataattctaggtccgcacaaaacagttgctgcatggaatcactgactgacagccagtccgaccatggggagcacatggtggctgttgataatgatctgcaaaattccgactcatgggcattggctttgattgctgagcttgatcagttcaagaatggcaaggatggttcaagaaatattgtgaacaatcctgttgagattgacataatggatgatttccttgagatggaaaggttagctgcattgcccgaatcagatggcacaagctctaactttgaaatggaaacagattctgacaaggctgtcacaagaagcagctccttgaaaatcaaaagtgaagaattgcaaaacaaggtcgcagatttgcaggaaaagtttgaagcaattgcatgcgagaaaagggagcttgagctggtgcttgtggaagttagagatcagcttgagatttcctgcgatgcgctagtggtggcaaagaacaggctggttgaaatgcagatgcagttggactcagcaaatgactccaaactttccgctttggaagatgtggagcgtttggactctgagaggaaggctttggagttgcagttggagtccaaatctgtagaagtt

SEQ ID NO: 262721 - DNA, 3105 bp, Zea mays
  unsure (1)..(3105): unsure at all n locations
cggaagaaggtgagcagaagctacatgaggtagtctttgcaaaaaccaaacagtgggagaagataaaggccgagttcggagcaaaattaactggaattggaacaggaactcataagggctggtgctgagaatgatgcactcacaagatcacttcaagaacgggcagaactattgatggaaattggttgacggaaaaaggtcaagctgaagctgagatcgaaattttaaaaagcacaattcaatcaggtgaaagggagataaattcgctaaaatatgaattgcatgttgtctccaaagagcttgaaatccgcaatgaagaaaagaatatgagtgtgcgctcagctgatgtagcaactaaacagcaccaggaagatgtcaagaaaatatcaaaacttgaagctgaatgccaaagattacgtggccttgttcgaaagaagttacctggtcctgcagcactagctcaaatgaaaatggaggtggagagcttgggtagagagtatggagaccacagagtacgacgatctcctgcaaagaattctagtttccatcggcccatgtctcctatgtctcctgttcctgattacgcaatcgagaacatacagtacatgcagagagagaatgagtttctgactgctcgtttattaacaatggaagaagaaaccaagatgcttaaagaggcattgacaaagcgaaacagtgagctgcaatcttcaagaagcatgtatgctaagacagcaggaaagctccgaagctttgaagttcaaatgttgactggaaaccaacataagagtccaactatgaacatggatattcactttgatggtgcactgagccaaaatggaagcaacccacctagcatgacttccatgtctgaagatggggtagatgatgaaggacagttgtacagaatcttggaccaatgctctggtatctgagccctgtcaattcaaaaaagagaaggcagccaagagcagcacgacagaaagctccaataggttggagctcatggatgacttcttagagatggagagattagcatgtctgtcttctgaagttaatggcaatggcagtactgttgacaagatggtccgcccccgcgtgcgggctacttttgctggctctactgaaagagatggtgttaaagatttgcagtcagcttcaccaatgtcagaaactccatctaataaacagtgtctgtctgagaaatctccgcttttgaatttccagtcaagaatatcttccttactggattctgaatcaccagagaataatgctggaaaggtacttgatagcatcagaaacattctaaaggatattgaagatgaggcagattcggtgaatgtaaatgggactcatccttcagatgggaccttaagttcagagagcaaatttgccatggatcaagatcttaagaatgccatattgaaaattctagactttgtgaagttacttgatcaagaaatctccaagtttcaaggccagtcacctgattatgatggactatgtgagaaaacacaacagttctctgcattagtcgataaagttctgtcaaacgttgatgttctaaatgatattgtcatagcactgtctgttatcttgtcagaaactagccagattaagttcacactgttgagagacaatagcaatgaagcagaaagtaataacttagattgtgttgataaagtgactctacttgaaaataaggtgcagcttgagccagtaaaagacaatgttcctggtatctgcccactgttgcctcattcatcttctgatcctgagtttgaggggcctgctgatgctagattcgatgttaagactgcagtgaaggtgtactcgccggaggaatatgaacaacttaaatctgagaaggcaaatttggagggagaactagcaaagtgcaacaaaataatagaagaaacaatggctaggttaagtgatatggagaaaaaactggaagacctgacatctaagttggctgacagtgagaaatcaaatagcttgaatgagacacagttgaagtgtatggctgaatcctacaagtcacttgaatcaaggaaaattgaattagaaaatgagatagaagtgctaaggtccaaaatagatgctttaacagctgaactctctgatgaaaggcaaagtcatcaggacgacttagttaaatacagagatctcgaggagaagatggaaaggtatgagatggagaggagttcaatgcttgtggatggggacccagacaccaagtcaaagcaggataaagagatagcggctgcagcagaaaagctggcagagtgccaggagaccatattgattcttggccgtcagctgcaagctatgcgtcctccagccgagtcgctaggctcttcacctaatcggcaacgcatggaggagtttctgaaggatgcggcaggaacaaccgcaggagaatatttccagaaaccttcaggccaacctgatacagaccaggatatgcttgggacaggaaatgtgtctccgatcagtgggtacaagacacacatgatcccttctgatgcggacgttagccctttcccttctccaaacacctccaagcgcccgaagcatcgatcgagatcctcttcgtcttcctcattcaccaaccaccagttgccagacaaacagaaccgaggattcagtcggttcttcgcgaagagcaaagagtgaaactattccggatcgcggtgttaggtttgttgatttttggcgccaattgggtgggatggtggtcatgaatttctgtagagctagtgagggatgcttgcttgtgcgttctctcaggtcaggtgattcctttgggttgctggaataatactcagcttgcagtcgagcgggttgtggcgagagtgtgtgggggaatatttaagttgtcagtctcttctgctagagcttttctgggtttctgtgtgctcgaaacctcactaaaacctcactgtacatgtgcttacttgcttgaaggagcttggctgttggtttgtgtttaatcctcttgtgaattagcccgtgtattgtgcttgtactggtttggtgtacaattaacctgcgcccatttcaagggtattgatgtcaaaaaaaaaaaaaaaaaaaaanaaa

SEQ ID NO: 262722 - DNA, 530 bp, Zea mays
tttcctttctccgaacagctccaagcgcccgaagcatcgatcgagatcctcttcgtcttcgtcattcaccaaccaccagttgccagacaaacagagccggggattcagtcggttctttgcgaagaccaaagagtgaaacttctcccgattgggtgggatggtggaggacatgaatttctgtagagcttattgaggcaagccttcgtgtgcgttctctcaggtcacgtgatgctttgggttgctggaataatactcagcttgcagtcgagcgggtcgtgggccacagtgttgcggaatgtatgttatcagtctcttctgctagagcttttctgggttgctgtgtgtttgaaacctcactgtacatgtgcttacatgcatgaaggagcatggttgttggtttgtgtttaatcttcttgtgaattagcatgtgtattttccttgtactggtttcatgtacagttaacctgcgctaatttcaatggcattgatatacctagtatattgtgttgatcaatttacaggtccgggac

SEQ ID NO: 262723 - DNA, 589 bp, Zea mays
ccggaccggacttgccgggccggcccacgccacccgtccattttcacacataggggcacatcaactacaaacatggatctttaatttgatggtgcatttagccaaaatggaagcaacccacctagcatgacttccatgtctgaagatggggtagatgatgaaggaagttgtacagaatcttggaccaatgctctggtatctgagccctgtcaattcaaaaaagagaaggctgccaagagcagcgcgacagaaagctccaataggttggagctcatggatgacttcttagagatggagagattagcatgtctgtcttctgatgttaatggcaatggcagcactattgacaaaatgaagatagatgaagttggggctactttgtctgactttactgaaagagatggtgttaaagatttgcagtcagcttcaccaatgacagaaagtccatctaataaacagcgtttgtctgagaaatcttcgctttcgaaattccagtcaagaatatctttattactggattctgaatcagcagagaataatgctgaggtacttgatagtatcagacacattctacaggatattgaagatg

SEQ ID NO: 262724 - DNA, 517 bp, Zea mays
tccacgcgtccgcccacgcgtccggagaattgataatgagtgctcctcttgaagatgctcgattgctaacttaccgttagcaacggatcagacaggacatggagtctcagatagctgatgtgatgagaaagcaacttaaatccaaggaaagtagtggtaacacagataactctgtgaaactgcaacatgcagaatcgaaattatcagatcttcgaactacactggcagcgttaggaagagaagcaactgcagctatggaggctgtagaggctcagcaacagcaagttacgtatgaacgtctccttgcaatggttgatgctgagaggacatatcatcaaaatgctgctgatattctgaataaactccatgatgagatgctctatgcaaagcatcataatgagtcagcaaaccactacgatgaaaagtctttcgagcctgaatcagatgcaggcccagcacaagtgcactcacgtagcacatctgaagatccagtattgactaaacctagcgaatccac

SEQ ID NO: 262725 - DNA, 617 bp, Zea mays
gcgcagcccaaggcagagctccataccccatcctacatttgcccaataggccgaccccggctccctcctcagcaacgtgctcggcttcttcctccctcgaatcggctgccacccccgcgccgcgatacgaaaacccaccaaaccctaaccctagctgcagtgccactaccgcccgcttgcccggtctccggagaggaagccgacccaagcaacgatgccgcccgggtcagcgacgcaatttcggtacacgcagacgccgtccaaggtgctgcacctgcggaacatgccgtgggaatgcaccgaggaggagctcgtcgagctctgcaaacccttcggccgggtcgtaaacaccatgtgcaacgtcggcgctaaccgcaaccaggcattcgtcgagtttgcagatcaaaaccaggcaatttcaatggtgtcctattatgcttcatcttcagaacctgctcaagttcgtggtaaaactgtatatatccaatattcaaacaggcaagaaattactaacaataaaggcactggggattcttctggcaatgctctacttgtcacttttgagggtgttcagccctatgatgttaccatagaagttattcatttgttttttcggc

SEQ ID NO: 262726 - DNA, 379 bp, Zea mays
aattctctggtcgacccacgcttccgtgaagataactatatgctgatggctgcatgtacggattcaaattggtctaaacaacatggtcccaagtgacctaggccatgccacatgtagctcatgtcctaagctgcccataaattccattatgtttctagtcgtccacctcctagtcggacgactaatcgtcatcagtcaatgattaatcggatggccataaactaatcaacttattgagttgtatctcccctgcgaacagcccctggtctaactggttaggtgatgtagtagcaaactctcatgttctgagttcaattcctagtggaagcgaattttcatacctgggttaaaaaatccccttgctggttctcacccgctc

SEQ ID NO: 262727 - DNA, 425 bp, Zea mays
gaccctacaacaagggtggcagggcatcgctaaggaaaggaggaccttttttcttagggcaaagcataaggcgttgctgggctctatgaaagacatggagatcgaacctgatgtaacctgttacacagtattgattgatggacggtgcaaagcagaatatctagaggaagcacgtggattgtttgatgagatgttagcgaaaggacttacccctgatgttcacgcgtacacagctcttataaatggacactgtagccagggagaaatagctaaggctgaagatcttttccaagaaatgacagctaagggaatgaagccagatgtactgagcttttcagtattacataagagaaccttgagacatgaaaaggctcattaatatttatgtgtcctaatggttatggtgatgaatgtcagtttgactg

SEQ ID NO: 262728 - DNA, 940 bp, Zea mays
cccacgcgtccgcccacgcgtccgcccactcgtccgcccacgcgtccgcggacgcgtgggtgcgcctctacatttcttctctctctgctcctccgcctccgccttgatccatccaagacagggatcgccatgtcggactcggaggagcaccacttcgaatcgaaggccgacgctggggcgtccaagacctacccgcagcaggctggcaccgtccgtaagaacggcttcatcgtcatcaagaaccgtccctgcaaggttgtggaggtttctacctccaagactggtaagcatggccacgccaaatgccactttgtcgccatagacatattcaatgggaaaaagcttgaagatattgttccttcatcacacaactgtgacattccgcatgtgaaccgtactgagtatcagctgattgatatatcagaggatggatttgtgagccttcttacttcagatggcaacactaaggatgatcttagactcccaactgatgagactcttgtggcccagatcaaggaagggtttgaaagcggcaaggatcttgttgtgactgtccagtctgctatgggggaggagcagatctgcgcgctgaaggatgttggccccaagtaacttccctgccttggaatactgtatctcaaaacctaaatcgaaaaaagaagtgtatcaaggattgctacagagacatccatctggcttgagctggcttttgctatggcaaacacaagtgcagggatcgctgggtgttgcaccgtgtctgcattatctgtggttacattctggaccctgtattttctatgcttttatgcccctactgtttagtattaattatcaataaatttgtttgggacggttgaaaaaaaaaaaaaaaaaaaaaaaaaaaaaaaaaaaaaaaaaaaaaaaaaaaaaaaaacaaaaaaaagaaaacaaacaccaaaaa

SEQ ID NO: 262729 - DNA, 912 bp, Zea mays
ggtcgacgcaagactctacactgaatcgctccgccctcgcctccgccgcctccgcctgatccatccaagacagggatcgccatgtcggactcggaggagcaccgcttcgagatcgaaggccgacgctggggcgtccaagacctacccgcagcaggctggcaccgtccgtaagaacggcttcatcgtcatcaagaaccgtccctgcaagggtgtggaggtttctacctccaagactggttagcatggccacgccaaatgccactttgtcgccatagacatattcaatgggaaaaagcttgaagatattgttccttcatcacacaactgtgacattccgcatgtgaaccgtactgagtatcagctgattgatatttctgaggatggatttgtgagccttcttacttcagatggcaacactaaggatgatcttagactcccaactgatgagactcttgtggcccagattaaggaagggttcgaaagcgggaaggatcttgttgtgactgtccagtctgcgatgggggaggagcagatctgcgcgctgaaggatgttggccccaagtaacttccttggctttggagacggaaccctactctatctcaacttaaatcggaaaagaagtgtatcaccaaaggattgctaccgagacattcacctggcttgagctggcttttgctatagcgtgcaaggggttgctgggtgtcgtacctacctgacttatcattatctgtggttacattctggaccctgtattttctatgctttcatgtctctctactttctagtattaattatcaataagttggtttggaatggttgaattgcatccaatgcatgaagtttctttggttaaaaatctctttgctcgattgttctgcttccagtgttggtgtatactgtagtttctgagt

SEQ ID NO: 262730 - DNA, 1106 bp, Zea mays
  unsure (1)..(1106): unsure at all n locations
ggnaatcatgccagacaatacctatctggaaaattttacaaacatgatctgttgttacggaaacaaacagcatgttcacaaatatttgtcacccgctagttcatttttgatctaaaccgcgacaaataaaaaagaacggagtgagtacaaaacaacagcccacagaaataacattttacaaactcttttgtacagcatgctctgtcgtctaaattacatcacatatatatcccttattatctcgggactctagttttttcaacaaaaaaatagaacaaatatggcttcacaggggaaaaaaaaagggttcgcaagctcacaaacaaacctgtgaccttggataggaaagaattggagtgaccggatcaccaatgcagtgatctggcactacatgcaaaatgtcagtgaagaacacaattcaggaacatgagcagctaaaaactcactggacttgctcctcccagacccaacgagggtcccttgaccctgctaggctacacttacaattactctttaccacttctgaattgactgcgagagatttcgagtgcctatgccaagttttcagaatagctgttgaaaacagtcattgtgcttttgacttagcaaagaaaagcagtctgtttgacagtaccaagttttcagaatagctgaagggcaatcttgagcctgttctgcttccaccttggtagcttcccaaatgcctcctttgtcatcccaaacttttctctgaactccgatgaagacagatatatctctcgcttggtaacatcaatgtctgtggggatattggtggaagatgtcctcaagctgtcatatgggtatataggaagtcctgcctgacactctgcctgactctcttttacatcttcctctactgtaggagttgcaatttgactatcctttgtagggttgatttccttggcattcgtctctagtgtaggcttgttcgcttcaatttggggcttgcttgcatcagggctcgcttcaattgactgtggtattagagttgctttaggccgctcaaaagaagcagaaatcgcagcgattgaagctgtccttggaggtggctttgaagaatcagaagatacaggcttcggaacttg

SEQ ID NO: 262731 - DNA, 464 bp, Zea mays
ccggaattcccgggtcgacccacccgtccgcggacgcgtgggctgatccatccaagacagggatcgccattgtcggactcggaggaacaccgactcgtatcgtaaggccgaccctgggcgtccaaatacctaccgcagcatgctggcaccctccgtaagaacggcttcatcgtcatcaagaaccgtccctgcaaggttgtggaggtttctacctccaagactggtaagcatggccacgccaaatgccactttgtcgccatagacatattcaatgggaaaaagcttgaagatattgttccttcatcacacaactgtgacattccgcatgtgaaccgtactgagtatcagctgattgatatttctgaggatggatttgtgagccttcttacttcagatggcaacactaaggatgatcttgttgtgactgtccagtctgcgatgccggaggagcagatctgcgcgct

SEQ ID NO: 262732 - DNA, 552 bp, Zea mays
ggtccggaattcccgggtcgaccgccccacgcgtccgcccacgcgtccgcccacgcgtccgctgagtatcagctgattgatatttctgaggatggatgggtgagccttcttacttcagatggcaacactaaggaatgatcttagactcccagctgatgagactcttgtggcccagattaaggaagggttcgatagcggcaaggatcttgttgtgactgtccagtctgcgatgggggaggagcagatctgcgcgttgaaggatgttggccccaagtatcttccttggctttggagacggaaccctactgtatctcaacttaaatcggaaaagaagtgtatcaccaaatggattgctaccgagacattcacctggcttgagctggcttttgctatagcgtgcaaggggttgctgggtgtcgtacctacctgacttatcattatctgtggttacattctggaccctgtattttctatgctttcatgtctctctactttctagtattaattatcaaaaaaaaaaaaaaaagggcggccgctcacgatcaccggaaa

SEQ ID NO: 262733 - DNA, 737 bp, Zea mays
cccacgcgtccgcccacgcgtccgatttcttctctctctgctcctgctcctccgcctccgcctgatccatccaagacagggatcgccatgtcgggctcgggggagcaccacttcgaatcgaaggccgacgctggggcgtccaagacctacccgcagcaggctggcaccgtccgtaagaacggcttcatcgtcatcaagaaccgtccctgcaaggttgtggaggtttctacctccaagactggtaagcatggccacgccaaatgccactttgtcgccatagacatattcaatgggaaaaagcttgaagatattgttccttcatcacacaactgtgacgtaagttaatttctgtctgttctctggttagctaacttattttgatagttcacttcatatgttactgacaagttcaatattttttagattccgcatgtgaaccgcactgagtatcagctgattgatatttctgaggatggaattgtgagccttcttacttcagatggcaacactaaggatgatcttagactcccaactgatgagactcttgtggcccaggtctgtatggaaatgctttccatcctaagcgctgctagttttcttgttggcttccgagtattctcgatgatgggtttatttgttagcttagtcatatgcgctttctcagtatgttctcttccttaaattttgttaatggattaatggatttggttcttacgattacaagtattgtggaaagt

SEQ ID NO: 262734 - DNA, 954 bp, Zea mays
gcgcccacgcgtgttttcccatacgctcctctctgccttctcctgctcctccgcctccttcttgatccagccaagccagggatcgccatgtcggactcggaggagcaccacttcgaatcgaaggccgacgccggagcgtccaagacctacccgcagcaggctggcaccgtccgtaagaacggcttcatcgtcatcaagaaccgcccctgcaaggttgtggaggtttctacctcaaagactggtaagcatggccatgccaaatgccactttgttgccatagacatattcaacgggaaaaagctcgaagatattgttccttcgtcacacaactgtgatattccgcatgtgaaccgtactgagtatcacctaattcatatatcaaactatggatttaggagccctgttacttcagatggcaacactaacgatgatcttactactaccaactgatgacactcttgtggaccatatcaacgaagggttttaaagtggcaaagatcttgatgggactgtacaatctactattgttgaagatcaaatatgcgcgctgaacgatgttggccacaagtaacttccctgtcttggaatactgcatctgaaaacctaaatcgaacaaataagtgtatcaatgattgctacagagacatacatctggcttgagctgcctgttgctatggcaaacacaggtgcagggatcgctgggtgttgcaccgtgtctgcattatctgtggttacattctggaccctgtattttctatggttgtatgcccactactgtttagtattaattatcaataaatttgtttgggacggttgaattgcatgcattgcatgacgtttcttgttggttatttgttttctcttgccatgcttacagtattggtgttggcaatttaatcgtgatttttttgtacctgtttcgaaaattggtgggcagcttacccgcgcttgtgc

SEQ ID NO: 262735 - DNA, 1313 bp, Zea mays
cacacgcgcccacctcctctgctctctcctctcccccacctctgcgtccgtgcgttgtgtttgtttaggcggcaaccgcgaggcgcaatggcggccgggcgagagctggtggtgagtttcggcgagatgttgatagacttcgtgcccaccgtggcgggggtctcgctggcggaggcgccggccttcctcaaggcgcccgggggcgcgcccgccaacgtcgccatcgcggtctcgcgcctcggcggcggggccgcctttgtcggcaagctcggcgacgacgagttcggccgcatgctcgccgccatcctccgcgacaacggcgtcgacgacggcggcgtcgtcttcgactccggcgcgcgcaccgcgctcgccttcgtcaccctgcgcgccgacggggagcgcgagttcatgttctaccgcaaccccagcgctgacatgctcctcaccgccgacgagctcaacgtcgagctcatcaagagggctgcggtcttccactacggatcaataagcttgattgctgagccttgccggacagcacatctccgtgccatggagattgccaaagaggcaggtgcactgctctcttatgacccaaacctgagggaggcactatggccatcccgtgaggaggcccgcacccagatcttgagcatctgggaccaggcagacattgtcaaggtcagcgaagtcgagctcgagttcttgacaggcatcgactcggtggaggacgatgttgtcatgaagctgtggcggcctaccatgaagctgctcctagtgactcttggagatcaagggtgcaagtactatgccagggatttccatggcgctgtgccttccttcaaagtacaacaagttgatacaactggcgcaggtgacgcgttcgttggtgctctgctccaaaggatcgttaaagatccatcctcgctacaagatgagaagaagcttgtggagtcgattaaattcgctaacgcgtgcggagcgatcaccgccacgaagaagggtgcgatcccgtctttgcccactgaaactgaggtcttgcagctaatagagaaggcatagatagatcactgtaattgctttggttttcactagcttccacttctgcaaattgcaaaatgtattgtattctgatctggaacagaagaagtgggtgctccatcttacctgccattttttgcttgccctagttcctaagggtgttttgttttagaactctacttgcaataagtagagcccttttatatttatgtatatcagcatgcatttgatacgatcgaataatcatcaatccataattgtagcaattttttttt

SEQ ID NO: 262736 - DNA, 521 bp, Zea mays
cttcaaagtacaacaagttgatacaactggcgcaggtgacgcgttcgttggtgctctgctccaaaggatcgttaaagatccatcctcgctacaagatgagaagaagcttgtggagtcgattaaattcgctaacgcgtgcggagcgtccacccaccacgaagaagggggcgatcccgtcgctgcccaccgaagcggaggtcttgcagctaatagagaaggcttagatcatcatcgtcctgtacgccatggttttcaccagcttctacttcttcgaattgtattggattctgatatggaacagaagaagaagcggctgccccatcttaccagccctttttgtttgccctagtttccccttgtgaaaagggtgttttgttttataaactctacttgcaataagcagagcctttttttaattatgtcagggtgcatttgatacgatcgaataatcatcaatccataattgtagcaatttttttttaaaaaaagaatagtcaattgagtttttgttccagtggtgg

SEQ ID NO: 262737 - DNA, 1055 bp, Zea mays
cccacgcgtccgccactccacagcagtagcaagagggatagagcaaggccacacacacacacacaccactaggctaggttagccttttaatcgtcgtcgagaagcaagaagggcgcgcacgcaagcaggcaagcaagaagagagccgatcgaccgagagctagcacgcgatggcgaggtcttccaagatgatggtggcggcagctctgctggccttggccctggccgtgtcgaccgccgaggcgaggaacatcaagaccacgacgacggagaagaaggacgacgcggtggtgcagccgcagaccttcccgcccttcgaccgcctcggcggcggcgcgtccccggcgttcggcggcctccccggcggcagcattcctggcagcagcattcccgggttcagcatgcccggcagcggcagcagccttcccgggttcagcttgcccggcagcggcagcatgcccctcttcggcggcggctccccgggcttcagcggcttcggcggcatgcccgggtcccccaccgccggctccgtccccgagcacgccaacaagccctgaactccgtctgtccgtccgatccgtcgctggagcgaggtcgggctagccagcgtgcgtggtagtagagtggtgctactgttactgtagtacgtcgtcgtcttcatgcatgcgtggttcgtggtttcccctagctccatacgagcagtagttgggccttgcacgtaccgtacgtctagctagctatatatatatagcttgtgttctactgccttttagtttaattacctgcctgcattggagagttggatctgtttcatttggtggtgtttgctttactattaggtcagtatctgtttgtggagacttggtgtttaatttatttagccgtttgtgactggttgtagctagcggtggtgcggtggtgatgttcttgaggcatgaataatgctacatgcatgtgatgtatccatgttttgtgtgtggtaaacctgttgtttgtataagctgtatgcatgggtctttaatttgtttttgaagcagggttcacgttattaatttg

SEQ ID NO: 262738 - DNA, 812 bp, Zea mays
gcgtgaactggcttgccttagatgactgaagtttgggtacagttgcctctaaagcgtcgctgagaaggaagaagggcgcgcacgcatgctggccagcaagaagagagccgatcgaccgagagctagcacgcgatggcgaggtcttccaagatgatggtggcggcagctctgctggccttggccctggccgtgtcgaccgccgaggcgaggaacatcaagaccacgacgacggagaagaaggacgacgcggtggtgcagccgcagaccttcccgcccttcgaccgcctcggcggcggcgcgtccccggcgttcggcggcctccccggcggcagcattcctggcagcagcattcccgggttcagcatgcccggcagcggcagcagcctacccgggttcagcttgcccggcagcggcagcatgcccctcttcggcggcggctccccgggcttcagcggcttcggcggcatgcccgggtcgcccaccgccggctccgtccccgagcacgccaacaagccctgaacgccaacaagcgtggtagtagagtggtgctactgttactgtagtacgtcgtcgtcttcatgcatgcgtggttcgtggtttcccctagctccatacgagcagtagttgggccttgcacgtaccgtacgtctagctagctatatatatatagcttgtgttctactgctttttagtttaattacctgcctgcattggagagttggatctgtttcatttggtggtgtttgctttactattaggtcagtatctgtttgtggagacttggtgtttaatttatttagccgcttgtgcct

SEQ ID NO: 262739 - DNA, 732 bp, Zea mays
cggaattcccggaccaccgctccacacacaagaagagagccgagagctagctacctagcgcgcgatggcgatgtccgcttccaagatgatggcggtcgccgccgctgccctgctagccctggtcctggccgcgtcgaccgcggaggcgaggaacatcaagacgacgacgacgacgacggagaagaaggacgatgcggtggtgcagccgcagaccttcccgcccttcgaccgcctcggcggcggcgcgtccccggcgtccggtggcctccccggcacctcgtcgggcggcagcagcattccagcgttcagcatgccgggcagcggcagcagcctccccggcgggtcgttcttgcccggcagcagcggcagcatcggcagcatgcccctcttcagcggcggctccccggccttcagcggcttcggcggcatgcccgggtcccccgccgccggctccgtctccgtcgtccccgtgcacggcagcaagccctgaaaatccgtccgtcgccggagcacattattgatccaacttgtgccctagtactcctttgtctgcattatattggagagttggtattgcgtttcgtttggtgtttgctttgttattaggcctatctaccgagacatgtgatgtttgttgcggtaaattaaaaccggttgtattcatgctgctgttgtctttaatttgttaagaacggttcactaaaaaaaaaaaaagaaaactgagactagttc

SEQ ID NO: 262740 - DNA, 483 bp, Zea mays
cggacgcgtgggctgacgcgtgggcggactcgtgggcgagaatagccttgtgtcttctgggccacgtcctcctcgccgtggcgtccatcgcagtggcggcggcggccggtgacgcgggcaagatcggcatctgccacggccgcgttggcagtaacctcccgccgccgtcggccgccgcggcactgctcaagcggaacgggatcaccaaggcgcggctcttcctgccggacccggccgtgctcccggccttcgccgcggcgggcatcgacctcatggtgggcgtgcccaacgagaacctcaccttcctggccgcggcggggcccgagggcgcggcgcagtggctgcggtccgcggtcctggcccacgcccccgccgagcgcgttcggtgcctcgccgtcggcaacgaggtgctgtacaacaaccagttctatgcgcctcacctcgtgccggccatgcggaacctgcacgccgcgctcgccaccc

SEQ ID NO: 262741 - DNA, 643 bp, Zea mays
tcgatacaagcctctagcccgggccgactccactccaatccaatcctggggcgggcgactgcctccttccctcgatctattctccatcttgtcctccctttgctaaaaataacgaggcagaggcatcttcgatttgacgtgcgcttcctcttcctcgctcgctctcggtcgcagtgatggctgatgtcgacgagtaccgttgcttcattgggaacctgtcctggtcaacgactgatgaaagcctcaaggatgcgttcagcaaattcggcaacctcactgaggcaaaggtggttcttgacaaattttcaggccgttctcgtggtttcggctttgtaacttttgatgagaagcaagccatggaggatgctattgagggaatgaatggactggacttggacgggaggaacatcactgttgataaagctcagccacaaggacctggtagagaccgtaatggtgaccgtgattatgaccgcgagcgtggatctcgttatgaacgtggtcgtgactatggtggtgggcgtgcaccgcgaggtggtggtggtggtggtggtggtggtgactgcttcaagtgtgggaaacctggtcattttgctagagagtgcccatctggggatggtgggagaggggacagatatggtgg

SEQ ID NO: 262742 - DNA, 1208 bp, Zea mays
ggctcgctagccgctacgctatctacgccgccccggcacctcccatgagatgacagccgcagccgctgccacatccacagccgccgcgctcctcgcccccggtctaaggctctgcgcgggcggcgcccgcgcgcgcgtctcctgtccctcccgctcccgcctcccactccaccgcatcgccgccatggcctccgcccccaacccctccttccgcccggaggaggcacgctcccctcccgccctcgagctcccgaccccgccgctctccaagttcaaggtggcgctgtgccagctctcggtgacggcggacaagaatcgcaacatcgcgcacgcgcgcgcggccatcgagaaggcggcctccgagggcgccaagctcgtccttctcccagagatatggaatggtccgtattcaaatgacagcttcccagagtacgcggaggacattgaagctggcggagatgcggccccttcattttcaatgatgtcggaggttgctcgcagcttacaagtcactcttgttggtgggtccatagctgaacgttcgggaaacaacttatacaatacatgctgcatctttggttcagatggcaaacttaagggtaaacatagaaagatccatctttttgacattgacattccaggaaagatcactttcaaggaatcgaagactcttactgctgggcagaatcctactgttgtagacacagatgttgggcgcattggtattggtatatgctatgacatccgtttccaggaactagcaatgttgtatgctgcaagaggtgctcatttgttgtgctatcctggtgcattcaacatgactactggaccactgcattgggagttgctgcaaagggcgagggctgcagacaaccagctgtttgttgcaacatgcggcccagctcgagataccagtgcaggatatgttgcttggggacactccactcttgttggaccttttggagaggtgattgcaacaactgagcatgaggaggcaactataatagcagaaattgactactcactgattgagcagaggaggcaatttcttcctctgcaacaccaacgccgtggcgatctctatcagctggttgatgtccagaggctgggttctcattagcacagggacgaagcaggagagcagttgactctgcaggcttgctcgtactacttcgttcatgagatgcatgcccatgcccatcgagaga

SEQ ID NO: 262743 - DNA, 471 bp, Zea mays
gctcgctagccgctacgctactgtctacgccgccacggcgccacgacatctcccataagatggtagccgcagccgcagctgcagccacagccacagccgccgcgctcctcgcccccggtctaaagctctgcgcgggccgcgcgcgcgtctcctctccctccgggctcccaccccgccgcgtcactgccatggcctccgcccccaactccttccttccgcccagaggaggcgcgctcccctcccgccctcgagctcccgatcccgccgctctccaagttcaaggcggcgctgtgccagctttcggtgactgcggacaagagtcgcaacatcgcgcacgtgcgagcggccatcgagaaggtagcctccgacggcgccaagctcgtggttcttccccgagatatggaatggcccctactcaattgcagttttccagagtaccgctccggacatttgaacctggcggagatgcag

SEQ ID NO: 262744 - DNA, 454 bp, Zea mays
cccacgcgtccggtcaccgccaccacagccgccagcagtccatcaccggttccgttcgaatgggccgcaagggacgcaaggctagggtttcgcgcgacgccgacgtcgacggcagcgaggatgagatggccgccgctcctgccgccgctgcgggcaggagcctctacgagatcttgggagttgagaagactgcttcacaacaagaaataaagaaggcatatcacaaattggctctgcgcctccatccagataagaatcctggggatgaggaagccaaagagaagtttcagcagctgcagaaggttatatccattcttggagatgcagagaaaagagctttatatgatgagaactggcattactgatgatgatgcactggtgggagaagctgcaaatgatcttcatgagtacttcagaacaatgtgcaagaaggtcactgaggctgacattgaag

SEQ ID NO: 262745 - DNA, 503 bp, Zea mays
tgcaaccgcaagggccgcaaggctagggtttcgcacgacgccgacgccgacgccgacgccgatggcagcgaggatgagagggccaccactgcgggcaggagccgctaccaggtcatgtaaataaccgtggatgggacaaaagtctgaactgttctaaatgtgtgtcacggatcgctttcaggttctctttccagatcacaggtgagttatttaatttcttgtttatttttcggggagcatttgaagattctgggagttgagaagaccgcttctcaacaagaaataaagaaggcgtatcacaaattggctctgcgcctccacccagataagaatcctggggatgaggaagccaaagagaagtttcagcagctgcagaaggttatatccattcttggtgatgtagtgaaaagagctttatatgatgagactggcatcactgatgatgatgcactggtgggagaagctgcaaacaatcttcacgagtacttcagaacaatgcacaa

SEQ ID NO: 262746 - DNA, 493 bp, Zea mays
ggtcgagcacgcgtccgagggcattggattataccgccgaggaagcagcaagcagcaaggtcgacatgtcgtctccgccgccgccggtgaagctgatcggcttcttcggcagcccgtacgcgttccgcgcggaggcggcgctgtgcctgaaagcgtgccgtacgagctgatcctggaggacctgttcggcagcaagagcgagctcctgctccaccacaaccccgtgcacaagaaggtgcccgtgctcctccacggcgacggcagggccatctccgagtccctcgtcatcgccgagtacgtcgacgaggccttcgacgggccgccgctgctccccgccgacccctacgcgcgcgccgcggcccgcttctgggccgacttcatcgagaccaggctcaccaagcccttcttcatggcgatctgggtggaggagcgcgaacgcacgtgcggttcgaggaggaggccaaggagctcgtggcgctgctggaggcgcact

SEQ ID NO: 262747 - DNA, 414 bp, Zea mays
cccacgcgtccgcggacgcgtggcgagtgctccaaacaaatagagttttccttcaccgagccagacccagaagaaggggagccggaggtagaaagaccagagaagatggcgaccaccgagccggcggcggtgaggctggtgggctccttcgccagcccgttcgtccaccgcgccgaggtggccctgcgcctcaaaggggtgccctacgagctcatcctggaggacctggccaacaagagcgagctgctgctggcacacaaccccgtgcacaaactcgtgcccgtgctcctccacggcgacagggccatctccgagtcgctcgtcatcctcgagtacgtcgacgaggccttcgacgggccgactcttcttcccgcggaaccccacgcgagggcggacgcgcggttctgggcccac

SEQ ID NO: 262748 - DNA, 522 bp, Zea mays
cggacgcgtgggatcaaagggaggcaaacgccatagcggccaatcacttggcggcggcggcggcgatggggcggctgaccgaggagcaggcggcgcgcgaggcgggctcggcggggaccaacgccacgtccctcaagctcacacaccgcgctctctccgacgtgtcgtgcctgagcagcttcaagaacctggagcacctcgacctcggcttcaactgcctcgtcaccctcgagggtttgtcctcctgtgccaatttgaagtggctttcggttaaggaaaacaagcttgtgagcttaaaaggtgttgaggggctctcaaagctgcaggtactgaatgctggcaagaacgaacttacaaaaatggacgaggtcacatctttaacaagcctgggagcattgattcttaatgataacaatatttcttccatctgcaagcttgatcagttgcaacagttgaatacacttgttctctctaagatcctgttttactattggcaatgctttggtcaaggctaagtctatg

SEQ ID NO: 262749 - DNA, 1741 bp, Zea mays
ttttctcctcgggcggaggccaagaacccagccgcgaagccaagcccatctgatccggcccctgctgccctgccccagctcgtctctcaggtcgccttgccgttgccggttccgcgcccgggcccggctcagagtcgcgagctcgtctcgcagatccggcttcgcttgcttgaattctgttctttgggagcaaagaggtgctggccggtggcgtggcttggtgctctggggccggcgagtttttttttttgcgtccgctcgctctgcctgtagtcttcttgctgcggcggcggggtggagatgggggtggcgggggagaagttccagctggggacggtgggggcgctcagcctctcggtggtgtcctccgtctccatcgtcatctgcaacaaggctctcatgagctcccttggcttcaacttcgccactactttgacaagctggcatctcctggttacattctgttctctccatgtggcattatgtatgaagctgtttgagcacaaacctttcgatgcaaggaccgtcatgggattcggagtgctcaatggcatatctattggacttcttaacttgagtctgggtttcaattctgttggtttctatcagatgacaaagctggctattattccctgtactgttatactggagacccttttcttcaggaagaaatttagtcggaacatcaagctttcccttagtgtgctccttcttggtgttggtgttgcaactataactgatctgcaactcaaccttgtgggatctgtattgtccctactggcaatcatcacaacctgcattgctcagatcatgacaaatacaatacagaagaagttcaaggtatcttcgacacagctcctgtaccaatcgtgcccataccaagcattgactttgttcctcgtcggtccattcctcgatggatttttgactaaccaaaatgtctttgctttcgactacacaactcaagttctgtttttcatcgtgctgtcgtgcctgatttcagtctcggtgaacttcagcacttttctcgtgatcgggaagacgtctcctgtaacctaccaagtccttggccatctgaaaacatgcttggtcctcacctttggctatgtcctgcttcacgacccgtttagctggagaaacatacttgggatcctaatcgcggtaatcgggatggttctgtactcgtacttctgcactagagagactcagcaaaaaccagcagaagcctccccgcaagccgtccaggcaaaggagggtgaatcgaacccgctgatctcggactccctgagcgccgccgaaaacggaggcagtgccaccgacgacgaacctctgaaggtaccaatgtggagctcgaagtactcgaaggcgtgaagtggctgttctggtattagtgcacacggtgctatacagaattcagcgtggtaggcagatactagggttggaaggcaaccctgttcctgttccatttttggccttctattttttcttcttcctggcacaaatactataaatatgtgctgtcagtaaatggatctcactcttgagaggaatacctcagctcgagaccgagtgttctgttctgcctgaaagctagtatttgtttgtgctccactccacgtgtaaagtggtagatggacatgatctgtacagtagtagtttgcattcttttgtactagtgatatacaatatttatgtattcctcgtgttccctaaaaaaaaaaaaaaaaaaaccacgcgtccg

SEQ ID NO: 262750 - DNA, 626 bp, Zea mays
ctccatgtagcattatgtatgaaactctttgagcacaaacctttcgatgcaaggaccgtcatgggattcggagtgctcaatggcatatcgattggacttcttaacttgagtttgggtttcaattctgttggtttctatcagtcggaacatcaagctttcccttagtgtgctccttcttggtgttggtgttgcaactataactgatctgcaactcaaccttgtgggatctgtattgtccctactggcaatcatcacaacctgcattgctcagatcgtatccttttgattgtacattgctcattattttcttttatatggcatatctgtccaagaatcatttgcatacaacaattgcatgtgtttgaggttgttaatattacaaaaggggcgcaaagcgctaatatatgaacaatagaagctagtgcttcctctattgtatactccctctgtcccaaattaaaattagtttcagttaattaataggttcatacaatacttgatgtatgtgttttatatatgtgtctagattcatcattatctatttgaatatagacataaaagtcaagagctaaagcgaatactattttggaaccgagagagtattattaaatttacctgttgagcat

SEQ ID NO: 262751 - DNA, 451 bp, Zea mays
aaaaaacacccgcctccgtctccatctccatctccggtgagcaggaagagggggagggaggaggccaagagcgcagcggcgaagccatagccaagctcacccgatccagtccctgccgcccccagcgtgccacagccagtcccgcgctcagctcagctcagattcacgagctcgtctcccagatccagcttcgtttggttgaattctcttctttggaagtgctggtgggcggcgtggtttggtgctcttggggccggcgtgtttctgcgttctccgggctatctgcctgtcttgctgcggcctgcggcggcggggtggagatgggggtggccggggagaagttccagctggggacggtgggggcgctcagcctctcggtggtgtcctccgtctccatcgtcatctgcaacaaggctctcatgagctccctccgcttcaactttgccaccac

SEQ ID NO: 262752 - DNA, 620 bp, Zea mays
ggcctccccgcaagccatccaggcaaaggagggtgaatcgagccctctgatcttggattccctgagcgccgctgaaaacgggggcagtgccaccgacgacgagcctctgaaggtgccaatgtggagctcgaagtactccaaggcgtgaaaggctgttctgttactggtgtactacggcgctatacagaattcagcttggtaggcagatactactactagggttggaaggcaatcctgttcctgttcctgttccatttttggccttctatttttttcttttcttgttttcttcctttctggcatatactacaaatatatgtgctgctgttagtaaatggatctcactcttgggaggatgatacctcagctcgagccgagtgatctgcctgaaagctatttccttgtgttccatcccctccccagtataaactggtagagatggacatgatatcaacagtagtggtttgcattcttttgtactagtatgtatccgattcttctgctatgtattccccgcgatcccctagcagtatggggtcctctggttcatatgtaggccagtgggacgcgttgggcgcatacaaagcgatgttaaaaaacatgccatttggtttctcgtt

SEQ ID NO: 262753 - DNA, 342 bp, Zea mays
  unsure (1)..(342): unsure at all n locations
tgggtttcaattctgttggtttctatcagatgacaaagctggccataattccctgtactgttatactggagacccttttcttccggaagaaatttagccggaatatcaagctttcccttagtgtgctccttcttggtgttggtgttgcaactgtaactgatctgcaactcaacgttatgcgatctgtactgtccctactggcaatcatcacaacctgcatcgctcagatcgtatccttttgattgtcattactcactattttctttatgtggcatatctgtcacagtatccagaacgatttgcacacaacaaactttgcatttgccactanagcatccttta

SEQ ID NO: 262754 - DNA, 479 bp, Zea mays
ccctcgctttcgcccacgcgtccgcgcaaaccctatcgcctatccctctcgcggtcttgcctcggtctctggcggcggcaccgccgttttacactcctcctccttcgacaacccgtcgcagtagcgtccgtctctggtgtccggctgtccggctctggactcccgacctcgacatcaggatctgcgcctcccgaccggtatgtgggggctctgaagaaggtgcagaaggatctgggcgcgtcggtgttcgagccgctggtgcaggcgtacgccgccgtcgggaagttccctgggatgtggcagcggctgaagatcgagaacgtggaggtcggggaggggacggcccagctgcttgactctatctgcgccgatcaataggtggttttcttttgtcctcgccgtttgtgtttgtctcaataacagcaggaccgtttcgagcgctcggctatttgctctgcaagcgctgtgatgcctgtatg

SEQ ID NO: 262755 - DNA, 613 bp, Zea mays
  unsure (1)..(613): unsure at all n locations
cggagacnctgatgagctacttcgaggagaacaaggacgtcgatggggccgagcggtacgtgggggctctgaagaaggtgcagaaggatctgggcgcaccggtgttcgagccgctggtgcggacgtacgctgccgccgggaagaagttccccgggatgcggcacgcaccgtagatcgagaacgtggaggtcggggaggggacggcccagctgcttgactctatctgcgccgatcaatagcccaagcacgtcctagaggcggtggcagcgttggtggcggctgctatgcgatgggggcaccacctccgttgatgtattgtctggtgcgggactgcgagtgacctctgaggcgcgggcggagaataactggatctacctaacttcggaatggagacctgcaggtccatttgaaattaaacagaaggttggtaagagtgtgatggtgctcattttgcgttttagaggatccatacttgcatgtagccaaagaaactattttagtaccttttttccttgtactttttttttttgtcttattgctttgcctggagctacttgaaatgctccccagttaaaaaaaaaaaaaaaaaaaaaaaaaaaaaaagggcggccgc

SEQ ID NO: 262756 - DNA, 764 bp, Zea mays
cttcaaaataaataatgtcttgtatttttttttttggtccccgacgaggggactacatttattcattattatgtacatgaaagaggctcaaggacgcctccactccattacatttgcaccgacaagggacaaggcaaaaccgtcgctagctacaagcgaagttcacaacagtgacagggatgggatcacacacgacacgacgagcagagttgcaaagcagagtagtacgacggcgtctatttgcatctacgtgtcatcagtagtgcagcatcacacgattcacgggagcactggtccgattttggcgatgatcagctcggatgagcctcctcaccattcttcgtgtcgcctctggcggcggcggcggccctcttggccgcctcggccttggccttgtcctccttcctcctcagtttctccagcttctcccgctccatcttctgtatgtagacgttctcggcggcgcgctcctcctcgctgagcaccctgccggaggccttgtcgctgaagtagcgcgacacgccctccatcctcctcgccacggccgcccacgcaggctggtgggcagtaacgctcgccgccacggtccttcttgtagccatccccggtccggtcgcttccgcaccccacgctgttctcacttcttgcccggcaagtaagcagcaagcagggttcgcttcctcaccacccgcccgcgtcggcccgttgccggtgacactagccgcggatcttttaaaccggccccgttggccttatctctatct

SEQ ID NO: 262757 - DNA, 1347 bp, Zea mays
cggacgcgtgggcggacgcgtgggcggacgcgtgggcggacgcgtgggcggacgcgtggggtgatgtaacacttatgtcgctggcatatgccgggacaggaaatgtgcttaaggttcagaaacttcttggcatttgctcacagcatcttgagaaaggtgaaacacaccaagggccagctgtcctagggattgctcttattgctatggctgaagaattaggagctgaaatggctgtacgttcacttgagcgtcttctgcagtatggcgagcagaatataagacgggcagttcctcttgctcttggtatactctgcatatctaatcccaaggtaaacgttatggacacactgagcagattgagtcatgatgcagacgccgatgtgtcgatggctgcaattatctcattgggtttgattggtgctggcacaaacaatgccagaatagctggcatgcttcgcaatctttcaagttattactacaaagaagctgctcatctgttttgtgttagaattgcccagggccttgttcacctcggaaagggcttgttgaccctttctccgtaccattctgatagatttcttctttccccgatggcacttggagggcttgtaactgttctgcacgcgtgtcttgatatgaagtccactatcctagggaaatatcactacatactttacattattgtcctggcaatgcagcccaggatgcttttaactgtcgatgaggatctgaagcccctgtcagtacctgtccgcgttgggcaagctgtggacgtggttggtcaggcaggaaggcctaagacaattaccggctttcagacacactccacgccggtcttgctcgcagcaggggagagagctgaactagcaactgaaaaatacattccactgaccccggtactagagggctttgtgattctgaagaagaacccagagtaccacgaggagtgaagacccagatagcatattggtgtttccgaggcccgtccagataggcagcctcgaatttgcgcggccttggatatctatcttctttcttgctcagcggcagcgccatcctggccctctccttcctgggtccgtgtccatgtttgattcttatcttaccggagctgtggctaactgaaagagctgtctttggttggcttaacttgtagtacgaccgtatttattaattactagaagacgtttatagagcttacgatgtacggcgaggtgatgacatggtggcatagcgtagtgtaatttttttttggcgttcgtctcggccaatccatagcatacatagtccttgttttgacattgtgaaccatcattatccgttccctgtattttggggtttcgttcc

SEQ ID NO: 262758 - DNA, 995 bp, Zea mays
tggtacccctgctggtgccgccccggcgttaccggggggacccacgcgtccgtccattcgtccgcttgttgaccctatctacataccattccgatggatgtctgctctccccgatggcacttgggggcctagaaaccgttctccacgcgtgccttgatatgaagtccaccatcctagggaaataccactacatcctctacattattgtcctggcaatgcagcccaggatgcttttgactgtcgacgaggatctgaagcccctgtcagtacctgtccgcgtcgggcaagcggtcgacgtggttggtcaggcaggaaggccgaagacaatcaccggctttcagacacactccacgccggtcttgctcgcagcaggggagagagctgaactagcaactgaaaaatacatcccactgaccccggtactagagggctttgtgattttgaagaagaacccggagtaccatgaagagtgaaacgctttagcatgccaaatagcatggtgtttcggaggctcgtgcacatggcagtcttcaagccctggcgcacccctcgtcgagaaatcgctcgccctttgctcaacccttcgcctggagttcatgttgaattcttaccagagttgtggctaactgaaagctgtcttcggttgtgctgatatacgattgtatctgtacgattgtagcaattactgggacagcttactctgtatggtgtggtgataacgtggcatagcatttttggcgctggtctaggttagtccttgtgttgacatggtgcaccatcattataagttttctgtattttatggatccgttctgttcgtgtgtactggaaacattgtacacatgatatgtaagtgtgcctccatgtgtatgtgtgccttcgtgtgtgttgtggttttgtctttagcatggcttttgtccccttataaccaaaagacaaatcaaagcgctcgaagcaactttttccaaatatatatggaagaacttttagggctg

SEQ ID NO: 262759 - DNA, 728 bp, Zea mays
ctgcgtttgctattcttatggagtatattggcaaggatgactcaaacattcgtattggagcaatattgggtcttggaattgcatatgctggttcccagaaagaagagcttaaaatgcatctatctgctgtgttgggagactcccaatcacctcttgaggtcttggtcttctcgccattgccatgggattggtgtttgtcggttcttgcaatgaagagattgcacagtctattatatttgctttgatggagcgtagtgaggccgagttggcagaacccattatacggttgcttcctgttgcgcttggccttttatatcttggaaaacaggatagtgtggaggctaccgcagaggtctctaaaacatttgatgagaagatagggaagtactgtgatgtaacacttatgtcactggcatatgccgggacaggaaatgtgcttaaggttcagaaacttcttggcatttgctcacagcatcttgagaaaggtgaaacacaccaagggccagctgtcctagggattgctcttattgctatggctgaagaattaggagctgaaatggctgtacgttcacttgagcgtcttctgcagtatggcgagcagaatataagacgggcagtccctcttgctcttggtatactctgcatatctaatcccaaggtgaatgttatggacacactgagtagattgagtcatgatgccgatgccgatgtgtcaatggctgcaatta

SEQ ID NO: 262760 - DNA, 564 bp, Zea mays
aaaaccgtcgctagctacaagcgaagttcacaaccgtgacagggatgggattacacacgacacgacgagcagagttgcaaaagagagcaaacgttcctctccatgcagagtagtacctagtacgacggcgtctatttgcatctacgtgtcatcagtagtgcagcatcacacgattcacgggagcaccggtccgattttggcgatgatcaatcagctcggatgagcctcctcaccattcttcgtgtcgcctctggcggcggcggcggccctcttggccgcctcggccttggccttgtcctccttcctcctcagtttctccagcttctcccgctccatcttctgtatgtagacgttctcggcggcgcgctcctcctcgctgagcaccctgccggaggtacgattgtagcaattactgggacagcttactctgtatggtgtggtgataacgtggcatagcatttttggcgctggtctaggttagtccttgtgttgacatggtgaccatcattataagttttctgtatttatgcacccgttctgttcgtgtgtactggaaacaatgat

SEQ ID NO: 262761 - DNA, 804 bp, Zea mays
atttttaactccatcatgaagcttgtcgggacaaagaactactatgacgtgaggatggaatgcgaggggaagctttgctatgacttctcaaacctggagaggttcttcggtgacaaagcggtcaaggaggcgcttggagtcggtgacatcgatttcgtctcttgcagcactacggtttatgaagcgatgctcacggactggatgaggaatctggaagtcggcatcccggcgctgcttgaggatgggattaacgtgcttatatacgctggggagtatgaccttatatgcaattggctgggaaactcgagatgggtgcactcgatggaatggtctggccagaaagacttcgtatcctcctgtgactcaccgtttgtagtagacggtgcagaagctggagtcttgaagagccatggaccactgagcttcctcaaggtccacaatgcggggcacatggttccgatggaccagccgaaagctgccctggagatgctgaggagattcacgcaagggaaactgaagcaggaaccgctccctgagacgatggccttgaaggcggcgatgtgactggcgtggacgtcgtgaatggaagaagggagtctcttaattactaggtggtccgaggtgtcgttcaagcgagcgtgtgtcgatcactgagctgctgaagcttgttgtttccattggctcatggatggatgctgttgataagaagttcaatgctggaaaccctgtctgtctgctgctcttgtaaagcatctcatgtatacaccccctggatccagaaagagaaataatatgtttttttcc

SEQ ID NO: 262762 - DNA, 752 bp, Zea mays
cccacgcgtccgcccacgcgtccgcccacgcgtccgaggcaccttccctgcccgattggcgatttaagtggtgggggagggaaggccgatggtcagtgaaagagagtaggtggccggacggtggtggcatcgccaattcaactccgcatctgaatcggcactcggcagcgcgccagctccatagtgtaggaggagatggcgctcacaagaatcggtcttgctggccttgcggtcatggggcagaaccttgccctcaacattgcagagaaagggttccccatctctgtgtacaacaggacaacctccaaggtggacgagaccgtgcagcgtgccaaggcagaaggaaaccttcccgtctacggcttccatgaccccgcgtcctttgtgaagtccattcagaagccacgggtggtgatcatgctcgtcaaggccggcgcgccagttgaccagaccatcgcgacgctcgcagctcacttggagcagggcgactgcatcatcgatggggggaacgagtggtacgagaacacggagaggagggagaaggccatggaggagcgcggcctcttgtatcttggcatgggtgtctctggaggagaggagggtgcccgcaacggcccgtccttgatgcccggaggctcgttcgacgcttacaagtacgtcgaagacattgttctcaaggtggctgctcaggtccctgacagtggcccgtgtgtcacgtacattggcaaaggtggatcgggcaactttgtcaa

SEQ ID NO: 262763 - DNA, 693 bp, Zea mays
cgacctggatgcgacgggggagacggaagacgacaggcggcggcttcgcaaggagcaggaggccctgcacgccagcagcctcagagtccccaggcgaccgccatggcatagtcagatgactgtggaggagcttgatgtgaacgagcgtcgggcctttctggtgtggcgcaggaatcttgcaagattggaagagaatgataagcttatcctgactccctttgagaagaatattgacatttggagacaactctggagagtgcttgaacgcagtgatttgttggttatggtggttgatgctcgggatcctttgttctaccgctgccctgaccttgaggcatatgcaaaggaaattgatgaacacaagagaacaatactccttgttaacaaggctgatctgttgccgttaaatatcaggaagagatgggctgattattttaaggcacatgacattctctatgtgttctggtcggctaaggctgccactgccacattagaaggcaaaaagttaagtggatactctgaaggagaatctgcttcacttgatttggataccaagatatatgaaagggatgaactcttgatgaagctgcaagctgaggcagaatctattgtagctcagaggaggatctcacctactgtagatgatcacgaagccagttcttcagattctgtttcttcagtgactaaacatgt

SEQ ID NO: 262764 - DNA, 1018 bp, Zea mays
gttgaaggcctgcagcagggttattgtgtcatttctagcgataaaaggttcttggttctgtatgctttgctaagaaagaagcggaataagaagataatggtgttcttctcatcatgtaattcagtaaagttccacgctgaacttctgaatttccttgggatagagtgttctgatatccatggaaaacagaagcaacagaagcgaactactacattctttagcttttgcaaggcagaaaagggcatcttattgtgcactaatgtggctgcccgtggacttgatattcctgacgtggattatatcttgcaatatgaccctccagatgaaccaaaggattacattcacagagttggtcgtaccgcacgtggtgagaaaggcaaaggaagtgcattgctgttcttactaccagaagaactgaagtttctaatttacctgaaggcggccaaggttaccctgacggaatatgagttcaatcagaagaatgtgccaaatttgcaatcgcagcttgagaatattgttggtgagaattactttctgaaccagtctgccaaagaagcctacagatcctacgttttggcatatgactctcactctatgaaagacatttttaatgtccatcaacttgatctgcagaaagtagctgcgtcattcggtttcaagaatcccccgaaagtgaacctggacctggatagcagtgcggcgaagcatcggaagaagatgaggagagtagacggtgggaagaggcatggcatcagcgcttcgaacccgtacgggaggaaggacaaaggcggtgccggcgataaacgacagttggcgagattctagaaaggaaggaagagcaggagcgtttcactattgctgtgttcgtaccagggctttgattgatgttacctggcttgggaaaaatcttgacaggccactaagattggctataaattctgggttgtcttgatatatttggtgtgtaacgcaatcagcctgctcgatgcgaaaattggattattgctttatagtactt

SEQ ID NO: 262765 - DNA, 1261 bp, Zea mays
  unsure (1)..(1261): unsure at all n locations
cctacgcgtccggggagcttacatttactgacaactccagctggataagaagcaggaaattcagacttgggctgaggattgctcctggcttttgtgaaggtatccgtgtccgagaagccaagacagaagctttccctgttaaggatcacagaggagaagtgtacaagaaccactacccacctgcgctgaaggatgatgtttggagattagaaaagattggcaaggatggcgcattccacaagaagttaaatgccagtgggatctatacagttgaagatttcctccggcttcttgttagggatcagcagagattacgtagcattctgggcagtggaatgtcaaataagatgtgggacagccttgttgagcatgcaaagacatgtgtcttaagtggaaagcattatgtatactatgctagagactcaagaaacgtgggtgcaatattcaataacatctacgagttcactggtttgattgccgatgatcagttcatttcagctgaaaatctcacagacaaccagaaggtctatgctgatgcattggtaaagaaagcatatgaggactggatgcaagttgtagaatatgatggcaaggcactcttgagcttcaagcagaaaaagaaatctgtcacgacaagaagtgacgttgcatctgcctcaacaagcaatcctgcttcatatggttcggccatttcacagaaacagttgtcccttccagcaaaagctggacaaacttcctcagcgggtactatgaatgaagcagatggaactagaaatgcttacaacgcaaatggaaaccagtcagcaagatatgcagccaccactcagaacattcctgcaaacgtcgccatgcaatatgacaggagtgcagtgtcgcctgaaagccagtttagtggttcatcccttcagagtcagtcttcaagagggtccaacatgctagcattgggccctccgcagcaacatcaaagtttcgaattcccagcgctcggccagcccgttcagccaacaggcctgaaccctttcgaagagtggccgcagcagcaggagaactggcgcggtgttgatgactacctgtgagggagatcaggatgaggagccatgagattctcgaaaacgaagaaatgcagcagatgttgcggcttctgagcacggtggtgcaggaaccaacctaactgaagatggcttcagtttcccttcgtacatgccttgaacttcaccaaaattgagctacgaggatgaccgnacccgtgcacctgggaaag

SEQ ID NO: 262766 - DNA, 605 bp, Zea mays
gcttttatgaagtcgatttgccaaaggatgctaaaaaagagtccttggttgagacagaagtgggaagtgataacttagagcagagagcagcgcagagctttgacgagcctttgctccctgaggtgaaggaggagaaaaccaggaggagccaatttgtgcaggggcttgtcttgtccctgatgtttgatgacatcttatgaagagcacatcccaaaaggggaagggagaaggcatattttgctaccagcaaacgtttcgccggcacagctgttgtaacgattcgctgatttgccatcggaagatggtgacattgctctgggataatgggggagatgaactgtggatatggatgtttcgtagtactatgcatcatcattgcatgaataatagagtatatgtatgtatagtttgttagcatcatggtactggatattctggggctctgtatgtatattgggaggccgaaatggaccctacctatcataaatcagccatttgataatgtgcatgtggtgttcttctggaagcctgggatgtgcgtaggtaacaccagacacatctgcctgtggttgtcggacctacttttcatcaaatcctttatttcc

SEQ ID NO: 262767 - DNA, 919 bp, Zea mays
cattgatggatggttccacactggtgacattggtgagtggcaacctgatggatctatgaaaatcatagaccgtaaaaagaatatattcaaactttcacagggtgaatatgtggcagttgaaaatttggagaatgtttatggtcttgtttctgctatagactcgatatggatatatgggaacagctttgagtcctttcttgttgctgtggtcaatcccaacaaggaggttctcgagagttgggctgcagcaaatggaataagtggtgatttcgagtccttgtgcaataatccaagaacaaaagaatacattttaggagagctgtcaagaataggaaaagagaagaggctcaaaggttttgaattcgtaaaggatgtgcacctggaaccagtaccgtttgacatggaccgtgatttgatcaccccgacatacaaaaagaagcgtccgcaactgctcaagtactaccagggcgtgattgacaacatgtacaaaagtgctaagtgaactcactctacagtacacatcccgatgaagattcccaacgttgaatcttgtttgagcagccagaagttctgctttgtatatgctcgtagtttgtatgcgagaattctttcctgtatcagttttttcagaaacgatttgccttgggcatatatatagcaaaaccggcaatgtggccagcagccaagtggagacaccgtttcaaattgattgaactatggcgaatactgattgacagaagggttagggcatgcttggtacctttaccaggtactattctacctggccgagcaaattgattaaggccaactgtttggatccaatttaggccttctttgaaatgtgggatttttttcccatttcctatgtatttcctgtgaaaataaactgattcctataaaattcctttacgactcctct

SEQ ID NO: 262768 - DNA, 724 bp, Zea mays
gttctagatcgcgggcggccgctcgcgatcatttgcgccgccgcagcccgcagtcgcttgcgcgcagcagcacttcgcaccgccgccccatcccatcgccgccagtgtctgctcgatccgatggctcccacgaagaagtcgaagaagagcacagagagcatcaacaacaagctgcagctggtgatgaagagcggcaagtacaccctgggctacaagaccgtcctcaagacgctgcgcaactccaagggaaagctgatcatcatcgcaaacaactgccctccacttaggaagtctgagattgagtactacgccatgctggccaaagttagcgtgcaccatttccacggaaacaatgttgatcttggcactgcctgcggcaagtactacagggtgtgctgcctcagtatcatcgacccaggtgactcggacatcatcagtaccacccctggcacccagtgagccagccccggcacccattgcagctgcttcgcctttctcaagatgagatgagatgtagcgctccggccctatgtccgtttcctttttttatcttttagctatgtaattttgctaccatgtgtccatctaccatactgatagtacctcttattatggctgctatgcaaggcatatccatggttttgtttgatgagatggctgtacttgttctcttgttgatgttgatcggatcaggtcaatcgatgcgctgatgggctgcttggtt

SEQ ID NO: 262769 - DNA, 546 bp, Zea mays
  unsure (1)..(546): unsure at all n locations
ccggnccggaanncccgggacgacccacgcgnccgcggacgcgngggcggcccnccacnnaggaaggcagaganagagnacnacgccaagcaggccaaaganagcgggcaccannnccacggaaacaagggggancnnggcactgccggcggcaaggactacagggggggctgcctcagtatcatcgacccaggtgactcggacatcatcagtaccacccctggcacccagggagccagccccggcacccattgcagctgcttcgcctttctcaaaatgagatgagatgtagcgctccggccctatgtccgtttccttttttatcttttagctatgtaattttgctaccatgtgtccatctaccatactgatagtacctcttattatggctgctatgcaaggcatatccatggttttgtttgatgaaaaaaaattaaaaacaaatctcaaaactacttcaatcacatcacatacaaatatataacttgaattaaaactataagactcacttcaaatgtataaaaaaaaggggctcccgttttaaag

SEQ ID NO: 262770 - DNA, 934 bp, Zea mays
ctaacttttggaaaatcaaaaattcatggatatggtgtctttgccaaggttgcacacaaggccggagatatgatgggtgaatacataggggagattgttagaccaccgatatcagacactagagagcggcgaatttacaactcactagtgggtgctgggacatatatgttcaggatagatgatgaacgtgttatagatgccactcgggttggaagtatagcccgtctgatcaatcactcatgcgagcctaattgctattcacgtgccataactattcttggagatgaacacatcatcatttttgcgaaacgggacatagatccatgggaagagctgacatatgattataggtttttttcaagtgatcaacgacttccatgtttttgtggattccccaaatgccgtggagtagttaatgatgttgaggcagaggaacagtcggctaaaatcagagttaagagaagtgaattatttgaaaaaagtgaaaagtaaaggtacatcatattggttgggatatgacatgcttgtgtgatatgcttgccagtgcctaaaggcaaattctaaaaaatggttgagtttcattcttgaatcctgataattcttctcattatttgagtggaagacgaatctaattgtataggtacccaatataggatcggcaatccaatttggggacataagttgaatcaattgtcgtgtaccattgaaatgttagttgttacacatatttcggccatttatcttgttgaacctaccctattttcaaccgttggagctgggaatcggaggggtggtttggttaaatgatttgagatggcctgccatgtgtaatgtaatcgaagtacatggttgcacttttcggtgttgcccatatattatccataacaatatgtagtttcagctgttctgcatttacgaaaatgcattggaagag

SEQ ID NO: 262771 - DNA, 400 bp, Zea mays
gaatttccgggtcgacccacgcgtgcgcccacgcgtccgcccacgcgtccgcggacgcgtgggatcgcaagcgcggacgccatcaagcctctcatccacgtccttgagacgggtaacccagaggcaagagcaaactcagctgcaactctcttcagcctttcagtaaacgaagagaacaaggccaaaatcggacgatctggagcaatcaaacccctggtcgacctgctgcgagatggcagtgcacaggggaagaaggatgcagcaacggctctcttcaacctatcgatatttcacgagaacaaggcccgggttgttgaggccggggctgtaaagcccctggtggagctgatggacccagcagctgggatggttgacaagggcgtcgccgttttggcaatcc

SEQ ID NO: 262772 - DNA, 1222 bp, Zea mays
gtggatgatcgtagtaaaaaccgtacatttaaaactagctgcttcaacaccaggaagttgagtcctgtctttgttgctggtcccaacatggatgaggctccacctgtttggatcgacagagttggatttaaagccaacataacagagagcttcacacgtcaaagcaaattcacatatggcctcgtggttgaagagattacaacacgtgatgaaactaatactatctgtacccatggttctcgagcaatgcctagcggcggtctgaacatggatggacctcccacaacactcagtggtactggagttgaccggatggcattccttcaggctaatataacccgtgacaatactgagtttgtgaatggtgcaattgttggagacagatacattttccagctagaccaaggtcttggcattgggagcaaaaacccattcttcaaccgtcatcaacttactctgaccaagttcatcaatttaaataagcaagagaaaggtgttggcaagccactaccagctgttttggttcttcatggtcattatgctggttgtgtgggtgatttgccgagctatgacgcctttgcacttggagggccttattctgttaggggctttagtaatggtgaactgggcgcttctaggaatattcttgaggttgctactgaactgcgtgtccctgtaagaaacacacacgtttatgcatttgtggaacatgggactgaccttgggagttccaaggatgtcaaagggaaccctacagagtttttcaggcgtgttggtcatggatcttcatatggtgttggtgtcaagcttgggttggtaaggggagagtacattgtagatcacaatgctggtactggaactattttcttcagatttggtgagagattttgagtatgcaacattctgccactgtggaaggcagacttttgaggcactctgtttagcgatgcttgtggactgtgataggattcaatcggcactggagctctgctgaaataatgaagctattttctggggaagagtgatagctagtgtgaaattagtttttttctatgtaggatgtaagatctgttctttcagagtttggagctcataaatagatgaatattcacagatgtctcccattttttttaccgttagttgtgttgtttgtgctgccgtcaaattgtcgagtcgttttgcccttcaccacctgtgagttgcttatctacagttttgttcc

SEQ ID NO: 262773 - DNA, 389 bp, Zea mays
atctattgttggttctgttacatccagcaacctgctgaatcctcaggatgatctttcattcaagcttgagtatgtccatccttatttggatggtgtcgatgatcgtagtaaaaaccgcacattcaaaactagctgcttcaacaccaggaaattgagtcctgtctttgttgctggtcccaacatggatgaggctccacctgtttggatcgacagacttggatttaaagccaacataacagagagcttcacacgtcaaagcaaattcacatatggccttgtggttgaagagattacaacacgtgatgaaactaatactgtctgtacccatggttctcgagcaatgcctagcggcggtctgaacatggatggacctcccacaaccctcagtg

SEQ ID NO: 262774 - DNA, 426 bp, Zea mays
cccacgcgtccggccctagtaccggcgcaaggtcccgacgaggcgcccctcgatgcgtccgccattcatagccggggggagcagctctcattgaaaaggctggaggtggagccggaggcggaggtggcggaggatgaggtggcactaggtttggactccacgcacaaggcggctcaggatgcgatggatgagtgggactcggccactgctgcggtttcaattgatgatttggatgcatacctggaacaactgagaaaggatgtagccatggcagagcaggggaatcagaaggtatctggtgagattagtgtcactgcagagacaacattcaatgatatgattcaattggatgttggtatcgaaatgctggagtctttgatttcgaatcttggtccaaaggctttgaaccattttgatgaaagttct

SEQ ID NO: 262775 - DNA, 853 bp, Zea mays
cggacgcgtgggcggacgcgtgggcggacgcgtgggcagatagagaatgatggggatgtgctttgggaaccagatgtgagagaaacaaatgaggctgtcgcattgaggggtatgaagtttatggactggttgtggacaagagaagagaaagagatagctattgtcagtcacagtggtttcttgtttcacaccttaagcatgtacagcaaggagtgccatccaaccataagagacgaagttagcaagcactttgcaaactgcgagctacggtcgatggtgttggttgacagaagcatgcttgggtcatattcgtcaagattcaactatgctggcaagaatccaaccgggctagatgtgcctagtgatattgcagataagaagcaggttgatgaagctcagaagaactgaggcaaccttgaaagcataccgtagatgacttggattatcaaaaagccactctgacctttgcgaagcttgcttgcttgctttgaagagggcatctactacagatagagtttacacataccattgcgttagtcgagatgaactacgcagcaatgtataagcatgtctgctcttttgtctcagcctacatttgagattcagggcattggactaagatcgcctatttatgataataataataataataaccggatcacctacattcaccaggtgatgcatggcaaagttctcttggtttccgagctgttctagtctaggggtggctgtacaacgtccacggctccacgcaattccgtctcatggatggtgataaaaccattcgatttatggttttggtttgtgcagattacatatgaaaaaacaaaaaaaagggcggctgttcgcgatc

SEQ ID NO: 262776 - DNA, 750 bp, Zea mays
cccacgcgtccgcccacgcgtccggtcccattctgatcctgtggacagtgggttaataatagtaataaaaatgataatccacctcctctgcttcccaggcccagcagcaggagctcccccgtctccgtcctcctccgcctctgtcagggtcccggtcggacttcctcacgaccgccgcgccaaatcccgtctcgttcctccgttccgctgcgcatcctcaggaatggaacttggcgccaccactgccctgtaccctctgcaccgctgcaaaaccatttacctggtcaggcatgcccagggcattcacaacgtcgcaggcgagaaggacttcggcgcctacatgtcacatgaactgttcgatgctcagctcacccctttgggttggaaccaagtcgatggtctgcgggagcatgtgaagaaaagtgggcttgcagagaagattgaattggttattacttcccctttactgaggactatgcaaactgcagttggggtctttggtggtgaaaagtatactgatggtgtaaatgcacctccactaatggttgaaaatgctggacacagtggacgtccagctgtttcaagtttgaactgccccccatttattgcagttgaaacctgcagagagcacttgggtgtccatccatgtgacaagaggaggagcataacagaataccggcctctcttccctgccattgatttttcattgatagagaatgatggagatgttctttgggaaccagatgtgag

SEQ ID NO: 262777 - DNA, 920 bp, Zea mays
accgccgcgccaaatcccgtctcgttcctccgttccgctgcgcatcctcaggaatggaacttggcgccaccactgccctgtaccctctgcaccgctgcaaaaccatttacctggtcaggcatgcccagggcattcacaacgtcgcaggcgagaaggacttcggcgcctacatgtcacatgaactgttcgatgctcagctcacccctttgggttggaaccaataactgataacagggtgttagtttctactgacaaaataagctgcatggatggagttgtgcttctactaacaaatttttatttgggcctaagctagcaaggtcgatggtctgcgggagcatgtgaagaaaagtgggcttgcagagaagattgaattggttattacttcccctttactgaggactatgcaaactgcagttggggtctttggtggtgaaaagtatactgatggtgtaaatgcacctccactgatggttgaatatgctggacacagtggacgtccagctgtttcaagtttgaactgccccccatttattgcagttgaaacctgcagagagcacttgggtgtccatccatgtgacaagaggaggagcataacagaataccggcctctcttccctgccattgatttttcattgatagagaatgatggagatgttctttgggaaccagatgtgagagaaacaaatgaggctgtcgcattgaggggtatgaagtttatggactggttgtggacaagagaagagaaagagatagctattgtcagtcacagtggtttcttgtttcacaccttaagcatgtacagcaaggagtgccatccaaccataagagacgaagttagcaagcactttgcaaactgcgagctacggtcgatggtgttggttgacagaagcatgcttgggtcatattcgtcaagattc

SEQ ID NO: 262778 - DNA, 609 bp, Zea mays
tttattttggtgaaggattacgctattgatagattaacttcagagaatcaggtgattctgttgccaatgtttctgatttcaggttgccttgaagatcccaattgaatgcctatttttttgcaggcaatgcgtttggaacttcataacatggaaattgctttacagaaatttcaagatttattcagtagtattgggcatgagggaatgaatagtttttcagcaatttctgaaaatcaggacgtacaggatgtgaataatgaacaacatgaaagggttccaggtacacaatgtggtctagcaaatgagcataccttggtaactgcagttgtcaaagaagccaccacacaaaatgtagatcaccagttggaaactgatccaggcagcatgcatgtacaaagcccagtgcacttcaagtctggtgcaatgccatctccggagctagtagctgcaaatacagaaaaagctgacagccttcttgaacccaatgtagacattggcatgggcagtgtatctcctgcacgaccaacagattgtttgaatatggatcttgacacggagagtcagtcctgacaatgcaatttatatcccttcacacctggtattcggata

SEQ ID NO: 262779 - DNA, 1084 bp, Zea mays
aatctcatgggggggttttttaggaacctttttagatttttttcccacccagtcgccaacaaccgacatgaacgcatggaagctggcaatgttcctaggaggaaatccggagttcagtgccagcacccatgctcttctgaacaaggactgcgagcttgggcgtggtgggtttggcactgtctacaagaccactcttctgggatcgtcaccctgttgccatcaagaagctcactgtgccaagcttggttaaatctcaagttgaatttgagagagaagtgaagatgctgggtaagctacgccatcgcaaccctatgttgcgcttaagggttattactggacgccgtcgcttcagcttctcatttatgagtttgtctccgggggcaacctgcacaaacatttgcacgagtcatccaccccaaactgcctgccatggagggagaggtttgacattagtcctcggtatagcgagaagccttgctcatctccacaggcatgatattatccactacaatctgaaatcaagcaacatcctgctcgacggatcaggcgaggcaaaggtaggagattatgggctagcgaactgcttccaatgctggaccgctacgtcttaagtagcaaggtgcagagcgcgcttgggtacatggctccagagtttgcgtgcaggaccgtgaagatcacggagaaatgcgacgtgtacgggttcggcgtccttatcctcgagatcctgacagggaggacgcccgtggagtacatggaggacgacgtggtcgtgctctgcgatgtggtgagggcggctctggacgaaggcaaggtggaagagtgcgtcgacgagaggctctgcggcaagtttccgctggaggaggccgttccgatcatgaagctcggtctggtctgcacttcccaggttccgtctaacaggccagacatgggtgaggtggtgaacatactggagctgatcagatgcccccaggacagcccggtgactgaactgggttaacctcctctactacctacactgtgatcccggcctgtttgttggtttcacttttgagatccttctctgcttggtaactgacggcacgat

SEQ ID NO: 262780 - DNA, 1235 bp, Zea mays
atcttgttatattgaccatcatcagagtctttcatcagaagataagggatggggctgtggatggagaaatattcagatgctgagctctcatctattgaagcaaagacaagaagctagagaagtattatttggtggttctggatttgttcctgacatcccttcactccagaggtggcttgagattgcttgggataaaaaatttgatacgattggctccagccactttcacaacaaagtttatggtgccaagaagtggatagggactacagaatgtgctaccctcttccgctcttttggcctccgtgcaaagattgtagattttgatagcacagaatcatccgacctccaaagtaagaacagtagccatgcagcaagtcaagtacgaggacttatggataagttcttaataaagagtaattcccctaaatcatcgtctgaattttgtcaagaggatgctgaaagtatgagaggccaacacgcccttgttgactgggtttggaactattttgcatgtgagcgctctgatagattaaccacacagcgtgccactgtcagcaataaaacaccactctattttcaacatcaaggtcattcaaggacaattgttgggattcaaaaggaaatgggtcaccgtggatctcaagaacaatacacccttttgattttagatcctggccatagaactgcagatctagaaaggtccctaagaagcaaaaatggatggcagcgtctggtgaagagaggcgtccacacgctcaggaagccacagtatcagctgtgttatgtggatcctggaattgctagttcagaagaggtggagcgactgaagactattgatggcacactagtcaggttttaggttcctggttgtagtctgcgggatcttgatggtggttgtggcagtcggctattttgccaacactatgtatacactggtggtactgaagctgaggtttaaagcaaagatgaagagagcaaggggcagacaggatcccccacatcaaaactgacaggcatgatcgttcctggaacacaaggatgcagcaggacggcaaaatcctttgacctgtgtcaacattttttggtgctgccgtgctagtagtaggagtatcttgcaagcttttgttttgcaaggtgtagtggtccagaaaacactctgtctgctaaattaccagaaacatccgcagttgtatattgcggcaaaatcccaagtgtatattgcgcaaaaaataaaa

SEQ ID NO: 262781 - DNA, 500 bp, Zea mays
  unsure (1)..(500): unsure at all n locations
tttgttctgtattaccttgcatgtttctccgaatttcttggttgaacaacagaaaacaggatgaggattatatgtgttttgctccctgggcactcccctggttgaagaaacaagaacatctaatccattgccgaacggtgcgctgtacgaatgacacagcaaggatgggcctgcagaaagatctttgacgctgcctaactgaatctgcttgcagactggatctactgttgtttggaggaccttagaagggtcctgactgctttcgtaactggacctgcccgttgggcttgttcggttatctgaacgactgaacctgtggtgtaggtaaacgaagcagagcttgatgtacagtacagtcgcttgtgttgaagtggagagaataaaagtgtttgtacatataataacatcctgcagttgttaatcttttgttacacatctgatgccgcccgcgcactcagaggacccaactggactaaaaactcacaaatcgtattctgcnc

SEQ ID NO: 262782 - DNA, 1496 bp, Zea mays
ccggactggaacgaccggatcgacccccgcgtccgcgcagagaccgggagccagatctttttgcttaagccgaggctgaagaaattgagttcgacggccaggagaatactggcatcaattttgatgcctatgaagacatccctgttgagaccagtggccatgatgtgcctgcaccagtcaacacatttgcagagattgatttgggtgatgcattgaatgacaatatccggaggtgcaagtatgtgaaaccaacaccagtgcagcgttacgccatcccaatctccattgctgggcgggatctcatggcctgcgcacagactggatccggaaaaaccgccgcattctgttttccaatcatcagtgggatcttgaagtcaccaaagccacaccagaggtcacggagtacaaggaccgcttgccctctagctctgatcttatcacccactcgtgagctttcagtccaaatccatgaagaagcaaggaagtttgcataccagactggtgtcagagttgtggttgcatatggtggcgcaccaataactaaccagctgagggagttagagagaggtgtggaaatcctggtggcaactcctggtcgcttgatggatctgttggagagggctagagtctcacttcaaatgataaagtatttagctcttgatgaagctgatcggatgcttgatatgggttttgagccacagatacgtaaaattgttgagggcatggacatgcctcaacgtggtgagaggcagacaatgttgttcagtgcaacattcccaaaagagatacagaggatggccgcagatttccttgctgattacatctttcttgctgttgggagagttggttcaagcaccgatttgattgttcagagggtggagtttgtcctcgattcagacaaacgaagctacctcatggatcttcttcatgcacaaaaggctaatggcacacatggaaagcacgctcttacattggtctttgtggagacaaagaggggggctgatgccctggaggactggctttttagaaatggtttccctgcaactagcattcatggagacaggacacaacaggaaagggagcatgcccttaggtccttcaagagcggagcaactcccatccttgtggcgactgatgttgctgctcgtggtcttgacataccacatgttgcccatgtgattaattttgacctccctaatgatatagatgactatgctcatcggattggatggactggacgtcccgcgcaatctggtcttgcgactgcattcttcaacggccgcaacactacgcttgcaaggccgttgagtgatctcatgaaagaggccaaccaggaggttcctaagtggcttgagggatacgctgcccgatcagcctacggaggtggaggtggtagaaaccgcagacaaggtagcagtgccagatttggtggccgtgatttccggcgagataggggcagtggtggaggatatggtggtggttcctacggaggaggt

SEQ ID NO: 262783 - DNA, 1408 bp, Zea mays
attacttgctggtaacgtacaggccgcttttctagatttaccaattgactggaagaggtaccttggtttgattatgtggtatcaattatcacctgatacaccactcgatattatcattcgttcttacgatcaactccttgttgagggcaaagttccctatcctgttcctcctctgactcttgggggacctcttgatgaagcacctcagtggtccccgggtgaccattttgatatctccttctacctaatgcttcttcatgccaataaagacgagaagtttgggctgctaaagactatgttcagtgcattctcatcttcattcgaccccttggattatcatttcatatggcatcagcgttcaattttggaggctgttggagctttcagttcaaatgaccttcacttgctagatttaagttttgtttatcaattgctttgtcttgggaggtgccattgggctatctatgtcattctgcacatgccgtatcttgacgatgccccatacattcatgagaaattaatcagggaagttttatcacagtattgtgagtcatggagtagagatgatgctcaaaggcaatacattgtagaacttggtataccagaagaatggatgcatgaagctctggctctttatcacgaatactatggagataaacagggcgcactggagaatttgattcagtgtggcaactggaagaaagctcatactattttcgtgacttctgttgctcattctatgtttctgtcatctaaccatcaggaggtctggaggatcacaagtgccttggagaaccacaagtatgaaattgctgactgggaccttggtgccggaatatacatagacttctacgttctgaagaactcaatgcaagaaagaaatgccatggatgattcggattcactcgaggagatgagtgaatcatgcagaagtttctttggccgattaaacgagtcgttgttagtctggggaagcaaattacctgttgagtcaagggcatgctactcgaagatggcagaggagctatgcgcgcttctggtggacaccccaagcgagacgctgaacctacccatggggtgtcttctgacgatgctcaacgctccagttccagacgagagcaggtcgtcgtacctgcaggatgcactctccgtcttcaccgaaatcctttgcagcgatccgtaggtgaaggggagtgaagcctacaggcaacacgccgaagagtttgtacgtctcatgtttgatacttgtagaaaattaggaatgtataactatgacctgatgttgctccggtgaatttgtaacgccatctgaagacatgtgtcgggatcttcgttgtatgtgagtaccaggtcttatgaaacgttgacttgcgagctgtaccaatggggagtgatttcctgggcttcc

SEQ ID NO: 262784 - DNA, 250 bp, Zea mays
gaagaacgagcaggcgatttctgaggttctctgctggtctcgggatccctccgagcttagaagttttatcacagtattgcgagtcatggagtagagatgatgctcaaaggcagtacattgtagaacttggtataccagaagaatggatgcatgaagctctggctctttatcacgaatactatggagataaacagggcgcactggagaatttgattcagtgtggcaactggaagaaagctcatactatttt

SEQ ID NO: 262785 - DNA, 1523 bp, Zea mays
catttccaaacacattttctggattctcaagtggccagccgtgcattagtccattgactcgtcagtgtgcggcttctactgcaccggctaactcgcaaacaacttggacaatgcgtgctaccttccctgaatatgtggttgctcttactacaattgttggatctgtgcttttcacgatatttggtggtgtcggaattgcctgccttccattgggacttatattctcatttgttcgtcgtccaaaagctgtaattacacgctcacaatatataaaggaagcaactgaactgggaaagaaggccagggagttaaaaaaagctgctgaagccctacaccaagaagaaagaagtgggaacaagggccggaaatggcgcaaaaatgtgaaggctttagaaaaggagttattactcctggaagatgacatgaaggctctagaagagatgtatcctcaaggagaacaggctgaggctacttgggcattcacagttcttgggtacatcgggaaacttctatttggtgttgttgggttaattgtttcaatagcttgggttgcacatattgtcatatacttgttgattgatcctcctctatcttctttcctgaatgaagtcttcataaagttggatggtgtttggggtctgcttgggactgctgctttcgcattcttctgcttctatcttcttattgcagtgattgctggggagatgatgcttggattgaagctagtttttatcacaattcacccgatgaaatggggaggcactttaatgaactccttcctgtttaatgttgggctcatactactttgctccatcagtgtgattcagttctgtgccacggcttttgcctactacgcacaagcaactgcagctcaagagatatttggccacactttgcaatcccttcgtggaattaagtatctttacaagtacaatgttttccagtatggctttgttgctcttgccatcctcactctcttctactatgctatatttggatggagaaagaggaaaccaacaggaagattccagctctcaaattgatttgctctgtaagtgaagtttgacggattcatcatatgtgccccctgagtggtagttcagttagcatcttagaaatgtatatgatcaacaaaaccaaaccaatccaaaccaaatcatcttcccaaagagttgaggaactgcaaatgatcaactctgagaccttaaaggccagaattatcaactctgagactttgaaggcaagaatggggcaactgttggttaccacggacatggatgttaaagtagaacccagttgactttgcaatgtacacatttcttgtatcggctcttcatttacgtctgtattatcgcttttatgattggatgatgatgttattcttgagagatgttcggtgtgtttgggggcgcttagcccccctttgatattcattcgtgttaggagttagaaagactcgctggctgatcaggcttccaatgaatgtcgctacgatggccaagatctcaatcacttacgacctg

SEQ ID NO: 262786 - DNA, 625 bp, Zea mays
gaatacccgggccgaccgacgcgtccgcccacgcgtccgctttgttgctcttgccattctcactctcttctactatgctatatttggatggggaaagaggaaaccaacaggaagattccagctctcaaattgatttgctctgtaagtgaagtttgacggattcatcatatgtgccccctgagtggtagttcagttagcatcttagaaatgtatatgatcaacaaaaccaaaccaatccaaaccaaatcatcttcccaaagagttgaggaactgcaaatgatcaactctgagaccttaaaggccagaattatcaactctgagactttgaaggcaagaatggggcaactgttggttaccacggacatggatgttaaagtagaacccagttgactttgcaatgtacacatttcttgtatcggctcttcatttacgtctgtattatcgcttttatgattggatgatgatgttattcttgagagatgttcggtgtgtttgggggcgcttagccccccccttgatattcattcgggttgggagttaggtcaattcattgcttttatatgtgttatatactgtgattacaatgcaaaattttaggttgtattaataatgccttgttccttcc

SEQ ID NO: 262787 - DNA, 538 bp, Zea mays
gggagcgtttcctggattcactcaagtcactgcatgaaaaagatcaaagaacggtttaccgactaacactggttaaaggctggaatgcagaagagatagatgcatatgcgaaactgctagatcttggccagcccgatttcattgaaatcaagggtgtaacatactgtggctcgtcagcaacttcaaagttgactatggaaaatgtaccttggcactctgatgtaaaggaattctccgaggtgttggcatcgaaaagcggtggtgtatacgaagtagcgtgtgagcatgctcattcatgttgtgtcctacttgccaaggtagataaattcaagatcaacggcaaatggcatacctggatagattatgaccgtttccatgaactggtgacatccggaaagcctttcaagagccgagattacatggccatgacgccctcatgggctgtctatggtgcagaggaaggtggattcgatccggatcaatctcgtttcaagaaggacaggcgccatggaactgctgccctcagaagttgaagttg

SEQ ID NO: 262788 - DNA, 582 bp, Zea mays
agaattagaatacttagaggaaatcatagagagaagacaaatcactcaagtatatggcttctatgatgaatgcttaagaaaatatggaaatgcaaatgtctggacgtattttacagacttgtttgattttttgcctctcacagctcttatagaaaatcaggtcttctgtcttcatggtggcctctctccgtcattggacacgttggataatattcgttctcttgatcgcgtacaggaggtcttcatcagagcaatgagtgggaattgcagaatcctgccaaattagttctcagatccaagacatgttcaatcctattcagaagcttgataacattgagataattgcaagacagccatacaaaaatgacagcgttgtcagcgtagaaagatacccagtgcttctagtgtttttctctcattcctcttttcttttggggtggggggtggggagcttgaggctgacatttcaccattagtgaagtgaccaaccagtagtcatttgcaatgaggttcctcatgaaggacccatgtgtgatcttttgtggtctgacccagatgaccgatgtggatggggaatttcac

SEQ ID NO: 262789 - DNA, 1220 bp, Zea mays
gtttcaggacgccaagcgagggcgtggacgcccacgcaaacgcaagagcgcccaggacccggtggcttcctccccctccccttcgccgctacagggagcaagtgttccgccgcctccatctggggtcaagagggggcgtggacgccctcggaaggacgcccttgtccctccgccttcctcttcttcgccactgctgggagggattgatccaccgcctccatctgggatcaagacgggccgtgcacgtcctcggaaggcccttgtccctgtgcgttcctccttttccgagctgctgggagctgttgttctaccacctccgtctggggtcaagcgtggccgcggacgcccgcgcaagagtgcctaccccgctgtggcgccgttggtgggagctgagaagggacctgctggtggacaaccacagaggaataccactcctctctcaccgacacctgctaccatgtcccacagtggtaagagtgagactgtccggctgcccaaggttgctgttgatatcagtgctttgcgtggttcctccatgaacatatctgcttctagtaacagtttggttggtgcgaagcggggaagagggcgcccacctaaggttgtggttgctgggaaagagaagatgcaacaacctgaatctgtgcagtccgtggatgcttcattgactaagagagggcgtgggaggcccagaaaggagaaggcattggaaagtggccgcatgaaagcctcgcagatgactgagggtcaacgtgaagctctgactgcagaccaagctggggctgtccaaaatgaagtagaagatagggatttgcaatccttgggtactcctttgacagagaagagaggccgcggtcgtcctagaaagaggccgttggaaatcgaaactgcaaaagcaggggctgctaagcgtgggaggccaagaaaggagaagacatctgaaactggggacttgaaagttgcacagatgactgagggtcggcatggagctctgcctgcacaagctgtagaccaaactgggcctgtgcaaaatgaagttgaagctatgactttgcaatcccttgctactactcctttgatggagaagaggagtcttggtctgtttataaagaggtcatcggtaacttgaaactgttttaaccctcctttgttgtatctggggagatttgttgtcttttaattgttatgtaggtgagttctttctctattctttttttctt

SEQ ID NO: 262790 - DNA, 910 bp, Zea mays
caaactgggcctgtgcaaaatgaagttgaagctatgattttgcaatcccttgctactactcctttgatggagaagaggagtcgtgggcgacctagaaagaggccattggaaactgacactgcagaaacccaagttgctgcatcggtggagaagcgagggcgtgggaggccaagaaagaagaatccatcggcagggtggtctgcaggaaccagggatactgcattaaaggggattaagagagggcctgggaggccaaggaaggccaggccttttgaaactgagtctgtgaaaactgcacttgaggtgtctagggacttgacagaagatgggcctcaaaaggatggggatcttgtgtcagggaagaaagcagatactcatggtgtggtttggtagtgtcaactgaggaggtagccattgctcccatggatgctgggtgcgcagacgccaagggttgatctgatggatgtgggcaccaagagtcactagtgctctgatggtgcgaacaagaacaaaaaagaaataatgatagtacctgaaaggctaaacagaacatgcagctaataagtgtgttcatggatataattaatagccatactgcaagtattgctatatgtttgcaccagtttgattactcgtatgtttttgagcagttccattggaaactgcgtttgatgggtttcacttttgggggttggatttaaatatctaacccacatcctctttctttgtcaaggactataacatttttgtaattttgttgcttgtactggaaactagccatcataaggttcattttgttttccagtttcaacatcttttagtgatatgttcacataatatctctgttttgtgctttatttggtgtgtctattgggtgcttggttggaggaatgggacgagttggtcctat

SEQ ID NO: 262791 - DNA, 519 bp, Zea mays
actcgcgggccgacacacgcctctagacagccggcgctcgtcacctccaatcaacaaattcccaatccgccgcttcccatcccgcgttcgccgctccatttgatcgaattcccgatggcgcccaaggccgagaagaagcccgcggagaagaagccgacggaggagaaggccgagaagaagcccagggcggagaagcgcgtgccgggcaaggagggcggcgagaagaaggggaagaagaaggccaagaagagcgtcgagacgtacaagatctacatcttcaaggtgctcaagcaggtgcacccggacattggtatctcgtccaaggccatgtccatcatgaactccttcatcaacgacatcttcgagaagctggctgccgaggccgccaagctcgcccgctacaacaagaagcccaccataacctcccgggagatccagacttcggtgcgcctcgtgctttctgcgagctcgccagcacgccgtgtccgaggcaccaaggccgttaccagtttacttcct

SEQ ID NO: 262792 - DNA, 484 bp, Zea mays
tcggtcgaacagtgtggaaccgtgtgattcagcgtggtataacatgcaaactacaggtgttctttacacgtgagggtaaaggctggggagtacgcacagtggaagatctcccaagaggtgcctttgtctgtgaatatgttggagagatactaacaagtgctgaattgcacgaaagagcaattgaaaatgcaagaaatggtaaacatatgcatcaagtactcctggatgctggttggggttcaggtgtattgagggatgaagatgcccttagccttgatggttcattttatgggaacgttgggcgatttatcaaccacagatgctatgatgcgaatttagttcagatccctgttgaagttgagacgcctgatcatcattattaccatctggcatttttcacgaacaagaaagtagaggcatttgaagagctaacatgggattatggcattggttttgatgatacggaagggcccagtaaaccatt

SEQ ID NO: 262793 - DNA, 818 bp, Zea mays
cgcgtgtccggcctatactgttgctaccatatcaaccgacactttctgcacagaggctacatgatctaggcgatgagtatagagctcttgctctctggagacaggcggaaccaagatttctatggaatgcttacttgttagaacctaccattgagaacaagctgaaccagtacttattgccggtaattcaaggcagctttcaaaatatccaagcagaagttgggtcagagaaggtaaatgtgatcctgattgcacgaaggtgcacacgaaggataggtactcgaatgtggagacgaggagctgatgcagagggttctgctgcaaacttcgttgaatcagagcagataatgcagtcaaaagggtttacagcatcctatgtacaagtccgaggctctatgccattcttgtgagagcagactgttgatttgacatacaaacctaattttgacattgttagacaagaggatgcgccttctgtgcttgagaggcatttccatgatttgcaaaagaaatacggagctgtcttagctgttgatcttgtcaatacaggtggcggtgagggtcgcctccgtgaaaaatatgcaaaatctattgaacctattcttagtgaagatataagatatgtgcacttcgacttccaccgagtttgtggtcatattcactttgagcgcctttctcagctatatgatcagatcaaggactatcttcagaaacataagtacttccttataaatgataaaggagagaaaattgaggagcagactggcactgtaagaatcaattgtatagattgtctggatcgtaccaatgtgactcag

SEQ ID NO: 262794 - DNA, 478 bp, Zea mays
gaattccaggctcgacccacgcgtacgcaatgacaagcaacggcctaatgcccatatttgacactatctactgctgggttacgtatggcgccatccaaaatgacatatgtatgacacctgcattatcaccagggggtggccctgtacgtgacatatccgcgttgcctaatcaagaagacaaattgcgaaacatacactccgcagacgcctttgagatgatacaaaaccatctcaatcttatcatgggagaaaagatagcatcaccgcccgatactgttgttgagatcagcaacttgaatcttggaaagctgtatgcagcatccatcatgtatggttactttctgaagagagtggatgagcgattccaacttgagaaaactatgaagactctcccaccaaagcccaaccagcagatagtatttgaaaacctacagcctaatccattctgggatatggagtccttagtacagaattcacc

SEQ ID NO: 262795 - DNA, 510 bp, Zea mays
  unsure (1)..(510): unsure at all n locations
tgtcaattccgtcctcctctatccagcagagagaaccttacttttggttggtttggtttgtaatggagggcacaaggagtaaacctcttctggttttccatggtaacatatgtgctctggctaattgaaatgccatggttttggggccatgcaacgtctgaaaatggagaaatcgctcaaatgtacttatctggatggagcgtgccaattcatgatgggggcttgacgggcaacaaactgagcaacccagatgtgcttgtcatcacactaccgttcctctatctggtgcttgtcccagtaatagtccttatatatggtctgtttgcagaaaaggctactgtatntttgcagcacagaataagagtagtatactcttggggactttttttttttttattctttatttatttgtatttatattttttttttttatttttttttttttatatattttttgttttgttttttttttttttttttttttttttatttttatttttttttttattt

SEQ ID NO: 262796 - DNA, 848 bp, Zea mays
ctcgcgggtcgacgcaagcctctaaacacgacgttctgacccacgcgtccgcactcatcttttctcgtttagaacctctaaaatttcccccactcgccagtcgcagcagcacctgtagcagccatggacgccagcggagccggtagcaaggggaagaagggggcggccgggcgcaaggcaggcggccccaggaagaagtcggtgacgcggtccgtcaaggccgggctgcagttccccgtcggccggatcgggcgctacctcaagaagggccggtacgcgcagcgcgtgggcactggcgcccccgtctacctcgccgccgtcctggagtacctcgccgccgaggttctggagttggcagggaacgcggcgaaagacaacaagaagacgcgcatcatcccgcgccacgtgctcctggcgatccgcaacgacgaggagctcgggaagctgctggccggcgtcaccatcgcgcacggcggcgtcctccccaacatccactccgtgctcctgcccaagaaggcggcggagaaggcggccagcggcggcagcaaggagcccaagtcccccaagaagggcgccaagtcccccaagaaggcttagaaagtagggtcttcatttgcgctgtgtgctgtagcatgttcgtgtctagatctgtggatgggatgtgtcctgctctagtatcgtccttgtgtcttattgtatgttcgtcttcatcgagaagatcttcagcagtcagagctcgttgtgtactaatgttcccccatgttctgtttctcgttctgattctgcaattcgtcatattgttgaatttaatggttatgtggaatcgctaaaaagacatggtcatccgt

SEQ ID NO: 262797 - DNA, 712 bp, Zea mays
cccacgctttttcttgtatgtctggtggacacgcagatggccaaaccagagtaccaggctatggagaccggacgagactgatcaattatgctctcacagcctccaaaagaaggtgcatgatagggtattttaacagaaacaataaatttcctcgaagcatcaaagtctccagcaacctgcacaggaaaacaaatatttataattatgtcatgttcccaacaatttagtgcaagagtccaaggagaccaccccgcgattcgtcaacgtctccgggatggcgaagcgcaacccgacgcctccctgtcctttttgttacctccggacgccgctgccgaggggctgcatgacatgattctgaatgctcgcgacgaccttgatgttttatctccgtggtcggtgggggcgtcggcgtgtggtgtaggcagatgagggaggcgacgatgttcttctgtggtgacccatcgacgccgcagtgggtcgaccaacaccatcaccacatggagattcacagggctctcttctgaagcagctagcaaacaagagtatcagtggtggtgtagctgttgttctagctgaaacgaacaagtaagagatggagatggacatagcaaagctagaagttggcttcatgggaacatctgtaatatgtaggagtgacgctcctctaattctagcagacttcaggaaggtataatattcataaattattgtt

SEQ ID NO: 262798 - DNA, 406 bp, Zea mays
gctgcggacgcgtgggacctctcaccattaaagcacaacctgatctggtagcttcagctccaaacaacaagaaacactgagagctgtgaagagtctgagatggcttatgtaagccccgcgactgatgatacatcaacagatctagatactgacgagaagaaccaaatgggactcccttctggaaggtcatcagcttcaagtgcggcttcgctgcatcagcgccaaccgcaatcagacattcatagtcatgagtaccatcagctttctcttttgcttatgttagccagcctgacttctattttccacccccttgtatgtctggtggacacgcagatggccaaaccagagtaccaggctttggagaccggacgagagttccaggtgaccaccccgcgattcgtcaacg

SEQ ID NO: 262799 - DNA, 1106 bp, Zea mays
cgtctaaccacacgtctgccgccgccgcgcccactgcctcgtgtggccgtcgtctcccgttcggaacgccaagccccccatccggcgaaatggcccccaagcgaggtggcagggcgccggtgccggccaagaagaagacggataaagtgacgaaccctctgttcgagaagaggccgaagcagttcggcatcggcggcgcgttgccgcccaagaaggacctgcaccggttcgtcaagtggcccaaggtcgtgcgtatccagcgccagcgccgcatcctcaagcagcgcctcaaggtaccaccggcgctcaaccagttcacccgcaccctcgacaagaacctcgctacgaacctgtttaagatgcttctcaagtaccggcctgaagacaaggctgccaagaaggagaggcttctgaagagggcccaagctgagaatgaaggaaaaactgttgagtcgaagaaaccaattgttgtgaagtatggccttaaccatgtgacttacctcattgagcagaacaaggctcagcttgttgtcatcgctcatgacgtggatccgattgaactggttgtgtggcttccagccctgtgcaggaagatggaggtcccttactgcattgttaaaggaaaggctcgccttggatcgattgttcacaagaagaatgcatcagtcttgtgtcttaccactgtcaagaacgaggataagcttgagttcagcaagatcttggaggctattaaggcaaacttcaacgacaagttcgatgaggtcaggaagaagtggggaggtggcatcatgggatccaagtcgcaggccaagaccaaggcccgggaaaagctgctcgccaaggaggctgcgcagcggatgacctagattgtctactgctgtgtctgccctgtagtttgacggggaagaactgatgaactcgtattgtggttttccgaatctagtttcatatgtttctgtccaccagaccatgtttagaagctttgcaagacagagtttacagtgtttatgtgatgcctcagatccatgcagctttgcttctaattgcctaagagcaacctcaaaagtatttcatgaaaaaaagcccttctacagcttttcttaccc

SEQ ID NO: 262800 - DNA, 1646 bp, Zea mays
cgtccgtgtcttccttgctcactctcctcaccactaccctgacctgacctgctcccaagctccctctgcctgcctttataaatcaccggggcagagcgcctcagtgacacacgccgctgctccaagaaaccaccgccgagcccaaccgcacaagcgcgcgaggcaggagagagagagaggcggggagcaaaacaatggaggggaaagaggaggacgtgcgcctgggcgccaacaagttctcggagcgccagcccatcgggacggcggcgcagggcgccgctgacgacaaggactacaaggagcccccgccggcgccgctgttcgagcccggggagctcaagtcctggtccttctaccgcgcgggcatcgccgagttcgtcgccaccttcctcttcctctacatcaccatcctcaccgtcatgggcgtctccaagtccacctccaagtgcgccaccgtcggcatccagggcatcgcctggtccttcggaggaatgatcttcgcgctcgtctactgcaccgccggcatctccggaggacacatcaacccagctgtgactttcgggctgttcttagccaggaagctgtccctgactagggccctcttctacatcatcatgcaatgcctgggtgccatctgtggagctggagtggtgaagggcttccagcagggactttacatgggcaacggtggtggcgccaatgttgtcgcacctggctacaccaagggtgatggccttggcgctgagattgttggcaccttcatcctagtctacaccgtcttctcagccaccgatgccaagaggaatgccagggactcccatgttcctatccttgccccactgccaattgggttcgcggtgttcctggtccaccttgccaccatccccattactggcactggcatcaacccagctaggagccttggcgctgccatcatctacaacagggatcacgcctggaacgaccattggatcttctgggtcggccccttcattggcgctgccctggctgccatctaccaccaggtgatcatcagagccatcccgttcaagagcaggtcttaagctgccgtggccgtgccgagacatgccagtccgaagaacgggcgtcttcctgtgatgtcttcttgtctgcccacgcctagtttctctgtcgattcctattcgtcgtctcttcagggctggtgctcactgctgcgccgttctgttaaccgaaacaagaactctgtgtattcctgtaccgagctgtgcatgtttttttctttccatcgtggagaatttaagttattatccgtttgctgcaaggtttgccgtctcattttatgcgttgggatgttggcaagaaagggcagatgtcatgtgagaatttaagttaagtgaaatcgattcagggttttcttggtttcagtttcaaaaaaaaaaaataaataaaaaaaaaaaaaacaaaaaaaaaaagaaaaaaaaataacaagaacaaaagcaaaaaaaaaaaataaaaaaaaaacgaaaaaagaaataaaaagggggggctcttttagaggttcaaagtttacttacgcttctatgcaatgtgaaaacttttatatgaggtaccttaaattcaattcatgggccccgttttaacaagctcggaattgggaaaaccct

SEQ ID NO: 262801 - DNA, 1374 bp, Zea mays
  unsure (1)..(1374): unsure at all n locations
tgtcgggtgggcggaggcggtcaccgctgcttcaagaaaccaccgagagcccaaccgcacaggcaggagagagagcagggagccagggacagtagcgtggggccggggagcaaagatggaggggaaggaggaggacgtgcgcctgggcgccaacaagttctcggagcggcagcccatcggcacggcggcgcagggcgccggggccggggacgacgacaaggactacaaggagcccccgccggcgccgctgttcgagcccggggagctcaagtcctggtccttctaccgcgcgggcatcgccgagttcgtcgccaccttcctcttcctctacatcaccgtcctcaccgtcatgggcgtctccaagtccacctccaagtgcgccaccgtcggcatccagggcatcgcctggtccttcggagggatgatcttcgcgctcgtctactgcaccgccggcatctccggaggacacatcaacccagctgtgaccttcgggctgttcttggccaggaagctgtccctgactagggccatcttctacattatcatgcaatgcctgggtgccatctgtggagctggagtggtgaagggcttccagcaggggctttacatgggcaacggcggtggcgccaatgttgtcgcccccgggtacaccaagggggatggccttggcgctgagattgttggcaccttcatcctggtgtacaccgtcttctcggccaccgatgccaagaggaacgccagggactcccatgtccccatccttgccccactgccaattgggttcgcggtgttcctggtccaccttgccaccatccccatcaccggcaccggcatcaacccggctaggagccttggcgccgccatcatctacaaccgggatcatgcctggagcgaccattggatcttctgggtcggccccttcatcggcgccgccctggctgccatctaccaccaggtgatcatcagggccatcccgttcaagagcaggtcttaagctgccgcggcagtgccgagacatgcctgccagtccggaaggacgagcgtcttcctgtgggggggaatgccttgtctgcccacgcctagtttctctgctgaatcttccatctctcttcccttcaagactgctcactgctgcactgctctgttatctgaacccagaactttgtgtactcctgtaccgagctgtgtgtatgttttttttttcttccatcgtgtttgttgcaagggttcccgtctccttttatgcgttgggatcgtggcaagaaagggcagatatcatgtgaaaacgtgggtttataactatcagctggatttcatccaagtggaatcgattcagaattttcttttnngggaaaatatnaaaataanaanaaa

SEQ ID NO: 262802 - DNA, 755 bp, Zea mays
tcgccgactcgttcgcccacgcgttcgcccacgcgtccgcccacgcgtccgggaaaaacgtgttgggtccaagaaaccaattgttgtgaagtatggccttaaccatgtgacttacctcattgagcagaacaaggctcagctcgttgtcatcgctcatgatgtggatccgattgaactggttgtttggcttccagccctgtgcaggaagatggaggtcccatactgcattgttaaaggaaaggctcgccttggatcgatcgttcacaagaagactgcatctgttcttgtgtcttgaccaccgtcaagaacgaggacaagcttgagttcagcaagatcctggaggctatcaaggcgaacttcaacgacaagtttgatgaggtcaggaagaagtggggtggtggtatcatgggctccaaatcacaggcgaaaaccaaggccagggaaaagctgcttgccaaggaagctgcccagcggatgacctaagtcttgccctgttaaattaaaattttcttgtacttgcgatcgtgtgcaatcacggtggttgtcagatctagtttttgagagttttgcttcaggagagacaccgagtcaccgaccatgacagaaagacatcatgtaagaattcaaagttttggttctgtaccatctagttcatgtgaatcatcttctatgatggctatgatgtttatgcgcatagctatttcagaattaaaaaaaaaaaaaaaaagggcggctgctcgcgatctagaactagt

SEQ ID NO: 262803 - DNA, 718 bp, Zea mays
atgtaaatgaactctaggtgttatgtattttggaactggaatttagctgattccttagtcttgtggttcaacaaattgaaaatattttcatattgtggttcatattgtattaaagacttaccgtcaatgaaacccattaatttttttttggtgaaaacagatccttgccccactgccaattgggttcgcggtgttcctggtccaccttgccaccatccccatcaccggcaccggcatcaacccggctaggagccttggcgccgccatcatctacaaccgggatcatgcgtggagcgaccattggatcttctgggtcggccccttcatcggcgccgccctggctgccatctaccaccaggtgatcatcagggccatcccgttcaagagcaggtcttaagctgccgcgggtgtgctgagacatgtggggaatgtattgtctgcccacgcctagtttctctgctgaatcttccatctctcttcccttcaagactgctcactgctgcactgctctgttatctgaacccagaacttcgtgtactcctgtaccgagctgtgtgtatgtttttttttcttccatcgtgtttgttgcaagggttcccgtctccttttatgcgttgggatcgtggcaagaaagggcagatatcatgtggaaacgtgggtttataactatcagctggatttttcatccacgtggaatcgataaaaaaaagggcggccg

SEQ ID NO: 262804 - DNA, 509 bp, Zea mays
cccacgcgttcttccacgcgttcgcccacgcgtccgtcactctcccagcctctcttactctccgccgtcgccctgctcgcccgaagcagctgccggcaaaatggccccgaagagaggcggtagggcgccggtccccgccaagaagaaggcggtggtgacgaacccgctcttcgagaagaggccgaagcagtttgggatcggcggcgcccttccgcccaagaaggacctccaccgcttcgtcaagtggcccaaggtcgtgcgcatccagcgccagcgccgcatcctcaagcagcgcctcaaggtgcccccggcgctcaaccagttcacacgtaccctcgacaagaaccttgcaacaaacttgttcaagatgcttcttaagtaccgccccgaggacaaagctgccaagaaggagaggctcttgaagagggcccaggctgaaaacgaggggaaaactgttgagtcaaagaaaccaattgttgtgaagtacggccttaaccatgtgacttacc

SEQ ID NO: 262805 - DNA, 585 bp, Zea mays
  unsure (1)..(585): unsure at all n locations
agaacaaggctcaatgaggtaagtcacatggttaaggccatacttcattgagcagaacaaggctcagcttgttgtcatcgctcacgacgtggatccgatcgaacttgttgtgtggcttccagcactgtgcaggaagatggaggtcccttactgcattgttaaaggaaaggctcgccttggatcgattgttcacaagaagactgcatcagtcttgtgtctgaccactgtcaagaacgaggacaagcttgagttcagcaggatcttggaggctattaaggcgaacttcaatgacaagtttgatgaagtcagaaagaagtgggaaggtggcatcatgggctccaagtcgcaggccaagaccaaggccaggaaaaagttgctggccaagaaggccgcccagcggatgacgtagattatccactgttaagtttgcccctgtagtttgacgtggaagaacctatgagcattgtgcactcgtattgtgtttttttgaatctactttcatatgtttctgtccntcagnccgtgtttaaaaaaaatggnagccaaaannaaanaaaaaaaaaaaaaaaanaaagggcggccgcn

SEQ ID NO: 262806 - DNA, 456 bp, Zea mays
gccttggcgctgccatcatctacaacagggatcacgcctggaacgaccattggatcttctgggtcggccccttcattggcgctgccctggctgccatctaccaccaggtgatcatcagagccatcccgttcaagagcaggtcttaagctgccgtggccgtgccgagacatgccagtccgatgaacgggcgtcttcctgtgatgtcttcttgtctgcccacgcctagtttctctgtcgattcctattcgtcgtctcttcagggctggtgctcactgctgcgccgttctgttaaccgaaacaagaactctgtgtattcctgtaccgagctgtgcatgtttttttctttcccccgtggagaatttaagctaccacccgtttgctgccaaataaaaaggaaaaaaaattaaattggacaacaagagatcatgtatctataacaaaatataaggagccttt

SEQ ID NO: 262807 - DNA, 638 bp, Zea mays
cgtcggccacgcgttcggccaagcctgccaattttttgttatattggcctaaccctttgacttgacctattgaacaaaacaaggctcagctcgttgtcatcgctcatgatgtggatccgattgaactggttgtttggcttccagccctgtgcaagaagatggaggtcccatactgcattgttaaaggaaaggctcgccttggatcgatcgttcacaagaagactgcatcagtcttgtgtctgaccactgtcaagaacgaggacaagcttgagttcagcaagatcttggaggctattaagtttgatgaagtcaagaagaagtggggaggtggcatcatgggctccaagtcgcatgccaagaccaaggcgggggaaaagttgctggccaaggaggccgcccaccggatgacgtaaattatccactgttgagtttgcccctgtagcttgacatggaagaacctatgagcattgtgcactcctattgtgtttttttgaatctactttcatatgtttctgtccatcagaccgtgtttagaaactttggaagacagttctacagtgtttgtgcaatgtcttttatcgaagtaaaagacactctcgaagacacgaatattacttcaagaaaggcaccccttttgg

SEQ ID NO: 262808 - DNA, 354 bp, Zea mays
gaattcccgggtcgaccaacgcgtccgcccacgcgtccgcccacgcgtcgcgtcccccgcgcaacgccacgctccggaccgccgaaatggccccgaagcgaggtggcagggcaccggtgccggccaagaagaagacggataaagtgacgaaccctctgttcgagaaaaggccgaagcagttcggcatcggcggcgcgttgcctcccaagaaggacctgcaccgattcgtcaagtggcccaaggtcgtgcgcatccagcggcaccgccgcatcctcaagcagcgcctcaactgtgccaccggcgctcaaccagttcacccgcaccctcgacaagaacctcgctacgaaccttttt

SEQ ID NO: 262809 - DNA, 414 bp, Zea mays
ccggcccggaattcccgggtcgaccgcacgcgtccgcccacgcgtccggccagtccggaaggacgagcgtcttcctgtgggggggaatgccttgtgtgcccacgcctaggttctctgctgaatcttccatctctcttcccttcaagactgctcactgctgcactgctctgttatctgaacccagaactttgtgtactcctgtaccgagctgtgtgtatgtttttttttttcttccatcgtgtttgttgcaagggttcccgtctccttttatgcgttgggatcgtggcaagaaagggcagatatcatgtggaaaccgtgggtttataactatcagcttggattttccatccaagggggaccaaaaataaaaatacagaaactaatcgaacaaaaaagcacactatagataaatac

SEQ ID NO: 262810 - DNA, 1361 bp, Zea mays
catcgctgatatgcccttgggccacgccttccttcttatcccctgcgcctgccctcccctcctgcagcgcccgtcgcctccctttccccttccctccctccctctccccgcgggccgccagaggcaatttcgccctcgattcgaccccgattcgtccgcccgcgaccgggattccctccgccaagcgcggatctgaacgctgcgctccgtgtcgccgctcgaatccgccatgaagggggccaaatccaagggcgccgccaaggccgatgccaagctggcggtgaagagcaagggggcggagaagcccgccaagggcaggaaagggaaggccggcaaggaccccaacaagcctaagagggctcccagcgctttcttcgtgttcatggaggaatttcgcaaggagttcaaggagaagaaccctaagaacaagtctgtcgctgcggtggggaaagctgctggcgacaggtggaaatccctgagcgagtcggacaaggctccctatgtagccaaggctaacaagctcaagctcgagtacaacaaggccatcgctgcctacaacaagggcgagagcactgcagctaagaaggctcctgccaaggaggaagaggaggaagatgaagaggagtctgacaagtccaagtcggaggtcaatgacgaggatgatgaagagggtagtgaggaggatgaagatgatgacgagtgatggagctcctcgagacaatggaccgtgcttcatccaacaatggagcggctacacaaggccccgtggcgatcacaaaaaaggagcctatatccatgtactagaattattcagtttcactccacatcgtgatgttttatttttacttttgtcgtgctataacggatagcgctcctcgttggcgccactggcgggtggttctgcctctggtctggtgtgtttgtgtgtggtcacacttgccagccagcagaggcgcctgcttgtacctagattactgtttccattgtcgtcatcatcggctaacattgtcataatgtcagtttgggtaatgttagattaagtaattattgtgttctgtaatcttgtttgttgcccttcttttgtgtgtttttgttattgttggtctgtttccattgttgttgctttggcattgtcagtgcccgccagccctgaaaattgccgtttgggtgggtttgcgtgtacttcgtattatgatgttgggctgcacattgtagctgggaatgtttgccaaaaaatggaatgggcatgcggtggttgttggtggaatggaataggctgtagaaaaaaaaaaaaaaaaaaaaaagtgaaaaaaaaaaagggcggtggctggcgatctagaacgtatctcgagcggaatgcc

SEQ ID NO: 262811 - DNA, 654 bp, Zea mays
ctttccccttcttctccgtggggtgacctaagagggccgaccccgggattccccccctagaagcgaccccgattcgtccgcccgcgaccgggattccctccgccaagcgcggatctgaacgctgcgctccgtgtcgccgctcgaatccgccatgaagggggccaaatccaagggcgccgccaaggccgatgccaagctggcggtgaagagcaagggggcggagaagcccgccaagggcaggaaagggaaggccggcaaggaccccaacaagcctaagagggctcccagcgctttcttcgtgttcatggatggaatttcgcaaggagctcaaggagaagaaccctaagaacaagtctgtcgctgcggtggggaaagctgctggcgacaggtggaaatccctgagcgagtcggacaaggctccctatgtagccaaggctaacatgctcaagctcgagtacaacaaggccatcgctgccttacaacaagggcgagagcactgcagctaagaaggctcctgccaaagaggaagaggaagaggatgatgaacagggtagtgaggaggatgaaaatgatgacgagtgatggagctcctcgagacaatggaccgtgcttcatccaacaatggagcggctacacaaggccccgtggcgatca

SEQ ID NO: 262812 - DNA, 1395 bp, Zea mays
ttcacgcgtccgatcgctgatacgcccttgggccacgccttccttcgtatcccctgcgcctgccctgccctcctgcagcgcccgtcgcctcccttttccccttccctccctctccccgcgagccgccagaggcaatttctccctcgattcgaccccgattcgtccgcccgcgaccgggattccctccgccaagcgcggatctgaacgctgcgctccgtgtcgccgctcgaatccgccatgaaggggggcaaatccaatgcagcaggcaggagcttaggagaggagaccccgacggaagattgcggggcggacaccatgcagcggaagcttatggatttgccaggtcccagatggaagaagggcaaggactgcaagggctttgcagcactggcagcagccaatcccatgtccagcatagttgcggagctccaggcttcactgcgggactcggaagccgtggcgattctagccgcgcacgccagggacgcgatcctcgaggtcggcccacgccaagccgcgcttctgaacggcgctgccttcggcagggccgtggagggtgcaggtgcagagagccagtggttccagctgggccccgaggaagtgttcttcctttgccatgccctgaagtgcctcagggttgagtcgaataacaagacgcggattggtgcgccggagctgtggggtctcttggcctccggctcagagcaattcccggagatgtacagggcgtatcaacacctcaggctgaagaactgggttgtaaggtcgggactgcagtacggggcagactttgttgcttaccgtcatcatccggcacttgtgcactcggagttcacggtggttgtggctccagaagggaaagcattcggcaccaggtgtgcccgcatggaggtctggtctgaagtactctgtgcgcttcgggcctctggaagtgtggccaagacgttacttgttcttaccatcagcaccaagagctgcgagctgggatccttggattgtttggagcagatgattgttcatgagaggacgatcacgagatggataccacagcagtgcagtgagcaacaagacaaaccatgtagagaagaaaccaacagggatggacaaagacaaaaatcttgcatagaagtatcaagcaacgaagaacaagagcatacaagtgggggtgtagtgtttagctattggcccgtagtgctaagctatacaattcttttcagtgtacttgtctacaagctgaaatcttaactgaagagcttcctatttctgtatgctcatgttgattagcgtgaataatgccattctatgggaagaatttgttgtgattccccaaaaaaaaaaaaaaaaaaaaaaaaaaaaaaaaaaaaaaaaaaaaaaaaaaaaaaaaagggcggccgc

SEQ ID NO: 262813 - DNA, 841 bp, Zea mays
  unsure (1)..(841): unsure at all n locations
cggacgcgtgttcttacgcgtgggcggacgcgtgggcggacgcgtgggcgcctccctttccccttccctccctccctctccccgcgggccgccagaggcaatttcgccctcgattcgaccccgattcgtccgcccgcgaccgggattccctccgccaagcgcggatctgaacgctgcgctccgtgtcgccgctcgaatccgccatgaagggggccaaatacaagggcgccgccaaggccgatgccaagtaagaaaaacgaatctccggntctcttcttccttggtcgtcccgcggatctgttccgtggcgtccgaagcattcgatttctgttattatgacatccgccgccgcgagtagattttgaccttttttttttcccgtcgacgttgttttgctgtcgctgtctctgtcgtcgtcgtcgtcgactcgattgctttggcatctgcaggctggcggtgaagagcaagggggcggagaagcccgccaagggcaggaaagggaaggtcggcaaggaccccaacaagcctaagagggctcccagcgctttcttcgtgtgcatggaggaatttcgcaaggagttcaaggagaagaaccctaagaacaagtctgtcgctgcggtggggaaagctgctggcgacaggtggaaatccctgagcgagtcggacaaggctccctatgtagccaaggctaacaagctcaagctcgagtacaacaaggccatcgctgcctacaacaagggcgagagcactgcacctaacaaggctcctgccaaggaggatgaggaggaagatgaagaggagtctgacatgtccaagtcggaggtcaatgaccaggatgatg

SEQ ID NO: 262814 - DNA, 414 bp, Zea mays
cggacgcgtgggtgtgtatctgcccgatactgatatgcatatctatacctgtgctgcatagtgttcgagtacatgtttctgtgggtttgtggctagcactcattgatgttctattgttctatggcttaatgtttacacgatggtagtagaataatgaatatgatcatagcgttgtcagttttcttttaactaacaataccatgcatttttcattctctgcagtcatctgttcttcattcccagccgaagtccactgttggaacacctgcttatattgcacctgaagttttgttgaaaaaagaatatgatggcaaggtacttgtgctatcactttttttatcttgagaaatgtgtcttgagagttgtgcatacctctgcatcagtgcacttgtgttccatatacatgtgccacat

SEQ ID NO: 262815 - DNA, 992 bp, Zea mays
tttcgttccgttgggacctaattcacgcgtttcagggctcctcccatttcgtcggcttcgtttgtcgtcgtcgtaagctgcagctagtgtggactggagatccaccactccaccagtccggtccatctgctggacctcgattggtttcttcttacctaggaacatccggggatgtcgactcctgcgaggaagaggctgatgagggatttcaagcggttgatgcaggaccctccggccggcataagtggcgccccgcaggataacaacataatgctgtggaatgctgtcatatttggacctgatgataccccgtgggatggaggtacgtttaagctgactctccagtttaatgaagaatatccaaacaaaccaccaactgtgcgatttgtttctaggatgttccatcctaacatttatgctgatggaagcatatgcttagatatcctgcagaatcagtggagtccgatatatgatgtagctgcgatactcacgtcaatccagtcattgttgtgcgatccaaacccgaattcgcccgctaactctgaagccgcccgcatgttcagcgagaacaagcgagagtacaaccgcaaagttcgggaggtcgtggagcagagctggacggcggactgatgatgccctgtgttgcgtcgcgctgtgctgcgcagctgctcactgcgccccgcgtccgtccattccataccaaaaaaagaaaatggcaaagccgaactcagctgttgctgctttcgttgccctgtgtcaagacgactgcttctctatgaacattttaccttcctgtgctgtatctggaatacaaacttaattatctctagcactgtggcaacatcttatcttatatgaaatttcctccgggaaaacgagaatgatttgcttgggtgattatttcatgaccagccaggttgctgtactaaactatggtacttatttcagctaattttgaatttgaactaaaaaaaaaaaaaaagggcggccgc

SEQ ID NO: 262816 - DNA, 409 bp, Zea mays
aagggcgtacggtggcagcaacgcggcgaaacgaagaagaaggaggttcggcgacagcgaagggtgcgtgtcaacagccacgcgctctcggagactcacattgtcgcgctgggttaagggatgccaaaaagaacaagaggagggtggattcagtaggaaaaagacaattctttttcgtggtaaccatagcggcgccgtgctatatagccggcgttttgtatatctgggtagcgacgagacgatgtcgtagccggcgtctttttctttttcgtttcgttcgcgacactgggtgggttgcccgccgcgtttatttgtggttgggtttgtgcatactactagactgtctcagcaagaggaagcaactagacttttagacccaaaaaaaaaaaaaaaagggcggcgcaccggg

SEQ ID NO: 262817 - DNA, 426 bp, Zea mays
tggataaaagggaaaagttttgctctgggtccccggcgaaggattttaaatgaattgcagacagggcctcggtgcactatgcacttgagtttacggctctgcagaaaaccccctagggtttctggaaatcgaacccacgacccttccctaatggaacggtggccgcagaggaaggaaggggtggaggggcttaccggcggcgagactgctctggtgaggtggtcgaggatgtacgggaggtcttgaggatcacggcgatgtgcgggtcgccgtcggggatggtcggagtcggccggtccgcgtgcgcatgcggagatgctcgccggcggcgaggagtccggcctaaccagggcacgataggtcaatcgaatgggtcagagagcttcactggatgctatggaagatgtgggtgcaaggaattggaaa

SEQ ID NO: 262818 - DNA, 699 bp, Zea mays
cgtccgttaggctccgccgccgcgtctcggctggaccgacaggccggccgatccgtctcctcctcctcctcctcctgcgggtcggcttcggggacgatggcggcgagggcggctgatgagaacagaaggccgggggtggggaggcccgcgccatgcgtccgagacatggggagccggcgcgcgctcacggacatcaagaacctcgtcggggttgccccgaacccctgcgccgtcgccaagaagcccgtgctgcagaagagcagaagggacgaaaagaagacagcgttgccaagcagccggcccatgacaaggaaattcgtcgcctccttggcgagcaaagggcaacctgaatgtcagccgaccggagctgatccagaacccggagttgatcaacggaaggaaccagtcggcgatggcaccgttgatatcgacgtggaactcgacgagccggtcgacgatagtgattgtgacatcgacatgggtgatgagacagagaacaaggacattatgaaccaagatgaatcgctcatggatattgatagtgcagactcggggaacccgcttgctgcaacagaatatgttgaagagctttacaccttttacagagaaaatgaggctaagagttgtgtaaggccagatacatgtccagccaacaagacataaacttaaagatgagagcaattctgattgactggctga

SEQ ID NO: 262819 - DNA, 1002 bp, Zea mays
gtcctattgttatgcctccaaaatcattattgatcagaccttttgtggacagaagattctgtatcacagctggttcttttgatatttcaaatcaaagtcaattcaattgctattgtctgtatgaggtcgatggacagaggcccagagcacacaataaatagaggtttttatgtagctgaaggtgcaaaaatgtgtagtgtggagcaggtcagggttgcacaagctctttatgtatctggtagcctgttcaatcactcatgtcagcccaatgtgcacgcatattttctttcacgtgcgttcgtgctgagaactactgaatttataaagtccgggagcccagttgaactgtcatatggtccacaggttggcgagatgcatatttcagagagacagaagtcacttcaagagaattactacttcagttgtcaatgttcaagttgttcagagctaaacctatcagaccttgttatgaattcattctgttgtccacaaagcaactgccttggtgccatatcggaatcaacttactacaggtccaaagagaatttcgtgaatgtttcccttggaggatcttatgtctgcaaactatcattgcccgatgtatcgaaggttgatatggatatggagaatgtcgccaaatctctcttgcaaaataagggtgccagtcctgacatagatcactggatgttgcatgagttgtagatcctgtattgatctgtcgtctgctctggctacatcacacagggaagaatctaccatcgataggttgaagaaacatacattcctagacaagactctcatcacagaggcattacaatctctaaaacaactcaagaagttgaggcacccatatagcaaggctctcgcgcaggccgaagacacaatcgcagaggcctttgcgaaggtcggagaccaagaactagcacgaaagcactgtgaagcatcaattcagatcctcgagaagctgtaccacccaaaacacatcatcattgctcacgagct

SEQ ID NO: 262820 - DNA, 1401 bp, Zea mays
cgccagatccaagccgcgacccagacggcaagatagagcgagcgacctctcgattctccccatcccgccgtgcttcccgtcttcaccaaatccttcgccacgatggcgcgcctgctcatccccctccccttcgccgccgcctctgcctcatcgctccacctcgccgtctcccgccttcctctcgccgcggtctccgccgcgcgtcgcgagtgtctctttgggggaagggtggtaggaggagtggtgagggcgcccgcgaggctttctaagcgcgggttgtgcgccggcgcagaggctggcgactcggccgtcacggtggaggccatggaatgggtcaagaaggacaggagacgcctgctccacgtcgtctaccgcgtcggggacctcgacaagacgatcaagttctacacggagtgcctgggcatgaaactgctgaagaagagggacattcccgaggagaggtataccaatgcctttctggggtacgggcctgaggattcacattttgttgtggagctcacttacaattatggtgtggagagctataacatgcggactggttttggccactttggaattgctgttgaggatgttgcaaaaacagtggaacttattaaagcataaggaggaacagtcacaatggagccaggccctgtcaaaggtgggaaatcagtaattgcctttattgaagatcctgatggttacaagtttgagcttatagaaagagggcctactaccgagccttagtgccacgtaatgcttcgagtgggagatcttgatcgtgctataaatctctatgggaaggcatttggcatggaacttcttcgcaagcgagacaattctgagtacaagtatacgattgcgatgatgggatatggcccagaagacaaaaatgctgtattggagttgacctacaactatggggtgaaggaatatgataagggaaatgcttatgcacagattgctattagtactgatgatgtctacaaaactgcggaagcaattagagtaaatggtggacaaattactcgtgaacctggcccattacctggcatcaccaccaagataactgcatgcacagatccagatggctggaaaacagtgtttgtcgataacatagattttctgaaggagttggaagaatgagctttgctagagatctcaacttggtacatcaagctccatacggttgcaccccgtgagttccatgcatgacctgcaaaatctttgtaaagccacagcctcaaactgaggattgtagataggtcgtcccatctacggcatcatcgcaattgatagttgatagagcattagattttccttgcagatctatataaatgcgcacccgtttttgtattatgcattttaatgcataagttcaatggaaatgattcatgggtt

SEQ ID NO: 262821 - DNA, 604 bp, Zea mays
caaacttctcaagactgtcactgtccactccaccacctcacttgcgatgcgaacaagagcaaagccctgaaatccttctccccctgcacgcacctgcagacctgctctctcgcgcgcatctcccgtgcccctcactgtttagtggcgacgactgggcgacagtcgccgccgccgcccgctaggggccgtgcccctggtctccatcttcggcgcttcgcccaccagatatgagcagctggcaattcgattttgaggccattatttgataacccgggacaagtgcactggttacctgaccattttagctttttgagatggctacacagttgccatgcttcacacagctcagtccaccgtcttgtagttggataaaagatgtcgggaactgcaaggctacgcctgatagggtagccagaagtgcccgagctttgggccactgtcacttccggtgctgtgcaggcccccgtagtgcaaactctttcaagaagaaagactctttcgagaagaaagactctttcctcgaacttcatccggaggtatctctgctccgtggcgagaagagtgccgaggttgtgccaatgaaaggttcctctgatgggggtct

SEQ ID NO: 262822 - DNA, 800 bp, Zea mays
ctcgagctcgagagcaatttacggcaccatcgcatcgcgcactcgtgccaccccaccccccgattccttcgatcccctcgtggcggtggcgcgtcgtgcgggctctactggagctagatctcggaggagtggaagggagacagccagggtgggctgtgacgcttccgctgcgcgccatgggcagcgccgtcgccttcgcgaagctcgacggggagcgctaccccaaggcggctgccgccgtcggggtcaagggcttccccaccgtgctcctcttcgtcaatggcaccgagcacgcctaccatggcctccacaccaaggacgccatagttacttgggtaagaaagaagactggcgtgccaatcattaggcttcagtctaaggattcagctgaggagttcctcaaaaaggacatgacctttgttattggtctatccgagaatttttagggagcagaccatgaagaatttgtgaaggcagcaaccacagacaacgaggtacagtttgtagaaaccagtgatacaagtgttgccaaagttctatttccaggtattacgtccgaggagaaatttgtgggcctcgttaaaagcgagccagagaagtttgaaaagttcgatgggaaatttgaagaaaaggaaattttgcggtttgtggagctcaacaagtttcctctaattactgtattcactgagctcaattctggtaaagtatattcaagccctattaagctacaggtcttcacctttgcagaggcttatgatgttgaagatctggaatctatggttgaagaaatagccagagca

SEQ ID NO: 262823 - DNA, 802 bp, Zea mays
tttgagtgtcctgaacatgaaaaatactatttgaagtcttcaatatggaacaatcttcatccaaaccaagttatcggtcaacctgcagctatcaaggaaattgattgcttgacagccactgtcgatgagatccgagaagtcagagcacaagtcacattgccaatcagaatggaagctagattatcagcactggctggatggtttgatgttcattttcgaggtagtgctcaaaaccctggggtggaggaagttgaattaactacagcgccagatgagcatggtggaactcattggggtcagcaggtattcttgctgactccacctctgagtgtgactaaaggagacaacgttaacgtttccttctcgatggttcgctcgaaggaaaaccatcggcttatggatatggagttcacatatgaattgcacgagttatctggcaggaagcacccagcagtcaaaaccaagatgtacttagagtagaacaagatggaaagacggaacctcacgacgccgttgctgaaacctttgctcagaagctgagcatgtagtgtgcttgttacacccatgatgggtacattgagaccatttatgttgtattagtaatatattgtttgattgcccaattaacggggtgagccattgtttcatcacaacatcgatgtgttagcagataaccacatcgccgttttaagcaaacattgagtgcggaattttgttgtctttgtgaagtccgatgaaagcatcttcttctgatcaaaaggatagagtgcgttggattaatatagaagtcttcacaataatc

SEQ ID NO: 262824 - DNA, 1719 bp, Zea mays
aagaactgtcgatgtattgtagaagatgatcttgtagattgttgcaaacctggcgaccgtgtctcaattgtcggtgtgtgcaaggctctaccagggaaaagcaagggaagtgttagtggtgtcttcagaactgtccttatcgcaaataatgtgtcgcttcttaacaaagaggcaaatgcacctgtctacactcgggaagatctgaagcggatgaaagaaatatcaaggagaaatgacacctttgacttactgggaaattctcttgctccatccatatatggtcatctatggataaagaaggcagtagtactgttgatgctaggtggtgtcgagaagaatctaaaaaatggaactcacttgagaggagatataaacatgatgatggtgggagatccttcagttgccaagtcccagctcctaagagctgtcatgaacattgcccctttggctatctcaacaactggcaggggttcatctggtgttggtttgactgctgctgtgacttctgatcaagagactggggagcgaaggcttgaagctggtgccatggttcttgctgatcgtggtgttgtctgcattgatgagtttgataaaatgaatgatcaagatcgagttgctattcatgaagttatggaacagcaaactgtaaccattgcaaaggcaggaatacatgcctcactaaatgcaagatgtagtgtaattgctgcagcaaatccaatatatggaacttatgatcgttcattgactccaacaaagaatatcgggcttccggattcactgctttcccgttttgatttactttttattgttcttgatcaaatggatcctgagattgaccggcaaatttcagaacatgttgcccgaatgcatagatattgcactgacgatggaggagcaaggtctcttgataaacagggatatgctgaggaagatgatggtgatgctaatgcagccatttttgtcaagtatgatagaatgctccatggtcaggatagaagaagaggaaagaaatccaagcaggacaggctaactgtcaaatttctgaagaaatatattcattatgcgaagaaccttattcaaccaaggctcactgatgaggcatctgatcatattgcaacctcatatgctgagctcagggatggtagtgcaaatgcaaagtccggtggaggtacacttccaattacagcaaggacactggaaaccataattcgtctatcgacagctcatgccaagatgaaactgaggcatgaggttctgaaatccgatgttgaggctgcattgcaagttctaaattttgcaatataccacaaggaattgactgagatggaagagagagaacagagagaaatggagatgaaacagcaagctgatcatgatgcaggtgcaaccggtggcaccgtggatgggcatggaagctctggcaatgatccaatggatgtggatgtaggatcaaatgatcagaatgtttccgcagagagaattcaagcatttgaagctcttctgggtcagcatgtgttggcaaaccatatagatcaaatgtcaattgatgaaatcgagcagatggttaatagggaatcaactgcaccttacaccagaagccaagtagagtttattttggagaggatgcaagatgcaaacagggtaatgatacgagatggtgttgttcgaatcatataactaccagtctaccaggacgtttacctgtggatcccatggtca

SEQ ID NO: 262825 - DNA, 748 bp, Zea mays
ctcccggcccccgcgaacaacttcctgcttgcacgcaagccactccgaggccaagtctagggtttgggaatctgtaggaggggagaggggagcgcgctcagggtcagggaggcgaagatgatcgaggtggtgctgaacgaccgcctggggaagaaggtgcgggtgaagtgcaacgaggacgacaccatcggcgacctcaagaagctggtggcggcgcagacggggacgcgccccgagaagatccgcatccagaagtggtacaacatctacaaggaccacatcacgctcaaggactacgagatccacgacgggatggggctcgagctctactacaactaggcgccctgaccccaaccgtgccctgatgtaaggttaatccgaattctgaagtcatgggtgcgcttccagtcacagcgtctttagctaacaagctcgcatacatataggcaacttgagtgagctatgtagtacggatatggttgtgtggcaaactgccaatgactattgacatccttgcatatattgacatgtgacaaggatcaacctgcaaaactggtgccctgctactcgcagaccttattatcttaaataacacaggtggtgtgtttttcaattatgtgaaaaccttggccttgtttggataatttatggtgtgattggattggttgtagttgtaggacaaccggtgacagcctcttcagcgtctctgttcgtcctgccaattctgatctactgctagggacgacac

SEQ ID NO: 262826 - DNA, 673 bp, Zea mays
cccacgcgtccgcccacgcgtcccccaaggcaaccaaaccatctcgactcgtggggaagtttcgctctcgccggcgtcgacggcctagggttcgaggaacgtccgtccgtccgtccggggaaggagcggtagggaggcggagatgatcgaggtggtgctcaacgaccgcctggggaagaaggtgcgggtcaagtgcaacgaggacgacaccatcggcgacctcaagaagctggtggcggcgcagacggggacgcgccccgagaagatccgcatccagaagtggtacaacatctacaaggaccacatcaccctcaaggactacgaggtccacgacggcatgggcctcgagctctactacaactgagccgccgcccctctctccctctcgtcaggttggtctgaattctgaagtcatgggtgcaattcgcttcgcggtgatctcttaagctcatcacatatataaaagcaacctcagtgggctatgtaagacatggcgtgccaaactatcagtgaccactgacagctttgcaatacgttgttgtatggtcaacctgcaaacttggtgtactgctactcgtactataaataacatagggttttaaccttggttgtggtaaaaaaaaaaaaaaaaaaaaaaaggggggccgccgactaaggaactcgacgccccggg

SEQ ID NO: 262827 - DNA, 506 bp, Zea mays
cgctcgtattcccaaaggccaaagccaacctagggcgcatggcgactggcgaaacgcgttcttcctctccttttccccaaggcaaccaaaccatctcgactcgtggggaagtttcgctctcgccggcgtcgacggcctagggttcgaggaacgtccgtccgtccgtccggggaaggtggagcggtgcaggagggaggcggagatgatcgaggtggtgctcaacgaccgcctggggatgaaggtgcggctcaagtgcaacgaggacgacaccatcggcgacctcaacaagctggtggcgccgcagacggggacgcgccccgagaagatccgcatccagaagtggtacaacatctacaaggaccacatcacccccaaggactacgaggtccacgacggcatgggcctcgagctctactacaactgagccgccgcccctctctccctctcgtcaggtactagcagtagcagcgactggttccctctacaactcgatttcctttcgattc

SEQ ID NO: 262828 - DNA, 464 bp, Zea mays
gaattaccggctggacgcactcgaccgaccgtctcgactcgtggggaatattcgttctcgccggcgtcgacggcctaggggtcgaggaacgtccgtccgtccggccggggaaggagcggtagggaggctgagatgatcgaggtggtgctcaacgaccgcctggggaagaaggtgcgggtcaagtgcaacgaggacgacaccatcggcgacctcaagaagctggtggcggcgcagacggtgacgcgccccgagatgatccgcatccataagtggtacaacatctacattgaccacatcaccctcaaggactacgatgtccacttctgcatggtcctttagctctactacaactgatctagttgttcttttttttttatacttgttattgttgttcttatattttaattttatttgttctatttctttttttttttgttttttctttattttttttttctttattt

SEQ ID NO: 262829 - DNA, 440 bp, Zea mays
aaaaaaatgacttttttggtgatttgttcaacgatcacatttcactgtgggtactttttccccgcacaaagtagcaaatcctttttccctaaaaaaagtttcaattccgtgccagtttaatccaaattctaaattcatgggtgggtttccagtccaagcgtttttagttaacaagctcgcataaatataggcaacttgagtgagctatgtagtccggatatggttgtgtggcaaactgccaatgactattgacatccttgcatatattgtcatgtgacaaggatcaaccagcaaaactggtgccctgctgctcgcagaccttattaccttaaataacacaggtggtgtgtttttcaattatgtgaaaaaaaaaaaaaaaaggggcgcccgccgattattagacccttaaacccgggatttatctcgggccggacttgaag

SEQ ID NO: 262830 - DNA, 295 bp, Zea mays
  unsure (1)..(295): unsure at all n locations
acccacgcgnccgcgctcgtattcccaaattccaaagccaaccttatgcgcaaggcgactggcgaaacgcgttcgtcgctctccttttcccaaaggcgaccaaaccatctcgactcgtggggaagtttcgctctcgcgggggtcgacattcctagggttcgaggaacgtccgtccgtccgtcctgggaaggcgcatgagggaggccgagatgatcgaggtggtgctcaaccaccgactcgtgaagtacgtgcgggtcaagcgcaacgaggacgacaccatcagcgaccctaacaa

SEQ ID NO: 262831 - DNA, 571 bp, Zea mays
tgcagaatttctctcatctcaactgagtaccaaggagttactgcgcttatatgcttattgggccaaactagagcttagtctcggcaaagatctttctgcagctcgtggagtttgggaaaacgcgatcaagaaaagtgggtctgtttttgaagtttgggagcagtacattttaatggagataaaaatggaccatgtacatgaggcgagatccctttataagcgttgttatagcaaaagatttgctgggtctggatcagaggagatatgctactcatggataagatttgaagaggagaatggcaccttggatgattatgatcttgctgtaaagaaggttacccctcggctaaaggagcttatgacattcaagtctcaagaggaggctaaagttgaggcttaccctaacctcaatgataattctaatgcaaatgattcctctcagaaaagaaaacccagctgcaataaacagcagccccctgctaagaaaagaaatgtgaatccatcaaatagtaccatgccatcagatgaccaaggatcaaatgtgcaaagtggtctcagtaggtgctgttac

SEQ ID NO: 262832 - DNA, 454 bp, Zea mays
cccacgcgtccgttcccgcgcacaacagatcgcacgcctcggttccctccactcgacgcttctcccgctcctaacccctagtaccttcgctcgctctgccgcccccgccgacgacgcgccagatccgcgcagcagtggtgtcctccgccgcggatcgagctcccgatccgcgcagtgggagtggcggcgagcgcaggagcgctcggccgggggttccgcgaggctggagacggaggaggaagggagcggtagttccgcggtggtagatccgccggtcctgtcgccggagatggactcatctgtcgagaagcaggggagcgtggcgctggatccggacgagcgcgcgccggcgtccggcgaaaccaaggcctgcaccgagtgccacaccaccaagaccccgctctggcgcggggggccctgcggacccatgtcgctgtgcaacgcgtgcgggatc

SEQ ID NO: 262833 - DNA, 1439 bp, Zea mays
aggaaacgcaacatcacctgtcagctagctgtcatgatattgctaatgtagcttctggtgtgtctgagtctggatctgcttctcaaacacaatcttctttgctttgtgggtcatcataccaacagatctatgatggaaacagtggtccaggtctgcatgtgcacaacggtttccacaactgttcaagccaagagtcctccaaccttcttaatctctcaagaagtggacaattcatggcatcagagggatggcctttgaagaggttggctgtggaatctctttctggtcatgagctccaacctatgcagcacaagtttgagaaagtgaatcaccaaagtaatgtgtctcacatttctggcaccttgccgccactgtcagcaagagacggttatagtgcccaggctagtggtacaaatgatcagagtcacctgctttcatcatcatttgcaatccatgatggcttgacagccgtcaggagtggtggtgttggcagtggaactgatgcgataaccatagcttcgttgagatatagtgatgcgaatttgctacctgaaaaccccatcgcaacttccagttgtttgggcgaatcaggaaccttcaattctctcgacgatgtgtgtggtgtaaacccatcacaaggtggaacctttgtgaaggtttacaaatcagggtccctcgggagatcgctcgacatcaccagattcggcagctactacgagttgcgtgtcgagctcgagcggttatttggtctcgaaggccaactggaggaccctgcaagatcaggctggcagcttgtattcgtcgaccgggaaaacgatgttcttctcctcggcgacgacccgtggcaggagtttgtgaatagcgtatggtgcataaagatcctctcgccgcaagacctgcagcagatggcccgcggcgggaggcgaccttctgtctacaactggagcgaggacgctgcagggcagtgtctgcgacgactattctgcaggccacgacgtgcagaacctcaccggcagcattgcgcctgtggtgcctctggactactgaagaggactgaggcgaaggccgggatctgaagctctgaaccaaaaccggcaatccagcatttgcaggatttgccatccgcaagtcgtttcgttcctgtgttatgatcctctcagtctcaggccctgttgatcgggaataacctagtcgtttaatatagctagatgatgatccatgtatcattatggtaatggacatgctgtacgatagctactgtagctctaaatgcaggcaaggcaagaattgatctatcaaagaacgaatgaatgcaggccctccctgtagaggtgatctagccctgtactcctcagtcctaaaatatattctcatagctaaaactgatggttccatgtggcattggcacccaagctattgaaaccagtcccctttgcccc

SEQ ID NO: 262834 - DNA, 476 bp, Zea mays
cagggcagtgtctgcgatgattattttgcaggccacgacatgcagaatctcgccggcagcatcgcacctgtggtgcctctggactactgagtccgagatgaagtccggaaactgaagttctgaaccaaaaccggcaattcagcactgcaggattgccgtccacgagtcttttcggttcctatgatcttctctcaagtcgtgttggtcagaaataacctagtgttaatatagctagatccattgtatcattatggtaatggacatgttgtacgatagctgttgtagctatgtgtagccatagcctaagctctaaatggcaggcaagaattgctctatgaaagtatggatgcaggcactcactgtagaggtgacctagccctgtagttctctatatattctcatatctaaaagctgacggttccatgtggcgccccccctattgattccagtcgcccctgtcataattttttcacctc

SEQ ID NO: 262835 - DNA, 463 bp, Zea mays
accggccttgaattcccgggtcgaccgcacgcgtccgcggacgcgtggggcacattatgttttctgtcagaaagttgcatatggattatatgaacatggtttcaaaaattcattactggggttctgtagttctgtgactggaaaaataattttcgggttactttaggaatgaacacattaaaggagctggagttgtcaaggtgcaaaaagatctctgaggctagcacatgtgagttgtgagaaacaggcacaactaggagccttttggtccagaactttatctctgaacaaatctgaattgttttgatgttcagtgatgaacaggcgatatattcttcttaagaaccattcctccttgtaaataattttttaaaaaaggtcttgctatttgtcccaaatttttttttcttttaaaaaaaattttgggttttttaaaatttatttttttttccccttttttttt

SEQ ID NO: 262836 - DNA, 482 bp, Zea mays
ctcgtttcccgtctcggagcggcggagtgcgcacctatcagtcccaagttcccgccacacacctctccattcccctcccgaagtcccgatcctgtcctcaaatcccattgctctatcttctctagcggcgagtcgaggcggggaagacgagctagcggcgaggatgttgtgggtagataagtaccggccgaaaaccctagacaaggtcaccgtgcacgaccaggttgctcagaacctcaggaagtttgtgtcggagcaggattgcccgcacctgttgttctatgggccgtcggggtccgggaagaaaaccctaatcctagcgctcatcaagcagatgttcggcgccggcgcggagaaggttaagctggagaacaagacatggaaaatcgatactggaacaaggacatttgagatagaattggcgatgttgtcaagtgctcaccatgtggagatgacccccagtgatgctggctttcaggaca

SEQ ID NO: 262837 - DNA, 382 bp, Zea mays
cgcgcctatttgtcccgggttcccgccacacccctcccatccccctctcaatcctgtccccaaatctctctcttctctctagcggcgaggcgaggcggtgaagacgagcgagcggcgaggatgttgtgggtagacaagtaccggccgaaaaccctagacatggtcaccgtccacgaccaggttgcgcggaacctcagaaagttcgtgtcggagcaggattgcccgcacctgctgttctatgggccgtcggggtccgggaagaaaaccctaatcctcgcgctcatcaagcagatgtttggcgccggcgcggagatggttaagctggagaataagacatggaaaattgatactggaacaaggacacttgagatagaattggcga

SEQ ID NO: 262838 - DNA, 530 bp, Zea mays
cccgccacgaaattctccacgctccgatccaatcgcaacaatgaagttcggcaagagcctcaacaaccagatcgtggagacgctcccggactggcgcgacaagttcctgtcctacaaggacctcaagaagcggctgaagcagatcggcgccggctctggcgagcggcggagcaagcgccagcgggtgggggacgggcgcggcggatcctcgccgcctgcgatgaccccggaggaggccggattcgtcgcgctcctcgacgccgagctcgacaagttcaacgccttcttcctcgagaaggaggaggactacgtcatccggctgaaggagttgcaggacagggtggtgagcgccgcggaggtggggtcggcggaggagctgctgcgggtgcgcaaggagatcgtcgacttccacggcgagatggtcttgctggagaactacagcgcgctcaactacaccgggctggtcaagatcctcaagaagtacgacatgaggaccggcgcgctgatcccgcctgcctttatccggaacg

SEQ ID NO: 262839 - DNA, 972 bp, Zea mays
aattgtgcgggcgcaggagttgcaggacagggtggtgagcgccgcggaggtggggtcggcggaggagctgctgcgggtgcgcaaggagatcgtcgacttccacggcgagatggtcttgctggagaactacagcgcgctcaactacaccggtgagacgcatctcactagggatgagagagtttttatttttatttcaaaaagatagagaggggaaaaacaatcgtgcagcgttagatttcaagattcattctaaacgtactgacagagagcaatggatgctctgcgttaaccagggctggtcaagatcctcaaggagtacgacaagaggaccggcgcgctgatccgcctgcccttcatccggaacgtgatgcaggagccggtctgcgccaccgacgtgctgtacaagctcgtcaaggggtgcgaggagatgctggaccagctcctcctgccccggaaccagcagcggcccgtgccgagcgacaacggcggggaaggagacagcgacggcgacgacgacaagcaacgaccggcggagccaggcgcctcatcgctgcccagcggcggcggcggtggcgctggcgacatggagctggaggagatcgaggacatggagagcatgtacatgaagagtacggtggccgcgctcagggcgctcagggagatcaggagcgggagctccacggtgagcgcgttctccctgccgccactacggtgattgacacgttgtgttcggttcagtagcgaaggagatagaacggggccgactgcgctgttgctgtaggtagtgtttggttcaaagaagacacgaacaatatgaaagaacatccgtcacatgatagtaatattcatctagtattctcaatctcactgctcccacaaaacttaaggggtgcatcgaatgcacaagtgacctccgctctacaaatcaatttctcgccgcctgtttctgatccaactctcgccgcggaaatt

SEQ ID NO: 262840 - DNA, 441 bp, Zea mays
accggtttggaactcccggctggacgcacgcgtccgcccacgcgtccgtgcagcggcgtgaagtatatatccagggggacttggatcgtgttatcggttcctaggtcctggttcctggtcccagcgcacaaggctatcttatccgagctgctgggggttgagtgcgaggtcccgttgacggtggagatggacaagttgcggcaattcgggcggaaggcatggttcatcgtgcgtgtgctgtctggttacgaggagaagaggatccggtcctacaggctgcagctgcagaagcgcatcgagatggcacaagctagaaaggaagagctgcagaaactgccagaaaaagggggggtttttttaaaaattctttgggtccgggggaaaaagggggtttttttttaccccgggttttttcccccaataaaatgggggccccccaaa

SEQ ID NO: 262841 - DNA, 1354 bp, Zea mays
gtccaatagctgccaaaggtcacaaagattcagtttacgcactggcgatgaatgatacaggaacccttcttctctctggtggcactgagaaggttgtccgagtgtgggatccgaggacaggatcgaaaaacatgaaattgagagggcacactgacaatatcagagccttgcttgttgattctacagggaggtattgcctatcgggatcatctgattcaatgataagactatgggatctaggacagcagcgttgtgttcattcttatgctgtgcatactgattctgtttgggcacttgcaagcactcctgcatttggtcatgtctacagtggtggaagagatcaatctgtatacctaacagatttgtccacaagagagagtcttttactctgcacaaatgaataccctgttctacagttgtctctgcaagatgacacaatatgggtggcaacaactgattcttctgtttatggatggccagctgaagggcgcacaccccaaaaggtcttcgaaaagggtgcctcattcttagctgggaatttgtcattctcaagggcaagagcatctttagaaggatcggcacctgtccctgtatacaaagagccatcttttgttatcccaggagttccagcaataattcaacatgaaataatgaataatagaagacatgtactgacaaaggataccactggttcagtcaaattgtgggagatcactcggggtgctgttattgaagattttggcaaggtttctttcgaagacaagaaaaaagaattgtttgagatggtaagcatacctgcttggttcaccatggatgctcgattagggtgcttgtctgtccacctggatactccacagtgcttttctgcagaaatatatgcggttgacctaaatgttgctggagcacaagaagatctcaagattaatttggctcaagagactcttcgtggtttgctaattcattggagtaaaagaaagcagaaatctagttcacacagcttgtgtaatggtgatagttcaatagggaaagatgttccgtcgaaagactcgccccggtcaagacctgaggtcgacgatgccactcaaaaccatgcaactcatgtgcttccatcatttgagttttctacagtttcacctccatcaattatcacggaaggtaatagtggagggccatggacaaagagaattaccgatttggatggaactgagggtgatcttccatggtggtgtgtggactgcattactctcaatcgatatcccaaggagaatacaaagtaaatgctcactacaattccctattttatcctcagagatgatatttttccttgatatatgatatatcttatattgtcttg

SEQ ID NO: 262842 - DNA, 690 bp, Zea mays
gcgttcactcgttcgctgagggtgatcttccatggtggggtgtggactgcattactctcaatcgatatcccaaggagaatacaaagtgcgggttttatttacaccctgctgaaggctcgcctgcgccaaacataactcaagggaagcttagtgctccacggatattgcgaattcacaaggttgctaactatgtggttgagaaactcgttcttgacaaaccattggatggaggctctgatgcgtttgttatgggattgagttctgctcaatcacagctctcagttctagatagttcttcgcggcttggactaaagccatggcaaaaaacaaagccatgtattgagatattgtgcaataaccaggttctatcaccagatatgagtttggctactgtgcgaacatatatatggaaaaagccagaagatttgattcttcattacagagtggtccaaccgagatgatcacggcttcagatcacatggttctcagcatgcctgcaccataaacggtgtggttgaagacacccttggcttagcgaggaaaccgtcagaaatattttgctcttgggctccggtagcctttctcctagaaattccccccccccggggaaaaccttttcggttttggggcccttttttttccccttttttttttttgggggtttttaaaaaaaaaaaagggggttttttt

SEQ ID NO: 262843 - DNA, 840 bp, Zea mays
agctctcacagctagatagttcttcgcggcttggactaaagccatggcaaaaaacaaagccatgtattgaggtattgtgcaataaccaggttctatcaccagatatgagtttggctacagtgcgaacatatatatggaagaagccggaagatttgattcttcattatagagtggtccaatcgagatgatcacggcttcagatgtacatgctcacatggttctccagatatgtcccagcatgtccgcacctttagatggtgtggttgaagatgcctttggcttagagaggaagcatcatcttcacagaggaaatattttgctcttgctccgccctccccccggtagctgttcccagaatcgacttgttcgcttctctgtaaagttcctgaccttgccctggtagtaagatgtatcatagcacaggtataaggctctctgctggctgccgagcttgtaaatgtagaagattaggtgcttaataaaagatcgaaaggatatgttttttcttttcgtttttctttgacagcatttgtaagaaaaaaaaagaggctgacgctcggcccagatcgtggcgctccgacgtcgattattggatttaaccccgccgatccccttggaggtgtttggttgagaccagggtaagaggtggacgggaacccgggaacaataaagctgtttttgggacatgttgatgtcgggagctactttacctctcatccttcaacaattgttctatatactctatagggctattttagtgttttctgttttttgctagcgagaaatcagaaataaatgattgctttgttttgataatcaaagctgttggatcatggtctc

SEQ ID NO: 262844 - DNA, 456 bp, Zea mays
ctatcaccagagatgagtttggctactgtgcgaacatatatatggaaaaagccagaagatttgattcttcattacagagtggtccaaccgagatgatcacggcttcagatcacatggttctcagcatgcctgcaccataaacggtgtggttgaagacacccttggcttagcgaggaaaccgtcagaaatattttgctcttgggctccggtagccgctctcctaggatcccgacttcgtttgcttctttgtaaggttccttcctgatcttgccctggtagtaagatgtatcatagcccaggtataaggccctctgcttgtacatgtagaagattttgggtgcttaattaaaggtcaaatgggattttttttcgtttttctttgccgaagtttgtaagaaaacgggcttagacgttccgacgtcgattattggatttaaccctgtcgcatcctcttgt

SEQ ID NO: 262845 - DNA, 444 bp, Zea mays
  unsure (1)..(444): unsure at all n locations
tccccacctgctctctctcactcgtccccatcaccgtcgccatcactaccccgctcctctgctctcatcggctccaatggcggacgccgacgccaagtcccagccgcccgacgccgcggcatccccggatgcctcgatctcctccccctcctccctaggcggcggcggcggcgacgcggccgacgcggacgcgatcgagaagcagctcgccggcctgggcatcgccggcgcccggtgggttccccgagccatcgggatgggacgatggccccgtaccagtccccatcccggccgatgtccttgtcggcggtgatgagggtgccggcgagatctcccgggcgccggcgccggcgccgcggggccgttgagttgatgntttctcggttcccgcgccggcccggagagccggactgcagctactacctcatgttcggcacctgccgc

SEQ ID NO: 262846 - DNA, 2009 bp, Zea mays
tctccggcgaaagccccccaaaccctcgcaccctaaaacagcggcgcacaagatgtccgacgaccccaccaacggcggcggcggtgatcgcgtggaggacgtcgtccgcaccgagggtgaaacacaacctcgtgatgatggcttgtcgaaatccaaggatagggacaaagatagagaaaaggacaaggacagagatcgtcgccgagaccgtgacagagatcgagggagagacagggaccgtgatagggatgggacagggacagggatcgggacagagacaaggatcgccaaagtaggcatcaccgtgaaagacgggaacagcgagaccgtcctgatgatcacagagtccgtgattctgaaagaagaagagaacgcgacaaagatgggcatcgtaggcatcgttctcggtctcgttcaaggggtagagatcgaagatctaggtcacgttcaagaagcaagcgagttagtggattcgatgcgccacccccgcaagcaatgggttcaacatttccagttattccaaccccaagtcagttaccaggctcttcgcttcccaacattggtggcatgtttccaaacatgctccctttcggtgttgctgggcagttcaatccccttgtcatccagccacaagcaatgactcaacaggctactcgtcatgctcggcgtgtttatgtcggtggccttcctccatctgctaacgaacagacagtggcaatttactttaatcaagtcatggctgctattgggggaaacactgctggtccaggtgatgctgttctcaatgtatacataaatcatgacaagaaatttgcttttgtggagatgagatctgttgaggaagcaagcaatgcaatggccctggatggcattatgttcgaaggggcaccggtgaaggttagaaggccaacagactacaacccttcccttgcagccgccctgggcccaagccagccaagccccaatctgaatcttgctgcagttggcctaacagcaggatctaatggaggactagaaggtccagaccgtatttttgtgggtggtctaccatattatttcactgaggctcaagtgcgggagttgctcgagtccttcggacctctgcgtggattcgatcttgtgaaggatagagaaactggtaactcaaaaggctatgcattctgtgtttaccaggatcttaatgtcactgacattgcctgtgctgcccttaatggcatcaagatgggggacaagacccttactgtcagacgagcaaaccagggggcatctcagcccagaccagagcaggaaagtatcctattgcaggcacaacaacaggtgcagttgcagaaacttgtgtatcaagttggagcgcttcctacaaaggttgtatgcctcacacaggtggtaactgcagatgaattgaaagatgatgaagagtatgaggacattatggaagacatgaggctagaagcaggcaaatatggtaatttggtgaaagttatcatcccacgccctgaccccagcggacagccagttgtaggagttgggaaggtgttcctggaatatgcagatatcgatggtgctgccaaagcaaagacagcgctgcatggaaggaaatttggtgggaacccagtggtcgctgtctgctatgcggaggacaagtttgccaatggggaatatgatggatgaaaatcttatccctcttgaactatagcagtagccggtctttgtctttggctctatgctacctgcttgtttaattgcaacaaagatgaacggtctctcatttaagctgaacctctacctgtattgatatccctggattttttctgagccaccacctgttgtgatttgtgaacgttgtaagaataggtttctttgcttgggttcgcttgttgctgtcgaaaatatgtaacgaatgttattaataaagaatttcttgtatgactttaaaaaaaaaaaaaaaaaaaaaaaaaaaaaaaaaaaaaaaaaaaagaaaaaaaatataaaggaaacaaacattaaaa

SEQ ID NO: 262847 - DNA, 1156 bp, Zea mays
ccgcccttacgcacgcggcccaactagcctaacaaaccctagctagatttagaaaaaaaatttgtccccaatccgaaccgacgaggagctcgccgccgtgagatgtccgagtacgacgagcgctaccagggcaacggcgacatgcccgcagccgaaggcggctatccgcaggccgagtacgccgccgccgccgcgcctgccgccgggggttcgccgcccgcagacagcaagccctccgggttctccgaccacgccgacggccgctcctcccagcaccagcacgagacacaatcacatgacagtggttcctcgaaatctcgagaaagggaccgagaacgcgataagggcaaggatagggagcgtgacagggatcgtggccgagaaaaggggagggaccgagacagggataaggatcgtgaaagaagtgacagagatcgcgatcgccaccacagggaccatcgagagcgcacgagaaaagggaacaccgtgatcgttctgatgatcgtgaccgtcaccgtgatggtcgtgaccgccaccgtgatgatcgtgattctgagaggagaagagatcgtgacagagatggtcatcgtaggcatcgctcccgctccccttctaagagtcgtgaccgtgaccgcagatctagatctcgttcacgctctcgatcaaagagcaagcgcgtgagtggttttgaccaagcacctccacaacaggcacttcctattgtttgctgctggtgctatccctggtcagctgcctggtgtcaccgctcctattcctggggttggggtgcttccaaacttgtataatttggctgcaggacagccacaagccatgacacaacaggctaccaggcatgctcggcgtgtctatgtgggcggacttcctccaactgctaatgagcagaccgttgccatattcttcaatggagttatggctgctattggaggaaacacagctggtccaggtgatgctgttcttaatgtctacataaaccacgacaagaaatttgcttttgtggagatgagatctgtggaggaagcaagcaatgcaatggtcttagatggcataatgtttgagggagcaccggtcaagattagaagaccaacggactataatccttccctagcagctgctctgggcccgagccagccaaatc

SEQ ID NO: 262848 - DNA, 714 bp, Zea mays
gaaaagggaacaccgtgatcgttctgatgatcgtgaccgtcaccgtgatggtcgtgaccgccaccgtgatgatcgtgattctgagaggagaagagatcgtgacagagatggtcatcgtaggcatcgctcccgctccccttctaagagtcgtgaccgtgaccgcagatctagatctcgttcacgctctcgatcaaagagcaagcgcgtgagtggttttgaccaagcacctccacaacaggcacttcctattgttgctgctggtgctatccctgaaggcaaccttggcccactttgtcacctgctgccaatggattgagctgactgctgtagctttgatgtcagctgcctggtgtcaccgctcctattcccggggttggggtgcttccgaacttgtataatttggctgcaggacagttcaacccacaagccatgacacaacaggctaccaggcatgctcggcgtgtctatgtgggcggacttcctccaactgctaatgagcagaccgttgccatattcttcaatggagttatggctgctattggaggaaacacagctggtccaggtgatgctgttcttaatgtctacataaaccacgacaagaaatttgcttttgtggagatgagatctgtggaggaagcaagcaatgcaatggtcttagatggcataatgtttgagggagcacctgtcaagattagaagaccaacggactataat

SEQ ID NO: 262849 - DNA, 789 bp, Zea mays
aaagcatcctgctgcaggcacagcagcaggtgcaaatgcagaaactcgtataccaactcggaagctgccctgccgacaataggtgtctgcctgacacaggtagtgacagcagatgaactgagagatgatgaggaatacaatgacattgtggaggacatgagggaagaaggacgcaaatatgtcccacataatgccattgcagagtgttttatagtccgaccctatgcaatattggcaatcgggctttaacccacagaagacactattcttttgagtttgattaatcattatatcattagcctcttgcctatatatctctactcactaacacttggacaggtaacttggtgaaagttgtaattccacgacctgaccccagcgatgctccagttgctggtgttggaaaggtgtttttggaatatgcagatgtcgagggctcgaccaaagcaaagacggggatgcatgggcggaaatttggcgggaaccaggtggtggccgtgttctatcccgaggacaagttcgctgctgagcagtatgactgaaagttgtagaacctgttctagagttgcaacacacaatgtgtgtgttttttttaaaatctttgagggtaccggtttctcttgaatttgaatcttatctagttataagtttggtgcaggaccagtcgataagcgataagtttgtgcaggaccattaggctttgtttgggtaattagtattgatcccaatccaaatctatatatgttaatgccttgctcagttattcttattccatatggattggagtgt

SEQ ID NO: 262850 - DNA, 425 bp, Zea mays
ctccagggttctcgatctattacagccttttaggagcaatacaccaatacctgactaatcgctcattgattatgcttcctactagaaatctacggacgccctgcaggtcaggtaccaggctcttcgctccccaacattgggggcatgtttccaaacatgctccctttcggtgttgctgggcagttcaatccccttgtcatccagccacaagcaatgactcaacaggctactcgtcatgctcggcgtgtttatgtcggtggccttcctccatctgctaacgaacagacagtggcaatttactttaatcaagtcatggctgctattgggggatacactgctggtccaggtgaggccggtctcaatgtatacataaatcatgacaagaaatttcgcttcatccctgtaagatctgctgaggaagcaag

SEQ ID NO: 262851 - DNA, 351 bp, Zea mays
acgatgaggaatacaatgacattgtggaggacatgagggaagaaggacgcaaatatggtaacttggtgaaagttgtaattccacgacctgaccccagcgatgctccagttgctggtgttggaaaggtgtttttggaatatgcagatgtcgagggctcgaccaaagcaaagacggggatgcatgggcggaaatttggcgggaaccaggtggtggccgtgttctatcccgaggacaagttcgctgctgagcagtatgactgacagttgtagaacctgttctagagttgcaacacacaatgtgtgtgttttttttaaaatctttgagggtaccgttttctcttgaatttgaatc

SEQ ID NO: 262852 - DNA, 913 bp, Zea mays
cggacgcgtgggggcaaaccaaggagcttctcagcctaggccagagcaagaaagcatcctgctgcaggcacagcagcaggtgcaaatgcagaaagccgtataccaagtcggaggtgccctgccgacaaaagttgtctgcctgacacaggttgtgacagcagatgaactgagagatgatgaggaatacaatgacattgtggaggacatgagggaagaaggacgcaaatatggtaaaccgcacgaggcccatcgagttctcttataccttcttgttttaaaagctcttacattcaactggtatgaacttatgattatgattgcctaccctcagttactgaattggatcccttttgtggttttgtcttttgtgtgtcttttttggagtgccacataatgccattgcagagtgttttatagtgcgaccctatgcaatattggcaattgggctttaacccacagaagacactattcttttgagtttgattaatcattatatcattagccttttgcctatataattttactgactaacacttggacaggttacttggtgaaagttgcaattccacggcctgaccccagcggtgctcctgttgctggtgttggaaaggtgtttttggaatatgcagatgtggagggctcacccaaagcaaagacagggatgcatgggcggaaattcggcgggaaccaggtggtggcggtgttctaccctgaggacaagtttgcagctgagcagtacgactgaaaagttttagaacccccattctagagttgcagttgtggcacccaatgtggttgttttgcccctttgtagttaagtttggtgatcgatcccctgataagtgatataagtttcgggcccaagtattatatcagccggaatggagctaaaatgaattcgtttgctgttttt

SEQ ID NO: 262853 - DNA, 269 bp, Zea mays
tctagatctcgttcacgctctcgatcaaagagcaagcgcgtgagtggttttgaccaagcacctccacaacatgcacttcctattgttgctgctggtgctatccctgaaggcaaccttggcgcactttgtcacctgctgccaatggattgagctgactgctgtagctttgatgtacgaggacactatctggtcagcttcctggtatcactgctcctattcccggggttggggtgcttccgaacttgtataatttggctgcaggacagttc

SEQ ID NO: 262854 - DNA, 294 bp, Zea mays
cccacgcgtccgaccacgcgtccgccggacatgatcaacgaggtcgatgctgatggcaggggcaccattgatggcccagagtggctcaaccttatggatcgcaatatgaacgacaccgcctctgatgaagatcatcacggaggccttccgtgtgtcagacacggaccagaacggcttcatctccgccgacgagctccgccatgtcatgactaatcttggctagaacctatctgattagcaggtgaccgatatgatccaataggctcatctcgctggtgacatgcagatcaacta

SEQ ID NO: 262855 - DNA, 1559 bp, Zea mays
ggaattggctgctcaggcaaaggagaggcacatcctcagaacgcaaacccttctttgtgatatgctcctgcgggatgctcctgttgggatatttacccggtcacctaatgtgatggatctagtaaagtgcgatggagctgcattgtattaccagaaccagcttttggtgcttggatcaacaccctccgagtcagagataaagagcattgcaacatggctgcaggataatcatgatggttcaactgggctgagtactgacagcttagtggaagcgggttatcctggtgctgttgcacttcgtgaagttgtgtgtggcatggcggccataaagatctcttccaaagattttatcttctggttccgatcgcacacaacaaaggagatcaagtggggtggggctaagcatgaaccggttgatgcagatgacgatggcaggaggatgcatccacgatcttcattcaaggccttcttggaggtggttaaatggagaagtgttccctgggaagatgttgaaatggatgctatccattctttgcagttaatattacgtggctccctgccagatgaagatgccaacagactcaatgtctggtccattgtaaaagctccatctgatgatatgaagaagatacaggggctacttgaactgagaacagttacaaatgagatggtccgcttaattgagacagcaactgcccctgtcttggctgtcgacattgccggtaacataaatggatggaacaataaagctgcagaactaacaggtttacctgtaatggaagccatagggaggcccctgatagatcttgttgttactgattctatagaagtggttaagcagattttggactcagctttacaaggaattgaagagcaaaatatggaaatcaagcttaaaacattccatgaacatgaatgcaatggtccagtaatcttgaaggttaactcctgctgtagtcgggacctttcagagaaagtcattggagtttgctttgtagcacaagatttgaccaggcagaagatgattatggataagtatactaggatacaaggagactatgttgccatagtaaagaaccccactgagctcatccctcccatatttatgatcaatgatcttggttcctgcttagagtggaataaagctatgcagaagattaccggtataaagagggaagatgcgataaacaaattgttaattggggaggtcttcacgcttcatgattatggctgtagggtgaaagatcatgctactctaacgaaacttagcatactgatgaatgcagtgatttctggtcaggatcctgagaagctcttttttggtttcttcgacacagatgggaagtatattgaatccttgctgacagtgaacaagaggacagatgctgagggtaagatcactggcgctctttgctttctgcatgtggccaggccagagcttcagcatgttctccaggtgccaaaaaaggcgtaacaagctgcgacaaacggttttaaggaattaacctactttcgtcaagagttttggaaccccctcattggcatgcacatatacttgt

SEQ ID NO: 262856 - DNA, 424 bp, Zea mays
ctccagggaccagaactagggtttgcgaaatcgtgacgcgagcacttgaagattcgcgaaagacagcgcgaccgacccacggcgatggccaccgtccaccctcaatccccggcgggtcccacccatctcccgcaggaggagcgacacggggacgccccggtaccgcccgccgtctccggcgaacccgccgccgcagcggaggcgggcggcgagatcgccgcgctcgacaagcagctcgccgtcgtcggcggcggcgaggagaggaggccggccggggccggggccggggccgccagcgcaggcgggggagggaagccggtggcggaggccatgcgcaagtacgctgccccgcggtcgtcgcgcttccacggcgtcaccaggctcaagtggagcggcaagtacgaggcgcacctttgggacaaca

SEQ ID NO: 262857 - DNA, 295 bp, Zea mays
gcctgaagctgtgcgccccggttcggtgggcgtgaaaggggagaaaagagggcgggaaggaccgcggattttgctagggtttgcggtttctgcttcacactgcctcctcagtcctcaccaccacagccgtcgcgcgcaggagggtagggaggatgccacgtaagatcaccttggtcaaggagggggagccgcagccggtggacgctgctcaaggggagcccgctccggcaccggcggcaccgacggccgcgttgacggaggcggaggtggacgagctgcccagggccatcgtgcg

SEQ ID NO: 262858 - DNA, 870 bp, Zea mays
aggctggagaaggccaaagagcactacctcactcgccttaaacgagaatgggagcaggatgcggctgcagcggcgtcaaaggaagctgctctgaaagataatgcagagaaccagaagccgaaactggataaggctgctttggagggcttgaagattaacatctacttcccaaagctgaggaaggtgaaagctttgccactgaaaggcacaggaaagcataaatacagtttccgacatattgaagttccttcttatccaattcatttctgtgactgtgaggagcactgtggacctcctgaggaagctaataatgaatatgcttctgttctcaatgctgctgcatatgagaaggaacgtaacattatgaattctgtgatgaacaagctttttgagaaggaaaatgaacattttgattcaggtgcaatggagaaatgtgatgaccgtactgataccattgaaccctccaatactgtgaatggcatgcaaattgaagagacggaagatgctccagaggacttggatgacttgcagacggaagaaacggaagagtcttcagatgaagatttagatgatgaccgtgtgattaacattgctccccgcaagtccaataagccagcagttcgagagaacataaagcatgaagtgaataaggactcacagttacaaaagcgtccaaggattgaagagacttccctgccaaagaagaggcagagatctgaagcctcatctgaacctataaaaaggaatggagaacaacatgtttcagttactctagacactagaaccgcaggcaagactgtgcctggaaaatcagaagccagccaaaatgaacagaagtctctggattttgaaggaaaaagaacatatgat

SEQ ID NO: 262859 - DNA, 472 bp, Zea mays
ccggtccggaattcccgggtcgaccgcacgcgttcgcgcacaccaatcgcccacaagcgctcgcaggagaggtcgaaaccctagcttttgcggcggcggcgagagaagatgatctacgacgtgaactcccccctcttccgttccttcctcagccagaagggcggcgccgacaagaggaaaatggaggagcataaaccaaaggagcagaggcccaaggctaacgagaacaagcctgtgatgaacgaatgaatatctccagaagctttgttcaatgtgcaaccaagtccgatgtccgtttgctctggtcagcttaaaaccaacgcttccaataatcctattggtgtcttagtttccccttatagtgttatttgctcggcttgaacatggcaacggaaatgaaacttgaactacctatggtactgtcatcaatttgagacccccatgattgacaaaaaaaaaaaaaaagggcggc

SEQ ID NO: 262860 - DNA, 565 bp, Zea mays
gcgcggggtagcgtttacaccttgacacctaaggccagagattggagagagaaagaagcagctgagtggagcaagaaagaagaggtcatggcggtgtagtctatcagctgagtgggaaagagtggagcaatggtggggggctgtgccagcggcgacggcgccgccgaagggacgctcgcgaggtggcggagggcggcggccaagcggatcggcctctcatgcgcctccttcttctcctacgccgcctctccctccccgcctccttccaagaccatctcccactccgcactgaatgcgcctgatggagagcagcaaaagatggaggaacccaccagcaccagagtggctgacaagaatctatgtgcaatatgtttggaactcctcagcacgagcatcagcagcgatgttgatagtggtgaggcggcagcaatctacacagcgcagtgctcccactcattccacttcctatgcatcgcctccaacatccggcatggcaacgtcagctgccctatctgccgtgccccatgggtctgagctaccacgtgacctgaaggttccaccattg

SEQ ID NO: 262861 - DNA, 569 bp, Zea mays
tggacgcgtgggcttgggagtgatgatgaatatcatgaggattcaaagtttgagactgctgaatttggtagttctgacaaggaaattgaagacaatattgtggaagatagacttgtcaagttggagaatagtcacgttggagcacacaaggactggaggagagttagaaaaatatacagacgcagcaagcagtatgtctttgttgctgccacccttcctcagagtgggaaaaaaactgctggtggtgtgctacaacgtatgtttccggatgctgtatgggttagtggcacttatctgcaccgtcacaaccccagattagaacgaagatggatagaggttactgctgatacacaagttgacgctcttctgaatgcagttaaatatggcctgaagagtgaagttcatgatgctaaagatgttccaagacgcactatggtctttccaaacaccgttgatgctgctaattcagtctctgatatattgcatcgagttggtattccatgtattttgtaccatcgtgagagttccctgaaggagcgggctaacaatttacagtctttttcggaaaa

SEQ ID NO: 262862 - DNA, 2210 bp, Zea mays
cggccacgccttctccaccgttcgtccgtccattcccattctcatttccatttgcctcgctcgccttcctcctccccactccactccattccaacgcaacggcctcgccccgctttataggccgccgcccgcgccacatcgccaccgtctcgcaccgtcgcggccacccattctctctcgtccatcgcatcgctccggctcccagcgcaatcgatccatccgtccctaggtgtgcttcagctatgcagttcagcagcgtgcttcccctagagggaaaagcgtgtatgagcccagtgaggagaggcagtggaggttatgggagtgagaggatgaggatcaactgctgcagcatcaggcgcaacaaggcactgaggaggatgtgtttcagtgcaaggggtgctgtgagcagcacgcagtgtgtgctcacatcagatgctggcccagacactcttgtcgtccgaacatcctttcggaggaattatgctgatcctaatgaagtcgctgccgtcattttgggtggtggtaccgggactcagcttttccctctcacaagcacaagggccacccctgctgttcctattggaggatgttacaggcttattgatatccccatgagcaactgtttcaacagtggcataaacaagatatttgttatgactcagttcaactcagcttctcttaaccgtcacattcatcgtacctatcttggtggggggatcaacttcactgatggatctgttgaggtgctggctgcaacacaaatgcctggggaggctgctggttggttccagggcacagcagacgccgttagaaaatttatctgggtacttgaggattattacaagcataaagctatagaacacattttgattttgtcaggagatcaactctatcgtatggattacatggagcttgtgcagaaacatgtcgatgacaatgcagacataactttatcatgcgctcctgttggagagagtcgagcatctgactatggattagttaagttcgatagttcaggccgtgtaattcagttctctgagaaaccaaagggtgctgccttggaagaaatgaaagtggataccagcttcctcaatttcgccattgattccccagctgaatatccctatatcgcttcaatgggagtttacgtttttaagagagatgttttgttagaccttctaaagtcacggtatgctgaactgcatgactttggttctgaaattctgcccaaggctttgcatgagcacaatgtacaggcatatgttttcactgactactgggaggacattggaacaatcagatctttctttgatgcaaacatggccctctgcgagcagcctccaaagttcgagttttacgatccgaaaacaccattcttcacttcccctcggtacttgccaccaacgaagtcggataagtgcaggattaaagacgcgatcatttcacacggctgcttcttgcgtgagtgtgccatcgagcactctattgttggtgttcgctcacgcctaaactctggatgcgagctcaagaataccatgatgatgggtgcggatttgtatgagaccgaagacgagatctcaaggctactggcagagggcaaggtgcccattggcgtaggggagaacacgaagataagcaactgcatcatcgacatgaatgccagggttggaaggaacgtctccataacaaacaaagagggcgtccaagaagccgaccggccggacgaaggatactacatccggtctgggatcgtggtagtcctgaagaacgcaaccatcaaggacggcaccgtcatatagagactaactttggccttacgcatggcgtgcaaggttacaggttagtcatcgtcttgagagttgagacttagtttgaggcgcgcgcccgaccttgacttgagccgtcggagggacaagaacatgaggaagaagaggctggtggtgccggatgttgccatggacgacgagaaatggtttggtgcggtcgcatcggttccagtagctagctcttccgatgttattaatatatgtatctagtggagtagtgcgaacagtgcaataagctgggcgagcaaagccgcggcaactcttggcttggggattgttggtgcatcttgtaaataataaactcggacgcagcaaatgaaacatgcccctcatcttcttccatatcttcgcaccgatgccttgccctgtctttatatgagacga

SEQ ID NO: 262863 - DNA, 989 bp, Zea mays
cggacggtgggcggacgcgtgggcggacgcaggggcggccccacgcgcccgaccagaagagcggcggcgcgggcggacaaggagcaggcggaggaggagttgtgccaagccacaatgggtatctcgcgtgactcgatgcacaagcgccgagccaccggtggaaagcagaaggcctggaggaagaagcgaaagtatgagcttggtcgccagccagccaacaccaagttgtcaagcaataagacagtgaggagggtccgtgttcgtggaggtaatgtgaaatggagggctcttcgccttgatactggtaactactcatggggaagtgaagctgttacccgcaagacccgtatcctcgacgtggtctacaatgcatcaaacaatgagcttgtgaggacacaaacccttgtgaagagtgccattgtgcaagttgatgctgccccattcaagcagtggtacctcactcactatggagttgacattggtaggaagaagaaaacccctgctgcaaagaaggataatgctgagggacaagaggttgaggcagcagctgaggaaacgaaaaagagcaaccatgtcacgaggaagcttgagaagcgcaaggagggacgtacccttgacccacacattgaggagcaatttggcagtggacggttgctggcatgcatttcttcccgccctggacagtgtggccgagctgatgggtacatccttgagggtaaagagcttgagttctacatgaagaagctacagaggaagaagggcaagagcgctgtagcttagagcattctcatggattgtcttgcaccgaaatgtgtgtcctgatgagtacactttttttggttagtcgtctcaagttcagagcgttatgccatgttttcagacctgattagtacactgttttctaaaagcgattgagctctagtccaatgtattgataataaaaaaaaaaaaaaaaaaaaaagggcggcaacccaagaaggccggcggta

SEQ ID NO: 262864 - DNA, 1144 bp, Zea mays
accgacgccccatgatttcgctctcttcttcccgtcgagacccaaccataccagcggcgccgcaggctgacgaggaggcggagtagagtggccggactacctcgacacctccactgcaaccatgggtatctcacgtgattcgatgcacaagcgccgggccaccggtggaaagcagaagacgtggcgcaagaagcgaaagtatgagcttggccgccagcctgctaacaccaaactgtctagcaataagacagtgaggagggtccgtgtccgtggaggcaacgtgaagtggagggctctccgattggatacaggtaactactcgtggggaagtgaggctcttacccgcaagacccgcatcctggatgtggtctataatgcatcaaacaatgagcttgtgaggactcagactcttgtgaagagcgccattgtacaagttgatgctgctccattcaagcagtggtacctcactcactatggagtggacatcggtaggaagaagaaggtgcctgttgctaagaaggatgcgactgagggacaagagggtgaggctatagctgaggaaacaaagaagagtaaccatgtgcagaggaagattgagaagcgacagcaggaccgtgcactcgacactcatattgaagagcaatttggcagtgggagattgttggcctgcatttctgcccgtcctgggcagtgtggccgagctgatggctacatccttgagggtaaagagctcgagttctacatgaagaagctccagaggaagaagggcaagggtgttgcatcttagagcattcttttagctagaactgcaaaatatcttctacttgggggattttgttgttagtctttatgcatatcatttgcggacctgatgaacacttcataagtgaatcaactctcgattctaagaattgataattttcacatgcggtggttgtaattgtgatatttaggtttgctatttattgaaacttcttgtctaaagcagtttaagtttaccttgaagatgattgttagaaatgagatcctatccaatgtttggttttccctttatagctgctaacatttgattgcatagtaagaactggtcacgcgaaagactttctctcaaaaaaaaaaaaaaaaaaaaaaaaaagggcggccg

SEQ ID NO: 262865 - DNA, 506 bp, Zea mays
ctgctgcaaagaaggcgatttcttcttcctaccaatgtcaactccatagtgagtgaggtaccactgcttgaatggggcagcatcaacttgcacaatggagttgacattggtaggaagaagaaaacccctgctgcaaagaaggataatgctgagggacaagaggttgaggcagcagctgaggaaacgaaaaagagcaaccatgtcacgaggaagcttgagaagcgcaaggagggacgtacccttgacccacacactgaggagcaatttggcagtggacggttgctggcatgcatttcttcccgccctggacagtgtggccgagctgatgggtacatccttgagggtaaagagcttgagttctacatgaagaagctacagaggaagaagggcttgagcgctgtatcttatagcattcttatggtttgtcttgcaccgaaatttgtgtactgttttgttttctttcttgtgtttttcgattaattttttttcatatgccttttttttat

SEQ ID NO: 262866 - DNA, 344 bp, Zea mays
aggagcaatttggcagtggacggttgctggcatgcatttcttcccgtcctggacagtgtggccgagctgatgggtacatccttgagggtaaagagcttgaattctacatgaagaagctacagaggaagaagggcaagagcgctgtagcttagagcattctcatggattgtcttgccccgaaatgtgtgtcctgatgagtacacttttttggttagtcgtctcaagttcagagcgttatgccatattttcagacctgatttgtacactgttttctaaaagcgattgagctctagtccaatttgagcagggtatgattatttgttcgaaaaaaaaaattacttata

SEQ ID NO: 262867 - DNA, 435 bp, Zea mays
tgctggcatgcatttcttcccgccctggacagtgtggccgagctgatgggtacatccttgagggtaaagagcttgagttctacatgaagaagctacagaggaagaagggcaagagcgctgtagcttagagcattctcatggattgtcttgcaccgaaatgtgtgtcctgatgagtacactttttttggttagtcgtctcaagttcagagcgttatgccatgttttcagtcctgattagtacactgttttctaaaagcgattgagctctagtccaatgtattgataatttctgctgttgtcctattgcggtgatgtttatttgccctgttcgctagctgcaatagttcctatttgagcactgagcagggtatgattatttgttgatgaatttgtttaaagcataaaaaaaaaaaaaaaaaaaaaaagggcggccgc

SEQ ID NO: 262868 - DNA, 506 bp, Zea mays
ccacgcgtccgcaatgagcttgtgaggacacaaactcattgtttgatgcattgtagaccacgtcgaggatacatcaaacaatgagcttgtgaggacacaaacccttgtgaagagtgccattgtgcaagttgatgctgccccattcaagacagtggtacctcactcactatggagttgacattggtaggaagaagaaaacccctgctgcaaagaaggataatgctgagggacaagaggttgaggctatagctgaggaaacaaagaagagtaaccatgtgcagaggaagattgagaaggcggacacatctgccaagaaaagcaagaaaaagaagaccaaaaccgagactgatggtgatgcaatggatgtggataagccctccaacgtggctgatggagaagctgagcttggaaccgagaagaagaaaaagaaaaagaagcacaagctagaggaggcacaggagaacggtgcagcacatgctaatggcgctgaagagacccagactccc

SEQ ID NO: 262869 - DNA, 575 bp, Zea mays
tccttgagggtaaagagcttaagttctacatgaagaagctacaaagggtgtaatcctgtagcattgtagcttggagcattctcatggattgtcttgccccgaaatgtgtgtcagtttgaatgcgcttcctttggttagtagtatcaagttcagagcgttatgccatgttttcagtcctgattagttctctgttttctaaaagcgattgagctctagtccaatgtattgataatttctgctgtggtcctactgcgccccatgttttaaaaaaaaaaaaaaaaaaaaaaaaaaaaaaaaaaaaaaaaaaaaaaaaaaaaaaaaagaaaaaaaaaaaaaaaaaaaaaaaaaaaaaaaaaaaaaaaaaaaaaaaaaaaaaaaaaaaaaaaaaaaaaaaaaaaaaaaaaaaaaaggggggggctcttttaaaggtaacaactttaaaaaccccggaattcaaacaaaatatttttttttaagaccacccaaaataaaaacctctgccgcattttaaaaaacgcgggatgtggaaaaacctgggaatacccaaaataaattttttgaaaaaaaatcccctt

SEQ ID NO: 262870 - DNA, 328 bp, Zea mays
cccacgcgtccgccacttcctcctcctcgcgagctcagctcgcgcaccggcgcgggcgggcaaggagcacgcggaggaggagctgtgccaagccacaatgggtatctcgcgtgactcgatgcacaagcgccgggccaccggtggaaagcagaaggcctggaggaagaagcgaaagtatgagcttggtcgccagccagccaacaccaagttggcaagcactatgacagcgacgagggtcccggttcgtggagggaatgtgaaatggagggctcttcgccttggtactggtaactactcatggggaagtgaagctgttacccgcaagacc

SEQ ID NO: 262871 - DNA, 524 bp, Zea mays
ttattcgtccgcccttgctttcgcccgaggctgcgtcgctgccccggcggcgccgacgtatgccagttctttgtcagtcccttcggcaggtcttcgtgggtccttctccttcgccggcgagcagcacccaccaagagaacctttctgcaaggctgcattgatctcgtcttgctgtttctggcccaacacttggtttattgctcaaccttaaccccggacttgttcttctacaggacagcgggtacagcgctagttattgcttcacctcccttatcctggccgcagcaactggaggccgaggcttttacaaggagctggggaagaacgggccgaagctgctatcgaatctgaagctttgcttggcacaccagcactggagagatgtataagaaccaactccaggaacttgctcagaggagctgcttaaactgccgtcctatcctgcatcccggagggaccagatcatgcaccccggttaaggctacagtaaattcaacgtgagatgttcgaagcccatgttttgt

SEQ ID NO: 262872 - DNA, 737 bp, Zea mays
atagatctcttcgagaggaagcccaatcccgttttcgctttcctattccaatggcgcccacccccgtgacgaagcccgccgcgaagaagccggcggaggaggagcccgcggcggagaaggccccggcggggaagaagcccaaggccgagaagcggctccccgcgggcaagtccgccggcaaggagggcggcgacaagaaggggaagaagaaggccaagaagagcgtggagacgtacaagatctacatcttcaaggtgctgaagcaggtgcacccggacatcggcatctcctccaaggccatgtccatcatgaactccttcatcaacgacatcttcgagaagctggccggcgaggccgccaagctcgcgcgctacaacaagaagcccaccatcacgtcccgcgagatccagacctccgtgcgcctcgtgctccccggcgagctcgccaagcacgccgtctctgagggcaccaaggccgtcaccaagttcacctcctcctaggcttgcacgctcgccctttgtaggcatctcttgtgttgatgttccccttgttgtagttatatgttgctggtttctctgtcggcgctgctcgtaactgcgtcatgtaaccctgcaaggacttgtttatttgtgaatcatcaacactttgttgttgatcactcatgttccaaaatctgagtttgacgctcgagcatgcctcatttgttcaaaaaaaaaaaataataaaaaatatataat

SEQ ID NO: 262873 - DNA, 585 bp, Zea mays
ggaattcccgggtgcgacgcacgcgatacgcccactccgttcgcttcaaggtgcctgtagctttgtgcatcccggaccatcggcatctcccgccagaggccatgtggcatggtgagctggcttcatccaacgacatcttctaaaaactggccggcgaggcccgccaagctcgcgcgctacaacaagaagcccaccatcacctcccgcgagatccagacctccgtgcgcctcgtgctccccggcgagctcgccaagcacgccgtctctgagggcaccaaggccgtcaccaagttcacctcctcctaggcttgcacgctcgccctttgtaggcttctcttgtgttgatgttcgccttgtgttgtagttagatgttgctggtttctctgtcggcgctgctctgcttctgtaggaactgcgtcatgtaacccagcaaggacttgtttatttgtgaatcatcaacactttgttgttgatcacttatgttccaaattctgagtttgacgctggagcatgcctcctttgttgctggaaaaaaaaaaaaaaaaaaaaaaaaaaaaaagggcggccgccccgcaatacgaaccg

SEQ ID NO: 262874 - DNA, 1043 bp, Zea mays
cggacgcgtggcggacgcgtgggcgcgcgcgaccgggcgcccggggcattctcgaattccgattcccaatccagcaaaccctaccagccttttgcaaactcagagagggacccgatggcacccaaggcggagaagaagccggcggcgaagaagcccgcagaggaggagcccgcggccccggcggagaaggcccccgctgggaagaagccgaagggggagaagcggctcccggcgggaaaatccgccggcaaggaaggcggtgttgacaagaaggggcggaagaaggccaagaagagcgtggagacgtacaagatctacatcttcaaggtgctgaagcaggtgcacccggacatcggcatctcctccaaggccatgtccatcatgaactccttcatcaacgacatcttcgagaagctcgccggcgaggcggccaagctcgcccgctacaacaagaagcccaccatcacctcccgggagatccagacctccgtccgcctcgttctacccggcgagctcgccaagcacgccgtctcggagggcaccaaggccgtcaccaagttcacctcgtcctaagctcctttcgagtaggtccttaagcgccgtggcgccttttgactgtatggaatgtttgtcatctgaaagttgatctgagcagtgcaatatataattctggcatactattctcgcaatcgttggggggttcagaatgggactgacatcagagtaatatgtggcataccttctgatcctctgtactcgagaggattttgttgtggataagccacttgctgcctttgtttggtgggtaattgcttcgagcataagaaacagcgtatgctgctataaacgtctttttgcaacgcgaaaaaaaaggctaccataggaaaaagaacaacaattaagtgaagtgcacagaagagagaatcaaaggttgcaagattttatcactaaggctatgaagaaccattgcttaagctgatgagaatgaaaactgatcatgctggactagttattaatgctgaagaaagaacgctttccttgac

SEQ ID NO: 262875 - DNA, 901 bp, Zea mays
  unsure (1)..(901): unsure at all n locations
taccggntcggaatgaccgacgcgtcatctcctcgcatttcttcccatccgatccccccttcgcaaccaaaaccccaactcgccccgcatcgatggcgcccaaggccgagaagaaacccgcggcgaagaagccggcggaggaggagcccgcggccgagaaggcgcccgccgggaagaagccgaaggcggagaagcgggtccccgctggcaagtccgctgccaaggaaggcggcgagggcaagaggggcaagaagaagggcaagaagagcgtggagacctacaagatctacatcttcaaggtgctgaagcaggtgcacccggacattggcatctcctccaaggccatgtccatcatgaactccttcattaacgatatcttcgagaagctcgctgctgaggccgccaagctcgcgcgctataacaagaagcctaccatcacctcccgtgagatccagacctccgtgcgcctcgtccttcccggggagctcgccaagcacgccgtctccgagggcaccaaggccgtcaccaagttcacctcggcctaggctgcgcggccgccgcttgcaggattctctcctgtgttcacgtctcttgctgtagttaggtgctgctgcctgctggcttctatgtatgttatctatctgtctgtagcaactgtgttatctgataggaccgtaatggtgcttattcaacccagctatatgtttctatgtgaatcatctctctatcggttgttgagtaactttatattgtgatgaagatgtgaatgtgatttataaaatgcgtcagtttctacggtaaggttagctgctggccatcaaggtccttgctaggtgtcaggtgcatacatcgttggattggaatgtagtcttgtttttattacaatcaaactgaatcagaa

SEQ ID NO: 262876 - DNA, 748 bp, Zea mays
cgcgacctctcgtgcgcccacgcgtccgcccacgcgtccgcccacgcgtccggaaatcttccgttctcaaaccaacctaggcaattcgccgcagcctctcaccctcgcgagtcccgacctcccgcagccgccgcacagatggcacccaaggcggagaagaagccggcggccaagaagcccgcggaggaggagcccgcgacagagaaggtggagaaggctccggcggggaagaagcccaaggccgagaagcgcctcccggcgggcaagtccaaggagggcggcgagggcaagaaggggaaaaagaaggcgaagaagtccgtggagacctacaagatctacatcttcaaggtgctgaagcaggtgcaccccgacatcggcatctcgtccaaggccatgtccatcatgaactccttcatcaacgacatcttcgagaagctcgcggccgagtccgccaagctggcgcgctacaacaagaagcccaccatcacctcccgcgagatccagacctcggtgcgcctcgtcctccccggcgagctcgccaagcacgccgtctccgagggcactaaggccgttacgaagttcacctcgtcttaggatccttgtaatggtcatgtgggcgtcggcggtaggcgtggctcagtttatgtgatactgctagcgatggatgatgatgatctgcgtgtaattgaattaaagaattgtgctgatctttttacaaaaacaaagaaaaaaaaaaaaaaaaaaagaa

SEQ ID NO: 262877 - DNA, 770 bp, Zea mays
tcgtaccggtctcggaattcccggggggacgcacgcgtgcgcccacgcgtccgagcgaatccctcgcatcgcattcgcagcctttgctgcatcacaccaccgcgaaaccccagcagccgcatcgatggcgcccaaggcggagaagaagccggctgcgaagaagccagcggaggaggagcccgctgccgcgaaggccccggcggggaagaagcccaaggccgagaagcgcctcccggcggccaagtcgtccggcaaagaaggcggcgacaagaagggtaagaagaaggcgaagaagtcggtggagacctacaagatctacatcttcaaggtgctgaagcaggtccaccccgacatcggcatctcttccaaggccatgtccatcatgaactccttcatcaacgacatcttcgagaagctcgccggcgaggctgccaagcttgcgcgctacaacaagaagcccaccatcacctctcgggagattcaaacctctgtccgccttgtccttcccggcgagctcgccaagcacgcggtctccgagggcaccaaggccgtcactaagttcacatcatcttagatttgaggtagtagctattgggtggcgttggtagttgtgtctcaatttgtctgctactaatagtggtaggagtatccatgtgtagttgggttgcggtaagaattgcagtgaaactggcaatatgtttgaaattgctttttgtggatgtggaatagttgaaaaaaaaaaatgaagaaaaaaaaaaaagggggggccc

SEQ ID NO: 262878 - DNA, 794 bp, Zea mays
ccaagaagcaagaaaactagaaaaggctcctcccgaccgcaacgcccctcatctccctcgaccccgacatccccgacccgatggcgcccaaggcggagaagaagccagcggagaagaagccggcggccgaggagaaggcggagaagacgaccgcagggaagaagcccaaggccgagaagcggctgcccgcgtccaagtcctccggcaaggagggcggcgagaagaaggggaagaagaaggccaagaagagcgtggagacctacaagatctacatcttcaaggtgctgaagcaggtgcaccccgacatcggcatatcctccaaggccatgtccatcatgaactccttcatcaacgacatctttgagaagctggccggcgaggccgccaagctggcgcggtacaacaagaagcccaccatcacgtcccgcgagatccagacctccgtgcgcctagtcctccccggagagctcgccaagcacgccgtctccgagggaaccaaggccgtcaccaagttcaccagcaactgagcgcgctgcgggatccgcggatctgttagaagggttctttgctgtgtcctttccccagtcccccaccctacccgcctagtagctagcttgcctgctctataaatccggcgcgccggattgtaatggtcctcttagatttgatgtccctgttgtggaatatagttgtatctctccgcttgctattaaaaaaaaaaaaaaaaaaaaaggaaatctggtaattttgccgggagataactaggatcatcacaaattcgcgttgacaacgcg

SEQ ID NO: 262879 - DNA, 918 bp, Zea mays
cccacgcgtccgcccacgcgtccgcccacgcgtccgtccgtccccaaatcctcctagcgaattcaccacagcttctcaccaccgctaccttcgatggcacccaaggcggacaagaagccggcggcgaagaagcctgcagaggaggagcccgcgacagagaaggcggagaaggctccggcggggaagaagcccaaggccgagaagcgcctcccggcgggcaagtccgccggtaaggagggcggcgagggcaagaaggggaaaaagaaagcgaagaagtccgtggagacctacaagatctacatcttcaaggtgctgaagcaggtgcaccccgacatcggcatctcgtccaaggccatgtccatcatgaactccttcatcaacgacatcttcgagaagctcgcggccgagtccgccaagctggcgcgctataacaagaagcccaccgtcacctcccgcgagatccagacctcggtgcgcctcgtcctccccggtgagcttgccaagcacgccgtctccgagggcaccaaggccgtcaccaagttcacttcttcttaggctcatagtactaggctgggtggtgttggtagacgtggctcaatttatctggtaggggtagtgatggatgatatgatctgcgtctatttgagctgttaagactgatgaacattgttccacgtcacgttgtgtttgatgggcattgttccagatcacgttgttaagactgcagaactgtgtctgacatggaacaagtatgatacttgaaatttctgtgagtgcattgaaacgtgaaatatgcagcccttgcaaccacaatctgaaatacaactgcgtgttcatgatcaagttcaggatgcaggcaaattttgtatcctatcattagtgctaaaaaaaaaaaaaaaggcgcggcggcaccggtaa

SEQ ID NO: 262880 - DNA, 934 bp, Zea mays
  unsure (1)..(934): unsure at all n locations
aaaatggaattcaattctaacgaaacaaacggggccttatagattatgggatgctacttaaaacatgcacggtaaggtactgcagacacaatacagttactttcttacataaaagacatcaaccgagcccagaaagcaaacgcagcggcaactaccaccgcggcaacacacctaaccgtactactattgtactcctgcaagaagaggagacgagtgcacgtcgcatcgctcgcctaggagctggtgaacttggtgacggctttggtgccctcggagacggcgtgcttggcgagctcgccggggaggacgaggcgaacggaggtctggatctcgcgggacgtaatggtaggcttcttgttgtaccgcgccagcttggccgcctccgccgccagcttctcgaagatgtcgttgatgaaggagttcatgatggacatggccttggacgagatgccaatgtccgggtgcacctgcttcaaggccatgtccatcatgaactccttcattaacgatatcttcgagaagctcgctgctgaggccgccaagctcgcgcgctataacaagaagcctagcatcacctcccgtgagatccgcacctccgtgcgcctcgtcctccccggcgagctcgccaagcacgccgtctccgagggcaccaaggccgtcaccaagttcacctcctcctaggcttgcacgctcgccctttgtaggcttctcttgtgttgatgttcgccttgtgttgtagttagatgttgctggtttctctgtcggcgctgctctgcttctgtaggaactgcgtcatgtaacccagcaaggacttgtttatttgtgaatcatcaacactttgttgttgatcacttatgttccaaattctaagtttgacgctggagcaaaaaaaaaaaaaaaaaanaaaagggcggccgcccgggaatccggccgg

SEQ ID NO: 262881 - DNA, 701 bp, Zea mays
  unsure (1)..(701): unsure at all n locations
ggcggcgagaagaaggggaagaagaaggccaagaagagcgtggagacctacaaaatctacatcttcaaggtcctgaagcaggtgcaccccgacatcggcatctcctccaaggccatgtccatcatgaactccttcatcaacgacatcttcgagaagctcgccggcgaggccgctaagctcgcccggtacaacaagaagcccaccatcacctcccgcgagatccagacctccgtgcgcctcgtcctcccaggagagctcgccaaacacgccgtctccgagggaaccaaggccgtcaccaagttcaccagcaattgagcagcctgcagcgtccacggatttgttaggtctccccttcttacaagggttcttcgtcgtgtcctctacccctcccctccccgcctatgtatgtgctgtgaaatcgttgatgttctcgtcgggtgaacaaaggccagtagctagcttgcctgcttcataaatcgtgccggattgtaatgggcctcttagatttgacgcccctgttttggaatatagttgtatccgtgccttccctgcttgcttaaaaaaaaaaaaaaaaaaaaaaaaaaaaaaaaaaaaaaaaaagaaaaaaaaaaaaaaaaaaaaaaaaaaaaaaataacaaaaaaaaaaaaaaaaaaagaaaaaaaaaaaanaaaaaaaaaaaaaaaaaggggggcccctttaa

SEQ ID NO: 262882 - DNA, 974 bp, Zea mays
ttgtacgcgtgggcggacgcgtgggctcgtctgctcgcatttcctcccaatccatcccgcctccaaacccgaactccaagtcgccccgcatcgatggcgcccaaggccgagaagaagcccgcggcgaagaagccggcggaggaggagcccgctgccgagaaggcgccggccgggaagaagcccaaggcggagaagcgtgtcccagcaggcaagtccgccggcaaggagggcggcgagggaaagaggggccggaagaagggcaagaagagcgtggagacctacaagatctacatcttcaaggtgctgaagcaggtgcacccggacatcggcatctcctctaaggccatgtccatcatgaactccttcatcaacgacatcttcgagaagctcgccgccgaggccgccaagctcgcgcggtacaacaagaagcccaccatcacctcccgtgagatccagacctccgtgcgcctcgtcctccccggggagctcgccaagcacgccgtctccgagggcaccaaggccgtcaccaagttcacctcgtcctaggctgcgtggcctccgcttgcaggcttccctcgtatgttcgcgtgtcttgctgtagttaggtgctgctgtgtctggtctcctccggtagcaactgttatctgatggaacagtaacaatgcttattgaatccagctagttgcttatttgtggatcctctctctttgttgttggccacctttatctcgtgatgtttgtgtgcatgtgaatactctgaatgtgcatttcgaagtttgagaagttacgacgcgttaaaaaaaaagcgtgcaccacagcccgtcccgagcgctgcacgacctcacggggatcaagaagcactactgccagaagcacagccagaagaaggtcaagtgctacaggtgcaacatgcgctacgacgtttagtacgacttgaatgcgcacgtcaagacctgcagcgaccgcaagtatct

SEQ ID NO: 262883 - DNA, 466 bp, Zea mays
tgtccatcatgaactccttcatcaacgacatcttcgagaagctggcggcggaggcggccaagctggcgcggtacaacaagaagcctaccattacgtcccgcgagatccagacctccgtccgcctcgtcctccccggcgagctcgccaagcacgccgtctccgagggcaccaaagccgtcaccaagttcactagctcctaggcgagcgatgcgacgtgcactcgtctcctcttcttgcagtagtgcaatagtagtacggttaggtgtgttgccgtggtggtagttgccgctgtgtttgctttctgggctgggctcggttgatgtgttttatgtaagaaagtaactgtattgtgtctgcagtaccttaccatgcatgttttaagtagcatcccataaactataagggatatgttttatgttgttcaaaaaaaaaaaaaaaaagggcggccgctcgcgatctagaacta

SEQ ID NO: 262884 - DNA, 516 bp, Zea mays
aagatctacatcttcaaggtgctcaagcaggtgcaccccgacatcggcatctcgtccaaggccatgtccatcatgaattccttcatcaacgacatcttcgagaagctcgccgcggaggccgccaagctcgcccgctacaacaagaagcccaccatcacctcccgcgagatccagacctccgtccgcctcgtcctacccggcgagctcgccaagcacgccgtctctgaaggcacaaaggcggtcaccaagttcacttcgtcttagattggttgccttccctctcgtttgtactggtgtctggtagtagatctcatctagttgggggtgctgttgctagtcggtcgtgggtccctttggtatgattggccctgttcaatgggtttgcaagtgattagtttgtacatggttgtagtagatctcgttccagctgtgattcttattactgctatgctatagttgtagtgatctcgttcccatttcttgatgcagtcctatcaactatatggttgtttagtt

SEQ ID NO: 262885 - DNA, 509 bp, Zea mays
aggtcctgaagcaggtgcaccccgacatcggcatctcctccgaggccatgtgcatcaggaactccttcatcaacgacatcttcgagaagctcgccgcggaggccgccaagctcgcccggtacaacaagaagcccaccatcacctcccgcgagatccagacctccgtccgcctcgtcctccccggcgagctcgccaagcacgccgtctcggagggtaccaaggccgtcaccaagttcacctcgtcttagcccccttgttgtaggcgtcgttgttgtctgcttctcaagcaagcactgtcatgtgccgcttctcatggcagtagtggtggttggctggtgtgtgtaagtggtgcagtggcttttgcctgtgttatgaatttagtcatggtggtaatgtattgctatggttatttgaatgttgatcagtgatcttatgtccgcctaaaaaaaaaaaaaagggcggcagaaaaaaaaaaaaaaaaaaaacaaaaaaagaagcggggggaggcc

SEQ ID NO: 262886 - DNA, 350 bp, Zea mays
cgcctcgtgctccccggcgagctcgccaagcacgccgtctctgagggcaccaagaccgtcaccaagttcacctcctcctaggcttgcacgctcgccctttgtaggcttctcttgtgttgatgttcgccttgtgttgtagttagatgttgctggtgtctctgtcggcgctgctctgcttctgtaggaactgcgtcatgtaacctagcaaggacttgtttatgtgtgaatcatcaacactttgttgttgatcacttatgttccagattctgagtttgacgccggagcaggcctcatggggcgctggaatttgagctggtggtttgcataaacagatgaaatttatttcggtt

SEQ ID NO: 262887 - DNA, 432 bp, Zea mays
cccacgcgtccgcccacgcgtccgcccacgcgtccgcccacgcgtccgcatcacgtcccgcgagatccagacctccgtgcgcctagtcctccccggagagctcgccaagcacgccgtctccgagggaaccaaggccgtcaccaagttcaccagcaactgagcgcgctgcgggatccgcggatctgctagaagggttctttgctgtgtcctttccccagtcccccaccctacccgcctagtagctagcttgcctgctctataaatccggcgcgccggattgtgatggtcctcttagatttgatgcccctgttgtggaatataggcgtatctctccgcttgctatttttctcattctttaggaacttggaaatttagcatttttgccgggagataactgggatcatcacaaattcgcgttgacaacgcgacctc

SEQ ID NO: 262888 - DNA, 411 bp, Zea mays
gctacttaaaacatgcatggtaaggtactgcagacacaatacagttactttcttacataaaacacttaaacgagcccagcccagaaagcaaacacagcggcgagctcgccaagcacgccgtctccgagggcaccaaagccgtcaccaagttcactagttcctaggcgagcaatgcgacgtgcactcgtctcctcttcttgcagtagtgcaatagtagtacggttaggtgtgttgccgtggtggtagttgccgctgtgtttgctttctgggctgggctcggtttatgtgttttatgtggaaaagaagctaaattgtgtttgcagtcctcctctttgcttgttttgtgtagcaaagtgtaaatctatgtggaaaatgttttatgttaaaaaaaaaaaaaaagggcggccgccc

SEQ ID NO: 262889 - DNA, 475 bp, Zea mays
agcgggcgaaataaatgaaaaatctgatgataaatatgacagagatcctagggaaaaattagatcggggtgaaaggcgtcgtggggaagatgccattgagagatcaacagatagattgtcggacaggagagaacgttccattgaaaggatgcaagagagaggtacagataaagcccttgaaaaaggtagagaggatagaaataaggatgagaggaataaagttaaatatgctgaaccttcggtggaccggacacattcttctgatgaacgattccgagggcaaagtttgccaccggccccacctattcccgcaagttttgtaccccaatcagttggcgccaaccgacgtgaagaagatgctgaccgaaagggtgggagctccaggcatgttcaaaggtcatcttctaagcacgatgagaaagaaaggaagcagtcagaggagaatatttgtcattttaggatgatgggaaacaca

SEQ ID NO: 262890 - DNA, 588 bp, Zea mays
aaaacaacaaggtggggggttctctgtgggttgctctgcttgttatctcacacttgtggacttgttctgcaggtgcaacatgcatgcattcagttcatctttgttgaaactgagctattctatgttttatttttgttatgcattagagtgcacgcgtccggcctggagggctgatattcatgacatgttatctaatagaaacactgtcctgtagtgtaatcatgttatattttctgttctgaacaaattcaaagaaatctcatggagacaaactttgatagtacaagttggaggtctcgaattttaaggtaatattgtgctagtattgtcatttgcagtattgatctttgttggtgcaacctaacattagattgatgttaatgagctgctgtagacgtttgatttaatctgcatgtgctatttttgtggagtttgatatttatgtgcttacatttcgtgacttagcaataccggttgtatgctgagatgtttgaaaagctattacgttttctgtgaacagttgtgtagtttttagttggatgacgtcgtgcatgccgtggaaagtgtgggtgtggcttttggtggaaa

SEQ ID NO: 262891 - DNA, 1673 bp, Zea mays
cgagaaagagatcgttgtacagttcattgattcttctttgccgagtgttacattaggtttgcaagctttcccgagtgctttgcgccacccaggagggatgtacaatacccatagtaaattgacgtcacattataaaccagttcagtaatgataacagaagtttcaacaccttaacagcaacatactgcagccgagagccaagtgcctaaacagcataacataaatctatcgccagtaacaaactcggcaataactagcagcaaccataactcctcaacctttcatagctttcgaaataaaaaaaaaggtaatattttcgagaaccataattcgtcacattcggccaatctccaaatcaagagcttattcttcctcctcagcctcctcgagccatttgacaaacggctccagagctttcacaaaagattgcctgcccttcgggtttgaacctttacggaaccaaaggactatagtatcttcagctaggacatcttggtcatacagtgttcttatgatttccggaaacagcttcatcagcttagcatcctcatagcactgtgtctgaactttgtgtataagttccagttcgagtctgccactcgtgcaaaaagcattcaaaagctcagtccaagctttcacctgcctaagtgctgcattggaattttgctgctggttcttcccagaccactgaacagcctccatgagcacatcccacaacatgcgaataacctctaaatcaggaaatttagcatccttaacttgctgcttgacagtctcaatcacttcagatattgcagcctcatcatttatcatagcagtcagtgttgactttatctccttaagtttaacctcaaacatcttcttttcgttgtactcaacaaggctagtcagaccttctttggtgaaatgctcagataaagcctcagaagatctcttagctgatgggaagaagtccaacagattgtcctccattttgcctttcttcaaaagtgcaatcaaatcatccaagctgttttcctcaaggtactccttgaaaaactcagtaatgaatgaaagtactatccctttggcaacaagattatccttgagcaatggctggaacacagtctcaggaggaagccctgatagcttctgagaaaatgcaagggctgtgaatatggcgagtttcttcctctcattttcctcaaagaactccaaggattgcaggaatttacgcataacattttcaagattctttattaaaaaaggcctcctgcgcaatgttttctggatatagagtacgaaaggcaaaattgcttcacgctgtgacgcacaatctaacaccgaataagggtggcggtctccttcttcaggttttacagtgcctggctgagtgcgccctccaacaaaaaccacctcaaaaaaggtgtcaccgtaacgtgagaagttgaggtctgaagactcgatacttttggcgacaagttccaggtctccaccattatccaaatagatctgaacaattgcatcagagaatgatgcagggtccaaaggagctgcaatattccgcttgcgggtcttaatccgcgtgcctccaagagtgggcttctccttcgagctcataaacaaagatctggcgcggagaggaagcgggggtcgcttgcttggggcttctccggggagaagataagtacatg

SEQ ID NO: 262892 - DNA, 895 bp, Zea mays
gtaaggaatgggcgggccgaccgaccagagaagactccatcctgcagctcatacgtatatcacttgccatgccagcctagcttcttccgtgtctttctttctcaataaatacatgccactcacatggtgctcctccatcttccaagtcaccaacgcaaattgcaccaagaaatccatcgagaggccgtcgacaggggaattaatggcgtcgtcgtctagcagcagccaccgccgcctcatcctcgcagccgccgtcctgctctccgtgctcgcggctgccagcgccagcgccgggacctcctgcgtgccggggtgggccatcccgcacaacccgctcccgagctgccgctggtacgtgaccagccggacctgcggcatcgggccgcgcctcccgtggccggagctgaagaggagatgctgccgggagctggcggacatcccggcgtactgccggtgcacggcgctgagcatcctcatggacggcgcgatcccgccgggcccggacgcgcagctggagggccgcctagaggacctgccgggctgcccgcgggaggtgcagaggggattcgccgccaccctcgtcacggaggccgagtgcaacctggccaccatcagcggcgtcgccgaatgcccctggattctcggcggcggaacgatgccctccaagtaactgcgaagagcatagtgcatgaggaatgagcttgtagctagctcatatgtctgaataataagcacagcaagaagatgaatgcatttctcggatcgttcatccggaacaataattaaaggggatccggatttgttcttgtgatataattaacgattcctgctatactcggaagcagctaggctcgtgcccatccaatgcatgcatagatctgacctaccataaaaa

SEQ ID NO: 262893 - DNA, 2152 bp, Zea mays
aagctccaactttctccccgaagaagccccaagcaagcgacactcttgtcctctccgcgccagatcgttgtttatgagctcgaaggagaagcccactcttggaggcacgcggattaagacccgcaagcggaacattgcagctcctttggaccctgcatcattctctgatgcaattgtccagatttatctggataatggtggagatctggaactcgtcgccaaaagtattgagtcttccgacctcaacttctcacgttacggtgacaccttttttgaggtggtttttgttggaggacgcactcagcctggcactgtaaaacctgaagaaggagaccgccacccttattctatgttagattgtgtggcacagcgtgaaacaattttgcctttcgtactctatatccagaaaacattgcgcaggaggcctttcttaataaaaaatcttgaaaatgttatgcgcaaattcctccaatccttggagttctttgaggaaaatgagaggaagaaactcgccatattcacagcccttgcattttctcaaaagctgtcagggcttcctccggagacagtgttccagccattgctcaaggataatctggttgccaaagggatagtactttcattcataactgagtttttcaaggagtacctgaaggaaaacaccttggatgatttgattgcgcttttgaagaaaggaaaaatggaggacaatctgttggacttttttccatcagctaagagatcctctgaggctttatctgagcatttcatcaaagaaggtctgactagccttgttgagtacaatgaaaagaagatgtttgaagttaaacttaaagagataaagtcaacactgaccactatgatcaatgatgaggctgcaatacctgaagtgattgagactgtcaaacagcaagttaaggatgctaaatttcctgatctagaggtcattcgcatgttgtgggatgtgctcatggaggctgttcagtggtctgggaagaaccagcaacagaattctaatgcagcacttcggcaggtgaaagcatgggctgagcttttgaatgctttttgcacgagtggcagactcgaactggaacttatatacaaagtacagacacagtgctatgaggatgctaagctgatgaagctgtttcctgaaatcataagaacactgtatgaccaagatgtcctagctgaagatactgtcctgctttggttccgtaaaggttcaaaccagaagggcaggcaatctttcgtgaaagctctggagccgtttgtcaaatggctcgaggaggctgaggaggaagaataagtttttgatttggagaacggccgaatgctggcctaagtgttactttatatttctgaagttagaagtttgtggaggaattattgctgctgcctcttactgccgagaactttatgttatgatgtttagccacatggatcccggctgcagagtgctataatatgttgctgttaaaactttgtgtcgagcatttgttgaaacttttgttatcattactgaaaggatttataatgggacgtcagtttactgtcggtattgtacaattactggattattcataagctgcagaatgctacaaaaccccaaaaaaagggcggccgctcgcgatctagaaccccacgcgtccgcccacgcgtccgcccacgcgttcgcggacgcgtggggcccggccggcggggtcgggccgcgcctacccgtggccggagctgaagaggagatgctgccgggagctggcggacatcccggcgtactgccggtgcacggcgctgagcatcctcatggacggcgcgatcccgccgggcccggacgcgcagctggagggccgcctagaggacctgccgggctgcccgcgggaggtgcacaggggattcgccgccaccctcgtcacggaggccgagtgcaacctggccaccatcagcggcgtcgccgaatgcccctggattctcggcggcggaacgatgccctccaagtaactgcgaagagcatagtgcatgaggaatgagcttgtacctagctcatatgtctgaatactaagcacagcaagaagatgaatgcatttctcggatcgttccaaaaaaaaaaaaaaaaaaaaaaaaaaagggcggccgcccgggaattcagtccggt

SEQ ID NO: 262894 - DNA, 618 bp, Zea mays
gcggccgccctttttttttttttttttttttttttttttggagggcccgacataatgctctcgagaaagagatcgttgtacaggtcattgattcttctttgccgagtgttacattaggtttgcaagctttcccgagtgctaattgcaagctttcccgagtgctttgcgccacccagtagtgatgtacaatacccatagtaaattgacgtcacattataaaccagttcagtaatgataacagaagtttcaacaccttaacagcaacatactgcagccgagagccaagtgcctaaacagcataacataaatctatcgccagtaacaaactcggcaataactagcagcaaccataactcctcaacctttcatagctttcgaaataagaaaaggtaatattttcgagaaccataattcgtcacattcggccaatctccaaatcaagagcttattcttcctcctcagcctcctcgagccatttgacaaacggctccagagctttcacaaaagtattgcttgcccttcggtttttatcaaccacgagtcctgagggtgagagtatcatcacctagacgatgatgttcgtccaggaatctgcccacgcgtccgcccacgcgtccg

SEQ ID NO: 262895 - DNA, 494 bp, Zea mays
gccggacgctggcggcgcttttgcttgcttacatcctcatgacgcgggatcgctgcgtccccgaccccacttgaaggcccgctaaaagaacttgcgggcttgccgccggaagtgcagagggattcgccgtcacccttgtcacggagccgagtgcaaccttggcaccatcagcggcgtcgccgaatgcccctggattctcggcggcggaacgatgccctccaagtaactgcgaagagcatagtgcatgaggaatgagcttgtagctagctcatatgtctgaataataagcacagcaagaagatgaatgcatttctcggatcgttcatccggaacaataattaaaggggatccggatttgttcttgtgaaaaaaaaaaaaaaaaaaaaaaaaaaaaaaaaaaaaaaaaaaaaaaaaaaaattaaaaaaaaaataaaaaaaaaaaaaataataaaataaaaaataataaaaaaaatataatataaattatataattt

SEQ ID NO: 262896 - DNA, 1339 bp, Zea mays
gcttgccagagtgctctccctgctgaggagtgcagatgcaacgtgtgcgctacaggaatggtttttgcaacctgtgcatgtgtgtcatctgcaacaagtttgatttgaggtcaatacatgccgttggattggctgtgatttttgctctcactggacacatacagattgtgcaattcacaatggccagatcggaatgggacaatcagtgaaaagcagcattggtcatgctgaaatgctttttaggtgccgagcttgccagaggacctcagagctgctgggttgggttaaggatgtcttccaacaatgcgctcctggttgggatagggatgctttgttacgcgagcttgagttcgtttgtaagatattccgtttaagtgaggatgcaaaagggagagtgttgttcaggaaatgtctagatctgattgaaaggctgaggaacactccagctgattccatcaatcctaggatgatactacaagcactccaagagcttgagatggactcccccaagatctctgaaaatgaagatgttgggcatctgatcacaccccaggaagcctgcaaccgcatagcagaggtagtccaagaggccgtgagaaagatggagctcgtggctgaagaaaagatgcgactttacaagaaggctcgcctcgccgtggaggcctgcgaccgagagctggaggagaaggttagggaagcccaggagctgaaggcagagcgtcagcgcaagaagcagcaggtggaggagctggagagcatcgtgcggttgaagcaggcggaagcggagatgttccagctgaaggcgaacgaggcccggcaggaggcggagcgtctgcagagcattgcgctcaccaagtccaagacagccgagcaggactatgccagcatgtacctaaagcggcgcctggaggaggcggaggcagagaagcagttcctcttcgagaagatcaagctgcaggagaaccagaggccaacggtcggcgtgggcagcagcagcggtgcgggaggggactccacgccgacgatgatgctatccaagattcaggatctgctcaagaacgtccgcagcatgccagcaaagtcggagggtcactagtcggagtaagagctttcgctgctgacactttcggtaattatgtgtgatctgctgacttgttcgagcagaggtgtaacgaaatcgtgtggtgctgtgagaaattcgaatcccttcgcgttactgtcggtactcgctaggcgtgctgatgtattaactctgttgtcgcaggtgatcatagtgtgcgtgaaacaatgttaaagttacatcggtagacacgaaacaaccaacagttgtggccccccc

SEQ ID NO: 262897 - DNA, 486 bp, Zea mays
cccacgcgtccggcgccccgtagtgcagtgcagtgcagcagtgtgctacctcctcagtcctctcactccatcacaaacgctagtcttcctctaaagctcggagcgagtctcagaagcgatggcgtccaagaggctgctgctggcggcgctgtgcgtggtggcggcggcgctgctcgccgtgcggtcggaggcccacggcctggaggacttcgcaagcagcgacgcgacgccggagatgcagaccttcttcaagcccgaggccgcggcgctcccggaggccctggacgcgtcctccatgcccgccgccaccatggccgcgaagccggaggccacgtcgatcccgaccaccaccaccggcaccacggcggcggcggcgggcacctccgccgcggcaggcactactgctgcgtcgccgccgcgcaggtccgtgtccgtggccgccggcgtggcctgcggcgtggctgccgtggccgtggtcggcatcgc

SEQ ID NO: 262898 - DNA, 511 bp, Zea mays
  unsure (1)..(511): unsure at all n locations
cccacgcgtccgtggagccgagagcgagcgtgtataaaaggccggcgcttggtcctccgaagcctgaaccttgaagcgccccgtagtgcagtgcagtgcagcagtgtgctaccctcctcagtcctctcactccatcacaaacgctagtcttcctctaaagagatctttggcaacgaccgacagctcggagcgagtctcagaagcgatggcgtcaaagaggctgctgctggcggcgctgtgcgtggtggcggcggcgctgctcgccgtgcggtcggagtcccacggcctggaggacttcgcaagcagcgacgcgacgccggagatgcagaccttcttcaagcccgaggccgcggcgctcccggaggccctggacgcgtcctccatgcccgccgccaccatggccgcgaagccggaggccacgtcgatcccgaccaccaccaccggcaccacgccggcggcggcggcgggcacctccgccgcggcaggcactactgctgcgtcgccgncgcgc

SEQ ID NO: 262899 - DNA, 778 bp, Zea mays
gcgcggtacccggggggcggggagtcctcttgtccgcaccatcgcctccgctccgattcgccgaatcggcgctggcgggcgagacgtggatctcgacggaggagactccgaccatcgctccatggaggccgcggactctgaatccgtcatctccaccttcacctgtccgcactgtcagcgggaggttccatcttcaaacattgcattgcacagcgcgcactgcgctcggaaccttcagaagtgcgaacattgcggagatatggttgccaggaagcttatggatgaacactacgatgaaaaccatgctccgatgaattgctcactttgcaaacacacagtagaacgcgagctatgggatcttcatacaggcatacaatgcccacaaaggatgctcgcgtgccaatactgtcagtttgaactgcctgcagttgatctttttgaacatcaggatctgtgtggaaatcggacagaatattgtcaaagttgcaggaagtatatcagacttcgtgaatggattggacatgaactccagttccatacgattttgaatgctgcatcagaactttcaagtgacaggactcgagcagcagcagagcagccagtaccaaagccagcccgacctgctactggttcgcttcacaaacaactgctcttgacggttgcagtaactggagttgcagttttgattggatcaatactgtaccaaggtaaggggaagtagttcccgggatagtaaattcacgccccttgatgtgtaaattccctcataaccaaagag

SEQ ID NO: 262900 - DNA, 1199 bp, Zea mays
cattcccccgcgcggcgacgctagtcgcctccgatggcagcccggcgcgggccccacgtcatcaagcttcacgatcccaacccgcccctcctcggacgggcgccgggggccgcgccggccgccgtccccgcgtcctcgcgcgatgagggcctcctcgcgcagcacctgcgcgcctccgcggcgcacccggccttcgccctcatcgaggagcgcctcgccgcccgggaccaggatatccaggagctcctcgtcgacaaccagcggttcgctgccacccacgtcgcactccagcagcagctcatagcggcgcaacacgagctccgggcggtctccgtcgccgccaccagggcgcgcgccgagcgggagggcgaggtgcgctccctggccgaccaggcggcgcatatggaggctgaggcgcgggccgtcgccgctgcgcgcgcggaggtcgaccaggttcacgccgacgtccaggtgctcgtcgcggcgcgcactgaccttgtcaaccggctccagggcctacgggagaagctcgcgcacaagaaggctgaggcgagtaagaccgattccgtccgtgcccagattgaaaccatgcgccgggagatccagaagggcagagctgcggttgattttgaaaagaaggcacactctgataaccttgaacaaagtaaagcaatggagaaaaatatgattgctgtggctagtgagattgagaggcttcgaggagagcttgcaaatgctgaaaaaggggccactgctgtcaacccagcagcagctgttggtaactctgggtatgctgcgccttatggcaattctgcgtcaacatatactggaatgtatggcaatcctgatgcaacgtataccgcgcaggcttatcctgacgcttatagcactaatcagggtcacatgcacaccgtcgccaatccgcattacatgagtcaacctgttccctatggacaatacgagagccagcacaccaatgttcaaagatgactggctgcaagagatagctttgactcgcctgccatctcattgtaacaggatagtcgcagaatccaccatgttacattgaaagtgctgaagtcctcatgttcatgatttttttttatttatttggctaatttgttccagaatcgatgggttgaattttggagcaaaaacctctcgcgcctctccatttactaccctgatgattctcagtt

SEQ ID NO: 262901 - DNA, 786 bp, Zea mays
cccacgcgtccggattttgaaaagaaggcacactctgataacctcgaacaaagtaaagcaatggagaaaaatatgattgctgtggctagtgagattgagaggcttcgaggagagcttgcaaatgctgaaaaaggggccactgctgtcaacccagcagcagctgttggtaactctgggtatgttgcggcttatggcaattctgagccaacatatactgcaatgtatggcaatcctgatgcaacatatactgcacaggcctatcctgatgcttatagcactaatcaggctcacatgcacgctggtgccagttcctattacacgagtcaaccattttcctatggacaatacgagagccagcacaccaatatccaaagatgactgccggcacaagatagctttgactcgtctgccatctcattctcgctgtaaaaggatagtcgcagaatccaccggattaagcatgctagaaaaatctgttgcatcggagcgctggaactcctcgtggtcatgtttgcttttcttttctggctaatttgttccagaatggatgggtcgaattttggagcaaaaatctttctggcttctccatgtactaccataacgatttgtcagttaattctgcagattggtgtggtgttattcagggccgactatgatgcctctagccatttgtggacatacgtataaatgaactaggttagtgcccgtgcgtttcaacggaaccgtataataactcgataacttatgtacatatgtgtgttatattgttatgagaaactgtttcac

SEQ ID NO: 262902 - DNA, 546 bp, Zea mays
gcgccgccagtcgcgccgtctccgatggccgcgcggcgcgggccccacgtcatcaagcggcacgatcccaacccgcccctcctcggccgggcgccggggaccgtaccggccggcatccccgcgccgtcgcgcgatgagggcatcctcgcgcagcaccctcgcgccgccccctcgagcgcatccgcctcgcacccggccttcgcccttatcgaggagcgcctcgtagcccgggaccaggacatccaggagctcctcgtcgacaaccagcggttcgccgccacgcacgtcgcgcttcagcagcagcttatcgcggcgcagcacgagctccgggcggtctccgtcgctgccaccagggcgcgcgccgagcgggaggtcgaggtgcgagcgctggccgaccaggcgggccacatagaggccgaggcgcgggccgtcgccgctgcgcgcgcggaggtcgaccaggttcacgccgacgtccaggtgctcgtcgcggcgcgcactgaccttgtcaaccggctccagggcctacgggagaagctcgcgcacaag

SEQ ID NO: 262903 - DNA, 711 bp, Zea mays
cccacgcttccgagcacaccatgtgatgcgggaggagcctgctgttccgcctctcatccccctacttcttccaagatgcaatcatgctgccccaagctcctcgggccctcggccgccatgattgcctcaccgcctctcaagagtcgcctccacctacttccaagaggaagaggccggagaagctatagtccgtgaagaaatcaagcggaggggcggcggtgtaggaggggccggcggaggagagagagggccgggggaggtgacagaaagctagagagagaggcagagagagatgcatgatggagcatgatgatggcgtggttgatctcttcgatctagcacttctatcattcgagtcaagaagccatcatcagatcggtgcagtcctccctcctcctcctcctcctcctccttccagctcctctttatcagcttctctgtaacgctgcgccgccatggctttgggggaatcaagcgccttggtccgaagaaatccgtcttcttttcctagctaggatctacgtacttgtgcaagagtatgtcatgcatgctacgctatatgttattcctacatgttcttggtcgatctgtcgctacatatggtttgtgcagacatcaatactcgtctgtctttgattgatttgttttgacaccactctttgatccggagtttggttcatgtaatactatttcattagagatgtggatttc

SEQ ID NO: 262904 - DNA, 296 bp, Zea mays
cgagcctcttctgcctctcatccccctacttccaagatgcaatcatgctgccccagactcctcgggcccctcggtcaccatgattgcctcaccgcctctcaggagtcgcctccacctacttccaagaggaagaggccggagaagctatagtccatgaggaaattaagcggaggggcggcggccggtgtacgcggggccgcgaggaggaggagagagaaggggaggtggcagaaaaagctagagagagagagagacagagatgcatggtgcatggcatgatgatggcgtggttgatc

SEQ ID NO: 262905 - DNA, 1132 bp, Zea mays
ccgaccccgaagaccacttgccccctccaggccgaggccgccgccgccaactactgacacagtgacacgcaccaatgagtcaatgaccaacccggcggccggccacgaacgataacacgccggcccgcctcgccacgctcccaccctcctgcctccgcgcgccacgaccagccgccccagcagcagatgtcgcctccgtccgtcctgctcctccactcccgcatcccgcttcagccccgccccttcaggatgaactcccgggcagctcccgagcagggtcgtcgtctgctccgtcgcgtctaccgaggggttcatctccgcagcgccgatcctcctccccgagggcccttggaaacaggtggaaggcggcgtcactgccgcgaaggggttcaaggcggcgggtatctacagtgggttgcgtgccaaaggcgagaagcctgacttggcactggtcgcctgcgacgtcgacgccactgtagcaggagcatttacaacaaacgtcgtagccgccgcacctgttttgtattgcaagcatgtccttagtacatcgaaaacaggtcgtgctgtgttaattaatgctggacaagcaaatgctgcaactggtgatcttggctatcaggatgcagtggatagtgcagatgctgttgccaagcttctcaatgtaagcacagataacatactgattcagtctactggtgtcattggtcaaaggataaagaaggaggcacttttaaattcactacctagacttgtgggctcactgtcttcttcagttcagggtgcgaattctgctgctgtggccattacaactacagaccttgttagcaagagcattgctgtccagactgagattggaggagtggctattagaataggtgggatggctaaaggttctggaatgattcacccaaatatggcaacaatgcttggtgttttgaccacagatgctcaagtcagcagtgatgtctggagagaaatgatccggatgtcagtgagtagaagtttcaaccaaattacagtgggtcgcggctcttgtacctcgggttgatcacatgtaagcaatcacacaagtacacaacatgggtagggatttttttggcatcatcaattattcaattatttatttagaagg

SEQ ID NO: 262906 - DNA, 559 bp, Zea mays
gaccttgttagcaagagcattgctgtccagactgagattggaggagtggctattagaataggtgggatggctaaaggttctggaatgattcacccaaatatggcaacaatgcttggtgttttgaccacagatgctcaagtcagcagtgatgtctggagagaaatgatccggatgtcagtgagtagaagtttcaaccaaattacagtggatggtgatactagtaccaatgactgtgttattgctatggcaagtgggttgtctggtttatctggaattcaaagtcttgatagcattgaggctcaacagttccaagcatgcctagatgcagtaatgcaaagtcttgcaaaatccatagcatgggatggtgagggtgcaacatgcctaattgaggttactgtaagtggcgccaacaacgaggcagaagctgctaaaattgctcgttcagtagcatcttcttctttggttaaagccgctatatttggaagagacccaaattggggacgaattgcttgctcagttggttattcaggcattcaatttgacgcaaatcgacttgata

SEQ ID NO: 262907 - DNA, 2665 bp, Zea mays
gatgttttcacgaaacctgaccagtagccgtcctcgtcttccacgttgtgtttctcgcccacctatctatatttatcataaaaaacagccaaatcgagcgaggcgacgagggcgagtagtagttggcgagttggagcaggtctgggtctggccgcgtgagttatttcccagccaggcatctgagagctttggtcttgacctcgacagagatcgccatggacgcatcggcggaggtggaccacctcgccgccgagaggtcggccgcgcgcttcgacgtcgaggcgatgaaggttgcatgggctggctcgcgacacgccgtcgaagtcggcgaccgcatggcccgactcgtcgcgtccgaccctgtcttccgcaaggataacaggaccatgctctccaggaaggacttgtttaaggacactctaagaaaggcagcccatgcatggaagcgtattgtcgaactacgtctcacagaggaggaagcaggtatgctgaggctatatgtcgatcagcctggttatgttgatctgcattggggcatgtttgttcctgctataaaaggtcaaggtactgaggagcagcagaaaaagtggttaccaatggcttacaagttccaaataattgggtgctatgctcagactgaactcggtcatggctcaaacgttcagggccttgaaacaactgccacatttgatccaaagactgatgagtttgtcatccacagtccaactctgacctccagcaaatggtggcctggtggcttggggaaagcttccactcatgcagtggtgtatgctcggctgataactgaaggaaaggactatggtatacatggtttcattgtgcaactgcgaagcttagaggatcactcccctcttcctggtattactctgggtgatattggtggaaaatttggcagtggtgcatataacagtatggacaatggtgttctgcgatttgaccatgtgcgcataccaagggatcaaatgttgatgaggctttcacaagttacaagggaggggaaatatgttcattcagatgtcccaaagcagctgctttatgggacaatggtttttgttcgccagacaatagtcgcagatgcttctaaggctttgtcccgtgctgtttgcattgctgtacgatacagcgccatccgaaagcagtttggctctcaagatggtggccctgagactaaggtccttgattacaagactcaacaaagcagactctttccgttgctggcttcagcatatgcatttagatttgtgggtgactggctgaagtggctatacatggatgtcactcagaaactggaagctaaagactactcaacactgcaagaagcccatgcctgtactgctggtttgaaggctgtgacaacatctgcaacagctgatgccattgaagaatgtagaaagctctgtggcggacatggttacctgaacagcagtgggcttcctgaattgtttgctgtctatgttcctgcttgcacttatgaaggagacaatattgttctgcttttgcaggttgcaaggattctaatgaagaccttatctcaattgacatctggaaaacaacctgttggtacaatggcttacatgggcaatgtacaatatctgatgcaatgcaaatgtgctgttaacacagctgaagattggcttaaccctgttgccatacaagaggcgtttgaagccagggctctcaggatggcagtaaactgtgcccagaacataggccaagcagcaaaccaagaagaaggtttctatgagcggtcccctgatttgctagaggctgcagtagctcacatccagttggtcattgtaaccaagttcatttcgaaggtgcagcaggacattcctggacctggagtgaaggaacagctccagaacctttgcaatgtctatgccctctacattctccacaagcacctgggcgacttcctggcaaccgggtgcatcacacccaagcagggagcgctggcaaacgagcagctgggcaagctttacgcacaggtgcgtccaaatgctgttgcgctggttgatgccttcaactacacagaccactacctggggtctgtgctggggcggtacgatgggaatgtgtacccagcgctgtacgaggaggcgtggaaggaccctctgaacgagacggtggtgcccgaggggtaccacgagtacctccgccccttgctcaagcagcagctcaagctctccaggctctagtctgatcggctaccccccctggaattctccatggcggctgccttctcagaaaatctcacgcgacctccgaatgaaagtgatgtaagctactaacgattcttgttagagccaggaaagaggctctccagccaattataaatttattcctcaagctctgaggatcaagttcaagctgtggattatataggaagcacgtttaataattaataaagagggagaggatgagcatctctctgttgctgctcaagtgttgtgcgcagtgcgagtagtagaatgaatatatacgagtgcgtgtattgtatggtgaattgaagttccatttgtttgctaaaagtatatcagaaaacaatggcttgatttgcctaagtccaaaatgaaagccagattccgaacaaaaaaaaaaaaaaaaaaaaaaaaaaaaagggcggcagatagcgatctagaac

SEQ ID NO: 262908 - DNA, 458 bp, Zea mays
cccacgcgtccggcagctcctatgggccaggcaggatcaatcaatggtcttatttatgaggactagccatgttccggcctctgctctgataaccattgcttcgggcatttgtcatttcttgttcactcgtttagcttgcagagccgattgcttcgatcgatactggaacgattacttggcgcctcaatttgactctgtcccgtacaaaaaagattctcctagctgttaaggaacgatcggatttggcacccaccacccagcacacataatagtgggagtgaccataaacagctaggaatatccacagttgcagatagataatggcgacgaaataaatgcttattggaaactggtggtttaaaaaatgaaacacagcccatagacttaattcagacgaggttagcagatcatttgatacaaacttgaatacttagtccctagatgtcttattttaagag

SEQ ID NO: 262909 - DNA, 1260 bp, Zea mays
cctccagggaccggtccgtattacccgggccgtccattcgtccgatccctctcgtcctctcgctttctctctccatctcgtttcccccgcctgcgcagccagcgcaaaccctagccaacaagcgccgttctgcgaggctctcggcagcggataacttaacctgtcgcgcaaggatcgggggagagaaaccagcggcaacttacgtggatcggggttgtttggtgctgctgcggcggcgcagggatggaccggaagcgcatcaaggacgcgctcgagaagcacctggagaggtcgtcgccgtctacttccaggggcgtcgtgtccaaggagagggagcgcctcgctgccgggaagctgccgtcatcgcttggcaaggcggaggtgtctgatggtgaggaatttgaaactgacagtgaagattctgatgtgagtggttccgagggagaggacacgtcctggatttcatggttctgtacattgcgaggcaatgaattcttttgtgagatcgatgatgactatatacaggatgattttaacctgtgtggtctgagtaatcaggtgccatattatgattatgcacttgatctcatcttagacattgagtcttctaatgatgacgggtttaccgaggagcaaaatgaattaatcgagtcatctgcagagatgctgtacggtttaattcatgcacgatacattttaaccagcaagggtctagctgcaatgttggagaagttcaagaactacgactttggtagatgccccagggtgtactgctgtggccagccctgccttccagcagggcaatcagatgttcctagatcgagcactgtgaagatatattgtccgaaatgcgaagaacttaactatccaagatccaagtaccaaggcaacatcgatggatcatactttgggacgacattccctcatcttttcctgatgacttactcgcacttgaagccgcagaagccgtcacagcaatacactccaagggttttcggcttcaaacttcacaagccgtcatgacagagttgtagcttccgccagaagcacccctgtcacctaggttttagggagagcatcgtggccttcaaatactgttgtattattgatgtacgaattcgcgagcctgggcctcgctgtaaactattgtgaaattgtatctgttttccgatattattactgttgtgtaaccttggttctctctcactcgcttgatcgaagtgcgtcgtcaacatgcatggtcccagggcatttcacacg

SEQ ID NO: 262910 - DNA, 458 bp, Zea mays
agccgcccacctcacgcaagctgcaagcccacgggcgctctctctccccctgcgcctcgtcgcctctccaatccctctcggcctctcgctttctctctccatctcgtttcccccgcctgcgcagccagcgcaaaccctagccaacaagcgccgttctgcgaggctctcggcagcggataacttaacctgtcgcgcaaggatcgggggagagaaaccagcggcaacttacgtggatcggggttgtttggtgctgctgcggcggcgcagggatggaccggaagcgcatcaaggacgcgctcgagaagcacctggagaggtcgtcgccgtctacttccaggggcgtcgtgtccaaggagagggagcgcctcgctgccgggaagctgccgtcatcgcttggcaaggcggaagtgtctgatggtgaagaatttgaaactgacagtgaagattctgatgtgagt

SEQ ID NO: 262911 - DNA, 332 bp, Zea mays
ctcttgctttgatgctttctctctccatctcgtttcccccgcctgcccagccagcgcaaaccctagcccgtactgcgaggctcttggcagcggataactggacctgtccgcatgaatcgggggagagaaactggcggtaacttacgtgaatcgggtttgtctagtggctgcgacggcgacggcggcgcagggatggaccgtaagcgcattaaggacgtgctcgagaagcacctggagacgtcgtcgccgtccacctccaggggcgtcgtgtccaaggagagggagcgcctcgctgccgggaaactgccggcgtcgcttggcaaggcggagaa

SEQ ID NO: 262912 - DNA, 1704 bp, Zea mays
caccatccatttgaataataggatactgatgcagggctcaaaagttatggctaacctgctttccttttgttttgggtgaccgaaacaaagtttggtgaacacttcacatgccatgtgactcagattagtgtcatagcattctttggcagcactagaactctagaagcacctttaaccttttttttaagaaaaacttgtctagttgtgttttcggtggctacagccagacagtttggcaaattgcccccattgcggtggtggtgccgtggtgggctgttaaaaaaaaggacatttaaaaactcttttagggctagcgtggcaactccattttctattgagaaatgaactaattttccttgtgaaaatggaaattatcttcggtaagccatgggattgagttggattcttagagaggattttagtttccaaactagccctcaatcctatggattctaggagaggattcgagtttccaaactagctctggtaatccaagggatctagtcagattttcggagaggatttgggtttggaaactagccctcaatcccatggattctgggagatgattggagttaaaaatctagctcttacatgatttattacctgcatttgttctttacatgctacagtctagagtatatggtttttgtagggcatggtccagagtagttgctggaggtgtttcccatgcacgttccatgttcaattatacacaatcctatcttgcacaatccattcccacatcagcatgggcattccgcattatttccttgtgcaaactgcattctctattgcagacaatgaagcaagagaagtttcttatttcgagaatatcacaatatctgcatttagcatgagcataacattagcaatcgctctttcttttcgatggatctcctatggaaaaagaagagcagccaagtaaaccgtgggaatgttttttttgttgttgtcttgtgttcgatggcaacacccaggtcgtgaaggcaatcgagaacgcgatccccgtgcggcacgccgccgccgccgccgccgcggagatcgaccccgcgagggaggaggagctgagggccatggaggcggagaaggcggagatcgaccgggcggcggcggcgcgggtgcggcgggagctgtggtgcgggctgacgtacctggtgatccagacggccgggttcatgcggctcaccttctgggagctgtcgtgggacgtgatggagcccatctgcttctacgtcacgtccatgtacttcatggccggctacgccttcttcctccgcaccaagaaggagccgtcgttcgaaggcttcttcgagagccggttcgcggccaagcagaagcgcgtgatgcgcgcccggggcttcgacctccgcaggtacgaggagctccggagagcctgcggcgtggcggcgtcgccgccgctccaggcccggaccccctgcgcgagcgcgggcgcggcgcgggagagcggccattgccactcctactgccattgccattgatcttggcctcgctcggttcattcctttctttttttttctttgttgttcatgcccatttggtggggatgatgattcgtgtatccatctgatgcgcgcgcggatgcaaaaaaaaaaaagcatactgaattgaggtttaaacttggaaccagggcttaaaaaatacccccctgttcgtccaaaaaaaaaaaaaaaaatataaaaa

SEQ ID NO: 262913 - DNA, 459 bp, Zea mays
cggacgcgtgggtagcaatcgctctttcttttcgatggatcttctattgaggaagaggatcactcaagtaaaccgtgggaatgttttttttgttgttgtcttgtgttcgatggcaacacccaggtcgtgaaggcaatcgagaacgcgatccccggcggcgcgggtgcggcgggagctgtggtgcgggctgacgtacctggtgatccagacggccgggttcatgcggctcaccttctgggagctgtcgtgggacgtgatggagcccatctgcttctacgtcacgtccatgtacttcatggccggctacgccttcttcctccgcaccaagaaggagccgtcgttcgaaggcttcttcgagagccggttcgcggccaagcagaagcgcgtgatgcgcgcccggcgcttcgacctccgcaggtacgaggagctccggagagcctgcggcgtggcggcggcgcc

SEQ ID NO: 262914 - DNA, 517 bp, Zea mays
gacgcacgcgtccgcccgcgcgttcgggttctcctgtcgctcttcgtgcgggcgtgcggcacaccaccagaagagcggccgagcggcgcagagaagagagaaccagccgagcggagcggctgcgcttccggagggaggaaggaggatggagaaggctctcaccaagctcggcagcttcacaatctcccgcaaggccaagcaggagctctccgccatcggtgacgacatctcccgtttttcgagcacggtggaggagaaggcaaaatgggtgttcgagaaactcaaagggcacaagaagtcgctccctgatctactgcgcgagcacaacctccctccaggtctcttccctcgtaacatcatctgctacgagtacgacgaatcgacctcgaagctggtggtgcacctgtccaagccctgcgaggtgagcttcaaggattcctccaccgtaaggtatgctcctcgtgtcaaggcgactctgtcccgaggcaagctatccggggttgaaggcatgaagacc

SEQ ID NO: 262915 - DNA, 1752 bp, Zea mays
  unsure (1)..(1752): unsure at all n locations
cccacgcgtccggcgggtgtggatgatgcccaaatgtttcgaactgtgacgcaagctatgaacattgttcatatcagcaaagaggaccaagagagtgtttttgcaatggtctctgctgttctttggctgggggatggctcgttcacagtaattgacagtgaaaatcatgttgaaatcattgtagatgaagcttcgaaaacggtttcagaacttcttggctgcagtattgaagatctcaatttagctttatcaaagcgccacatgaaagttaataatgaaaacattgtccagaaacttacccttgctcaggcaactgacacaagagatgctctggccaaatcagtgtatgccagtttgtttgagtggcttgtagaacaaattaataagtctctctcagttggcaagcgtcgaactgggagatctatcagtattcttgatatctatggctttgagtcatttgataagaacagttttgaacagttctgcattaattatgctaatgaaaggttgcagcaacatttcaatcgtcatttgtttaagcttgagcaagaggaatatgtggaggatggcatcgactgggcaaaggttgacttcgaggataatcaagactgtttgagcctctttgagaaaaaaccactgggactattgtctctgctggatgaggaatctactttcccgaatgccacagatcttacttttgcaaacaagcttaagcaacatcttgactcgaattcttgcttcagaggagaaagaggcaaggcatttgctgtccgtcactatgcaggagaggtggcttatgatacttcgggttttctggagaagaatagagatttattgcacatggactcgattcagctccttgccaaatgcaaaacttctctgccaaaaatgtttgcatcgaagatgctagttcaatcagataattctatgtctgttccatatagatctagtgctgctgattctcaaaaactaagtgttgccatgaagttcaagggtcaactgttccaacttatgcaaagactggaaagtacaacgccacactttattcgttgcattaaaccaaacaatttacaacttcctgcaatttatgaacaaggacttgtgcttcaacaacttaaatgttgtggggttcttgaggttgtccggatttcaagatctgggtatccaacaagaatgactcaccagaagtttgctcggcggtatggctttcttcttcttgaggatgttgcatctcaagatccactcagtgtttcagttgcaattcttcatcagttcaacattttacctgagatgtatcaagttggctacacaaagttgttcttccgaactggtcagattggcaaccttgaagatactcggaatcgtactctgcatggtattttaagggttcaaagctgtttcagggggcatcaagcccgtcatcatgcaagagaacgaacaagaggagttttgactcttcaatcattcattcgtggtgagaatgcacggcaaatttactcctctttgttgaggaaacatagagccgcagttgttttgcagagaaatgtgagatgttggcttgcaagaaggtatttcataaatgtccggaaggcctcagtgataatacagtctggtattcgtggcagtcttgttcgaagatgtaatggcaatattgatctaataaatgtgctaagagagtttgaatcanaacaggtacaataactgtgtgtgcgcgcgcgccccttatacggtgctgctggcagctatattcat

SEQ ID NO: 262916 - DNA, 720 bp, Zea mays
cccactcgttcggcaagagaacgaacatgtagagtttgggctcttcaatcattcatccgtggggagaatgcacggcaaatttactcctctttgttgaggaaacatagagccgcagttgttttgcagagaaatgtgagatgttggcttgcaagaaggtatttcataaatgtccggaaggcctcagtgataatacagtctggtattcgtggcagtcttgttcgaagatgtaatggcaatattgatctaataaatgtgctaagagagtttgaatcaaaacaggaggcacatggtgaccaaattttgatcaaggcctcagtcctggctgagttacagaggcggatactaaaagccgaggccacagtacgtgaaaaggatgaagagaacgagatgcttcatcagcggcttcagcaatatgaaaaccgctggttagagtacgagcagaaaatgaaagctatggaggaaatgtggcagaagcaaatgcgttcgctgcaatcgagcctttccgtagcaaagaagagccttgttttggatgaaacgcctaggatgtcggactcatcagtggatcagagctgggaaagcaatgggaaccaccatgtcagcagcggttctcagctggtgccacacactggtggacgtgaaatgaatgctggcctcagcgtcatcagccgcttggcagaagaattcgagcagcggagccaggttttcgctgatgacccaagt

SEQ ID NO: 262917 - DNA, 946 bp, Zea mays
cccacgcgtccgataaagatcctccactgcgcacttcccgcgccgcccctctccttcccgagcaggaggcggacaaggtaagcagcaatcgcaggaaccctagcgccgccgcatccgcagccatgggtatcgacctcgttgccggtgggaggaacaagaagaccaagcgcacagcgccgaagtccgacgatgtttatctcaagctccttgtcaagctctaccgtttcttggtcaggaggaccaagagcaacttcaatgctgtcattctcaagaggctcttcatgagcaaaaccaatcgcccaccaatctccatgcgccgccttgtcaagttcatggaaggaaaggagaagaacattgctgtgattgttggcacagtcacagatgacaaaaggatccaggaggttccagcaatgaaggttactgccctgaggttcacggagacagcaagggccaggattgtcaatgctggtggcgagtgcctcacatttgaccagcttgctcttcgtgctccacttggcgagaacacggtcctcttgaggggccccaagaatgcccgtgaggcagtgaggcactttggcaaggctcctggagtgccgcacagccacaccaagccgtatgtgcgctccaagggaaggaagttcgagaaggctcgtggcaggaggaacagccgtggattcaaggtttaaaacaaattgtggccctccgtgttgccatcagcatagtgcaaccgttgtgtttgatcagtcgacagtaattagtcatcactctgtaccgagattagtagcacaatttgttgtcctggtttgaattttggaagatatttgatgtcgtctccttattatctactcgttactggttgagcacgaagattgttttgtgatactcctacatgatttaagacggttcccgacgttccatgtaaaaaaaaaaaaaaaagggcggccgc

SEQ ID NO: 262918 - DNA, 631 bp, Zea mays
  unsure (1)..(631): unsure at all n locations
ggctcgagtaaagctcctccattgcgccgccgccactctcctttacgaggaggcggaccaggtaagcagcaatcgcaggaaccctagcgccgccgcacccgcagccatgggtatcgacctcgtcgccggtgggaggaacaagaagaccaagcgcactgcgcccaagtccgacgatgtctacctcaagctcctcgtcaaggtaagcggcgtcgttatcttcgatagatctgcccgtggtcgcgtgtttggttctgaaaatgccgtgtgatctgtagtcccatactgttatgctaacaactgcatcattttcgaggatattgcttgttgcgccggtgtagtaatcctgtaagcttcatcggcctgaagcgactttggaagataaaaagaattcatctctctttcatataatagatagatgtgcagtacctttgggttatctgcttgccatgtattaaaggtgtcatggtcgtctacgtttttgtgtatcccgcgattctgatttgtgttatgctcgggtgcagctctaccgtttcttggtcaggaggaccaagagncatttcaacgctgcattctaagaggcttttatgagtaaaccaccgacaccatctcatgcgccgcttgcagttatgga

SEQ ID NO: 262919 - DNA, 696 bp, Zea mays
cggaattcccgggtcgaccgcacgcgtccgcccacgcgtccgcggacgcgtgggcgagaagagaccaggccgaaggaaaacaatcctgaaaccaagccatgggtctgcaggaggaatttgaggagcatgctgagaaggcaaagaccttgcctgagaacacgagcaatgagaacaagctgatcctatacgggctctacaagcaagccacggttggagatgtgaataccgatcgtccgggcatattctaccaaaaggacagggccaagtgggatgcctggaaggctgttgaaggcaaatcgaaggatgaggcgatgaatgactacatcaccaaggtgaagcagctccaggaggaggctgccgcctcttaaaagtctcttaatagtgttgccaaacagctatttgtcagatgagctttgtgccatttcctcattagaagtatatcattcgatccattggggatctgtgaaccatgtacctgtttatgtaactggttaccagtgttatccatctatctatctatctgtgaagacttgagtcttctcaattaccaggtaagcagcagcaggaaccctagcaccgccgcatccgcagccatgggtatcgacctcgttgccggtgggaggaacaagaagaccaagcgcacagcgccgaagtccgacgatgtttatctcaagctccttgtcaagctctaccgtt

SEQ ID NO: 262920 - DNA, 638 bp, Zea mays
cagccactgaagtcgaatcccctcacactataaagctcctccattgcgccgccgccactcggctttcggaggaggcggaccaggtaagcagcagcaggaaccctagcaccgccgcatccgcagccatgggtatcgacctcgttgccggtgggaggaacaagaagaccaagcgcacagcgccgaagtccgacgatgtttatctcaagctccttgtcaagctctaccgtttcttggtcaggaggaccaagagcaacttcaatgctgtcattctcaagaggctcttcatgagcaaaaccaatcgcccaccaatctccatgcgccgccttgtcaagttcatggaaggaaaggagaagaacattgctgtgattgctggcacagtcacagatgacaagaggatccaggaggttcctgctttgatggttactgccctgaggttcaccgagacggcatgggccaggattgactatgctaattgcgcgtgccttacatcgaccagatagatcttagttctaccacttctgatgaccacgcccctatagaggttcaacctatatccagaggagccattgattcacacagtcgagcatcgtgcttggttgaaaagccactgtcacgaagctacgctgtgccagattatg

SEQ ID NO: 262921 - DNA, 809 bp, Zea mays
tactggtctcggaattgccgcgtacccgcgactcctcggacgcgtgggcggacgcgtgggagcaatttcaacgctgtcattctcaagaggcttgtcatgagtaaaaccaaccgaccaccaatctctatgcgccgccttgtcaagtttatggaaggaaaggagaagaacattgctgtcattgttggcacagtcacagatgacaaaaggatccaagaggttccagcagtgaaggttactgccctgaggttcaccgagacggcaagggccaggattgtcaatgctggtggggagtgcctcacatttgaccagcttgctctccgtgctccacttggcgagaacacagtcctcttgaggggccccaagaatgcccgtgaggcggtgaggcacttcggcaaggctcctggagtgccgcacagccacaccaagccatatgtgcgctccaagggaaggaagttcgagaaggctcgtggcaggaggaacagccgtgggttcaaggtttaagaaagttgtgggccatcagcatagtaatcacttcctaccgagtagtagcacattttgttgccttggcttggattttgaaagatatttaaggattttcgtgccttgtctactggttactggttgagcaagaagacaatgttcttttgcacctctttttattggtcggcatattttgcgctgtgattggaactgtgttgtgttatctgctggatgtacttactgcatcacctagaaaggtggcttgggccatttggaatcataaaacgaaagttgctcgcttcaagctagaatacacgattcctcgaacc

SEQ ID NO: 262922 - DNA, 667 bp, Zea mays
tacgaccgcccgcaatcccgggtcgacgcacgcgtgcgcaaaccgagaagagaccaggccgaaggaaaacaatcctgaaaccaagccatgggtctgcaggaggaatttgaggagcatgctgagaaggcaaagaccttgcctgagaacacgagcaatgagaacaagctgatcctatacgggctctacaagcaagccacggttggagatgtgaataccgatcgtccgggcatattctaccaaaaggacagggccaagtgggatgcctggaaggctgttgaaggcaaatcgaaggatgaggcgatgaatgactacatcaccaaggtgaagcagctccaggaggaggctgccgcctcttaaaagtctcttaatagtgttgccaaacagctatttgtcagatgagctttgtgccatttcctcattagaagtatatcattcgatccattggggatctgtgaaccatgtacctgtttatgtaacttttttttttttcgaaagagcgcaggaggactgcgcacccatatattaaagtagagggaaaataaagggccataatgatgatatccatctatctatctatgtaactggtttatgtaccatgtacctgtttatgtaactggttaccagtgttatccatctatccatctatctgtgaagacttgagtcttct

SEQ ID NO: 262923 - DNA, 727 bp, Zea mays
aatctagagtattgtcaagtaccagtcacgctgccaatacataacacttcagctccatagagacctgcagagcggtggaggacggccggcgtctggctctggcggctggcggcccacgtttatggaaggaaaggagaagaacattgctgtcattgttggcacagtcacagatgacaaaaggatccaggaggttccagcaatgaaggttactgccctgaggttcaccgagacggcaagggccaggattgtcaatgctggtggcgagtgcctcacatttgaccagcttgctctccgtgccccactgctggcgagaacagtcctcttgaggggccccaagaatgcccgtgaggcggtgaggcacttcggcaaggctcctggagtgccgcacagccacaccaagccatatgtgcgcttcaagggaaggaagttcgagaaggctcgtggcaggaggaacagccgtgggttcaaggtttaagaaaggtgtgggccatcagcatagctatcacttcctaccgagtagtagcacattttggtgccttggcttgtctactgaaggatctccgtgccttgtctactggctacctggttgagcaagaagacaatgttcttttgcacctctttttattggtcggcatattatgcgctgagattggaactgtgatgggttatgtgctggatgtacttactgcatcacctagaaaggtggctggtgccatttgcaatcata

SEQ ID NO: 262924 - DNA, 571 bp, Zea mays
attcaatcaggcaatgatgaaggcccagtatgctaattacgtggtccagaagatacttgaaacttgcaacgaggatcagcgggagcttctgctcagccgcgtaaaggatcatatgcaagcattgaggaagtacacatacggcaagcacatcgtaagccgagtcgagcagctctgtggcgacggaactgccgagtcaggttcttgaaacgaaccgccgcctaattcttcataggctggagggtgtcctgctcttttgctcattccgtcagtgacgaagaaagcaaaacggatcaagtctaactctggcgcttcagaacagactaacaaagctgtcgtcgaagattgtataggtgtgactctgttcagggatagtcttcaggttctagaacagaagggtagtggtgtgcatcagtgtatctgtttactggataatagtggttggttaggtgtgtgcagaaaaagtttagtgctatgctttgtatgtgatacatattaactatgccttggaatgttcatatgttgtcctgattacgtgtgatatctctcgttcaaaaaaaaaaaaaaaaaagaa

SEQ ID NO: 262925 - DNA, 1996 bp, Zea mays
gcgcgaaggcaaagcgtccaagcaaccacttctgctctgcatcccgtctgggcctctgcatttgcttggctgctgctcccttctcccaccgaccaactcgatcccgcgccatggatcgcgccgaccccgcgcggggccgccttgccgtgctctcctcccacctccgtggtgcaggggccgaggaggcggcggggctggagaggtcgccggtatccgcgccggcgcccgggccccgcgccggcgcgcttgccgtggtggacgggaggaccgggaagcggcacgaggtcaaggtctccgaagacggcaccgtgcgcgccaccgacttcaagaagattaccactggaaaggacgacaagggtcttaagatttatgatcctggttaccttaacactgcccctgttcgctcgtccatctgctacatcgatggagatgagggaatccttcgctataggggttatccaatcgaagaattggctgaaagcagctcgtttgttgaggtggcctaccttttaatgtatgggaacttgcctactcagagtcaattggcaggctgggaatttgctatttctcagcattctgctgttccccaaggactgttggatatcatacaatcaatgccccatgatgctcaccccatgggtgttcttgccagtgctatgagcaccctttctgtctttcatccagatgcaaaccctgctctacaaggtcaagatctttataaatcgaagcaggtgagggataaacaaattgtgcgagtacttgggaaggcaccaacaatagcagctgctgcctacttgagattagcaggaagacctcccgtccttcctttaaatactctatcttattcagagaacttcttgtacatgctggactctttgggtgacagaacatataaaccaaatcctcgacttgctcgagctctagatattctttttattctgcatgctgaacatgaaatgaactgctccactgctgctgttaggcaccttgcttcaagtggtgtggatgtatttactgctctttctggtggtgttggagctctatatggtcctctgcatggcggcgcaaacgaggcagtacttaaaatgttaaatgagattggaagcatggaaaatattccagatttcattgtaggagtgaagaacaggaagaggaagatgtccggttttgggcaccgtgtgtataaaaactatgaccctcgtgctaaagtcataaggaaattggcagatgaggtgttctcaattgttggacgggatccacttattgaggtggccattgccctagaaaaggcagcgctgtcagacgaatattttatcaagaggaagctgtatccaaatgtggatttctactctgggctaatttatagggcaatgggattccctacagaattttttcctgtgctgtttgctattcctcgcatgggtggctggctagcgcattggaaagagtcactcgatgatcctgacactaagattataaggccccaacaggtatacaccggcttctggcttaggcactatacccccgtcagagaacgagtgctatcaagccagagtgaggaacttggtcaggttgccacctcaaacgcaactaggcgccgccgtgctggttctgccctgtagaagctgcagcgtataaacgcaccggcatactcaataaacatcgaccacttttgtgcttgaaaaggccacaaatgctttttagcttggttggagttgtaggccttttgttgtcgagtatataggcaataatgcagtgagaacaccacaccgttacaatgtaaaactgtcacgaggcatcacttgctggtgtacaccccttgcgttctctatgacttaatcacttaacttcccaaaagatgaattaagaggtacgatcgagtacccgtgttcttgcgttgaccccatgtgctcattttggtgaaattttgttgttcatttgcatggagattagtggaaacaaagatcgctgttggcgtatttgtgtcccaagaaat

SEQ ID NO: 262926 - DNA, 1248 bp, Zea mays
tgccttcgcgtccgcccacgcgtccgcccacgcgtccgaaaaaaaacaaaaagggtaccggaagcggcgaaagcctcgccccccgccgctctcgcatcgtctccggagcgcacgtcagatcaggtgcgccgcgcccccctcgcctaagctgcgacgaccatccatcgaacaggaaggatgacgggctccatggatctcccggccaagggcgggttcagcttcgacctgtgccgccggaacaacatgctggagaagaacgggctcaaggtcccgggattcaggaagaccgggacaaccatcgtcggcctcgtctttcaggatggggttgttcttggggcagacacaagggcaactgagggccccatagttgctgataagaactgtgagaaaatccactttatggcaccgaatatatactgctgtggagcaggaactgctgcggacacggaggccgttacagatatggtgagctcccagctacagcttcaccgttatgcaacgggccgcgaatcaagagttgtaactgctcttacactactgaagtcacacctcttcaagtatcaaggccatgtcagtgctgcccttgttcttggtggagtggattgtactgggccacatttacacactgtttatccacacgggtccactgatactcttccttttgccaccatgggctctggttctcttgctgcaatgtcagtgtttgaatcgaagtacaaagaaggccttactagggaagagggaatacagattgtgtgcgaagcaatctgtgctggtattttcaatgacttgggtagtgggagcaacgtggacgtctgcgtgataaccaaggggaagacagaatacttgagaaaccaccagttgccgaatcccaggacttatgctagttcaaagggatacagtttcaccaaggggcagactgaggtactgtcttcaaaggtcacacttctaaagcagaaggttgaggtcgccgagggtggtgatgctatggaggagtgatcttgcatcctgcattcatacaagcatattctgaatctgtgtaactttgcttagtggatcagctagaacaagaaaaaagaaaatttggagatctttgctgtactcgctggaccaaagccagggttcttatgctaaatgtgtttctaatgtttggcacattttaaattgcttgttgtttccgaatgtttaaaaccggtgaaggtctggtatctgcttggagatgttaaaaaaaaatgacttgtgctaact

SEQ ID NO: 262927 - DNA, 601 bp, Zea mays
tcgttaccgcccccgcaccacggccagaaccctagtcacttccccgccgcccactccatggaggacgacgccatctcgacgctcatggacatcgacgactcgccgctcagcgctgcgggggccgggttcctcgacgaggaggacggggaaggcgagatgttcttcgccccgcaccgcgcggcccgcggcggcgctggcgatgcccgcgggcccctccccttttccgggttcttcaacagcttcgacggcgccgatttcgacgacgacgacctcgcctgagggaactgccgcccggttcggtaacggatgttgttcgtggatcgcgaatcgtgttatgtcgataccgtgatggggtctcttaattagcgcatcgattcagactcgtttgggcaatctgaagatgtttagggatcaacattacctttgtggcctatggttcgtggatgcacatgcacagggatcaatataagtacctttgtgccccatggttcgtggatcactgtgcatgtgtttttccgcgtctttgttgttattttggctccatctgtatgatctaatgaaccttcctttgttaacaacccgtctttgttacaagaacacc

SEQ ID NO: 262928 - DNA, 878 bp, Zea mays
gcgaatcgtgttatgtcgataccgtgatggggtctcttaattagcgcatcgagtcagactcgtttgggcaatctgaagatgtttagggatcaacattacctttgtgtacctttgtggcctatggttcgtggatgcacagggatcaatataagtacctttgtgccccatggttcgtggatcactgtgcatgtgttcttccgcgtctttgttgttattttggctccatctgtatgatttaacaaaggaaggttcattagatgggccacatttacacactgtttatccacacgggtccactgatactcttccttttgccaccatgggctctggttctcttgctgcaatgtcagtgtttgaatcgaagtacaaagaaggccttactagggaggagggaatacagattgtgtgcgaagcaatctgtgctggtattttcaatgccttgggtagtggaagcaatgtgaatgtctgcgtgataaccaaggggaagacagaatacttgagaaaccaccagttgccgaatcccagaacttatgttagttcaaagggatatagcttcaccaaggggcagactgaggtgttgtccgcaaagatcacacatctcaagcagaaggttgaggtcactgagggcggtgatgctatggaggagtgatcctgtatgcttgcatccaggtaaaacagtcatactcttttttatattattttacttagtggaggagctaggaaaagacagaatggagatctttgttgtactttctcgactgaatccggactttcatgtcaaaggtgtttccaattaaatgcttgtttctgaatgtttaaactgcaatggtatgttacaactttccttgagatgttattgctactgctgctgcatctgt

SEQ ID NO: 262929 - DNA, 538 bp, Zea mays
cccacgcgtccgcccacgcgtccgcccacgcgtccgcccacgcgtccgcggacgcgtgggcgacgcaattgacatcccctcgcctaccccagctctacccgcgacgaagcatcaccaggaaggatgacgtgctcaatggatctcccggccaagggcgggttcagcttcgacctgtgccgccgcaacagtatgctggagaagaacgggctcaaactcccgggattcaggaagaccggaacaaccatcgtcggcctcgtctttcaggatggggttgttcttggggcagacacaagagcaactgaggggcctatagttgctgataagaattgtgagaagatccactttatggcgccaaacatttattgttgtggagcaggaactgctgctgacactgaggctgttacagacatggtcagctcgcagctacagctgcaccgttacgcaacgggtcgcgaatctagagtcgtaactgctcttacactgctgaagtcacatctctttaggtatcaaggccatgtcagtgctgcccttgttcttg

SEQ ID NO: 262930 - DNA, 507 bp, Zea mays
gatacttgaaacttgcaacgaggatcagcgggagcttctgctcagccgcgtaaaggatataggcaataatgcagtgagaacaccacaccgttacaatgtaaaactgtcacgaggcacatcgtaagccgagtcgagcagctctgtggcgacggaactgccgagtcaggttcttgaaacgaaccgccgcctaattcttcataggctggagggtgtcctgctcttttgctcagtccgtcagtggcgaagaaagcagaacagatcaagtccacctctggtgcttccaaacagactaacaaaactgtcatcgaagattgtataggtgtgactcgcttcaggatagtcttgaggttctagaacaggaacttagtggtgtgcatcagtgtatctatgttagggtgtgcctatttacagtataacagtggttggctagctgtgtgcagaagggagtttagcgttatggtttgtatgtgatacatattatgcctggtaatgtatttgctttcttgc

SEQ ID NO: 262931 - DNA, 795 bp, Zea mays
gggttttagcttctgccgccgtaacctcacctcccggcccttgtcgccgcaggtccgcatccgcaccatcctccgaatcccatacgaatccctagcccgcaacccgccgggcgacgagcggcggagcccgcagccaacatggaccggtaccatagggtggagcgggcgcggaaccagtcgaccatcgaagagaacgagatccgcatcaccgcgcagggcctcatccgcaactatgtctcatatgctaccttcctcctccaggaaaggagaattaaagagattgttttgaaggccatgggacaggcaatcagtaagtctgttgctgttgcagagattatcaagaaaagggcccctgagttacaccaggataccaacatcagctctgtcagcatcactgatgtctgggaacccatagaagaaggacttgtcccattggagatgactcggcatgtttctatgatatcaattactttgtcccccagagagctggacaagcacactcctgggtaccaagctccagcatatgttgaacatcccaggcaacagctggtgccaccactgcagcgccaacctcgcagaccatcaggacaacaattccagctaggcgtgttggatctactcgcgccggcccactgctccttcagtcaggcgcggcgcctcttctccttcggccaggcgagttcgcgcttcttctccttcagccaggtgcgttgaatctgctcgacgccgcccactgctccttcagccaggcacggcgcctttttctccttctgccaagtgaggtcgcgcgcccct

SEQ ID NO: 262932 - DNA, 854 bp, Zea mays
accagatgacaacagaaggatcagggaaagggatagtaggagacatgttgcttctgcagagaatgggcataggcgcaaagaaggttccaaagaaagtgagtacaaaaaaggcctaaggccggttctctggctctctccaaatttccctctgcggactgaggaactgctgccgttgcttgatattcttgcaaacaaggtgaaggcaattcgtcgtttgagggatctacttacaacaaaactccctccagatacatttcctgtcaaggttgccatcccagtcgtgcctacgatcagagtgcttgtgacattcacgaaattcgaggagctacagccgctagaggagttcggcacaccaccttcaagccctgacaaaagcaagagcccagcagtgcagcctccttcgagctcctgcgtccgatggatcaaggcgccttattaccgccagatgaacttgtctacggcgccaggcccgagcagccgcgtggaggacatccaccaccaggacccgttcgccatcccttcggattacgtgtggaccacacccgaggagaagaaaaagaagacacaggaaaacaagaacaggtccaagaaaggcaggaacgggtgatagagcattggtgggatgggatctaacaggagggacgagtggaagggaaggtttggagatttcggctgtgctggtccgagtctgacgtcgaatattgggaagcgaccgcttgtcttcttttttatttgtgttaacggatttgctgccaactctttcgtttaaccccaattcgtttcggtcctgattactgctgcaatctgttggtagattttgagatgtggtggcttctatacaaccagtgatgcac

SEQ ID NO: 262933 - DNA, 836 bp, Zea mays
atctgctgcactccactgtccactccactctcccaccgcactttcctctctcctcccctgttttcgctcccctcgagacccccaaagcaccgaaagggggaggagcggagggagatagaaaaagcggcggggttcaagaacgccgcggccatccggagccaggattctcccgatacaccccctcgttcccagttcttcagtggcgccgatttggagttccagagacggcgatgggctccggatctctgctcaaggtcttcgccaacaacttcgacgtccttgcagggcctttggtggcattggcttatcctttgtatgcttccattaaggcaatagagaccaaatctcctgtggatgatcaacaatggctcacatattgggtcctgtactcactaataacattgtttgaactcacatttgcatcaattattcagtggcttcctttctggccttcaatgaaattgatctttatttgctggcttgtcttgccatacttcaatggcgcagcctatgtgtaccagaattatgtgagacctgccttcataaagaaccagatggtcgacatttggtatgtccctcagaaaaaaggccttcttgggaaatctgatgacttcctcacagcacttgataagttcattgaagaaaatgggactgacgcgctgaagaaattggcgaacaaggctggcaagccatttaaacagtctgggaaatcatctaaggatcagaaagagacaaaatcatccaaggactccaaagaaccgaagccatcaaaagatgcaaagcaacccaagcgcatcaaagatacaaaggcgccaaagccaccaaaggattcaaag

SEQ ID NO: 262934 - DNA, 496 bp, Zea mays
  unsure (1)..(496): unsure at all n locations
actcccgtgtaccctgtcccgtcctcttgggtcgcattccgatttccgagtgggagccagcgagcgagccaaccaactgaaccaaccaaccaccgctccttcttccttccttccttccccagttcccctcgtctcaccagtcaccaaggttccgagagcagagcgagataaaaaaaaaggtaatccgacggaaacgacaaggccgcggcgagggcggggacagggtcgggaaggccctgggcgcgggggcgccaagcgcatggcatcgtcgagggtgatgccgtcctcctcgccgtcgcacacggcctctgatctcgcgcgcctagcgcaggccgncagcaggcccggcggcgggggcagcgggctgggctccatgaacgtggaggagctcctccgcggcatctacagcgacatgcccaccccggcgcctgccgcgtcggagcccgaacgcccgaggtcgccggccccggcgccggaggtcgccacgcggaggacg

SEQ ID NO: 262935 - DNA, 1745 bp, Zea mays
tcggctacgcgtgccgccactcttcctctgccctaaagccctctctcccagcgccctcttccttccgcggactagttttttctgaagattcggcgatggcggcgacgatccaatccgtgaaggcgcgccagatctttgacagccgcggcaaccctacagtcgaggtcgacgtgttttgctcagatggaacctttgcaagggcagctgttcccagtggagcatcaactggtgtatatgaagctctggagttgagggatggtggctctgactatttggggaagggtgtctccaaggctgtgaacaatgtgaattctgttattggacctgctctgattggcaaggaccctacagcacagactgagattgataacttcatggttcaacaacttgatgggaccaaaaatgagtggggatggtgcaagcaaaagcttggtgctaatgcgattctggctgtgtcattagctgtttgcaaagctggggctagcatcaagaggattcctttataccagcacattgccaacctagctgggaacaagcagttagtgttgcctgtccctgcattcaatgtcatcaacggtggttcccatgctggaaacaagcttgctatgcaggagtttatgatccttcctactggagctgcctcatttaaggaggctatgaagatgggtgttgaagtttatcaccacctgaagtccgttatcaaaaagaagtatgggcaagatgccacgaatgttggtgacgaaggtggttttgctccgaacatccaggagaacaaggaaggacttgagctcttgaaaactgcaattgagaaggctggatacactggcaaggttgtcatcggaatggatgttgctgcttcggagttttacagtgacaaggaccaaacctatgacctcaactttaaggaggagaataatgatggttcacagaagatatctggcgatagcttaaagaatgtatacaaatcttttgtgagcgaataccccattgtttcgattgaagatccttttgaccaggatgactgggttcactatgctaagatgactgaagaaattggagagcaagtgcagattgttggtgatgaccttctcgtcaccaaccccactagggttgctaaggctatcaaggagaaatcatgcaatgcccttctgctcaaggttaaccaaatcggatctgtgactgagagtattgaggctgtgaagatgtcaaagcgtgcgggctggggtgtgatgactagtcataggagtggtgagactgaggacactttcattgctgatctggcagttggtttgtccacgggtcagattaagactggagcaccctgcagatcagagcgtcttgccaaatacaaccagcttcttaggattgaagaagagcttggcgctattgctgtctacgcaggtgccaaattccgtgcacctgtggagccctactaaacgggcgggatgcaagtgcttttatgtctgcacaagtcctgtgaaactgtttactgcgacctgcagattttactcttggagtgccctgagtagattttagcaataatatccaacatgtaacatgttacggacatgtacccaaacgtgatccagttttagttaatgtgctccatgcttgacgttttgagctgaaatggatacatcgttgcccttctaccttacatagttgtgacggcaattggttcaaaaaaaaaaaaattatttaaaaatattagtattaaattaatatattattaataataataaaat

SEQ ID NO: 262936 - DNA, 1113 bp, Zea mays
cctagaagctcgaactccctgatatttcagttatctaaaagtggcatccaattccaaaattccaaaagccaaactgaaaatcaaggctcgctccttgctaaagatgtagtaaaacgggtgataaggacaccatccaaaaagcacataaacgattaacgctagcatctacctccatttacacagtccacaattgctctagaactcatcattatgtagtagcagtggatgtaacaaggtacaatattcagagtcagaaatatgggaatgtcgtcttcggtccgacgcaactaaagcttgcatgaggctcgtgagcaaggtcatcttcaaactgctgagtggattttgaactggtttagtatctgtagtttttgtcgtagaagggattttcgccccacgattctctctcggctttagctcgattttcagcctctccatcctccaagttcaaccgctttgtgttccttgacttcgaagacttcgtagacttgctgatgagcttctcaaatgcttctggtccgttttgttcaatatatctctctgcagctgacagaacatcatcagatttacctagcttctcatttcttggaatataccatatgttcactatttggcggttcacaaacattggccgcacaaaatggtcgtaaacataggcagcaccattgaaccaaggcaagaccaaccagcagttaaagaacagctttgcatacgaccaaaatggaagccactcgataattggagcaaaagttagctcaaacaaagtgataaatgagtacaacacccagtaagtgagccactgctgatcatctacaggattttttgtctctatagctctaacagaagcatatagaggataagcaagtgatatgagtggcccggcaaggacatcgaagttattggccagcaccttgaggaaagatccggaccccatcttgctccctgctcttcctgcagtagaacagaactatcgctctccccctgccctgatgccgctgcagctaaaacctggaagcgcgtgcagaaatagactcgggttctcgcgagcggcgagccagtcgttgggggctgctgcctggctggtgtagtggaggcgtggaggctcggacgaataag

SEQ ID NO: 262937 - DNA, 535 bp, Zea mays
tcaaatgctcaaggtccattttgtcaagtatatctctctgcagctgacagcacatcatcagattgacctagcttctcatttcttggaacataccatatgttcactattcggcggttcacaaacattggccgcacaaaatggtcgtaaacataagcagcaccattgaacgaaggtaagaccaaccagcagttaaaaaacagttttgcatatgaccaaaatggaagccactcgataattggagcaaaagttagctcaaacaaagtgacaaatgagtacaacacccagtaagtgagccactgctgatcatctacaggattttttgtctctattgctctaacagaagcatatagaggataagcaagtgatatgagtggcccggcaaggacatcgaagttcttggccagcaccttgaggaaagatccggaccccatcttgctctctgctcctcctccagtagaacagaactatcggcctcccctgcagctaaaaacctggaagcgcgcgctctctctctctcttcctgtcttcctctctc

SEQ ID NO: 262938 - DNA, 1460 bp, Zea mays
gaaaagaactggtttatacttttttttagaagtttataaaattacaaccataaagatcagcactaacattaatgactttgctaacataagagtggcataccatgcgtgccatacaaactacaggtacattcatacatagcataacttacagcacatgatacaagctaccgagcacggtcaatcttaaatatataaaaaagacaatattgaaggctcccatatgagtggggtctgatgaaggagagaaaccagggcaggctttccccgcaaatacggagaagctacttcgaaccagtgaccttatgactcagtgatcttaaatttagaagaagaaaaaaagagcaaagcttattttgcccaggattccatctaaaatgcagtttctgtgctggtaggggatgatcaggcttgagctcttgtttgagggtttgcatggaaagccgactgcctattttgacccacctagcagatttagcgacagagaagtagacactgtctcctgaccatgctcccatatgcttagctttgacatgcccacgagttcatcaacattaattggattctgggaatgaactgcaacaggcttgacaatctcgtgtgtttcttggggaagatcgcctccatcttcctgatttggccagaaaggaactgagaattgcaagaacggcgagaaataagctggaacaatcatcggataggtaggctgtaaactctcgggcatgagagcagaagctccagaactctctgcgacagcagaagtatctgactccatcgattccacctcctcctccacaggaggcggcagtggcggttgatttaactgtgagatctctggttcttgacttccaggaaggggtggaaggtccatggactcatcaggaaccatgtcgaaaaggctagaccttctcttccttctgctcatatttgattggcgtataaaatacttttgagcatgacttgctacttgagtaggtgttcttgagaccacgaaattacgagaaatccctcgccaatcacctttcccaagcttttgtaatcccagcaaaaacctccggtgttcttcttcagtccaaggaacacctttcttacgctcgcggctggcggaggacgacccctggacgaagtcgtcggaggcgtagcccccgccgccgtcggcgaggtcgggcccgtcggcgggcgacgcgccgccgctggttgaccccgcggagaggagggagaggttccccatgcttgcgctcttgcggatggccgagccatcggtgaggcgcaccccgaagatcttgaccccgcggttggggcacgtccgcgagttgtgcccgttgtggctgcagtgcgagcaccgccgcgtcatcccgccgccagccagggttcgtgcggtttgcgtgtgtcgggactcgtgagaggaacgacggtggtgatggtgatgggaggaggaccggagccggtgcgaggaagccgtg

SEQ ID NO: 262939 - DNA, 555 bp, Zea mays
ctcatattttatttggcgtataaaatacttttgaagcataacttgctacttgagtaggtgttcttgagaccacaaaattcgaagaaattcctcgccaatcccctttcccgagcttttgtaatcccagcaaaaacctccggtgttcttcttcagtccaaggaacacctttcttgcgatcgcggctggcggaggacgacccctggacgaagtcgtcggaggcgtagcccccgccgccgtcggcgaggtcgggcccgtcggcgggggaagcgccgccgctggtggatcccgcggagaggagggagaggttccccatgctcgcgctcttgcggatggccgagccatcggtgaggtgcaccccgaagatcttgaccccgcggttggggcacgtccgcgagttgtgcccgttgtggctgcagtgcgagcaccgccgcgtcatcccggagccacctccgcctcccgccgccagctagggttcaagcggtttgcgcgggacgcgtggcgcccagtggtggaggtggtggtccggtggaggactggaggtggtgggaggaagaa

SEQ ID NO: 262940 - DNA, 396 bp, Zea mays
gctattgctgtctacgcaggtgccaaattccggtgcacctgtggagccctactaaacgggcgggatgcaagtgcttttatgtctgcacaagtcctgtgaaactgtttactgcgacctgcagattttactcttggagtgccctgagtagattttagcaataatatccaacatgtaacatgttacggacatgtacccaaacgtgatccagttttagttaatgtgctccatgcttgacgttttgtgctgctgtggttacatcgttgcccttctaccttacatagttgtgacggcaattgtttcattttggttgaaggtgaaagaatcgagtgggaagggtgaactgtggtaatctaaatcttttctcgcaacaattaaaattcactgcttagtctattt

SEQ ID NO: 262941 - DNA, 579 bp, Zea mays
ctagatcgcgagcggaccccttttttttttttttttagcacataaacgattaacgctagcggctacctccatttacacagtccacaactgctctagaactcatcattatgtcgtagcggtggatgtaacaaggtacaatattcacagtcagaaatatgggaatgtcgtcctggcgatagcttaaagaatgtatacaaatcttttgtgagcgaataccccattgtttcgattgaagatccttttgaccaggatgactgggttcactatgctaagatgactgaagaaattggagagcaagtgcagattgttggtgatgaccttttcgtcaccaaccccactagggttgctaaggctatcaaggagaaatcatgcaatgcccttctgctcaaggttaaccaaatcggatctgtgactgagagtattgaggctatgactagtcatcacaccccagcccgcacgctttgacatctttacagcctcaatactctcagttacaggagtggtgagactgaggacacttttatagctgatctggcagttggtttgtccacgggtcagattaagaatggagcaccctgc

SEQ ID NO: 262942 - DNA, 1275 bp, Zea mays
gcgttgacgcgtgggtcgctacaaaaatgttttgaagatcttgaatattcctaccttattgatcgtgcatccgaatgggggaaaagggggaatagtcttatgaggattcttagcatagcagcatttgctgtttctggatatgcctctacagatgggaggagctgtaagccttttaatccccttcttggggagacatatgaagcagactatccagacaaaggcctccgttttttctctgtaaaggttagtcatcaccctatggttgttgcttgccactgcgtgggaactggctggaggttttgggctgatagcaacctgaagagtaaattctggggtcgttccatccaacttgatcctgttggtgaattaacactggagtttgatgatggggaagttttccaatggagcaaggtgacaacttcaatttacaatctcatattgggcaagctatattgcgatcactatggtactatgcgcattcaaggtaatcgtgagtattcatgtaagcttaagttcaaggagcagtcaattatcgatcgcaaccctcaccaggtgcaaggtgttgttcaagatagaaatggtcgaactgttgctacactatttggaaaatgggatgaaagcatgcactatgtaatgggtgattgctttgggaaaggcaagggaactgaacagttatcagaggcccatttgttgtggaaaagaagcaaaccacctaagtttcccactagatacaatctcactcaatttgcaattacattgaatgaacttacccctggattgaaggagaaactgccacctacagactcaagattacgaccagaccagagatgtctggagaacggtgaatatgaaagggcaaatgctgagaaattgaggcttgaacagagacaacggcaggcacgaaagatgcaggagagcggatggaagcctcggtggtttgcgaaggataaagctactgacacataccgttacgtcggtgggtactgggaatccagagaaaagagcacctgggaaggttgccccgccatcttcggacaagtccctaacgatctgatggtaactgactaggttcgagtaggttataggtcttttgcttctccccatcggtatcacttgattccggaaattttagtggttcatattatagagcaattaagtgcccgttgacaagtaaacattggcagtgccttccgtaatattgggcctcgtacataacaagaagaaaatggttcggtctaaaaaaaaaaaaaaaataaggcggccgttttagaggat

SEQ ID NO: 262943 - DNA, 396 bp, Zea mays
cccacgcgtccgcccacgcgtccgagaacctgtaaaatatatgcaaaaaagcctcagggccgatccaagaacgcggagaggtggaactttgtttgccagcatacactagtgaaggtagaataccagaatcatgatgaatctaagccaccaaccaaatctcatttgtttcatgatgagacactaccatctttcttccgaaggttggcatggtcacctgatggatcttttctagtattgccagcaggcctttctaaacactcctccgaggtgattaatacagcttatgtaatgtccaggcgtgacctctcaaggcctgcgatacaactccctggggcaagtaaagctatagtggtagtacgcttctgccctgtactattcaaaccacgtggttctaac

SEQ ID NO: 262944 - DNA, 1269 bp, Zea mays
  unsure (1)..(1269): unsure at all n locations
gtgggtgggagactgggaaagacgagacagcgagacaccactgagacgagagtcagccggcaggtgagacatcgcaggggaaccagctctcaagacggccgacggcggcttgcctacctgctcccatccttcccgagggaccgagaaagataagaaaggcggtggtcaacttgtgtcctgaggtgcccgtagaagcccaaggacaagaaacaaggagaagagtagatctacatctactccaccgatgagcgcgtctcggttcatcaagtgcgtcaccgtgggggacggtgccgtcggaaagacctgcatgctcatctcctacacatccaacactttccccactgactatgttccaactgtgttcgacaacttcagtgccaatgttgtggttgacgggagcactgtcaacttgggtctgtgggatacagcaggacaagaagattacaatagactgcgtccgttgagctatcgtggtgctgatgtttttctgctcgccttttctcttatcagcaaagcaagctatgagaatgtctctaagaagtgggttcctgaattaaggcactatgctcctggcgtgcccataatccttgttgggacaaaacttgatctgcgtgatgataagcagttttttgttgatcaccctggtgctgttccaatttccactgcccagggcgaagagctgaggaagctaattggtgctgccgcctacatcgaatgcagttcaaaaacccagcagaacataaaagcagtgtttgacgcagcaattaaggtggttctccagccaccaaagcaaaagaagaggaagaagaaggtgcagaagggatgcaccattttgtaactacaaacggtagagggcaacagtctggctgcggcgctgctgccaatgataaccatcgcctccttgctgtataatatatcgcctgatcatgccaccagcatgcacaagggagatggtggttttaggatccttgtcctactgtgttgtgtagaccaccgggtgtagttgactgtatctggttgtttgtatgtatggacaagacaaaactagcactgcagatggtatggtaaggcgtaagcaaatacaatatgacattggtccagttccaggaatgaatggaatatgacattggtccgagaaaaaaaaatttaatatttataatttttttaataataatttataatatttatttaatttgtttgggggggtgtgtttttgnattttaattattanaatttttttgttttttttttttttaattataatttttt

SEQ ID NO: 262945 - DNA, 1038 bp, Zea mays
cccacgcgtccggagatgttgagtagaggctttaaggatcagatttacgatgtctacagatatctccctccagaacttcaggtggttttgatctctgcaactcttcctcatgagatcttggagatgactagtaagttcatgaccgaaccggttaggatccttgtgaagcgtgatgagctgaccctggagggcatcaaacaattctttgttgctgttgagaaagaggagtggaagtttgatacactttgtgatctttatgatacactcaccatcacccaagctgttattttctgcaatactaagagaaaggtggattggctcactgaaaaaatgcgtacaaataacttcaccgtatcagctatgcacggtgacatgccccaacaagaaagggatgccattatgggtgagttcaggtctggcgcaactcgtgtgctaataactacagatgtttgggctcgaggactggacgttcagcaggtttcacttgtcataaattatgatctcccaaataatcgtgagctttacatccatcgcattggtcgttctggtcgttttgggcgcaagggtgtggcgatcaatttcgtgcgcaaggatgacatccgtatactgagagatatagagcagtactacagcacacaaattgacgagatgccaatgaatgttgctgatcttatttgagcagcaagaggatcgggaggggagcttcttgtgttggcttgaggcccttggcgcgagtgtggctgtggactggagcagatgggctttgtagttgggtgtggagcagagattatttccgtttttgccatggcatgaactgtatatattttagctcgctccagctcatgtaacactttgttgctgcgtttgtgcttgggatacgaagacctgtgttgatggcttcgttagtgtgacactgatttggcgtcggatttttgtttgtcatctgtcattcctgtgctgatctgaattgctgtttgtttattattattattattacaatcactatcaattattatggttgactggtattacaattac

SEQ ID NO: 262946 - DNA, 459 bp, Zea mays
cgagagctttacatccatcgcattggtcgctctggtcgttttggacgcaagggtgtggcgatcaatttcgtgcgcaaggatgacatccgtatcctgagagatatagagcagtactacagcacgcaaattgatgagatgccaatgaatggtggctgatcttatttgagcaaccgctcctcgcaaggtttggcttggtgtggcggtgagaagtggacgagaggggctttgtaatctgagtggagcagagatttgtttgtttacttttttggtgacggcttgaactgtatgtatatatattttagcatgctccagctcatgtaacactttttgggagacctatgttggtggcttcattattgtgacaatgacacggagaactgtgctgctgtgaaacacaaacaaccaaaacaaaaaccaaaaacacaaaaaaagggcgaccgctcgcgatctagaactagt

SEQ ID NO: 262947 - DNA, 965 bp, Zea mays
  unsure (1)..(965): unsure at all n locations
ccggaattcccgggtcgagacagacgaagtcagatccgtgttccgtgtccgcgtccagtgtgtccgctactccgctccccctcagtcctcagttcctcacctagcggtagcgtgcgcgcgggagacgtagatggcggcttcggaggcggcagcggcggcggcaacaccggtgacgccgacagaggggacggtgatcgcgatccacagcctggaggagtggagcatccagatcgaggaggccaacagcgccaagaagctggtggtgattgacttcactgcaacatggtgtcctccgtgccgcgccatggctccaatttttgctgatatggccaagaagtccccaaatgttgttttcctgaaagttgatgtggatgaaatgaagaccattgctgagcaattcagcgtagaggccatgccaacattcctgttcatgagggagggcgacgtcaaggacagggtcgttggcgcagcaaaggaagagctagcaaggaagcttgaactacacatggcctcgtagatcagtgatgccgtaatgtagtattcgcctaaataagaggacgcctcgcctcaactctgagaaaactagtgcttctgtgatggtaattcgtatgagagagtgccccctttggtggtacttcttcgtatgtagtattaactcctgtcttaatatgttgccctgcttgtgcttttcataccatgtttgctctttcagctgaggtgttatacggtaaatcggagtcaatatctttgaaattgattaactgtagtcacctagcttttttccctaacagccagcttggttagccgcgatgcgtgggttatttnggacagccatgtcttctcaggccagtatgctttctcttcctgaacactcaagtttccagaattacggtcttgtctggtattgagaaccgatatttgcatgttcatttccaaatcaatgttgaatgggacatttttttctc

SEQ ID NO: 262948 - DNA, 344 bp, Zea mays
ccctcgcgtccgcccacgcgtccgcggacgcgtgggtccgtgttccgtgtccgcgtccagtgtgtccgctccccctcagtcctagcggtagcgtgcgcgcgggagacgtagatggcggcttcggcggcggcggcggcgacaccggtggcgccgacagaggggacggtgatcgcgatccacagcctggaggagtggagcatccagatcgaggaggccaacagcgccaagaagctggtggtgattgacttcactgcaacatggtgtcctccgtgccgcgccatggctccaatttttgctgatatggccaagaagctcccatatgttgttttcctgaaagttgttgt

SEQ ID NO: 262949 - DNA, 1424 bp, Zea mays
gaccacgcgtgcgtgagaatggtcacaggagataacataaatacagcgtaggcaattgctcgtgaatgtggtagactgagctgaagatggcatagctattgaaggaccagagttcagagagaaaagcctagctgaactccttgaactggttccaaaaatacaggtaatggcccgatcatcaccacttgacaagcatacacttgtaaagcatttgcgcacaacattcaatgatgttgttgctgttactggtgatggaacaaatgatgctcctgcattgcatgaagcagatattggacttgcaatgggcattgctgggactgaggtggcaaaagagagcgctgatgttataattctggacgacaacttctccacgattgtaactgttgccaagtggggacgatctgtttacatcaatattcaaaagtttgtgcagtttcagctgactgtcaatgtagtggcactgctagtgaacttctcttcagcctgctttacaggaaatgcaccactaacagctgttcagcttctttgggttaacatgatcatggacacccttggcgcgcttgccttagccacggagccacctaatgatgacttgatgaagagagagccagtaggaaggacagggaaattcattacaaatgtgatgtggaggaacattcttggtcagtctttctaccagttctttgtgatgtggtatctccaaacgcaagggaaaaatttctttgggcttgaaggctctggtactgatattgttctgaatacgataattttcaactcattcgtcttctgtcaggtgttcaatgaaataagctctcgggagatggagaagatcaacgtgctcaagggcatgacaaggaactacgtgttcatggctgtcctcagcagcacggtgatcttccagttcatcatggtgcagtttctaggagagttcgccaacacgacgcccctgaccatacaccagtggctagccagcgtgctcctcggtctggccgggatgcccatcgctgccgccgtcaagctgatcccagtcggctcgtcatgataccattgaagattgctgctgcctgggatgggaagcacggcatgaaaagcgtcaggctgtccaagctgcatggtattcggtggagctgagctctctctctgtctctctgtgtgcgtaaacttttggaatgcacggagggcaggctagggaaatggagcagccgctgcagtttgagaagttttgtagcctggaaatgtggctagattgcctcggacctgtaagaaacatcgtgtttgttggcgccgggaaaaaagcagctagctgtggtggtggtgcagcagagttgttagattgacttcgaaatggaatttagactgcaggatatttatggtggatgaatggacggaaaacatggttcgttggttatttttactccttgctt

SEQ ID NO: 262950 - DNA, 1992 bp, Zea mays
gacgtgaccagcaacaaataggacacgccggctagtactgcgccacccactcagcgctgaaggcctgcagcgccagcgcagcgcctctctgctactgtgctggctgacgccggtggggtgtgagcgaactgcgagctgctgccacccctgctgccgcggtcgaccgccggccccggaccgagatggacgctcggtgggcggtgctgctcgcgccgctggggccaagggcgccaactggctgggcgggctgagccgcgcgtcgttccccaaggggttcgtgttcgggacggcgacgtcggcgtaccaggtcgagggcgccgcgtccaccaacggccggggcccctccatctgggattcattcgcgcacgtcccaggaaatattgcagggaatcaaaatggagacgttgcagtggatcaataccatcgctacaaggaagacgtcgatctcatgaaaagtttgaactttgatgcctaccggttctcaatctcatggtccaggatcttcccggatggcgaagggaaagtcaatccagaaggtgtagcgtattacaataatttgataaactatctgcttcagcaaggcatgactccttacatcaacctttaccactatgatcttcctcttgcgcttgagaagaaatatggagggtggttaagcgcgaagatggcggacttgtttacagactatgctgacttctgttttaagacctacggcgatcgcgtaaagcactggtttacattcaatgagccaaggatagtagcgctacttggctatgacacagggtcaaatcctcctcaaaggtgcaccagatgcgctgctggtgggaattcagcaaccgaaccttacatagttgctcataattttctcttggcacatgctactgcagttgcaagataccgtacgaaatatcaggctgctcagaagggtaaggtcggaatagtcctggacttcaactggtacgaggctcttacaaactcacctgatgaccaagcagcagcccaaagagccagggacttccacattggctggtttgttgatccattgataaacggacactatccacagataatgcaagatctcgtgaaggagaggctgcccaggttcactcctgagcaggctaaactggtgaagggctcggcagactacatcggtatcaacgagtacacatccagctacatgaaggggcagaagctggtccagctggcgcccagtagctactctgccgattggcaggttcaatatgtttttgcacgcaatggcaaaccgattggaccacaggcgaattctaagtggctctacatcgccccgacggggatgtacgggtgcgtgaactacctcaaggagaagtatgggaatccaacgatctacataacggagaacggaatggaccagcctggaaacttgacccgagaccagtacctgcgcgacgccacgagggtgcggttctacaggagctacatcggccagctgaagaaggccatagaccagggagcgaacgtggctggctacttcgcctggtctctcctcgacaacttcgagtggctggcagggtactcgtccaagttcggcatcgtctacgtggacttcaacacgctcgaacgccacccgaaggcgtcggcctactggttcagggacatgcttcagaagcattgagatctccagagccgagcctgagcacggaaggtaccattttgttcagcttcgcctagtgtttgggatggcccaatggttcaaatccggctcagtgcctggctaccaaaatgggaacaaaggacagctaccccgatcaattgtgatgttgtgtgtttgtgggtatgttctctctggagtttgagctgtggttattttatcgtgttggttgatcgtgtttgaaatgcttaattcaggactgtgacatctcgagttgttttaactaaatcttataagaactaccctgatcgagcgctgggtaattggataaaatgaaaccaagagcccccaaccaccgtttg

SEQ ID NO: 262951 - DNA, 585 bp, Zea mays
cttactcgtccgatcactctagcactcctaggagtggtaaactgatgttattttattcaatgaagtgtgtggtccaggattttatttttaaatgaaatgtgggcagggtctatatatgcttggaagttggaacaatggtcagcatactttcacattaataactctactgttcatgaaatgcattagcttgttctcctaaacgattggacatgtgcctgtcgaatttcattagtttcttggactgaaaactgctgatggaagagtgacatgatgttttaaaaacataggctgctcagaagggtaaggtcggaatagtcctggacttcaactggtacgaggctcttacaaactcacctgatgaccaagcagcagcccaaagagccagggacttccacattggctggtttgttgatccattgataaacggacactatccacagataatgcaagatctcgtgaaggagaggctgcccaggttcactcctgagcaggctaaactggtgaagggctcggcagactacatcggtatcaacgagttcacattcagctacaatgaaggggcaaaagctggttcaagtggcgccc

SEQ ID NO: 262952 - DNA, 967 bp, Zea mays
cgtacgcgtgggcggacgcgtgggcggacgcgtgggcagcgctgaaggcctgcagcgccagcgcagcgcctctctgctactgtgctggctgacgccggtggggtgtgagcgaactgcgagctgctgccacccctgctgccgcggtcgaccgccggccccggaccgagatggacgctcggtgggcggtgctgctcgcgctgctggtcgccagcggcggcgtccgtgtctgcgccgccgctggggccaagggcgccaactggctgggcgggctgagccgcgcgtcgttccccaaggggttcgtgttcgggacggcgacgtcggcgtaccaggtcgagggcgccgcgtccaccaacggccggggcccctccatctgggattcattcgcgcacgtcccaggaaatattgcagggaatcaaaatggagacgttgcagtggatcaataccatcgctacaaggaagacgtcgatctcatgaaaagtttgaactttgatgcctaccggttctcaatctcatggtccaggatcttcccggatggcgaagggaaagtcaatccagaaggtgtagcgtattacaataatttgataaactatctgcttcagcaaggcatgactccttacatcaacctttaccactatgatcttcctcttgcgcttgagaagaaatatggagggtggttaagcgcgaagatggcgtacgtcagtctaaagatatatctggtcatgttattaacgtgcttcgactttctgtgttttcccgaaagaaggacacacaacatagaatctctagtttcacatgatatagaactggaaataccagattatacttatatatgtatacaatttgctttgtagggacttgtgtacagactatgctgacttccgttttaagacctacggcgatcgcgtaaagcactggtttacattcaatgagccaaggatagtagcgctacttggctatgacacagggt

SEQ ID NO: 262953 - DNA, 742 bp, Zea mays
ctggtaacataaaatattctagtattacatggtattagctggaaaaatataaaaaacactttgcttccgaataggccctaacagtgctgctgtagcttcttcatggttgaaaacgagagagcgttcatctccttccaaatgtaccgagtcgatgctgcgccgatgttcttactaaacacacatttcatatcgctttacgaaagaatgccctcaacttcttggcaagaacaatcttatgtctttagaagcgactattaacttgtgcaaaaagtgccctaaagtctgtagttggcgtcccttcaccttctggttttgatgccagatcaaatgccttaaactttgactcttcgaatagcaatgcctgtatgcaaacttctgcaacatcggccctggctatagttcttgtttctgttttcaggatctcatcatccttcccaacaatcaactctcgcaagccaccatctttatcttgtaaaccgccagctcttataattgtatatggaagaccggagtctgctaggtactgttctgccttgcgcttccacaccagtatatttgcatttcctaacttgtttagcgggtgattgatattcgaagagtcaaagtctgtagttggcgtcccttcaccttctggttttgatgccagatcaaatgccttaaactttgactcttcgaatagcaatgcctgtatgcaaacttctgcaacatcggccctggctatagttcttgtttctgttttcag

SEQ ID NO: 262954 - DNA, 755 bp, Zea mays
  unsure (1)..(755): unsure at all n locations
aaagctgctgggggtgcgggtaccggattgcaatttccggccacacctacgcagttttagttttccgtacgaaatatcacccttctggggggggttgagtcctaagaggggttgacttaaactggtacaaggctcttacagactcacctgatgaccaagcagcatcccaaagagccagggacttccacattggctgggttggtgatccattgataaacggacactatccacagataatgcaagatcttcggaaggagaggctgcccaaggtcactcctgagcatggtaaactggggaagggctcgggagactacatcgggatgaacgagggcacatgcatctacatgaagggggcagaanctagtccatctggcgcccaggagctactctgcccattggcaggggcaatatggtggtgcacgcaatggcgaaccgagtggaccacacgcgaattctaagtggctctacatcgccccgacggggatgtacgggtgcgtgaactacctcaaggagaagtatgggaatccaacgatctacataacggagaacggtactcaacggaattccgtgtttcgcatgaacacgccacgccgcataccaagggaatcgtatttacatcgatcttttttttatttcttttctgtgttaccaggaatggaccagcctggaaacttgacccgagaccagtacctgcgcgacgccacgagggtgcggttctacaggagctacatcggccagctgaagaaggccataga

SEQ ID NO: 262955 - DNA, 371 bp, Zea mays
agggagcgaacgtggctggctacttcgcctggtctctcctcgacaacttcgagtggctggcagggtactcgtccaagttcggcatcgtctacgtggacttcaacacgctcgaacgccacccgaaggcgtcggcctactggttcagggacatgcttcagaagcattgagatctccagagccgagcctgagcacggaaggtaccattttgttcagcttcgcctagtgtttgggatggcccaatggttcaaatccggctcagtgcctggctaccaaaatgggaacaaaggacagctaccccgatcaattgtgatgttgtgtgtttgtgggtaaacaaaaaaaaaaaaaaaaaaaaaaaaaaaaaaaaaaaagga

SEQ ID NO: 262956 - DNA, 288 bp, Zea mays
caaatccggctcagtgcctggctaccaaaatgggaacaaaggacagctaccccgatcaattgtgatgttgtgtgtttgtgggtatgttctctctggagtttgagctgtggcttggctgcagcagcacttagggcctatttggacgaacaacctgtgttgctgctgaagcttcttcatggttgaaaacggagagcgttcatctccttccaaatgtaccgagtcgatgcagcgccgatgttcttactaaacacacatttcatatcgctttacgaaagaatgccctcaaca

SEQ ID NO: 262957 - DNA, 334 bp, Zea mays
cattgagatctccagagccgagcctgagcacggaaggtgccattttgttcagcttcgcctagtgtttgggatggcccaatggttcaaatccggctcagtgcctggctaccaaaatgggaacaaagggcagctaccccgatcaattgtgatgttgtgggtttgtgggtatgttctctctgcagtttgagctgtggttgttttatcgtgttggttgatcgtgtttccccccctaattccgggctggtgacttctccagttgttttaattaaatctgataaaagccaccctgatctaaaaatggccccctggatggaaataaaaaaaaagaatttaa

SEQ ID NO: 262958 - DNA, 451 bp, Zea mays
cagaacttcactcaagatcttccccctgctcgtgttcgcacggtcaagaacagaaggattgcgtactccgaggccattcctctgagaggttcaacatccaacgacactgagcacctcaagagctttggcagtacgaagcctgtttcgtcagtggtcgtctctgtgctggctgatcccagagaggctggcgatggggatggtgagggaaggatctcttcaaaatcattgtcccgcatcttagttgtcgttcttatagatagtgttaagtatgttacgtactcttgtgtcctgccgttcaaaagccatagccctcacctttaggtctgggttttggacgtgagttgataaagctgacctatacattttatagcagaagaggtgtaagacagctgcctttgttcatttattcaagttttgtgtgctcaaaaaaaaaaaaaaaaaaaaaaaaaga

SEQ ID NO: 262959 - DNA, 812 bp, Zea mays
cccacgcgtccgcccacgcgtccggtcgttttcacctcctccctctctcacggcggcttttctggcgacggcggcggcggcgacgacgagcagccacctggggaagagcaggtagcaggaaatggcggcgttcctgaggtcaaaatgttcaccagttggacgtactttgatgggaagccttggaaatagtttgtttggggctgccaactcttctgttggggcaataacaaggccttctcattgcgatgctatcagtcagcaaatcagaacattcatccagatgaggactaacctgaaggtggtcgataactccggggccaagcgggtgatgtgcatccagtccctgagggggaagaaaggagcaaggctcggggacatgatcatcggatccgtaaaggaggcccagcctcgtggcaaggtcaagaaaggagacgtagtctacggcgtggtcgtccgtgccgccatgaagaaaggacgcagcgatggcagcgaggtccagttcgacgacaacgcggtggtcctcgtgaacaagaagggcgagctgatcggcacccgcgtctttggccccgtcccccacgagctgaggaagaagaagcacctcaagatcctggccctggctgaacacattgtttgaggtgtgtcgcatagccaagccaagtgtttgtgggaatgtttttttttgtgtgttctctgtttgaataatgcattgtgaaacgatagcatggaccgtttgaactattttgatgacattgctcgtccatttggatggcccaaaaaaaaaaaaaaaaaaaaaaaaaaaaaaaaaaaaaaga

SEQ ID NO: 262960 - DNA, 1374 bp, Zea mays
cacgcgaccgcccacgcgtccgcccacgcgtccggccgagaacacccgtgcggcggcggcggcttctctgctgcctcctacgacgccggcggccccggccgccgcgagggcgaccaaggcggcgggcgccgtgcccgcggagaagcccaggtccaaggccaggaagcccggcgccgtgctgccggtggcgacgttcgcggcgccggaggcgttcgagccggcggggagcatcgccgcggcgcggcgggagcacgccgcgcaggcgcaggcgcagcgcaagtcgcggatcgcgcactacggccgcaccgcgtccttctcccgggtggagggccgagtcggcgccacggccacggccacggccgccgccgtccccgcctcccccaccgggctcgacgagaagcgctgcagcttcatcacgccctactctgaccccctgtatgtcgcgtaccacgacgaggagtggggagtgcccgtgcacgacgacgagtaagcaagccgccattattccttgctccttgcaagcgcaagctgatgctcacggcaacagctgtgctcacatgttcgagatgcactgcgacgacgggttgctgttcgagatgctcacactgtctggcgtgcaagtcggggccgactggacttccatcctcaagaaaagacacgtctacagggaggcgttctccggcttcaacgtggatgcggtcgccaagtacaccgagaagcagatggcgtcgctgagcgccgactacgggctggatttgggcaccgtcagaggaaccgtcaacaacgcctgccggattatcgaggtgcggagggacttttgctcgctggacaagtacgtgtgggcgttcgtgaacaacaagccgctgtcgccgagctacaagtacagccggaagatcccggtgaagacgtccaagtcggagtccatcagcaaggacatggtccggcgcggcttccgcttcgtcggccccactgtcatccactccttcatggaggcggtcgggctcaccaacgaccacctcgtctcgtgcccgcgccaccgcgtctgctccgccgccgcccgcgtaaataactgattctgctgacgaccaccaagcaaaactcaagagggaattatctaaggacaaccaagacgagagagagagagagaggtagcagtagtaatatacaaaagagagtgttggcggtttgcatgtgtgtatgatgacccagtgtgcttgtgtagattaattacggcctctgattagcgaatgaatgatcttgcttgctgtgaaaaaaaaaaaaaaaagggcggccgctcgcgatcccacgcgtccggctgatcctttgaccatattgtttttcgtggaagaagctttttaactattttttttccag

SEQ ID NO: 262961 - DNA, 944 bp, Zea mays
cccacgcgtccgcccacgcgtccggttctagatcgcgagcggccgcggccgccgagcgggccgtccccgcctcccccaccgggcacgacgagaagcgctgcagcttcatcacgccctactcagaccccctgtatgtcgcgtatcacgacgaggagtggggagtgcccgtgcacgacgacgagttgctattcgagatgctcacactgtctggcgtgcaagtcggggccgactggacttccatcctcaagaaaagacacgtctacagggaggcgttctccggcttcaacgtggatgcggtcgccaagtacaccgagaagcagatggcgtcgctgagcgccgactacgggctggatttgggcaccgtcagaggaaccgtcaacaacgcctgccggattatcgaggtgcggagggacttgggctcgctggacaggtacgtgtgggcgttcgtgaacaacaggccgctgtcgccgagctacaagtacagccggaagatcccggcgaagacgtccaagtcggagtgcatcagcaaggacatggtccggcgcaggttccgcttcgtcggccccaccgtcgtccactccttcatgcaggcggtcggcctcaccaacgaccacctcgtctcgtgcccgcgccaccgcgcctgctccgccgccgccgttaactgattctgctgaccaccgtccaccgatcgagagccagacgtaaggaagaagagagacctttatatataaggacacgtacaatacaaccgagaaaaaagagaaaggtagtagcctctagtagcactagaagtagtacgtagtatacggaagggagagtgctggtttgcaattgtgtgtacgtacgagtacgatgatcgagtgtgcttgtgtagattgattacgcccccccccctaattagtcaatgaatgagcttgcttgcaaaaaaaaaaaaaaaaaaagga

SEQ ID NO: 262962 - DNA, 424 bp, Zea mays
gcgaatgttttgtctgctcacaaacagggaggcgttctcctgtttttacgtggatgcggtcgccgagtacaccgagaagcagatggcgtcgctgagcgccgactacgggctggatttgggcaccgtcagaggaaccgtcaacaacgcctgccggattatcgaggtaccgtgacccgtacgtgagcttcaccccagtcgttgaaagatactagtagcagcagcagtagtagttccagtaccatcctgcaacggaaagacgaagggaggcggtcaatgaatggagaagaagaatatatatagtataaaatcatctgatggcgttgttcgttctccgtgtttcaagtgcggagggacttgggctcgctggacaggtacgtgtgggcgttcgtgaacaacatgccgctgtcgccgagctacaagtaca

SEQ ID NO: 262963 - DNA, 1640 bp, Zea mays
cccatcttctctttctccgtgccctcccaacacgcgttccccaaattctcccaccctactagaaatccccatatccgcggcggcgccgtccatcggattcgatcctcctagcgagtcgactccatctgatcggcggagccggggcaccagccaccatgtgggcggcatcgtgcctggcgtcgtgctgcgcggcgtgcgcgtgcgaggcgtgccggacggcggtcggcagcatcggccgccgctccgcccgcatcgcctactgcggcctcttcgcgctctccctcttcgcatcctgggcgctccgcgaggtcgccgcgcccctcctccagtcgatcccatggattaaccacttccacaagacccccgaccgcgagtggttcgagaccgacgcggtgctcagggtcagcctcggcaacttcctcttcttcaccatcctcgccgtcatcatggccgggataaaggaccagaaggacccccgtgacaaggtccaccacggcggatggatggccaagatcttctgctgggtcgtcatcgtcttcctcatgttcttcgtgcccaacggggtcgtcagcttctatgaatctatatccaagtttggctctgggctgttccttctcgttcaggttgttctgctgttggattttgtgcacggatggaatgagaactgggtcgccaaggatgagcagttctggtacatggctctgttggttgtctcggttgtctgttacattgccacgttctgtttctcgggtctcctatttcactggttcactccatctggacatgactgcggactcaacctgtttttcattgtcttcacgttgattcttgtttttgcgtttgctattgttgccctgcacccaaagatcaatggaagcttgttgcctgcatcagttattggtatgtactgtacatatctgtgctacagtggactctccagtgagccaagggattacgaatgcaatgggcttcacaatcactcaaaagctgtgtcaactggtagccttacattgggactccttaccacggtcctctctgtggtctattctgctgtccgcgctggctcctctgcaactgtgctctcgccaccagactcaccacgtgggaccgacaagccattgcttcccttcagcaaggcagacgaacaagaagataagaaggatgtgccgaggccggtgacatactcctactctttctttcacctcatcttctccctggccagcatgtactcggcaatgctcttgactggctggtcaacttcggttggtgagagcggaaagcttgtggatgttgggtggccatctgtctgggtcaggattgcaacccagtgggcgacggcaggtctgttcatatggtcgcttgttgcacccgtcctctttcccgacagggaattctaagttcaaccacggtaagcctggagcatcaaacgtgtctactgtggtagctaatatatcctatcaagtatgttgcctttaaaacatgctccgagtcggtgtttgcccactgttatcaagtttgtctacttaataacatgtgactttaggcattgtgccactatcttaacagtgaacgtgtgctgcttgtattgtgtatatactggagaattttaagaatgcttcgtgcgagcgtgttgtgtatcg

SEQ ID NO: 262964 - DNA, 543 bp, Zea mays
cggcaatgctcttgactggctggtcaacttcggttggtgagagcggaaagcttgtggatgttgggtggccatctgtctgggtcaggattgcaacccactgggcgacggcaggtctgttcatatggtcgcttgttgcacccatcctctttcccgactgggaattctaagttcaaccacggtaagcctggagcatcatacgtgtctactgtggtagctaatatatcctatcaagtatgttgcctttaaaacatgctccgagcgtggatggcaaaaagtcggtgtttgtccactgttatcaagtctgtctacttaataacgtgtgctgcttgtattgtgtatatactggagaattttaaggctgcatcatgcgagtgtgttgtgtaaaaataacgaagatgacgtgacaacttcaccgaggaggaccttaagaactacaagttaggccagcaacacactaggaagctcttacgaaccatattaaagacttgtttgaaacccatgtttgtccagctagctctgatatgattctgaatgataaattta

SEQ ID NO: 262965 - DNA, 538 bp, Zea mays
cctcccgctgcacgcatctccagggtccggatccatgggctgcttcctcgcctgcttcggcggcgacgccggccggcgccgccgacgccagaagtcgcggaggcagtctcccgcgaggactccgccgcggtcgattcatgttgcggtggcccgcgaggcggcggatgtggtggtgaaggaggtgtcgccgccgttgcgcggggcaaagccctcaacgctggcggaggccgtggaggcgccgcacgatgaggtcgccgaggatgcggatgtcgcggcgaaggacgcgtcgctgccgtcccatgaggtgaaggcttcaacgccgccgccggctgtggcggctgcggatgaggcggtcacagacgctagccccgtcgacgagctcagggatttgactgagcaaaaggtgttagagaagcaagccgcaccatcactctccccagtcaaatgttctcctattgtggcagcagttgtttccccacatgattcagtgaagtgttctccagttgtggcaggaggtgtttcagctctggattcagaa

SEQ ID NO: 262966 - DNA, 459 bp, Zea mays
cccacgcgtccgggaagcggaagcgaggcgcccgtcatgctctgcctcagcctggtcgcgccaccaccgatggcccccgccggccggcggcggcggcggcggcatccgacttctgtgacccgccgcggccaaaccctcgccgccctcccgtgccactgtggacggcggcacgtcatcggtgcctcctcggctgccgctctccttcctttcctcgcccctccttctctggccgctccgcccgtcgaccccgacgtggtgctccagcgagtgcacccgtcgaggccggactggtatgaggagttctatgcctcggccatggaccagggaatgaaatcatacgaagcagagatcgcaggatacaaagtaaagctcttctctcaactgtcgcctgcgggaaagaacattctcgagctcggtgttgggacaaggcctaacttcaaatactatgcaagtgaagat

SEQ ID NO: 262967 - DNA, 1498 bp, Zea mays
ttcccacgcgtccgcccacgcgtccgcccacgcgtccggagcgaaaccgaaagagaggcagagcttggcaatggagctcccgtggggaatgctgctgccgctgctgctggtcctctccgtctcgtcctcgtcatcgtcgtcggctgctgccacgctcgccgtcagcgctccgcccccactgcctgttcctcctcctcgtcatgctcaagacgccgaaggcatgctcatcaacggcaacttcgagacggcgccgcggaggctgaacaagaccctcatcgtggggcgccactcgctgccggggtggacggtgcagggccacgtggagtacgtctcgggcggtccccagcccgggggcatgttcttcgcggtgccgcacggcgtgcacgcgctgcgcctcggcagccgcgcgtcggcgtcgcagaacgtgacggtgcggccgggggcgctgtacgcgctcacgttcgcggcgacgcggacgtgcgcgcaggacgaggccctgcgcgtggcggtggcgccgtcgctctcggcgcccgccgacgtcgccgtgcgcacgctctacagcggcgcgtccgccgacacctgggcctggggcttccgcgcctcctcccccgtcgcgcaggtcacgttcgccaaccccggcgtgcaggaggaccccgcgtgcggcccgctgctggacgccgtcgccatcaaggagctgcccgcgccgtacccgaccaaagacaacctgatcaagaacgacggcttcgagatcggtccccaggtgctcaggaactcgacggtcggcgtgctgctgccccccaagcagaaggacgcgacgtcgccgctgcccggctggatcatcgagtcgctcaaggcggtgcggtttatcgacgcggcccacttctctgtccccgcggggcagtacgcggtggagctggtggccgggcgggagagcgccatcgcgcaggtcatccgcaccgtgcccaaccgcgcctacaacctgtcgttcgccgtcggcgacgcccggaacggctgccacggctctatgctggtggaggcgttcgcgggcaacgtcacgcagaaggtgccgttcgattccgccgggaaaggcgggttcaagacggcggcgttcaggttcgtggccggcggcgtccgcacccgcctcaccttctacagctcctactaccacaccaaggtcaccgacggcgtctcgctctgcggccccgtgctggaccaggtcaaggttgtgcctgtcaaggcgtagtgaaatgaatcgtgagagcgccgagtgacggtctgctctgctcgtcgtctgtagctgtgctcgtcgtgatttggcgtggtgggttgtgaaagtgtggtcgaattctggacccttcggaatctgatcgtggtgtgctgtgcggtgcgatgtgctgtagcgaaatttggttgctatctcttgttcactccacgtttggaatttgcgttttcaatccggtattgaaggtataataattaactgctaccccggtgactg

SEQ ID NO: 262968 - DNA, 839 bp, Zea mays
tcggccgagccttccgccaagccttccggtcaaaacaaaagttaacgggggcccaaaccccccaaatccagttccatcccaatcgccgagaaggggaagccaaatcgatggcggcggcggcggccggcggcgagaacagcggcgcgggcgcgggcgcgggcgagggcgagttctacctgcggtactacgtggggcacaagggcaagttcgggcacgagttcctcgagttcgagttccgccccgacggcaagctccgctacgccaacaactccaactacaagaacgacaccatgatccgcaaggaggtcttcgtctccccctccgtcctccgcgaggccaggaggatcatccaggagtccgatatcatgagtatgaggttttctgtttctgtttctgtgctcgatcttattgttctttttgattttgattttgttatgttcatttaacttattttattttatcatttttcatttattgttctttttttttttcattttatttgttcttctttgttcttcttatttttattttttcttttggttttaattctttttgtttttttatattattttttttaatttgttttttttttttatttttttttttgttttttttttttttttccttttttttttctttttatttttttttttttatttttctttttttttttatatttttttttttcttttttttttttttttcctttttttttttcttttttttttttctttttattattctttttttttttttttatttttattttttttttttttttttttttttttttttttttttttttttacttattttttatttttatttttttttttttt

SEQ ID NO: 262969 - DNA, 819 bp, Zea mays
gttcgatcggtatttgcagattggtgcgtccacacgagagtttacggcggcccaaaccccccaaatccagttccatcccaatcgccgagaaggggaagccaaatcgatggcggcggcggcggccggcggcgagaacagcggcgcgggcgcgggcgcgggcgagggcgagttctacctgcggtactacgtggggcacaagggcaagttcgggcacgagttcctcgagttcgagttccgccccgacggcaagctccgctacgccaacaactccaactacaagaacgacaccatgatccgcaaggaggtcttcgtctccccctccgtcctccgcgaggccaggaggatcatccaggagtccgatatcatgaaggaggacgacagcaactggcccgagcccgaccgcatcggccgacaggagctcgagatcgtcatgggcaacgagcacatttcattcaccacttccaagatcggctccctcgtcgatgtccagtccagcaaggacccggagggcctccggatcttctactaccttgtccaggatctgaagtgtttcgtgttctcgctcatcaaccttcacttcaagatcaagccaatccagtcttgagctccatcccaagccttcatgtagctggtttgtgagactgcgagtgttttgagagagaaccttttaaccatgtaagatgatgttgatattgtggacgatgcgtgcgatcggccctgtgtggtgcacttagtggaagtggaacccccctttgcatttgttttgtgcaaactgctgagtagtagtgaacgtgatatttgtgcctttttattccttcc

SEQ ID NO: 262970 - DNA, 608 bp, Zea mays
tactagtcacgataggaggaagactggaagaggaggcgagcacgtttgcggtgcccaccctcaccgtccactccagaaccccaaatccagttccgttccaatcgccgagaagggcagcaaaggggagaaaaaaaaaggaaatctatggcggcggccggcggcgagaacagcggcgctggcgagggcgagggcgagttctacctgcgctactacgtgggacacaagggcaagttcgggcacgagttcctcgagttcgagttccgccccgacggcaagctccgctacgccaacaactccaactacaagaacgacaccatgatccgcaaggaggtcttcgtctcgccctccgtcctccgcgaggccaggaggatcatccaggagtccgacatcatgaaggaggacgacagcaactggcccgagcccgaccgcatcggccggcaggagctcgagatcgtcatgggcaacgaacacatttcattcaccacttccaagatcggctccctcgtcgatgtccagtccagcaaggacccggagggactccggatcttctactacctcgtccaggtacagcctaacgatcgacttggatgtcaaagcatgatttcttt

SEQ ID NO: 262971 - DNA, 705 bp, Zea mays
caggagtcctatatcttgaaggaggacgacagcaactggcctgagcccgaccgcatcggccgacaggagctcgagatcgtcatgggcaacgaacacatttcattcaccacttccaagatcggctccctcgtcgatgtccagtccagcaaggacccggagggactccggatcttctactacctcgtccaggatctgaagtgcttcgtgttttcactcatcaacctccacttcaagatcaagccaatccagtcttgagctccatctcaagccttcatgcgactgtttttggagcgttttaagagagaaccttgtaccatgttaagatgctgttgagcttgtgacgatgcgcacggtagaagtggaacctttttttttttgcggttggattgtgcaaactgcgagcagtagtgagtgtggtatatttgtgccttcagtttcctgttgggtggagtgttcttgtcgtttggcacggcacactagtattcttctctgttatcagcgctctgttgaaggatggatcggaatggatgcccagatagtctgggacttgtggtgatgcaaatccagccagtaactagtatgaatttctttagtggggttgttgggctgctaaaaaccgccggactgagcaaaggaaccttgcgtctttgtgtaaagcaacaatcgaatctgtgtgtgtttgtgattaaagtcgtcattcggtcc

SEQ ID NO: 262972 - DNA, 313 bp, Zea mays
agccaaatcgatggcggcggcggcggccggcggcgagaacagcggcgcgggcgcgggcgcgggcgagggcgagttctacctgcggtactacgtggggcacaagggcaagttcgggcacgagttcctcgagttcgagttccgccccgacggcaagctccgctacgccaacaactccaactacaagaacgacaccatgatccgcaaggaggtcttcgtctccccctccgtcctccgcgaggccaggaggatcatccaggagtccgatatcatgaaggaggacgacagcaactggcctgagcccgaccgcatcggc

SEQ ID NO: 262973 - DNA, 557 bp, Zea mays
aacacttctcaacccaatgggcttgttgttccagatgcaagcttgcaggcagttaagtggacatctgatgtattagacttgatggagattggacaagcaaatagagcagttggttcaacagcgctaaatgaacgaagtagtcggtcacacagtattctaactgtacatgttcgagggatggatttgaagaatggatcagcctctgaggggttgtttgcatcttattgatcttgctggtagtgagagggtagagaagtctgaagtaaccggcgatagattaaaagaagctcaatacattaacaaatcactctctgcgttaggtgatgttatttttgctttgtcacagaaaagtgcccatgtgccttatagaaacagcaagctaacacaagttcttcaaagttctttacgtggacaagcaaacactctcatgttcgttcagataaatcctgatgttgagtcatattcagaaactatcagcactttaaagtttgctgaacggctgtctggagtagagttaggtgctgctagaagcaacaaggaaggaaaagatattaaag

SEQ ID NO: 262974 - DNA, 737 bp, Zea mays
ctcttctccagcgtccgacttcccactcgcctccctcaccgcagctctcccggctcggtcgcttcgccacctccgtcctccccccgcgctcggtcgctcgccacctgctctcccctccctccacgttgctcgcgcccgcgcttatataagtgcaggaggagctcatggcggacgctccggcgagccctgggggcggaggcgggagccacgagagcgggagccccaggggcggcggaggtggaggcggtggcagcgtcagggagcaggacaggttcctgcccatcgccaacatcagtcgcatcatgaagaaggccatcccggctaacgggaagatcgccaaggacgctaaggagaccgtgcaggagtgcgtctcggagttcatctccttcatcactagcgaggcgagtgacaagtgccagagggagaagcggaagaccatcaatggcgacgacctgctgtgggccatggccacgctggggtttgaggactatattgaacccctcaaggtgtacctgcagaagtacagagagatggagggtgatagcaagttaacttcaaaatccagcgatggctccattaaaaaggatgcccttggtcatgtgggagcaagtagctcagctgtacaagggatgggtcagcaaggaacatacaaccaaggaatgggttatatgcaacctcagtaccataacggagatatctcgaactaatgaagacatggaccttttctgcaacagctg

SEQ ID NO: 262975 - DNA, 938 bp, Zea mays
cgacgcagagactcgccaaatttcccaccctcctcctagccttctcgtcgctcctgttcttctcgcatccccagcccaggtggtgtcccctgtcgcgttgatgcatgctccctcggcggtggccttgagctgaggcggcggagcgatgccggactccgacaacgactccggcgggccgagcaacgccgggggcgagctgtcgtcgccgcgggagcaggaccggttcctgcccatcgccaacgtgagccggatcatgaagaaggcgctcccggccaacgccaagatcagcaaggacgccaaggagacggtgcaggagtgcgtgtccgagttcatctccttcatcaccagcgaggccagcgacaaatgccagaaggagaaacgaaagacaatcaacggggacgatttgctctgggcgatggccactttaggattcgaggagtacgtcgagcctctcaagatttacctacaaaagtacaaagagatggagggtgatagcaagctgtctacaaaggctggcgagggctctgtaaagaaggatgcaattagtccccatggtggcaccagtagctcaagtaatcagttggttcagcatggagtctacaaccaagggatgggctatatgcagccacagtaccacaatggggaaacctaataaagggctaatacagcagcaatttatgctagggaagtctctgcattgcttaccatgtgtattggcagaaaacaggaggcacttacaaagggtgttaatctctgcgatggctgcctctcaggtgtaaattggcttccgtttagcgctgcttttgtccgtatatttaggatgatttgactggtgctacttttggccaccttttacatttacagatatgtattattcagcataaatataatatagtagttctaggcctaaataatggtgattaacataccaagtcttt

SEQ ID NO: 262976 - DNA, 498 bp, Zea mays
tttgttcgcctcctcttctccagcgtccgatcgccggttcccacctctcctccctccgccgccagctcccgcccccttctctcccctcctcgcctccccgcgcgcgcgtttttataagggtttcggcggaggcgcccggtcgctggcgatggccgacgacggcgggagccacgagggcagcggcggcggcggaggcgtccgggagcaggaccggttcctgcccatcgccaacatcagccggatcatgaagaaggccgtcccggccaacggcaagatcgccaaggacgctaaggagaccctgcaggagtgcgtctccgagttcatatcattcgtgaccagcgaggccagcgacaaatgccagaaggagaaacgaaagacaatcaacggggacgatttgctctgggcgatggccactttaggattcgaggagtacgtcgagcctctcaagatttacctacaaaagtacaaagagatggagggtgatagcaagctgtctac

SEQ ID NO: 262977 - DNA, 438 bp, Zea mays
cccacgcgtccgcggacgcgtgggtcgcaccctcccgggccgccttctcttctccagcgtccgatctcccactcccctccctcaccgcagctctcccacctccgccctccccccgcacgcgctcgccacctcgccctcccctccacgttgctcgcacccgcgcttatataagtgcaggaggagctcatggcggaagctccggcgagccctggcggcggcggcgggagccacgagagcgggagccccaggggaggcggaggcggtggcagcgtcagggagcaggacaggttcctgcccatcgccaacatcagtcgcatcatgaagaaggccatcccggctaacgggaagaccatcccggctaacgggaagatcgccaaggacgctaaggagaccgtgcaggagtgcgtctccgagttcatctccttcatcactagcgaa

SEQ ID NO: 262978 - DNA, 657 bp, Zea mays
  unsure (1)..(657): unsure at all n locations
aaaccatcctattcctcccaaggcaagaaaccaagaccatggctggcacggccaagacccgcgtcctcggcttcctccttgccgaccgcggacgcgtgggctcgacgccggctgcggccaccacgctgacgctccacaacctgtgtccgtaccccgtatggccgctggtgagcccgaacaccgggttccccgccatctccgagaacacgggccgcctcgacggcggcgggcgcgggctggtctccttccgcttcccggacagcttctgggcgggccgcgtggtggcgcgcacgggatgcagctccgggcattcccggtgcgagacgggaagcgttgcgccggcgacggtggtgcagctggtggtgcacgcggaggggcaagacctggcgtcgtacagcgtgagcctggtggacgggttcaacgtgcccgctgtggtgagcccgcaggcggtgggcggcgggcagtgcccggccctggggtgcgcggcggacctcaacgccgggtgcccgccctcgcagcgcgtgctgggggccgggggcggcgtggtggcntgcaagggccccgcgggctacttcaaggagcggtgcccgctgacgcgcaccacgcccaccgacgtggagcccgtgccgcagcggtgcttggcgcccggcgagctca

SEQ ID NO: 262979 - DNA, 988 bp, Zea mays
ctctgttaggcatctaactgaataaatgatctcctaaagaattgacagattccaggactgagcagcccttcgccccggtggctgcggtgtcgcactggctgacacctgctcgcagttgcattacaagttttactgactatgtattttcaggtttattcaatttcggttctaatgcttctgacagcagttgtatcagtcctcttgttcagcttacatgtatccctcgcatccttccttggatccacataagtgttaataataattttgttgcatctcctctgctgatcagagctttcaaactcatgacagaataatgtactaaacttcagtttggtgtctatctcagtgtacctacactcagttggaaaacttcaaccacactgcaaccaggtttataaaaggtactgctacttttggggcaattagtcattttagctatccgcttctatttcaccgtgcttgcaggtttgctatgaggaaaaacaaatttatgggctcaaacaaagtgtgatagtgaaagtcattttgcttccagcttaagaaccaagccaagaaaacagatatcaactgtgacgccacactcaaaagcttgtttggtgagagggataaggttgggatgctggagatctctaagcttttgagccgtggcttcccgaaaatctccaagcttttgtggtccatggagccagggatggctctttggtaaaagacttcgttgtggatggcctcttttatggtccatgttaagtcccaagtcccactaggtggttaagcagaaaaatcttgtgatggcattaagactttcagactttgtttttgggtctgatgcatgtaaaaaggattcccagtgtttctgttgctcttgcgatcctgtgaggacacatatgagagaaatatttagtttgttgatggcaaatcttgtcttatgttcatgcctgtacctatctgatcaagcgttatgatatgatcccatgcgtggtactgtgtt

SEQ ID NO: 262980 - DNA, 1054 bp, Zea mays
cccacgcgtccgcccacgcgtccgcccacgcgtccgccccgcgtccgcggacgcgtgggtgttgatgatgtcaatggagggagacttatcttctatgacttcgggatgatgggaagtatcagtcaaaatatccgggaaggattgcttgaagtattctatggagtttatgaaaaggatcctgacaaagtgcttcaagcaatggttcaaatgggtgtccttgttcctactggagatatgactgctgtcagaagaaccgctcaatttttccttaatagctttcaagagcgcctagcagcacaaaggaaggagagagaaatggcaaccgcagagctgggattcaaaaagcaattaactaaggaggagaagtttgaaaagaggaagcagagacttgctgcaatcggagaggatcttttggcgattgctgctgatcaaccatttcgcttccctgccacatttacatttgtggtcagagcattctcagttctagatggtattgggaaaggccttgatcctaggtttgatattacagagattgctaagccatatgccaaggaattgctaagatttaatgacgctggtgttgaaatagttgtgaaggatgcaaagaagagatgggaaaggcagtcccgtgccttttacaatttgttccgccaacccgatagagttgaaaagctcgcacaaattattgaacgtttggagcaaggtgaactcaagcttcgtgtcagaacgctggaatcagaaagagcatttcaaagagttgccgctgtacagaaaacaattggatatggagttgctgcaggtagtttgatgaaccttgcaacaatgttgtacttcaattcaatccggggaccagcaaccattgcatactccctctgcgcatttttcgggctgcaagttctgatcgggcttgtcaaggttaagaagttggatcggcaggagagactgataaccggtactgcatgagctatgagttattcacgatcaatcggtgaggactgaattacaccacttttcagcgttgtcgcgacacctttttttttcttttgcccaaatt

SEQ ID NO: 262981 - DNA, 441 bp, Zea mays
ggcccttcaaatgagttccacgcatcaagaagtcaagattccaggaggcctaaaataggagaggagggcgcagcttgattcaatccatgtcaagtcagaggctgctgcgaggtttgcacatgcaagtagaatttagatggtcctgcttcgctttcatgtggatttatcttgcaaatggtatgtggatccgttccagaggcaatgagccttgcagccagtttgcagtataaaaaacccaattatgtccactgctggttcgacgcagcgtgtgccgaggatttctactgccaagcataagaaagtatttgaaatcaagaacttgcattcattcaatcataatgtgtttcctatcaagcataagtgtgtgtgttttgtttgatatctgctttaataggagaatggtcttggcaccccaaaaatgttcccattctactttcgggc

SEQ ID NO: 262982 - DNA, 524 bp, Zea mays
cggacgcgtgggtatttatgatgagtgtgcgtctgttttatatcaggaaatagactatatggaggaggcatttaacgctgaaaaatttgctgaaaacttcaaaaaattggattatgtgaaggttcctgaaatttactgggcacacactactcctcaggttttaacaatggaatatgtcccaggaattaaaattaacagaataaagcagttagataagttaggagtcgatagaaaaagattaggtcgttatgctgttgagtcctaccttgagcagatcttatcccatgggtttttccatgctgacccgcatccaggaaacattgctgttgatgatgtcaatggagggagacttatcttctatgacttccggatgatgggaagtatcagtcataatatccgggaaggattgcttgaagtattctatggagtttatgaaaaggatcctgacaaagtgcttcaagcaatggttcaaatgggtgtccttgttcctactggagatatgactgctgtcagaagaaacgctc

SEQ ID NO: 262983 - DNA, 640 bp, Zea mays
gaaggcaccagcaacagcccatggcaaacgccgcagatgaccctatggcagatgaagccggagtagaagatgccttcccacaggagatcaatcattcgtacgtccctagataccatgtgttgagttggatggaaactgtggaggggatggtggccggtgtggcgtcgcttccgccggtgtatttgatactgaacagagatcttcttgagacgggatggggatggaagaggctggtgccctacagacctggttatgttgagtggcatgtgttcaagaaataccttggggactatttcgaccataatcgtgaagcttttctttgtgccgagcagaagcctgatccatttggatggattattgctgaaaagagtgccctgattgctgcagccaaattgtgcctcaagatggagaaggcacttctcaggtactgtgctagctttctcactcctgacgacaaaaggctgatcctcgggatcaaggaccaggcaaagcaaatgatccaatcagaggtgctttaagcaatggttcaaatgggtgtccttgttcctactggagatatgactgttgtcagaagaaccgctcaatttttccttaatagctttcatgagtgcctaacagcacaaaggaaggagagagaaat

SEQ ID NO: 262984 - DNA, 606 bp, Zea mays
cttcacgcgtttgcaggaggcctaaaataggagaggagggcgcagcttgattcaatccatgtcaagtcaaaggctgctgcgaagtttgcacatgcaagtagaatttagatgaattgacagattccatcactgagcagcccttcgccccggtggctgcggtgtcgcactggctgacacctgctcgcagttgcattacaagttttactgactatgtattttcaggtttattcaatttcggttctaatgcttctgacagcagttgtatcagtcctcttgttcagcttacataataatgtactaaacttcagtttggtgtctatctcagtgtacctacactcagttggaaaacttcaaccacactgcaacaaggtttataaaaggtttgctatgaggaaaaacaaatttatgggctcaaacaaagtgtgatagtgaaagtcattttgcttccagcttaagaaccaagccaagaaaacagttatcaactgtgacgccacactcaaaagcttgtttggtgagagggataaggttgggatgctggagatctctaagcttttgagccgtggcttcccgaaaatctccaagcttctgtggtcgatggagccaggg

SEQ ID NO: 262985 - DNA, 2481 bp, Zea mays
actagaaccccccctcgcgtcgagagccgcgtccccccgcgtgctctccgcctgcggcctctgtatcccgcaaccaaaaactacccccaaaaaaagaagaaaaccccaaatcctcgagatctatcagtatcgagcgacttaccaatccgattgctagggtttagtttcgaaaaaatctgaaaaaaaattctggtcgaggggaggaggcgatgtcggcgcaagtggcggtggtgcctaatgggggcccgggcgctgtccccgcggtggtgtcgccgggagctgtcggcgtggctcagcctctcccgaccacgtcgctctacgtgggcgacctggagggggccgtctcggactcgcagctgtacgaactcttcagccaggcggggcaggtggtgtcggtgcgcgtctgcagggatgtcacctcgcgccgctcgctcggatacgcctacgtcaactacagcaatcccttggatgctgcgagagcattggaagtgctgaactttgctgctcttaacaacaagcctatccgggtgatgtattcaaaccgtgatccaagcagccgcaggagtggatctgctaacattttcataaaaaatcttgacaagacaatagacaataaaacccttcatgagaccttttcttcatttggtaccattctctcatgtaaggtagccgtggatgaagcaggccaatccaaaggctttggttttgttcagtatgacaaagaagaagctgcgcagaacgctataaaaagtcttaacgggatgcttataaatgataagcctgtttttgttggaccttttgttcgcaagcaagaaagagatcattcttttgacaagacaaaatttaacaatgtctttgtgaaaaatttgtctgagtctaccacaaaggaagatttactcaaaatctttggtgaatatggggatattacaagtgctgttgtgatgattggtatggatggtaaatcaaggtgctttggtttcatcaattttgagaatccagatgcagcttcccgtgctgttcaggaacttaatggtaagaagataaatgacaaagagtggtatgttggaagagctcagaagaagtcagaaagagagatggatctaaaaaggagatttgagcaaagcttgaaagatgctgctgacaaatatcaaggactgaacttatacctcaagaacttggatgatagcattggagatgatcaactttgtgaattgttctctaactttggcaaaattacttcgtacaaggtgatgcgtgaccaaaatggtcttagcaaaggctctggatttgttgctttctcaactcgtgaggaagcatctcaggctttaactgaaatgaatggcaaaatgatatctggaaaaccattgtatgttgcatttgcacagcgcaaagaagatagaaaagcgatgttgcaggcacagttttctcagatgcgccctgctgtaccaatgacacccactctagccccacgccttccaatgtactctccgatggctcctcagcaactcttctatggacaagcgccaccagctatgatgccccctcagccaggatttgctttccagcaacagcttgttccaggcatgaggcctgggggtcctcatatgccaaattattatgttccggttgtccaacagggccaacagggtccacgcccaggtattaggcgtggagctggagcccagggccagcaacctgtgccaccatttcagcagcagattcttccgcgaggacggatgtaccgttacccaactggtcgcaacatgcctgaagctccagcgatgccaggggttgctggaggtatgattcaggcatatgatatgggaggcttccctgtgagagatgctgccttatcaccggccgctcaaattgggactctgacttctgcccttgcaaatgctaatcctgagcagcaaagaacgatacttggtgaaaacctatacccactggttgagcaactggaaccaaaccaagctgcaaaggtcactggaatgcttttggagatggatcagaccgaggtcctccacctgctcgagtcccctgatgccctcaagtcaaaggttgctgaggcgatggatgttctccacaatgtggcccatcagcaaaacgcaaaccccccgaccagtcagcttgccgcattatcactaaccgaaggcattatgtcctaacttgaaagccataacaaactatcttcagtttgcaattgagtgatgtttccagaggttatctggcacatgacagtattgctccttttttttcttctatggttggacttgagtgctgttttcgtatttgcactctgcggtgtactgccgttaaggcaaatcagttgtttgcaagtttgagtgttattgggggccgttgattacatacctgtcttttgcaccttgtcggaagttttgctacttaattgaatgagtgagggaccttgtttgccaaaagaaaaaaaaaaagaaaaaaaaaaaaaaaaaaaaaaagaaa

SEQ ID NO: 262986 - DNA, 656 bp, Zea mays
tatacccactggttgagcaacggggacttatccaagctgcaaaggtcatttgaatgcttttggagatggatcagaccgaggtcctccacctgctcgagtcccctgatgctctcaagtccaaggttgctgaggcgatggatgttctccgcaatgtggcccaccagcaaaacccaaacctcccgaccagtcagcttgccgcattatcactgaccgaaggcattatgtcctaacttgaaggccataacaaactatcttcagtttccaactcagtgcgggtgtttccagaggttgtctggcacatgacagtattgttccttcgatactatggttggacttgtgaatgttgtttccatactggatgttaggttttatttgcgccctacggtgacctgccgttaaggcaaagaacttatttgcaagtctgagcactattttggggggtggggtggggggtgcgttgtttttataactgtcttttttcccctagttggaagttttcttactcaattgaatgaacgagggaacttattgcatactatcaaatgttttgtgatatggtgttgagtaattatcaacaccttggatttttaaaaaaaaaaaaaaaaaaaaaaaaaaaaaaaaaaaaaaaaaaaaaaaaaaaaaaaaaaaaaaaaaaa

SEQ ID NO: 262987 - DNA, 415 bp, Zea mays
tgtctcctccgcgtgctctccgcctgcggcatctgtatcccacaacgaaaaactaccaaaaaaattagaaatccccaaatccgcgagatctatcagtatcgagcgatttaccgatccgattgctagggtttagtttcgaaaaagaaactctgaaaaaaaattctggtcgaggggaggagacgatggcagcgcaagtggcggcggtggtggtgccgaatgggagcccgggcgctgtccccgcggtggtgtcgccgggagcggtcggcgtcggactcggcgtggcgcaccgctcccgaccacgtcgctctacgtcggcgacctggaggggtccgtctcggactcgcagctgtacgagctttttcagccggcgggcaagtgtggtcgggcgcgtctgaggggacgtcacctggccgtc

SEQ ID NO: 262988 - DNA, 1799 bp, Zea mays
gtagttgactccagaagacaaatacactactgctggcgagcccccctcccttctctccccccttctctctctcttcgccgcagcgtcagccgacggcaaaaccctagatctctctccctcttaaaccctctcaacaagtgcgggaggatgtcagagccgtccaaggtaatccacatccgcaacgtcgggcacgagattgccgagtctgatctccttcagctgctgcagccgttcggcatggtctccaagatcgtcatgttgcgtgccaagaaccaagctcttctgcagatggaagacctccatgcttccgtgagcgcgctgcaatattacacttctgttcaacctagcataaggggaaggaatgtatacatgcagttctcatctcaccaagagcttaccactgaccagagctctcatggaaggaattctgatcaggggtccgaacccaaccgaatactcttagttactatccaccacatgatctatcctataacggtggaggttctacatcaagtattcaaagcttatggatttgtggagaagattgtcacatttcaaaagtcagctggttttcaagctcttattcagtttcactcgcgccaaggagctgtggaagcatttggttctttgcatggaaggaacatatatgatggttgctgccagctagatattcaatattcaaatctcagtgaactgcaagtccattacaacaacgaccgatctagagatttcacaaatccatcattacctacagaacaacgtcctagggcctctcagcaagcttatcctgatccagctaatctctatgccttccaacaagctggagcttcatatgcacagatggggagggctgcaatgattgctgccgcatttggtggaactttacctcatggagtgactggtaccaatgaacggtgcacactcatagtcagtaatctgaataatgataaaattgatgaggataagctcttcaatctgttttccttgtacggaaacatagttcgtatcaaggtactgcgtaataaaccagatcatgctcttgttgagatggctgacgggttgcaggctgagctagctgtgcattatttgaagggggctatactatttgggaagaagctggaagttaactactcaaagtaccctaacattacacctgccccagacgcccacgactacttgaactcgagcctaaaccgattcaacagcaacatggtaaaaaactaccgacattgctgctctccaacaaagatgatccacatctctgccctcccccaagagatctctgaggaagcaatcctgaaccatttgtctgagcacggtactgttgtcaacaccaagctatttgaggtgaatggcaagaggcaggctctcgttttgtttaagactgaagaggcagcgaccgaggccctcgtgtcaaagcatgccagcacacttgagggtaacacgatccggatctctttctcccagatgcagagtatataagccacctcaagggaaagctcatgccgccctcgcttgccacccggcgagcactttttaggaagcatttcagactaagatgtgaatcctctgcgccattctccaagacatgctgtctgagctgtacctccccctgaccttcgggttttcttttcactctacactggccttgcaccaaaaggtttctgtgtttctttccaaatcctgttggctaggttatcaaaggacatttaccccttgtcgtgatattctgagttggaaggcctgttaattgtgtgaatcgtaccatccttttgaatggaccccctttgccttgtttt

SEQ ID NO: 262989 - DNA, 335 bp, Zea mays
cgacggcaaaaccctagatccctctccctcttaaaccctctacgaggtaacgtttcttgcccggagattagagctttggctctagatctctcttctccccgtttcctcgattggttcgggaccttccatacgaccaatttcgtggtgtatattggctgctgcctgtgttacagtgcgggaggatgtcggagccttccaaggtaatccacatccgcaacgtcgggcacgagattgccgagtctgatctccttcagctgctgcagccgttcggcgtggtctccaagatcgtcatgttgcgtgccaagaaccaagctcttctgcagatggaagacata

SEQ ID NO: 262990 - DNA, 452 bp, Zea mays
  unsure (1)..(452): unsure at all n locations
tcgacgaattttatcttctgtcgtgtgggagagccgcggccccatcctccgtgtgatgaagttcgggaaggatttccggaaccacctggaggagacgctgccgcgtggagggacaagtacctcgcctacaaggccctcaagaagctcatcaagaacctggtgccacgcgagcccgcagcggcccctcctctccctcctcctgcccccgccgccgccgacgccgacgggccgggggctcctgccgccgcgcacgggaacgtcaacctggccaactggttcgccagcatcctcgacgcggagctgcacaagctcaacgagttctacatcgagagggaggagtggtacgtcatccgcctccangtgctcaaggagaggattgagcgcgtcaaggctaanaagaatgacgcttttacatccaggagtgagttttacgaagaaatgttagagatacg

SEQ ID NO: 262991 - DNA, 1543 bp, Zea mays
tggtagttctcctgcgtcgtacgaaagaaactgtgatcaatggcaaaccaataataaatttacctcctaagacaattaatctgaataaagtagatttcacacaagaggagcggacgttttatttgatgctggaagaacgctctcggcaacaattcaaggcatttgctgcggctgggacactcaaacaaaactatgccaacatccttttaatgttgctgcgacttcggcaagcctgtgatcatcctattcttgtaaagggcaatcagtcagaatatggaggtgatggttctatagaaatggcaaagaaacttcctaaggaagtggtgatagatttgcttgcaaaactggaagtggggtcaacactttgtggcttatgcaatgatacacctgaggatgctattgtgacaatttgtggtcatgttttctgctatcaatgtatacatgaacgaataacgactgatgataatatgtgccctgcccctaattgcagtagaacattaggtcttgaattgttattttcgtcaggagctttaaagatttgcatctctggcaaatccagttctgcagtagctagttcatcatcagataacgagtcatcttcaatcagtcaaagcggcttgtgtctcatccaagatacaagcagccattggggtactgaattcaatcattgtcatggcccctcttactgaaagttatacaatggaatcaagcagaagtggactaggccctgtgaaagccattgtcttttcccaatggactggcatgctggatttgctggagctttcactgaatatcaactgtatacagtacaggtgtctagatggaacaatgtctctcaatttaagagaaaaaaatgtgaaggattttaacactgacccagaggttagagttatgattatgtcactgaaagctggtaatcttggtctcaacatggtttctgcttgccatgtaattctccttgatctctggtggaacccttatgctgaggaccaggcagttgatagggcacacaggattgggcagactaggcctgttactgtatctcgcttgacggttaaagacactgtggaagatcgtattttagctctgcaggaggaaaagagaaccatggtgaactctgctttcggtgatgacaaagccggcggccatgcgacccggctcaccgtggaagacctgcggtacctatttaggatatgattgcgagggaactctctcaatgcctcggtcaacttgtcagggcatgatgcgttgtaccttgtaatcgtagtccggcaaaagggcggtgtaccattgcgagggtaggctcattggtccatgtccaccacgccttgctgcagctccagttttgtggtgctcagatttctagatgggtaatctagggctatatagcatgtgtaattataaccccccaaccccccctccccggggcatggaggagagttccgcagtgccaatgctttatgatttagtgtatgtatatacatgaacaccatgtctaacttgcaatccgttgttttagctcgaaaaaaaaaaaagaacaaaa

SEQ ID NO: 262992 - DNA, 409 bp, Zea mays
attcaataagccttggggcagcttctactgtttgtgggtggtcattggttcaatggctgttgcgcaaatattttcctctgtttacttcagtgcatggtccaacaagtcatatttcaaaccgcttgttttcagtagcattgttttgttcttggggaatgtatgctatgcaatggcatatgatatgaagtccctaacagtccttattatcggccgtttactctgtgggatgggttctgcaagagctgtcaaccgccggtacattagtgattgtgtccctgcaagaatacgcatgcaagcttcggcaggattcgttagcgcaagtgcacttggcatggcctgtgggccagcgctagctgggtttacttcaatggaaattcaagatctacatggttacgttcaatcaatcgac

SEQ ID NO: 262993 - DNA, 1010 bp, Zea mays
cggacgcgtgggctgaggacaaagcgaaaagaaaaaaaaagggaaaaggggctggtgcgcaaaaccctagcgcagtcgcatccatcatggcgatgtccatcttcgtcggcggcgactccggtgcgctcatcgcgccgtccgcgtcctcgctccgcccgccgttccgtcttgccgctggtcccaagggccatttttgtacttttcctcatggagcatctagcaatcacagccggctatgtgttgaacatcaaaggtgttctcgcagctccacccagaactatgctctttctaggaaggatttttctcctataactcaagatgtggaaggcttccttcacaatgttgttaacatgggttttcttgaccgtctgaaattagcgtggaagataatgttttctgcaccaaccacaaaggatacctccaatgcaaacatcgcaaaacagaggcttaagatgatcctgttctccgacaggtgtgaagtcagtgatgaggcaaagaaaaagatcgtggagaacatcattgaggcactgtctgagtttgttgagatagaatcaagggataacgtccaagtggatatctcaactgatgctggccttggcaccgtgtactctgtgtcagttcctgtgcgccgtgtgaagccagagtaccaggaatctgaagagcagtacagagggaaaattgttggtgtcgacttcaaggacactggagaatcctcagggagcgttgacgtcacctttgacttctttgtacccaatgagaactaattccctggacttctatcagagtgtggtctgcaatgtttcatctgttcgttgaatttgtgagccctctgggtagaaagttagaatgctttgttctctacagtgatgtaaatatctagggtccctgtttgctccatgtttcctgtaatttggttctggaattttgtcagagacctgcgttggtaggttcttggtaaaaccataaccatgttctcattgttaaaaacccaacgtccagttgctgtcttc

SEQ ID NO: 262994 - DNA, 899 bp, Zea mays
gaaatgctcgcaaggtttggtggagatagtcacgccagatcccaacccaaaggggctgacctttgaaaccggggttcaaatggtggggattaagaaccaattggttgttgaagggaaggttgcccaaatgtccctttccaagaaattgttgaaaaatacataacctatgcctaacctgaatgtgtttcccaaaatacatgatgccgatctagacaagattagccatgtttatgctgaactccgccgtgaatcctctcatggccaaggggttcctattgcagtaaggcatatagagtcaatcatccggatgtcggaggcacatgcaaggatgcatctgatgagctacgtgtctcatgaagatgttgacatggccatccttgtcttgcttgactcttttatttcgactcagaagttcggtgtgcagaaagcacttcaaaagaatttccggaagtacatgacattcaagaaggactacaacgagctgctcctgctgctcctgcgcacactggtcaaggacgccgtgcacttcgaagaaatcatggcaggatcagcctcacgccttactcacgtcgaggtcaaattggaggacctgaggaacaaggcccaagaatacgagatctacgatctgaagccgttcttctccagcgcgtgcttcagggacaacggcttccttctggatgaagggcgtgggatcatcaggcatccactggcggagtaacaactgagaactgatcttcctcatgtctagaaccggcctgtgtctgttagggcctgagatgaagagtgatgatatctgacctcatttgttatacgcatacaattgacacttggctggtcgccttttggatttagtatctgttgtgtcttgtgtgagagtttcgtactatatgcacttgctg

SEQ ID NO: 262995 - DNA, 354 bp, Zea mays
cccacgcgtccgggcgagtttcaggatttgggtcagaagaatcgggaaattccgaacatggagacgaacatggtgaagatgagaaattggcagacaattccattagcagaggctcagggccaaataaatcttgtgattatggcacacaattcgggaatttgcactcaattcctgaaacaggaaatgatcatcttgtactgaacatggatgctattgtcagaggtgatgcacaaatatctgttaccagggctcaagccgtcacttatgatgaagttgtggattggaatgaaactccgctgcctgacaatgacagtgtccaccctgggaaaaagagaaaacgccttctgacagaag

SEQ ID NO: 262996 - DNA, 858 bp, Zea mays
tagagctgttacgacgtatgctgcccgcctacggcatgctaggatccagtagagacgaacgacgcgtgcgcgctcgcgcatcctattgccctcgcgccaccgtcgccgccgccgccgctgcagcgagccaccgccccgccgtcgcctgaggtagacaccaatccaccgccatggggcgtatgcacagccgcgggaagggtatctcttcatcggcgctgccgtacaagaggactcctccgatctggctcaagacagctaccaccgaggtggaggagatgattaccaaggctgcgaagaagggccagatgccgtcgcagattggtgttctgctccgtgaccagcacggcatcccgcttgtcaagagcgtgactggtagcaagatcctccgcatcctcaaggcccatgggttggcgccggagatcccggaggatctctacttcctcattaagaaggccgtggcgattaggaagcatctggagaggaacaggaaggacaaggactccaaattcagactcattcttgttgagagcaggatccaccgccttgcccgctactacaagcgtaccaagaagctcccacccacctggaagtacgagtcaaccacggcgagcactctggtggcctaagtgatatcctctgatggcttggtctttagcacctatgagcttgttctagatatgaatttatgtaattcttgttatgtctggagctggttagatggacaaggaacctcaactttttctatgtttacttggagaatcccataaaccatttttggtttcgcaattctgtctgttaaacgtaacatgcatccatgttttgtcgaaaaaaaaaaaaaaaaaaaaaaaaaaaataaaa

SEQ ID NO: 262997 - DNA, 722 bp, Zea mays
cgccctcgctcctccgccgccgccgccttcgtatcaagcccccgccccgccgtcgcctgttgaagggtatctcatcgacggcgcttccctacaagaggacgcctcctacctggctcaagaccgctgcctccgacgtggaggagatggtcccaaaggcagcgaagaagggacagatgccgtcgcagatcggcgtcctgctccgtgaccagcacggtatcccccttgtcaagagcgtcaccggcagcaagatcctccgcatcctcaaggcccatgggctggcaccagaaatccccgaggacctgtacttcctcatcaagaaggcggtggcgataaggaagcaccttgagaggaacaggaaggacaaagactctaaattcaggctcattcttgtggagagcaggatccaccgccttgcccgctactacaagcgcacaaagaagcttccacccacctggaagtatgagtcaaccacagcgagcactctggtggcctaagtgtggtatcctccgacagcttgttctagatatgaatttgtgtaatgcttcttatgtctcgatccggttaaatggacaacggacctcatctttttttatgtttaccttgagaatcccgtaaaccattttggggttttgaattgtctgttaaacgtaacatgcatatgttttgaagcctagggtgagcttttacttcaccatcacttattattgttgcttgtcggccgc

SEQ ID NO: 262998 - DNA, 713 bp, Zea mays
gaaaattctctcagataagttgaataggatcgaaaaccctaatccgtctccctcctatcgcactcgcgtctctttcctattcgcgccgccgccgctgccgctgctgcaagcgccagctcgccgtcgtccgaatagtacactctaacgccgccatggggcgtatgcacagccgcgggaagggtatctcgtcgtcggcgctgccgtacaagaggacgcctcctacctggctgaagaccgccgcctccgacgtggaggagatgatcacaaaggcagcgaagaagggacagatgccgtcgcagatcggcgtcctgctccgtgaccagcacggtatcccccttgtcaagagtgtcaccggcagcaaaatcctccgcatcctcaaggcccatgggctggcacccgaaatcccggaggacctgtacttcctcatcaagaaggcggtggcgataaggaagcaccttgagaggaacaggaaggaccaaggacttccaaaattcaagacctcaattctttggttgaaaagccaagaatccaaccggctctggcccggttcttccaggcgtaccaagaagctcccacccacctggaagtacgagtcaaccacggcgagcactctggtggcctaagtgatatcctctgatggcttggtctttagcacctatgagcttgttctagatatgaatttatgtaattcttgttatgtctggagctggtta

SEQ ID NO: 262999 - DNA, 805 bp, Zea mays
gcggcggattggcgtctacctccatggggactttgctctgccgacgtcgacaagacgtggaggacgctgtgaccgcccgtccggagttcatcaacgggcaccacttcttccgcgtgttcgacggacaccgctgctcacacgtgtcgacatagttcggagagcggatgcaccaaattgtggccgaggaggcaacagctgccgcatgctcgtcggtatcggacgacgcgtcgcggagcaggactgtcatggacaagagctgcgcgaggatggacgcaagatcctccgcatcctcaaggcccatgggctggcacccgaaatcccggaggacctgtacttcctcatcaagaaggcggtggcgataaggaagcaccttgagaggaacaggaaggacaaagactctaaattcaggctcattcttgtcgagagcaggatccaccgccttgcccgctactacaagcgcacaaagaagcttccacccacgtggaagtacgagtcaaccactgcaagcactctggtggcctaagcgaggagctcagcgtcgggcgcttgaagccgagggcattgttggaaatcatttttatgtaccgttttaagagtttggagtgaactagagatggtgaatgtccctcctctggaggatgccatggaccctttttgtttacatagaactgccctgctgttaaacttttgctacttggcgaaggcagttgattgcttgcctccattaacacctgctatgcgagaagcttttagccaaaggctgaaaggcagagggactcctaaaaaaaaaaaaaaagggcggccg

SEQ ID NO: 263000 - DNA, 951 bp, Zea mays
cagacgcgtgggcagacgcgtgggtgacgagtcaattctctcaccgaggtcctggtgcccgaggggattcgcgaccccatcccaattcacaacgcatcgtcgtccgtctcccacaacacggtccactaaccctagcgacagcctcgggtcgtcgtttgatccccgcggggagctctagttccgccaagcgtgcgtaccggcgtccggatccgggaccgaagatgacggagtccctggtgcggaacaagccggggatggccagcatcaaggagatgccggtggtgcaggacgggccgccgccgggcggtttcgcgcccgtgcgcttcgcccgccggatccccacctcggggcccagcgccaccgccatcttcctcaccaccttcggtgctttcgcatatggcatgtaccaggtcggccaggggaacaaggtccgccgggcgctcaaagaagagaaaattgctgctcgcagtgctatactgccgatgctccaagcagaagaggatgaaagatttgtcaaagagtggaagaagtatcttgaggaggaggcgaggatcatgaaagacgttccagggtggaaggtcggcgagagcgtgtacaactctgggaaatggatgcccccggctactggtgagctccgccctgaggtttggtaagggcctgttgcaggcactgaatgccatcatgtcacgggggcacggataaagcttcatttttcattaaggatcagctgtttaaagacctgtatttgttgtacttgaaatctggctggttaataattggacatgtaaagccgacgtttacattgatgtaacgtgttcttgtctgctattgcttcccagcctctggtgtttcttcctgtaagtcattccgaacatgaatccttgttattgaagaaagtatggaatataaccagcccgtagcgtggtggcggcccctcctgtcgcgtgtggg

SEQ ID NO: 263001 - DNA, 762 bp, Zea mays
attaatactactgacagcaagactggggtgatccacgaagcggtatggagtccgggtagggtagctaggatgacggattctgtgttgctgaacaagccaggcatggccagcatcaaggagatgcctgttctgtaggacaggcctccgccgggcggttttgcgcccgtgcgctacacgcagcctgattcccacgtctgtcgccagctccgatggaatgttcctcaatggcttccagggctttaaggtatggcatgtaccaggtcggtcagggcaacaaggtgcgccgaggcactcaaagaagagaaaattgctgctcgtagtgctatactgccgatgctccaagctgaagaggatgaaagatttgtcaaagagtggaagaagtatcttgaggaggaggcgaggatcatgaaagatgttccagggtggaaggttggcgagagtgtgtacaattccgggaaatggatgcccccggccaccggtgagctccgccctgaggtgtggtaagggcctgttgtaggcattgagaatgcaatcatgtcatgagggcatgaataaggctttcagacatgggcatccttctttgttcactaaggatcagctgttcaaatacctgtatctattttgctcttatgaaatctggctggttaataatatgaagccgacgctttgcctcatctatgctcgtgcattgatgtaacgtgtccttgtctgatattaagaaactactatggaatataagaaagccaacagcctgcttcttgc

SEQ ID NO: 263002 - DNA, 515 bp, Zea mays
agacagacttaagcaatggacttatgtttttcttttcttttatttatctaatattaacaattgaacaagcaaactgatccttttacaggtacttatatgtgctaaggcatgacactaattgtgctgctatccaagtttcgcctgaaatgctcatctccttgtcatgccttattgcttttgcagtggttgttagtacttgtgtgattttccatctgttgcgtctaattgtgctgctatccaagtttctcctgaaatgctcatctccttgtcatgccttattgcttttgcagtgtttattagtacttgtgtggtttccatctgttacgtgtttgtgttttagtatcaccagccttaagtgctaatgattacccattagttgatatgatttccatgccggtgctgtatatacttttatctcttcggtcttagcttcatgggtgtgaaattacgtttgcagggcactcaaagaagagaaaattgctgctcgtagtgctatactgccgatgctccaagct

SEQ ID NO: 263003 - DNA, 388 bp, Zea mays
gtcctgcgccaccctccattaaccctagcggcagcagcgctcgtttgatccccgcggcggtccggcgtccgggtaggggagcgaggatgacggagtccctggtgcggaacaagccggggatggccagcatcaaggagatgccggtgctgcaggacgggccgccgccgggcggtttcgcgcacgtgcgctacgcgcgccggattcccacctagggccccagcgccactgccatcttcctcacggtcttcggcgccttcacgtatggcatgtactcatgtcggtcaagggaacaaggtgcgccggacactcaaagaagagaaaattgctgctcgatgctatactgccgatgctccaagctgaagaggatgaaagatctgtcaaagagtgg

SEQ ID NO: 263004 - DNA, 2095 bp, Zea mays
ttcatgcgtccgcacgcgacgcgaaccagctgtgagctggcgaggatccctagcggacactgtgcaggcgaccgcggcgcgctatcacttacggggggatacggcggcatcgtccccctcggcccctcctccatccctggtgcggcggcgccagcctgcaggtgttgaatgctgatttgttgtggctgattaatcgggttgatcgtcgattaatcgtgattagtcggctgatcgcccttctggcgatcagaaacgataaggcaatctgaaaacattggccgccaaacctccagagcgactcccgcgagccgtgaccaccatagccaaatcaacgcaccagaagctttcacggagctgtctcgtccacgagtgttccagctgactcctattccctgcgtcaatggcgagctctggcgatgaagggcgtgtggtggtggaccttggctccgcggcggagtcggtggctgctgacgaggaggcgcacgccacgcctctccacgagattgagtccctttgcatgcgctgcggcgagaacggcatcacgaggcttttgctgacgttgatcccgcacttccgggaggtggttctgatggccttcgagtgcccgcattgtggtgagaggaacaacgagattcagtttgctggacaactccaacccaagggatgctgctacagcttggaggttccgttggggcagagtgagatgctgaatcgtcaggtcgtgaagtctgattcagcgattatcaagattccagagctcgactttgagatccctccagaagctcaacgtggaacactttctactgtggaagggattattatgcgagctgtggatgagctgcaagctcttcaagatgaacggaagaaagtggatcctcagaaggccgaagctatcgatcaatttttactgaagttgagatctcttgggtcaggagaggctgcattcacttttattcttgatgatcctgcaggaaacagctttattgagaatccgcatgctccgttattagatcctttactatctgtgagattctacgaaagaactcgtgaacaacaagcagcacttggctttcttgctgaaccaccaaaagaacaacctggagaggctgtattgcctgcttcagcagtggaatccaattctgatgggttgcaaagcgtgccccatggctcagttggagctgttgcaggtcgtcgtgctatagctcagggaaaccctgatgaagttgctgcagcattgtgtagatattcagcaccagaagaggttgatactttaccatcaacatgtggagcctgtggaacagaatgcgtcacacgtttctttgctacaaaaatcccatatttccgggaggtgattgttatggcaacaacatgtgacatgtgtggttatcgcaattcagagctgaagcctgggggtgaaattccagctaagggaaagaaaattacactgcgtgttcaaaatgcacaagaccttactcgtgatgtcataaagtcagattcagctagcgtaaaagtacctgaacttgagttggaactttcatgtggaactttgggtggttatggtcacaactgttgaaggtttaattgtgaaaatatgtgaggctctggagagaatacatggatttcaattaggcgatagtacactggaatggaaaaagaagaaatgggatgacttcaaggagagactatccaagcttctgagtttacaagaagcctggactctaataattgatgatggattggcggcttcatttgtggccccggctactgattcgttagaagatgacagccaactaaccattgaagagtatcagaggagttgggagcagaacgaggaacttggtctgaatgacatggatacgtcctctgcagacgcggcttacaacacgaccaacacataatttttttagttttgttgtgccgaatgtatttgttacgctatcagtttactttgatgaactttcagtgtgtatactaatatcaacaacttatatttcctctggcgataaacaacgagcgaacgtgccaggcgcaagcccgatttcctgtcacccgtgcaggtcccccaaaaaaaaaaaaaaaaaaaaaaaaggaggaa

SEQ ID NO: 263005 - DNA, 383 bp, Zea mays
aattcccggctcgacgtcggatgtgagcgcgcgctcgtagttcgacgtgatccgcttggccatgtcctcggcggggaagccgtggggcgaccagacgatgctgacggccggaatgtcgatgttcgggaagatgtcggtcggcgtgcgcaggagcgcgagcggtcccgcgatgaagatcagcagcgcgagcacgacgaacgtatagggcctgcgcaacgccagccggacgatccacatgatgttgttcctcgaagcagggcaagggcgccgcattcgatgcgacgagcgtgcagtctgacgtcgccgcgtagacccagccctgactggaagattacgaaactgctatctgcgtgccgcagcctcagatttcggaattgtcattc

SEQ ID NO: 263006 - DNA, 1421 bp, Zea mays
cctgttcctatcgggtcaaatcatcaggctgaattacctgagtgcaggccatttggtggaagaactgaagaagacgaaagtgtcaagtggatcagaaacagtgttgtgccaatgcctggtactgatgcatcgtctttggtgttggagcctgttcactgcaaagcaggttgtgattgtcttgacgaaggttcaatcaattgtgtgagaaagcatgtgatggaagcaagagaaaatttgaaggattctgttggtgcagacgccttcagggagttgggtttctatgacatgggggaagaggttgcctcaaggtggtcagaagaggaggaacgtttgttccagcaagtggtctcgtcaaaccgtgcttctctgcgcaggaacttttgggatgaacttcctcttgccttcccttccaagtccagcaaagagctagtgagctactacttcaatgtcttcatgttgaggaagagggctgagcagaacaggttcgacccagcgaacattgacagtgacgacgattagtggcaggcaggtggtgattttgagtttccaataacaggaagaactgatgaatacatgccaatcgagtcccttactgatcaagatgatgttgcttgcaatccatttcccttggagggggatttatatggagattctgatgatgaggacgagctcgacaattccagtggagacaggcataatggtgtgcagagggctggtatgttgtcagagggtcatcccgaaatgtcatttatagatcatgatcaacagacgttgaagctagatgcagatgcacaagatgactcttgcacatcatttgaggctcatcaggttggttgcgatggtggggcacatactgatattggcaatcactacaggagtgacgacggcctttgtggtggtgcagaacatgggttcttcggtgaccagtgggacacaaaagagtggggctctcggtctcagtatcggttgggaaaagcatgattttttgtcaacaaacaatgtcatagaagaggtgttcgggaagtgctgtgacactgctgaccaggaccttatctgagccagacgcggaggcgtcttgtcagctgcgaaaactttacggttctctgaattgtacagcagtagttggctattttgatttaatgcctcacttgttcttacaggaatctcatctctgtccttggaacatcatctgcttgtgatttcgtcacatgattaatgtaaatccgtagatatcatctgtcgatctgttgatagcctgtggcatgtatgtatcatctttgttgtgacggtgtctcttgacctgagcgttttttctatgtgctagcgagggtcatgtaataaaagctgttgttgttccttgaccctgtctgcaaataaatgtaacctgccagtcaatgtattccgaaaggtcatttttatct

SEQ ID NO: 263007 - DNA, 305 bp, Zea mays
  unsure (1)..(305): unsure at all n locations
cacatactgatattggcaatcactacangagtgacgacggcctttgtggtggtgcagaacatgggttctttggtgaccattgtgacacaaaagagtggggcttcggtttcagtactggttgggagaggcatgattttttgtcaacgaacaatgtcatagaagaggtgttcgggaagggctccagtgaagatggaagtgacactgctactggccaggaccttatctgagccagaggcggaggcttcttttcagctgcgaaacctttagcagccccacccccccccttgttctcggaatctgaaaag

SEQ ID NO: 263008 - DNA, 1641 bp, Zea mays
cccaggtggtcgggatctccggcatgggcggcagcggcaagaccacgctcgccatggaggtcttcagggatcacaaggtccgagcctacttcaacgacaggatcttcttcgagacgatctcgcagtccgcaaatctggaggccatcaagatgaagctgtgggagcagatcagcggcaacatggtgctgggtacatacaaccagatcccagaatggcagctcaagctaggaccaagggaccgaggacccgtccttgtgatcctcgacgatgtttggtctctcccgcagcttgaggagctcatcttcaagttccctgggtgcaagaccctagtcgtatcaaggttcaagttccccacgctggtgaaacagacgtatgagatgcagctgctagacgaggcggcagctctgtccgtcttctgccgcgctgcgttcgaccaggagtgtgttccgcagaccgccgacaagagattggtcaggcaggtctctgcagagtgcagaggtctccctctggctctgaaggtcatcggcgcgtcgctgcgcgaccagcctccgaagatttggctcaacgccaaaaaccggttgtctcgaggagaggccatttctgactgccatgagaccaagcctctggagaggatggcggccagtgtcgagtgcttgtccgagaaggttagggactgtttccttgacctgggctgcttcccggaggacaagaagatccccctcgacgtcttgatcaacatctggatggagatccatgaccttgatgagccagatgcttttgccatcttggttgagctttcgaacaagaaccttcttaccctcgttaacgatgcacagaacaaggctggagatctgtacagtagctaccatgactactcggtgacacagcacgacgtgttgagagatcttgctcttcacatgagcgggcgtgacccgctcaacaagcgcaggcggttggtgatgccgagaagggaagaaacacttccgagggattggcagaggaacaaggatgctccgtttgaagctcagatagtctccattcatacaggcgaaatgaaagaatccgactggttccagatgagcttccccaaggcagaagtgctgatcctcaacttcgcgtcgagcctgtactacctgccgccgttcatcgcgacgatgcagaacctgaaggccctggtgctgatcaactacggcagcggcagcgcggccctggacaacctctccgccttcaccacgctgagcgggctgaggagcctgtggctggagaagatcatgctgccgccgctgcccaagacgacgatcccgctgaggaacctgcacatgatctcgctggtcctctgcgagctgaacagcagcctgagggggtcgacgatggacctgtcgacgacgttcccgcgcctgtccaacctgacgatcgaccactgcatagacctcaaggagctgccgccgagcgtctgcgagatcgggtccttggagaccatctccatctccaactgccacgacctcaccgagctgccgtacgagctggggcggctgcgctgcctcagcatcctccgcgtgtacgcctgcccggcgctgtggcggctgccggcgtcggtgtgcagcctgaagcggctccagtacctggacatctcgcagtgca

SEQ ID NO: 263009 - DNA, 263 bp, Zea mays
ccactcaggctgccggaggatcgcgggtacggccgcgcaactgggcgtgaggccgcggtcggctgggtttcacgcgccgcggcgcggctaggcttctccgcgctcaccgccgcgctcgccgccgcctacctcgaccgctgcttcctccccgggggcgcgctccggctcggcgaccagccctggatggcgcgcctagccgccgtcacctgcttcgcgctcgccgccaaggtcgaggagacgcgcgtgccgccgctcctcgacct

SEQ ID NO: 263010 - DNA, 510 bp, Zea mays
cccttcccagttctgtccctctcgaaccctaactccaaaaaccctcgctctcctctcatggccgccgccgcagctgacgacgcagccgaggtggagcggctttacgagctcggcgagcgcctctcctccgccaatgacaagtccgagcatgcggcggactacgaggcgattattgcagcggtgaagggacagagtgccaaggcgaagcagctcgcagcgcagcttatccccaggttcttccggagcttccctgcactcggcacgcgcgccatgtcagccatgttcgatctcgtcgatatggaggagctcgcgatcagaatacaagctattcgtggctttccacttcttggcaaagatactgaatttgtgtcaaaaattgcagatgttttgggtcagctccttacaagcgaggaaaatgttgagcgtgatgctgttcataaagcgctcatgtcccttatacggcaagatgtaaaaattcattacaaccttatttaacatgtggagcaggat

SEQ ID NO: 263011 - DNA, 720 bp, Zea mays
gttcgcccacgcgtgcgctccagtgggctcggtcttcacaactgaaccatgaactgcccctttcactcctcctccggagtcttgccatctgacaacccctttctttgcagaggttcgatttgcaaagcttgtgacatcgatcaacaatggcgagaatggtgaagcagggggtgatctccagtcgtagccaaactacccagacagcccaattgggcgcctgatatctccaagctcgggctgttctggcacatcctccccattccctgaccctgagatgcaggcttcttcacgcagcgctttacgcttgttcccagttcgtgagccccctaagatattggatggcgagggcgttgcgacacagaagttgatacctcgccatatgcgcaacggtgggtccctcttggatggccagatctcagcagctgtaccagttgtggacttctctgcccgacttcaacccaacgagcacgcaatggatcaccgggtgtcattcgagttgaccgtcgaagatgtcgcgcgctgccttgagaagaagactgcaatctccggggattctggcacggcatcattccaccttgcaccgaccggcagcggcgaccaccacagagaatccaacgaggcaagggcagggctctacgtcgacgaatcataccatgacttgcccgagaaagcgacggcggtccctgtccctgcgcctgagcaaagagttcattttcaaca

SEQ ID NO: 263012 - DNA, 1618 bp, Zea mays
tgtaagatgaatttcagaaagctagagactgggtggcagagtcgttagactttgacaaggattatgatgcgagtgtttttgaaacgaccataagggctgttggaggtttgcttagtgcatatgatctatctggtgataaagtatttcttgataaggctaaagatattacagatcgactattacctgcttgggagacaacatctggcatcccctataatagaataaacctagctcatggacgagcccataatcctggatggaccaacggtgatagtatccttgcagattctggtacggagcaacttgaattcatagctctgtcacagaggactggagatcccaaataccagcagaaggcggagaacgtcattaaacagcttcaaaagatatatcccagtgatggtttgcttcctatttacataaatcctcattctgggacagcatcatactcaactatcacatttggtgctatgggagacagcttctacgaatatttgctcaaggtctggatccaggggaataaaactgagcatgtaaaacactacagacaaatgtgggagacatcaatggaaggtctattaagtttaacaaagaaaactacaccatctaattactactacatttgtgaaaagaatggtggctcattgtctgacaagatggatgaacttgcttgctttgctcctggtatgctggccttaggagcctctggttacgggccagaaaaatcagagcaaattatgaatcttgcaaaagagcttgctaggacctgctataatttctaccaaaccactcccacgaagttggctggagaaaattattttttccatactggacaggacatgggtgtgggcacgtcgtggaacatcttgagaccggagactgttgaatcactgatgtacctgtggcgcttgacggggaataaaacataccaagattgggggtgggacatattccaggcatttgagaagaactcccgcatagaatctggatatgtgggactgagagatgtgaacactggtgaaaaagacaacatgatgcagagtttcttcctggcagagacgctgaagtacctgtacctacttttctcccctccatcagtcatatccttcgacgagtgggttttcaatactgaagctcacccattgagaattgttccagtaaatgataacaaaggcattggaacaccggtccgacaattcgggagaaaacagggaaagcctgagtaaccttggatatagagcagtggatttttgaatccgccgtctgattctgacctccctgttgatgtgttctgacacgagggaactttctgcctgaagcagtaagggttagaaattacggcgatagattgtttagagcaaaaatcataggtagaggatgatgttatatgcggggcagtgacctccgtgaggtcaagagccccatagaagcttttatctttggatttgcttacgcaccctgaggtgcattgttgatgtgtagcatacatctaactcactgtccatatgttgttgctttcctgggggctctgcgagctgtattgtcattatgtaccccctagttattacttcttttcagatatgattcatataaatataaaacgtaaagtatctacgtt

SEQ ID NO: 263013 - DNA, 500 bp, Zea mays
attgctccagtaaattataacaaaggcattggaacaccggtccgtccattcgggagaaaacagggaaagcctgagtaaccttggataaagagcagtggattttttttttgaatccgacgtctgattctggcctccctgatgaagatgtgttctgacacgagggaactttctgcctgaagcagcaagggttagaaatcacggcaatagattgtttagagagaaaaatcataggtagatcatgatgctatatgcggggcagtgacctccatggggtggtatggtcggagctcaagagcccccatagaagcttttatctttggacttgcttacgcaccctgatgtgcgttgttgatgtgtagcatacatctaactcactgttcatatgttgttgctttcctgggacctctgcggagctgtattgtcattatttggcccatagttattactttttttcagatatgatttatatatatataagttgtttaaaaaaaaaaaaagaa

SEQ ID NO: 263014 - DNA, 790 bp, Zea mays
cgcgtgggcatattcactcctctgccctctcagatcccgaactaccgaacccccttctcgccggcggaggaaggcgggggctgagaaaagagatcacggtcgctaatccgtgacggcagtggttgggatggcggcggcgctagctccgggggtgtcccggaagttgaagaaagtgctggagacgcgtacggataacccggatctgctggcctcgctgggcgctctctccactttctacgtccagaacatcccgcaggcgcgccgcaatctcaagtcatccattgagcagcgcgcacttgccatcaatcgccacttcctcgacgcctcgctccccgcccacaaggcgctggatcgcgtcgagggggaggtgcacgcgctgaacgactcctggaagaagatcgaggaagcattgaacagttgcagtgcaagtactggggacatcatcagtacaacagagaggttgcaacaggaacttgaagttatcactcagaggcaagaaattgtgtcatgcttcctgcgggattaccaactttcaaatgaagagataaatgcacttcgggaagaggagatagatgacaaattcttcaaagcattgctgcatgttcaagaaatacactcaaactgcaaggtcctgctgcgaacacaccaccagcgtgctggtttggagcttatggatatgatgtctgtgtaccaagaaggggcttacgaaagattatgcaggtgggttcaagctgaatgtaagacattaggtgatactgacaatcctgaagtaagtgagcttttgaaaatg

SEQ ID NO: 263015 - DNA, 1781 bp, Zea mays
gagaaattgaatcacaacttctgcctatagctacagcctcgttgaacataagagaaaaacatgtcaaggcttacctgggcacaacgccaggtgcaaagcccaagttttggcttgcttttcctgtgtctgttccacctcttggtttcaatacttatttcgtctcaaacttgaagaaatcagcacatatttcttcgaagtccactcagtactcacctcaaggaagtgaaagtagtaatctacaagttggtcaaggcaacttgaaacttcaatataatgaagctggaaaattatccctgtactccgatagtaagactatggttcaagcaaactttgagcagaaatacaagtattatattggacaggatggaaatggaagtgatcctcaggcttctggagcatacatattccgccctaatggcacagttccaatcagtactgatgggcaggtttctctcacagttctgcgtgggcccatattggatgaagtgcaccagcagataaattcatggatttttcagattaccaggctttacaaggagaaggactttttggaaactgaatttatagttgggcccataccagtagatgatggaaatggaaaagaagtagcaactgaaattgttacaaacatggttacaaacaaaacattctacactgattccagtggacgtgatttcatcaaaaggataagagattatcgatcggagtggaagattgaagtgcaccagcctattgctggaaactattatcctgttaatcttggcatctatgtggaggatggcagcaaagagctgtctgtactggtagacaggtcaattggaggttccagtataaaggatggacaaatagagctaatgctacacaggaggctactccatgatgatgggaaaggcgtcgccgaggcgctaaatgaaacagtctgtctcgataagcaatgtgaaggactcattatacaaggaaaatactatgtcaaaatagacccacaaggagaaggagctcggtggcgtcggacatttggccaggaaatatactcccctctccttcttgctttcacagagcaggatggaggcaactgggcgaattcacatgttgcaaaattctctgcgatggattcaacttacagcttgcctgataatgttgcaatgcttacccttcaggagcttgaagatggaagtgttctccttcggtttgctcatctatatgaggccggggaggacaaggatctttcgtctttagcgagtatcgacctcaagagagtgttcccggagaagaagattggcaaggtcatcgagacaagcttatcggcaaaccaagaacgcgcagccatggagaagaagcgtttgaaatggaaggcgcaaggttctgcggcggacgagaaggtggttcggggtggccctgtggatccttcgaagctcgtcgttgagctggggccaatggagatccgcacattcatcgtcagctttgatcacatcagtgacaagcaacagctctaatcgtctccgactagacgactaggtctggatgaagttgtcgtgcggcttcgaaataaaaaataataatgtggcctgctgtgtacctgtggttcaacccatgatatggcctgctgtgggtcagcacggttctaaagctaaggacattttataaggcaaattttgctttagggtgacactcctatcctcacgttgcaaaaatacagaaaaaaccagcgaaaacatgattgcaaacaggtaaggggcaactcccccacctcaattttataaaaaaaaaaaaaaaaaaaagaa

SEQ ID NO: 263016 - DNA, 666 bp, Zea mays
  unsure (1)..(666): unsure at all n locations
ctttttatttggtgctttcatcgttgagtgcccatgggattaaccatggtccagtgttatagaattactagtttagactccaagcattgttttctatgtctggtcatgtgtacattgccttgtattaagtaatcctttttactacattaacaatttttcaaggttcaagcaaactttgagcagaaatacaagtattatattggtcaggatggaaatggaagtgatcctcaggcttctggagcatacatattccgccctaatggcacagttccaatcagtactgatggacaggtttctctcacagttctgcgtgggcccatattggatgaagtgcaccagcagataaattcatggatttatcagattaccagggtttacaaggcgaaggactttttggaaactgaatttatagttgggcccataccagtagatgatggaaatggaaaagaagtagcaactgaaattgttacgaacatggtgacaaacaaaacattctacactgattccagtggacgtgatttcatcanaaggataagagattatcgatcggagtggaagattgaagtgcaccagcctattgctggaaactattatccctgtgatattccgttgctcccatctctacngtttttaaatgagttcataacatcgataagatggttactt

SEQ ID NO: 263017 - DNA, 567 bp, Zea mays
tcacttctgcatgatctatctcccttactggcgggcgtctacgcctgggcggccggcgcatccgtcctacgccaggtgcccaggttctcgtccggctcttagccggcgatgagcacccaccaggccaatacgctgcggttgtacctcacctgcatccggaacactctggaggcggcgatgtgcctccagaatttcccttgccaagaagtcgagaggcacaacaaaccggaggtggagctcaagacaagccctgaacttctgctgaatccggtactgatatgccgcaacgaagcagaaaaatgcttgatagagacttcaatcaactccatacgtataagcatgaaggttaagcaggcagatgaattggagaacattcttgccaagaagttccttaggtttttgtcaatgagggcagaggcattccaagtgttgaggagaaaaccggttcagggctatgatatcagtttcctgataacaaactaccattgtgaggacatgcataagcacaagctcatagatttcattgtgcaatttatggaggatattgaccaggagatcagtgagctg

SEQ ID NO: 263018 - DNA, 1879 bp, Zea mays
ccaggctcctcgacagtcgatagcctcccaagtcccaactcgacctgagccgattcggaaggacggtttgcctacctctggttccggcggccatggcggtggcggcccctggccagctcaacctcgacgaggccccgtcatggggctcccgcagcgtagactgcttcgagaagctcgagcagatcggcgagggcacctacgggcaagtgtacatggcgaaggagacgggcaccaacgagatcgtcgcgctcaagaagatccgcatggacaacgagcgcgaagggttcccgatcaccgccatacgcgagatcaagatcctgaagaagcttcaccaccagaacgttatcaagctcaaggagatcgtcacctccccaggcccagagcgggacgagcaagggaagccaattgacggtaacaagtacaaggggagcatttacatggttttcgagtatatggaccatgatctcaccgggcttgctgatcggccaggaatgcggttcactgtgccgcagattaagtgttacatgaggcagctgcttacaggcctgcactattgtcatgtcaaccaagttctgcatcgagatatcaaaggatctaaccttttgatagacaatgagggtaacttgaagcttgctgattttggccttgcaagatcattctcgagtgatcacaatggcaaccttactaaccgtgtgatcactttgtggtatagacctccagagttgctacttggaagcacaaagtatggcccagccgttgacatgtggtcagtgggctgtatttttgcagaacttctcaatgggaagccaatattgcctggaaagaatgagccagagcagctgactaagatcttcgagctttgtggtacccctgatgacacaatctggcctggtgtcacaaaaatgccttggtacaacaacttcaagcctcaccggccattaaagagacgagttaaagacttctttaaacattttgatcggcatgcactggatctgttagagaagatgttgactttagatccatcacagaggatatcagcaaaagatgcacttgatgcggaatatttctggactgatcccttaccatgcgatccaaaaagcttgcccaagtatgaggcatcgcatgaattccagactaagaaaaagcgtcagcaacagaggcaagcagaggaagctgcaaagcgtcaaaaacttaaccatcctccaccacattctcgtttgcctccactccagcagcctggccaagcacatcctcaaatgaggcctggccagggtatgcacaatgtgcctcctgtggcagccggcccaggccatcactatacaaagccccgaggaccaggaggccctaaccggtatcctccgggtgggaatcaggggggaggctacaatccgaaccgtggaggtcagggtggtggctatggcagtggcccatatccccagcaagggcgagggcctccttatcctggaggtggaatgggtggaacagctggtccacggggcagcggtggcagtggctatggagctggaggtccaaactaccaacagggtggtccatatggcgcgtccggtccaggccgaggatcaaactactcccagggtggtggttcccgcaatcagcagcagtatgggaactggcaataacgtggcattgagatgtatgtatatgcagaatgcatttgcagcatctttgcagtttaatcatgttgtgattagtactgtaatacagtccagatatcgtaatagggctgtttgtggcaagcccgagcgttgccaaagggacccttagcatagtctcatttttacctcatcacaaaaccaacttaaacacaataatagtaaactttccgtatgaaaaaaaaaaaaaaaaaaagggcggccgc

SEQ ID NO: 263019 - DNA, 568 bp, Zea mays
  unsure (1)..(568): unsure at all n locations
ggtcgaccacgcgtccgacacgcgtccgcggacgcgtggggccccccgcagcccagcaccaccacccggcagccgccgcgcaacgcaccacactgggctcctcgacagtcgagactcgagagcccaatcgttcccgacccgattcggaaggagggttgttgccccaccccctctggttccggcgcccatggcggtggcggtacctggccagctcaacctagacgaggccccggcatggggctcccgcagcgtcgactgcttcgagaagctcgagcagatcggcgagggcacttaccggcaagtgtacatggcgaaggagacgggcaccaacgagatcgtcgcgctcaagatgatccgcatggacaacgagcgggaagggttcccgatcaccgccatacgcgagatcaagatcctgaagaagcttcaccaccagaacgttatcaagcttaaggagatcgtcacctccncaggcccagagcgggacgagcaagggaggccaattgactgcaacatgtacaaggggagcatctacantggtttcgagtatatggatcatgacctcactggg

SEQ ID NO: 263020 - DNA, 467 bp, Zea mays
ggtccacccacgcgtccgaggacgcgtgggtggggagcaccggcgacacgacgacggccgaggcggaggcgccggcgccggtgggtgactacgagctgctggagcgcctgggggggcgtcccccgtacacgtccgtgtggcgagcggtctcccggtccaccggcgcgcccgtggctgtgaagcaggtgcggctcaccggcgtccccgcgcgcctccgcgacagcctcgactgcgaggtccgcttcctcgccgccgtcagccaccccaacatcatccgcctcatcgacgtcgtccagacccagagctgcctttacctcgtcctggagctctgcgagggcggggacctggcggccttcatccggcgcaatgggagccttgacgagcgcctggccagaaattttatgaaacagatcggagctggcttacatgtgctgcaccggcaccatgtcgtccaccgggacttgaaa

SEQ ID NO: 263021 - DNA, 508 bp, Zea mays
atttctccacccctttccccccgtctctctctcctcacccctctctctctaaaagactgaaaacaatagaaaggaacaaggggggaagacgcactccatgcaggacttggtttttgggaactccatgggctgtggaattgtccccagggagtcccctctgggtttgacgagattcatacagatacatatatttaattttttcccctttcgtttgctcaaaaaatcaattgtacaggcgaaactgcttgtttgtgctttgtttcttccgtgtttgtttccttgggattttcctctggtccgttcttcttcacctgtggggtgggaggagcagagacaatcatgggaaagcaaggaccctgccgtcattgcggagtcacaagtactccgctgtggcggaatgggccaccagataagccggtgctctgcaatgcgtgtggctcgaggtggagaacgaagggttcaatggcaaactacactccaatgcatcgcaatgacaatattgatgatg

SEQ ID NO: 263022 - DNA, 537 bp, Zea mays
acttcaacgaaactgccaattttgattgttcacagctccaactgttggtgcttgacgaggcagatcaaattcttgatcacggattcagaaaccaggttgatgctatcatttctcagattcccaaagttagacaaactttactgttttctgctacacaaacgaagtcagttaaggaccttgcaagggttagcttaagggatcctgagtatataagtgtgcacgaggaggccagaacagccacaccggatacccttgagcagtatgccatgattgtacctcttgagcagaagttaaatatgctctggagcttcattaaaaggcatctaaattcaaagacgatagtcttcttatctagtgtcaagcaggtcaaatttgtttatgaaatttttaagaaacttcgtcctggtattcctttgaaatgtatgcatggacggatgaaacatgtggtacagcaggccatagttgcagatttcaatgaagctacctcagtgcttttctcaactgatataacatctcgaggactagatataaagatgt

SEQ ID NO: 263023 - DNA, 443 bp, Zea mays
tcaaaagcttttaaacccctttgaatccccatttttccccccccgtggaaaaactggctgctttgtcggctgcggggagccactgaacaagtggttgcacaatccttatgttgagcgcatgcatttattgtaagcttgcacagttttgtggaagaatcagcttggaatgaaatataagctgtgccccatatatagttcagttcgctctgatttagtcaggccaggtgtagtttggtagccagatagtctatgcttggaaactatttattgtgattgtgataacatttagagatggattttttcgtttagcttgagataaattttctctcaagataaattttctctcaattagccagtgacagtcgctgctgagtgctgacaggtaatgttgttgaaaaaattgatgattattaattgagacagaagaatcatagctggatgcc

SEQ ID NO: 263024 - DNA, 1485 bp, Zea mays
cattcgtacgcgtgcttgttgtctctgtcagccatcaactctccagtgagctgcgagcctacaaggctgtgggcagtgccagcctcaacctcgtcctcccccaatgcctcaccgaccaccggcctcctttcccgcaggcacgggtgcacggcacgcggtttccactcgcttcgtccgcgttcggatcgccctcagagtaacagtctagcagagcaagcatgtcgtcgtcggcggagaacgaccccacggtgacggtgaccgagcgcggaggcaaggacaagcacgaggacggcggcgacaaggagcagggcggcggcggcttcatcgacaaggtgaaggacttcatccacgacatcggcgagaagatcgaggaggtcgtcgggttcggcaagcccacggccgacgtgtgcggcatccacatcccgcacatcagcctccaccgcgccgacctcgtcgtggacgtgctcatcaagaacccgaacccggtcccgatcccgctcgtggacatcgactacctcatcgacagcgacggccgcaagctggtgtcgggcctcatcccggacgccggcaccatccacgcgcacggccaggagaccgtcaagatcccggtgtcgctcgtcttcgacgacatcaagagcacctacaaggacatccagccgggcagcatcatcccctacctcgtccgcgtcgtgctcctcgtcgacgtccccatcatcggccgcgtcaagatcccgatccagaaggacggcgagatccccatcccttacaagcccgacgtcgacgtggagaagatcaagttccaccacttctccttcgaggagaccaccgccacgctccacctcaagctcgagaacaagaacgacttcgacctcggcctcaacctgctcgagtacgagatgtggctcggcgacgacagcatcgcctccgccgagctcacacagaccgccaagatcgagaagcaggggatcaccaggatgcaggtgcccttcagcttcaggcccaaggacttcggatccgctgtctgggacatgatcaggggaaggggcacgggatacaccatcaagggaaagatcgatgtcgacactcccttcggcaacatgaagctgcccataagcaaagagggtggaaccacccgcctcaagaaggaggacgacgatgacgacgatgacaactgaagtgaggactgctggggggcgctgctgttacctttcacgaaacgcagcgaagcagaggatgcggggatcgtcgtcgacctgatacccacacccttagcgctggttaagctcttgcctttagcttatggtgctctgttgttttgcattgtctgaacatcctctcacttcctgagtgtacgttcagtttgaggtttcctgtgttgtccatctgaattctttcaaactttgcggttggaactggatgaagaataaaattccaacccgccctggttcttttgtgggtctgtttcccataaatgctccctgcccc

SEQ ID NO: 263025 - DNA, 855 bp, Zea mays
tcgggcaactcgcctaccattgaaaccgcggtagagcaacagcccactaccagcgtccccccagaatgttcgtcctccgcaaaaccctcctccatgcgccgccggccgccgccgcggcggtcccctctcggatctcttccctcctccgcctcatcccctctgcatctttttctgaggtaagcggaggtggggaagaatggggcgcctcctcacccggaggcggcggcggcaggggtgggggtgggaacgaatggagctccacctggtctaccggcctcaccaaggaccatttcgacggatcctcgccctccgtcggccgttctgtcccttccgagtcagcgcccgtctctcgtgagcgggcggccattcgcgctatggatgagtgggacgagagggtccgggaactggagcgtaacaatgtcgaggcgaaggcgtatgtggattcatgggacgaccggatgcgggagacctgtgcgctgctgaagcaggtgcgggagccgggcgctcggggctcgtatctcaaggactcggagaagcaggagatgtaccggctgcacaaggaggaccccgcgacttacaccgtggagcggctcgccaaggacttccgtgtcatgcgacagcgcgtgcacgccatcctctggctcaaggagatggaagaggaagaggagaggaagaggggccagccgctcgacgactccatcgaaatcctgctcgacagctgcccagagttcttcaattctcatgacagggaatttcatgtagcatctcttccatataaacccgactttaaagtaatggcctgaagactgggatgggcacacaacgagaccctgatgagggtctttataaatttca

SEQ ID NO: 263026 - DNA, 3099 bp, Zea mays
gatggccttaaagctcttattcggttacttcgagttgttcagcccctatacaagggtcagctgcagaggcttcttgtgaacctttgcacgcatcggggtagcagacagggccttggttcaaattctggtggacatgcttatgcttgatctgcaggggttttcaaagaaatcagtagatgcacctgagccaccatttaggttgtatggttgccatgcaaatatcgcatattcacgccctcaatcttcggatggtcttcctccattggtctcacgtcgtgtgctcgaaacgctcacgaacttggcaagaagccatccaaatgttgctaaactcttgctctttcttgagttcccttgcccatcaagatgtcgctctgaagcacatgatcataggcatggcaaggctgttctagaagatggtgaagaacggaaagcctttgcggttgttcttttgttaactctgttgaatcagccactttatatgagaagtatagctcatcttgaacagttactaaacctccttgaagttgtcatgcataacgctgagaatgaaattaatcaagctaagctagaagcgtcatctgagaagccatctgagaatgcagtgaaagatgtcaaagataacaccagcatttctgattcatatggatcaaagtcgaatcctgaggatggtagcaaagcccctgctgttgacaacagaagtaacttgcgagctgttctgcgaagtcttcctcaaccagagcttagattgctatgttcattgcttgcgcatgatggattgtcggacagcgcttatctccttgtaggtgaagtgttgaaaaagattgtggctcttgcccctttcttctgttgccatttcataaatgagcttgcacgttcaatgcaaaacttgacacttcgtgcaatgaaggagcttcatttgtacgagaattctgaaaaggctcttcttagctcttcatcagccaatggtactgcagttcttagagtagtgcaggctttgagctctcttgtcaatactcttcaagagagaaaggatccagaacagcctgctgaaaaggaccattcggacgcagtttcccagatttctgaaattaacacagcattggattctctgtggttggaattgagcaactgcataagcaagatagaaagctcttcagagtatgcatcaaatctaactcctgcttctgcaagtgcagctacattaacagcaggagtagcacctccattgcctgcaggaactcaaaacatattaccatatatagaatcattttttgtgacatgtgagaagttgcgtcctgggcaacctgatgctgtacaagaggcttcgacttctgatatggaagatgcttcaacatctagtggtgggcagagatcatattcctgtcaagctagtcttgacgagaagcaaaatgcttttgtgaaattctcagagaagcacagaagattgctgaatgcattcatccatcaaaaccctggattactggagaagtcattctcgctgatgttaaaaattcctcgcctgattgattttgacaacaaacgtgcatatttccggtctaaaatcaagcatcagtatgatcatcatcatcataatcctgttagaatttctgtgcgtcgttcatatattcttgaggactcctacaatcagcttaggatgcgatctcctcaggatttgaagggtaggctcactgtccaatttcaaggagaagaaggaattgatgctggtgggctgacaagggaatggtaccagtcgatatcacgagtcattgttgacaagagtgcccttctgtttacgacagtcgggaatgatttgacgtttcaaccgaatcctaattctgtgtatcaaactgagcacctctcatacttcaaatttgttggacgagtggttggcaaagctctcttcgatggtcagcttttagatgcccacttcactagatctttctacaaacacatacttggtgtcaaggttacataccatgacattgaagccatcgatccttcgtactacaaaaacttgaaatggatgctcgagaatgacataagtgatgttttggatctcacctttagcatggatgcagacgaagagaaactgatattgtacgagaaggcagaggtcactgattgtgagttgattcctggagggcgtaacatcagggttactgaggagaataagcatgaatatgtcgaccgggtagcagagcatcgattgaccactgccatcaggcctcagattaatgccttcctggaagggtttaatgaactcattccacgggagctgatatctatcttcaacgacaaagagcttgagcttctgattagtggtcttccagatattgacttggacgatttgaaaacaaatacagaatattctggctacagcatagcctctccagtcgtccagtggttctgggaaatcgttcaggggttcagcaaggaagacaaagctcggttcctccagttcgtcactggcacttcaaaggtaccgttggaaggttttagtgaacttcaagggatctctgggccacaaaggtttcagatacataaggcctacggcagcacgaaccatctgccttcagctcatacttgctttaaccaactagacttgcctgagtacacatccaaagagcagctccaggagcggttactattggcaatccacgaagcaaatgaaggtttcggatttggctaatcagttatactcgtttgtccgtgccctgagaactgcaataggcgagcagcacgtgtgtggctgatcacattctgaactccacgtgtgtgatgagagatggccggagagaacatgtccaggatagacgaatgcccgtgggagaggtactactgttaagagagagagcgactattttgtgtttataatctttgtccgtttgtagtttttgccttacattggtcgttgctccgaagttttcccccttcttttcgttcatagactggtgtaagttgtaaccgaacattatgtcaaatgcaggtcatcttacgctggaatgttatacctcccctaatctgttaaaacaactgtaaattccgaaggactatttattctaatattattagagcgaaaattctctctttcgctctccc

SEQ ID NO: 263027 - DNA, 692 bp, Zea mays
gatctctgggccacaaaggtttcagatatcccttgaagtgcactaaaaccttccaacggtacctttgaaggttttagtgcacttcaacagttctctgggccacaaaggtttcagatacataaggcctacggcagcacgaaccatctgccttcagctcatacttgctttaaccaactagacttgcctgagtacacgtccaaagagcagctccaggagaggttactgttggcaatccacgaagcaaatgaaggtttcggatttggctaatcagtcatgctcgtttgtccgtgagagtctgtacagatactgagcattgcaatgggcgagcagcacgtgtgtgctgatccttaccacattctgaactccacgtgtttgatggccggggagaacatagaagaatctccgtgggagaggtactgatgagagagagcgactattttgtgttcataatattcattaccttttttttagcttttttcggtcgttgccccgttcgtagtttttgccttacattggacttcgctccgattttttttctctgcttttccttcatagactggtgtaagctgtaaccgaacactgtcaaatgcaaatcatcttagggccccttcgattattactgaatggaggcatggaataatttctagccgtactgtttctctactaaaaaaaaaaaaaaagggcggccgccc

SEQ ID NO: 263028 - DNA, 762 bp, Zea mays
tccactcgtccgggcagaggtcactgattgtgagttgattcctggagggcgtaacatcagattaatgccttcctggaagggtttaatgaactcattccacgggagctgatatctatcttcaacgacaaagagcttgagcttctgattagtggtcttccagatattgacttggacgatttgaaaacaaatacagaatattctggctacagcatagcctctccagtcgtccagtggttctgggaaatcgttcaggggttcagcaaggaagacaaagctcggttcctccagttcgtcactggcacttcaaaggtaccgttggaaggttttagtgaacttcaagggatctctgggccacaaaggtttcagatacacaaggcctacggcagcaccaaccatctgccttcagctcatacttgctttaaccaactagaccttcctgagtacacatcgaaagagcagctccaggagagattgctactggctattcatgaggcgaatgaaggtttcggatttggttaatcagtcactcctgcacctgtgtgcaagaaatttcagggagtaatgtacagataccgtcggagttgcaataggcgaggggaatgtgcacggactcttacataacctgctactagattcatttgttgcctgcatcaaccatcggcgtgggtccctgaagactgatgagatttgttgacaaagtaccggcctgcccacgatgctttataggactggtgctgcgaaggatgtgcacggaggtgtagc

SEQ ID NO: 263029 - DNA, 485 bp, Zea mays
tgtgtcctttgacgcgtgggcactcacagaccgacaacgccctaggcaagcagcaagcgcacacgtaaacgtacacctacctcggcgagcaaaagggaaaacgctgatcggagcaacgaagcccgcagccatgccgacggcgacggccacggccacggcagctcctcgccacgcggcgctcttcctgcccctgctgctgctcctgctcggcctccacgccacgtccgccgccgccgcgcgcgcgggcgtcgccgtggacgccgagctcacgtccaccaagccgtccccggtcccgaagaagcccagcgtgaagccgcccggccccggcgccgcgagcccgaccttcccgggcttcggcatccccgggatgggcgggttcggcatccccgggatgggcgccggcgggtggggcggcggctacggcgggcccgccggcgggtacgcccgcggcggcgtggtggcgcccaccgtgacgtgctccgaga

SEQ ID NO: 263030 - DNA, 613 bp, Zea mays
acctacaacgcctaggcaagcagcaagcgtacacgtaaacgtacacctacctcggcgagcaaaaggcaaaacgctgatcggagcaaccaacgaagcccgcagccatgccgacggccacggccacggcggcggcggcggcggcagctgcaccgtcgactgcaaggtcaagtgcacggcctactgttgattcgactcgtccgctgctggcgcgtagcggtttggcagtgggcggtgctagtggctggcggtggcggcctgctagctgctgttggtgtgatggcgcgtgtgcgtgtcggtgagctgagtaccgggtggttaacttgtgttatcatccccaatagtatactagcgtacttctcgttctggggactatttatacgtagaccacgatatgcgtaggggcggtttatttctaagataagaatataagatgctctgtttatggtgtttattagtgttataatcatcaaagttgtgttcctgctttggttaagtgataagacgtgcttgtgaaatccagtatgcataaataaagagctatattgtaagtatacctctcagtttcctttacctaccaaaaaaaaaaaaaaaaaaacaaaaaaaaaaccaaaaa

SEQ ID NO: 263031 - DNA, 488 bp, Zea mays
cccacgcgtccgccgacgcgtggggccaacctggccatggcgacatccccagcgctcctgttcccttctgcctcctcggcatcctctgcgccttcgtcggcgcgggtggaggcagtggtgccgaccagcaaagcaaacggagggagggctaaaacctttcgttttgaagcaagggatgagcgcgaaagccgttgcgcttccgtacacgcgcatactcttgctccgtcgcgcgttaggttaggttagtacttagtacttaacttagtacaataacgcgcagccgttttgggcggacacggttctctaaaggcgaagactctgaagtgggcgaacactcggcccagcgggcgaacatgccggctccggctccgcgcacctgctgacacctttcgaagcactttcacgtgtgaaccgaagtcgtcttgtccttcctttctcctttcagtcctcgcctttttcatcttccgtaggggcctttagtcttttga

SEQ ID NO: 263032 - DNA, 1843 bp, Zea mays
gccagctgctcgctgaaacgccgcggatgaaacagatgtccgtccgtcggtttgcgtgctaggctactgtgccgcttgacagaagcggccactcacctctctctctctctctctccccgcacacgttgctgtcggcagcctcaccaatctcggcgccagactgggaccgcgaggggactggtggtcgccggttccgcccgctactccggctgctttccctcctctctccgtcgccttccccttcgggctgcccatatttcattcagtgccaacaagtgccaagtgctcgtgtccggatgcgccagcgccgcctggtcaacagatttttgccctgcgctgtcactccaccacgctgcttgtactgaaagctttttcccagaataaaggctggggaggaggaagcggcggcggcggcgctctcagaagagagggtgagatgaagactcggagctcagcgagaggggagccgaggcgtctcggaaatgcggctcttctggcgctcatgctctgctccgtcgtcgcgctctccctcatccgggggagattcgccccaattgtcactaccgcaggagatgccatcaaatccgaggacgacgctgcggcggctgcgctcagtgtcagcaaggcggccgtcaacgttgacaccggcgacagcgccgacgaggccgccgccgaagctgctgctgaggagaaagagaaggaggaagtccagccgaagcccgctgacggttccggctccggctccggcggcggcgcagccaagccggtgtgctacgagacgagccgccgctccgacacctgcgaggcggctggcgacgtgcgcgtcgtggggagcacccagacggtgtacgtggactcgctggaccgggagtggaagaccaagccgtactgccggaagcacgacaacttcgcgctcgcccacgtcaaggagtggtccctgaagccgctcccctccggcgcggcgccgcagtgcacggtcaacagctcggccaccgcgttcgtgctgtccacgggcgggttcaccggcaacccgttccacgactacacggacgtgctcatcccggccttcatcacggcgcacccgctccgcggcgaggtccagttcctggtgagcagctacaagtcgtggtggatgaaccgctacatccagatcttccagcagatgagccggcacgaggtggtggacatcgacgcggacgacgaggtccggtgctaccgcagcgtggtggtgggggcgacgttccaccgggagctgggcgtggacgcgtccaaatcgccgccggggtactccacggccgacttccgcaagatgctgcgcgacgcgttcgggctggagcgcgccacggccacgcccagcggcgaccggtgggacatccggcgccgcccccggctgctcatcatctcgcgccgcccgtcccgcgggcgcgccttcatgaacgagcgcgccatggcggacatggcggccagcctggggttcgacgtgcggatcggggagccagacaccagcaccgacacgtccaagttcgcgcggctggtgaactcgtgcgacgtgatggtgggcgtccacggcgccgggctcaccaacatggtgttcctgcctgccggcgccgtggtggtgcaggtggtgccgtacgggcggctggagtggctggcgcggaacacgttcgcggagccgtcggcggggatggaggtccactacctggagtacgtggtgcagctggacgagacgacgctgagcgagcagtacccgagcgatcacccggtgctgagggaccccatggccatccacaagcaggggtggaacgcgctcaagaccacgtacctggacaagcagaacgtcggc

SEQ ID NO: 263033 - DNA, 2529 bp, Zea mays
attacccccaggccccagcgtgcgtggtctccttcctctcgtggcgacgaccgagccgccgtcgctgcctacgtgcccagtcctgttcgtcccttcgccggcgacggccacgacctggttataggcaaagtttgtcctgaactgttcatcatggtggaaggctgggtattctccgctttgttagtggtgtttctagcgttcacaacaccttgtgagtcattctacttgccaggtggttatatgcacacatatcagcaaggtgaagtaataagggcgaaggtgaactctctcacttccattgagacagagctacccttcagttactacagccttccatactgtcgtcccagagatggggttaagaagagtgctgaaaacttaggcgagcttctgatgggtgatcaaatagataattctccgtaccgtttccgtgtaaatgtcaacgaatctctgtatctgtgtactacaaccccacttgacgaggctaatgtgaagctcctcaagcagcgtagccatgatctataccaggtgaacatgattcttgacaatcttcctgtgaggaggttcacagagcagaatggaataaccatccagtggacaggctatccagttggttatattccagaaggcacttctgatgtctacatcatcaatcacctgaaatttaaggtcttggtccataagtatgaaggaggcgaagtaaaggtagttgggactggggaaggaatggaagtgatctcagagactgacaaagatgccaattctggatatgagattgtgggatttgaagttgtcccatgcagcgtgaagcgtgatcctgaatccatattgaagcttaatatgtatgataaagtcgatcctgtgaactgccctgtggagttggaaaaatctcaattggttagggagaaagagaagattacttttacttatgaggttgaatttgtaaacagtgatatcaggtggccatcacggtgggatgcatacctgaagatggagggttcgaagattcactggttttcaattatgaactctttgatggtaattctatttttggctggcattgtatttgtcatattcttgcgtacagtgaggagggacttgactcggtatgaggagttggataaggaggcccaagctcagatgaatgaggagctctctggttggaagcttgttgttggagatgtcttcagagaaccaacctcaccgaagctgctctgtgtcatgattggcgatggggttcagattttgggtatggcaattgttaccattttctttgccgcatttggcttcatgtctcctgcatcgagaggaatgttgttgacagggatgatagtcttttatatgttacttggaattgtgtctgggtatgctgctgtcaggctctggaggactttaaaaggaacgtccgagggatggaggtctgtctcctggtcaactgcttgtttcttccctggcattgtcttcattgtcctcactgtgttaaacttcatgctgtggacaagaaatagtactggagcccttcccatctcacttttctttggccttttgtccttgtggttctgtgtctccgtgccacttacccttttaggtggtttctttggcacaagggctgagccaatagaattccctgttcgaaccaatcagataccaagagaaatccctacgaagaagtactcattgctcttcatacttggtgctggaactctaccttttggaacactcttcatcgagctcttcttcattctttctagtatttggcttggaaggttctattacgtgtttggcttcctccttgtcgtgcttcttttgctgattgtggtgtgtgctgaggtatcagttgttcttacctacatgcatctctgcgcggaggactggaggtggtggtggaaagctttctttgcttctggaacagtggccctttatgtgttcctttactctatcaactacttggtgtttgatctcagaagcttgagtgggccagtttctgctattctctacattggatactctttcgttgtctcccttgccattatgctagcgactggtaccgttggcttcctgacgtcgttctcttttgtccactaccttttctcatcagtcaagattgattgaagatccagggttgtctttacacaaaatcacctgtgagctcaaatgatatgaccattgcatcttgaaggcctttcacagagcagtgctgtttgtaatgtagcttattaccgagagtctgagactactgtaccttgtaatgaatagtatatttcagcagatgtgttttgaagtttgtcacactttgctacagcattttgttgacctgccaatactgtaggaaaagtcttgcgtttattatcccatgggtgccattttgttgtctgtttctttctgcaagattggcttgcagctggagaactatacgttcttatggtataatatacatgtgcagacaagataatttccaaaattcttgcgagactcagttcagaagtcaccttctttcgtgaatgttttgattccctgaggctactttat

SEQ ID NO: 263034 - DNA, 585 bp, Zea mays
agttgccaaagtttcagtctttggctgctgctataccggattatgctcgtccaatagatgatgggctttatcgtgctattgacatatatctcaaggcgcacccacatctgccagaatcggacaaggaagagctctgccgggtgatggactgccagaagctgtcccgggaggcctgcacacacgcggcgcagaacgagcgcctcccgctccgcgtcatcctgcaggtcctcttcttcgagcagctccagctgcggagctccatcgcggaatgcctcatgatctcagagcccctagacggcggcggcggtggcttctcgcggcagctcggcggcctgcctgtctcgggcgagcacctccgtggcgctggctggcccctggccgccagggagaaccagacgctgcgggaaggcatggacagcatgaagcagcgcgtgtcggagctggagaaggagtcctttgccatgaaggacgacatcgagcggctcgggccgcagcaggagcgcgggcaagagcaggttcccgttcgcgctcgccgcaaagccccacgtctgcggcaccaaggacaaggaggctgctccggagacg

SEQ ID NO: 263035 - DNA, 941 bp, Zea mays
taacggttgctagagcgtttacttgcatttggcccgaatgatcgacctactgctgaagaggctttagctgatccatacttcagtggcctttctaaattggaacttgagccttcagcacaaccaatttcgaaggttgactttgaattcgagggaaggaaactaacaaaggctggtgtgagagaaatgatatatcgggagattttggagtaccacccccagatgcttcaggagtacatcgaaggtggagatcagattcacttcctatacccaagtggggtcgatcgcttccagcgacagtttgctcatctcgaggagaactacaggagaggagtagcaagcaccccgccgcgaaggcagcccacatctctgccgagagagcgagtctgctcatcagaagatggccacagtcaggactctgacagcgaagagcaaagagcagcatcctacgttgcccgaacaaccataagccctccaagatcacaagaggagggcggcaagctccagcctgcctaccagagcgccgccgccgccgcagactcctgcgccaagagctatctgaagggtgccgctagtatcagtagtgcttccaggcgtaccatcaagggggataatggccgaaaggagaagggatctccgaggctgtgaaagaggtggcgcaggctcgtgacctgttaggcaaaagaggtagcaatggcgccaatgcgactgcaacgtgggatgtcttagtcatcatgcatccaacaacgcaggggggcagtacaagtatgcaggtcatcctagctaggtcgcccaaattaaagcagcctgcttggaggaaatagatttgtgtactgttgttaagtttttttttttttgaattcaactgctagattctggcagatctgtcaaccgcactctccttggtttcccaaaatttactggtttgaacaagtttattactg

SEQ ID NO: 263036 - DNA, 411 bp, Zea mays
  unsure (1)..(411): unsure at all n locations
tggaaagcctttaattatttcccacaatggtgctagtggggattaccctgngtgcactgagctagcttatcagaaagcagttgatgatggcgcacatgtcattgattgccccgttcaagtgaccaaagacggagtaccaatgtgcatgagttccattgacctgatgaacgatactactgttgcaagatcacaatttatctctcagactgccacgataaaggatattcagattgcacaaggggtttttacttttggtctcacctgggatgacattgtaaacaacctgcagcccaaaatatccaccccatggtactccttcagattggaccgaaatccgagatataggaatgcaggaaagttcatgaggctatcagactttctggacttcacgaaagacaaagatttgtatgg

SEQ ID NO: 263037 - DNA, 505 bp, Zea mays
cccacgcgtccgaaactaggagtgctggcaggaaaagattggtatgtttatgctaccatattttttcaatgtttttattttctagcttttctttgaacttgcatggtaccatctattttcagattttgcaatatacttatcagcgaagattcatgtagttctcttataatgctatataattagcacaatacagtgcactcactttattatttcctgatgaaaagtgagtgatatagccactttatttggaggtttttacacaagatagcatgtaactgaaatactaagatagtatgaatcaataaatgcacatgctgaattggcttcgttgtttagttttggctacaaacagataaggcaacaaatctcctgagacagtacttcagcaacttgcatgatcgactgagtatacactctttccacaatcaggttgaaaagaaattgattgatttttaggcaagaaggtgagcaaggcacctaagatccagtgcttgtgaacccttga

SEQ ID NO: 263038 - DNA, 349 bp, Zea mays
gctggcgcagcgcaggcagcatccacagcctgaatccaccacaccagcaccacccagcaccgatggccggcgacgacggacgtgctccctccggcctccgcgtcgtgatgttccccttcccgttctggagccacattaaccagatgctccagctcgggaagctcctccgtgcgcggggcctgggcgtcaccatgctccacaccgacttcaacgcgcccgaccccgcactccacccggacattaccttcgtgtccatccgcgagtccctccccgccgaggtcgtcgccaaccccgacatggtagagcaaatgatgcagctcaacgccgtctgcgaggcgccgttccaggc

SEQ ID NO: 263039 - DNA, 1389 bp, Zea mays
ttgtcgtttcacacgccgcctcattggtccgaacaaggccgggctacggccggcgtcttatcggacatcctggctttcaccctccagccagcgtgccctctgtatctctcccggttcttcccctctcctgcgacgtcagggttgggtaacgccgctcgccgccgccgccctacgcaggtgctgaggccttcatcgatctcttagccgtcgacaagcacccaagagatgcaggatagaatgagacggcagggccaatatggtgaagcggatattaactccatggttgctgcccagttgcatcactaccaggcacagcaaagggtacagaaacaccctgagaatagctacactggaagagatcctgcacaagcttctgcggagcatcagtacacttcccctaaggcaagacagagtcaatgggatcgaggtggaccaaatgcgccaagccaggttccatcatatgcatataacgaagcccaaggtgctggaggtgcgcaatccttttatgatgggcagagatctgatacaaaggttggtctagaaaagcagcccagcaaggagtctagggagcaacctcgtactgaacgaactgaaacaagatacgagaattataatcttcctcggacattcgaaggtcttgaacaaagtttccatgaagacattattttgctatccaaggaactacaggaggcagaggatgctgaaaattctagacacatggagagattgaaggatataaatacacagtaccaggagaaactattaacacttagagctcggcaagcgaactatagagatgagttcctgcgcaaggaatctctagcacgccagcagcaataccagcacgccagcatgagccattatgccagcaattccacggctggggagcagcatggttataacccaacggcagcaggcacgcctcctgttgctgctggaggtgcttatggtgaggctcatcggggttatgcttctggccagtatgaatcatttagcgatcgtccagattatccagagttccatgatgggggcagaggtcgtggtcgtagttctgagcagcgtgctcaataccctggtggtcgtgcttataattccggtggccggcgattctagatatgctttgaactttgaaggacgatctatcactctgtcaagcgagctcatatcacctgatgtcagtgtgctgtaccgtgctatactcgaccgagaaacctaagcgctcataaaacttgttctacaattcaggtgcatcgaactactttatggttttgctagagttcattctggttataattgtagaggaacgaaacgatgagagaacactgacttttccgtttctctgcaattcatgtaatatgatctcggaagcaataacatttcatcttctat

SEQ ID NO: 263040 - DNA, 559 bp, Zea mays
gagctgagtagtctgggtggagcatcgtcctctacaccttatagtaaggatagaatgagacgacaggggcaatatggtgaagcggatattaactccatggttgttgcccagttgcatcactaccaggcacaacaaagggtacagaaacaccctgagaatagctacactggaagagatcccgcacaagcttctacggagcatcaatacactccccctaaggcaagacaaagtcaatgggatcgaggtggaccaaatgtgccaagccaggttccatcatatgttggatcgaggttatggctccacctttgcaccaactgcagcagcgcctacttcggccccccccaccccccatgcctggcagtgccaagcaaagcaagacttctgtagagttatgcgtccttgcttgctttcacatttgggtgtgttctgctataatttacggtgattaattttcccctgcaatttggcaggcatacaaacattttctctctatttttctatccaacataattcatgatttaaataaaggaactatttcttaaaaaaaaatttaatctat

SEQ ID NO: 263041 - DNA, 369 bp, Zea mays
attcccgggacgaccggagtcgacccacgcgtgcgcggacgcgtgggcggacgcctgcgcggacgcttgtgctcgaccgagaaacctaggcgctcagaaaacttgttctacgattcaggggcatcgaactactttatggttttgctagagttcattctggttataattgtagaggaacgaaacgatgagagaacactgacttttccgtttctctgcaattcatgtgatatgatctcggaagcaataacatttcatcttctatagcttcgagcatcacagagatggtcaaatgacactgatctgcattacatgttattgtgaaacatttgcttttgaaaatgccaataaaaagaatcatactgtttaatc

SEQ ID NO: 263042 - DNA, 410 bp, Zea mays
cccacgcgtccgcccaatttactatgttataccctttggcttccgatgaggtggccgaggcgtgaggctgacggttgtgctggtagtccgcaaggaaccggatttggacgcgtctctttcgttgtttaggtttggctacaaatggataagtcatcaaatctcctgagacagtacttcagcaacttgcacgatcaactgagtacacgtcctttttccacagtcaggttgcaaagaaatggcttgatttttaggatagaatgagacggcatgggcaatatggtgaagcggatattaactccatggtcgttgcgagttgcatcactaccaggcacaacaaagggtacagaaacaccatgagaatagctacactggaagagatcctgcacaggcctcggcggcgggtccgcccc

SEQ ID NO: 263043 - DNA, 1152 bp, Zea mays
ggacctgggtcagattgttgattatgaaggggaatagaagagtattttgctctggaggtgatattgctcaatgtgcccggtgtttatataatggaaactggaaatgggtcgatgatttcttccaaaatgaatatttgctaaattacatcattgcgacttacataaaacctcaggtttccattcttagtggaattgtcatgggtggaggagctggtgtttcaatacatggaagatttcgagttgccactgataacacgatttttgcaatgccagaaacagctctaggcctctttccagatgtaggggcctcttattttctatctcggctaccagggttctatggagaatatgttggtctaactggtgccagattggatggtgcggaaatgcttgcctgtggcctggcaactcattttgtcccgtcaaagaggttgccattgcttgaggaatcgcttaaaaagctggacacgtccagtacttttgctgtgtcgggtattatcgaccagttttcacagaggccattagtgaaagatagcagctctttaaataggatggaaaccatcaacaaatgcttctccaaaaggacagttgaagaaatcatagatgctcttgaacaagaaatctcaaatgtttcagacaaatgggttgctgcaacaatcaagtccctgaaaaaggcttcccccaccagcctaaaaatttctctgagatcgataagagaagggagaacacaaactcttggggagtgcctgcgtcgggaatatcgagtggtttgccatgtcctgcgtggcaccttcagccgagacttgtctgagggatttagggctgtgctactagaaaaagacatcaagccagagtggattcctccaaggttggagcaagttcctgacgaggcagttgagcaatatttcttgagaattgatgatccccagtgggaagatctgaacctgcctgcgagactttcccaccgaagaaatattgagtccaagatttgattgaggtcttggacgaagagtgagcctcggtcaggataactcgtcaactcatgtttgaagttgtgtgcggaatgttgacgacgattgataaataataaacgcggactgaatatatgtcttataagttcacgtttatcgctaaataatttttgttgccttt

SEQ ID NO: 263044 - DNA, 1590 bp, Zea mays
agttcccaggattaaaatcttgaaagtggtacccatgcagaatgttgatcatgactacataatcaatatctttgatcagatttcagaggaagatgatgacaatgatgatcatgaagttgaaaatgaatcttcagaagatgctggtgatgatgataacagtggagtagcagaaacagtttctgcagaagagaacggtgatgaatctggtgacgaaagtgatattgaacccttggtttcaattgattttgtcattgagaataacgatgactatgcttctcatccatctgctgaagcttttgaacgaatgccagctagattagaaaaaagagaccgcttctcgttttccttctatactgaagaatatagtaaaaaactagatgctggaaaggcccagcagacttcaaagaaaacagttcgtttgcataccgatcagcaggattatgatggttttgtcgagcttgatcgtgtaaagttgagcggcagcaacaaaaaactttcgatactacaacttggcatcaaacgaaataacaaggttcagaaaaaactgcatggagttacccactttagtcgtattcagatgcctatatcttcagatcctcttaccggcttatatttgaccgcatcaggatttgactcagaaattcttagtttacaacgaaaatttggtcaatggcgggaggatggtccatctgaggagcatagtgacctattgttctatgagtatgttgaagctgtaaaattaacaggggacaacctcatgccagctggtcaggttgttttccgtgcaaaagttggtgaacactatcggctccctcataagggaattatccctagagaacttggagtgattgctaggtacaaggggcaaaggaaaattgcagatcctggtttccaaaaccctcgatgggttgacggggagcttttgatactagatggaaagttcatcagagatggtcctgtgatagctttcttttactggacatctaatgttcatcttttcgaattctttagacagttgaagcttcctgactagttcccttctaaaagtagttaaaggccattataatttcagcatagctgcgtttggagccaaccggagttgcctggcatcgagtacagattctgatgtggagaacagggcgcctggcatgaatcagtggcatctccacccaactctgatagcctgccacaagggtggaaaagagatcgcagtcgcaagaggaatatcatcctgccaacatgggtgagccgcgggcgcatcatactaaattactaattacgtttctcctctgctcgtccaccgccagtttctgtgtttctcatagcaagtagaactaaagcacctcaaagatgtaaagttatgtatgcagtcgcaaatagtttaggattttgagcacatattgataatttttatacatggagagtcagtatgtatgtgaaatagtacgagcaagagttttgtgcagcgtgatcaagctgtggccataatgcttgtacatgtgtcgcaatcagcagcagaggcgtagagccaccccggttacacagattgttagggggtgtttggtttaaggaatcggtgggtgtaccgcc

SEQ ID NO: 263045 - DNA, 703 bp, Zea mays
gagaacttggagtgattgctaggtacaaggggcaaaggaaaattgcagatcctggtttcgaaaaccctcgatgggttgatggagagcttttgataatagatggaaagttcatcagagatggtcctgtgatagctttcttttactggacatctaattttcatcgtttcgaattctttagacggttgaggcttcctgaatagttcccatctaaaagtagttaaagccaacaggagttgcctggcattacattttccgaggacagattctgatgtgaagagggcgcctggcatgaatcaaggggcatctccacccactctgaaaggctgccatgagggtggaaaatagctcacagtcgcaggaagaggaatagcatcctgccaacatgggtgagctgcgggcgcatcataccaattccgcttctgctatgctccgtccaccaggtcaccagcttgagaccgaggcatcaaaccgccagattttgtgtttctcagagcaagtagaactaaagcacctcaaagatgtaaatttatgcactcccaaatttaggattttgagcgcaatcttggcagttttcatacatgcgaagtgaactagtacgagcaatagttttgtatagcgtgatcaaacagtggcagcaatcagtagcagaggcatacagaccaacacggccacacagatctgttacatatatctaagtttgttt

SEQ ID NO: 263046 - DNA, 369 bp, Zea mays
gacccacgcggccgcggacgcctgggcggactcgtgggcgtcgttttgcttgtgtggacgggacggatacatgggggagagcggcgtcgacagggacgagggccccgccttgtgcaaggccgctgcggcggtcgggggcggggatgtgggcgccgcctccgcccgccgccgccgccggctcgggcgtgccacggaggggcctgctccgacgaagagaatccggtcggggtcgcagaggtcgccgtacgactcgtctctggagacggcgacggacggctgctgctggccggcgcgcctatcgcatggcgccgtgtcggtgatcgggcggcggagggagatggaggacgcgttcgccgttgtgctcttgtt

SEQ ID NO: 263047 - DNA, 1029 bp, Zea mays
cgccagttcgccacctcctttgctctcgcctcgcgcgctcccccccccccccccccgcgcgcatcgtgccgttcgccaccgcaccgcgccgatggaggtcgccgccgtgcccagatccgccgcggcctgccgtgcggcgcccctgctcccggccgttcgagccgctgcgtgccacctggccctgccccggcgcgcgttctccgcatccgtcgcggcggcaccggcgccgcgccgcctcgccgctcgtcgcgctgcggatggtgacagcgtggagacggcgccggaggcggtccccattgagaaaaggttccctcccttcccgagcgtcatggacatcaaccagatccgcgagatcctcccccacaggttcccattccttttggttgatagagtaattgaatacaaggctggagaatatgcagtggggatcaagaatgttacaataaatgataatttcttcccaggacattttcctgaacgccccataatgcctggtgtcctcatggtcgaggctatggcccaggttgggggtctggtgatgctgcaacctgaagttggtggatctcgagacaacttctttttcgccgggattgacaaagttaggttcaggaagccagtgattgctggcgatacactgatcatgaggatgacactgactaagtatcagaagaggtttggactcgccaagatggaaggaaaagcttatgttggtggtgacctagtttgtgaaggggagttcctcctagtcagcgcaaccgagtagtgcaaagacacttcatgattctctgggaagaatcattggttggaatcagatctggttggatgtttgaaagaaccgagttttgaactaattatacaatcggcagttgaggcgatcctttacctgttcttaagcatgttgttgagtccatgtggtgatttctatcggttaccaagggcccaaggctgaatccacgccatgttatgttgcaattggggattacaacatattgggtaattttttgatggaataaaccttaatgctttttt

SEQ ID NO: 263048 - DNA, 1456 bp, Zea mays
agcccacgcgtccgcccacgcgtccggtctgttccgcctccgattgagtggctcaccttctttcccagccagcacgagcttgcaagcaagcgagctcctgagatttcagctcgcttctcctccagaggtcgagcagaccagactcctccgaccgaagctctaccacttcccagttagcctgtccaggaactgcttggccggagatccaaacaaacctctgtgttggggttctccggggttccttgcgctggagggaggtttcgttctcgctggccatggtttggctgagaagcagcagcggcagcatcttgatgccaaatctctgagctttatgaagatcgccactcacctgcgccgctcctgcttcctccactccttctcggttgtcttcctctactggttttatgtgatctcataacttgccctcccccggatccgccattcccccgtgccctctctccgtcccctcaaccttctccctcctttcttgcttccctcaacaatcgccaaataacagcactagcggcagcggtagaggatcttttcgaggtaagctaggccggccggttccctgcgggaaaaagaaaagaaaaggaccctgtcttgatgtcgtcgtcgtcgctgtctccgacggcggggaggacgtccgggtcggacggcgactcggcggcggacacgcacaggcgcgagaagcgccggctgtcgaaccgcgagtcggcgcggcggtcccggctccggaagcagcagcacctggacgagctggtgcaggaggtggcgcgcctgcaggccgacaacgcgcgcgtggcggcccgcgccgccgacatcgcgtcccagtacacccgcgtcgagcaggagaacaccgtgctccgggcccgcgccgccgagctcggcgaccgcctccgctccgtcaacgaggtgctccgcctcgtcgaggagttcagcggcgtcgccatggacatccaggaggagatgccggcggacgacccgctgctgcgtccctggcagctgccctacccggctgccgccatgcccatcggcgccccgcacatgctccactactgatgattgcctccaccaaccacaccaccatacatctgaggctgtcagctggggctggttggcaacaagacaagaagaattggctgcctctcaacaacattcacatctactacctacctggctgctttgagaattacagggcctctactatctgctgctgtgttaaatctacctcctggtttctccaataattgtcgctgttctgtactcttctcttatgttctgtctgtcagtgtgtatgagatgatgctcatcttatgttataaggcttaatcatgtgtctagttgtactttctgtcttgtaatgttatcagttatatgaataataagtgttatgtaagcaaaaaaaaaaaaggacggtcgctcgcgatctagaacctagttctagatcgcgagc

SEQ ID NO: 263049 - DNA, 867 bp, Zea mays
gttcatcgatgaggaccagttggtggtgaatctgaagaaagtagagcaagagttgaaatggcctgatgtagatgaatcctgggaatccctcacttctgggatcacccagctactgacagggatcagtgtgcacatcgttggtgattccacgcacattaatgaggcagttgctaaagagatagccgagggcatcgggtaccttccggtttgcacctagtgagctgctagagagcgccactgagaagtcgattgatacatgggtggcttctgaaggagtggactcggtagctgaagcagaatctgttgtcctggaaagccttagcagccatgtccgcactgtagttgcaactctggggggcaagcaaggagcagctagcagattcgacaagtggcagtaccttcactctgggttcacggtttggctatcggtgtccgacgcaagtgacgaggctagtgcgagagaggaagcccgaaggagcgtgagcagtggaagcgtttcttacgcgaaggcggacgtggtggtgaagctcggcggatgggacccggagtacacgcgggctgttgcgcagggctgcctcgtcgcactcaagcagctcaccttagcagacaagaagctagcagggaagaagagcctctacatcaggcttggttgcagaggcgattggcccaacatcgagcctccaggctgggaccctgaatccgacgccccaccgaccaatatctgaaacaatcctccgcccagttgtattctaggagaattctctgcatcaccattccggactagttttttcagtgtaataaataagagaggaacttgtcatctgtctgttgatgcataaaatgaactcgactaacgtttagtggggt

SEQ ID NO: 263050 - DNA, 461 bp, Zea mays
  unsure (1)..(461): unsure at all n locations
cggnccggaaaacccgggtccacccaacccgtccgcgtccccgccgctccgcctccaattggagtggctcgccttcttccccgcagccagcacgagcttgtcgagatttcagctcgtttctccgccagaggtcgagcaggccagcttcccaggaccgaagctctgcccggttcgccagtccaggaactctgctctcccggggccagagatccaaacaaatctctgcgttggggttctccggggttccttgcgctggagggaggtttcgttctcgccggccatggtttggctgagaagaagcagcagcagcagcatattgatgcgaaatctctgagctttatgaagatcgccacccacctgcgccgcttctgctttctccactccttctcggtcgttttcctctactggttttatgtgatctcgtaacttgccctcctacggatccgccatttccccgtgcc

SEQ ID NO: 263051 - DNA, 703 bp, Zea mays
cccaaaacaaaccctaaccggccggcccaattctcacgcgctcgccgcctaggagcattcacgttggcggcgggcggcggctcggttcctctcctccaccgcacctccaagaatccacctccacgactcagctgacggctcggcggcgccatggcggttcaccggctccaaccttccccctccggcctacagtgctccaccgcccggtcgccagtgctcctccatgggccacggctgacgggtgcacgcaccgggccccgaccacaaggatcccgatggtggacaactgctgctgcactttcctagagatcctgatgacgatggtcgctgctgcaccttcatggaaatcataaatatatttatattgcataatctgctacctaaggccttagtgcctatccttaacaaatatttttttatacttgattctattgtgtaggtattgatggctgtaagacagttcaatgagcacctcattatccagagtctcacaatttaaatggcttgatttctaaagtccaattatatttccagtcagcaatcacatattaactacacaagcaaagtgcagagatatattatgttcctttttgaaacaagttatttcttacaataccattttcattgtgttcttttcattgtatttttgcttcatctatcatgtcacgttgtggctgtggtcctagctagcttcaatcatgct

SEQ ID NO: 263052 - DNA, 1342 bp, Zea mays
  unsure (1)..(1342): unsure at all n locations
attctcacgccctcgccgcctaggagcattcacgttggtggcgggcggtggctcggttcctctcctccaccgcacctccaagaatccacctccacgactgagctgacggctcggcggcgccatggcggttcaccggctccaaccttccctctctggcctacagtgctccaccgcccggtcgccagtgctcctccatgggccacggctgacgggtgcacgcaccgatggttggtgcaggcaggagaggtggatttggtggacctagattcgatgtgcagagagcgacttggaggtggctgacatctcaagcactgcaacatgcagttacaactactgtgggccatacagggaaatgctgggcctattataccaattgttcaaagcatggaccttgtatagctacatgtttttatcatagatatattaatttctgaaatgcccatatattggtatatttgtggaaatttattggccaactgtaagcccgtcgtgatgcatagaacatttgtggtataagatttttctgttgatgtttgcaggttatttttccagcacttgacattcgagtgaaaaatgtcgcagggacatattctcttgaacataaaggagaaaatgatctcttcgcacatcagacaaggcttctactctttcagaagaaagtcatttttaggagaatcgtgaacaaaatgaccagatgtttaggcctggttggaaggacatttttcgaatgaatcagagtgagctcgaggctgagatttgaaaaggtctctcgagattctactcttgatccaaggaggaaggcctatctgatccaaaatctcatgaccagccgttggatagctgctcagcagaaatcaccacaaccaagcgtcgaaggacataatggatgtacacgacgacctggatgtgttccttcgtaccgagacccagggaaacaaatatttggctgtgagcattacaaaagaaactgcaagcttgttgctgcatgctgcaataagctattcacttgcagattctgtcatgataaagttagtgaccatacaatggacaagtatcttcactacaaccattcattttatcgtccacacctttcctgctgagggatgctttcaaggatttcattttaacatcgaaccaatatcaattaagcatggcattttatttggaaatagaagtttgtggtggtgccatggacctgtgcgtcccttgtgaaatgaattgattttctgtcattgaattttctaactgaagctttttcattcgtttgattcacttgagctcccttaagttggattggattatttaatcataaatgtcacccttcctctttagttatatntcc

SEQ ID NO: 263053 - DNA, 958 bp, Zea mays
tcgattctcttgaacataaaggagaaaatgatctcttcgcacatcagacaaggcttctactctttcagaagaaagtcatttttaggagaatcgtgaacaaaatgaccagatgtttaggcctggttggaaggacatttttcgaatgaatcagagtgagctcgaggctgagatttgaaaaggtctctcgagattctactcttgatccaaggaggaaggcctatctgatccaaaatctcatgaccagccgttggatagttgctcagcaataatcaccacaaccaagcgtcgaaggacataatggatgtacacgatgacctggatgtgttccttcgtaccgagacccagggaaacaaatatttggctgtgagcattacaaaagaaactgcaagcttgttgctgcatgctgcaataagctattcacttgcagattctgtcacgataaagtaactcaagaggtccacttattgactcttatgaccatgtaattggtgttaatacaactacattaacatgtaaaggttggtagatctggaaggtcttgatggtctaatacctatctatgagtacggaagaaaaggcgggagaagtcggtctctgcagcatcgcgcgtgaaaaaaaatcagccaattccacgagcattgatgttgtcatgacttcaaaagaggagagaccatgctaagaataatgcattatgacatttgtcaggcttacatatcgactgtttgatatggatagatgtataggtttatgaccaatccagttcaaagcaattggagtatagaagaaataaggagaaacaggaaagctctgtacatcttgcattttgctgttgtttgtcgaagtttcaatgtctgtcgcgtgacaaaatatagttgtaatttatattttggcatgcacgaaacaggtgtatttattcatttttgaacgaaattttatgtcaaatcaaaaatccccttat

SEQ ID NO: 263054 - DNA, 439 bp, Zea mays
caggaagaaaaattgttccaagatatatccactgtactatctgaactttctcaactacatgatgggttgagctatcctctggatgttgaagctggaacaaatgatatttcaagtaatgagattgattgggctagaaagcgtaatgaacttttgacaaagcttcaaggattatgcaaatctatccgggtcacgttgtcaaatcatgttcatagagaagaacttgagttgtggccattgttcgataaacatttttctgtagacgagcaggatatagattatcggtcatataattggaactactggtgctgaggttctgcagtccatgttaccctgggttacatcagcacttagtttagaggaacagaacatgatgctggatacatggaagcaagcaaccaaaaacaccatgtttgatgaatggctaaatgaatggtggaag

SEQ ID NO: 263055 - DNA, 994 bp, Zea mays
ttctttttcaccgcacctccaagaatccacctccacgactgagttgacggctcggcggtgccatggcagctcaccggctccaacctttccccttcggccaacaatgctccatcgcccggtcgccagtgctcctccatgggccacggctgacgggtgcacgcaccggcaacgagtacccaccacccggtacgtgcaccctctttgctctcggcattcctacctatcttccgtgctaaaccacccagcacccaagcattttggcctgatgccacatgtgtggtagctacaaacctacaagctttgacaaaagatgttatgattagggtgatacaaagttgtttatgcttctttatctctatcatactagcacttattaggttgcaactcgattgtttaggtactagattcgatctgattgtgaattaccagatggttggtgcaggcaggagaggttggatttggtggacctagattcgatgtgcagagagcgacttggaggtggctgacatcttcaagcactgcaacatgcagttacaactactgttggccatacagggaaatgctgggcctattataccaattgttcaaagcatggaccttgtgtagttacatgtttttatcatagatagattaatttctgaaatgcccatagattggtatatttggggaaatttattggccaactgtaagcccgtcgtgatgcacagaacatttgtggtataagatttttctcgatgatgtttgcaggctatttttccagcacttgagagtccagtgaaaaatgtcgcagggacatattctcttgaacataaaggagaaaatgatctcttcgcacatcagacaaggcttctactctttcagaaggcttgatcagttggctctttatcctatagaatggtggacgggatctctatgtcattgagatatttttatttggccttgtagaaagtcatctttaggagaatcgtgaacaaaatgaccagatgcttaggcc

SEQ ID NO: 263056 - DNA, 886 bp, Zea mays
caaaccctaaccggccggcccaattctcacgcgctcgccgcctaggagcattcacgttggcggcgggcggcggctcggttcctctcctccaccgcacctccaagaatccacctccacgactgagctgacggctcggtggcgccatggcagttcaccggctccaaccttccccctccggcctacagtgctccaccgcccggtcgccagtgctcctccatgggccacggctgacgggtgcacgcaccggtatgcatcccttgctgctctaattcccgacgctctagctcgtgtaccagatgtgcagactgtcgcctagccctgctccggcgtgaaggacttccgcttctgcccctgcgcatcccgcccttggtcgcgcacctcggcatgttcctcggcccgacggctactgtcttgaggcatacggtggccgcccacctcgtacccagtcaccagatctcaagttccacctcaaaatctagatcaagtgaatgccatgtttcatccttggttcaatcggttcttactggaatttgttggcagggcgacgagcacccaccaccggttatgtgcaccctctctccttcggtccttcctccctttcttccgtgctaagccaccgagcacccaagcggtttggcctgatgccacatctctggtaggagaggtggatttggtggacctagattcgatgtgcagagagcgacttggaggtggctgacatcttcaagcactgcatcatgcagttacaactactgttggccatacagggaaatgctgggcctattataccaattgttcaaagcatggaccttgtataattacatgtttttatcatagatagattaatttctgaaatgcccatagattggtatatttgtgaaattta

SEQ ID NO: 263057 - DNA, 344 bp, Zea mays
gaggaaggcctatctgatccaaaatctcatgaccagccgttggatagctgctcagcagaaatcaccacaaccaagcgtcgaaggacataatggatgtacacgacgacctggatgtgttgcttcgtaccgagacccagggaaacaaatatttggctgtgagcattacaaaagaaactgcaagcttgttgctgcatgctgcgataagttattcacttgcagattctgtcacgataaagttagtgaccatacaatggacaggaaatcagtgatggagatgatgtgcatgcaatgtctgaatgttcaacctgttggtccaaattgtcaatccccttcttgcaatggac

SEQ ID NO: 263058 - DNA, 1252 bp, Zea mays
caatagtactgatatagctctccagatatgaatcatccgcaaacctgagcagcaggcaagacttcccaacaccggagtccccgatgaggagcagcttgaagaggtagtcgtactcgggattcatggcgttggacgcggacgggatgggggtcggggtcgggaccggcagggacgaggcggctcctgctctctgggggaggcgacgaccgaggtggggaaggaaatgggagaactagcggagggagcacggcccacgcgtccgcccacgcgtccgcccacgcgtccgcccatctctctctgcgcgtcccgtgctccctccgctagttctcccaattccttccccacctcctcggtcgtcgcctcccccagagagcaggagccgcctcgtccctgccggtcccgaccccgacccccatcccgtccgcgtccaacgccatgaatcccgagtacgactacctcttcaagctgctcctcatcggggactccggtgttgggaagtcttgcctgctgctgaggtttgcggatgattcatatctggagagctatatcagtactattggagttgattttaaaatccgcaccgttgagcaagatgggaagacaataaagctacagatttgggatactgctggccaagaacgctttaggaccatcacaagcagctactaccgtggagctcatggcattattgttgtgtatgatgtaactgaccaggagagctttaacaatgtcaagcagtggctgaatgaaattgataggtatgccagtgaaaatgtgaacaagcttttggtggggaacaagtgtgacctggctgagaacagagtagtttcttacgaggctggcaaggcccttgctgatgacatcggaataccattccttgagactagtgccaaggatgcaacaaatgtggagaaggcattcatgaccatggcaggggagataaagaacaggatggcaagtcaaccagctgcaagtggtgctagtaggcctgcaactgtgcaaatgcggggtcagcctgtttctcagcaaagcagctgctgctcttgatcgtctgtctagatcacagtagtgtgattgtgcagcaagcaaaacttaaattggttgctccctgtacattaagcctattactgtcccaaagaactcgatgttatctatcggatactggaagtctgtctatcgactgcaacgcttaagcagatatggcctgttttatctgcctgttcttattccagtagaaatgtgatgttggatc

SEQ ID NO: 263059 - DNA, 733 bp, Zea mays
gtgaggaagaaactttgagttgatagtcacgagttttgcggcctcgttacacatttgccacaagctaccatagaagtattccatatcattcccgacaaaatatccagagcacacccattcttgatgaagtttgaaatgggtacacagggaacatattactaattctggctttgacaacactcaaaacaaattgctgatccaacatgaaaccaaaaactaacatgacatccaccaaaagggacttaagccgtggacgccttcttcagcttggcgagctcttgcctgatagcaccacccctcttgatccttgccagcatgaccttgaacctgtcaaagtcactgagcgcagccctcctcttctggacaatcagcttcttgccccatgagctgttctcccacttcgtcttcacatcagcttcctccatagccttgatcagggttgtcttcttggggacacgtttgatgtcaatcttgatgtcagtaagtgagagccgtttgaagttaatctggcacctgaccatatcaggggcgtccacaagtgccctgttctggtcgaccacatcgacgatgacgacgagacggccatagtctttgccgtagttcaccagggccacgcgcccgatctccacgaacctcttgaacggcatcctcgcggtgagaggcgagcggcggcgctgtgaagcggctggagcgagagggcgaagcggcccacgcgtccgtccagcgggaaacc

SEQ ID NO: 263060 - DNA, 758 bp, Zea mays
gcggccgcccttttttttttttttttttttttttttttttttttttttttttttttttttttttttggcgcaagctaacttaagtatttcatatgattccggacaaaatatccagagcacacccattcttgatgaagtttgaaaagggtacacatgaaacatattactaattctggctttgacaacactcaaaacaaaatgctgatgcaacatgaaaccaaaaactaacatgccatccaccaaaagggacttaagccgtggacgcctttttcagcttggcgagcttttgcctgatagcaccaccccttttgatccttgccagcatgaccttgaacctgttaaagtcactgagcgcagccctcctcttctggacaatcagcttcttgccccatgagctgttttcaccacttcgttttcacatcagcttcctccatagccttgatcagggttgacttcttgggtacgcgtttgatgtcaatcttgatgtcagtaagtgagagccgtttgaagttaatctggcacgtgagcatatcaggggcgtccacaagtgccttgttctggtcgaccacatcgacgatgacgacgaggcggccatagtctttgccgtagttcaccagggccacgcgccggatctccacgaacctcttgatcggcattctcgcggcggtcggagagtcgatcgccggcgctgtgaagcggctcgacccataggggagagcgtggcgcccacgcgtccgcccacgcgtctgcggacgcgt

SEQ ID NO: 263061 - DNA, 403 bp, Zea mays
gaaaacccgggagagggggggtgcgtgtcaggcaagagctcgccaagctgaataaggcgtccacggcttaagtcccttttgggccttggcagcatgaccttgaacctgtcaaagtcactgagcgcagccctcctcttctggacaatcagcttcttgccccatgagctgttttcccacttcgtcttcacatcagcttcctccatagccttgatcagggttgacttcttgggaacgcgtttgatgtcaatcttgatgtcagctcaaaataagtttcgattacagttgcctggggaggtcaaacttgcagaggaagcggataaattactggatgggttgggtccaaggttttctggttggtggggatatgatcctgttccggtggatgctgatctgttgccagcta

SEQ ID NO: 263062 - DNA, 650 bp, Zea mays
atttttattttatatttttaatttttattttttttttaaataattatattattttttttttttttttttttttttttattttttttttttttttttttttttttttttttttttttttttttttttttggatcacaaaatagtttatgccaataacctggtttcctaaaaacactggcaataaacaaaactcaaatgggaagcggggcacatttggcgacagctaacttttatgtgttccatatcattcccgacaaaatatccagagcacacccattcttgatgaagtttgaaacgggtacacaggaaacatattactaattctggctttgacaacactcaaaacaaattgctgatccaacatgaaaccaaaaactaacatgtcatccaccaaaagggacttaagccgtggacgccttcttcagcttggcgagctcgtgcctgatagcaccacccctcttgatccttgccagcatgaccttgaacctgtcaaagtcactgagcgcagccctcctcttctggacaatcagcttcttgccccatgagctgttctcccacttagtcttcacatcagcttcctccatagccttgcccacgcgtccgcccacgcgtccgcccacgcgtccgcggacgcgtgtgcggacgcgtggg

SEQ ID NO: 263063 - DNA, 479 bp, Zea mays
gctgttctcccacttggtcttcacatctgaaaaaagaatagccagagatcaaataagtgtcaccattctcttatgggcaatcatctagaatacagaagatgaataaagtgtggcggtgctaaagaggtccacagcataagctctatcgttaccagcttcctccatcgccttgatcagggttgtcttcttggggacacgcttgatgtcaatcttgatgtcagtaagtgagagccgcttgaagttcacctggcacctgaccatatcaggggcatccacaagtgccctgttctggtcgaccacatcgacgatgacgacgagacggccatagtcctccccgtagttcaccagggccacgcgcccgatctccacgaacctcttgaacgccatcctcgcggtggcggtggcggcgcggtgaagcggctggagcgtgtgggcgaaccccagaggcccagcgtccgcggacgcgtgggcggacgcgt

SEQ ID NO: 263064 - DNA, 435 bp, Zea mays
gactagttctagatcgcgagctagaactcggccgccctttttttttttttttattccatatcattcacggcaaaagtatcctgagcacgcccgtgcttgataaactttgaaatgggttcacagggaacatattggtacttctggctttgtcgacgctcaatcgaattgctgatccaactcagaaccaaaaactctaacatgacatccacggaaagagaccccttaagccgtgggcgccttcttcagcttggcgagctcttgcctgatagcaccgcccctctcgacctttgccagcatgactttgaacctatcaaagtcatcaagtgctgctctcctcttctagaaaatctgcttacaccccatgagttgttctcctacttggtcttcacataatatcttcaaatttggaagttgagagagtgtcgatgggatcac

SEQ ID NO: 263065 - DNA, 459 bp, Zea mays
acccactcaatcgcggactcgtgggtcttctgatgcgatgggatcttcaccttcttgtgattcacctgacaagttttcatgggatcattagcggtctcctatctctagtccactgagaagtccagttttaaaatcaagaaacccaagtgcacctccatcaccaatgcatccaaagttgttcccggagaaccatgtttctcgccctgatggcaatggaagtgctagttttcacccattaccgctccctcctgcttctgtaagcccaaagcagacaaatgctagccaccagttagttccaaaagctgagatgccttcggtggctggtcaatggcagaaaggaaaactcttgggtagtggcacctttggatgcgtgtatgaggccaccaataggcacactggagctccttgtgccatgaaagaggtgaatataattccagatgatgctaaatcagtcgagtc

SEQ ID NO: 263066 - DNA, 904 bp, Zea mays
ccacgataaggccaaacaagcggtaaccttgaacaagggaagagaattgacttcctgggtcagtcatagcaaatgcatcggcagctgcgcatgcaatgaagtccagggctgcggcgccggcctacaaccgttttcgtgctcacacacccaaaccttagtcgcgatcaggccccaaggactcgagatgaagtcgagggcacggtccaccgccggcgactccaggctctcggtgaggaagaccaaggctgagaaggacccaaacaagcccaagaggcctccgagcgcgttcttcgtcttcatggaggagttcaggaaggactacaaggagaagcaccccaatgtgaagcaagtctccctgattggcaaggctggtggtgacaagtggaagtccctgtctgatgccgagaaggctccctacgtgtctaaggcagagaagctcaaggctgagtacaccaagaagatcgacgcttacaacaacaagcagtctggagaccccacggcgtctggtgattccgacaagtccaagtccgaggtgaacgacgaggacgaggagggtgacgagtgatgtatgacggatgaaactctgtccaagtgtttgcagtcagggaaaaaatctcgtcgttgtcggcctaaccgggttttctcgaaggactttctagatgcagtagattagtgccgtcttctgagtagtttccttgcaagtgtcgtcccgtccctggagtgaggcagtttagtttgtagtttcttcgcttcatcggcactcgaccgttgttggattgggatgtttagcctgcagtctgtacttaccccaagcatctatggtgcctgttttaaatctcagatcacaatagacgtttgttttaaaaatcaaaaaaaagggcggccgcccgggaattcgggccgg

SEQ ID NO: 263067 - DNA, 561 bp, Zea mays
ctcatgaacttgcttagtatgctgtatgagtttccttactctactttcaaattcattccactcaatcgtggcattcttcacaagtatgctggctagccggcgcttgtttggccttattgtgggaaagttcccaccacccatgtacatgcggtaaccttgaacaagagaagagaattgacttcctgggtcagtcatagcaaatgcatcggcagctgcgcatgcaatgaagtccagggctgccaactgagatgagaagttcctaaatggttcgagctctgatggagacagaagggtttctttagttactaaagcaggataaagacgacttatggcagccatcctatccttccctccataaatttcagcacctgcaacgtatatatttgtgctgcgcttgaaaccaatagctgctagcataagcacagcctcttcaggtgcaaggggacatttgccttcggaccgtaacaaagcagcagacggcaactttgtcgtcttcttgagttctgacagcacaggaaagtgaatttggcgataagcttctagttcgtccggacgcgtggg

SEQ ID NO: 263068 - DNA, 398 bp, Zea mays
gaattcccgggtcgaccgcacgcgtccgcccacgcgtccgcaagtccgaggtgaacgacgaggactaggagggtgacgagtgatgtaggacggatgaaactgtgtccgagtgtttgcagtcagggaaaaaatctcgtcgttgtcggcctaaccgggttttctcgaaggactttctagatgcagtagattagtgccgtcttctgagtagtttccttgcaagtgtcgtcccgtccctggagtgaggcagtttagtttgtagtttcttcgcttcatcggcactcgaccgttgttggattgggatgtttagcctgcagtctgtacttgccccaagcatctatggtgcctgttttaaatctcagatcacaataaaaaaaaaaaaaaaaaaaaaaaaaataaaa

SEQ ID NO: 263069 - DNA, 744 bp, Zea mays
ggggtgcccaaagataccaaagatagagatgacatcttagaaagcgagttctttgacaccaggcaggcattccttagcctttgccaaggaaatcattatcagtacgacacgcttcgccgcgcaaagcattcgtcaattatggtgctataccacctgcacaatccaactgcgccagcatttgtcactacgtgcaatgcctgctgccatgatatcgaaactggtcaaagctggcggtgtgagatctgtccagattttgacgtgtgcaacgcttgtttccaaaaaggagcggttactcatcctcacaagttaacgaaccatccatcagctgctgaccgtgacgctcagaacgcagaagctcggcaaatgcgtgttcagcagctaagaaagatgctcgatctcctggtacatgcgtcgatgtgccgctccggcagttgccagtatccccactgccgaaaagtaaagggactattccgtcacgggatgcagtgcaaaacccgtgcttcgggaggatgcgtcctctgcaagaagatgtggtacatgctccaactccacgcccgggcttgcaaagattcagagtgcaaagtgccacggtgcagggatctgaaggagcatctcagaaggttgcagcagcagtctgattcccggaggagggctgctgtgaatgagatgatgaggcagagagcggcggaagtggccaaactgatagtgccgcctctgtacggggggtatatatctttgtggaaa

SEQ ID NO: 263070 - DNA, 1225 bp, Zea mays
tgacggcattctgctcgctcctgctgccatcgtttttcctttttcctggacagccactgcaactcctcccaaatcctcccacccggtttagccggctccgctgccaccgccgcgactccacctctgtcgccaccatggtcaagtccaaggccatcagggtccacgagctgggcggccccgaggtgctgcggtgggaggaggtggaggtcggggagcccggtgaaggggagatccgcatcaggaccaccgccgtcggcgtcaacttcatcgacatctactttcggaagggggtctacgccgcgcccaccatgcccttcaccccaggaatggaagccgttggcgtcgtcaccgctgttgggcctggcctcactggcaggaaggtgggcgatgttgttgcatatgccggcaaccccatgggctcctatgctcaggagcagatccttccagcggctgtcgctgttcctgttccaccttccgttgatcataagcaagcagcttctgtgatgctcaagggcatgaccgcccatgttctgcttcgccgggtattcaaggttgagagtggccatactatcctggtccatgctgctgctggtggtgtcggctcactcctttgtcaatgggcaaacgcccttggtgccactgtcatcgggactgtttccaatcaagaaaaagccgctcaggcagctcaggatggatgccaccatcccataatttacactagcgaggatgtcgtcgcaagagtcaaggatattacatcaggaaaaggtgtcaatgtcgtctatgattctgttggaaaggatacatacaaggcttccctggagtgcttggcgtcccgcggcttcctggtgtcgtttgggcagtcgtcaggcaaacctgacccaatcccaacgagcgacctggcttccaagtccttgttcctcactcgtcctagcctcatgcattacactgctacccgtgatgagctgctggagtcagccggcgaggtgtttgccaatgtcgctaacggggtgctgcacgtccgggtgaaccacacgtatccattgtcggaagctgcccaggcccatgcagatctggagggcaggaagacatcagggtccatagtgctcatcccgggatagactcaagggcatgtgaatgaataaatggggtgatctggttatgggaacggcgtaataataattatatctatgctgtttatgcggtatgttcgatctgtttctgagtt

SEQ ID NO: 263071 - DNA, 572 bp, Zea mays
gtctacgccgcgcccaccatgcccttcaccccaggaatggaagccgttggcgtcgtcaccgctgttgggcctggcctcactggcaggaaggtgggcgatgttgttgcatatgccggcaaccccatgggctcctcacgcgtccggcagatccttccagcggctgtcgctgttcctgttccaccttccgttgatcataagcaagcagcttctgtgatgctcaagggcatgaccgcccatgttctgcttcgccgggtattcaaggtacaaacaaaccctaaaccctaaccactacttaattgattgatttttagccctcctcttacagtatccactcagtctgggatctcagcccttggctaactgaatgtgattctgacgaccccttcttattactttgcgcgagcgttctgacaattgtttatttgaacaatcaattggatatgtaaacagtaagcaaaaatgacattgtatatttatataagtaatatataggtctatttatatacatggaagccgatacatagtatgaaaattgtgattaggaattttgaaagttttttagattgattcag

SEQ ID NO: 263072 - DNA, 1090 bp, Zea mays
tgcccctgctggtaccgccgcggcattactgggtggtccacgcgtttttttaaaaacaccagagagcaggtgtcctgcaatttcattagcagaagttcctagcaaacaagcaagaaatgatcatgaggcagcagagaagcttaagtttgtcatttatcaaaggcccaaagcattccaaaatggaagcactgatttgggaaacaagaatggtgcaccaaaaactgttgaagagagaatagaggaatataataaagcacgagcacgcatcttcaatggttctgtttctgcagattctgatgctgcaagtgttttgggaactctttgcactggcagagatgagtcagtaaatgttgaaccttctgttgatgaaatcaaagtcagcacgatgaacaaccgttccagagttgctgttttcaaggatactcaaaaggatcgcagtgacccagattatgatcgaaactacaaaaggtatgttaggagcccagttcctgacttcaacttgagcccaggtgccttcaactttgtgcctcagtttatgcagtatggcattggttatgtgcaatctcctggcatgtccacaaaccagcatactatgtactttggccagcctgatctaacaatagggtcttctggagctgctgtttatcgacattggccaaccccaacaatgatgtatccccattgctatgataatgttagtccaatgatgtctcaggttcctctgtaccagtctttcaaccatgattaggagattctgcttgctggaaagttgggaacaattctctgttgaacttgctatgttgtgttgtcctatgttaagtggagttcctttagattcgagccgtttttattacaaaaaattgtataaggagtcctaattcgttgaaactatttcgtgaactagtctggaactgtgatgcttgtctaatgtctagttctcgtttgcaatttgctcccggtttatagttagtagtgtgctgcgactggtcttgaaccgtgtcgcgtggtcgtactggtagaaccaggttgctacttgccagcagtcattgctttgattccgattttttatttaacttctttttaatcaagt

SEQ ID NO: 263073 - DNA, 965 bp, Zea mays
gcagatccctgcctgcacacggcatccggagttccggactcccctcctcttctcgggcagccgggcgccgcttcgcctcctcctcgcaggcaagaagagcagccagccgcttcgcgatcggggacgcggagaggggaaaggcgagtcgtcgtccgtccacggcagcttccctccctctcctctccgcccccgcttacctagcccggcccctcctacgccccccctcccgccgccgcacgatgagcacctctccggccgcgtccgccgccgcgtcgcctccgccgcctattgcctccgccgccgaggcctcgcgggcgacggagacgttggtggtcgacgagagggtcgcctcacacgtggacccgttcctcgtagaggcgctcgacaaccctcgccaccgcctcatggttctacggatggaactggatatacgaaactttatgcagaaccctcagctgcaggagttcgaattccagaactttccgacttcttacctacgctgtgctgctcatcgtgttgcacaacattatggcttagagactatagtggcagatagtttagtagaaggctcagttagcaggatcgttgcaagaaaaacaccagagagcaggtgtcctgcaatttcattagcagaagttcctagcaaacaagcaagaaatgatcatgaggcagcagagaagcttaagtttgtcatttatcaaaggcccaaagcattccaaaatggaagcactgatttgggaaacaagaatggtgcaccaaaaactgttgaagagagaatagaggaatataataaagcacgagcacgcatcttcaatggttctgtttctgcagattctgatgctgcaagtgttttgggaactctttgcactggcagagatgagtcagtaaatgttgaaccttctgttgatgaaatcaaagtcagcacgatgaacaaccgttccagagttgctgttttcaaagatact

SEQ ID NO: 263074 - DNA, 487 bp, Zea mays
caacatcagcgaaaacgcgcagagaaagatcactgatacaatggccatcaggggcagcatcggcttcgtagtgctctgcgtcgcgctggtgctgcacgccgcggcgacggcggcggcggccagggccgtgcctatgccgggcgcctcctcgacgtccaccggcagcaccgcgtcgctcccggccgcggccggcaccaagaacgacgactctggctcgggcgtcgccggcgtggcggacaagaagaacctcttcgtgggcgtgggaggcatgggcgacctcccgggcttcccggccgtgggcggcgggtacggcggcggcttcggcaacaacggcgggggcgtcttcagcggcgtcacgggcccgctgggcggcgtcgggggcggcgtcggaggcgtcggcccgctgggcggcgtcggcgggttcgggcccctcggcggcggtggcggcggtatcccgtttggcgcttcgcttgcggcggcaccccct

SEQ ID NO: 263075 - DNA, 557 bp, Zea mays
agtatggcgttggttatgtgcaatctcctggcatgtctactttggccagcctgatctaacaatggggtcttctggagctgctgtttacccacattggccaaccccagcaatgatgtatccccattgctatgacaatgttggttcaatgatttctcaggttcctctgtaccaatctttcaaccatggttagtagattctgcttactggaaagttgggaaccgttctctgttgaacttgctatattgtgccgtcctatgttaagtggagttactttagattcgagccatttcgattacagaaaattccaaaaaattcatgtaatgtcgaacgtattagtttgtataatggggagtcctaattcgttgaaactaatatcgtgaactagtctggaactgtaattcgtgtctaatatctagttctcgtctgcaattgctctcggtttagggttcactagaatagtgatgcgcgtctgcacctgttcttaaccatgtggcatggtagtactagtacaaaaagctgccacttgtcagaatgccagcggtgagtactttcctgcc

SEQ ID NO: 263076 - DNA, 611 bp, Zea mays
  unsure (1)..(611): unsure at all n locations
agtatggcgttggttatgtgcaatctcctggcatgtctacaaaccagcctgctgtctactttggccagcctgatctaacaatggggtcttctggagctgctgtttacccacattggccaaccccagcaatgatgtatccccattgctatgacaatgttggttcaatgattcctcaggttcctctgtaccaatctttcaaccatggttagtagattctgcttactggaaagttgggaaccgttctctgttgaacttgctatattgtgccgtcctatgttaagtggagttactttagattcgagccatttcgattacagaaaattccaaaaaattcatgtaatgccgaaagcgtattagtttgtataatggggagtcctaattcgttgaaactattatcgtgaactagtctggaactgtaattcgtgtctaatatctaattctcgtctgcaattgctctcggtttagggttcactanaataaaaaaaaaaagaaaaataaaaaaaaaaaaaaaaaaaacaaaaaaaaagaaaaataanaaaaaaaaaaaaaaataaaataaaaccaaaataaaaatttgttatacaaattaaaaacgggggggcggctcaaaa

SEQ ID NO: 263077 - DNA, 273 bp, Zea mays
cattatggcttagagactatagtagcacagcggaggtaagacgtcggaaagttctggatatacaaaactttatgcagaaccctcagctgcaggagtttgaattccagaactttccgacttcttacctccgctgtgctgctcatcgtgttgcacaacattatggcttagagactatagtagcagatagtttagtagaaggctcagttagcaggattgttgcaagatgcacagcagaaagcaggtatcctgcaatttttttatcagaagttccta

SEQ ID NO: 263078 - DNA, 1768 bp, Zea mays
cctctaaactcagacgtagcacggtgggcgaccagtctcctccgcacgcttcccaccgagctcacacactgcacactcccacactcccactcccacctgtaggttcacgggaggcgaggaccctgccccccctgcattcttcccgtatcgcggaccgatcctcgccgcgggaggcgagcggagcggggcgtttctgcgggggagaagcgcgtccctgcaatttctgagagaggggaggcggcgagtggaaaagagcaggcgttgctatcctatcttgctgacacagcggcggtgtggcgaggcgcatggcgagggcgcgcggtggcgccgcgtggtgggtgctggcagcggcgtgggtgctgtgggcggctgcggctgcggcggaggcggaggccaggtcgccgtccgcgaggagggtgcaccggcacctcaagcgcctcaacaagccggccgtcaagagcatcgagagtccagatggagacatcgtcgactgcgtgcatatctcccaccagccagcgtttgatcatcctctcctcaagaaccacacaatacagtttaggccggcgtaccaccctgaaggtctatacgatgataccaagagcagcataggctcaaacaatgctggcgagaggccgatgctccagatgtggcatcgaaatggcaggtgccccgagggcacggttccaatcaggagaaccaagaaggacgacctgcttcgagctagctccgtgaggcggtatggcaggaagcggcacactgctccgagcccactgtctgttgatcccaacatgctcagtgagggtggccaccaacacgccattgcgtacgtccagggcgacaagtactatggtgcaaaggccaccattaatgtgtgggagcccaagattcagcaggctaacgaatttagcctgtcccagctctggatcttggggggttcatttggggaggatctcaacagcatagaggctggctggcaggttagccctgacctctatggagacaacaacaccaggctgttcacatattggactagtgatgcataccaagccacaggttgctacaacatgttgtgctctggtttcattcagataaacagcgaggttgccatgggggctagtatcttccccatctcgaactacgcgggctcccaatatgatattagcatcctgatctggaaggaccccaaggaaggaaactggtggatgcagtttggcaaggaatacgtcctgggctactggccgtccttcctcttctcctacctcgcggacagcgcgtcgatgatcgaatggggcggggaggtggtgaactcggagcccgacggcacgcacacatcgacccagatgggcagcgggcacttcccggaggaagggttcagcaaggcgagctacttcaagaacgttcaggtggtggacagcagcaaccagctcagcgcccccaagggcgtgggcaccttcacagagcagtccaactgctacgacgtgcagaacggtaacaatggggactggggcacctacttctactacggcggccctggcaagaactcgtactgcccgttactggtgcttctattgtgtatttgtgaagtgcctttctctattagcataatatgtttcccaatcttttctatttttttttattcctccttttattttcttttttccttgctctcttccttccttccctatttttttctcttttccctttctttactttctattcttttttttttttcttatttttatttcttttttttttattttttattttt

SEQ ID NO: 263079 - DNA, 573 bp, Zea mays
caagaacgttcaggtggtggacagcagcaaccagctcagcgcccccaagggcgtgggccccttcaccgagcagtccaactgctacgacgtgcagaacggtaacaatggggactggggcacctacttctactacggcggccctggcaagaactcgaactgcccgtgactggtgcttctaatgtgtagtgtgaagtgccgtcaccactagcaaaatgtaacccaagcgttcaggttcgcttatacagcgtcaatctgcatctccttgttcagtcctagctaggtagtgtgtaacatgtgcatgtgctctctagactctaatgttttcttcttcttttcattgtattttgttcttgtgccatgtaaagtttctgaagagaaggagcatggcttgaggctgcggtgggtggttgggctggtcggtggtgacctctactgatttttgcgaagtctgcttattggtcaccttcgccagttattttgaaagtgtgctatagcttgtttgatgatgaatgatagtaatgctgtaatggtattgagctctatggttaaaaaaaaaaaaaaaggggggccgcc

SEQ ID NO: 263080 - DNA, 570 bp, Zea mays
cgagaaaaggagagggctcagctgaaagaacaaaacagaaggctccgcattcagctgcgagacactgccgaagctgttcatgctgctggagaactgctcgtcagattgagagaaaccgaggaagcatctacactagaaaaggagaggactgccgcgttgttgcaagagaacgagaagctgaagaagcagctggagaagctgaggaagaagcacgagatggagctggagacgatgaaggtgcaccttgcggagagccggctgccggagtcggctttgggtgccttctaccaccacgagaacgagaggacgccggacgacgatctgtcctggcgggccgccttcgcttctgcgtacagtgactgaagttacctgactggggattgcttgggagttgagtctcgtcaactgagacaggttgacaattggggcatgagcatttctacgaccttgtttgattttaagtacatgactcgattggggcatggggcaaagtttttatgtatactgcttgtatgggaactgaatttccacgagttttatgtagtctttcgagtatttttttggtcgatc

SEQ ID NO: 263081 - DNA, 797 bp, Zea mays
tcgcccacgcgtccgctcacgcgtccgcccacgcgtccgcggacgcgtgggaagcggctagtcttcggggcttgccctttccccgccccaagggtacacggtcgccgccacctgccctagccgcaggagggagcgttcgccgccccgccccgccctccgtctcccgtcgcctcgccccccgcgctccgtctgccgcccctctccggagaaatgtctgagcatctctttgaggacaccttcgtcgtcactagactcgaccctgatggcaaaaagtttgatagagtttctcgtgttgaagctcgcagcgagcagttagatatgtatatgcagctagatgttgccacagatgtttatcctatgcatgctggcgagaaatttaacatggttatagcgcctactctgaatttggatggcacccctgacactggctactatactcaggctggcagaaaaactctggcagacaattatgagtacgtcatgcaagggaagctttacaaaatctcagaagacacatcatccagccaaaacgctaaagtggagatgtatgcatcgttcggcgggcttcttatgctgctcaggggtgacccttccactgccgctagctttgagcttgatcagaggctctttctgctcatccgcaaggtgtaaaactgtggttgctgaccacttaggtgtttgccttgctcgccacttatttaatttccatccgtgggtgaagctgttatatactgttgtaagtactgttttctgtatcgccatggatttatggtaacgagttcatgtttcttgctttt

SEQ ID NO: 263082 - DNA, 361 bp, Zea mays
gctaggcgacggggcttgccctttccccgccccaagggtacacggtcgccgccacctgccctaggccgcaggagggagcgttcgccgccccgccctccgtctcccgtcgcctcgccccgcgctccgtctgccgcccctctccgtttattgactgccaagtcagctgcgggtttatctactttttatctaggagaaatgtctgagcatctctttgaggacaccttcgtcgtcactagactcgaccctgatggcaaaaagtttgatagagtttctcgtgttgaagctcgcagtgagcagttagatatgtatatgcagctagatgttgccacagatgtttatcctatgcatgctggcgagaaat

SEQ ID NO: 263083 - DNA, 1268 bp, Zea mays
tggttttgttagcaggaaaagacacaagagctaggggtgaggattttgttacagcaatcggctatcgcatattagaggtcgagaactacttgaaagaatccaatcttgcggacgggagggggccattgagctgggttcacttggatgaggatgaaagggacgaccttgcagctttcctatctgccagtccttttcaacagaaagacattgtggtcacaattccttcagcaggtgacagtgaagggggcagcaatgcagcagggatgaaaaatgatatatcaactgacagctccaaggattcagctggttccacggatttgatatcaggcagagcaaaggaagatttgcatcgtgggcacagaagagcagctagtgccagtgctgatataggctcatggagcatgtcaatccctaatgaatgtgaaggaactacagaacagttatctgatggctcagacaaattgcctttgcgtaagatagtgaaaacatgtgctttgacaagtaccttgcaatctaagactagaacgaagtggaaaaatggagctgttaggtgggcaggcagtaaccaacagaatgttgaagaggctatccctctgaatacttctcagtcgagtcagggcttagaggaatgctttgaaaggaacaagagttgcttaagtacatgtgatgagcatacatacaataagaagcttcatggttggctcggagcccttcgtagacaacttcaaaggtctcagtaccaaattcaatatgggcatcatattcaattgattgttttggcacttgctgcccttgtaatcattgtatgcatagtgaggacaatctggtgactatatttatttgctcatgattggatttctagcctcacaagatcagcagcttgtatggtaaattcactggcagttaagttactcttggtcaacttgatcctgaagcatgcatatgaggcaactatggtagaccattttggtagtcaaggttgaaaatcatgtataatgatctggttgggaccacttatcttgccacatgttcagggcagtctgcctcgtccttggaagaacatctacaggacaatccttgcagcacggttgcttcgccacacttggatatgctcccgaatggtgccttgaacaattgatgcacctcgagaactcattcctccgtggtgagtttggtgactgggtggcacctatgcaatggcccaatataaattagtggtgcagcgggctggcgatcatgctgctagaaacccaaattgcaagacttgt

SEQ ID NO: 263084 - DNA, 1466 bp, Zea mays
ttcgttacgcgtgggcggacgcgtgggcggaggcggggcgcaacgacagcgcgcacttggattcggcgaccaccggagcgcggaggaggcacaggcgccgatctagagacgatggccgccgcgggctcctcgccgtccttctcctcctcgagtaagcgactggaagggaaggtggccctcgtcactggtggcgccaccggcatcggcgaggccatcgttcgcctcttcatggagcacggcgccaaggtctgcatcgcggacatccaggatgaggccgggcagcagctgcgcgacgccctgggaggtgacgcgcagggcgccatgttcgtccactgcgacgtgacgtcggaggaggacgtgagccgcgccgtggacgctgcggcggagcggttcggcgcgctggacgtgatggtgaataacgccggcgtgacgggcaccaaggtgacggacatccgcaccgtggacttcgcggaggcgcgcagggtgctcgacgtcaacgtgcacggcgtgttcctggggatgaagcacgcggcgcgcgctatgatcccgcggaagcggggctccatcgtgtcgctggccagcgtggccagcgccatcggcgggacgggcccgcacgtctacacggcgtccaagcacgccgtggtcgggctcaccaagagcgtcgccgcggagctcggtcgccacggggtgcgcgtcaactgcgtgtccccctatgccgtgcccacggcgctgtcgatgccgcacctgccccagggcgcgcgcgcagatgacgcgctcaaggacttcctggcctttgtcggcggcgaggccaacctcaagggcgtcgacgccatgcccgaggacgtcgcccaggcggtgctctacctggccagcgacgaggcgaggtacgtcagcgcggtcaacctcatggtggacggaggcttcacagccgtaaacaataacctcagggcgtttgaggattagttgaggcatttatgccagctctgggattgggagggagtattaccactatttcttctgctgttgtgacaagtgagtgcaagactaataaactgcagcatgttcatgtagccaacagatgattgaacattccaagtatcattgctgaattcacgcatatagttgctcttcaaaaagatcaagtacaatttcgtcctacagcgttgctgctgtgagctatataatggccttccaaaatcaagaagaatctaatcaccagctcgaggttgatgcgaagctacaaaagcatcattatcaagtgagcaggagctttcggccaattcagttacactagcccgtagggcatcccttttcacaattcgcaaacagccatgctctcaggctgcagcaaatccccttcgcaattcgcaaacagccatgctcgtgggagtagaagcctgagtggctctggtgttggcagtgttgcatgcctcggtctcagattttctgtgcatctacctggcata

SEQ ID NO: 263085 - DNA, 428 bp, Zea mays
ggaagatgcaatatattggcgaactcgagctcaaggtgcaaaccctgcaaacagaagggacaacattgcagctcagctagcattgcggcagagtgacaccactgggctaacaaccgagaatagggagctgaagattcgcctgcagaccatggaacaacaagtccacttacaagatgctttgaatgacaccctgaaaacagaggtccagcggctgaaggtggcaacaggacaggtgggcaatggtggtggagggatgatgctgaactttggggccatgccacgcctggtcggaggcaaccagcagatgttccacagcagccaagcgatgcaatccgtgctggcgacgcaccagctgcagcagcttcagcttcactcccagcctcagcagcagcaactgcactcgctgcagcttcaacatgtggcgagag

SEQ ID NO: 263086 - DNA, 569 bp, Zea mays
gaatacccggccggacgcactcgaccgcccacgcgtccgcccactcgtccggtgactagcccaccgccaccggcaagtcccctccgccgtccttcagtaccggaagaaggcgaggcgcccaaccgagagcaccaggggaaaggaagtgcgcctaggcatcgacatggaggacttctacgtcacgatcccctacggcctgctgctcgtagccggcggcgtagccggctacatgaagcgcggcagcgccgcgtctctggtcgccgggggcggattcggtgctgcgctccttctcgctggtgcgctcagcgcctgggccttcgcgcacgccggaggtggcgctgccgccatctttgccaccgtccttcagatcgtttgtgctgtgctattgactgttgttatgggaataagatatgtcaaaacacaaaagataatgcctgctggaattgtcgcttctatcagtgcactcgtactgatattttacgtgtacaagatatctactggtggcaacaaggattatatgtcggtgagtgccgagtgaatctgggcgtgtggtgttccgtgtacatgtt

SEQ ID NO: 263087 - DNA, 833 bp, Zea mays
tgaattcgctcgagctaaataagacgttgcagccaaccaggggaggccctccgcggtccgtggctccgtgccatcctctcctgggcagcgagcagtggtggccgcgggttcccccgcctcgtcctcccggatccggcgacgaagattaattgaataacttcgataagatgggtcgtggtattagcagtgggggtggtcagagttccttgggctatctctttggcagtgacgaagctccaaaatcatttgagaagcctgcaccagttcaaaagccaactcctccatcctctgcagagagactaaaagatatcgctgctggtattcaaagtagtaaatcaaacaattacaaaagatctgaaggccagaactgtggaaatttccttacggaccgtccgtcgaccaaggtgcaagcagctccaggtggcgactcttcactcggttatctttttagtggcagcaaagatggcaagtgatgtacacctgctgttagtgttcgccatgatcatgggagaaggtttctgcttaacaaaggaaaaagggaaaagaatcttgtattcccatgagtaaatatcaaactgctcatggtatctgtgttgttgggattgcttgtatgtgtgtatatgttcgtgtgtgtcgtgtgttgatccacagctactggtagcaagagcttctatccctgctgatggaattgtgcgcaatgccaatgttgacattatcgtgggtgatgctattatgttgtggtgtattattggatatgtttgctgtttaatacacattgttgtagaaaaaaacatccacagttctgttcaaaataaaaaaataaaaaagggcgg

SEQ ID NO: 263088 - DNA, 985 bp, Zea mays
  unsure (1)..(985): unsure at all n locations
ctctatttttccctttgccttgggtccattctccggcgtccgcccttctctcgcgcgcgccgaccgccgccgccaggtgccaggaagtcgtgggaagtcttcttcggcgacgagcacccgccaggccatatctctgcaatgggtgactacacaatccagattagcaccaagctcattgaccagcttgctcgtgatgacgagaaggtaaaacggaaagccaggaagcccaagcctaagaagaagcccaccgtccagccacatgaagagcccctggaattcccgagagaaccaaagacgacaagccttgctactgctcctgggtggcctctgcagcctccccctatgtttctgccagtgacccctgctcccccgccacccccggccacaatgccggaggtggaagccattcgttccgtcctgaaagaaagtgaggcgcttctcaagaagctggagaaccaggaaactggggcacgccaagagctcagcaagagagcaaaggagctgcacgacaaggagttcaagctaccataccagaaacccatgccctgcacccaggagagggcaggctgccttgagtgttacaagaccaatgcaaaggacccgctcaagtgtgctgaagcagtcaagagatttgaggcatgtgctctcatggccatcaaaagtactgccgcaaaagctgattagtatgtagcccgtgaagctttgtgagttggggcgagctgatacgcggactctgttttttatcttttgaggcaattcaaataaccaaggattttcatgggacccactgtagatttctaatgccactgcactgggctacctgaggcagcgcaccttgagcttagcgatattgcatatgtttgttaaaattggtatatcaagttgctggtgcaaaggttttttctgaaatatatattgatctgtgtggatggtatcactagctcgctgatatttttgtgngtctatgggcatatttggtatgcgg

SEQ ID NO: 263089 - DNA, 2042 bp, Zea mays
aggaaatgggactacttgagattaaacatggactgctacaagttgcagagacgttagattttcttcataacaatgctcatcttgcccatcgagctatatcacctgagacggtctttataacttctaacggatcttggaagcttggtgggtttggttttgctctttcagttgatcaagccacaggtggtttgacttcatcacagctattccattattcggactatgatgtcgaggatacagctttacctcttcaaccgtcgttgaactatactgcaccagaattggttcgaagtggagattctaaagttggctctgcttgtgatatgtttagctttggatgtctagcttaccatctggttgctcgtagaccacttctggactgccataacaatgttaaaatgtacatgaatgccttgacatatttaacaagtgaagccttttctaatattccttctgatttggtatcggatttgcaaaggatgctatcgatggatgcactatcgcgtcctcctgctgtggcctttacaggttcttctttcttccgggatgatacgaggttgcgcgctcttcgtttccttgaccatttgcttgagagagataatatgcagaagacagagtttttgaaggcattatcagatatgtggaaggattttgattcccgagttcttcgatataaagttcttcctcctctttgtgctgagttacgcaacatggttatgcagccaatgattttgcctatggttctaacaatagcagaatctcaggataaaggggattttgaacttgcaacactgcctgcgcttgttccagtgtttacttcagcatcaggtgaaactctacttttgcttgtgaagcatgcagatctcatcattaacaaggccacacaggaacatttgatatcacatattcttccaatgctggttcgggcttatgatgacaatgatccccggttacaggaagaagttctgcgtcgaacagtaccactgtctcgtcaacttgacaccaagctagtcaatcaggctgtgcttcctcgtgtacatggattagctctaaagacaacagttgctgcggtgcgtgtgaatgcgttgcgctgtttaggagatcttgtgccatccttggacaaagaaggaataatgggtatcttggagactgttcggcgttgcacagctgttgaccatactgcgccaactcttatgtgcacacttggtgttgctaatgcaatctataaacaatgcggtgtggagtttgctgcggaatatgtgattcctctcatcttcccattactcacagcacatcaactgaatgtacaacaatttgccaagtatatgctatttgtcaaggacattacaagcaagatcgaagagaagcgtggtgtgactgttacagataatgggaacacagaggtaaaatcatcaccttcattggcaaacgggatccattctgaacctatgtcaggacaaataccagttgcaaagagcagccctgcatgggatgaagactggggtcctactaagaaatccggtgttccatctctctcagttgattctagtgcacaaacaaagcaaccctcagtagacccttttgacttcggtactcaaacaaagcaatccacaccactcccctttgatttgagcacccaagcaaagcagccatcattagtttctcatgttacagcagctacaatcccacctgcgcaaccacaaccatcactacaatctcttgcggctagttcaggacctaaaatttctggctcatgtgtccctgttgacattgagtggcctcctcgaagaagctcgtcatccgacttcaatgcacccttgtctattagcaaggagaatggttctggaaggctgtctagcgatggacttgacgatattgatccttttgctgattggcccccaatacctagcaatgttactagcattacagcaaccgagcatcgtccaagcataaatcaaaatatttctggatttagctcaggtaacatagggtttggtggcagcgggaattctatagggcaagcgaaaagcaaccaaatgagc

SEQ ID NO: 263090 - DNA, 556 bp, Zea mays
  unsure (1)..(556): unsure at all n locations
actttctgttaaaaannngcgaccannggaagggaaaaatcgatttagcancgcactcgatgctgcaagaggcgacgagtaccttcacagccttgcccagcagacctttatccacagagacttgaagccatcaaacatacttcttggtgatgacatgaaggccaaggtggcggactttggattggtccggcttgcaccagctgatgggaagtgtgtctccgtagagacaagacttgctggcacttttgggtaccttgcaccagagtatgcagtcactggacgagtgaccacaaaagctgatgtcttcagctttggtgtcatcttgatggaactgattacaggacgcaaggcacttgatgagactcggccagaggatagcatgcatctagttacatggttccggagaatgcagctgaacaaggaaacattccgcaaagcaatcgaccctgttattgaccttgatgaggagacatatgctagcgttagtactgtctcagagcttgctggtcactgctgcgctagggaagcacaccagaagcctgacatgggccatgct

SEQ ID NO: 263091 - DNA, 1305 bp, Zea mays
gccgcgctgctgccagccagctcagcctgtactgcactgccataggaggcattggagctgccctcatggcagctttcatgtaccacatgctgcggcgcactgaccagctcactggcctctgggtcgtgtccatcttctgtggccttatctggtgcgtcggcatctgccatggcctcttcacaaacaggcccagcagctcgtcacccaccaccgcattcgagcccaacttcttcaccaagctcagctacagcatgaccctcctccgttacccgcaggccattggcagcctggttgcggtgttcctgtcctctttcgccacaatgtgcatcttcaccagcggcacgctctatgctatcggtggtgtctgcatcaagccggtgctcgtgcttgcgctatggatcctctactttctgttccccttgatctcgctcccgctcctccacccgatccagatcataatccgcgcggacgccgtgcgcatgcagctgctcgggttcataatctgcctgttcgtgtccggtgccgggttctacttcaagagccacaggtggagggctgcccacatcatcgtcatcgccctggtccagagcaccgccaatggcatactgtacgcgttcggccgcatcctgctcctcgatgcctcgccgccggggaaggagggtgcgttctcggtctggtacgcgtttgttcgtgtcaccggtgccatgatcggcttcgctgcctcctccgctggccctgggcgcgcgggagggtcctttgctgctgcgttcctcgggagcttcctgggcatcatcgtgctgatcttcggcaacgtcagcaacatcggggcgctgaaggcggccgggcacctcaaggggatggacgacgagaagaggatgggcggtctcgggatggagaagggcgagggcatgggtagcgccgtcgctgattctggcgagagcagggggagggtatgatgatgactattcgtgacagtgaattcctgggaggtgggggagaaaaggattgcgtcctgtggaggttgtgcttgtgagaaggatttgttctctcttttttttcttgtttctttggccgtgtttcagtgacactgttgatggatcccagtgctttgcccgtttgatgcatcatggtggtggtggtgatgatggatgacatagtggtagggggtgtgtgctagttgttaatgtgttatttattcttttgcttgcaagacaattgtaactgatgatcgttagatcatatggttcttccttcgttcttcacccgcccccaaagtctcgtgcagtaaagcttcattaatgattc

SEQ ID NO: 263092 - DNA, 669 bp, Zea mays
cctgcagtaccgtccgaattccgggtcaccaacgtccgacacggtcggtgctcggtgacgtgacgcgcgcgctacctagctgctcctgcctggatcgcagtagcccgtagcccgtagcacaacaacaacaaaaaaaatctccgcggcgcgtggggaggtggtctgttcaccttggggagcagcggcgggccgtcggccgagaaatgcccggtggcgccttcctcctcaacggcagcggcggcggcatggcggactacggcggcggcctcaccgtccccgtcgtcgtgacctgcctcatggcggcctccggcggcctcatcttcggctacgacattggcatctcaggaggtgtgtcggagatggaggatttcctgaacaagttcttccccgggttgctcaagaggacggcgcgcgccaacaaggacgtgtactgcatttacaacaaccaggcgctgacggccttcacgtcgtcgctgtacgcgttcggcatggtggggacgctgctggcgagccgcgtgacccggcggctggggcggcaggccgtcatgctgatcggcggcggcctgttcttggccggcgccctcgtcaacgccgccgcggccaacatcgccatgctcatcgtcgggaggatgctgctcggcctggggctcggcttctccggccaggcca

SEQ ID NO: 263093 - DNA, 443 bp, Zea mays
cgagtggtagctttctagctagctactactgtagtaggtaaagcctgcggcgctcgagcgagcaggaaggcaaaggcaagcatggccgggggtggcttcgccgtggctgatggcccgtccgtcgactacggcggccaggtgaccttctcggtcgtcgtgacctgcctcatggcggcctccggcggcctcatcttcggctacgacatcggcatctcggggggcgtgacggcgatggagtcgttcctgtcggccttcttcccgggggtgctgcgcaggatggccgcggcgcggcgggacgagtactgcgtctacgacagccacgtcctcacggcgttcacctcgttgctgtacctggccgggctggccgcctctctcgtcgccagccgcgtcaccagggcgatcggcaggcaggccgtcatgctcgcgggcggcgcgctcttttt

SEQ ID NO: 263094 - DNA, 1030 bp, Zea mays
cggacgcgtgggcggacgcgtgggtttcgctgcacttgggaccccaaaatcttctcaatggcctgacatggtgtatcttcctgattatgttgaataccaatatgttgctgcacctccgctacgtacgttgcttccgatggccagcgatgatgctttggatcttcgggcaagagtgcttacctatgatccgaaagcaagaatcagtgctcagcaggctctagaacacaggtacttttcatcgttacctgcaccaacaagaccatcgcagcttccaaggccacgtcggaaaggagatcaagggaataacaagattcctgatctcaacctgcaggatggccctatggtgctctccccgccaagaaagttacgtagggtgacagcgcatgaagggatggaaggtatgcacaggacagataaagtggacgaacatccttctgggatgaggcacaccgatgacatgcccagtcagagttctagaattccaatgtcagttgatgttggggctgtgtttggcacacgacctgcacctaggccaacattgaacagtgcggacaagtctcgtttaaaacggaaacttgatatggatccagagtttggatacgcggagtagaaggaacacatgtttacatgcaccattcttttcttattggggatgttgatttttaaaataagattctgacacaatcaactgagatgttaccgtcatcgcctcacgaagaggaaaactgaagagagattattctaatttatcccgagtcacatagggtattacagctaaccaattccgtaaggcaggctcttgaaaacagtagactcaatgggatattcatgagtggagagtgttatggggaattggaggatggaaaagcttgctccatgcgtgtttgtacgtgttttgccaagattgtgctgaagcatctgatctatctactgattctctattttccgtactgtcaattcccgttcttgtatggacagagctttgagcatgttttcagtcagacaccttaggcacagtgattcttattgt

SEQ ID NO: 263095 - DNA, 763 bp, Zea mays
cttaacatgtctgacctggcactaggtgtgaacagctactatgtactccagatcattgaacaggatgatgggtctgagtgctacgtatttcgtaagtggggacgggttgggagtgagaccattggagggcaaaagctggaggagatgtcaaaaactgaggcaatcaaggaattcaaaagattatttcttgagaagactggaaactcatgggaagcttgggaatgtaaaaccaattttcggaagcagcctgggagattttacccacttgatgttgattatggtgttaagaaagcaccaaaacggaaagatatcagtgaaatgaaaagttctcttgctcctcaattgctagaactcatgaagatgcttttcaatgtggagacatatagagctgctatgatggaatttgaaattaatatgtcagaaatgcctcttgggaagctaagcaaggaaaatattgagaaaggatttgaagcattaactgagatacagaatttattgaaggacaccgctgatcaagcactggctgttagagaaagcttaattgttgctgcgagcaatcgctttttcactcttatcccttctattcatcctcatattatacgggatgaggatgatttgatgatcaaagcgaaaatgcttgaagctctgcaggatattgaaattgcttcaaagatagttggcttcgatagcgacagtgatgaatctcttgatgataaatatatgaaacttcactgtgacatcaccccgctggctcacgatagtg

SEQ ID NO: 263096 - DNA, 2400 bp, Zea mays
cggttcgcgtgtttctagatcgcgagcggctgccctttttttttttttttttcaaacataaacacatatttcatttattcatagagggtcgccaagcttacagcactcaacaatctgcctgtaaaaacagggatctggcaaaaaaaaacaaccatacaaggctgtcaaggcaaggcttctagtaagcgcctcgcaatggccacgatcaccatgaacaccaggcatcccaaagagaccgtaaaaaagatgcaaccctacatgaccagtacacaccatggagaacagcacacacacacaacacatcaagactctaaacatgacaaccaaacacaccgcacaagtccacagacgctccagcaccagcagcatctggcagttgagttagaactgtgatagtccagagctgtcaatggatcaccaacgcctgcaacagtaaaacgaaagaggacctggacactatggcaacctaaaaagaacttatgactgtaagggcaaggaccagtgtctggatctaggggcaggatgccagtgatggcagccgaggctcaaaaaacagataaaccccctgagaggtgatctgtgaaaaacgagcactccgctagaaagcgccccctaaaacaactggtccttgaacaatgtggaagcccaccataatgaccggcatgcgagccaaaaacctgaagaccgtctggttgtgctactgctaaggtcgtatatctgcatctggaagtggctcccagtagacatgagcccttccagcaatggaccatcttgtctgcctatgcaaggatgtcacaccaccagagcttcttctccagcgatgcaatgttgtggttgccaatcatgttgcagaactgaagattgaggccctctagagactggccaaggttgcccaagaacggcacactcttctgagtaaccttagagcaaccagacagtgagagaacacgaagcttgaggtgccttgcagatgccagcatggcaacaccatagtcactaaccatgcagtttgaaagatcaagctcggcaagctcggtgcagctctcagacatggtgaagaggctagcatctgttatcttgctgcaaccctcaaggctgactttcttcagagattttccatgtcgcttcaccagagaggagacagccacatctgtgatgttcttgcaaccactcaagtcaaccttgatcagaccagattcagaagactggatcaatggaagaagcccattatcagtgacctcaccaagaccactcaagtcaacctgctccaactgagggcaaatcatccctaccacggccaagcttgcatcggtgaaacctgggcagtccttgattgtaaggaaacgaagtgaacggcaaaaaggaagttgtggcacagagcagatatccttgatccccatgcatttcaccaacgatagagccctgaacttctctctgcagttgaggaggaaagcaagaataccgacaagagaaacccggttgcattcctcgagatgcaagttctcaaacacctttgctgattctgtgaacgccttgaggccagcatctgacacatatccgcacttcctgaggtacagctgcttcaagttcgggcagaacttggcaatagaagcgagcgcaagatcggtgactccagggcaagaggtaacactcatgcacctgagattctgcaggccagcagcattagccatcacccagaaacccctctcaccaacagcagcgagacgagtaagtgtaaggtcagtgatggccttcccgtagtatccaatcacagcaagcgaagcatcagttatgttcaatccctggagccggatctttgtaagagcagcggtagcagagcacaccaggctggaaatgccttggtcaccaacaagagggcagttcttgatgttcactagcttgcagcttcacgcagctgcggccaatcgccctcaggccctcattggcaacaccggtgcatgcctcaatggtcagagacaccaagttggggcacccctgcgcaacagcgacgaggcccttgtctgtgatgaggggacatcgacagatatccagacgctcgagcgagggacacccggcagcaatctccgcgagcccagcatcggtgataagaggcacatcccagagcgcgagcgagctgaggttggggctgccgcgtgcaaccgccgacagtccttggtccgtgacgccacgggtcgggtggctgccgcggacggcgagcttctccagcccgccacgggatccggcgacgacgcaggatctcgaagaggcactcgtctgggagcgcgtcgagcgacggcagcggcagctgcctctgcttcttggccgccctcacgaactcggccgccgccgcggcgacagcgaacccggtcaccagcgtgcgcttccgctgctgcaaggcaa

SEQ ID NO: 263097 - DNA, 659 bp, Zea mays
ttgatcgcgaacggccgcccttttttttttttggtttttttttttttttttggaaatttcaacataaacacatatttcatttattcaaagagggtcgccaagcttacagcactcaacaatctgcttgtaaaaatagggatctggcaaaaaaaaccataaaaggttgtcaaggcaaggcttctagtatgcgcctagcattggccaagatcaccatgaacaccaagcatcccagagagactgtaaaaaagatgcaaccctacatgacccttacacaccatggagaacatgaacagcacacaacacatcaagactaaaaacaaactcaaaactcgacaaccaaacacactgcacaagtccacagacgctccagcatcagcagccctggaaaagatgacaccagcatctggttcttgagttagaattgtgatagtccagagctgccaatggatcacggatgcctgcaacttcataaccaggaagcagtaaaacgaaaaaggacttggacactatggcaacctaaaaaaccttatatgactataaggcaaggaccagtgtctggatcgaggggcaggatgccagtcatgccagccaaggctcaaaccacacataaacctccccagaggtgatctgtgaaaaacgagcacttggctagaaagcac

SEQ ID NO: 263098 - DNA, 1625 bp, Zea mays
cccagcccagctgacaacaccggcctccgagacgcacgcgcgggcggacgcgtgggctccagaacgttcggcggcggcgaggcgacacgcccaccaccagtcagccgccccgccacagccatgcgcctccccgccggcgcacgcctcgcgctcctgctcgcccgccgctccctctcctcctccccccgcatcccgcgggcgcacacagggatatggagcgaggcgccctcccggagctctcccttctctccgccgagcagcgcccgcaggtccttccacgggaccaggccggtggcggcaagggactactacgatgtgctcggcgtcagcaagagcgccagccaggcggagataaaaaaggcctattatgggcttgcaaagaagctccatccagacacaaataaaggtgatgcggatgcagaacgcaagtttcaagaggttcaacgagcttatgagactttaaaggatgaacaaaaaagatcattatatgatcaggttggccctgatcagtatgagaaaactgcttctggcggaggcggaactggcttcgagggtggttttggaaatccatttgaggatatttttggtggtggcggtggcggtggtggaatgaatgatttctttaggaacattttcggggatagggactttggaggacgagatgttaaggttgcactcgaactatcatttgtggaagcagttcaagggtgcagcaaaacggtcaccttccaaacgtctgtaacatgtgaaatctgtggtggagccggtgtgcctcctggaaccacacctgaaacatgtctatcttgcaggggttcaggatttatattcatgcaaaccgggccattcaggatgcaatcaacctgcacaaaatgtggtggttctgggaaaactgtgaaggaattctgcaaggcatgcagaggaaacaaagttgtgcctggaaggaaatcagtccgccttgacatactgcctggtttggataatgaggataccataaaggtggttcgatcaggtggagaagacccagatggccgtccaggtgatctttatgtgaccctcgaggttcgtgaggatcctgttttccgaagagagaaaggtgatattcatgttgatgctgtcctgaatgtgactcaggcaattttgggagggacagttcaagtcccaactctcagtggagacgttgttctaaaggtcaagcccggtactcaacctggtcagaaggtagttctgagaggaaaagggatcaagacaagaaactcaccgtaccacggagatcaatatgtccatttcaatgtcaacatccccgaaaatttgacgtctagacagcgggagctgatcgaggaattcgcgaaggaggagcaaggcgaagacgagaaggacgccaaggcagcagctggagcatcggggggatagccggttttaggagccacagtagtgccttttagctggtatttataccgtgaccatagacctgtctcaaattcgcagcggaaaaaatatatagataggtctttgtttcggattttgtagctggaataaatgaataatacgtctagaactgattttctgtcttaaaaaaaaaaaataaaaaaaaaaaaaaaaaaaaaaaaaaaaaaaaaaaaagaaaa

SEQ ID NO: 263099 - DNA, 930 bp, Zea mays
gccgtaccggtaccggaattcccggactcgacccacgcgtgccgccatgctggacatgcttaagcagaccggcaagccagaaatggttgtaggttggtatcactcacatcctggcttcggatgctggctatcaggcgtcgatatcaatactcagcagagttttgaagctttgaaccccagagccgttgctgttgtgatagaccccatccagagtgtgaaggggaaggtggttattgatgcattccgcctcattaatcctcagaccatgatgcttggccaggagccacgtcagacaacatcaaatgttgggcacctaaataagccatctattcaggctcttatccatgggctgaatagacactactactcaattgcaatcaattaccggaaaaatgagcttgaggagaaaatgctgttgaacttgcacaaaaagaaatggaccgatgggctaattttgaagaggtttgacactcactcgaaaaccaacgagcagactgtccaggaaatgctaaacctagccatcaagtacaacaaggcagtgcaggaggaggacgaactgcctcctgagaaacttgcgatagcaaatgtgggtcggcaagatgcaaaaaagcatttggaagagcatgtgtcgaatttgatgtcatcaaacatagttcagaccctaggaaccatgctcgacacggttgtcttttagtctactaataatattgttgtcccaaactgaaacatagccacactatcgaagcacacgtgcaatgagcttgacgccggatacattttggttctaaggtttgtttatgaatggatttgtctacatttcattgttgttaaacttcctaccttttctatcaaagcttaagtgcgttctagttatgtttaagccaaggtggctccagatgtcagttgggatgtcattgccctgggagaact

SEQ ID NO: 263100 - DNA, 593 bp, Zea mays
ccctcgcgcccactagtcgcaactcgcaagcaaatcgaacgaacccaaccgaagcgagagctgagcaaggcagaggcggcgtgaccggcgatggagcggctgcagcggatctttggcgcctccggcatggggcagccgccgacggactcgccgctgctcgattcctccgagcaggtctacatctcctccctagcgcttctcaagatgctcaagcacgggagggctggggtgcccatggaggtcatgggcctcatgctcggcgagttcgtcgacgactacaccgtcagggtcgtcgacgtcttcgccatgccgcagagcgggactggtgtcagcgtcgaggccgtcgaccacgtcttccagacaaacatgcttgacatgcttaagcagaccggcaggccagaaatggttgtaggttggtatcactcacatcctggcttcggatgctggctatcaggcgtcgatatcaatactcagcagagttttgaagctttgaaccccagggccggttgctggtgtgatagaccccatccagagtgtgaaggggaaggtgggtattgatgctttccgcctaattaatcctcagaccatgatgc

SEQ ID NO: 263101 - DNA, 402 bp, Zea mays
cccacgcgtccgcctaaataagccatcgattcaggctcttatccatgggctgaacagacgctactactcgattgcaatcaattaccgaaaaaatgaacttgaggagaaaatgttgctgaacttgcacaaaaagaaatggacagatgggctaattttgaagaggtttgacactcattcaaaaaccaacgagcagactgtccaggaaatgctaaacctagccatcaagtacaacaaggcggtgcaggaggaggacgaactgccacctgagaaacttgcgatagcaaatgtaggtcggcaagatgcaaaaaagcatttggaagagcatgtgtccaatttgatgtcatcaaacatagttcagaccctaggaaccatgctcgacacggttgtattttaagctctact

SEQ ID NO: 263102 - DNA, 383 bp, Zea mays
caggatgactccgtccgccgccgccgcaacaagccgagcgccaagttcctcaagctgctccggaagcgggcccgcgactacaactccgacgacgaggatgaagctggtgacgaccggcagcaggagcacctgccgaatcctcaacgccgcgttgacgaggacgacgacgaggccctctctcactccgagccggaggagggcgaggacgaggacgaagaggagggggcctccagctcggccgtcacgaggttcgagcaaggctgcagggcgttccgcgtcgcctttctcaagatcatggccaagaaactccccgatgatcccctgggtccaatcctgtcagcgcacaagacattggtagccgccaagttagccgaggaggtgga

SEQ ID NO: 263103 - DNA, 576 bp, Zea mays
gtcaccgcgatcccgtgcttccttctagcacctgcggatctactctccgcacctgcggatctaccccccggcgaaacaagcgccccgacgcctcagggaatgcggagcgatgaggcggcgctcaggcactgacgtcgccggtcagcgcgagctgcgcggcgaccgaacctgccatcgcaagcacgtcgaggacgggtagactcgtccatccttccttcctcttgttagtggtcgtagggtagtttgcactttgcagatagctagctagctagtagttaggggatcaggcatgggtgagggcgaggcggaggtgaagggcggtgtgctgcatgggccgctacaagctcggccgcgtgctgggtcacggcgacttcgggcgcgtcgacgggcgcgggacctgcgcaccgggcgggccgtggcggtgaaggtgctcgacaaggacaagatgctgcgcacgggcatgatggagcagatcaagcgcgagatcgccgtcatgaagcgcatgtcgcaccccagcatcgtgtagctccacgaggtgatggccacgcgctccaagatctacctcgcgctggagct

SEQ ID NO: 263104 - DNA, 1032 bp, Zea mays
ctccggactcgggagtcggcactcgggtctcgacgtctcgtctcgtctcgtctcgcctgcccgcagccccttggcttcgttccatccggcttctcggcggcggcggagaggagggggatggcgcaccggctgctgcgggacgcgcaggcggacgggtgggagcggtcggacttccccatcatctgcgagtcatgcctcggcgacaacccctacgtccggatgttaagagctgaatatgacaaagaatgcaaaatttgtgcacgtccttttactgtattccggtggcgtcctgggcgagatgcaaggtacaagaagactgagatctgccagacatgttgcaagctaaagaatgtctgccaggtctgcctgctggatcttgaatatggtctgcctgttcaggtccgagatacagcactctctatcaattccaatgatgcaattccaaggagtgatgtcaatcgcgaatattttgcagaagagcatgataggagggccagagctggcatagactatgattcatcctatgggaaggctcgcccaaatgataccattctgaagcttcaaaggacagcaccatattacaagaggaacagagctcatgtttgcagtttctttgtgcgaggtgaatgtacaagaggagctgagtgcccttatcgtcatgagatgcctgaaactggggagttatctcagcagaacattaaagatcgctactatggagttaatgatccagttgcactgaaacttttgagcaaggcaggtgagatgccatccctgacaccaccagatgatgagactataaggaccctctacattggcggactcgatagcagaataaccgagcaggatttgagggatcagttttatgcccatggtgagatcgagtccataaggatggtacttcaacgtgcaatcgcatttgtgacgtatactacaagagaaggcgcagagaaggctgcagaagagcttgctaataagctagtcatcaagggcgtgcgcctgaagctgatgtggggcaagcctcaaggcccaaag

SEQ ID NO: 263105 - DNA, 1762 bp, Zea mays
acggtttttagtggaggttccgccacatttatcgagggggggcctttagacaccttttggggggtggatggagtgcctttgtcaacaagaagaagcctgtctcaggggacgccgtactatttttgaggggtgataatggggagctaagacttggagtgcgccgtgcagctcagcttaaaaatggatctgcttttccagctctttacaaccagtgctcaaatcttggttcactacctaatgttgcacatgctgtggccaccaaaagtgtgttccacatctactacaaccccagattaagccaatctgaattcattataccattttcgaagtttatcaagagcttcagtcaaccattttctgctggttcgaggttcaaagtgaaatatgagagtgatgatgcttctgaaagaagatgcacagggatcatagcaggaattggtgatgctgaccccatgtggcgtggttcgaaatggaaatgtttgatggttcgatgggatgacgatgtagattttcgtcaaccaaacaggatttctccttgggagattgagctgactagttcagtttcaggatctcacatgtctgcaccaaatgcaaagagactgaaaccatgtcttccccatgttaatccagactacctagttccaaatggaagcggtcgtcctgattttgcggaatctgcccaattccacaaggtcttgcaaggtcaagaattactgggttatagaactcatgacaatgctgctgctgcaacttctcagccatgcgaagctacgaacatgcagtacattgatgaacgaagttgctccaacgatgcgagtaacattatcccgggggttccaagaattggtgtcagaacaccactcggaagccctaggttttcctaccgttgctcaggctttggggagtctccaagattccaaaaggtcttgcaaggtcaagaagtatttcatccctacagaggaactctggtcgatgcaagcttgagtaatagtggcttccatcagcaagatggttctcatgtgcctactcaggccagcaagtggcacgcacagctacatggatgtgcttttcgtggccaacaagcaccagctgttccatctcaatcctcatccccaccatctgtcctgatgtttcaacgaggtgatccaaagatgtccccatttgaatttgggcatttccacgtgaataagaaagaggatagacgcgcaatgtttgtccatgctggaggcatcggaggaactgagcaaacgacgatgctccaggctcatcatgtttctggaggaacgggaaacagagatgtgaccgttgagaaatctcatcccgctgttgccgctgcttcagacaacagggaagttagcaaaaacagttgcaaaatatttggcatatctttgaccgagaaggttccagcaatgaaagaaaagggctgtggtgacatcaacaccaactatccatcccccttcctgtctttgaagcaacaagtgccgaaatcgctgggcaacagctgtgccaccgttcatgagcagaggcctgttgttgctagggtgattgacgtttcaacagtggatatgatgatctgatgtattggaaaactgtcctggaggctgtgttgcgtagtgtggacagtgtcggtttgatggttcggtatcgtgaagacgggatttgattgaggatctggccagatttgtatcctagttgtagctgttagagcactttgtatgacaaccgtgagtgctccgtgttatcagcactagttgctgctcac

SEQ ID NO: 263106 - DNA, 633 bp, Zea mays
cggacgcgtgggtgaggctgccgccagccactggccagcgtcgttcgctttgtagcagtccagctctgcgcccggcgccgcagccccgcatcgcgcacaggcacaacttctacggtcctgccgctgatcgccgcacgtggccgcgccgccgcctccctcacccgagctcgaccgcgcttctccagctcgccgcctcgacggtcgctgcctcgacacctcccccgcgtgggcatcagccgggagcagagagccctggtccctggaggcgcgtcgcgttacggcgggggcgcggcctccccagccccccttggtgatcggtcctcccccggcagactcgcctcctcggtcttgcgctcctgcgcggctgcgcgcccagcgccgtgcccggtggcggcggcgaccggcgacggtcagcccccgacagtcaggacttccgactccggacctccccctcagccccctctgtccgttccagtcccagctcgagcttgaaggttgaaacaacaagcaagatattttgaaatagcccccgccacgaaattcttcagccatcgtggaggggttcagctcaggggaggactcgactcatgaaacaggagcacgagcggagcataaggcagtcatggcggatga

SEQ ID NO: 263107 - DNA, 1046 bp, Zea mays
atcggccgtccaatctagtggtcgcgttcccccacgacacctataagcaccaaccctagcccaaaaccccgcttccacttcacagcctctccgcctccactcctcgcgccgctgccgcatctcctctacaggtaagaaggagagaaagagggcgaaatggtgaagcacaacaacgtcatccccaacgggcacttcaagaagcactggcagaactatgtcaagacatggttcaaccagcccgcccgcaagcagaggcgccgcatcgctcgtcaaaagaaggctgtgaagatattcccacgcccaactgctggccctcttcgccccattgttcaatgccagactctcaagtacaacatgaagtcaagggctgggagaggctttacccttgaggagctgaaggctgctggcattccaaagaagcttgctccaaccattggcatttctgttgatcaccgccgcaagaacaaatcccttgagggactgcaggccaatgtccagaggcttaagacatacaaggccaagctggttatcttcccaaggcgtgctcgcaaggtcaaggctggtgactctactccagaggagcttgccaccgctacccaggtccagggtgactacatgccatttactcgtggtgagaaacgttcagttgaggttgtgaaggtcacagatgagatgaagtcatttgctgcctatggcaagctccgccttgagcggatgaacaagaaacaccttggtgcccgccagaagaaggcagctgaggcagagaaggaagataagaagtgaagcggctgaagatagtaccctgttttgttctattcagtcattagcgagatgctacttccatcaagtgcttgttccaagttttttttgggtgctggaaatagagcccagtcaaatattttggtgtcctactgtttgataccttgtatttgtttgcgaactcagctatctaatgggttaatgaattcttggcgacgcacgattctgccttaatgttttgaatttatatagccaaaaaaaaaaaaaaaaaaaaaaagggcggccgc

SEQ ID NO: 263108 - DNA, 661 bp, Zea mays
cggacgcgtgggcggacgcgtgggctgacgcgtgggggctgggagaggctttaccgtggaggagttgaaggctgcgggcattccaaaaaggcttgctccaaccattggcatttctgtggatcaccgccgcaagaacaaatcccttgaggggctgcaggccaatgtccagaggcttaagacatacaaggccaagctggttatcttcccaaggcgtgctcgcaaggccaaggccggcgactctactccggaggagcttgccacggccacccaggtccagggtgactacatgcctattactcgtggtgagaagcgctcagtcgaggttgtgaaggttactgatgagatgaagtcgtttgcggcctacggcaagctccgtcttgagcggatgaacaagaaacaccttggtgcccgccagaagaaggcggctgaggcggagaaggatgtaaagaagtgaagcaggtataccctgtttttgttttctatctttattccgatgcagccactagtggaattttactgtcaagtgtgtgctctaagttctgttttggtgctgaaaatagagaccagagttttggtgcccaactgtttgatacctggtacttgtggttgcgaactcatcagctatacccttatctaaaaaaaaaaaaaaaagggcggccgc

SEQ ID NO: 263109 - DNA, 272 bp, Zea mays
tcgtccacgcgtccgcccacgcgtccgcccacgcgtccgatccgactccactcctcgcgccgctgccgcatctcctctacaggtaagaaggagagaaagagggcgaaatggtgaagcacaacaacgtcatccccaacgggcacttcaagaagcactggcagaactatgtcaagacatggttcaaccagcccgcccgcaagcagaggcgccgcatcgcacgtcaaaagaaggctgtgaagatatttccacgaccaactgctggcccttttcgt

SEQ ID NO: 263110 - DNA, 516 bp, Zea mays
cagattcttctcaacaggcaacagcaccagcgctcgaacgccgcgtccaggcaacccatccttccgacccccgtagatcccgccgcctcccgcgtctagccgtcgacgagcaccgcagcctgacacagccgcgggcgaaccatcgcgtgcggcctcgcccgggatggcgaccatggagagcctgatcgggctggtgaaccgtatccagcgcgcgtgcaccgtcctcggcgaccacggcggcggcggcggcgagggctccctctgggaggcactcccctccgtcgctgtcgttggcgggcagagttccgggaagtcgtcggtgctcgagagcatagtggggagggacttcctgccccgtggatctggcattgtcacgaggcggcctttagtgctgcagctccacaagacagatggtgggcacgagtatgctgagttcctccacgccccgcggtagcggttcaccgactctgctgctgtgaggaatggagatgctgatgaaacagatcgcataactgg

SEQ ID NO: 263111 - DNA, 514 bp, Zea mays
cccacgcgtccgattggacaccgaatgagcagcgagcaccagtttaggcaagggagcaggtcgccagttgtcggtcgcggcctcctgcgctcagcgcttcgctcgcggtgccggtgcgtgaggtgaggttgatgggcgcggagggatgagcgagagcgccttgaccataaggcggctgagcgggccgtcgaacggcggcggcggcaatgcgggacctagctcttgcgcggtcggcacctggggaggaggaggcggcggcggcggcggcaatgcggcgagcatccggggcgtcaacgtggggctcatggacgagaaggtgctgcggctcgtgttcctggcgctcaactgggacccacagtcgctgtgcgcggtggcgcgggtgagccggcgcctgcgcgccgtggcggagcgggtgctgtggcggaagctctgcgtctcgcgggcgccgcggatggtggcggcgctgacgggaggccccgcggcctcggcgccggcggccgggcgcgtcggcggc

SEQ ID NO: 263112 - DNA, 1083 bp, Zea mays
ttgaaaaactgcaaggcttaaccatggggatgttgaaactctttttcatgagtttgggcatgcccttcactctctgttgtcaagaacggaatatcagcatttctctggtactagggttgctcttgatgtggctgaaaccccctcaaacctatttgaatattatgcctgggactatcgtgtcttgaagacatttgctctagatgaaacaactggagatgcaataccagaaaagctggtaaaggcactaaatgcttctcggaacatgtttcctgctactgagctccagaggcagatcttctactctataatggacctaaccttgtttggcgagcaatcatccaagcctatggacacgatttccactgttgccgatttgagaaggaagcatacaagtgggaaatacgcagaaggcacacactggcatacacgatttactcatctcgtaacctacggtgctggctactatacctatctatatgctagatgttttgccacaactatatggcaagaagtatgccaagaagacccgttgtcccgcagtgcaggcagtgccatcagggacaaattcttgcggttcggcgggtcaaaggacccatcatccctgctgaaggattttgcaggtgatgccgtcattagaaactccgggagtggaataatcccgaacgctagttccttgtgcaaagaaattggattgtgaaatagcactgtgggggcggaggctggcatctttctgcttgagcttggctgaagggccaagaactaaacctcgagggcttgaggtagtttgagggagattggagatgatttaatcctctcctattcaattcacctctaaccggacaagtccgaacaagtcatgaaggggcagagtcgctggagttccggtgcttgacctctcggcatacattaatggtgtggtgctagcggaagatggttctcctagacatactttcttcaaagtttcacctgcggatggttttgcaatctgtcaaattttactagaggacggttgacggtaccatattattactcccattgcctgggatttttccttcaaaatgttatgatgaagtctgtcagccc

SEQ ID NO: 263113 - DNA, 442 bp, Zea mays
ccggccttcctgcgatcctacccgtgcccgacgcccggaaacgcgcgcgcgcgcgagcgagggacggggtggggaaacggggggaggagacgacgcgctcgcctattggccgccggctccgctcctttgcgcccagtgcgacggccacggcctgagcggcgctgccagcaaggcggctagtatgagcagcatggagtcgcggccgggccgaacgaacctggtggagcccatagggcacggcgccgcgctgccgtccggcggccaggcagtgcagccgtggtggacgagctccggggctgtgctcggtgcagtctcgccagccgtcgtggcggtggcgcccgggagcgggacggggattagcctgtcgagcagcccggcaggtggtagtggcggtggcggcgcggctaaaggagccgcgagtgacgagagcaacgaggattca

SEQ ID NO: 263114 - DNA, 571 bp, Zea mays
cttattgcggttttgaatggtagctagagctgaaactcgagtctcgcagcaaaaaccttgccgttgttgaattggccctgatgtttcatgtccagtgtttgtgttcttccgctccatgattcgcgactagcgagcatgtgttctgccatggattcagagcgtcgtggagttttttcgtgtcgccgatcaagtcaagatcgctaccctgttttgcaccgatcatatcctgctttcattgtcgatcctcgtttgtgacgtactgccactgttcatctcggtttgacttttccatcgctcgtcttcctgatgccactgaaacagcgacggccacggcctgagcggcgctgccagcaaggcggctagtatgagcagcatggagtcgcggccgggccgaacgaacctggtggagcccatagggcacggcgccgcgctgccgtccggcggccaggcagtgcagccgtggtggacgagctccggggctgtgctcggtgcagtctcgccagccgtcgtggcggtggcgcccgggagcgggacggtgattagcctgtcgagcagcccggcaggtggtagt

SEQ ID NO: 263115 - DNA, 1414 bp, Zea mays
agggattgggaagggcaacattagcctatattacagttgcctcttttctccttggagcgttatgttctggaatagctggttttgttggaatgtgggtgtccgtacgtgcaaatgtacgagtttcaagtgctgctcgtcgctctgcaagggaatcattgcagattgccgtccgtgctggtggtttctcagccattgtggttgtttgcatggctgtatttggcgtggcccgtcgcgactcgacattttatgtttggcttggagtagattcacctgggtcaatgaaggttaccgacttgcctcttctccttgatgggacatggttttggtgcctaaattgttgccctttttgctcagttgggtggtggaatatacaccaaagctgctgatgttggagctgatctggtcggaaaagttgagcagggaatacccgaagatgatcctcgtaacccagctgtcattgctgacttggttggtgacaatgttggagattgtgctgcccgaggcgctgatctttgtgagagcatagcagcagaaattatcagtgcaatgatacttggaggaacaatggcacagcgctgtaaaattgaggatccgtctggctttattttgtttcctcttgttgtgcattcatttgatttggtggtgtcatcagtcggaattctctcaatcagaggaacacgtgactctgggctcatttcccctatcgaagatcccatggcaattatgcaaaaaggctactctgttactattatgcttgctgttcttacgtttggggcgtctactcgttggcttctgtacacggaacaagcaccttctgcatggctgaattttgcattgtgtggcttggtggggatcgtcacagcatatgcttttgtttggatttcgaagtattacacggattataaacacgagccagtccggcttttagctctttcgagttccacaggacatggaactaatattattgctggagtaagcttgggaatggaatcaacagcactaccagttctagtgataagtgttgccattatatcagcatattggctggggcagacctctggcttggtggacgagtctggcaacccaactggtggtctttttgggacagctgtagcaacaatggggatgcttagcactgcagggtatgttctcaccatggacatgtttggtcctatagctgacaacgctggtggtattgttgagatgagccagcagcctgaaagtgtgagggaaatcacagatgttctagatgctgtgggcaacacaactaaagctactacgaaaggatttgccatagggtcagcagctctgggcttcctctcctcctgtttagtgcatatatggatgaagtagcttcttctgctcaattgccattcaaggaggttgatatagcagtcccagagatttttgatgg

SEQ ID NO: 263116 - DNA, 529 bp, Zea mays
tccgaacctagtgaagctcttgggctactgctgggaggacagagaacttcgtctcgtggatgaattcatggccaaagggagcttggaaaaccatctattcaggagaggatgcgccccgttgtcttgggaactgaggctgaagatagccatcggcgcagctcgaggactcgcattcttgcatgcatcagaaaagcaagtgatctaccgtgacttcaaggcgtccaacatacttttagatgcgaactataacgctaagctctctgattttggccttgctaaacttgggccgactggtagcaagtcacatatcacaaccagggtgatgggaacgtatggctatgcagctccagagtacgtagcaaccggccatttgtacgtgaagagcgacgtgtacggcttcgcgcgtggtgatgctggagatgctgtccgggcagcgcgcgctggacccgaaccggccgaacgggcaactgagcctggccgactgggcgaaccgttcctggccgaccgccggaggtggcccggctcatgg

SEQ ID NO: 263117 - DNA, 467 bp, Zea mays
tccggtttggaattcccggctggacgcacgcgtccgctggtcctctccctcgacgccgccggcaggagggcggaccggcggtccacggccgcggggcccgggctgttgccgcgcgagtccggcggcgagtgggagggccgcaagtgcccgccgtcctcgccgtccgtggcgcgcctgccgccgctgccgccgctggcgaggtggaagcaggggcggggctcctcgcgccggccgtcgtcgcgccgcctggccagcagctcgtcgtccgacgacgagtacgacgaggactcgaggaacctcttctcgtcgcggagcttgtcgtccgactcgtccgacttctacagctgcccgcgccggaacgccagcgccagcagggggcgcgcgtccgtctcgggcccgtgccgcgcgctggcgctggcgccggcgccggcgcccccgcgccgcggcgcgtctcaaagctgccggta

SEQ ID NO: 263118 - DNA, 557 bp, Zea mays
cccggtcgacccactcgtaccgaatcgccaagtcgaagaaccactctttttgtttgtcagttagttaaccaatttcttaacaagctggcttggtagagttctataccgcagaagccctccttgcgctgcaagaggcagcataattccacttgatagaactgtttgaaatggcgaatctgtgtgccatccatgccaagcgtgtcacaatcatgcaaaaggacatacaacgggcaaggcgtatcggaggaaggcgttgggcatgatatataatatccattctgattgcatcattcttgtgaatttgtttgtaggagctagacattagtgttgttgaatgctgcatggttcctaatccttttcgcagtctaacatctgtggagttagtatgttacatggcaacagctgaacatctgtggactataactatatggcaacagccgaagattgtgtctgtgggataactggttgttttggttgctcttcagtagtttgtttgcttcagtatggactatggagtaaactgcatgctgaaacccgaaccactgctgaaacggcag

SEQ ID NO: 263119 - DNA, 2221 bp, Zea mays
ttcatgcgtccgcccacgcgtccgcccacgcgtgcggccacgcgtgcgcccacgcgtccgcccacgcgtccgcccacgcgtccggcaacgtccaaaatccagaccgctggtaggagtatctcgtagacattgaacaacggctgcatggcgagcgcctgcgccacctccatccccctcgtctcggcgccctctgcatgcccgtccaagaagaccaccgtcgccaggttccggcgccgcacggcgacgtgcagggccagcagcggcggtggcggtggccggggcggcgaaaatgatggcctcctttggctgccccggcgggacgtgatgctcaacggcctgtccagtgtcgccgccgggctcgcctggtacccgggcgtcgcgtccggcgcggatgcggtgtgcaccagggccgacaaggtgaacgagaagaccgtgcagtgcacggacccggccgggcagcttccgtgccctctggtgtcgccgacggaccccgtggacttcaagccggaaagcaaggtgacgcgcatccggcagccggtgcatctcctgagccgggagtaccaggagaagtacaaggaggccgtcgcgaagatgaaggcgctaccggaagagaacccgctgagcttcgcggcccaggcggccatccaccaggcttactgcgacgcctactacaagtacgacccgacggccaaggacgcgccgttcgacgtgcacttctcgtggatcttcgcgccgtggcaccgcatgtacatctacttctacgagcgcgccctcgggcagctcatcggcgacgacaccttcgcgctgccgttctggaactgggacacgccggccggcatggtggtgccgccactcttcaaggactccatgggcaacccgctgtacgaccccaacaggaacccgtcgaacgtcgacgcgctggtggacttagactacctcaacgacaggaatgcggagcccatccctttcaagggcccacgggacgaaaagtacaaggaacttgtgaacaagaacctgtgcaccgtatacacccagcaaatacgtagcggcaagggcgccgagtcgttcctgggcgagaagtactgcaccgacatcgggtcaagcacgagcagcatgggttcgctggagcggatggcgcacactgccgtgcacgtctgggtcggcaaggcgggcccgacgccttcctcggaggcgtgcagtgccgctaccggcggcttcccgaaccacaccaaaggcgggtacagctgcaacaacgacatggggttcctggggtcggcgggacacgacccgctcttctactcgcaccactccaacgtcgaccgcatgtggcacatctggtcgaccaggctcggcggcgggcagggcatcacggaggcggactggctcgacaccagcttcgtcttctacgacgacgtcaagagcccgcggaaggtgcgcatcaggttccgcgacgtcctggacacgcgcgacctcggctacacgtacgacgccgagtccgacaaggacctgccatggctgcgctgcaagatctcgtcgctggtgccccacggcaaggacagcccgccgaggtcatcgtcggcgaggaaggcggcggcgccggtgttcccgctcgccctgaccaagggccaggtggtggaggtgccggccgtgcctgtgccggccaaggacccggggaaggagcagctgctggtgatcgagggcatcgagtacgacccccaggcgaacaataagttcgacgtcgccatcaacctgcccgcggacaaagcgttgcaggtaggcccacagtacaaggagtacgccggaagcttcgccgtcgtgccgggctccggcgccgggaagacgcggaaagtgaagctctccctgtgcatcaccgaagtgctgttcgatatcgacgctgacggcgataaaaccgtcgacgtcgttatcgtgccgcgcacaaatgctaagatcacgctcaacgctcgccccaccatcaagaatcggaactaggagctagctgctactagtgctcatcaagcacactgtacgtacgtacgtatgtactcgatcgcgtggtcattcatcgaccatcatcgtttatatgctgtcacgcacagtgcgggacggccagtgttgcattattgtgtgttttatttcgcatggattaggatcgagccgcgccaatggtagattctacggaataaatataataacattgttatgattgatatcattatgtttt

SEQ ID NO: 263120 - DNA, 570 bp, Zea mays
atcgagtacgacccccagcgaacaataagttcgacgtcggccatcaacctgcccgcggacaaagcgttgcaggtaggcccacagtacaaggagtacgccggaagcttcgccgtcgtgccgggctccggcgccgggaagacgcggaaagtgaagctctccctgtgcatcaccgaagtgctgttcgatatcgacgctgacggcgataaaaccgtcgacgtcgttatcgtgccgcgcacaaatgctaagatcacgctcaacgctcgccccaccatcaagaatcggaactaggagctagttgctactagtgctcatcaagcacactgtacgtacgtacgtatgtactcgatcgcgtggtcattcatcgaccatcatcgtttatatgctgtcacgcacagcgcgggccggccggtagggtgtcggcaataataaacgcggccagtgttgcattattgtgtgttttatttcacaaggattaggagcgagccaatggtagattctaaggaataaataacattgttatgaatgatatggttatgttttagagaaaaaaaaaaataaaaaaagcgcggc

SEQ ID NO: 263121 - DNA, 482 bp, Zea mays
cccccaggcgaacaataagtttgaggtcgccatcaacctgccctcggacaaagcgttgcaggtaggcccacagtacaaggagtacgccggaagcttcgccgtcgtaccgggctccggcgccgggaagacgcggaaagttaagctctccctgtgcatcccccaagtgctgttcgataatgacgctgacggcgataaaaccgtagacgtcgttatcgtcccgcgcacaaatgctaagatcacgctcaacgctcgccccaccatcaagaatcggaactaggagctagttgctactagggctcatcaagcaccctgtacgtacgtacgtatgtactcgatcgcgtggtcattcatcgaccatcatcgtttatatgctgtcacgcacagcgcgggccggccggtagggtgtcggcaataatccacccggccagtgttgcctttttttataaaaaaaaaaaaaaaaaaaaaaaaaaaaaaagaacgaa

SEQ ID NO: 263122 - DNA, 645 bp, Zea mays
caggtctaggactcgcgggtcgacgcacgcctctgcacagacgttctgctacgcgtccgcggacgcgtgggcgggactgctcgcggcggctcctagctgccttggggctataaaagggacccctaggcgcatggaggaggagaccaagcattcttacaacattcctaagcaccaagacctcgattcacgcatttgtttctttgtgatagcatatagagctctagtggagttgtgaactctttgggttgtgttgcgagctcttgttgtgacttgtgtgcgtgttgttgctctgatttttgtgtcttgtgtgcgttgctcatccctcccttgctccgtgcttctttgtgaacttcaagtgtaagggcgagaggctccaagttgtggagattcctcgcgaacgggattaagaaaagcaagcaaaacaccgtggtattcaagtgggtctttggaccgcttgagaggggttgattgcaaccctcgtccgttgggacgccacaacgtggagtaggcaagtgttggacttggccgaaccacgggataaccaccgtgccatatctgtgattaatctccttgtggttattgtgttttgcaagaactcctctctagccacttggctttattgtgctaacacctaatcaagttttt

SEQ ID NO: 263123 - DNA, 1242 bp, Zea mays
  unsure (1)..(1242): unsure at all n locations
gaaaaatttaaattcgctagaagtatgttgtttaatgggagacgccctggcatcaatgatggcataggcttccaaaggggagacaatgtcaaacttaatgctgaaagggaaatgtgcccttgggccatttctaaagtattttggtgattgagtgccaacacaagtgcttaaatgtgaatctatgcccatgggtgaacaaagtgcaaatcaagagcaaaggtatgtttctaagtcttagtacattggttttgtgtactaatatacttgtctaagtcttagaaacagaaagaagaagaaaagaagaaagttggctgtgtacagccaacaggctggttcggtctggggcaccggactgtccggtggtgcaccggacagtgtccggtggtgcaccggacagtgtccggtgcgccaggctgcctcggccgaagaggccgctctcgggaattcgccgacggcgtacggctaaaattcaccggactgtccggtgtgcaccggactgtccggtgagccaacggtcggccagggccaacggtcggccgcgcgattctgcgcgggacacgtggccgggccaacggtcggaagggggcaccggactgtccggtgtgcaccggacagtgtccggtgcgccaacggctctcggactccaatggtcggcttcgccaaataaggaaggagatctgcaccggacagtgtccggtgcaccagtcgacagaaggcaagatctgccttccaggaatgttctcaacgactcctagctgccttggggctataaaagggacccctaggcgcatggaggaggagatcaagcattcttacaacattcctaagcaccaagacctcgattcagcgcatttgtttctttgtgatagcatatagagctctagtggagttgtgaactcattgggttgtgttgcgagctcttgttgtgacttgtgtgcgtgttgacactctaatttttgtgtcttgtgtgcgttgctaatccctcccttgctccgtgcttctttgtgaacttcaagtgtaagggcgagaggctccaagttgtggagatttctcgcgaacgggattaagaaaagcaagcaaaaccccgtggtattcaagtgggtctttggaccgcttgagaggggttgattgcaaccctcgtccgttgggacgccccaacgtggagtaggcaagggttggtccggcccnatcctcaaaatacacaaaaaaaaagaagtaataaaaaaaaaaaaggcaacccaa

SEQ ID NO: 263124 - DNA, 1285 bp, Zea mays
  unsure (1)..(1285): unsure at all n locations
agagaactgctccacctcaaatgattgcacccatgaatgtgcactcctttttctatcgaagagattactgaaagggaaatgtgcccttgggccatttctaagtattttgggattgagtgccaacacaagtgcttaaatgtgaatttatgctcatggatggacaaagtgcaaatcaagagtaaaggtatgtttctaagccttagtacattggttttgtgtactaatatacttgtctaagtgttagaaacagaaagaagaagaaaagaaaagagatgaaaaaaggcttggctgggtacagccaagactcagctcggtctggcacaccggactgtccggtggtgcaccggacagtgtccggtgcgccaggctgactcggcgcgaagtggccgctctcgggaattcgccgacggcgtacgactaaaattcaccggactgtccggtgtgcaccggactgtccggtgagccaacggtcgggtttgaaaagggaaatgtgcccttgggccatttctaagtattttggtgattgagtgccaacacaagtgcttaaatgtgaatctatgcccatggatgaacaaagtgcaaatcacaagtaaaggtatgtttctaagccttagtacattggttttgtgtactaatatatttgtctaagtgttagaaacagagagaagaagaagagaagaaagttggctgtgtacagccaacaggctgtttcgggctggggcaccggactgtccggtggtgcaccggacagtgtccggtggtgcaccggacagtgtccggtggaccaggctgcctcggccgaacaggccgctctcgggaattcgtcgacgacgtacggctaaaattcaccggactgtccggtgtgcaccggactgtccggtgagccaacggtcggccgggccgacggtcggccgcgcgatcggcgcgcgacacgtggccgagccaacggtccgaaggaggcaccggactgtccggtgtgcaccggactgtccggtgcgccagatctgcaacggtcggcttcggtcggatgcgctgtttaaggaaacgaatcgggcaccggacactgtccggtgtgcaccggactgtccggtgcgccacgagacagaaggcaaagatggccttccagatttgttcccaacggctcctagctgccttgnggctataaaagggacccctaggcgcatggaggagcacaccaagcattcctacaactcttctaagcaccaagacatcaatctcacgcattcgtttcattgtgatagcatatagagctcttgtggagttg

SEQ ID NO: 263125 - DNA, 1127 bp, Zea mays
agcactcttcggatctcacaagtccttgtgcaagtgatgcacatatttagggggaggtgtgttacaacttgacccttttgagactaaccgtgtgcttgagtttgcttgttttagcctcaaaggaggtttgaaagggaaaaggtggacttggaccatgcaagacttccactgcactccgatgagaggagtaacttcttccaagttcatctctcgaactcctattgcctttgtgctcctagttgaagattttggtgaggcaatggggttctggggccaagattgatcccgttttggtgcttgatgccaaagggggagaaaataaaggccaaagcgataaatggatcagctaccacttgagagattttgaaaatagtagaatagagtttttggtttgtcaaaactcttttgttgtctctcttgtcaaaagttggcctcttgtggggagaagtattgattatgggaaaaaggggagtttttggaatcttgaatcaattttctttggaaaacctctctttatgtctctacatgtgtgatttgacttagagatagagattttgagtttgatttgcaaaaacaaaccaaagtggtggcaaaggatgatccatatatgccaaaattgaatcaaaatcaatttgagttttatttgaagtgatattgcacttgttctagttgctttatgttgtgttggcataaatcaccaaaaagggggagattgaaagggaaatgtgcccttgggccatttctaagtattttggtgattgagtgccaacacaagtgcttaaatgtgaatttatgccatggatggacaaagtgcaaatcaagagtaaaggtatgtttctaagccttagtacattggttttgtgtactaacatacttgtctaagtgttagaaacaggagaaagaagaaaagaaaagaagtggagagtggctgtgtacagccaaaggctgcttcgggctggggcaccggactgtccggtgtgcaccggacagtgtccggtgcgccagaccagcgcggagcaaaccagccgctatcgggtttttctccggcgacttcggctaaaattcaccggactgtccggtgtgcaccggactgtacggtgagccaacggtcagccgagccaacggtc

SEQ ID NO: 263126 - DNA, 1353 bp, Zea mays
cccacgcgtccgcacagatgctgacattaggcttgctcgacgaatcagacgtgatacagttgaaagaggaagagatatcagctccgtgcttgaccaatatgggaggtttgtgaagccagcgttcgatgattttgttttgccttcaaagaagtatgctgacgtgatcattcctcgaggtggtgataaccgtgtagcagttgatctgattgttcaacacatccatacaaaacttggttagcatgacttgtgcataatctatctgaaagggaaatgtgcccttgggccatttctaagtattttggtgatttagtgtccaacaagtgcctaagtgtaaaaaggtgaacaaagttcaaatcaaggataaaggtatgtttctcagacttagtacattgttttatggactaatgcattgtgtctaagtgctggaaacaggaaaaatccaattgttaatgtcttggctcgagcagccaagactctgctgagtctgggtgcaccggactgtccggtagtgcaccggacagtgtccggtgcgccaggctagctctggcgaactggctgctctcgggacttcgacggcggcatacggctaaaattcaccggactgtccggtggtgcaccggactgtccggtgagccaacagtcggccgggtcaacggtcggccacggaatccgcgcgcgacgcgtggcaagtgccaacggtcggatggggcaccggactgtccggtgtgcaccggacagtgtccggtgcgccaacggctccaagactgcaatggtcggcttcgccaaataaggaaagagatccgcaccggacagtgtccggtggtgcaccggactgtctggtgcgccaagcgacagaaggcaagaattgccttcctggattgctctcaacggctcctagctaccttggagctataaaagggacccctaggcgcatgaaggacaaccccaagcaccctctaagcattcttgatcattcccactccgtctttgcgcactcaattggcattcttagtgatttgagcttcatgttagtggtgaaccttgtgttattcatttgagctcaagtcttggctgtgtgtgtgcgtattgctgtggacttgtgtgtgttgcttttcccactcttacatctgtgcttctttgtggtcatctcagtgtaagggcgagaggctccaagttgtggagattcctcgcaaacgggaaaaagtaaaggaaaaagaaccctgtggtattcaagttgatcattggatcacttgagaggagttgagtgcaactctcgtccgttgggacgccacaacgtggagtaggcaagttttgtacttggccgaaccacgggataaaacaataaggaatcgt

SEQ ID NO: 263127 - DNA, 660 bp, Zea mays
gcctcataacaaaaataaagggtcactgaataatagacttgaacaacacatataccttttacctgatcaactatccacgaaagaattatttttatataaccgaattttgtgttgtattttatactttgtagtaatgacagagggaaaacaatactaggattagagatcctaagctactaactgatcttataaaatcagtccatgtacatttgtctcagtgttgctgaattttgcttagcttggcatctggaaactggttcgtcccttcttatatgagtccagctattttcaactcaactctgaatgaagcttcagaggcaggaacacaagcacaaactattgtccagattgacgaggaaccaggttctgatgaagacgacgatcttccaccacttgaagcaaacaccaacaggaatagaccatatgaactaatttctcaacggaacaactaattgaattttttgtccagtgcaaggtattagttgtgtaacaaattgttaaattctcacatgtcagatagtggtgcatttcatggctgaaagggaaatgtgcccttgggccatttctaagtattttggtgattgagtgccaacacaagtgcttaaatgtgaatttatgctcatggatgaacaaagtgcaaatcaagagtaaaggtatgtt

SEQ ID NO: 263128 - DNA, 834 bp, Zea mays
gtaaatataaccccgaaaacaaagacggctgggggagtcttgtcagctctgtctgggtgcaccggactgtccggtggtgcaccggacagtgtccggtgtgccaggctggctcaggcgaacttgctgctttcgggaagtgattaatggcgtacggctaaaattcaccggactgtccggtgagccaatggtcggccgggccaacggtcggccgcgcgatccgcgcgagacacatggtcgagccaacggtcgggagggggaaccggacagtgtccggtgcgccaacggctcccaggcgccaacggtcggcttcgccaaagaaggaaagaaatccgcaccggacagtgtccggtggtgcaccggactgtccggtgcgcccaggcgacagaaggcaagaattgccttcctggattgctctccagcggctcctagctgccttggggctatcaaagggacccctaggcgcatggaggagacacaccaagcattctctgatcatctcttagcaccaaggcttctctcctagcgcatttgatccgttgtgatagcaatttgagctcctcttgagttgagaactccgtgtgtgatcttagagctcaagttgcgacttgtgtgcgtgtttgtgctcgttgctcgtgctttgaggcttgtgtgtgttgcttttcccactcttacatctgtgcttctttgtgatcatctcagtgtaagggcgagaggctccaagttgtggagattcctcgcaaacgggaaagagtaaaggaaagagaacaccgtggtattcgagccgatcattggttcaaaccaccccaaaaaaaaaaaaaaaaaaaaagaaaatat

SEQ ID NO: 263129 - DNA, 776 bp, Zea mays
  unsure (1)..(776): unsure at all n locations
gctgctctcgggaagtaattaccgccgtacgactataattcaccggactgtccggtgtgcaccggactgtccggtgagccaacggtcggccgcacgatccgcgcgagacacgtggccgagccaacggtcggaagggggcaccggactgtccggtgcgccaacggctccaaagcgccaacggtcggcttcgccaaataaggaaagaaatccgcaccggacagtgtccgatggtgcaccggactgtccggtgcgccaggcgacagaaggcaagaattgcattccatgttggcctccaacggctcctagctgccttggggctataaaagggacccctaggcgtatggaggagctacccaagcattcaagaaacattctaagacttctagactccaacttcgtgcatttgattctttgagatagtgacttgagctccacttgagttgtgaactccgtgcgttgtgttttgagctcaagttgtgacttgtgtgcgtgatagtgctgtgatttgagtcttgtgtgtgttgctctcccctcccttactttcgtacatcttttgtgatcatcattgtaagggcgagaggctccaagttgtggagattcctcgtaaacgggagaaagacaaaaaaagggaaaacctgtggtattcaagttgatcattggatcccttgaaataggttgagtgcaaccctcgtccattgggacgccccaccgtggaagtgagcaagtttttcttgaacaaccccccagtttnnnnttnntnaaaaaaaaantattta

SEQ ID NO: 263130 - DNA, 813 bp, Zea mays
  unsure (1)..(813): unsure at all n locations
tttgtgtactaacatatttgtcanagtgctagaatcagagaaaagataaatggaaaagccttggctcgagcagccaagactctgctcagtctgggtgcaccggacagtgtctggtgcgccaggctggcgctgatcaactggccgctctcgggaacagaacggcggcgtacggctataaatcaccagactgtccggtagtgcaccggactgtccggtgagccaacggtcggccgagccaacggtcggccgcgcaatccgcgcgtgacgcatggccgtgccaacggtctgatgaggcaccggactgtccggtgtgcatcggacagtgtccggtgcgccaacggctccaaatcttcaacggtcggtcgcgccagaataggaaagagatctgcatcgaacagtgtccggtggtgcaccggactgtccggtgcaccagtcgacagaaggcaagatcagccttgctagaatgctctcaacggctcctagctgccttggggctataaaagggacccctaggcgcatggaggaataaaccaagcatcctttgagcattgttgatcactcacacatcattcttgcgcacttgttcgacattctagtgatttgagctccattctagtgtgatagtcatttgagcttaagtctgggtcttgtgtgtgcgtatttgctgtgatcttagtgtcttgtgtgagttgctaatccctcccttgctccgtgattctttgtgaacttcaagtgtaagagcgagaggctccaagttgtggagattcctcgcaaacgggattaagaaaagcaaagcaaaacaccgtggtattc

SEQ ID NO: 263131 - DNA, 735 bp, Zea mays
atttatagtatgggaggtttgtgaagccagcgttcgatgattttgtttgccttcaaagaagtatgctgacgtgatcaatccttcgaggtgttgttaaccatgtagcagttgatctgattgttcaacatatccgtacaaaacttggtcagcatgacttgtgcaaaatctatccaaatgttcatgttgttcaatcaacttttcagatccgaggaatgcatactcttatccgtgatagggacatcaccacacctgactttgtattttattcagatcgattgatccgtttggtagtggagcatggtcttggacatttgccatttacagaaaagcaggttattaccccaacaggatctgtttatatgggagttgacttttgtaagaagctctgtggagtctctattgtgcgaagtggtgagagtatggacaacgcattgcgtccttgttgttaaggaataaaaattgccaaaattctaattcatcgtgttggagacaatggacagcagcttgtttatcacaaactgcccatggatattgctgaacgacatgttctacttttggatccggtgcttggtacaggcaactcagtagcccaagcaattgaccttcttataagaaaaggtgttcctgacgatcggatcatttttctcaatctcatctcggctcctgaagggattcagtgtatctgcgagcgatttccttcgctggagattgttacatctgaaatcgattatggtc

SEQ ID NO: 263132 - DNA, 393 bp, Zea mays
cttgatgccaaagggggagaaaatcaaggccaaagcgataaatggatcagctaccacttgacagattttgaaaatagtagaatagagtttttgtgagtttttgtcttgtacaaagcttttagtgtctcttattgcctctattatcaaacgttggcttcttgtggggagaagtgttagcttatgggaactagggcgagcttttgaaatccttcgatcaatctctcttggaatgactctcgttatgcctacaacatccgtgtttgaatatctagatcgagacttgagtctgcttagcactaacatacccactggtgccccaagatgatccatatatgcgccaattgcatctaactcagactcacttgttatttaccgagatattgcactgggtct

SEQ ID NO: 263133 - DNA, 1411 bp, Zea mays
aaaacccggccggacgcactcgaacgcccgagcgtcctcggacgcgttttcagattttgatttccctttgcacaatgggtcaacggtatattctaaagatgggtgggcattgaaaacacctgactcagcggaagctgtaaatggagctaacgatgagattcctccactccctgatgaccagattttccagccagatgaactggaacaactgttgcagtcaatacaagaagattcccatttgggctcaactatcattgaccccatgcattcttctatgacacattcacttctgcctgaggacgattatttgatgttctatgatgcacccttcgattccactatgtgtgatgatgggtatggacagaatggaattcttggctccgcagcagccaatctatctggcattggcatgatggaggatggtatggcatactttgatgcaatggatgataattcatttaatgatactctgggctccatacagcagtcagctggtagcagttcccatgcttttaatggcccagtccttacccaagaggtcaacaatactatgtgtacatatagtccaactcaaaaggttttagaacctaattttctagttggtgccccgtcatctgctaggttacctgaagctggtagtcagttaaattgtgttgttttaccagatggtcaggctaagagtagtactattggaaagggatttgtaaagattttggactcaatctccgctcccccagcttttgctggagaattcccagctatccaccgcaaatctttggctcatatttctggggggcgccccaacacactccatgtttctgctgaagtgatccgcgtaggaagtttagctgttccttctggcgcagataagtgggcgctgcaaaaggatcaaggcatggagctggtcttttctgcagattttgagcctgatacccgtcttcactgtggctgcaacaccattaccgcggtgctgcgtggtggcttctgccttttctttgtttcggcaataatgctcttagtgagctactagcgatggcatgtgcatctatggcaagtaatgagcctgcgataggatgaagattaatctcatgacattagattaatccagtgttctgaggcagactcaactggggtctggggcctcctgctagcttttaagtgtgccgcgttgcatggcgtggacctgtggggtgttcagcactagcagtaccattttgcttgcagctcgagagctaatggtgtatgtatgaattcggtgttatttagtaatagtatgcgaattgcctcattggtgtgtgatgatgccatttgccatggaaatcctgtatatatataattcagatctgccatggaaatcaaaaaaaaaaaaaaaaaaaaaaaaaaaaaaagaaaaaaaaaaaaaaaaaaatga

SEQ ID NO: 263134 - DNA, 567 bp, Zea mays
gctgttccttctggcgcagataagtgggcgctgcaaaaggatcaaggcatggagctgctcttctctgcagattttgaacctgatgcccgtatacattgtggctgcaacaccattaccgcggtgctgcgtggtggcttctgccttttcttcgtttcagcaataatgctcttagtgagctacgaggtgggcatgtgcatctatggcaagtagcaacctggtactggtctaagataaatctcacagcatttaggttaatcctatgttttgaggcagactcaactggggtctgggccctcctgctagcttttaagtgtgccgcattgcatggcatggacctgtggggtgtttagcactagcagtaccattttgcagctcgagagctaatggtgtatgtatgaattcagtgctatttagaaatactatgagaattgcctcgttggcgtgtgatcatgccatttcccatgcttgtggtcccagtggtcaatgttagtgcaaaattttgtatcccccacaaaaattaaaaaaaccaccagaaaaaaaaaaaaaaaaaaaaaaaaaaaaaaagaa

SEQ ID NO: 263135 - DNA, 1862 bp, Zea mays
ctatgatagatactgaattcaaaaaaattgattcataccccgtgccaaccgaccaaattgcccagatacacgattacaaagcgattgtaatatactggttttgacagctcgccgtgtccacaaagtgtgacgcacaaatactcccaccacaaagatatacaatacaagcatacgagcagcaatctgcatgcctcactcaacaccaacagcacacaacccaggtagcacagcctgtggcttccccctgcccctggtgaaacccctggtgccatcaggcatgcgggggcctggtggaagcttgttggccccaataggcagctgcggatgcggctcaagcttggttttcaggttatgcggtgtagttccaacagagtgaaggctgccacggttcccaccaaggtggttgttgccatggttattgtactgcggctggttgttctggtggtgctggttattgtgatggtgattgttatattgatggttgccacgcccatgccctctgccaccgcgaccgcgccctttgccgcgcttgggaacttccttgttgaaattctcatcaaacaagtgttccggcagtacatctaacagttgagaggattgttcaaactgtttctcgttagaatggttcaaagtggagacatcctcctcactatttccatcagtttcattcattccgttttttcctttgcctgcccccttcaccgtgcaagtattcagcaaccgaactctaagcccatttctccagtttttctcatcattgagctccaaaatagccttcgcagcatcctcaggagtttcgtactccacgaaagcatgcagcttgttagcaaaaagcatatctaacttggaagatctattagttgcaggaccagtgccatttggagtctgaggatagcaagttcggattgaaatcaaacttccaacagctgaaaatatcttcttaagattctggtaggagggatcaccaggaagattttctgctacaacaatccgggactggagctcctgcaaatcagattctgtaaatggctgctgccttttgactctcttaccgtcatcgcttacaacaagttttgatgaggttcggagagccgcagcaagcatcacattattgcgcacagaagtttttactttcttaaagccagcaattactgatattggcacaaatccctcagaatccttggtaatgaatctcatcagatgttctgtagtagcaaggttgatgtcactaaaatagtattccacctgcttggtgatcttgtgcaccacctcgtcgtcgagcccatccaccaccggctccgtcttcaccgcggcgggcgggagcatctccgcttccagctccggcgcctgttgctccttggcagcaaatccgctgcgttcaccgataggcgcatagtactcgaacggccggggctgcggcgcggagaagaagcccccacgcggcggcgggggaggcgcggcgaacatgcggatcacctgcggcggaggcggcagcacaaccgccggcgccggtggcggcggcccccgcggcacgaactccggcgcctgcgcgttgaggcgactggaagagccggtcctcggcaagcccacgggccgctcggaagccggctccttagcgaaccagccggcggcgatctgatcagtggacccctccatctgcggcatctaggctgggacttgggtacacgaacggagccggagcgacaagataacggccgctactgctgctagctctcgttgtaggcgcgcgcggatggaagctccctagcagcagcggcggcggtgaggggtacaagggcttcggtagtggccgcgtcggcggacgcgtgggcgggtagggttccgacgagatcggatattta

SEQ ID NO: 263136 - DNA, 2143 bp, Zea mays
actcgcgggctgacgcacgcgtctgcccacacgtccgccctcgcgcccgcgacaagaaagaagagtactatctcagctactggattgggaaggatagcttggtggacgatcaagtgtcggcatctcaaataatctaatacaatgtggaattcattgaaaggacggccagttctgggtcgtatataccaagggaaggagccaccacaatttgttgctcttttccagcccatggttatcttgaagggtggaatcggatctggatacaagaagctcatagaagaaaaaggtgctatgggtgagacttatactactgaaggcatagctctaattcgagtatctgagacatctatctacaacaacaagactcttcaagtagatgcggtagcaacgtctttaagctcaacggagtctttcgtactgcaatctggaaatgctatgtttacatggtttggcaattctagcacatatgagcaacagcagtgggcagcaaaagttgctgaatttttgaagcctggcgttgcagtgaagcactgcaaggaggggacagagagttctgctttctggtttgctcttggagggaaacagagttatacaaataaaaacactcctcaggatattattactagagagcctcacttgtatgcattctcattcaagaacgggagactggaggttactgagatcttcaacttttctcaagatgatttgttaactgaagacatgatgatacttgacacacatggtgaagttttcatttggattggtcagtatgtggaatcaaaagagaaacagaaggcatttgatattggccagaaatacgtggagcatgcaaattctattgaagatctttctccacatgtaccactatataaagtcatggaagggaatgagccatgcttcttcaagacgtacttttcttgggataacacaaaatctttggttcatggaaattccttccagaagaaactctcgctgctttttggattgcgttctgagggtgcacctaggagctctggtaatggtgggccaactcaaagggcatctgcattagcagctctatcatccgcattcaatccatcatctcaacaaaggctctctaatgagaggcctaaaagcacaggcgatggacccacgcaacgtgcctcagcactggctgccttatctaatgcattcaacccatccttaaaacccaaaacatcacctccatctcgctcaggtcgaggttctcaaagagcagctgctgtagctgctctatcctctgtgctgactgctgagcaatctggatcttcagaatttctacgatccaaagctagcaacacagcatataagactgatgtcgaccggattgtcataactccagctggcccatcaggcccatcttctcctcagtctgaagctggggagtccaatgtgtttcaccaggaaaaagatgctgcagcagatggggcaccgcctgacactgatggagcagtggctgaggcccgagaggaagaaacgacagaaaatgttggtgaagcgacatttagctatgaccgcttgatatccaaatccaccgatccagttcgtgggatagattacaaacgcagagaggcatacttatcagatagtgaattccaaactgtttttggcatgaccaaggatgcattctaccgacagccaaattggaagcaagaactacagaagcgaaaagcagatcttttctaaagagaacaagccttgtttccagtggtctgctacagtatgcaatcctcttgtcgtgaatggtcggtcccatgagagttggtgtattaatatattgttggtcgtttctgaggacggtctactggtggctttgctcggttgtttcttttttggcaaccaattttataggccaattcttttatttgtacatggcctgggttgtgctgcttgcgaggtcctaagatgcttcatagctttgtgttgtgactgtccatatgtgtatatcgttttttttcatcagtttgttacgtatgggcatatcctggtaggttgtcaattgtattgtcattcagatgtattgcacacgaaatacttgtgctgtctgtttgttgttaatggttggcagttgttttgtttggatttgaacacttggctgaattccatcattttcgtgtggccgctg

SEQ ID NO: 263137 - DNA, 2378 bp, Zea mays
acagctttgaatgaatgcacagagtggggccaagttttcattttggattctttgtcaagatataaagcagcagatgccagggaagctgaaaacatagtggaacgagttacaccccgtctccaacatgcaaattgtgcggttgttctttctgctgtcaagataatccttctacaaatggagctcattacgagcacggatgtagtcaggaatctctgcaagaaaatggctccccctcttgttactcttttgtcagcagagcctgaaattcagtatgtagccttgaggaacattaatctgatagttcaaaagaggcctacaatactcgctcatgagattaaggttttcttttgcaagtacaatgaccctatatatgttaagatggaaaagctggagattatgataaagcttgcctcagatcgaaatatagatcaggtgctcttggaattcaaggagtatgccacagaggttgatgttgattttgtgcggaaagctgttcgtgcgattgggagatgtgcaattaaattggagagagctgctgaaaggtgcatcagcgttttgctcgagctgattaagataaaagttaattatgttgttcaggaagctataattgttatcaaagacatcttcagacgctaccctaacacgtatgagtctatcattgctacactttgtgaaagtctggacactttagatgaaccagaggctaaggcatccatgatttggataattggagaatatgctgaaagaattgacaatgcagatgaacttcttgagagcttcttggaaacatttcctgaagaaccagcattagttcaactgcagctgctaaccgctactgttaaattgtttcttaagaagccaactgaggggccacaacagatgattcaggctgttctcaataatgcaacagttgaaacagataatcctgatttgagggacagagcttacatatattggcgacttctgtctactgatcctgaggctgcgaaagatgttgttttggcagagaaacctgtgatcagtgatgactccaaccagcttgactcatcacttcttgatgagctgctagcaaacatttctaccctttcatcagtttatcataagcccccagaatcatttgtcagccgtgtcaaggcagctcctagggctgatgatgatgagtttgctgatacagctgaaacagggtattcggagtccccatcccagggagttgatggggcgtcgccttcctctagtgctggtacttcttctaatgtacccgtgaaacagccggcggcagcatccccacctggtccagtggcaatgccagaccttttaggtgatttaatgggtatggataatgctattgtccctgttgatgaacctgcagcaccttctggccctccgctacctgtcttactgccttcgaatacaggtcaagggctgcagattagtgcacaactaacacggcgtgatggccagatatactatgatatatctttcgagaatggcacccagggtgtcctagatggatttatgattcagtttaacaagaacacatttggtcttgctgctggtgaagcacttcaggttactccactgcaaccaggccaatcaacaaggacacttttacaaatgaacacgttccagaatatcagccctggtgcaccaaactcgctattacaagttgctgtgaaaaataatcagcagccagtgtggtacttcaatgacaaaattccactgcatgttttctttggtgaagatggaaaaatggaacgagctagttttcttgaggcctggaaatctttacctgatgacaatgaatttacaaaagaattcccgggctctgtaatcagcagtatagatgctacagttgagcgccttgcagcatcaaatgtgttctttatagccaagcggaaaaatgcaaacatggatgttctgtatctgtccgcgaagatgccccgcggaatcccctttcttatagaggttacagccgtggttggtgttcctggtgtgaagtgtgcagtcaaaacaccaaatagggagatggttcctctcttctttgaagctatggaggctctcaccaagtgacgacaaacttaatggatctggatcggtggttctacaaaaaaaatatcagtcgatgagctgctataggtgtttggacgtggcattttatttttcacggaagctggtgtgaattgtagtttttttggtattagattacagtatttaaactgctagtttcctggttccaaagttttttcaccagaaatactggaggtgttcatgccttgcatgatttgtacatcttaccatgttgtatgaagcgatgaaattgtaggtgacgaaaaagtagaataagcatagattaactggtacgattgtggattgttatt

SEQ ID NO: 263138 - DNA, 713 bp, Zea mays
ctcgagccgtgaaatatatgtatgggttggacgggtaacgcaaatggaggatagaaaatctgccactaaagcagttgatgaattcctcattaatcaaaagcgtccaaagacaacgtgggtaactcatgtgattcaaggttatgagagtcatgctttcaagtccaagtttgaatcatggccagtgggtaatgctactgggagccctggcgcagaggaagggcggggaaaagttgccgctttattgaagcaacaacgcgttgatctcaaaggagctgcaaaaagcaccactccagtaaatgaggaagttcctcctttgcttgaaggcggtgggaagcttgaggtatggtgcgttgatggcaacgctaagactgccctgccaaaagaggacattggaaagttttacagtggagactgttatatcattctctatacgcatcattcgggcgacaagaaagaagagtactatctcagctactggatttggggaaggatagcttggtggacgatcaagtgtcggcatctcaaataatctaatacaatgtggaattcattgaaaggacggccagttctgggccgtatataccaagggaaggagccaccacaatttgttgctcttttccagcccatggttatcttgaagggtggaatcggatctggatacaagaagctcatagaagaaaaaggtgctatgggtgagacttatacctactgag

SEQ ID NO: 263139 - DNA, 431 bp, Zea mays
tcccctttcttataaaggttacagctgcggttggtgttcctggtgtgaaatgtgcagtcaaaactccaaataagagatggttcctctcttctttgaagctatggaggctctcaccaagtgacgccaaagttaatggatatgtggttctacaaaaatttatcagtcgatgagctgctataggtgtttggatgcggcatttttttttcacggaagcttgtgtgaattgtagtttttgtattagattacagtatttaaactgatagttcctggttccaaagtttttcgccagaaatactggagatgttcttgcctcacataatctgtacatcttaccctgttggacctggaaattttcatcttgttatgcatagcatatgaaatatgactagttttctacacggctaatgtaaactgatactacctccgttgac

SEQ ID NO: 263140 - DNA, 614 bp, Zea mays
ccgggccggtatcgggtgggacccacgcgtccgcggacgctttgggcgacccaggcgttcggtttcaccaggaaaaagatactgcagcagatggggcaccgcctgacactgatggagcagtggctgaggccggacaggaagaaacaacggaatatgttggtgaagcgacatttagctatgaccgcttgatatccaaatccaccgatccagttcgtgggatagattacaaacgcagagaggcatacttatcagatagtgaattacaaactgtttttggcatgaccaaggatgcattctaccgacagccaaattggaagcaagaactacagaagcgaaaagcagatcttttctaaagagaacaagccttgttttcagtggtctgctacagtatgcaatcctcttgtcgcgttaatggtcggtcccatgagagttggtgtattaatatatcgttggtcgcttctgaggacggtctactggtggctttgcacggttgtttcttttttggcaaccaattttataggtcaattcttttatttgtataaaaaaaaaaaaaaaaaaaataaaaaaaaaaaaaaaaaaaaaaaaaaaaaaaaaaaagaaaaagggccgacacg

SEQ ID NO: 263141 - DNA, 584 bp, Zea mays
tccttttttttatttttttttttttttttttttttttttttggtgtttttttcgggccaacggggcaaattgccagatacacgattacaaagcgaatgtaatatactggttttgacagctcgccgtgtccacaaagtgtgacgcacaaatactcccaccacaaagatttacaatacaagcatacaagcagcaatttggatgccttacttaacaccaacagcacacaacccaggtagcacagcctgtggcttccccctgcccatggtgaaacccctggtgccatcaggcatgcgggggcctggtggaagcttgttggccccaataggcagctgcggatgcggctcaagcttggttatcaggttatgcggtgtagtaccaacagagtgaaggctgccacggttcccaccaagggcagggggaagccacaggctgtgctacctgggttgtgtgctgttggtgttgagtgaggcatgcagattgctgcttgtatgcttgtattgtatatctttgtggtgggagtatttgtgcgtcacactttgtggacacggcgagctgtcaaaaccagtatattacattcgctttgt

SEQ ID NO: 263142 - DNA, 458 bp, Zea mays
cacgtcctcttgttcgcccacgcgcccgcccacgcggccgcggacgcgtgggtcgcccacgcgtccgcccacgcgggcggaagttcagtgtggggccttgacgaacattaatctgatagttcaaaagaggcctacaatactcgctcatgagattaaggcttgctgttgcatgtgcaatgaccctatatatgttaagatggaaaagctggagatgatgataaagctggcctcagatcgaaatatagatcaggtgctcttggaattcaaggagttcgccacagaggttgatgctgttcttgcgcggaaagctgtgcgtgcgattgggagatgtgcaattaaattggagagagctgctgaaaggtgcatcatcgttttgctcgagctgattaagataaaagttattatgttgttcaggaggtataattggtatcaaagacattttagacgctaccctacac

SEQ ID NO: 263143 - DNA, 294 bp, Zea mays
atcctcttgtcgtgaatggtcggtcccatgagagttggtgtattaatatattgttggtcgtttctgaggacggtctactggtggctttgcacggttgtttcttttttggcaaccaattttataggtcaattcttttatttgtatatggcctgggttgtgctgcttgcgaggtcctaagaggcttctttgttcttctttgtgaatggccacatgtgtatatcgttttcccctcgccagtttgttacgtacgggcaaaaaaaaacaacaaaaaaaaaaaaaaaaaataaaaaaaga

SEQ ID NO: 263144 - DNA, 498 bp, Zea mays
cccggctggacgcacgcgtccgcgagaaggcgcaggcgaagcctgcggggagagaaaacgggcggctcgcgcgcgagcggcggcggcggcggcaagggaggtcacctcctccccctcgccttccgcgccgccgccggcctcctcgaagccggcgctccagctcaaccccgcggccgtcctcctccgccgcctgccgaccccgaccccaacagcggcgacgcccgtcaccgcgacggcgccccccgcgcggcccgccaccgcgtccaacccgctcgcggccttgctcgtccccttctggcgcgggctgcggcgagcgccgaaacagccggtccaccccgcctccgccgccgcggcgcggagggcggcggagcagcaggaggcggaggccgaggcggaggcgcggcagctggtggggtgcgcggtgccgctgttccggccgtacgtggcacagctgccgtggcacggcggcgcccgggcgtggctgtcgaagctgttccc

SEQ ID NO: 263145 - DNA, 755 bp, Zea mays
aattcccgggtcgacgcacgcgtccgagcagcggcgcccccaggccaggccccacccgctcagcctcctcagctgcccaaccttctgcccatctgctcagcctgagctgtcattcccgcgaagcgccgtctcccggctctatcgatggaccgagtcgccgccctcgtcgtcgcgctcctcgccctcttcttcgccgccggggccacggcgcacgccccggcctcgtcgcccaagcgcactccagcgccagcgccacccaggacggccttcctcccgccgccgccggccagggcgcctatggcctccccgccctcgcctcccgcgatggcgccggtgcccgcgccctccgccggcgtgccggccacgagccccgtcggcgcgggagctggtgacgacgcgatggcccccgccggagccgcggcggctctgactccggctgccgcgcccgtcacggagaagagcgccgccgtctcagcctccgccgccgccgccagcctcgtggccatcgttgccgccgtggcagccgccgtcgcgttctagaccgggaccgaccttgggacatctgatatgtcggtggatccgtggaggagctagagctgcactctttctctgctgtgtgtgttgggtgttttcctcctcttttttcggatcctatttatttgtttattcatttgttatttcgaggcttgagacggagatgaggacgtgtaatcctaccaatttttcagaaaaaaaaaaaaaaaaagggcggccgc

SEQ ID NO: 263146 - DNA, 485 bp, Zea mays
agagctgaacacaaacacccgcatcaatccaaccccagccacgcctcggggacaggccgacgcgagcgagatccaacccaagtcccgacgccgcgggcgaggccgaccagatccacctcctcagccgtctcggatggcggcagcatcgacgtcggtacgggtgctccccgacggcggtgctgacgacgaggagcgctggctcgccgagggcatcgccggcgtccagcaaaacgctttctacatgcaccgtgccctcgattccaacaacctcaaggacgcactcaagtactcggcgcagatgctatcagagctgcgcacctcgcgactatcgccgcacaagtactacgagctttacatgagggcgtttgatgagatgaagaagctggagatgttcttcagggaggagactcgccgaggcagctgctctgtggttgatctgtacgagcttgtgcagcatgctgggaatgtcttaccgagactctatc

SEQ ID NO: 263147 - DNA, 429 bp, Zea mays
tgaattctcgggtcgacccacgcgtgcgcccacgcgtccgcccacgcgtccggcccggttaaaggtataccggcagctgttattgtttaggaggatagtgtttagtatgttcttcaggatacactgtcttgttggattctgtaggaggatgggttctagtatgttcaggaatcaggatgcgctcgtcttgttgggttttgcttctgatgacttcgatatgttccatggcaaatgcgactttaaagtttgggagacttagaattctacaaaaaaaaattattttaaatataaatatattatttaatattattaatttaattattattttttttttttttatttttttttttctacttttatattttttttttttttcatttttttaatattctttttatttattttttttattttttatattttttattt

SEQ ID NO: 263148 - DNA, 1189 bp, Zea mays
accggtcctggattcccgggtcgagtcacgcgtccgctgtagaacgtcaagagagctattgaaaagggctagagcaatgcagcaacttcaaaataccagggtacaagcaggaccaaccactattctgcccaagataatgatgactttctttcttcagaatcagatagacagcttctactcatgaggcagcaggatgaagaacttgatgagctcagtgaaagtgtccaaaggattggtggcgtgggactaaccatacacgaagagctgtctggacaggaaaggatcctaaacgacctaagcttggagatggagactacttccaacagacttgatttcgtgcagaaaagagtggccatggtgataaagaaggccggcatcaagggtcagatcatgctgatcgtgttcctggttgttctgttcatcattcttttcgttttggtgttcttgacatagccaagtgcaccagggtcctcggttttctctctcatttgttgtgcctccctagtacgaacactagtaaattggtcgcgctccgcgtgagttgttgcttgatgtgcttacataagatgtagaatcttgttgctataggcatgtatcaacaggtgctagcagcttgcagttctccttctaacagaaacaggtcgaagcagattttttgttctccaagtgatcagtttgtccaaggttgttaggctttccgtaatcgcttcgagtttgcttttcaagatcatcattcacaggttgcttgctagactttggctcaacataaggaggcagcatggattctttatgtttgcaacatttagcttagtgtaaggagccttgtttctagtggtaccacccacccggtatactaagaagactcaatgaacgcccttgattctctgggtgctgagctcttacccctgaatctgcatgtctcccattgtgttcatgaccaccagggccattgagatcaagctctactacctccatcagcttcttttccaaagggcgaacaacttttctgtttagcttctgaacatccttttttgggtcctgttagtgtccacaggagacactggtttatgcaaatgttcattctcaacagacacatcaggttgttgcttcctcgaattcttatcaattgtatggtgtgcgttagcaacagaacgaatatcttttggatcaacagtatctccactttatc

SEQ ID NO: 263149 - DNA, 997 bp, Zea mays
ctctctcgtctgcaccgcgagtccgcgactccgcaccaagcaaatcccctgcccccaaaatattgctagggattcgaggggaggaaaatccaggcgcccaggcctggcaatccgttcgtcggagaggccatgagctcggcgcaggatccgttctacatcgtccgggaggagatccaggagtcgattgataaattgcaaagtaacttccaccgctgggagcaaactgcttcaaacacaggagaatatgttcatctgacaaaggagcttctgaccagctgtgaaagcatcgagtggcaggtagatgagctggaaaagacaatctcagttgcatcaagggatccatcatactatggacttgatgaagttgaactttccagacgaagaaactggactggttctgctcataagcaggttggtacagttaagagagctattgaaaagggcaagagcaatgcagcaacttcaaaataccaggatacaagcaggaccaaccactattctgccgaagataatgatgactttctttcttcagaatcagatagacagcttctactcatgaggcagcaggatgaagaacttgaccgagctcagtgaaagtgtccaaaggattggtggcgtgggactaaccatacacgaagagctgtctggacaggaaaggatcctaaacgacttaagcttggagatggagactacttccaacagacttgatttcgtgcagaaaagagtggccatggtaatgaagaaggccggcatcaagggtcagatcatgctgatcgtgttcctggttgttctgttcatcattctttttgttttggtgttcttgacatagccaagtgcaccagggtcctcgattttctccctcccatttgttgtgcctccctccctagtacgaacataagtatacgtgctggagctatcctttataaatcccgattttaatgcattttgttctgcgtgaaaaaaaaaaaaaaaaaaaaaaaaaaaaagggcggccgca

SEQ ID NO: 263150 - DNA, 518 bp, Zea mays
tctactccacgcgttttttctccttgacatctcccgccacccgcctctacttccgtcccgccgccgccggcgccatgaagggacccggcctcttctccgacatcggcgggaaggaaggatctactcactaaggactacacctacgaccagaagctgtccatctccaccgccagcgcctctggagtgaatccgttcgtccgagaggccatgggctcggcgcaggatccgttctacatcgtccgggaggagatccaggagtcgattgataaattgcaaagtaccttccaccgctgggagcaaactgcttcaaacacaggagaatatgttcatctgacaaaggagcttctgatcagctgtgaaagtatcgagtggcaggtagatgagctagaaaagacaatctcagttgcatcaagggatccggcatactatggacttgatgaagttgagctttccagacgaagaaactggactggttcttctcataatcagacattaaggagtaacatattaccatgttc

SEQ ID NO: 263151 - DNA, 525 bp, Zea mays
tgacttgaccaggcgggacgcagcggccatcgtcaacctcctcgcgctgctgtcgtccgcacatatcttcgcgatcctcgggtacatcgccgtgcactccattgcgctgggcgcagtgtttgcgtccgtggcggggcaccacagacctgggcagcgtctagtgttcctcctcaccggtgctgccaagggcgctaagagactcacagggttcgcgttcctccggtgggccacgagggacgccgttgtgcagatgctctgcctctggttctttgccgatgtgcacgaccaggcccagctgttcaggctctttgtggtcgccaaactcatgccattctccgcgtctgttaacccgtggcttggtgcagccgttgcaggcccagagctcggtggtttctttgttgcctgggctgttcttgatgcagtggtgtcggttttgttcactgtggtgccttgggtggttgtcatggaccgtgatccacggccgcctgggcgcaatgctgtgaaggaagggtgctatcttgtgtc

SEQ ID NO: 263152 - DNA, 1818 bp, Zea mays
cctttcccatttacacatgggaagagaaaggcttcacaaaagaggtcgaggttgatgaagatccagcggaagcccaaaaaaaaggtgatgattcagcggaaaccaaaactgagcctaagaaaaagaccaaaactgttattgagaagtattgggattgggagctttcaaatgagacacaacctatttggcttcggaaccccaaagaggtttcaactgaggaatacaatgattttttcaagaaaaccttcaatgagtacttgggccctttggcatcatcacacttcactacagagggtgaggtagaatttaggtcaattctttttgttcctgctacaaggaaggaagatgtaactgctgatagtaggaagaccaagaatatcagactatatgttaagcgtgtattcatatcagatgactttgatggagaattgttcccaagatatttgagctttgtgaagggtgttgttgactcaaatgaccttccattgaatgtttctcgtgagattcttcaagaaagtcgaattgttcgtataatgagaaaaaggctggtgcggaaagcctttgatatgatacttggcatttcttgcagtgaaaatagagatgattatgaaaggttctgggagaactttggaaaatttttaaagctgggtgccatggaagataaggaaaatcacaagagaattgctcctttgttgcgcttcttctcttctcaaagcaacaatgaattaattagcttggatgaatatgtggaaaacatgaaacctgagcagaaggacatttacttcattgctgcagatagtatgagcagtgccataaatgctcctttcttagagagactaacagaaaaagactatgaggttctacttttggtcgaccctatggatgaattggctatccagaatctgagctcctacaaggataagaaatttgtggacattagcaaggaagatttggatttaggtgataacaatgaggaaagagagaaggagataaagcaggagttcagccaagcctgtgactggataaagaatcgcttgggtgacaaggttgcacgtgttgacatatctaatcgtctcaggtcatcgccatgtgttcttgttgcagcgaagtttggttggtcagccaatatggaaaggctgatgagagcacagtctatgggtgatacagcctctttggatttcatgcgttcgaggaaagtttttgaaataaacccagagcatgagataatcaaggccttgaatgtggcatgcaggaataaccctgatgatcctgaagccctaaaggctctggatgttctctttgaaactgctatgatttcaagtggcttttcgcctgacaacccggcggagctcagtgggaagatttacgagatgatgacctctgccatcgctggcaaatggtcctcacagccacaggcgcaggcgcaacctgccgacccaatcccacagcacgacgcacctgtgaggtcagacgagccgcttgaagctcaagtggtggaggcagagcccgttgaggctggtcagcagaagtgagggcctgttcgtgcagaatctttgtacggagtagttttgaaccgttgtgcacaacatggctgagaatttcgagtatttgttttgacggcctgtatctgtgtcatgagctgttactggtaatgtaagacgtattggttagaaattaggagattaggaataatcgggtagctggactacttgaactggttcctgaaccatcaggagggttatggactcatggttagcttctactgcgtccttgggggcagtagtaattttgaagccaattcgttgttttgtaggctct

SEQ ID NO: 263153 - DNA, 1185 bp, Zea mays
ttcgccgcgtaacgcgcgaacgtgccatctgacggtgcgtttgtctcccccctcgcgtccggggtggggcacgaacgaggcgctcatcatctccatcctcggccaccgcgacgccgcgcagcgccgcgccatccgccgcgcttacgccgaggcctacggcgaggagctcctccgctccatcacggacgagatctccggcgacttcgagagggccgtgatcctgtggacgctggacccagcggagcgcgacgcggtgctggccaacgaggcggcgcggaagtggaagcccgggaaccgtgtgctcgtcgagatcgcctgcacgcgcacctccgcgcagatcttcgcgaccaggcaggcttatcacgagcggttcaagcgctcgcttgaggaagacatcgctgcgcacgtcactggggacttccgcaagctattggtgccacttgtaagtacttaccgctatgatggaccagaggtcaacacaaggttggcacactcagaagccaaactacttcatgagaagatccatcacaaggcttacggtgatgatgagatcatcagaatcctcaccactaggagcaaacctcagctgattgctacattcaatcattacaatgatgcatttggccaccgaatcaacaaggatctgaaggctgacccccaggacgagtacctcagaacgctgcgggcgatcatccggtgcttcagttgccctgacaggtactttgagaaggtggctaggcaggccatagcggggctaggcacagatgagaactccctgaccagggtcatcaccacccgcgctgaggtggacctcaaactgattaaggaggcgtaccagaagaggaacagcgtgccgctggagcgggccgtcgcgggggacacctccggcgactacgagagcatgctcctcgcgctcctggggcaggagtgatgagccgtactggtgcgctggtgcctttctgaccggcgccgtggtgtttgttcgtgatcgtaataaacctgattgcctagctgtacgtgaggctgtttcttcggtcctggtactgtcgctgcagcatgcatagcagtggaccagtggtgataaataagttactgtgctttcgacgaatgaaccctttttttgtgtctaagttgtggaacctcgagaaagtttttgtgtctaaggctgtctttagtagattgcat

SEQ ID NO: 263154 - DNA, 447 bp, Zea mays
cccacgcgtccggcatcagtgcgtcacattcaccgggaatggcaacgctcaaggtcccagccactgttcctcccgtcgccgatgactgcgaccagctgcgcaaagcattccaagggtggggcacgaacgaggcgctcatcatctccatcctcggccaccgcgacgccgcgcagcgccgcgccatccgccgcgcttacgccgaggcctacggcgaggagctcctccgctccatcacggacgagatctccggcgacttcgagagggccgtgatcctgtggacgctggacccagcggagcgcgacgcggtgctggccaacgaggcggcgcggaagtggaagcccgggaaccgtgtgctcgtcgagatcgcctgcacgcgcaccttcgcgcagatcttcgcgaccaggcaggcttatcacgagcggttcaagcgctcgcttgaggaagaca

SEQ ID NO: 263155 - DNA, 2170 bp, Zea mays
ggtttggtggttacctccaaatgtttggaacaaggggtgtgggtttgagtgatcgctttgcattattttttgcacggtgtgtttgggttgagctttgcactattttttgcacggtatggtaacacggagggtgaagccgtggtatcaccaggtgcccacattaggttcttaatagtttagtatagatataaatatagagtccgatttgacctcatattctgattatatgttgcacaggtgctaaaagaaagctttaaaatttattgtgcaataaatgatggaatcataaacctcgttgataagttttttgagatgccaagacatgaagcacataaagctcttgaaatatacagaagggctggccaacaggctggaaatctatctgatttctacgagaattgccggggtttagaacttgcgaggaattttcagtttcccactctgagggagccgccacaaacatttcttgctactatggaggactatgtgaaggaggctccacgcatggtcccagttcgagaacccctggaacttcctgagaggcttcttcttacatacaaacctgaagaatcggaggacattcctgagcctgcttctgttgaagaggaaaatgcaccagttgaagagcctgttctggtaccacctgttactgaagttgtttcacctcccaagaccgaggtggccgatactggtgacttactgggcttagatgatccaaatcctgctgtatcagctatagaggaaagcaatgctcttgccttggctattgttccaacagatggcgcttccacaactggtaacactgcatttcaagataaggggtttgatcctacaggatgggaactcgcccttgttactgcacctagcaacacgacttcatctgcgtctgtcggtcaattggtgattgatttctcgatttgggccgattggagcaatcgttggctattctatcggcatgaataattgatgagacaaactcaatgtcaaacatatttctttgagttttcttcattgatagagtcaaaggcataaagataggacgacaactgacagcacacccctgactaagcagtggagaggtaaagcatcacagtagtctggaggaaaccgacaacacaccggtgaccaagcagtggagaggaggagcatcacagtagtctcgcattgcttatggattgtggggaatggaaccactctgttcaacagcaattctgtttggcaaaatattgtcaaggacacaagggatagaggttgttttttaaatgccactgatgagaaggagttgttgaatgcaattttcaagcttgctgttgagtatcctcacgcggacaatttagctggcgaggagacaaggcagcgattgagtaccaggatgagtctattcaatgtcgctgaggcaacaattacaagatcctagaagaaaacccgtggcagctctacactacaataagggtgataaatatgtctcgcccaatggaaggcgcgaggatgctgcagcattcgaacagtgccaacgagctgctcttgcgccggaagctggaggagcagcagcaggctgccgaacttcagcacgccattgagctccagagccgccgcctcatggatctccagctgctcggcctcaaggctcgcgcagctgcgacagcagcagcggcatcggcactgccaacaccagttgccaatgcctttgcgtccaaccatcctttgagcaccatggcagtcgagtcgccactagagtccggagagcagctcaagctgagcagtgggtttgctctggaggggaagctcaacggtggcgacaaggaagaatctgcttgcgaggcgagccctgacgccgctgatagcgaccaaaggtggattaaacaacccatttcatcattcttcttccttgttagttatgattcccacgcttgcctttcatgaatcatgatcctatatgtatattgatattaatcagttctagaaagttcaacaacatttgagcatgtcaaaacctgatcgttgcctgttccatgtcaacagtggattataacacgtgcaaatgtagctatttgtgtgagaagaagtgtgatcgactctttttttatatagatagcattgagatcaactgtttgtatatatcttgtcataacatttttacttcgtagcaacgcacgagcgttcacctatt

SEQ ID NO: 263156 - DNA, 1053 bp, Zea mays
gaatgtgtttgttctggtaccacctgttactgaagttgtttcacctcccaagaccgaggtggccgatactggtgacttactgggcttagatgatccaaatcctgctgtatcagctatagaggaaagcaatgctcttgccttggctattgttccaacagatggcgcttccacaactggtaacactgcatttcaagataaggggtttgatcctacaggatgggaactcgcccttgttaccgcaccgagcaacacgacttcatctgcgtctgtcggtcaattgggtggtggactcgacaagctcattttggacagcctttatgatgacggggcctacaggcagaggcaacagcaacaggtgtatggttcagcagtgcctaatccattcatgtcaaatgatcctttcgtgatgtcaaaccaagttgctcccccaccatcagttcaaatggctgccatgtctcagcagcatcagcagatccccacgatgatgcaaccaaatccttttggaccacctatgcagccacaggtaggcatgggcccagcaacaaacaatccctttctggatgctggattcggggcattcccagtggcgaacaatggccatcagcaacacaacccatttggcagtgcccaacttctgtaggctacgtagttacaagagcaaatttgtgcttcagcagatgcgattttttcggtgattatatcgtgcattgtgctcggccattcttccatgcgatgcgtgtattatgaattggcttcaccacacggaaagctgtgcctatggcttgacccaacccttgttgtaaagaaattaggcgacttgtgtaacatcgaatgtatgtcaataaacagtaggcaatgttattatatctataaacaaaagaacggtggtatgtaggaaattcttaatattgtttattccattgctttttatattgccggtcttgcatgcacattgattggccatgtgttctaaccccagaactgaagcgttattgtacctatacacatgcatatactacttgcgattggtaattattttacgttgttcacatt

SEQ ID NO: 263157 - DNA, 989 bp, Zea mays
ctacgccctgcagtgcgtcatacacatggtgtgcgtcgcaatcgagtaccggatgcgccatggccagcgcggcggcgccggcgcagcgcccgctgacgaggaaaggggcagcgacggatcgtcgtcgtctagtgatgaggatgacagggagctcgatcgccatggtcgccgcaccgattacgccagtattgcaaaacacttggagtctgctaatacaatgttctccttcatatggtggataatcggattttattggatatctgctgggggtgaagaggttatccgggacgcacctcagctttactggctctgcatagtcttcctggcatttgatgtgttttttgttgtattctgtgttgctctggcttgtatcattggtattgctgtctgttgttgccttccttgtatcatagcaattctctatgcagtatctgatcaggaaggagcatctgaagatgacattcgtcaaatcccaagatacaaatttcggcggacggatgagcctgagaagcaagatgttgaccccatgggtccttttggtggaataatgatagagtgtggcaccaatcaacctattgagaaagtgcttgcagctgaagatgcagagtgttgtatttgcctatctgcttatgatgatggtgcagagttgcgggaactcccttgtgggcaccatttccactgcacctgcatcgataagtggcttcacatcaatgcaacatgccccctgtgcaagtacaacattcggaaaagcaacagtagcagtggaagtgaagaagtatgaatgcaaccgcttgacaatgccaatctgtttaaacttcgtgcctgtgtcgttgctaatgtaactccagggcttgagcagtgtaaatttttgtactaaaaagaagtgctgatagagtcaattatgtatcaaagttactcaaagtgctgtctatatgtccgataagtaataaatagttgggtgtgcatctgtatttactgtcaggaatgat

SEQ ID NO: 263158 - DNA, 868 bp, Zea mays
gttctcgttctcgccgtcgccgtcgccgcccaagggcgccaacctcaacctcctgctccaccaccactaccagcagcaaagcgagccccaaagggcggcggccgccatgctgctccagggcggcggcggcgacgacatgcacagtagcaggttcccgctgcggtcgcccggcaggatggaccgcggcgagctcgtctccagccccgccgcgcggcagatctacctcaccttcccggccgactccaccttcggcgaggaggacgtctccaactacttcagcatctacggtccagttcacgacgtgcgcattccctaccagcagaagcgcatgttcgggttcgtcaccttcgtgtacccagagacggtgaagctcatcctggccaagggcaacccgcacttcgtctgcgacgcacgcgtgctcgtcaagccctacaaggagaagggcaaggtccccgacaggttcaggaagctgcagcacccgcacctcggcgacttcgccggctgcacgtcgcccaccggcgtgctggattccagggaccccttcgatctgcagcagccgcagatcggaccaaggatgatgtacgggaacatcgccaaccacgaggcgttcctgaggaggaagctcgaagagcagcagcaggccatcgagctggagggccgccgcttcatggggctgcatctcctcgacctcaagatcaggggccaccacctcggctcctcccccgccacgaccgtcgtggggcaaggcgagggcggcaagggcagtggcaatggcaatgccgtccagctggaggatgtcatcgtccaagatactcctacgaagatgaacagtaacagcgttgcaatgagtgcgcctgcagctgctgta

SEQ ID NO: 263159 - DNA, 907 bp, Zea mays
cctcactcgtccgcccacgcgtccgcccacgcgtccgcccacgcaggacgaagtggcccgcccaggaaatggcgtcgatgcagagctggcgcaaggcctacggcgccatcaaggacaccacaaccgttagcctcgccaacctcaactcggacttcaaggatctggatgtggcgatcgtgaaggcgactaatcacgtggagtgcccacccaaggagcgacacctgcgaaaggttgttgcggcgacatccatcgccaggcctagggcggatgtcgcctactgcatccacgcgcttgcccgccgtcttgccaagacccgcaactggattgttgctctgaaagcacttgtagtaatccatagacttcttcgtgagggtgatcctacatttcgagaagagcttcttaactttacacaaagggggcgtattctgcaactttcaaactttaaggatgactccagtccaattgcttgggattgttctgcctgggtgcgcacatatggtttgtttttggaagaaaggttggagtgcttcagagttctgaagtatgatgttgaagctgagcgtttgtccaaacaaggtcaaggtcctgaaaagggtcacagtagaaccagagagttggattcacaggatctgttagagcagctgccagcattgcagcagttactataccgactcgttggatgtcggcctgaaggagctgcaaataataactacctggtgcaatacgctttagctttggtgctaaaagaaagctttaaaatttattgtgcgataaatgatggaattatcaaccttgttgataagttttttgagatgccaagacatgaagcacataaagctcttgaaatatacagaagggggctggccaacaggctgggaatctatctgatttctacgagaattgccgg

SEQ ID NO: 263160 - DNA, 442 bp, Zea mays
gcaggaagccgcagcaaggggacttctccggctgcacgacgcccactggcgggctggacggcgggttcccctgggatctgcaccagctcggcggcaggatgctgcagcactcgagcagcgccaacgagctgctcctacgccgaaagctggaggaacagcagcaggccattgagctccagagccgtcgcctcatgggtcttcagcttctcgaccttaaggctcgcgctgctgctgcagcagcatcgccactgccgacaccaattggcgatgccttcgcgtccagccaacctgtgagcaccaccgcagtcgagtcgccatcgccgccagagtccgggcagcagctgctcaagctttgaggagcggatttgctctggaggggaaggtcaacggtggtgataaggaggaatctggtcgcgaggcgagcccaaacgccgatgatagc

SEQ ID NO: 263161 - DNA, 794 bp, Zea mays
  unsure (1)..(794): unsure at all n locations
aatttgtgtgatattgataatgttttccacacgtattttgcatattatagtgatgtttgttgttccgtatcaatgtttcatagaaatcttttacttccatcgcaacgcacgtgcacatatctatactatatattgntaacaagggccaagtaagttctgcaccgagcatttaaatttcacttcaattacttcataatcttttatctggtgcatgataataaaactatttaatttttaacaatttgttgtaggcattgcttatggattgtggggaatggaaccactctgttcaacagcaattctgtttggcaaaatattgtcaaggacacaagggatagaggttgttttttaaatgccactgatgagaaggagttgttgaatgcaattttcaagcttgctgttgagtatcctcacgcggacaatttagctggcgaggagacaaggcagcgattgagtaccaggatgagtctattcaatgtcgctgaggcaacaattacaagatcctagaagaaaacccgtggcagctctacactacaataagggtgataaatatgtctcgcccaatggaagatatcatatttagacatgatcaaggtagcaagatgttgaccccatgggtccttttggtggaataatgatagagtgcggcaccaatcaacctattgagaaagtgcttgcagctgaagatgcagcgcgaggactgctgcagcattcgaacagtgccaacgagctgctcttgcgccggaagctggaggagcagcagcaggctgccgaacttcagcacgccattgagc

SEQ ID NO: 263162 - DNA, 449 bp, Zea mays
gaacaagtccggtctgtccagaaatacattagaaaaaagagccaaagaggagaacaccggccggcgaggtggacgaagcggcccgccgaggaaatggcgtcgatgcagagctggcgcaaggcctacggcgccatcaaggacaccaccaccgttagcatcgccaatctcaactccgacttcaaggatctggatgtggcgatcgtgaaggcgactaaccacgtggagtgcccgcctaaggagcgacacctgcgcagggttgttgcggcgacgtccatcaccaggcctcgggcagatgtcgcctactgcatccacgcgcttgcccgccgtcttgccaagacccgcaactggatcgttgctctaaaagcacttgtagtgatccatagacttcttcgcgagggtgatcctacatttcgagaagagcttctcaactttacacagaggggacggat

SEQ ID NO: 263163 - DNA, 555 bp, Zea mays
tcatatttaattgaaccacgaaatgtcaatacattatttgagaattcattatgctggtgcatcggaccagataatatcaactagtgttttgccttagcctgcaattagctttacttgttggtcctcatcatcattcatatttcatttcactaaaggaaatgataaggcagactgggattcctgcaatctttacggacttctgtgaagaagctgcacatctagcatcctgctgcataagctccataactggtcaaccccttaaaattccaatccaggtaaatcctttcaggcagccagttgcagcggaaaacaatgcattatacgtaccatgttattcaaattgctttgtttttgggatgtaaaattgccctgtcaccaggaagtatatttagagattgatttgtcaagaaatggaatgtgaattttcaaagaagacaagggtgccattccttgacaaatcaatctcccatcaccaggcctagggcggatgtcgcctactgcatccacgcgcttgcccgccgtcttgccaagacccgcaactggattgttgctctg

SEQ ID NO: 263164 - DNA, 500 bp, Zea mays
cgtcgtgcgcatcccctaccagcagaagcgcatgttcgggttcgtcaccttcgtctacccagagacggtgaagctcatcctggccaagggcaacccgcacttcatctgcgacgcacgcgtgctcgtcaagccgtataaggagaagggcaaggtccccgacaagtacaggaagcagcagcaaggggatttctccggctgcacgacgcccactggcgggctggacgcccgagatccctttgatctgcaccaactcggcgcgaggatgctgcagcattcgaacagcgccaacgagctgctgttgcgccggaagctggaggagcagcagcaggctgccgaactgcagcacgccattgagctccagagccgccgcctcatggcgtctccagctgctcgacctcgaggctcgcgcactgcgacagcatcggcactgccaacaccagttgccaatgccttcgcgtccagccatcctttgagcaccatggcagtcgagtcgccactag

SEQ ID NO: 263165 - DNA, 442 bp, Zea mays
ggctggaccgcgccgtcttggcgagcttggtgaacccgggctcgcgccagatttacctcaccttcccggcagacagcaccttccgcgaggaggacgtgtccaactacttcagcatctacggccccgtccacgacgtgcgcatcccgtaccagcagaagcgcatgttcgggttcgtcaccttcgtgtacccggagacggtgaagctgatcctggccaagggcaacccgcacttcatctgcgacgcgcgcgtgctcgtgaagccctacaaggagaagggcaaggtccccgacaagtacaggaagcagcagctgcaaggcgagagggcggtggatttcttctccaacgggttagacggcagagaaaaccacattggatctgcaccagctgggtaaggcattatcatctgttgcaaaatgacatggagtgtttgaggactgatgct

SEQ ID NO: 263166 - DNA, 367 bp, Zea mays
gatatattgaaggattccgttccacaacttatttttgccccaaatgcgggtgtggctgcatatcctagttggatgccaactattgaaatgataaggcagactgggattcctgcaatctttacggacttctgtgaagaagctgcacatctagcatcctgctgcataagctccataactggtcaaccccttaaaattccaatccaggtaaatcctttcaggcagccagttgcagcggaaaacaatgcattatacgtaccatgttattcaaattgctttgtttttgggatgtaaaattgccctgtcgaccaggaagtatatttagagattgatttgtcaagacatggaatgtgaattttcaaagaagaca

SEQ ID NO: 263167 - DNA, 394 bp, Zea mays
aggcacttagctttggtggcggtaatggtgcaagccgagctgttgctggaagcagccgtgtaggaggcggccttggtacacctacaggccttggtggatcacaggggggcacaaattatgatggcaagggtacatatattgtattcaatgctgctgatacactattcatcagtgatctcaattcccaggagaaggatccactaaagtccatccatttcagcaactcaaacccactgtgccatgcattcgacccagaggccaaagagggacacgacctgatcattgggatgggatcaggggatgtctattcaatgtcgctgaggcaacagttacaagatcctggaagaaaacccgtggcagctctacattacaataagggtgataaagatgtctc

SEQ ID NO: 263168 - DNA, 382 bp, Zea mays
caaaaagcagcctgccctgttcattttctctctcctcccgtcggcgaaattttatacgccagcaaaaccgccctgtggaggaaatagagaaaaaaaacccgaatcatacggccagaaatattagacagacagaaaggaagaggagaatagcggcgaggacgaagtggcccgcccaggaaatggcgtcgatgcagagctggcgcaaggcccacggcgccatcaaggacaccacaaccgttagcctcgccaacctcaactcggacttcaaggatctggatgtggcgatcgtgaaggcgactcatcacgtggagtgcccacccaaggagcgacacctgcgaaaggttgttgccgcgacatccatcgccaggcctagggcggatgt

SEQ ID NO: 263169 - DNA, 775 bp, Zea mays
cggacgcgtggggccgccgccacctgctgcagcttctcaaccggataggtagcaccggagcaggtagaacgctgcacaatccccttcgccgccgccaagatggtgaacgttcctaagaccaagaagacgtactgcaagaacaaagagtgcaagaagcacacactccacaaggtgactcagtataagaagggcaaggatagcctgtctgcccagggaaagcgccgttatgaccgcaagcagtcaggatatggtggtcagaccaagcctgtcttccacaagaaggccaagaccaccaagaagattgttctgaagctgcagtgccagagctgcaagcactactcacagcacgccatcaagagatgcaagcattttgagattggtggagacaagaagggcaagggcacatctcttttctaagtttctcatcccccatctcgatgttggatcgaagctgtgggtctactactgttctaaaaactcgtcaaatttcaatgttactagtagttctgaaagcaggtcatgctgtgtatcaaattccaatgcctgacatttgcgctgagtgtgggttgtcttttggctaaatgaagttttgcaccctgaatcttcattgaatgtgttgtgtgtttgtttgattttgttctgcgattgccttagtctaaagcttgatcacaccgaggatggtttatgtaatgtaactggctgaatggaatcccacagttcgctcactgaattgttggagatgatattgcatatgaaataaatccatcgattttgt

SEQ ID NO: 263170 - DNA, 736 bp, Zea mays
acgcgtccgcccacgcgtccgccgacgcgtgggagcctctctacctctacctaccggagcagggagcacgccgcacgagccctttccgccgccgccaaaatggtgaacgttcctaagaccaagaagacctactgcaagaacaaggagtgcaagaagcacactctccacaaggttactcagtacaagaagggtaaggatagcctgtctgcccagggaaagcgccgttatgaccgcaagcagtcaggatatggtggccagaccaagcctgtcttccacaagaaggccaagaccaccaagaaaatcgtgttgaagctgcagtgccagagctgcaagcactactcacagcacgcaaattaagaggtgcaagcattttgagattggtggagacaagaagggcaaggggacatctctcttcgaaggttcggatcgcccatctcgatgttggatcgaagctatgggtctactactgttctaaaaactcgtcaaatttcaatgttactagtagttctgaaagcaggtcatgctgtgtatcaaattccaatgcctgacatttgcgctgagtgtgggttgtcttttggctaaatgaagttttgcaccctgaatcttcattgaatgtgttgtgtgtttgtttgaaaaaaaaaaaaaattttaaaaaaaaagtattgggtacaacttataataacaatcaatctaaaaaaaatggggggcggccgttctagaggatccaagcttactt

SEQ ID NO: 263171 - DNA, 447 bp, Zea mays
gcgggccgtacgccaccacggcaacggataagaggactttcagctgcgacggcggacctgcgcaacaacagggatgggggatggacgaacaaacagtgcaagaagcacacactccacaaggtgactcagtataagaagggcaaggatagcctgtctgcccagggaaagcgccgttatgaccgcatgcagtcaggatatggtggtcagacctagcctgtcttccacaagatggccatgtccaccaagaactttgttctgaagctcctttgccagagctgctagcactacttcacagcacgccacctacagatgcatgcattttccgcttatgctggttacaataaaggcaatgtcacatctcttttctaaacttcatgttcacctgattggttgttgagttgaagctgtgggtctactactactggtataaaaacattgtttcaaaat

SEQ ID NO: 263172 - DNA, 362 bp, Zea mays
acgcgtccgcccacgcgtccgcccacgcgtccgggagcagggagcacgccgcacgagccccttccgccgccgccaagatggtgaacgttcctaagaccaagaagacctactgcaagaacaaggagtgcaagaagcacactctccacaaggtgactcagtacaagaagggcaaggatagcctgtctgcccaggggaagcgccgttatggtggtcagaccaagcctgtcttccacaagaaggccaagaccaccaagaagattgttctgaagctgcagtgccaaagctgcaagcactacttcacagacgccatcaagagtgcaagcatttgagatggtggagacaagaggcaaggcacatccttt

SEQ ID NO: 263173 - DNA, 1468 bp, Zea mays
attcccggtcgacgcacgcgtccgtaaggatgcctttgtcctctgccgtgtttctaaaagaaatgactggtcattagataatggtaatggggtgggcaacaggagctctcatctggaacaaccagatgctgctacatcagttgtcagcactgtaaagccagaagatgttgctgcctcagtcatctgtccagaagaatcgaaccatgcaactacaccaattggcagtgctgaactatctaatgatgttgctcaggcagctatcactcctgcagctatcactcctgattcaacaactccaaatggtggtaatgaactggaaacatggctgcaagaactgttggatccttcacctccatttaaccttgtagctgatactggttctgctgacgtgtgtccgactgaacaatatgctgaatcatcaaatttgcagaatcctggttccatggctccgaatatcagaccaggccatgctagccctatccaggatggaacagatgccacagactacctattcacagatgatcttcccgaggatctttacagtatgttgtatcctggtactgaccagttcaatgatagcatatttttggaacaaactggccaggaaggtaataacaatcagacaaactacatgatggggattggttcatatgttcttccaaacaactttgagaatgaaactccgaatgtcgaattgcagttagatcatgaaaataacaagatggatatgtcaaatgaaaatattgacaccggaattacaatacgaaggcgcagagcaactgcgcctcccgctaacatttcactagcagctggcaagattaaaatgcaggttggaattaagaggatggttacgagtaattcagaatctatcaaccagactatgaagtttacagataacagtggtcgtcgtcttgatctcaggactgatgttgagcaccagaagaaaaatgcaaacaatgtcatttctgccaagcagtctgatgcagccaatcatgaagcccacagcaaccaaggttatctcgagggcttcaaaagtatgttcatcagctggattcagggcatacatatttgttccccttcttgtggttggagttgctgctctagtgctgcattatcaccgctccaatgccaacctatgaatttgaatcatggaacatcagcatgcttgattgtagctctagtggtcagtggcagcattggcttcgtccttggagtagttcgctagctttgcttgcattggactggaatagaaatcgagttcctcggcttatctcactgggattactggaaatacatttttgcgaccactgattcccagttatctccacttgtttttttttgtggtgctgcacatattaagttatttctctcttcttttgatcgtctagttgctaccaacgggtgcctatcgaaaatcgaaaaagagaaaaagagggaaaagggttggtcgtatgaacaaaaaagatgt

SEQ ID NO: 263174 - DNA, 993 bp, Zea mays
  unsure (1)..(993): unsure at all n locations
aagacgaggcagttgacaactattctgatggcttccccttcgatggctttgaagaagactatgcttatgatgaagatgagtttgaggatgatggttatgacactccactcattgaaagtgagtttcaatttggtttgtctgccaagtttgataacttcaatgttctacatggtctggaggcttctttaccgtggaagcagaagactgctattgagattgcaaataagaccaaacctagtaaggctgtagatgataaaatcgaagaaaaatacaaggccttcaaacgatttgatactgttgatgatcatagtgatcattattattcaaagccagaatcaagaaaggttcaggcggtaaaaaagccatcaaaagactgggtcaaacgtattcagcatgagtggaaagtcttagagaaagatttgccagatactatatttgtgagggcatatgaggatagaatggacctgcttagagctgtcattatgggaccagctggtactccttaccatgacgggctcttcttctttgacatttacttccctcctcagtatccaaatataccaccgatggtgaattaccgtgctggtggtttgcggcttaatccaaacttgtatgcttgcgggaaggtgtgccttagcctcctaaacacgtggactggcagtggatgtgagaagtggaacccggccaattcaactatgctgcaggtcctggtctctattcaagctttggttttgaatgcaaagccttatttcaatgagcctggctacgctatgcatgctaacacagcccacggggagaagaaatccctgacatataatgaagacacgttcctgcactcctgcaggacgatgctgtattctcttcgaaatccaccaaagaatttcgaggattttgttgctggccatttccgcaagtatgggcgcaacatcctcgtggcttgcagagcctacctggagggtgcccaggttggatgcctctncggtgacggagtgc

SEQ ID NO: 263175 - DNA, 955 bp, Zea mays
  unsure (1)..(955): unsure at all n locations
attttaagcgtggctagagctagagacgcggaggggacgttaggaggggcccactgaacccacacagcgcgaggaagcgggaaggacgaccgtgttcccgattcccgttccaccatgccaccgtgacaccgtctctctctctctgtcggtcctccgctccgccgctttaaaaccaaagccgaaccactgctccgcccactgcatcccggctccgtcgtcgcgtgccatcctagggtttctttccccgtcggcgcctccccagatttggccgccgccgccgctgacccaggttgtcttgatggcgcccgctgtagaagccgtgaaggagacaggcaccttccagaaggttcctgccttgaacgaaaggatactgtcatccatgtccaggaggtctgttgctgcacacccttggcatgatctggagataggtcctggtgctccaaccatattcaactgcgtcattgagataccaaggggcagcaaggttaaatatgaacttgacaagaaaactggactgatcaaggtggaccgtgtgctgtattcatcagttgtttaccctcacaactatggattcattcctcgcacgctttgtgaagacagtgatcctttggatgtactggttataatgcaggagcctgttatcccaggctgtttcctacgtgcgaaggccatcggccttatgccgatgattgatcagggagaggcagatgacaagatcattgcagtgtgcgctgatgatcccgagtacaggcattacaatgatatcaaggagctcccacctcaccgcttggctgaaatcaggcgcttcttcgaggactacaagaagaatgagaacaaggaggttgctgtgaacgactntctaccagcgagcgccgcttatgaagccatacagcactctatggatctgtatgctacatacatcngtgagggcctgangaggtaagattctgatggc

SEQ ID NO: 263176 - DNA, 1312 bp, Zea mays
catttttctacgaggcacatcgccaccgtgttccgagagcagaacacaattgaagatccaataacgaattatgtatcacaaaagcgaatgaatattacgataccaatcacgtacaacatatataggcagtcaggccagaaaataatatttcgccaaccttgttactagcttcacctactaccgactccgactccccaggggatttcggtctttgattgagggttcactactagcagtatacacgacacaaataaaataataacggtactcgttccatgcggtaaatggtctcccagtttttcgtcaacatcctccccacctttcctagccatcagaatcctacctcctcaggccctcaacgatgtatgtagcatacaggtccatagagtgctgtatggcttcataagcggcgctcgctggtagaaagtcattcacagcaacctccttgttctcattcttcttgtagtcctcgaagaagcgcctgatttcagccaagcggtgaggtgggagctccttgatatcattgtaatgcctgtactcgggatcatcagcgcacactgcaatgatcttgtcatctgcctctccctgatcaatcatcggcataaggccgatggccttcgcacgtaggaaacagcctgggataacaggctcctgcattataaccagtacatccaaaggatcactgtcttcacaaagcgtgcgaggaatgaatccatagttgtgagggtaaacaactgatgaatacagcacacggtccaccttgagcagtccagttttcttgtcaagtccatatttaaccttgctgccccttggtatctcaatgacctggcataggaataggagtcgcttctatgagtctttcttaagcatttgagcatgcatcagaaagtgccaaggagcagaggaacatgggtgacacaaacagttcatgtgttcacaggcattgattttagagtccagggagactttttattttccaatagaacaaaagacatcatgctattaacatgaacatatcacaagaggaccagtcaagcatgacagggtggccttacgcagttgaatatggttggagcaccaggacctatctccagatcatgccaagggtgtgcagcaacagacctcctggacatggatgacagtatcctttcgttcaaggcaggaaccttctggaaggtgcctgtctccttcacggcttctacagcgggcgccatcaagacaacctgggtcagcggcggcggcggccaaatctggggaggcgccgacggggaaagaaaccctaggatggcacgcgacgacggagccctcgagc

SEQ ID NO: 263177 - DNA, 738 bp, Zea mays
cgacccacgcggactccccgtcttcgcctcctcagatttaatttttacgccgccgcctcctctgacccgtgtttttgtgatatttcccgctgtagaagccgttaattatacatgctctttccataaggttccttccttgaactaaaggatactgtcatccatgtccagtaggtctgttgctgcacacccttggcatgatctgtagataggtcctgttgctccaaccatattcaactgcgtcattgatataccaatgtgcagcaaggttaaatatgaacttgacaagaaaactggactgatcaatgtggaccgtttgctgtattcttcagttgtttaccctcacaactatggattcattcctcgcacgctttgtgaagacagtgatgctttggatgtaaatgttataatgcaggtatgcttcttttgtatatatatcattgggattcacgaaatggtacatcagtagtgatctgagtatccttgggcataagttgagctaattttcaaatcttgtcattttccatttctgggaatggtcgagaacatgtctataaactgttacttccaagcatgtaggagccagtcattttccatttctgtttatagttgcctagtcgggaacatgtatgtaaactgttacttccgtgcatgcaggagcctgttatcccaggctggttcctacgtgcgaaggcccaacgccctatgccgatgattgaacaaggagaggcagatgacaag

SEQ ID NO: 263178 - DNA, 307 bp, Zea mays
gaattcccggctcgacccactcatcctcccacacgacctctgacacctccgctcctattcaccacgcccccatacttcacagccttcgcctatctaccgagctggtggttatcactctcattcttaccaactttcattaccataagaccaaattcttatcgacactgtcagaatcacctccaaaccctgataactcactgcgcaacatacctaactttcccaccttatccacagttacctaccttccatccttgccgctgcatcatcaacaattcaaactgtaatctgcttgagctccaaggtctcc

SEQ ID NO: 263179 - DNA, 797 bp, Zea mays
gatcgaccgcactcgtcgcacgcggacgagttctccaagctccgcgccgcgcacgacgccgtcgtcctccacaactgccacggcgacaccgagctgctgaagatgaaggacaggctggcggaggtggaggaggagaagacgaagctcgtcgcggcggcggcggcggcggccggcggcgcagcgggcgcagggagcagcagcccgagctcgtcgtcgttctcgacggtgacgcaccacccggccgcggcgctgcaggtggggcacttcggcgtggagccggaggaggccgccgacctcgcctacatgaccgagtacgcctacaacagctacatgaacatgatggacctcgcgcccggctacttcggcggagtcgtctacgactacgaccacttcaactgatccacgagcatgcaggaggaggaggaggaagctacaagacgaaggaaggaaggattgactggcctatcagctaggtactattttcgtgttaatggatggatggaccgatttgcagggctcgcgtagcagtagtagcaatcaaggtcactagtatagtctgtcagtacgacgacgtcgatcagtcaatgtcctcctgacgataattattaagtcgatctattcagtagtaacttgttaagccatgtagattagtagcagctggtaatctttgtaaatgtgtgtggattatcatgcaagtgcgcgcttatcatgatcgaaccagtgggctctgcgatgtaatattgggagggggtcggggggttattcggattcacaagatgcatgcttgtagatgcttt

SEQ ID NO: 263180 - DNA, 848 bp, Zea mays
tgaaaaaaccttcagggcatgctgaccctgagaaacatgataatggtgctcttgctgataatacggttggcgagaagacctccgttgagaatgattctacaaaagctattgcagttcctgaggaggccaatttgggtagcagttctggcaacaactgcaagttaggagtggatgtgaatacaatgccagctattacagataaaagtgagccttttttcatgtctaaaggttggagggagacactatgcaggtgtgaaacatgcatcaacttctatgcacaacgaggtattgcatatcttattgacaaggaggattctattgaggaatacgagaagattgccaagcagaagagggagatgaaactggagcagcagcaaggagctgagacaaattttctgaattcacttaatcatgttcagaagatagagatgataagtggcatcaatgacatgaagaatgagtttcagtcctttctggagtccttcgatgcatcaaaaccggtaacatctgatgatatacattcattcttcgagaatcttgctaagaagaagaaacagaggttatcttagcttttgtgaccgcatcggaccccacctgaggcaatcgttctgctggacagaggtcctagtttgttgggctagtaaatgtaatgttatcttaggtggtacttactaatcgggccagtaatgttgaattctagctggaacgcggtaatgtttgatgcaccgaagtcgcttgcagtaggttccgatggcccaagccaccaaaaacttgtttgctccatgaacctcgcaatcctgttaggtgataatataatatacattgtgttgccaccgtgcttttttctt

SEQ ID NO: 263181 - DNA, 478 bp, Zea mays
gggatttcaaggaagcagacaaagggctctttttggtgcaagcagaaattcggacaggccaatggcaaggcagagatggtgaaactgggacaacaggcatcgcttagggatatttccggttcccagtcccttttttttgttctgaaaagatgggcaaaataagtcgttacttatttgtttgtcgtgtttgcttggtctagaagattgttgaggatggagataactccacatgaagttattggtttgtcaactctatgccgtaggatgttttgcgtttccctttttgccatctaccatgtcaaaacgatatcttagcaacctccgatactaactgttatgcttactggattccagttcagcatatgtcactagtcgattatttgtgcactgagcagtggaaaccttggatttgcaaaaacccacgcgtccgcccacgcgtccgcccacgcgtccgcccacgcgtccgcccacgagacaa

SEQ ID NO: 263182 - DNA, 1481 bp, Zea mays
ctttccttcgtcgcttccgcaatcttccattcctcctctctccttccctgtgtctctctcctcgcgagctcttcatcccttcttccagcgcggtttggcgatggcggcagcgcaggcgatctcgaaggggagcgtggtgtctccatgcggcaatcgagcggcgccgggcttccttgccaggcggaggggtgccgtggcggcgcggatggcaccgtcagcggcgcggatcgggggcttctggaggaagaacgcgtttcctggcgggaggctaaccctgaggacgaggagatccagggccgcgtcaccgacgcagatgaacatgaaccttgcgcttgggaaatcgatgaggtggtgggagaaggggttgcagcccaacatgcgtgagatcgagtccgcccaagaccttgtcgatgctttgaccaacgccggcgacaggctcgtcgtcgtcgacttcttctctcctggctgcggcggctgccgtgcttttcaccccaagatttgtcaatttgcggagcagaatccagatgtgctgttcttgcaagtgaactacgaggagcacaagtctatgtgccacagccttcatgtccatgtcctacccttgttcagattctacaggggagcacagggacgactctgtagcttcagttgtacaaacgcaactattaagaagttcaaggatgcacttgcgaacacaagccagatagatgtagccttggcccaaccagggggctagaggaatcggagttattagccttggcagcaaacaaggacctgcagttcacctacgccaaggaggaaccagaactgacccccaggggagatgctcctggggaggtcgttgctcccgagcctgcaaagcttcctgcggctccaaagcctttggtcaggctggggtccgaggagaggtcaggctggtctcgtcaggaagatgaaatgcatatgaggttatcatgaggatgattagatgcttccgttctgtatagttccgcggttcttggtgtgtacaggttgtagcttcccatggtagcagagtgcaggctaagattttttacatgtgaagcctgcccgcctgtcgtccagtagtttagctcggttggattagcagtaccaatgagcggtgttgtggagctctgccttgaggaaatcgtgtggtagatgtatggatgattcgtctacatgctatttcgtcgaattctgtagatcaagtggatgtgtagctcttgtttcatttcccctgtagcgttgggatctgtccgtcgcagaacagaataatcgatcatgccttatgttgtgccagatattgtggtgcttagagatcattgtttgttgtgataatattcgagtccgtgactagtttccttatgttgtatcagacactgtggtgatcattgttgtgataacatttgagttttgtggctagttcctgccttgccttcgggccagccaacggccgattgagaaaaaaaaaaaaaaaaaaaaga

SEQ ID NO: 263183 - DNA, 505 bp, Zea mays
cgccacctcgctgccacgtgccgggacgcgtgggcgaccgtggctcctctctcctggcgccgtgatccctcttgtgtctcctggcgagctcttcataccgtcttcgagcgcgatttggcgatggcggcggcgcaggtggtcgcgaaggggagcgtggtgtcgccgtgcggcaatcgagcggtgccgggcctcctgggcaggcggagggatgccgtggcggcgcagatgacgccgtcggcggtgcggatcgggggctcctggaggaagaacgcgtttcctggcgtgaggctagccttggggacgaggagatccaggcccgcgtcccggagtttctccgcctcgccggtgcagatgaacatgaaccttgcgattgggaaatcaatgaggtggtgggaagagggggtttgcagcccaacatgcgtgagatcgagtccgcccaagaccttgtagattccttaaccaaacgccgcgagaggctcgtcgtcgtcgacttcttctcccctgc

SEQ ID NO: 263184 - DNA, 356 bp, Zea mays
ttccttggtcgacccactcgtcgcgatgcactccaaccaggcctcttaagttagagttagcttatatcccgaattacatgtactggtagcatgggaaggttctaatgagttctgctttgtttttcaattattatatagttaatatttgtggtgatggatatgttcacgcatttgctgtttacagaaaagcaggtggttacaccaacagataatgaactgatagttgttggagatggtcattcaggtaccatatctggtcgtgcagctggtaacgaccttattagaccatttgatgttgctgttgttgtacccacttgagcttgaccccttttcatggttcacatcaaaatgattat

SEQ ID NO: 263185 - DNA, 966 bp, Zea mays
gatgggatggctgtcttacgatataccagttttcttatatagtaattcattcagtttgacataatttgtgtttgtgtgctctctagccattgctgagacatttttttgctcccatgttttaaatttacagcctccttctgagaaggtgcatcagataattgcaaggacagccttatttgtcagcgagcacgggggacaatcagagattgtattgagggtgaaacaaggagagaatccaacatttggattcttgatgcctgaccatcatctccacagctacttccgctaccttgttgatcatcctcaactgctgaaggatggtgctgatgctgttggcacgaataaaggcaatactgagagtgagcatgcttcatctggcggggctttatcattgcttgggaccacatatgactcaggagacgagaatgaaggcacactcccgcgtagttcggaaggcatgaatcctgaaaatagcacgactcttgatgtgcagggccatgtaaaatctgcatcaattatgcctgtcaaaaaagaaataggcaaaaatcagaatgctcctcctcctgcagttaaaagaaaaacaatattgatgaagaagaatccgattcttactggcaacagcatggttgctgttcagcatgaaaaggttaatgacgcatttttagcatcaagtacttccaaatcacataccaattcaggcttatcagaaattaaagaaatgatccttgaaccaccatctttcatgaaacgcacaatggagaaaataattgagttcattctgacaaatgggaaggagttcgagaaaaaactgattgagcaagacagaacaactgggaggtttccatttcttctgtcttctaatccataccactcatattatctaaagtttctccaggaaacttgagaagtccaatcacatgggagaaagtcttaatacaagggacagaaaaggtttttctgaccgga

SEQ ID NO: 263186 - DNA, 346 bp, Zea mays
cggacgcgtgggattcaccatggactacctgtacccgctctcggcgtgccaggccttcgggatctgtctgaccagcttggaccccaagccagcgtgcgaataactgaaggtagcataaaagctggggtgggtatgttcgtcctgagcgacgtgaatttcttgatcttgccatgggggcctgtgcccaggcgaaatggtcgcttgtgatggggggtgtgaagatgagctatggcatttgtaccataggaacagatttgaacgaactggactgttatatgtatcgttgttgggatgtctggctgtgaaatatcactgccgcatcgtatcaataatggtcgttgtggct

SEQ ID NO: 263187 - DNA, 786 bp, Zea mays
cccacgcgtccgcccacgcgtccgcccacgcgtccggccagacagggctcccacaggccatcaccacaacacacaaagacagctcagagcaactcacacacaggctcctctcccccgttgcgcaacgcgctttcccccacttcacccgcctcggcgccatggctaagctcgcgctggcgctcctcctcctgctggccgtggcggcgtccgcgtcggccagcagcgggagccacctggatctcgacctgggcttcctctcctctggggaccgccggagggagtgccgcgggacggtggccgagtgcctcgccgaggagtcggatgaggagggccttgacctggccggatcccaccgccgcgcgctctacggcggcgggtacatcagctacggcgcgctgcggcgggacaacgtgccctgctcccgccgcggcgccagctactacaactgccgcccgggcggccaggccaacccctaccaccgcggctgctcccgcatcacccgctgccgcggctgaggcggcgccggatccgccagactgccgaggaaaggtctggtccaggtcccggccctttcgccgacaataatttctttcgccttgttcgttcaggcgctaccgccaccgccaccgctgtttactatagcaccagacctacggattgaattgttgtatggatttgtttggccaaatctttgttctgttgtaaagtaaggggagggattcctgcccctgcgcctgcttaaaatacttatatgaacatatcagtctttcttgttttttttctctc

SEQ ID NO: 263188 - DNA, 549 bp, Zea mays
  unsure (1)..(549): unsure at all n locations
gcgaggcnagaaggacagctcagagctcagacacaggctcctctcccccgttgcgcaacgcgtttcccccacttcacccgcctcggcgccatggctaagctcgcgctggcgctggcgctcctcctcctgctggccgtggcggcgtccgcgtcggccagcagcgaggagccaccgtggatctcgacctgggcttcctctccgctggggaccgccggtgggagtgccgcgggacggtggccgagtgcctcgccgacgagtcggatgaggagggccttgacctggccggatcccaccgccgcgcgctctacggcggcgggtacatcacccgcggcgccagctactacaactgccgccccggcggccaggccaacccctaccaccgcggctgctcccgcatcacccgctgccgcggctgaggcggctccggatccgcccgactgccgaggaaaggtctggttggtcaaggtcccggccctttcgccgacaataatttctttcgccttgttcgttcaggcgctaccggcacccttaccgtcactgctgtttact

SEQ ID NO: 263189 - DNA, 866 bp, Zea mays
cttcagactagtctagcaagctagctcctcacggaacctgcgctccgatccgccacctctcttatctgaaaacctccagagtccagcctcccttccgattccacctccaagctcccagtcccagccatggcgtctcatgatcatcaccactcccactcccacgacgaccaccaccaccattcccacggggacggcggtggccatgcggctgggggatcgtgggtaggggaggacggacgcgtgtggcactcccacgacggcctcgcgccccactcccacgagcccatctactcccccggcgacttcaccaagcgcgcgccgccgctcgcctcgcgcgacttcgctgaccgcgccttcaccgtcggcattggcggccccgtaggcaccgggaaaactgccctcatgctagcattgtgcagatttctacgcgacaagtatagtcttgcagctgtcacaaatgatatattcacaaaagaagatggagaattcttaattaaacatggagcgctccctgaagaacgtatacgtgcagtggaaactggaggctgccctcatgcggctattcgcgaagacatcagcataaatcttggtcctctggaggagctatcgaacttgtacaaagctgatttgctactctgtgaatctggaggagataacttggcagctaacttcagcagagaattagcagactacataatctacattatcgatgtctctggtggggacaagataccaagaaaaggtggccctgggataacccaggccgatctgttggtgcgtcgtgctgtattcaccagcatcatctataaccttgtgcacttaacttcatttgtagctctgcaaacttattttgacttttgcacact

SEQ ID NO: 263190 - DNA, 629 bp, Zea mays
aggagctatcgaacttgtacaaagctgatttgctactctgtgaatctggaggagataacttggcagctaacttcagcagagaattagcagactacataatctacattatcgatgtctctggtggggacaagataccaagaaaaggtggccctgggataacccaggccgatctgttggtaataaacaagacagacctagcacctgctgttggagctgatctgtctgtaatggagcgagacgcacttcgcatgcgcgaaggagggccctttgtgtttgcacaggtgaaacatggagtgggcgtggaggggatcgtgaaccatattctgcaggcgtgggagatcgcgactggtaataagcggcgataagatctcacgacttggggccatatgttggatgcagatttgattcagtcggcacttccacatgcatgtgtcatctgttcgtttctcaataaattctgcgtcatttgctgctgattgtacttgacaagtagagacatggatggactcttaaaattccatccatgtgttaaatgacatattcgagacatccttttctcaataaactctgcatcatttggtgaattgcacttgagaaaaaagggcggcagctcgcgatctagaactagt

SEQ ID NO: 263191 - DNA, 515 bp, Zea mays
ggtggtggttcgtttctgatctctgagagtccgccccccctaaacaccgcttgggctatcccgaaccctaaccccgaccgccgcgccagctactcccgtttcgtcctcgcggcattcgcggcgttttctccctctgctcgaaccgcgccgacgagcgacgacaagagctgctctattcttcaaaacaaatggcgaccgttccagttaacccaaaaccttttctgaacaacctgacaggaaagcctgttattgtcaaactcaagtggggtatggagtacaagggttatcttgcttctgtggactcatatatgaatctccagcttgccaacactgaggagtacattgatggtcaattctctggaaacctgggagagattctgatcaggtgcaacaacgtcatgtatctccgaggcgttccagaggatgcagagatagaggatgcagagtgagaagatgtgaatgtaatttgattctgacatgtatgtttgaatatgccggtgacaactagacctatc

SEQ ID NO: 263192 - DNA, 671 bp, Zea mays
gcttgggctctcctaaaccctaatcgtgaccgccgcgccacgccagcaactgaagtttcgtcctcgcggccttctctccgtccactcgaaccgcgccgacgagcgacgacaaccgttgctgcattcttcaatggcgactgtgccagttaacccaaaacctttcctgaacaacctgacggggaagcctgtaattgtcaaactcaagtggggtatggagtacaagggttatcttgcttctgtggactcatatatgaatctccagcttgccaacactgaggagtacattgatggtcaattctctggaaacctgggagagattctgatcaggtgcaacaacgtcatgtatctccgaggcgttccagaggatgcagagatagaggatgcagagtgagaagatgcgatcaatgttagattgataaatgtaatatggttctgacatctatgttcgaatatgccggtgacaagtagatctatcggatcgctttgttctcttgagtgatgaaacatgatggcggtcgggctaagggtgaagctgctttcagttagactatgctgtcattctgctgaatgtatatcagatttcttgaacaattcttcttgcctcattgcctactatcacggattaagttatatcaggggaaattgaccggctctttttttttcccgttgag

SEQ ID NO: 263193 - DNA, 800 bp, Zea mays
cccacgcgtccgcccacgcgtccgcccacgcggcggtagcaatcagctcatctgtcagcgccacaggtgaccggaaaaccacggccggcgttcctgcttctctacccggtccgaattgctgaccggatcaacccgagaccttgcaggattatcgatctgattgcggcatgatccgcttcatcctgctgcagaaccggcaggggaagactcgactggccaagtattacgtcccgctcgaggactcggaaaagcacaaggttgaatacgaggtacaccggctcgtggtcaatcgggaccctaagttcaccaacttcgtcgagtttcgcacacacaaagttatctataggagatatgctggactgtttttttcaatatgtgtggacataactgataatgaattggcatacttggaatgcattcacttgtttgtcgagatattggaccatttctttagcaatgtttgtgagctcgatttagtgtttaattttcacaaggtttacctgatactagatgaatttattcttgctggggagctgcaagaaacaagcaaaaaggcaataattgagcgaatgggtgaactggagaagctggaatgacgaagaccaggaagatgctgccgcgtgtgttgtattccaatttgtattattcgtttcaggtgttttacatttgctctcctggttcgttccggctgacagcgtgatgcccatgctgtcactcgaaagaatggtagtagtagctagcatgagtttggtgcccagttacattataaacgtaccttcgaaaaataataatttcccagc

SEQ ID NO: 263194 - DNA, 1398 bp, Zea mays
cgggacaccgttgcattcagctaactcaccatttgtcccatctccatctcctcctgttgccccatcaccggtcccactggattcggataaaccactctccaacctatcttcactcactagtgctgggcaggctggacatcagcaaacatctcttgcacctcaaacacaatctatagccgttaacacaccaggtatatcagcgtcacccttgcttgcagaattcacaagtgctgatggaagtccggccaatgtaccaactcaagttccagccaaatcaagcgcacagaaaggcctctggaccgtttgcttaaagcattgcgaacaacacagcgtgagtccctaagtgctgcagtcagcgatattggatctgtcgtgagtatgattgacaggattgctggatcagcgcctggtaatggttctagagctgctgtaggagaagatcttgtcgctatgacaaagtgccgcttacaagccaggaacttcataactcatgacgggagtggtgcatcaaagaaaatgaagcgggacacgagtgctatgcctcttaatgtgtcatcagctggaagcgtgaatgatagcttgaagcaatcatatggtgttggtactccagagctacaatcaactgcaacctcacgtgtcaagtggcaaagggctgaggtaaaccatgctctgatggaggagattcaggagataaaccaacagcttatagatacagagctccatgtctctgaggatgatgctgagtccttcactacatctgaggggggcaaagggacggtcattagatgcacattcactgctgttgctgtttgccccagcttgaaatccgtgtttgcgtcagcgcagatgagtccaattttgccgttgaggttgcttgttcctgctagctacccgaaatgctccccggtgcttctagacaagtttcctgatgaacaatgcaggaactcagacgacctgtctaccaaggccaagacaaagttcagcgtattgctccggggtctagctgagcccatgtcactgcgagaaatcgcaaggacatgggatgcttgcgctcgcaaagtgatcacagagtatgcccagcaaaccggaggaggcagtttcagctcgagctatggttgctgggaaagctgcgtaggcgcttgttaattgcttatattgtatctattattattattataagtatttatgtgtcgagtaaaatagaaaaaaaaacagtgtgtctgctgtatactccatccttttgctattgggtcaatgttggcttgataaatatggtcgtgtacagtacagtgtatgcgtcagtccggttagtatcatgtatgctttgcctctatttacagaacttggttttataactttttttcgtcaccttttatatctaaatattttttaatagtc

SEQ ID NO: 263195 - DNA, 386 bp, Zea mays
agtcaaagttcagtgtgttgctccggggtctagctgagcccatgtcattgcgagaaatcgcaaggacgtgggatgcttgcgcccggaaagtgattgcagagtatgcccagcaaactggaggaggcagtttcagctcgagctatggttgctgggaaagctgcgttggcgcttcataagtttattgtatctattactccgtagtatatttattattctttattacactaagcatttatgtgttgagcaaaagaaaataacagtttatcttccttttggtatcgagtccctgttagcttgataaataagatcgtgtacagtacagtgtatggagcaagcttgggtgcttcagcccggttaatatttacccccttgtatgctttgcctct

SEQ ID NO: 263196 - DNA, 1404 bp, Zea mays
aaattagtttaatttacaccccaatttatttcaatatatgtggcttgggattaatactagagtacacaaacaaagacttggtctgaggtaggggtgtaggctttatcggacccctctttttctctctcttaattcaaagatacacaactctcctgggtattatagaaaaaatgcacaaatattgcacatttgcacccactgctcaatagttgtccgctttcatagcgtgctaggaaaaagacttggaaaagacatgggaaaagtatcaaatgtggtgaagaagatgactcaggagcagatcttagcatttgaaaaaagtggagaggtttcattcttcggccattgcttgaagctagatgatatcaaggttgtccgacaattcaagcgtcctgaaaatgtgtcagagaaggagattgatgctgcaggagatggtgatgttttagtcattttggatctacgaaccgaccagtcattgtttgaagctggagtggctcgagaggttgtgaacaggatccaaaaattacggaagactgctcagcttgaacctgctgatccagttgatgtgtattacgaatctgtgggcagtgacaaaaacacactggaagagattttgaagtcacaggatcagtatattagggacgcacttggttcaccaattatgccaaaagaaatggcaccaacagatgtcgtagtacttggcgaggaatcgcacaacgtacatgacatgtcatttgtcatatgcatcgcaaggtccaccccaattatttcaccagatcttctttctcatgcctcaggcaacagcaatcatgtcgaggcgttgagagtatatcttctgtcaaaatctctatccagattgaagaaccagttccaaagtggaaatggcgtgattacggtcgactgcatcgaaggttatccactaatcaggttacagctaggaaagcatgtttttctaagtgcaggggatttttatctggctagtcgatcctaatttttgtgtgcagcatcccaattttgactgattcacccatcattttgccgcaatcggcttaaacagcttggttccatttatgcattcagattcacttgttaaaggtgaaaaatcccaatttatgatataccatggtactctccgttctttttttatttgtcgtgttttagttcaaaaatgaactagccggtgacaaatatttttttttattttgtcgtgttttagttcaaaaataattagccggtgacaaatattcgagtaagctataggttcccatacccctagtgaattatgagtagataacatgtatgtttgtaatctcttgggtgtttggtttttgaggattgatgtggtccatcagattttgatgaatgaaaacaaaaaaaaaaaaaaaaaaagggcggccgcccggtaat

SEQ ID NO: 263197 - DNA, 499 bp, Zea mays
ttaaatttgcggaaggtatcaagtaaatctgaggagagcattcacttctgcaagttcccttccacaactggtgagagagatgagcgtgttgagcaaagtgtaaggaggatggtgaccatcattgatcttgcacgtaatattcgtgagcggcataacaaagctctcaaaacaccactcaaggagatggtggttgtgcatccagacaatgactttcttgaagacataactggtaaactaaaagagtatgtcatggaggaaatcaatgttaagactgtcactccatgcaatgaccccttgatgtatgcttctctgcgagctgaacctaatttcagggtgctgggaaaaagacttggaaaggacatgggcaaagtatcaaatgtggtgaagaagatgactcaggaacagatcttagacttcgaaaaaagtggagagatttcattcttcggtcattgcttgaagctagatgatattaaggttgtccgacaattcaagcgttctg

SEQ ID NO: 263198 - DNA, 513 bp, Zea mays
gcatctgtagcgctcgtcttcgatgccccagcaccgctacgcgccgcacttcgcccccttctctccctctcatgccgctggttgatctctcgtcatctcctcctccaagcacggatcttctcgtcgtctcctccaagcacggatcaggagcactgaaattctatctcaaccggttctgccgactgggtaacttgaattctaaagatgaggcatggtttggaagtcttccaagaagcagtcgtacccatgctgatatgaacagagatgaattggaagtttgttgctgcagccttaagcaagagtggtaatacttttgacacaacaaggtctatggtactcatatctgaatcagagaaagctaacctaaaggatagggcaaggaggctcctttctaagcctatcaagtttttcaatgagatgcaagagttgtttattaacagcagtgctgatggctctctagccatggaagctacaacttgtatgaatgaaactcatcctagagatgacagtgac

SEQ ID NO: 263199 - DNA, 470 bp, Zea mays
ctggggcgctcgttttcgatgccccagcaccgctacgcgccgcacttcgcccccttctctcgctctcatgccgctggttgatctctcgtcagcgccccctccaagcacggatcttctcgtcgtctcctccaagcacggatcacgagcactgaaattctgtctcagccggttctgccgactgggtagcttgaattctaaaggttgatccaagcaggaggtgaatgtgtgatcgttggttattttgcatttcttctaggttgatgcatgaccgttcatggagaacgctggtggttgtgatagctatcacacactctcttggttaataattagatactctttttgtcgagcaatgtgaacctttaatggtgtttatgggtctcgtcgagttgtgatggcgctattatgaagatgctatggccctgctatggatgatgggacattgtatgggctctatatataaatctgtaagt

SEQ ID NO: 263200 - DNA, 942 bp, Zea mays
gttcgagacaccaagtataaagtttcttttcagcgttaagcaactaactgaggaggacaagtctgcctggtcagaacttgtggtttctctgaagtcagaatatccgaagtacacacctttgctttctaagattttgcaatgtgtcctccagaaaggaactgatggtgataagattagccatgaaaaagaggttattgctgcagccgatgaggttgtgggcagtattgataaagaggaactggctaagtatttatctctaaattcagatcctgaagatgaagaagcacagaaattcaagaaaaaaatagaagaaacgcgagatcagttggctgatgcactatatcaaaagtgtcttgcattggctgagattgaatcactgaagtctgatgagtcaattgaggtatctgctaaagatatttttgaggagaattacaaagaattgattaaatgggttgatgtcaaatctgcaaaatatggcacttcgactgttttgcgtgaaaaacgctgtggaagacctggtacagcattgaagattctaaatgatttgattcaaaatgaatctgaaccaaagaaaaagctttatgatttgaagatccagttgattgaggagatgggatggaaccatgtctcaacctacgaaaaacagtggatgcaagtccgctttcccccatgtctgccaccattttgattgtgaactcatttttacaatggctctatcatcctgggttcagtagttgtcattttcattgctgggtgcgtcagttcattatttcgatggcaaacagccaactaggcaagctactggatttgtgcgtttggggacacagttattccatagttattttgtggtacaatatcaggggagtcctttctccaaggagataagacggaacagagatattttgatggacttgaaggagattttatcctcttcaatcctag

SEQ ID NO: 263201 - DNA, 352 bp, Zea mays
gttttgcgtgaaaaacgctgtggaagacctggtacagcattgaagattctaaatgatttgattcaaaatgaatctgaaccaaagaaaaagctttatgatttgaagatccagttgattgaggagatgggatggaaccatgtctccccctccgaaaaacagtggatgcaagtccgctttcccccaagtctgcccccattttgattgtgaactcatttttacaatggctctatcatcctgggttcagtagttgtcattttgattgctgggggcgccagttcattatttcgatggcatttgcttactctgcagttttctcttaaataataatataaaacagccccctaggccagct

SEQ ID NO: 263202 - DNA, 2101 bp, Zea mays
cgccgaggcagtagggtccaccctcaccatggagcgcgtcgccgccgcgaagaagttcatcgagagcaactaccgctcgcagatgaagaacatccaagagcgcaaggagaggcgctttagattggagagacagctagcttcttctcaagttcccaaggagcagcaaatcgatttaataaaagatcttgagaggaaggaaactgaatacatgcgacttaaaaggcacaaaatttgtgtggatgactttgagctgctcactattattgggagaggagcttttggagaggttcgattgtgtcgagagaagacctctggcaacatttatgcaatgaaaaaactcaagaagtctgatatggttgtcaggggccaagtggaacatgttagagctgaaagaaacttgttggcggaagttgctagtcactgcattgtgaagctttactattctttccaagacaccgagtatctttacctaattatggagtacctccctggtggtgatatcatgacccttctcatgagagaggataccttgactgaacatgtagcgcgattctacattgctgagacaattcttgctatccaatccatccataaacataactacatccacagagatattaagcctgataatttgcttctagataaaaatggtcacatgaagctgtcagattttgggctgtgcaagccaattgactgctcaaagctctcaacgttgaatgaagatgaacccatgggtgatgacaacatgagggaatcaatggatattgatagttctttgtccaatacagcaaatggtagaagatggagaagtcaacacgaacagcttcagcactggcagatgaacagaagaaaactggcattctcaactgtcgggacaccggattatattgctccagaggttctgctgaagaagggatatggaatggaatgtgattggtggtctctaggcgcgatcatgtatgagatgctagttgggtatccaccattttatgccgatgatccaataactacatgccgaaagattgtgcactggagaaaccatttgaagtttcctgaggatgcaaagttgtcaaatgaagcaagagatctcatttgccggttattatgtgatgttgaccacaggattggcagtgcaggggcagatcaaataaaggcacatccttggttccaaggagttgcatgggataaactttatgaaatggaagcagcatttaagcctcaagtaaatgatgaactggatacacagaatttcatgaaatttgaggaactggaaaatcctccagccaaaacaggctctgggccttcaagaaagatgatgctgaactccaaagatctgagctttgtggggtatacatacaaaaactttgatgcagtgaaagcaataaaaatttcagatctgcaaaggaattcatctctaacaaggccttccattggttcgatattcggtccaccaggcatggattctcccatggaaccaaacggaagggacacacacatgcacacagtttcatctggtgacccaatgattccctaaccttcagtgccgtctgtcctcagcaaatttccgaactaaatcagcgtgcaaacgccagggtgatgtggctccagctggacaacatgcttatttttagccaggtctctgctctctttatcgtgggcaagcggtttgtagaaatccaccaaagtttctagttgtaaaatagtatgccacagacttcaacaaaggtcccatgcattattggctcatcagacatgggggcagtttttttttggagaaattgcaccttgcggctggctgcccaggttggcagagcaaattgcggccttctcttgtggcagttcccggtctgcaggaaagggaaatacgacggtgttgttgcagcaggaattctcatggttagtgtcgttgttggtgtttgatatgtatcaggaattttcacatttgaagtagggtttctgttagcagagttgtagctattgacaagcaacatcctttcacggagttgctttttttcgttgatgtatggaaaacgagacattgtagaaatcgaagttcgatctagccttgtatgctgcttaagaaaaaaaaaaaagtgaaaaa

SEQ ID NO: 263203 - DNA, 774 bp, Zea mays
gcgtcaaatctttatattgagcatgaaaatgatggcaatggtacaccatgacacaagtcttgttttattccaactcgccgtcaagaacatgaaagtgagcacagtggtacaccaagaacacaagttttctgttttattctaaaacatggccaagaacatggaactgatcgcacaatgatacactagaacacaacaccgtcaggaacgtgaaagtgagcacagacagtggtacagtagtaggaagacaagtcgagcacgatggacagagtaggcatcacccaacagatcgatcgtcatgagctcagaaggattttatgagatcaaccaaatcggttaaatccgtgcggggcgacgcagtttcgtcgacgtcgacgccgatgccgatgcctttggccgcagcgatcttgaattccttcatcctctccttgatctcctccccttccttggtgccaaagagcctgtcgatggcggccttgacctggcctctctccagctgttcccccacgagctccgtgcctaccttccacacgtcgcacacgtacctcatgttgccgaactggtccccgtgccgcgggcagcagaccatgggcacgccctccgagatggcctcgacggtggagttccagccgttgtgggtgaggaagccgccgacggccgggtgcgcgagcacctcctcctgcggcgcccaggtgacgacgatgccgcggccgcgcacctcgtcctccaccccgtcgggcagcgcgccggactcgaagccgcggatgagatatgggc

SEQ ID NO: 263204 - DNA, 445 bp, Zea mays
acctgcgcgacatcagtgaccgcctgctccggatcaccggcgtcgtagagcacggcatgttcctgggcatggccaccaccgtcatcgtcgccaacaaggacggcacggtgtcagtcatggacaggaagaagtagcagtagtaatctacaagcagtagcctgttcttcgaaacagcgatcgcctgatcaccggcatgttccttgacgtggccaccaccaccatcgtcgctgccaacagcgacgacaagaagtactaataattttgcaagtagcctgtgtctgtgcaacacccagcgtactcttatctaagttggagttgtatcgtgtccgtgcgttatcctcatatgctgagtgtctgcaggagtatgttaatcatcatcctggtgttattatcgtaccttgctaccagtgactctcatgctatttattaaacaagctaattttgc

SEQ ID NO: 263205 - DNA, 744 bp, Zea mays
cccacgcgtccgggggcgggatgaaataatcgacgctctccgtgacggtcagacagaacgcgacactgtacgtcctggagaagctttcgcggctccacatctccaaggaagaagagtccaccatcttgaggttctccggggaccccgacaggctcgcccccacggaggccttcctcctccgcctcctcctcgacgtgcccaatccgatcgcgcgcgtcaatgcgctgcttttcaaggtgaactatggtgcggaggtcgcgcacctcaagcactcgcttcggacgttggaattggcgagccaggagctgaggacaaagggcctgttctttaagctgcttgaggcagtgctcaaggcgggaaacaggatgaatgccggaacgcacgtggcaacgctcaggccttcaaccttacggcgctccgcaagctctctgacgtgaagagcactgatgggagcaccacgttgctgcacttcgtcgtcgaggaagtcgtccgctccgagggtaagcggctcgccatcaatcgcaactacagcatccgccgctcgggcagtctcgcgaggtctggccacgagggaggcagctcggcagcaggcttcgcaagccaggggccatcgcgggaggaaaggcagagcgaatacatgaacctggggctaccaattgttggaggtctcagcacagagttcgccaacgtgaagagggccgcactggtcgactacgacgcagttgtcagcgagtgcgccattct

SEQ ID NO: 263206 - DNA, 512 bp, Zea mays
gacaatcaatcctatgcattgcatcttgctgaacggagaaagaacagcaatgcggaagttgggtccaacacagcagtaccccaagatccgagttttgatgatatacagcgtgaccgggagtgcgtcatgtgcttgagtgaggagatgtccgtggtgttcctcccctgcgcccaccaggtcgtctgtgccaaatgcagcgacctccatgagaagcaaggtatgaaggaatgcccttcgtgccgggcccccatccagcgcagggtgcgcgcccgccccgccggttgctagatttcacatataccatttggattttacttttcttctttttttcaccttgattgctcagcttaagttgatggaagattggagggaataatcaggtggtgtgagtggttgaaactgtgacaataatacatcgttaaacaccaaacaagccccaccagacagtggggcctggtttggtttgttataaggctaaaccggccccttctgaaagctttggttttgctgcc

SEQ ID NO: 263207 - DNA, 641 bp, Zea mays
  unsure (1)..(641): unsure at all n locations
ctcatcgcgtccggccagcactgccacagcatttgtccattccagcgcggcggcggcgggggcgcagccgcggcgcggtaccacagcgcggcggccgtcgcgctggcggagcggatgtattcgtcgtcgacgacggcgtcgttcatcccagcagcgcggcagcagctcttcagcttgccgccgttgcacccgcagagctccccgccgtcctcggagacgacgccgccgtcggtcgttagctcggtgactactacttcttttcagcgtgctaacgacggcgacgagctgtggcggacaggcacaggctacggctccggggtgtccgtggcgcagtcgccgtcaacgccaccatcagtgcctccgccggtcgtttcggttcagaaggcggcgctgctggacgacatggtgccccatggtggaaggcatggcaccccatgatcgatggtggcaaaatatggcaatttaatatatatacctgtcggccgtaccagcaagaggcggataaagtgatcaaccagctagcagctagggttttctcctgctggattcatcagtagtagttagatttatctattactctcccagncggtgcatgcccccatatactcaaaatataccaacagatttgcttatattcaaaa

SEQ ID NO: 263208 - DNA, 1074 bp, Zea mays
  unsure (1)..(1074): unsure at all n locations
accggtcccgaatttccttttngcttaagcgttcggccctgcgtccgtccacgcgttcgcccacgcgtgcgggagtcttcagtcgtcagggatcagaagatactgcacgccggcctccttcagtgaaagcttctctgtcagtttcctttggacagcgtgctccacatcgggcttccaccagggattcatctccagttcgtcgaacagtcacccgtgatggtcatcgaagttcatactcaccatctcgtcgtagtggtagccgtgagggtcctgatcatgaccgttctgaccgggaactggatcattctagtcgtgaccgtgacagagcccgggatcgttcaaaccgggatcggtatcattcaagccgagaccttgaccgtgacaaggatgccagagattatcatcggcatgagcgtgatagcagggatcgtgagtactacaggtccaggcattcagaagaaagacgggacgacagaagagatcatgaaagtagcaggcacaggcgctctagctctcgccacaggagcaggagtaggagccgaagctggggccggagcaggagcaggagaagccgcagccgaagcacgagcaggaggagcctgaatgagcagcgatccagcccattcagggatgcaaataaagagaaggcagccaccgtgtcgagcaacctagcaaagctgaaggacttgtacggtgacataactgcaaagaaggaagacagtgatgctgaaaagcttcaccgtgattcatgcgctgaggaggtcatcaggctgggaggccctcgatggaggtaactttgagacctgtagaactctggtttccgctttgttctgccagcctctctgtaggccttcttgaaaatgctctttatgttcccaaacttgatagagtcgactggtacttcggtatcttgacttgttgtcgcctgacatttgccattaatgtatgttgtttggtatgttattcctaagaattcctatgacattggaacgtactgtataaaccgtggtatccgagcttcatgtttgcttgatgcttatgcaaattgaaggttgaataagtgtcagtttcacc

SEQ ID NO: 263209 - DNA, 635 bp, Zea mays
tctttggatggacttgtggctgaattccttggtcctaggacacggggatgacaaagtgtgcgagaagttcatagtgtaccagtctgtgctttggagttattggtttcttgtatcttcggtatgttgcagacccaaaggttctttggatgtggtatgagccctatttgagggatgatgaggagttctcccccggatctaatggccgcaagacagccatgggtgtttatgtgcgtgatcttatacttggacagtactactttgatagtcttctaccaagaattcctctcccagtaactcgtcagattacagccaatcttgaaaagatgaaattgcccactaagctttctggggcaactggagactccagtcgtcagggatcagaagatactgcacgccgtcctccttcagtgaaagcttctctgtcaggttcctttggacagcgtgctccacatcgggcttccaccagggattcatctccagttcgtccaacaatcaaccgttaaggtcaacgaagttcaaaatcaacaaccccgtctaattggtacccttgagggtcctgatcatgacggttctgaccgggaactggatcattctagtcgtgaccgtgacagagcccgggatcgttcaaaccggga

SEQ ID NO: 263210 - DNA, 381 bp, Zea mays
atccagcccattcagggatgcaaataaagagaaggcagcctccgtgtcgagcaacctagcaaagctgaaggacttgtacggtggcatacctgcaaagagggtagacagtgatgctgaaaagcttccccgtgattcatgcgctgaggaggtcatcaggctgggaggccctcgatggaggaagtcgcccgcatgattcaaggcacttttggacatccttgtctttgcagtcagcacgggaattgaatcgacatgcagttatggcaaggctgcattgctgaatcgaggtcgcaactcataatgccttatataagtgttggtaactagttcagacaaacaacttgttgggaaaataatgaaacatatttgataagggtacgattg

SEQ ID NO: 263211 - DNA, 2101 bp, Zea mays
tccacgcgtccgcttttcccccggttttttccggcctctcctcactcgtgtccgatggctcgcccccgccgcctcctctgacgacggtctgactgacccccgcctccccggagagcggctccgctgtctcgccggatatggcgccgcctcgtccccctcctaacccggcgggggagcagcagccgcagctccacggggtggtcatcatcacgctccctcccgcggaccagccctccaagggcaagaccgtcaccgccttcgcctacaccaacgaccccccgccccctcgctcgcccccggatccggttatggggtacccggcggcgacggaggctaggcggcggccgaggcgggcgctctcgacgcggcgggtggcgaccgcggcgctcgtgctgggcgcgctcgcggccgccgcctactattgcttttactcggccgtggccgtgcagttcctggggatggagcaggaggaggagcagaggaacgagaccaggtctttcctgctgccgctctaccccaaggcgcgtcagggccgcgcactgcgcgagttcggggacgtcaagctcgccgccaggagggtcgacgacggcggaagaaaggctaggaacaggatggaggtcgcgaaggcggccacggcgaggaccaattccacggcgttgctcccgatcaagggcaatgtcttccccgatggccagtattacacatctatctttattggcaaccctccaagaccatactttcttgatgttgatactggaagcgacttgacgtggatccagtgtgatgcaccatgtacaaactgcgcaaagggaccacatcctctatataagccagcaaaagaaaagattgtccctcctagagacttgttgtgccaagaattgcaaggcaaccagaactactgcgaaacctgcaagcagtgtgactatgaaattgaatacgcagaccaaagctcctctatgggtgtccttgcaagggatgatatgcatatgatcgcaaccaatggtggaagggaaaaattagattttgtctttgggtgtgcatatgatcagcaaggccagcttttatcttcaccagctaagactgatgggatccttggacttagcagtgcggcgataagctttcccagtcagctggctagtcacgggattattgccaacgtttttggccattgtatcactagagagcaaggtggtggaggatatatgtttctgggagatgattatgtacctagatggggagtaacatggacttctattcgaagtggtccagataacttatatcacacacaagcccaccatgtaaaatatggggatcagcaactccgggcgcctgaacaggcaggaagcactgttcaagtaatttttgacagtggaagctcctatacgtacctcccaaatgaaatatatgaaaaccttgttgcagcaatcaaatatgcgtctcccggctttgtccaagacccttcagatcggacattacctttatgctggaaagctgatttccctgtgaggtatctggaagatgtcaagcagttcttcgagcccttgaaccttcacttcgggaagaaatggcttttcatgtctaaaacattcactatttctcctgaggattacttgattattagtgataaaggaaatgtctgtcttgggcttctcaacggaacggagattaatcatgggtcaactatcatagtaggagatgtttctctgcgcggcaagttggttgtgtacgacaatcagcggaagcagattggatgggcagattcagactgcaccaaacctcaatcacaaaagggctttcctttcttcctctgacgaagcatcactctctacataatacatgtgtaaagcgtaaatagtgaacgccattgtattgtagaatacattattaagtggagactgcctttgtgtatgggtatatcgttccattggaactgtcagaaatcctccactgtgttgtacccgtctgtaatgtgtatactatgttgtttacttgtatgatgtatgtacactatctcctctacatggagttgtcccctacacatggattttttgtagattagttacattatgaacattttcgccagcagttgggtacttttccc

SEQ ID NO: 263212 - DNA, 997 bp, Zea mays
cgttctcaagcggtgacgcgtgggaaacgtccgagggtctctccggccctgatagcggtatatccctgactcctcaacatatattccattataatgcatacatgctgcaatctcttcttccatccgcttttctataagatcggaaacacactatttcttccctgcataaggtcctacatatgagtgccatgtggctcagcagcagaaggcagagtcgtgacctaaagccagccaaggatctgcagatgttgattgccgcatctccacgtctactcaatgtgggggatccttcctttggcaaatccttggtggcaagcaagaaaaggctggttggagatgtggaagagcaacttgagccagataaaaacgatgatggggtgcaagcaacgcagcagcagctagagctcacaaaagagaacactgaagcaagagcttcaacatgttccaccttccaagagcttcaacatgttctgctccggtggctcaagaggcaagcgtcgcacccgccccgattttgattccaaggacgaatacaacattcccgccggactagcgatcaccgtacctcctgtgcctcgaggtggagccgcccgtctgcgactcgcgcagaccacatctaacgcgtgtggcgctcgtccggctcacgggcaagcaccccttcaacttagaaccttcggtgtcgtggctgatggcgcacgacttcatcaccccggcaccgcaccactaccactactggaaaaatatcggctagaaaccgaagttcttactctaatagatcaacgttcttatgtaaagttgtttcgataggtcttatctaatacctgtaatgtacaatgggcagtttgatgttcataatgtaaagttgaacgttggactgtacccctgcaaaaaggccatcagtatcaaataaatatgtaagctactaacccctacaacttttgctctcaggttatctgtgaaatttactgaatggattttattgaaaatccagtcgcct

SEQ ID NO: 263213 - DNA, 469 bp, Zea mays
cactcatcacgccgccactgatctgctctgttgctggtgactaggagcagtagcgagagggattctggatggccaagtcgaagaaccacacggcgcataaccagtcgttcaaggcgcacaagaacggcatcaagaagcccaagcgccaccgccagacctccaccaaggggatggacccgaagtttctgaggaacttgaggtactcaaggaagggcaacaagaagagtggcgaggctgagtccgaggagtaagatgatggtgattgagtttgtggcgacaaatgcatctcttgtatcgctaagagtcttagctgtgaacttagttctcacttctgtgtgactgtgatcaaaggagatccatcagttggtaccgaagtgtattttatgtcttgttggttacctggaatttaattaaaaccatcagttgtatccttttgagaattgggcaattgatgtgtcgttttctgttc

SEQ ID NO: 263214 - DNA, 514 bp, Zea mays
cccacgcgtccgtccacgcgtccgctcatcacgccgccactgatctgctctgttgctggtgactaggagcagtagcgagagggattctggatggccaagtcgaagaaccacacggcgcataaccagtcgttcaaggcgcacaagaacggcatcaagaagcccaagcgccaccgccagacctccaccaaggggatggacccgaagtttctgaggaacttgaggtactcaaggaagggcaacaagaagagtggcgaggctgagtccgaggagtaagatgatggtgattgagtttgtggcgacaaatgcatctcttgtatcgctaagagtcttagctgtgaacttagttctcacttctgtgtgactgtgatcaaaggacttgtgtatgatcaaaggagatccatcagttggtaccgaagtgtattttatgtcttgttggttacctggaatttaattaaaaccatcacttgtatccttttgagaattgggcaattgatgtgtcgttttttgttcaaaa

SEQ ID NO: 263215 - DNA, 481 bp, Zea mays
ctagctcacttaacgccgccgcggagctgctccgcgcccccgacgccggtgattaggagcaggagcaagaggggttcggaatggccaagtctaagaaccacacggcgcataaccagtcgttcaaggcgcacaagaacggcatcaagaagcccaagcgccaccgccagacctccaccaaggggatggaccccaagtttctgaggaacttgaggtactcaaggaagggcaataagaagagttgtgaggctgagtcagaggagtgagatgatgcctgagtttgtggcgacaaatgcatctcttgtatcgttagggtcttagttgtgaacttaattttcacatctgtatgattaaaagagattcatcaattggtactgaagtgttgtttttttgtcttgctgcctatctcgggtgtatctaactaagatcatcagttgtgtccttgagaatcgggcacttaatgtatcattttcggttctctgtg

SEQ ID NO: 263216 - DNA, 476 bp, Zea mays
accggtccggaattcccgggtcgagacgcgcgtccgcccacccatcccactagtttctcgcgagccatcgcttcggcatccggaagaaatggccaagtcgaagaaccacacggcgcacaaccagtcgttcaaggcgcacaagaacggcattaagaaacccaagcgccaccgccagacctccaccaaggggatggaccccaagttcctgaggaacctgaggtattctaggaagggcaacaaaaagagtggtgaggctgaagctgaggagtaggaaggaaagcatggctttgtttcctctgtttttagctcagttccacctttaggacctggggttttgctaaagatggaacttaagtggtgttactgtatgatggcaaggaccttttgctgccgaaggttatgttttgaagttcatgctaccttttaaagtacggattaccttgtgctcaaataataatttattctgttagcctttt

SEQ ID NO: 263217 - DNA, 720 bp, Zea mays
gtttctacttgtgatttgaaaacacatttagtcccagtttgctgctgcggtgtgtatgaattcttgcagctggtatttttcttgtctttgtacagatgatattcataatgtttttgttcatgttggtccagttgatcagtctattattttactagtgttacatggagtttactttgaagttaaacttaattttcatatcaagcgttctcctgctgaggttgaggctgttgctatgatgagacgtaataccttctgagagcagattactgctctatgaacctgggaaatattctttcattatttcctcctgagcggttacctgagcaactgcacaaccttgattcctgttgcgcttcatttaggatgctatttgtattgagatgtagcacaactgttacttttgccaatttttcatctctaacagctgcttgagatgcaccttggtttttgctctacaactgaccctttgcattgaccatgtttgcagatggaccccaagttcctgaggaacctgaggtattcaaggaagggcaacaagaagagtggtgaggctgaggagtaggaaggaaagcatggttgtgtttcctatgttttagctcagttgtaaggtggaacttaggaccttttgctgccgaaatgtttttatgataatcatgttttgaagagttacggtttaaaaaaaaaaaaaaaaaaaaaaagggcggccgctcgcgatctaga

SEQ ID NO: 263218 - DNA, 1359 bp, Zea mays
tgctgctagagatgtctatacatgagagctcacactgcagtacgattcggtaagcgtatacgatggattatgtgatccacatgctgacagcgaacagatattgagaacattgcttttgtagttgagaaaccttgggacaaacatgaaaagagcattgaagatttggctgaaagcactatttctgtccaaggttcatatggaacaaagtttgaagctgtcacaagaagaatcttgagaatcacttcaactgatggaacagctaaagttcttgttttctcaagttggaatgatgtactggacgtactagagcactcccttgctgctaacaacatttcatatgttcggatgaaaggaggaagaaaatcacaggcagcactctcccaattcaagggtcaggagagcaatataaatgtagataaagtgaacagggcagcctgcaaaatgcagcctgttcaagtacttctgatgcttatacagcatggagcaaacggtcttaatctactagaggcacagcatgttattctagtggagccattactaaatcctgctgctgaggcacaagctatcagcaggatccatagagttggacaagacaaaagcacatttgttcaccgttttatagtgaagaaaacaatagaagagagcatctacaaattgaacaggagcagagctgtctgctctactataaaccgtaaatccaaaaacttcaaagatgagcctgttttgacgctgaaggatgtggagtcgctattcccgatggcaggacctgatgaacccctagaacaggcagatcaaaattacggcgatagcttgaggagtttgcctccatctgttgccgctgggttagctgctgaaagaaggcgactaatggagcaataagttaatggagtttgcctccatctgttgccgctgggttagctgctgaaagaaggcgactaatcaagggacctccatccatcgttgtggcagttgtgctaattttacttgatcagaatttctcttcgcagcacagtaacgacagtaggagaatgatgctccttagttatgaagcacccccatcatgagaatcaggctatttacgttgtaactttaggattttttttttatgtacctgtaggccttttagactcttgtacataagcttctagttttagttcgtttatacggcccatcctgtagttttgatgtagcagctctcagctctgccactgctacaccaacttatggcatgtataagtgtactaatacatggtcatcagcatgatacattctttagatgcttggtcaattttttagaagcttggtggttggttgtgccagtagtcattatggtagataattgttggttgtctaattttt

SEQ ID NO: 263219 - DNA, 667 bp, Zea mays
aacacacatgaagtccaaagtttaccatgctcccagattgtggtacctgcggggtaatataatcgaggcccaagatgctgctatattagataagacccgctatccagatgtatttgtgagagcacaggtggggcatcaacttgggaggacaaaacctgtgcaggctagaaattttaaccctttctggaatgaagacattatgtttgtggctgctgaaccatttgaggatcaccttgttctgactcttgaggatcgtgtaggtcctaataaagatgaaatgcttggtcgtgtaatcatacctttggcaatgattgatagacgtgccgatgaccgcattgtccatgggaagctggttcaatctcgagaagcctgttcttgttgatgttgaccaactgaagaaggagaagttctctactcggcttcatctccgtctctgtcttgatggaggttaccatgttcttgacgagtctacaaactacagcagtgacctgagaccaactgccaagcaactctggaagccgtctattggtttgcttgaacttggtgtccttggtgctcaagggattgttcccatgaaaactcgagatggaaaaggttcatcagacacctattgtgttgctaagtatgggtcgaaatgggtaaggacacggacccatcatgacaaccc

SEQ ID NO: 263220 - DNA, 1650 bp, Zea mays
  unsure (1)..(1650): unsure at all n locations
cggaccgtggcgagaccacataccaggccaccaccatctctagaaccttcctcctcgcctccgtctttacctcccccagctcaggcaggaccgcaggagccagacccaaacccacgaaaccctcctgcctcgccgccgcttcctcatcctcccgccgcttagtcccggacccggaccaaccttcgtgaggacgggaattggactaagggggtaggatgccgccaaagaaagcggcgccatcgaaggcggagctggccaagaagcagaaggtcgtggaggacaagaccttcgggctgaagaacaagaataagagcaagaacgtccaaaagtacgtccagtccctgcaccaggccgtccagcccaagcctgactcgaccaagaccgccgccaagaagaagaaggaggaggagaaggcgcgcgagaaggagcttaatgatctgttcaaggttgccgtcagccagcccaaggtccctgttggtgttgatcccaagtcaatattgtgtgagttcttcaaggctggccagtgccagaagggttttaagtgcaaattctctcatgacctgaatgtccagaggaagggtgaaaagattgatatctatacagacaagcgtgatgcagaaaccatggaggactgggatcaggaaactcttgagaaggttgttgaatccaaaaagatggagtatcagcaaaacaaacctaccgatattgtctgcaagtactttcttgatgctgtggagtagaaacagtatggatggttctgggtttgcccaaatggcggcaaagagtgccattacaggcatgcccttccgcctggatacgtactgaaatcacaaatgaaggccttactagaggaagagagtgagaagatagctattgaagatgagattgaagatcagcgtaaaaagacaaagactacaacccctatgacaacggaattgttcatggaatggaagaggaggaaggcagaagaaagagaagctggtcaggctgccttgaaagcagagagggctaagaatgatcgcatgagtggccgtgagttgttcatggctgacgcaagtgtgtttgttgatgatgctgaagcatatgaagtatatgagagagaggagtctgaggccaatgaagaatcgaccaataaaagtcagaatccaggtccaagttcatcaacatctaatggcaaggaggttgaggagcctgacgacgatgatatcgatgttgacgatgacttagacattgatgaattgaatgaacttgaagcaagcctgtcgagaacttccatccaaattcgagagcctggcgagggaacatcatcttgagcagtactacaatggaagattgttgcgaagttgctctccatttttgcgcttccatccgatctagtcgcttttgcaaacaaagaaccgtggagcacagatgcaagtggaatagatctcttagccttgttcactagctatcttgagggagcaacgatcaacaaatgacgaccagtattatgatcacacatgacaattgatgtttgctgtgtgccttattttttttatcttgtgccctttgtgggaaatatgttgctacttgtgaaccccaggactaaacagtttgttagctttccgcagactcaacagaattttgaagtgaacaaaaaaaaaaaanaaa

SEQ ID NO: 263221 - DNA, 444 bp, Zea mays
ggcacctacgacaagatggaggcgctgctgaaccaggacatccaccccgtggacatcctcctcatgctggcagcctccgagggcgaccgccccaagatcgaggagctgctccgcgccggcgccaggttcgacgtcaaggacgtcgacggccggacggcgctcgaccgggccaccgacgagaccagagagttcatcctcggcttcgccgccaagaaggcctgaacgaccatgtgcaggtcgatcgtgcccggttcttctggacatttggctgcatgtaactaaattcttcgttttctggaattggtggagtgttcaaccgggggtgaacaagctgtttgcagaggtagctttccgtagtcagctgtattcttactgaagtctgaggggtgtactgcgacctgccaaattgctcaataaggtcatgcttcgtttaaagctgtcaaa

SEQ ID NO: 263222 - DNA, 515 bp, Zea mays
tcgttacgagcttctctctcacatctcgtactgccgcatcgtcccacacgtccctccgtccatggtctcaccggcgttcccctcccccgctccccccattccccccgcattccgtccgtggtctcatgggacaagacggtgaggctttacgacgctgacgccaacgtgctcaagagggagttcatgcaccctggggccatcctcgactgctgcttccacgacgactcctcaggctttagcgccggagccgaccacaccattcggaggttggtattaagctcgtccaaggaagatgttttggggcggcatgatggtccagttcgttgtgtggaatactcttatgctgcagatacttttatttctatggatttgcttttggatttcttttctagcgtttctttttcttctgcaaggtacttctgcagcctgatgcagctataaatagaacacattgatagctatttttgtacttgaattccaaaaacactatatatagttatgcagttatgcttttg

SEQ ID NO: 263223 - DNA, 1608 bp, Zea mays
ttcccccaactctgctgcttcccgtggccgtggttcaaaattcgaatccagaaagacttccccaagcattttccgtttctttaaaccgtcatcgtcctccctcgtgctagcctcgctcgttgcgcgttcaaatttcgaaccacctccgccttcgacgccccaaaccctagcccgacccctcctcctccacctgcgccaccgcccaccatgagctccgccgccgcgccagctgccgtcggcagcggcaaggagcttgccaacccgcccgccgacggaatcaccaacctccgcttctccaaccacagcaacaacctcctcgtctcctcatgggacaagacggtgcggctctacgacgccgacgccaacgtgctcaagggggagttcatgcaccccggggccgtcctcgactgctgcttccacgacgactcctcgggctttagcgccggtgccgaccacaccgtgcggaggttggtatttagctcgtccaaggaagatgttttggggcggcatgatggtccggttcgttgcgtggaatactcttatgctgcaggtcaagtcatcaccggcagctgggataaaactgtaaaatgctgggatccaagaggagttagtggaccagagcgcacccttgttgggacatatgctcaacctgaacgtgtatattctctttcgttagtaggaaataggttggttgttgcaacagctggaagacatgtaaatatttatgatctgcgcaatatgtctcaacctgagcaaaaaagagactcttctttgaaatatcaaacacgatgtgttcgatgttttcccaacggaacaggatatgctcttagttctgttgaagggcgagtttctatggaattctttgatctatctgagtctgctcaatctaaaaagtatgctttcaagtgtcatcggaagtctgaggccggcagggacaccgtttatcctgtcaatgcaattgctttccatcccatatatggaacatttgccaccggagggtgtgatggatttgtgaatgtgtgggatggcattaacaagaaaagactatatcagtactcgaagtacgcatcaagcatcgctgctctatcattcagtaaggatgggcatctgcttgctgtggcatccagctacacttatgaagagggagaaaaaacgcatgaacctgacgctatatttatccggacagtgaatgaagtcgaggtgaagccgaagcccaaggcattggcagccccccagtagtgctgtgacctgttctggaggctagatgacccgtacttctctgcgttgatgtcaattacattagttgacggagtgcttgtttgtgttgaaagagctgaaacgcctgtgtttcttaatctggaaccctcttctcccgttttacttgtccgtggaaacatttcatgttccagctggttgtatattccgaaacagaccatgttttagttcactcggttcttcgttgacttaagttatttatcaaatatttaagtatcgtacgtaagtttgaaacctggggggaagaactatgctggctttgttgtactgccaatttcaatttaggaaggatgaaattgaagttaaaaaacatctaaaaagctcatctacaag

SEQ ID NO: 263224 - DNA, 1227 bp, Zea mays
gctggtcctcctgcagccgccgcgccgtaattgccgggtccaacgactcctgcgttatgtgcaagcatgaaaccactcatgggcggcttaaaggtattatacgggtagaccgtgaccaacctctccagatcaatgggaagaacgagcgcttgacttgctgcagagagtctgacatgatggcacggatctactagcgcatggactacgagaatggctcttcgggcctcttcacgacctctggtatagcatcagcacacttaaagggtggcgcaaagaaagtggtgatatctgcaccatcagctgatgctcccatgtttgtagttggagttaatgagaatagctatgatccaaagatgaatgttgtttctaatgcaagttgcactaccaactgccttgctccacttgccaaggttgtccatgaggaatttggcatcgtggagggccttatgacaactgttcatgcaacaacagctacccagaagaccgtcgatggtccttcgatgaaggattggagaggaggacgtggtgctgcccaaaacataattcccagctccactggtgcagcaaaggctgttggaaaagtcctgcctgagctgaatggaaaactcactggtatggccttccgagttccaacaccaaatgtctctgttgtggatttgacatgccggattgagaaaagcgcctcctatgatgatgtgaaagcagccatcaagacggcatcagagggtgcactcaaaggtattcttggctacacagacgaggatgttgtttccaatgattttgttggtgattcaaggtcaagcatctttgatgccaaggctggtattggactgagctcttccttcatgaagctcgtgtcttggtatgacaacgagtggggctacagcaaccgggttctggatctgatcgctcacatggctcttgtgagcgccaagcactgatgttcgtactcgttcctccagtaccagtagtagcctagataagaggctgcagttttgacggccattttcttttagctgttgtttggaataaaagaccaaatgttggaacacttggaactcgcgcaaaactggaatccgattcatgacctgtgttttagttgtagagggggcaaatttgcatcgtactatatgcgggattgttgatcggatgtcgtatggttcaaaagaaataaattaaatatatattaattaaattatttttattaattttttatttattttattt

SEQ ID NO: 263225 - DNA, 1172 bp, Zea mays
cggacgcgtgggaagcaaactgcacaggcgcagcaggacgcgagaagagaacgtgaagggccccacgactagccgaacgcagcgcggtcgcacggacaaccgccaccgccacctacccacccgggccggcggggggcgttgcacgttccgctgcgcaggccacttttttttaaaaatattttattacattttcctcttcctttttatacgaacgaggaacgatcacacgcagacacgcttccgcggcgccaccaccttccgccctccgctgcccgctcgcctccgcgcccgaaaggcaaagcctcctcgctcctgccccgccccctcctcgcggcgtcggtcaaaccctagcacaccgtacgcgcaggcccgcccgctcccattccccacctccacccatggcggcgctctccgcgcccctccgcgccgtcgccgccggatcccgcgtcgccgcgtccgaccccgtcaaggtctcgtgcgtgaggagcactggctcagctcacttcggctgcgccttcccctacatcagggcctcctcttcggctgcgaggaacctcgagccgctgagggcgataccacgcaggcgccccctgccatgccacaatattcgagtggggagaagacaaagattggcatcaacgggtttgggcggattggcaggttggtcctgcgaattgcaaccagcagagatgatattgaagttgtggctgtgaatgaccctttcattgatgctaagtacatggcctatatgttcaagtatgattccactcatggcccgtttaaaggttctattcgtgtcgtggatgattcaaccctcgagatcaatgggaagaaggtcacaattacaagcaaaagagatcctgcagagattccatggggtaactttggggctgaatatgttgttgaatcttctggtgtcttcacgacgactgataaagcatcagcacacttaaagggtggtgcaaagaaagtggtgatatctgcaccatcagctgatgctcccatgtttgtagttggagttaatgagaatagctatgatccaaagatgaatgttgtttctaatgcaagttgcactaccaactgccttgctccacttgccaaggttgtccatgaggaatttggcatcgtggagggccttatgacaactgttcatgcaacaacagctacccaga

SEQ ID NO: 263226 - DNA, 484 bp, Zea mays
gtcaagcatatttgatgccaaggctggtatcggactgagctcttctttcatgaagctcgtgtcttggtatgacaacgagtggggctacagcaaccgggttctggatctgatcgcccacatggccctcgtcagcgccgccgccaagctctgacgtccgtgctcggtcctccagtagtagcctacgagaaaggctgcaattttgacggccattttctgctagctgttgtctggaataaagatcaaatgctggaacacttcgaactcgcgcgagactggactcagatccatggcctgtattttagttgtagaagggggcaaatttgcaccgtagtaccatggcatggctatatgcggaactgttgattgatgagtcgttgtacggtttgtcgacttgatgatatgttgatgtgggagcccctgaatgaggcggtattaatggaaatataggatggcaatggcacaaaacaacaaaaaaaggggcggc

SEQ ID NO: 263227 - DNA, 651 bp, Zea mays
  unsure (1)..(651): unsure at all n locations
tggacccacgcatnctaactttacttcttcntgctcacacccccaatgaacaccggatggaggtcactccaaaaactttggctgatgtataaggtggcccactttcttgctctcgcttccggtgacgcccgccacttcctccccgacgagatgacgaaacgcaccaagaaggcaggaatcgttggcaaatatggtaccaggtatggtgccagtttacgtaaacagatcaagaagatggaggtctcgcagcactccaaatacttctgtgagttctgtggcaagtttgccgtgaagaggaaagcagttggtatctggggatgcaaggactgtgggaaggttaaggccggtggcgcctacacaatgaacactgctagtgcggtcactgtgagaagcacaatccggcgcctgcgggagcagaccgaagcatgattgcgggcagcttgaaaaggagtacctggatttttgtagttcagccaagagccgtgaaccattttgcctttttagctaaatgaacaagaaatgtttatctatctgtagtgacccctttggactcatggtttgtcatgctaaattgatggtatgccctatgcaatgccaaaaaaaaaaaaagaatataaaaaaaaaaaaaaaaaaaaaaaaaaaaagggcggc

SEQ ID NO: 263228 - DNA, 601 bp, Zea mays
gttttgaattcccgggtggacgcacgcgttcgtccagacccttacgccttcgctcgcgccgccgccgccgccgccgctacgccccgcacctcgcttcatttcgtgtcgccaagatgacgaagcgcactaagaaggcaggaattgttggcaaatatggaaccaggtatggtgctagcttgcgtaagcaaatcaagaagatggaggtatctcagcattccaagtacttttgcgagttctgtgggaagtttgctgtgaagaggaaagcagttggaatttgggggtgcaaggactgtgggaaggtgaaggctggtggtgcttacaccatgaacactgctagtgcggtcaccgtcaggagcacgatccgccgcctgagggagcagactgaagcatgatatagctctttatattattggggtttcctgtagttgctcttgtcaggcatgttgtgggggccttatctagtggaaatgtggaatcactgtactggctgttttgccgagacaatgctccttatatttggtttatgctctaggatctcaaagttgtgttaaaaaaaaaaaaaaaaaaaaaaaaaaaaaaaaaaaaaaaaaagggcggccgc

SEQ ID NO: 263229 - DNA, 693 bp, Zea mays
gcccgaaatccccgggccgaccgacgcgtacgacaacgcttccgcgaacccatgggtttatcaattttaaccctagcgcgcgccgccacacctgccgggtgctaccgccacgtacctcgcttgctttcccgtcgccgaaatgacgaagcgcaccaagaaggctggaattgttggcaaatatggaaccaggtatggcgctagcttgcgtaagcaaatcaagaagatggaggtatctcagcactccaagtacttctgcgagttttgtgggaagtttgctgtgaagaggaaagcagttggaatttggggatgcaaggactgtgggaaggtcaaggctggcggtgcttacaccatgaacactgctagtgcagtcactgtcaggagcacgattcgtcgcttgagagagcagactgaagcatgatttagcttgctacatcagggttctcctagttgctgttgtcgggaatgttgagctcctctagttggatcacgagactggctaaaagttgggtgctaagatttgtagttggttaccgttgtgaatttctcaagtgatattatcctatgcttgtctcaatgactcaaatttggttgtggtttctatgcttttggctgtgtcaatggtttgccattgttgaaattcaacccttaatgctgcctcttataataaaaagtttttttattggtctggttcag

SEQ ID NO: 263230 - DNA, 600 bp, Zea mays
cccacgcgtccgcccacgcgtccgcccacgtgttcgcccacgcgtccgggcaggaattgttggcaaatatggaaccaggtatggtgctagcttgcgtatgcaaatcaagaagatggaggtatctcagcattccaagtacttttgcgagttctgtgggaagtttgctgtgaagaggaaagcagttggaatttgggggtgcaaggactgtgggaaggtgaaggctggtggtgcttacaccatgaacactgctagtgcggtcaccgtcaggagcacgatccgccgcctgagggagcagactgaagcatgatatagctctttatattattggggtttcctgtagttgctcttgtcaggcatgttgtgggggccttatctagtggaaatgtggaatcactgtactggctgttttgccgagacaatgctccttatatttggtttatgctctaggatctcaaagttgtgttaagatttgcccttggttaccgttctgaatctgacaagtgatatttcatcctatgccatcttgacgtcgaatttggttgtggttttcaaaaaaaaaaaaaaatcaccaacacaaacaagacgaaaaaacagaaaaga

SEQ ID NO: 263231 - DNA, 622 bp, Zea mays
  unsure (1)..(622): unsure at all n locations
acgcgtccgcggacgcgtggggcctcatatatatagtttctctcctgccacttttgcgagcttacccggagcacgccgccgctacagcccgcacctcgtttcctctcccgtctccgagatgacgaagcgaaccaagaaggccggaattgttggcaaatatggaaccaggtatggtgctagcttgcgtaagcaaatcaagaagatggaggtatctcagcactccaagtatttctgtgagttctgtgggaagtttgctgtgaagaggaaagcggttgggatttggggatgcaaggactgtgggaaggtcaaggccggtggtgcttacaccatgaacactgctagtgcggtcactgtcaggagcacgatccgtcgcttgagggagcagactgaagcatgatcggtcgcttgtcaggcatactggggtccactatattggctgtgtagccgagacagtactccagcatttttgggttatgctctaggatctctaaaggttgggtgctaagatttctacttgtttaccgttgtgaatttcacaagtgatatctgatcctattactatcatgatgacgtcaaatttgcttctggtttctaaaaatttttaaaaaataacattttanac

SEQ ID NO: 263232 - DNA, 603 bp, Zea mays
  unsure (1)..(603): unsure at all n locations
gtccgcaatntcaacttcgctcccccggcggcgccggcggcggtaagcccccgaactccccttcatttctggtccccagagtgtcaatccgccctaaaaaggcaggatttgttggcaattatggaaccaggtatggggcaaccttgcttaggcaaatcagtaaaatggaggtatctcacaatccaaagtacttttgcgagttctgtgggaagtttgctgtcaggaggaaagcagtgggaatttggcggtgcaaggactgtgggaaggtgaaggctggtggtgcttacaccatgagcactgctagtgcggtcaccgtcaggagcacgatccgccgcctgagggagcagactgaagcatgatatacctctttatattattggggtttcctgtagttgctcttgtcaagcatgttgtgggggccttatctagtggaaatgtggaatcactgtactgggctgtttgccgagacaatgctccttatatttggtttatgcctttaggacctaaaagtggggtggtgaaaattggccttgggtaccggtcttgattttgccaatggatattgatcctgntgccaaaaaaaaaaaaaaaaaagggcggccg

SEQ ID NO: 263233 - DNA, 444 bp, Zea mays
cgaattccgggtcaccacgcgtccgggacctggtcgtgccgccagaactctggcccagaatctaccgtcgaccagaagagccctacaaaaccctagtagcatccacaattccacataacctcgcccgcgccgcctcccccacgagacgccttcttgctctcgcttccggtgacgcccgccacttcctccccgacgagatgacgaaacgcaccaagaaggcaggaatcgttggcaaatatggtaccaggtatggtgctagcttgcgtaagaaatcaagaagatggaggtatctcagcattccaagtacttttgcgagttctgtgggaagtttgctgtgaagaggaaagcagttggaatttggtggtgaaggctagtgcggtcaccgtcaggagcacgatccgccgcctgagggagcagactgaagcatgatatagctctttatat

SEQ ID NO: 263234 - DNA, 384 bp, Zea mays
ccaatcgccgagaaggggaagccaaatcgatggcggcggcggcggccggcgcgcgcgcgcgccgctagcgccccgcacctcgcttcatttcgtgtcgccaagatgacgaagcgcactaagaaggcaggaattgttggcaaatatggaaccaggtatggtgctagcttgcgtaagcaaatcaagaagatggaggtatctcagcattccaagtacttttgcgagttctgtgggaagtttgctgtgaagaggaaagcagttggaatttgggggtgcaaggactgtgtgatggagaaggctggtagagcttacaccatgaacactgcttgtgcagtcaccggttgagcacagattcttagcatgaggatttgccgatgcatgatatat

SEQ ID NO: 263235 - DNA, 546 bp, Zea mays
ccaatatgagaactaaagttcggaggttatatgacattgccaatgtcctgtcttcactgaatctaattgagaagatacatcaaggggactcgagaaagcctgcgtttcgttggttgggtagggcaacgctgaacacagaaacacgcgtcccagttgctgtgcccccaccagggaagatcgcgatcaaagaaaagagcgtttggaacagaactcactaacattgacatgcatacaagtaatctagattcaaaaaataagaagaaagcaaaacttgtacagagtggtggtgatgtcttgacgaattgcaaattagctgtgcgtagtcggctggggcagtggtaaacaaagtggcttctgtttatggtcctttccacccttctggcgcaaggaaacatggacttgatggcggcaataagcctgggcaaagggagagggctgaggactgggagagcctttctgcttcatttcgaccacagtaccagaaccaagcactcagtgatctatttgtccattatgtcgacgcgtggaagacatggtattctgaat

SEQ ID NO: 263236 - DNA, 1637 bp, Zea mays
cccacgcgtccggtcaagtgtaaagaaagaacaccgataaaactccgtcgaactactccggacgggaagcacctccaatcccctcgcccccacggaccctcgccgccggggaagcgccgctcgctcaggaggacagccatggcgccggagccggaggatgatattatgaacgagaagaatccccgcccgctcgacgaggacgacatcgcgctcctcaaaacctatgggcttgggccgtactcgactagcattaagaaggtcgagaaggagatcaaggaaatggccaagaaaatcaatgacctttgtggtataaaggagtctgatacagggttggctccacctagccagtgggatttggtttcagataaacagatgatgcaagaagaacaaccgttacaagtggcaaggtgtacaaagatcataagccctaatacggatgatgccaaatatgttataaatgtaaaacaaattgcaaagtttgttgttggactgggggataaggtgtctccaactgatatcgaggaagggatgagggtcggtgttgatcgcaacaagtaccagattcaaatccctcttccaccaaaaattgacccaagtgttaccatgatgactgtggaggaaaagccagatgtgacgtacaatgatgttggtggctgcaaggagcagattgagaaaatgcgtgaagttgttgaacttcctatgcttcacccagaaaagtttgtcaagcttggtattgatcctccaaaaggcgtcctttgctatggcccacctggcactggcaagacacttcttgcaagagctgtagcaaatcggactgatgcttgtttcatccgtgtaattggaagtgagttagttcagaagtatgtcggcgaaggtgctcggatggtcagggaacttttccagatggcccgctcaaagaaagcgtgcattgtattcttcgatgaagttgatgctattggtggtgctcgttttgatgatggggtgggtggcgacaatgaggtgcagcgtacaatgttggaaatagtaaaccagcttgatgggtttgatgcaagagggaacatcaaagttctcatggccactaataggcctgatacattggatcctgcacttctgcgtcctggtcgtctggacagaaaggtagaattcgggctacctgacctggagggccgtacccaaattttcaagatccatacacgcaccatgaactgcgagcgagatattcgtttcgagcttctggcacggctctgccccaactctactggagcggatataaggagcgtctgcacagaagccgggatgtatgccattcgtgcccgcaggaaaacggtgacagagaaggattttctcgatgctgtcaataaggtcatcaagggctaccagaaattcagtgcaacacccaagtatatggtgtacaactagtcggcgtgtcttcatgggatctgttgtttctagaaactctggatctttttcatggttgtatcatcatgagattctctatgcaaaggttgttgtttgtttagcaaattggatgccgagtgatttgtgacctgtaccgcatgtttttaagataacaaggttcttcgctcggtggttcaaaaaaaaaaaaaaaaaaaatgagtatttgctttatatacatt

SEQ ID NO: 263237 - DNA, 457 bp, Zea mays
ctagaggcccagccgaaggcatctccaatctcctcgccccccacggacctgaaccgagaacctttaccgccgccgcctctcgcctagccgccggagaagcgccgctcgctcaggaggacagccatggcgccggagccggaggatgatattatgaacgagaagaatccccgcccgctcgacgaggatgacatcgcgctcctcaaaacctatggactggggccgtattcgaccagcattaagaaggtcgagaaggagatcaaggaaatggccaagaaaatcaacgacctctgtgggataaaggagtctgatacagggctggctccacctagccagtgggatttggtttcagataagcagatgatgcaagaagaacaaccgttacaagtagcaagatgtacaaagattataagccctaatacggatgatgccaaatatgttataaatgtaaaacaaattg

SEQ ID NO: 263238 - DNA, 491 bp, Zea mays
tataaaaagcgtgtgcacaaaagccgggatgtatgccattcgtgcccgcaggaaaacggtgacaaagaaggattttctcgatgctgtcaataaggtcatcaagggctaccagaaattcagtgcaacacccaagtatatggtgtacaactagagagtgtcttcatggaatatgttgattttagaactccgggatcttttcggtgattgtgtcatcgtgaggttctatgcaaggattgttgtttgttttgaaatctggatccccagggattgcatcctgtaccacatgtttttaagacaaggttatccgcttggtggttcactgtacctgtggcaattgttgccgacaccgaactgaacataaagtcagaaacaggctacagtgagtgttgaaaaggaagaaatacagtgggtgcctgtttaaataaaaaaaaaaaaaaaaaaaaaacaaaaaaaacaaaacaaaaagaaaaaacagaaaatcgaagcgggcc

SEQ ID NO: 263239 - DNA, 320 bp, Zea mays
ggcatctccaatctcctcgccccccacggacctgaaccgagaaccgttaccgccgccggagaagcgccgctcgctcaggaggacagccatggcgccggagccggacgatgatattatgaacgagaagaatccccgcccgctcgacgaggatgacatcgcgctcctcaaaacctatggactggggccgtattcgactagcattaagaaggtcgagaaggagatcaaggaaatggccaagaaaatcaacgacctctgtgggataaaggagtctgatacagggctggctccacctagccagtgggatttggtttcagataagc

SEQ ID NO: 263240 - DNA, 537 bp, Zea mays
  unsure (1)..(537): unsure at all n locations
cttggagaagaggaaagaaagaggtcgcttggagaagaggaaagaaaaataccgacaagacgagaagtcgaagtacccgttaccgccgccgcctctcgcctagccgccggagaagcgccgctcgctcaggaggacagccatggcgccggagccggaggatgatattatgaacgagaagaatccccgcccgctcgacgtagatgacatcgcgctcctcagaacctatggactggggccgtattcgaccagcattaagaaggtcgttgattntcttcgccatttccttgatctccttctcgaccttcttaatgctggtcgaatacggccccagtccataggttacgaggagatcaaggaaatggccaagaaaatcaacgacctatgtgggataaaggagtctgatacagggctggctccacctagccagtgggatttggtttcagataagcagatgatgtctgaagaacaaccgttacaagtagcaagatgtacaaagattataagccctaatacggatgatgccaaatgttataaatg

SEQ ID NO: 263241 - DNA, 983 bp, Zea mays
ctccaccaccttctgcagggcaccagcagcagtgggcgctccccttcgccggcgccgggcaggtcaggctgccgccgcagcaggcgcctccggatagaaagggccggggcggcgccggtggcggcgtcatggagtctggctccagatccagcggcggggcggggttcgacgacgacgacggcctcacgacgcgccgcgaggtctcctcttcgctccaagatttgacagtaagggtggaccggaagggtgggagctgcagcgatggtggtacggatcagcggccaaacacaccgcggtcaaaacactcggccacagagcagcgcagacgcagcaagatcaatgataggtttcagatacttagggagctgttgccacacagtgatcaaaagagagacaaagcaacatttctcttggagggtattgaatatatacggtttttgcaagagaaggtgcaaaaatatgaggcaacatttccagaatggaaccaagaaaatgcaaagatgcttccatggtcaaatatgtattttcgatcattctggaaaaatgcacagagtaaaggccaaatctcaggagattccccgcctgacccttcacatttcatgagaaatggatcctcccctggatctaatttcactgggaaacttgatgataatcacaacatagtgacatctgcagctgcatcaggggcacaggatcaggcagaaaccgaccacatggctagcggatgctacagatcagcagaaactacggcgaattttacaaataatgctatgtctcagtcccaacctcaatggaccggtccgtcccctgtggatgactctgcagtgaacagtgagacgcttaacaaccagcagttggtgattgatgaaggaacaatcagagtgtccagtaactattcccaagagttgcttaactcgttgactcatgcccttcaaagctcaagtgtagatttgtcccaagccacatctctgtgcagatcaaca

SEQ ID NO: 263242 - DNA, 418 bp, Zea mays
accacggtcaaaacactcggccacagagcagcgcagacgcagcaagatcaatgataggtttcagatacttagggagctgttgccacacaatgatcaaaagagagacaaagcaacatttctcttggaggttattgaatatatacgttttttgcaagagaaagcgcaaaaatacgaggcaacattcccagaatggaaccaagaaaatccaacgatgcttccgtggagtaaaggccaaatcccaggagattccccgcctgacccttcacatttcatgagaaatggatcttcccctggatctaatttcactgggaaacttgatgataatcacaacatagtgacatctgcagctgcatcaggggcacaggatcaggcagaaaccgaccacatggctagcggatgctacagatcagcagaaact

SEQ ID NO: 263243 - DNA, 1198 bp, Zea mays
gtcgtcccgaccttcttttcaatcccgtctcggattcgttccgtctcagctaccgcggcgacgacgccgacgcgagatggcagggaacacagccactcgccgacgagaccccggcgcgcgcgagagaaagagaagagaggaggatcttttgttcgtgaaaaatattggaggcggagggaaggtgaaggagggggatcggagatgaacgtgttccggctggcgggggacatgacccacctcctcagcgtggtagtgctgctcctcaagatccataccatcaagtcctgcgcaggcatatctctgaagacacaggagctgtatgcacttgtttttgcagcacggtacctggacctgtttgttcattttgtgtctctgtataacactgtcatgaagctggtcttcttggcaagttctttctcgatagtttggtacatgaagcggcataagattgtgcggaggacatatgacaaggatcatgacacctttcgccattacgttttagtgttgccttgtcttcttctggctctcctcattaatgagaagtttacttttagagaggtgatgtgggcattctccatttatttggaagctgtcgcgatatttccacaacttgtgttgctacagcggacaaggaatattgacaacctgactggccaatatgtcttcttcttgggtgcctaccgtgtgctttatatccttaactggatttaccgatacttcactgagccccattttgtccactggataagttggatggcaggaatagtgcaaactctgttgtatgctgacttcttcttttattacataatgagctggaagaacaatgtgaagctagagctgccagcttaaggttgctgctcctgtccccaagatatagtagggtaatatatcagataggcaggccccatacacagcatgatcattgctatcgccaactgggttatgaaaaaagcattttagttgcgtggcttgtatcgccttgtatctctctgctattgttggaagaacaggaaagtcaggctcaccatgtaactttttacaataagctgcgtaagatcagcactagaaggttgtgaattgtgatcgtccttagggaattttgtgctgatgtaaccctttcggcaagtgattctcatacaatataatctcagactataattggtaaaaaaacaaaaaaaaaagggcggccgctcgagat

SEQ ID NO: 263244 - DNA, 414 bp, Zea mays
ccgacgcgtgggcggacgcgtgggcggacgcgtgggcgcgaccacgacgccgacgcgagagggcagggaacacagccactcgccgacgagaccccggcgcgcgcgagagaaagagacgagaggaggatcttttgttcgtgaaaaatattggaggcggagggaaggtgaaggagggggatcggagatgaacgtgttccggctggcgggggacatgacccacctcctcagcgtggtagtgctgctcctcaagatccataccatcaagtcctgcgcaggtaacattgctcctgagaagacccatcaaggaggaatatgttgacttgttgaggttgtcctggaatcagcagtgccatctaaaacgccgccaaatctcaccgggaggcataacgaacagcaaaatatagaggaaaacag

SEQ ID NO: 263245 - DNA, 1117 bp, Zea mays
ccgttaagcacactttgatcagttcaatgctgcgtcgtataggtctcgtcggagtttctgtggtcaggcagataggcgtgtagagcttcctatgatggagaggttgacttaagtttgatctgtcggtttgacaataaacttctgggcaagtagtcaactactgcattatcgaattgattttcacatccatcgccatgttgtcttgacttgttcaatagtgccaagttcctttatcaaaaataaaatcgtgccaagctgctaagctctgaaccagtgcaaatctagacgccacaaatttcgatgcatgaataggacttcgaatgtactgagttgaacactattttgtagtattatcctcatggtcatcatggagttggcaaagaggggagacctgtttacattgaaaggcttggaaaggttgaccctagcaaacttatgaatgtcacaacgatggatcgatacgtgcgataccatgtgaaggagtttgagaggagcttcttgattaaatttccagcttgctctcttgctgcaaaaaggcacattgattccagcacgacaattctggatgtccacggcgtgggtttgaaaaatttcagcaaaactgcacgcgaattaattcagcgactgcagaaaattgacaatgataactacccagagactctataccaaatgtttattgtcaatgctggtccgggcttccggctactatggaacactgtgaagtccttccttgatcccaaaactaccgccaagatacatgttcttgggaacaaataccaaagtaagctgcttgaaacaattgacgctagtgaattgccagaattccttggtggcacttgtacctgtcctgaatacggaggttgccttaaggctgaaaagggaccatggaaggacatgcgagggagtggcacatcaactgctgtgtctggctcaaaagaaggtgatgatgctgtctccgtacaagctctcacaagctacacatcacatcctaagttgacccgagttcgtgaagaggcttgtgatgctacatgaaagagagagcaaccactaaaggcaccattcgatccccaagtttaagctcttcaaggtgaggtctgttcaatttggctagaaaggc

SEQ ID NO: 263246 - DNA, 1164 bp, Zea mays
cctttcttgatcccaaaactaccgccaagatacatgttcttgggaacaaataccaaagtaagctgcttgaaacaattgacgctagtgaattgccagaattccttggtggcacttgtacctgtcctgaatacggaggttgccttaaggctgaaaagggaccgtggaaggacccaaacatacttaagatagtccaaagtggtggggttcattgtgctcgtcaaattgtaactatttccaatggtgaggaaaaatttattacttacgccaaaccgaagcgccacgcaatgagagggagtgacacatcaactgctgagtctggctcagaagctgacgatgctatctcccccaaagctctcagaagttacataccacatcctaagttgaccccagttcgtgaagaggtcaaaatggtcagggctacgagcttttctactcgtctccctgaatatgatgtacctgttgttgacaaggctgtggatgctacatggagaagagagcagccacgaaagataccattcatgccccaagatgcagactcttctgtgaaaactatgtccaggccatctgattcctcctgggataagatcgctgcaactctgatggcttgtcttatggctattgtaatgttggttcgatcagtcaaagatcttgtcacaaggagattgccatctaaaggcgggtcagaagaaatccactctacgctgtacccagaccccatccagaaagaggaattccgtcctccttctccgatccctggatttgctgaagccgacctgttcgccgtggtcttgcaaaggctgggagagcttgaagagaaggtccagatgcttcaagaaaagccttctgaaatgccttgcgagaaagaagagttgcttaacgctgctgtgcgtcgtgtggatgcattggaagctgaactaattgtaacaaagaaggctttgcacgaggctcttatcaggcaagaggaactgctcgcgaacatcgacagcaaggagattgccagggctcagagaaagaagaaaacaatgttctgctactaggacaacacctgcttccgtgaggagatgacaaacgcggcggaccccttcatttttctgacacttgtgaatcaacaggtttccgttgtaaatcaacaaaattctggcccccataaaatgtttttttttt

SEQ ID NO: 263247 - DNA, 857 bp, Zea mays
  unsure (1)..(857): unsure at all n locations
caacatcccccctcgcctcggattcgctcgcggccccgcccgccgacgcaacagcgaggtcgttccgttccaggcttcggacggcggcggggtgacgtaaggaggtgcgcgggaggatccgttcgcgcccggaggaccgggatccggcgcccgtcgtcgtcgacgcccatgtcgggccacctcgatcgcttcgcgcggccatgttttgaagggtgctcaagtcacgatgaacgtagagaccataagtcagactttgaagtctctgaagatgaaaagaagacaagaataagctctttgaagaaaaaagcaatagatgcatcaacgaagattaggcactcattaaaaaagactagaaggaagagtggtagtagggtcctttctgtgtctattgaggatgtgcgcgatctagaggagctgcaagctgttgaagcatttagacaagcactactcttggatgagctgttgcctgcaagacacgatgactatcatatgatgctgagatttctaaaagcaaggaaatttgatatcgacaaagcaaagcaaatgtggatggatatgcttcattggcggagggagtatggcactgatacgattttggaggacttcgaatacactgagttggacactgttttgcaatattatcctcatggttatcatggagttgacaaagaggggagacccgtttatattgaaaggcttggaaaggttgaccctagcaaacttatgaatgtcacaacgatggatcgatacgtgcgataccatgtgaaggagtttgagaggagcttcttgattaaatatccaagcttgctctcttgctgcaaaaaggcacatngattccagcacgacaattctggatg

SEQ ID NO: 263248 - DNA, 1240 bp, Zea mays
gtaaaggcgacaggcaggtgcgagccgtgaaggacgggagcgagcagtgaccaccgcgccagattcagaccacaccacccaccgcaatcaggagcggagccaaggaaggagggggcagcgggcgacgacgaagcagcggcaatccgacggcgtaatggcggcggggagggggtgaggcggcgccctgagccgtaaaggagccggctttcgtagctcttcctgggagtgaccttctccgacgaaacgaaatggcccatcaaggaccaggagtgcctaagtttggaagttgggaggatgagggcgatcacccctacacacagtacttcgaaaacgctcgtaagggcaaatctccaggcagatctgctactcagaacgagcacagaactggagatccggaagcgctcttcaaagaagacacgacgccatcagctaaagcttctcccctgcggactgggtcggaggatcctgtggcgccaaagcccaaggacgcggcctttgctagaggcaagccgtatgctgagccagcaacccataaacacggtgctaataccagctatgaaagaaaaaccggcacggagagatcgcctctgcatcctcaccaccaagcaaggctcgtaaacagaggaggtgtttcgtctccttcatgggaacgcacgggttcgtcagaaggaaaccgtggagctgcgcccaccacacctgggaggtcgtccaagatgaggccaggcggccgtggagacgagacgcctgagagaggatctgccgtgcccaagtttggagaatgggacgagaaagatccctccacaggtgaaggcttcaccgacatatttaacaaggtgagggaggagaagcagtccggcgatgctcctgtcatcaccagcggcaacgcaggtggtggttatagccgctccaaccaaggccgcaaatacgaatcttcggcttgctcatgcttcagttggttcaggaactgatgcttccttgcatggttgctgatgcttcagctggttcagcagctgataggtgccgttgaagatttggatgaaccagagccgatcgtatcattttcacatgagctgtagtcccatcgtgttctccctgttgtgatgttgtgtggtagcaggacgtgccagaacttgactttgagaagctgaggttcagtagtttgagctgtttttgcaacatgcggtttgtttctccacagaatagaatccttaaatgaagaaaaaaaaaagaaaaaaaagga

SEQ ID NO: 263249 - DNA, 1082 bp, Zea mays
catttacgcttgtccgccactggcctgtgctgtctccgcgcttttaaacacctgcacctcctactcccgaaggccgcagcgtgcattgcggctcccgctcccacactcgcctccctcatcagtggcagctagtagcgggagcacccgcagctcgcaggagagagagagagagagagagagagagagagagcagccatgaaccacggaggcggagccgacaacggtgtgagccccggcaacgtcccggtgtgctactacggcgcggcggggcgcgtgccggcggcgctggagcggcgggtgcgcgccgcggagctgttcatgcggtgcgcggcgtgcgggctcgcggtgctcgccgcggcgctgctgggcgccgaccgccagacccgcaccttcttctccgtggagaaggcggcccggttcaccgacatgcagtcgctcgtattcctggtgatagcaaacgggatggcagcgtgctacagcctgctgcagggcgggaggtgcctggtgagcatcctcacaggtggtggcgtactaatcaacaggcccatggcatgggccatcttctcctgcgatcaggtgatggcgtacttcacgatccggcggtggccgtggcgatggaggcggcgatgatcggcaagtacgggtcgcagcagttccagtggatgaagacgtgccacctctacaagcgtctctgcgcgcacgcgggtggcgccgtggcctgcgcggtggcggccagcctgaacatggtcggcgtctcgctcgtctcggcgttcaacctcttccggctgtacggcagcggcaaagggaggaagtgatctcgatcggcctgctgcccctaggaacacagggccggcagccccgcccctgtgctggcatttctcttaggttttaacccccagtatggacccatagccccatggatggatggatggtctcttcttctccggtttgagttttttctggtgttgggtaggcaaacctgtcgtctgtcaagggtagacataaaaaaaaaaaggtctttgggacgctcgcccatgtatgtatgtatatgatgtgaagtgatccaaggtggttcgcgtcct

SEQ ID NO: 263250 - DNA, 1451 bp, Zea mays
tcgaaagaaagggtgaaagggggatgtattttggccttgcctccttttcctccgccgatcccccgcacccgcacccaaccgcagcggagccgggggtattcttccttcgccgctgagcacgcctcctccacaggcagccgacccagggaagcgtcgccgtctgcccccaccccgaatctgatgcttcatcgattggttctaatcctcactacctccatattcatgcacgagattgcgcgtgattaggagcagggaccaatcatattgaactcagatctggagcggagcaggaggggagccattgccggtgttctgattgctgctggaggtcgagggatggtaggggtgctgtcgaatcgcgtggatcgggacgacctcaaggccggggatcacatctacacttggcgggccgcctacatctacgcccaccacggaatatatgctggagatggcatgggtatccattgtacaagggcagctggacatgagattggaacaggaacattcttggactggttcctttatagctcctctccggcagcaactgagggtcctccctgccagaaatgtgggcacctagtcaagtccgatggggtcatcacctcttgcctcgattgcttcttagatgggggcagcctgtacctctttgactacgctgtgtcgcctgctttcttcctcgccaaagcacggggaggaacgtgcaccctggctgcctctgaccccagtgacgttgtgatccaccgtgcacggtacctcctggacaatgggtttggcatgtactccctgttcaagaacaactgcgaggacttcgccatatactgcaagactgggctgcttgtggagaccgctttcagtgttggccgtagcgggcaacttgcgtctctgactgctgccttcagcgccgtggcctcgtcccccttgcgtttcctgacaaccagtgctggtggcctggcaattgtgaccagcggcatgtactgtgtcgggcggtatgtgtcggatattggtgtccggcgtgatgttgtcaaggtccctgtcgaaaggcttgtggagcagaatgttacttggattcctcagtgtgtggctacagagacagatatcgcggcaggagcaccgcagcagcagttggaggttccttgtgcggttgccgaggaagcatccgttatacagcccgcggcaccgtgatccattgctgaaatgtcatcatgtaccaggtgttggcatgagacaggacaactggaactacgtacttgtgtggaagtacatgtaatgatgtatctggtggtgttatgcaatccattgctgctgctgctgctaatggtgcaagcaatgatgatgatgatggatgtggttccatgaccactattaattattacagaattgagaagacctgtatttgcccttgatgattaatgatttctgttataccgttgcttaaaaaaatgtagtgaaaa

SEQ ID NO: 263251 - DNA, 1571 bp, Zea mays
cgtctatcaaccagccaccgtgcagcggcaagggtgtccaggtcccgtaaaatctggcttttctccctccccataccccgcagtcccgcacacacactcgctttcttcggttcttcctcctcgagcagccacttccgtctctaaccctacagcgacgacgagagcgaggccatgaaggggaagaagccggtcaaggagctcaagctcaccgtgccggcgcaggagaccccggtagacaagttcctgacggcaagtggcacgttcaaggatggtgagctgaggctcaatcagagcggcttgcggcttatctctgaggaaaacggggatgaagatgaatctacaaagctgaaggtggaagatgtgcagttatcaatggatgatcttgagatgattcaagtcattggcaaaggaagcggtggtgttgtccagctagtgaggcacaaatgggtgggcacattatttgccttaaagggtattcaaatgaacattcaggagtcagttcgtaaacaaatagtacaggagctcaaaataaaccaagcaacacagagccctcatatagttatgtgccatcaatctttttaccacaatggtgtaatatatcttgttcttgagtacatggaccgtggatcgcttgcagacattgttaagcaagtgaagactattctggagccataccttgcagtactttgtaagcaggtcttggagggtttattgtatcttcatcatcaaaggcacgtgattcacagggacataaaaccatctaacttgttggtcaaccgtaaaggtgaagtcaagattaccgacttcggagtgagtgctgtgctagcaagctcaataggtcagcgagatacatttgttggaacctacaactatatggcgcctgagcggattagtggtagcacttatgactacaaaagtgacatatggagtttgggcttagttatacttgagtgtgccattggccggttcccttatataccttcggaaggtgaaggttggttaagcttttatgaacttctggaggccattgtcgatcagccaccaccttctgcacctgcagatcagttctctccagaattctgctcatttatctcctcttgcatacagaaagatccggctcagaggatgtctgcttcagaactcttgaatcacccttttttgaagaagttcgaggataaggacttaaacctggggattcttgtggagaacctggaacctccaatgaatatacccgaatagcctgtcgtttttagtgatgaagcctttgttgtgccttcagggtttggcctcgaagcctcttggcatctgctcctcaactgcagcctccctacctgaatatgctataacatcattgtatgattcaagccccttatctgagcataagagtagagggaactatgctgcattccgtgtatggtcaccttattgtagctattgttgcgacgggccttgtgattttgagtcttgttttaacttttgcagtcttatcggctgtggattcaaaatgaacgaactgaatattcaaaacatgtttgccaaaaaaaaaaaaaaaaaaagggcggccgccgact

SEQ ID NO: 263252 - DNA, 842 bp, Zea mays
  unsure (1)..(842): unsure at all n locations
gctctggtactctcttctctctccctgctgacccaagtcccacgcctgcgtctcgtgatgccgccgaaatcgaaggcgtccgccgccgcggagccggtggccgtcgaggacctcttcgcctcgctccaccgccacatcgaggcaggtgctttcaaacaggccgccaaggtcgccgaccaagttctcaaggcagcgccgggagatgaggacgcggtgcgatgcaaggtggtggcatacatcaaggccgacgagatcgacaaggcgctcgccgcgatccgcgccgccgagcgcctcccgatcgatctcagctactacagggcctactgctgctacaggcaaaacaaactgcatgaggctcttgagcttttaagaggccaagaagaaacttcagctgttctccagctggaatcccagatcttttaccgactaggaagaatgaatgattgcatgagtagctatgagaagcttaaaaaaatttaaaattgactcaatggatctgaagataaatatcattgctgctctagttgctgctggaagggcttctgaggtgcaggcagctatgaaggcgcttaaggttgatcttaccacgagagcactcagggatactcgtagttttgagctcgcatacaattctgcttgctccttgatagaaaacaagaagtactctgaagccaaggagcaattggacttggctaaaagaattgggaaagaagagcttatggtggaagactacggcgaggcggatattgaatatgaattagctcctgtttctgctcagcttgcttatgtgcagcgctanagggacaatctcaagaggctatgcaaacatatgttaatatgat

SEQ ID NO: 263253 - DNA, 594 bp, Zea mays
ggggatggagctgcaaaaattgcatggaacaatcaaagcccttcagaaggtggtcacagatactggtgtcctccttgaacaagagaggcttgatttcaatgccaatttaaaagaagcaaagaagcagatcgaggtgctaaagctcaaggagatcttggatgatgatataattgaaatgaactacgagcaaatgttaaaagacatacagcttgacctcattcaaacttcttcaggccagaaaaccagtccgtttggtcaggaaaagaaaaatgtagcacaagtagatgacaagatggtaaactcacgcggttctattgggccgagccatggacatgtggctgacgacctaagaccgccgcaaagtgagtcatttgggagagagaacaatttaatggtcgtgaaagagctcagcattgacaagcaagagttaccgaggtcgcttgctatggagccacacgaggagtggagaaacaaggtcgtagaaaggttggcttctgatgcccagcgactcagtgccctccagtccagcatccaagaacttaaaacgaacgccgaaacatccgaagaggtagagctcgggacgtgtcagtacca

SEQ ID NO: 263254 - DNA, 1574 bp, Zea mays
cggacgcgtggcggacgcgtgggtgcgtgaagttgatgctaatgatgacagtaaaatggtggatgctgatgggaaggttgagaatgaaaaagagaagcatgctgagcttcttgctcttcctcctcatggagctgaagtttatgttgggggcatatcttctgatgtatcttctgaagatctcaaacaactatttgaatctgttggagaagttgcggaagtgcgaatgcgaggaaagggggataacaggacttatgcttttattaatttcagaactaaagagatggctttaaaggccatccaaaagttgagcaataaagacctaaagggaaaaaagataaaagtttcatcctcccaggctaagaacaggctttttattgggaatgtaccccatgattggacacctgatgatttcaaaaccgcagtggaagaagttggtcctggagttttaaaagttgaactcatgaaggcgccaggcttagatcgcaataagggttatggctttattgattactacaaccaggcatgtgcagagtatgctaagcagaagatgtctaccccagaattcaaactagatacaaatgctcctactgtcagctgggcagatcataagaatgctagtgaagctacatctacttcacaggttaaatctctatatgtcaaaaacctccccaagactgttactcaagagcagctgaaaaagctgtttgagcatgttggagaaatcacaaaagttgttgttccacctgcaaaatctgggcatgaaaatcggtacggttttgttcattttaaggaacggtccatggttatgaaggctctgaagaacactgagagatatgaacttgatggtcagctgctggattgttcacctgcgaaacctcctgctgataagaaggatagtactgtatcaacacctactgcaaaaggaggcccgttactcccaagttatgccccacttggatatggactggtgggagcttataatccacgtggaaagggattggcagatgcttataataacccccttggaaatggactggcaggtgcttatggtgtgctttccgctcgtgctgcacagccaatggtgtatgctccaggtgctcctcccggctcaacaatgatcccaatggtcctaccagatggccgtcttgtatacgtaccacagactgcagggcagcagcctctgcatgtgacttcgcctctgcctcagcaaggcggtcgtcgattcggcggcggtggcggatccagctccggcggaaagcgacagaggggagatgatcgtggcagtaacgccgcaggggctggcaccgtccgtattgatgtttgccatgccgctgatttgcaattagaagttagaacccagcaattagcatatttatcgcagtaccatgctggaaactgtactttgaattatttgtttttcctgtgtgcttcgtaacaggcctgccctaaaaagaatgatagtaccgcaaggggcaaatgtagtggtaatataatctatacatttgtaaccatcttcattctgcgttgaccgtcttaggttattaaaataaatatatttcctccgttcttttttc

SEQ ID NO: 263255 - DNA, 306 bp, Zea mays
aaaggaggtccattgctcccaagttataccccagttggatatggactgatgggagcctataacccactcggaaatggcctggcagtggcaggcgcttacaatccgtatggaaatggactggcaggtgcttatggtgtgcttggtgctcatgctgcacagccaatgttgtatgttccaggtgctcctccaggttcgacaatgatcccaatggttctaccagatggtcgtcttgtatacgtaccacagcctgcaggacagcagcctgtgcccatgacttcgcctccgccgccacagcaaggtgtcgtc

SEQ ID NO: 263256 - DNA, 551 bp, Zea mays
cgcgcccctcgcgggcgccagcacggcgaccaaccctctcccaacccgactagtcggactcgcagctccgccccaagtccaggtccaagcatggaagtcgcggcggcgtcggcgaggcccgtcctgcgcgtggctgccatctgcggctccctccgcaaggcctccttcaaccgcggcctcctccgcgccgccgcggaggtgtgcgaggactccatcccggggctccgcatcgacgagctcgacatctccgacctgcccatcatcaacaccgaccttgagaccggcagcggcagcggcaccgtcttcccgcccgccgtcgaggccttccgcgccaaggtctgccaggccgactgcttcctcttcggcgcgcccgagtacaactactccatcgccacccccctgaagaacgcgcttgactgggcctctagaggaaagaactgttgggcagacaaacctgctgcgatcgtgagtgcaggcggcggctttgggggagggaggtcgcagtaccatctccgtcaggtcggggttatcctggatctccagttcagcaa

SEQ ID NO: 263257 - DNA, 401 bp, Zea mays
taccggtccggaattcccgggcgacaccgagcgagacgtccacaactcctcccgctccactaacccttgcggccaccaccagcgaccgcttcggttagtcaaggctacggcgtgcaagcgggaggagcgccgcaagcgcaaggaccgcaagcggcagaggcacctcgttgacgagctcgtgcggtggcaacctctcggcgccccgacgcccctcccagccgccaccggatccgtgtccccctcccaagcgcagcccgatacgccttggccgtgtgacccgccgccgccttcggaccccgcggaagccgactcctggagctggggcccggccgccgtaccctcgccgacgccgacgcaacccacagtcgacgtggcgggcgcggtcccctttgcaccctaag

SEQ ID NO: 263258 - DNA, 1388 bp, Zea mays
gtagggactagggagtacctgctctctcgctctcgcccatcccattgccttcatcatcaaatcgccaccgaaaattccccccaaaaaacaataagcacttgttcatcatcatcagagtaaacacagcagaaccctagcgcgccgttcctccgacgactcacatcccacccactcacccaccccatggcggccaagctctccaccagcgccgacgccccggcctcggtgcggctctccgcagcagcgcaggcggctgcgatccagccctcctccccgcgcttcttcttctcctcgctggccgggaccaacccggcctccccgcatcgccgcatcgccattgccgtcgatctctccgacgagtccgccttcgccgtcaagtgggccgtgcagaactacctccgccccggggacgccgtcgtgctgctccacgtgcgccccacctccgttctctacggcgccgactggggttccatcccggtctccgtcgctgacgaggccgacgctgccgaggacgccgccgccgccgccgagggcggcccctccgaggaggagctgcagaagaagcgggaggaggaatacgacgccttcacctctaccaaggcgcaggacctcgcgcagccgcttgtcgatgcccagatccccttcaagatccatgtcgtcaaggaccacgacatgaaggagcgcctctgcctcgaggctgagcgccttggcctgtccgctatgatcatggggagccgcggttttggggcctcccggaaaggcagcaaggggcggcttgggagtgttagtgattactgcgtacaccactgtgtatgtcctgttgtggttgttcgctaccctgatgatgctgcagatgccggtggagatgcatcaggggtgacagatgagttgcacactgtaccagaggacgaacctgtttatcacgatgcacctgaggtgcagaaagaaaactgaggcaacggccacatgcggctgaagaacgaaggaaaacatgaggcttgtagtgaggcgatcctgtgtatctggaagatgggaccggctgtttatctttgcttctatatatcaactgcgtatcatgatcagctgtctgcttcccgttgagtttcatatcggagtcgtagatcatctgagttttttgttggtttgcttgtgagatgtagagtactcttcccgtgggtcgaaggtgtcttgcagatgcttgaactttatgttgtcgaacggtagttatctacacggtatcatcttctctgttaagcctgtttagtgtttactgtattggatactcgttaatagagaaccgctacttttcagtatttattatcacctgtatattggataaaattattgcttagcttatgcttgcatgctccatatttgcccacggtccg

SEQ ID NO: 263259 - DNA, 502 bp, Zea mays
gcgtcagcgactactgcgtgcaccactgtgtctgccccgttgtggtggtgcgcttccctgatgacggctctgccgagggtggggaggccgctggtttgtccgccgcggttggtgctgaggatgtgctgcaccccgtgccggaggaagaaggcgagtaccatgacgctgcggaggagcacaaggatgcttgacctcgttgatgcattgtgaagtcctcttggattcagcatgtagaggttctagcattcgactgttggctgggtgctaagctgggatttgtacttgagtgcatgtgatgtttatgaactcccattaccggtgtctatccgtgctttcgctttgtttgtatcctccgttacctttgttcatgtagcttgtctgacttccactgcgtggtggatatatgtctgaacatttgtagctactttgcgttgcactgtgtttctgatgaaagttacaggttactggtcacttctatagaacccaaaaaaaacaaggatgc

SEQ ID NO: 263260 - DNA, 1072 bp, Zea mays
gttctcttccttgtcaccttgaccttccccctctcccttcctagtcccctaccccctactcgccagtccacaggacctcgaccccgctaagcaagctccaagagcgatcgccgcagaagatcccgcgatgcaggccccgccggcgccctcctccgtcgacctgccgctggcggtggcgccgccgccggtgaaggcgccgaccccgcggcccccgctgccggcctcgctgcagcccgagtccccgggggtcttcttctccgccgccgccgccgccgcgcccctgggcacctcccaccgccgcatcgccatcgccgtcgacctatccgacgagtccgccttcgccgtgcgctgggccgtcgccaactacctacgctccggggacgccgtcattctgctccacgtgcgccccacctccgtgctctacggcgccgactggggcgccgtcgacgtctccctccccatccctagcgcctactccgaggatggctttggcggcggcgacgccgattccgaggcagccgctgcgcgcaggatggaggacgactacgacgccttcactgcctccaaggccgacgacatcgccaggccgctcaaggaggcgggcatcccctacaagatccacatcgtcagggaccacgacatgaaggagcgcctctgcctcgaggtcgagcgcctctcgctcagcgccgtcatcatggggagcaagggcttcggcgccgcgcggaggaccagcaagggcaggctcggcagcgtcagcgactactgcgtgcaccactgtgtctgccccgttgtggtggtgcgcttccctgatgacggctctgccgagggtggggaggccgctggtttgtccgccgcggttggtgctgaggatgtgctgcaccccgtgccggaggaagaaggcgagtaccatgacgctgcggaggagcacaagggtaaactgggtttctactcttatatttgcttgttgtgcatgtcataaggaggttgccttcatcatccatacgaaaatgcaccaaaatttaactcacaataacaatgggataggacaatgcccgcaacaaaattactatcg

SEQ ID NO: 263261 - DNA, 518 bp, Zea mays
gttgcttgcttgattcttattctcttgtatctgtggatgcagaaaactgaggcaatggccgcaagcagctgaagaacgaaggaccacatggggcctgtagtgactagtgaggccattctgtgtatctgaaagatgggactggctgtttatcttcgcttctgtatatcaactgcgtgtcatgatcagtggctgcttcgcgtttgagtttcatatcggagtcctagatcatcgaagtctttgttggtttgcttgtgagatgtttatgttgtgaacaccatgtagagtactcttctcgtaggtagaagctgccttgcagatgcttatgcagttatgctggggtctgggctctcttgtcttgttttgcggagccggtgatgagctttatgttctcaaatggtagttatctacactgtattatgtgctctgttcagcctgttcaccgtattgcatattcgttaatggagaaccactactttcctgtaaaaaaaaaaaaaaaaagggcggccgcccgggaattc

SEQ ID NO: 263262 - DNA, 1134 bp, Zea mays
tcattattcgccactccgtccgttaccttcactcgctcactcacaatgcggcgccatggcgaggtacgcgtgatcttagctatggccgccgccgccgccgccgcgctcttggcgtcggcggccgtggccggacgagacggccggcagacctacatcgtccacatgtcccattccgccatgccggacgagttcgcggagcatgaggaatggtacgccgcgtcgcttcaggcggtgtcggatgccgccaccgtgctgtacacctacagcaccctcctccacggctactcggcgcggctgacgcgcgcggaggccgcggcgctggagtcgcagccaggggtgatcgtcgtcaacccggaggtgcggtacgagctgcacaccacccggacgcccgagttcctggggctggacggcacggacgcgctgttcccgcagtcgggcaccgggaccgacgtcgtcgtcggggtgctcgacaccggcgtctggccggagaggccgagctacgacgacaccgggttcggccccgtgcctgcgggctggaagggcaagtgcgaggacggcaacgacttcaacgcctccgcgtgcaacaagaagctcatcggcgcgaggttcttcctgacgggctatgaggcggccaagggccccgtggacacgtccaaggaatcccggtcgccgagggacaacgacggccacgggacgcacacgtccagcaccgcggcgggcggcgccgtccagggcgccgacctgctcggctacgctgccggcacggccaagggcatggcgccccgcgcccgcgtcgccacgtacaaggtgtgctgggtcggcgggtgcttcagctccgacatcctcaaggccatggaggtcgccgtgacggacggcgtcgacgtgctctcgctctcccttggcggcggcacggcggagtactaccgcgacagcatcgcggtgggcgctttcagcgccatggagaaggggatcttcgtgtcctgctccgcgggcaatgccggcccgggcgccgcgacgctgtccaacggcgcgccgtggatcaccaccgtgggcgccgggaccatcgaccgcgacttccccgcctacgtcacgctcggcaacggcaagaactacacgggggtgtccctgtacagc

SEQ ID NO: 263263 - DNA, 1951 bp, Zea mays
tcttcgtgcgcgccgttaacactgggtcgctcggctgggcgctcgcctcggcgttcggttacttctatatggtgtcggcatggggaggctacctgttcatcatcaatctcgtcccgctttatgtgcttgtgttgcttgtcactgggaggtactcgcagaggctctacgtggcctacaattgcatgtatgtgcttgggatgttgcttgcaatgcagattcgttttgttggattccagcatgtgcagtccggagagcacatggctgctatgggagtcttcttccttttgcaggttttcttcttcttggactgggtaaaatacctgctaaacgatgccagactgttcaagtcattccttcgaattacccttacatgtgtgattactgttggcaccctggctcttggtattggtactgcatctggttacatctctccttggacaggacgattttactccctgctagatcctacctatgcaaaggaccatataccaatcatcgcatctgtttctgagcatcaaccaacagcatggtcatctttcatgtttgacttccacatcctcctttttctgttcccagctggcctttatttctgtttcaagcgcctgtcagatgccacaatatttattgttatgtatggcctcacaagtatgtactttgctggtgtgatggtccggttaattcttgtggcagcaccagccgtttgccttattagtgctattgctgcatctgctacaataaaaaacctaaccactttgatcaggacaaagagcagaagtccacagactacttctgggaaaacaactggctcaaagtcagctgctaagggtgcagttgatcaatctttaccattccaacacaatgctgctattggtcttcttctgggtgccttttacttgctcagtaggtatgccatacactgcacttgggtgacatctgaggcttactcttctccatctatagtttgggccgcaaggggtcataatggtggaagagtcatctttgatgattatcgtgaggcatactattggcttcgtcagaacacgcctcctgatgctaagattatgtcttggtgggactatggataccaaattacagctatgggtaacagaactgttattgttgataacaatacatggaataacacacacatagctacagttggacgagctatgtcatcttatgaagatgaagcatatgagatcatgcagtcacttgatgtgaactatgtgcttgttgtgtttggaggtgttactggatattcttcagatgatatcaacaagttcttatggatggtacgtattggtggaggggttttccctgtaatcaaagagccagattaccttgttaacggggagtatcgtattgacaagggggcagcaccaaaaatgctgaactgcctaatgtacaagctttgttactaccgatttggagaacttaccacagaatatggaaaacctccagggtatgatcgtgtacgaggagtggagattggcaacaaagatataaagcttgaatacttggaggaggcatttacaacttcaaactggatagtgcgcatatacaaggtgaaacccccaaagaacaggtcctgaggcgtcatcgctagtgaagtggttggagagctattacctcagacaagtacatattgtcaaaaaatctgaatctgagtggcctcaggagagggcggggtcgttgttatgggcacctgctttggcgagactgactttttgcagccatagcatcagttcagctcaaagtcaagaacatctttcccctcattcggtttaggtgtgatcggtgtcattcagaggaaccaattgtggcaacagcgagtactttttaattgttgagcatctcatgaccgagctattaaagtttttgtaggcgcaacgacatatttgaatagaaacttgtctttgatcaatccaaggcaatggattttttcggccct

SEQ ID NO: 263264 - DNA, 471 bp, Zea mays
gcgcccacgcgtccgcccacgcgtccgcccacgcgtccgcccacgcgtccgcccacgcgtccggaagcacttgcaacatgaagagatgtggagccccaaggccaactccgggaggtaacacgagctcatctcgcaaggacaacagcaataaggaagcccctgaaggaagctggacctgcccagagtgcaacaacctgaactacccattccgcacggtgtgtaacaggaaaggatgctcgtacagcaagccagccccggcgaacaactgaacccaaccttcgcgcatcgtccagctattgttgtacccgtagattgtatcctagtcgtgtgcaatctttgaactgcacgaagatgtttgtgcctggagacgagagattcgattcgttacgcttaatttactattatacatttttattaaatgatgaaaactagggaagatcattataaaagaaaaaaaagggcggccgctct

SEQ ID NO: 263265 - DNA, 830 bp, Zea mays
tgctgcgacgcaattggagaacagaggcgcgccgtcgatcaccgagtccaagtccaagaatgatgccagcacctcctgctcctggatatgaccgactacctctgttttacggaggaggtggtggcgctccatctccaattccacttggatctggtagctatggtggtccatatccacaccttgggatgcgatatggttatggtccaccagtaggagctcctggttcatatggccttttctcgtcatatggtcaacctgggccaatgagtggtatgggatatggcccaggacctgagctaggccgatatagctatgggtttagaggttctccaatgctggtttctagcccatggtctggtggagcattagctgaaaacaatgacaacattgcttcacgaaagcgccgtggaggccctgatggactttctgagggtgactggacctgtcccaaatgcgacaacattaacttttccttcagaagcacttgcaacatgaagaaatgtggagccccaaggccaactccgggaggtaacacgagctcatctcgcaaggacaacagcaataaggaagcccctgaaggaagctggacctgcccagagtgcaacaacctgaactacccattccgcacggtgtgtaacaggaaaggatgctcgtacagcaagccagccccggcgaacaactgaacccaaccttcgcgcatcgtccagctattgttgtacccgtagattgtatcctagtcgtgtgcaatctttgaactgcacgaagatgtttgtgcctggagacgagagattcgattcgttacgcttaatttactattatacatttttatt

SEQ ID NO: 263266 - DNA, 547 bp, Zea mays
catgggcacacggccaccacaccgcggcgcgtggccagcgcagataatccatccccatcctcatgattataaataaataataattttacacgccctcctctctggggatttctcgcggagcggccctccacctttatcgccgccgcctccgccgccgttgctgtgttccgtctcttcgccgatggcttcggccaagttcggtgctgcccagcaggtggagaaccgaggcgcgctgtccaaaaggtcacgtaacgacgtgtctgtaagggagggggactggaattgtcctcagtgtggtaatgtcaacttcagttttagaaatgtttgcaaccgtggagcctgtggtgcaccccgtccatcaccgagtccaagtccaagaatgatgccaggacctcctgcttctggatatgaccggtcacctctattttacggaggaggtggtggcgccccacctccaattccgcttggaactggtagctatggtgctccatatccacaccttgggatgcgatatggctatggtccaccagtaggacctcctggttca

SEQ ID NO: 263267 - DNA, 556 bp, Zea mays
  unsure (1)..(556): unsure at all n locations
ttaccgttctgccgctcccgtctcggacgtggatcccccgctctcctccccaccgccgccgcgaccgcgcacgctccacgcatcccgcccgcccgccgcgcttctttccatcctcttccttccgtacccactcaccgccccctcggctctccgtcgatggaagggcgccattgacgccccgcgatcctcgctaccacccccacgaggccataccctccccccacacacagatcttggaagaggccgccaccccgcccccgttcttggccccatcaccctccccacgcgatgctcgcctaccccacacgatgcaccccttccttgccttggtggcgagcttgtcgacgtcgaggcagatgcgggagatggacttggcggcctgctccgccttgtcggcgcgccgctgctcgaggaggcgcttggagcgatcctncccctccgncccgctctcgctcgcgctttcgtcgccgccgtggtccactggagcggtccttcccctccggcccgctctcgctcgcgctttcgtcgccgccgtggtcggctgtcgcacacgccc

SEQ ID NO: 263268 - DNA, 778 bp, Zea mays
gtacggtccgaatccgggtcacctccgccgtcagcgcgcgacctggcgagctgtctagctaggagcaggccgcctacgccatcggccgtccacagcaacatgtgctccggctcctggttctggagcagcggcggcggcggcggcagcgagaagcgcccgtctcttgtcgtcgtcaacctcgagcggcagctaaagaagacgctggccgtcaggagaaggaggaggaggttgaggctgaggaggttgcgagccggaggagcagaggccatggagatggtgaacctgaagctgtacctggagaaccggtgcatcatcgcggagaacgagaggctccgggagagggccagcgcgctccgccgcgagaacctcgcgctgctccggaacctgtcgtccaggacggcggccgtgccagagccaggagcgggagctgcgtgagtctgctgcttcgatactctgcctgcctggctgcctgctgaacatgaagtagcgcgctcgcgtcaccctcgttggtgcttgtgctacttgtgtggacaggagacaggccagtggactcgtagccctaggtatcatccatctgcttggctgctccgccatgtctctggtctgtgctcaactgctcatacataaaccgccaggttcttggagctctcttggggtgctctgcgtcatggtgtctgtacattataagtgcgcggattaactagattttgttggcaagaactgactcttttggtcatataagaacacggtcaagttaattattacattcgttctcgat

SEQ ID NO: 263269 - DNA, 816 bp, Zea mays
taccggttcggaatgcccggcgacgcgttcgcaaagacggaaagctaccaccaaagccccgtgtgtcgagacgaggcgagatgcgatgaggtctatcttttatatatagcctgtagcgcccttcaaacacttcatcccgaagtcaccgcgctgagctccaaagaatctagcagctaggagcaggccgtgtatacgccatccaccacggcaacatgtgctccggctcctggtcctggagcagcagcaagaagcgcccgtctcttgttgtcgtcaacctcaagcggcagcagctgcagaagacgccgccgccgacgccgcctcgtgcctcagttgctatcaggaggaagaggctgaggctgaggaggttgagagccggagcagaggccatggagatggtgaacctgaagctctacctggagaaccggtgcatcatcgcggagaacgagaggctgcgggagagggccagcgcgctccgccgcgagaacctcgcgctgctccaggacctgtccaagacgccggccgtgccagaggcaggagcgggagctggagctgcgtgagattgcttcctcttgctgcctgctgagcatggagtagctagcttagcttgcgttccctcgctggcgcttgtgctagttgcgtgggcaggacagcggactcctaggtatctatctgcttggctgctccgccatgtctgtgctctgctgtctgctcatacatcaccaggctcctggagctctcttgggtgctctgtgccatggtgtttgtacattatatataagtgcgcggattaactagaaaaaaaaaaaaaaagggcgg

SEQ ID NO: 263270 - DNA, 415 bp, Zea mays
accgcgctgagctccaaagaatctagcagctaggagcaggccgtgtatacgccatccaccacggcaacatgtgctccggctcctggtcctggagcagcagcagcagcaagaagcgcccgtctcttgttgtcgtcaacctcaagcggcagcagctgcagaagacgccgccgccgacgccgcctcgtgcctcagttgctatcaggaggaagaggtacccagctaacccgccctgctcgagtttcccaagcttcctctgctcaagtttcagcagcatcagcgacagtttcctgcaatcacacaagtacactgtacacgtacgtacgcaggctgaggctgaggaggttgcgagccggagcagaggccatggagatggtgaacctgaagctctacctggagaaccggtgcatcatcgcgg

SEQ ID NO: 263271 - DNA, 264 bp, Zea mays
gccgagctctgaagaatctagctaggagcaggccgcctacgccatcggccgtccacagcatcatgtgctccggctcctgggtctggagcagcagcggcagcgtcaaggagcacccgtctcttgtcgtcgtcaacctcgagcggcagctaaagaagacgctggccgtcaggagaaggaggaggtaactagcgtgctctgttcgagtttctcaagattcctctgcccagctgcaacagtttcctgcaaccacacacgcgccacacg

SEQ ID NO: 263272 - DNA, 1116 bp, Zea mays
ccgggtttccatgaaaagttgctggcagttggtggacgatatgattggttggtggaacaagcttgggatgagacatctaaatctaaacccccaggtgctgttggtgtgagcattgcacttgagaaatgtcttcctaacaatccttcatctgatctggggttgcgaaggttactgtccagggttgaacctagcatcagtgtacttgtctgttcaaggggtggtggcggtctgttgactgaacgcatggaacttgtcgcggagctttggaaagctaacataatggctcagtttgttcctcaggaagatccaagtcttcaagaacagtgtgaatatgccagtgaacatgatattaaatgccttgcaattattactgaatctggcctgtcacaaacagaccttgtgaaggtccggcatcttgattttaaaaaggagaaggatgttgaaagagagggactaataaagttcctgtctgatgcaatgtgttcacaatacaaaaatcctacgatctggagctgaccaacggccctcccaagtgcttagtgtatttgttttcaggttctagcagagcatcaaaaaatgtgtctgccgggcttccgggtgaaagcaatgtttgctgttcgaacatgtgaaggcaatcatgcgtgttggcttccgtgcatacggtgaggcagctgttggctctctgcaggttgttgccaaacgttacgccctggtctttactgaagatgggcgccgacgtgcggtgattggccaattggtataatcctggacctcttgattgttctcctgaggaccaatgccatgcaacaaggttgcttcagacacaaggtggcgtgtagttggtgcaattctgcagttttggggctgttggtattatatggatctgaaggtgcgcggttttctactacaacagatcccccgtttttgcctgggttccctttcttgggcatgggattttctttttcttttccaaaggactcccttggacatagttcgtttggggtgagccatcatggacatgcaaaatttttacattgttgggttcctgccaatgaaatgctgaattttgcaaccccctgatttagggcaaaacaaggcgtgcgtgctgttttgtcc

SEQ ID NO: 263273 - DNA, 1000 bp, Zea mays
gtgataatgaacgaagaggccatggaccatgtggttctggctgtggcccggaagaaggcggccaagacgctgcacaaagaggagagggatctgcaaaggtttgccagtgttctcacttctgcacctgcggggaggaagtgggtgtcagatgagcttgctgtggtggctgagtcgaaggaggttgctggggatatgatcactgaggctgtgcttgatcaggttcttggtgagaaggcatttgagaaatttgggaagtggttcatctcgcttcgtttttcagaccagttggcaggatcctacaagaaggtccttgcattcaagtttgtattgccagatgcaagcaacatgtcagagatgacaagattggttgctcttgtgccatactacattgatttggttggccgttataagctcagctctcatgctcgctctaaaactgatggagctagaacgaaggctgctcaggaggctttcagggaactacagagtgcccggcaggaggccctgcaaaggaaaaaggctgaaaagaagaaactcatcgaggaggcagatgccaaactaagcgctgagtcactccggaagaaagaagaaaaggaaagggctcggcaaatgaagaagtctggacccaaagtgaagatgctccgctcttaacaacgtcatgattcaagaatctatcatatcttggcttttgctattcacctgttgattagcatatagttcagtgtctgctagactcatttatattctaatcctgtgagaatgagcaaaaaggatccaggagaaaagaatcctcactggcgtttcggcttttattggatgtgtgccagaattatccgtggccccacgcaacttctaagaaaatttggttatgcaagacctgtgctgtatgagaaatagaacttacatgattcaatgtgtagaatggtgatagaactatgatatgaaattctatgctcggattacatgctttcagattctagcaacttcgctgctcagcatc

SEQ ID NO: 263274 - DNA, 752 bp, Zea mays
gctgaatacacataggcagaaagaggaggattgaaaagagcttgaaaagcaacagaagagagaggtagagaagaaagagctggataagcaaaagcaaagggaggaagagaggatggagatggagaaggagaagaaaaggcagcgagagagggaggaagagagacagagggagagagagcaatacgaaaggaaaggtggaaatgatgtggagagagacaacaaaaggaaactgatagatgatcggtatgatccaaattcaagtagagatagagaagagggatacagagactctcagaacagagatgacaatagaaggcaggaagagcatggtcaacacaatagatatatggatagtcatgattccaagaggtcaaggcatgactcgcattaccattcaaggagggattatgaacaacgctattctagagacgaacatagagacagaaggcgtcactaaatcttggaagaatgccgctctaggtggacaacttattctcagctatcacccataagttccagtcccagatcttttctgcggcagcaagaccaacccatcagtacctccgctgcagcattaatatctgcttttgtttgtatcatactttggattttactatgcaaagagcgaagtctgcaatatgtaatatgttgtggaacagacatgaacggtaggatttttttgtgttggaatttgtggtgcgcatggtgctgatcataaatatgagacgttttcttaagcttatatttgatgg

SEQ ID NO: 263275 - DNA, 1739 bp, Zea mays
agagaaagcaaagatgcataattggcttgactactatcagctgagatttgaaaggaatgcatctaaaaggcctactactaagactggttttcttggttgttttggtacgaaggtggatgccattgaatactacacatcagaaattgagaggatagaacatgaagaagcagaagagcgtgaaaaaattgtaaaggatcccaaatccattgtaccagcagcatttgtttccttccgatcacgttggggtgcagcagtttgtgctcagacacagcaaaccagtaacccaactgtttggttgacagaatgggctccagaacctcgtgatgtgtactgggataatttgtctattccatttgtctcccttacagttcgaaggctgataattgcagtggcattcttcttcctgaacttcttttatgtgttcccaatagcatttgttcagtctcttgcaaatcttgaagggattgagaaggcagcgccgtttctgaagcctctgattgaagagcatactattaaatcattcatccaaggtttccttccgggaattgctctgaagatcttccttatattgctcccaagcatattaatgtttatgtctaaggttgaaggattgacctcaatatcttcactggagagaagatctgcatcaaagtattatattttcatattcttcaatgtgtttctggcaagcattattgcaggatctgctttagagcagctaaaaagctatattcatcagtcagcaaatgaaataccaaggacgattggtgaagcaattccaatgaaggcaaccttttttataacatatacaatggttgatggttgggctggggtagctggtgagatattgagattgaagccactagtgatcttccacctgaaaaactttttcttggtcaagactgagaaagacagggaagaggcaatggaccctggaagtattggttttgactcaagcgaacctcaaattcagctgtatttcttacttggtcttgtctatgcggcagtgacaccatttatgctcccttttgtattggtattctttgggtttgcgtacgttgtataccgccaccagataataaatgtgtataatcaagaatacgagagtgcagcagcattttggccaagtgttcatggacgcataatcacagcgttgattgtatcacagctgcttctccttgggttacttagcacaaaaggcgctggccagtcaacacctgtgctccttgttcttcctgtagtgaccttctatttccacaagtactgcaacaaccgctacaaaccgacttttgtgaaatgcccattgcaggaggcgatgaagaaggataccctggaacgtgccagagagccaggatttgacctcaaaggatacctaatgaatgcctacatccacccggtgttcaaaggtgatggggacgacgacaagttctcagtcgcagatgaaccagaagccgagcaagtcctggtggcaaccaagcggcagtccaggcggaacacccccgtgcccagtaaatacaatgggtcggaatcaccttcgcttcctgaaattgtaaatgaccaacggctataaagatgtctacagttttcctatgtatactaggtatatgcccgtgcgttgccacggaagttaaaaaatagtataaaacatgtataccgaacaccatgttctagacaatgctagtgaaactgaaataaaaatagctacataattgcttaaatagttatacagctcgtagcac

SEQ ID NO: 263276 - DNA, 417 bp, Zea mays
  unsure (1)..(417): unsure at all n locations
tncctgcaggaggcgatgaagaaggataccctggagcgtgccagagagccaggatttgacctcaaaggatacctaatgaatgcctacatccacccggtgttcaaaggtgatggggacgacgacaagttctcagtcgctgatgaaccagaagccgagcaagtcctggtggcaaccaagcggcagtccaggcggaacacccccgtgcccagtaaatacaatgggtcggaatcaccttcgcttcctgaaattgtaaatgaccaacggctataaagatgtctacagttttcctatgtatattaaggatacaataatgctttcgaatgcctccagttaatactagtaaaagcagtgatggccaatatattcatgcgtgtggttcttaacacgccggtggtgattgacaattaaaaaggacgc

SEQ ID NO: 263277 - DNA, 1323 bp, Zea mays
aaacacccatcttggcattgaacagcgccgacgagctgacttggaatctcttggatatgtactcatgtacttcctgaggggcagccttccttggcaaggtcttaaagcaggaacaaagaagcaaaagtatgagaaaattagcgagaagaaagttgcaacatcaattgaggctctatgccgtgggtatcctactgagtttgcatcatatttccattattgccgttcactgcgatttgatgacaagcctgactattcctatctcaagcgattattccgtgacctttttatccgcgaaggttttcagtttgattatgtctttgactggacaatattgaagtaccaacaagctcaaattgccactgctccaccccgtgcgggccatggcgctgggccttctgggttggcacctgcattacagaatgataggcaaccaggccctgaggaagcaaggactagtggttggtcatcaatggatcggcgtcgtgccccactaccaattacaagtgtggggacattatctaagcagaaagcaccggtagggaatgatgctattgtttctagagacgctgtgatatctggaccaaatttcttgggaaggtcaagtggatcttcaaggaggcctgttatctcgagtagccgcgatgcggtggtcaccgatagttccgagccttcacgagcgcgcacaactgatgcaagccctggggtgttccgcagagcctcaggtcctcagagaagctcacctgtccactctgcagaacagaagcgctcatcctcaggccgtcatccatctaatgcgaagaactacgattccgctctcaaaggcattgaaggccttactttagatggcgacgagagggttcagtactagagcggcaagaagaaattctacatcccctgtaaaaaagcataaccaggtggtaaccatcgtgtttcctgttgagttttggatcaacaggaaacagaatgatggaaggaggatctggtcacgtgttgtgcggtttcgggtggccttctgagcaaggtaaataaacggtcctgtccgaggcgcttcaagcctagctctcgtaatgttatcgtcatgtatgtaaatgtgtcttatagtgagcctattttgttgttccaatccttacggtgttccattctgaggtgctgaacctcggggcaacaagaccgaagctggtagggacttcaattggagaactggggttcaagcatgtagaattttaaaatcggttcatttgtctggacaatgttcctgactagtaatgtgatcgcaagacaaacgatgttatttccctctctggttatcaatatgtccatctc

SEQ ID NO: 263278 - DNA, 949 bp, Zea mays
  unsure (1)..(949): unsure at all n locations
cagtacggtcggaatccgggtcgaccacggaacaagacctggtgaccacgcgtcccgagtgcnatctaagcagaaagcaccgatagggaatgaatctactgtttctagagatgctgtgatatctggaccaaattttatgggaaggtcaagtggatcttctaggaggcctgttgtttcgagtagccgtgatatggtggccactgacagttccgagccttcacgagcacgcgcatccgtcgcaagctcatgctcgttccgcactgcctcagggactcaggagaagctcacctaggcatgcggcataacagaagcgctcatcctcaggccggcatgcgtctaacgtgaagaactacgattctgctctgaaaggcattgaaggtcttcattctgatggctacgagagggttcagcactagagccgcaagaaattctacatgcactgtaaaaatcataatcaggtggtaagcatcgtgtttcctgttcgggttttggatcaacaggaaatgaaatgctggaaggaggatctggtcacgggttgtgcggtttcaggtggtcctctgagcaaggtaaataaacggtcctatctgaggcgcttcatgcctagctctcataacgttgtcgttgtgtacgtaaatgcctcttgtagcctgaatgtcaggcgcccggattcatgaatctattttattgttgtattccttacgatgttccatcttgggactacaatgctgcaactggtagggcttgatttggaacactggaattcgagcatgtagaatttttaaatcggttcattggacgaatttgtctgtaacacgtacctgacttgtaatgtgatctgtcaggacaactgatgttatttgccaatgtgataatcagttcatccaaaaaaaaaaaagaagtgaggaaagagagtgagaaactggaggtagagtggggaagagaaggaaga

SEQ ID NO: 263279 - DNA, 595 bp, Zea mays
tttttcttgagacaaccagccgctccccccggctgccccgtgccctagacaaagaggaaaggtacgcctccggttccagagcggagaggattgcgccgcctgattggcgattgctgatagtctgccgccagtgccctcgcccgatttgctccgccgagaacaacatggggagaagctataatcacagtccatcgccaccaagaggctacaggagaagaactcgcagcccaagtcctcgtggtcggtatggaggccgtgatactgatagggacctcccaactagtcttttggtgaggaatcttcgtcgggattgtaggcctgatgaccttcgtagaccatttggaaaatttggccccgttaaagacatatatctgccaaaggattactacactcgggaacctagaggatttgggttcatccaatactttgatcctgaggatgcttctgatgcaaagtactatatggatgggaagatgctgcttggaagggatattgctgttgtttttgcagaggaaaacaggaagaagccttctgacatgagggccagggaaaaaataagtggcagaggccgttcttatgatgggaggttgcgctc

SEQ ID NO: 263280 - DNA, 478 bp, Zea mays
cgcctccggttccagagcggagaggattgcgccgcctgattggcgattgctgatagtctgccgccagtgccctcgcccgatttgctccgccgagaacaacatggggagaagctataatcacagtccatcgccaccaagaggctacaggagaagaactcgcagcccaagtcctcgtggtcggtatggaggccgtgatactgatagggacctcccaactagtcttttggtgaggaatcttcgtcgggattgtaggcctgatgaccttcgtagaccatttggaaaatttggccccgttaaagacatatatctgccaaaggattactacactcgacgcacgtcttaagagtactattgaagaaaaggaagaaatagaggtttaaagagatatgcaagttatgaagaggttcaagtgtatctctaaacactgatgactgcaagggaacctagaggatttgggttcatccaatactttgatcct

SEQ ID NO: 263281 - DNA, 1014 bp, Zea mays
gttaaagtattacctcatagacccaagaaagccaaatacgcgcgtggaaaggttttacttcaaaggagtgctgaacgtaaatggaccgctgaggagtatgagataattcgacggtttgttgaaaagaacggccgaaattggaaggtattagcaaaagaacttggaaagagtgaaatccatgtaaaagatacttggagacgaataaagttcaaaaatttgaaaagagggacttggagtcaggatgagtaccaaaacttgtttgatttggtaaatctggacatgcgccggaaagcccatcaaaacatcaatactggtcaccgtcagatatgagataacatttcttgggaggctatcagtgaaaaattaaccactcgtagagcccaagaatgctgcacgaaatggtacgggcaattggcatcgccgctggttaaacaaggaatctgggcagatacagatgactacatgttagtggaagcgcttcaaaatgtcgatgctgtttgtgctgaagatgtggactgggagaaccttctcgagcacaggtctggggagctttgccgtcatagatggaaccagatgattcgcctgatgggtgaccacagatataggcctttcattgagcaagtggaagtgcttgcaaggcggtactgcccagagatgcttgcgtacaggaaaccagtcgcaggtggatcctcggccgacgaacctgctggagcctctgacttgtaatatgggatctttagaaacgttagcagcatatggttctagagctgccaagggtgtcgtcagcactctgatctcaacaaactttggtattgttgagggcttatgtatcttctggatttgaaatcacggatgttttatcgcccaactaatcatgatttggggctcgattagagaacgactaggaatcaggccgtccagttagaactaatagtctgattaagtgttggatgactgttgaaaatgcaatgtgagcttagcagctgtgcacatgcacttttaccttggacttgg

SEQ ID NO: 263282 - DNA, 674 bp, Zea mays
cccacgcgtccgcccacgcgtccgcccacgcgtccgcccacgcgtccgcggacgcgtgggggtaggtcacctatgtgaccaatcctcaccattggtttcacagcacttagtaagcatacgtttgaagaccgagttggttgatttggtctgtccattcgctctaggaggggctcgacttcctttgagctatgagaaatgggagcgccttcttcttttttttcagggatctccttggctacaaagagagctatggagcctagctgaaagcttgacaaggcctatttagtgtattcggccacccaaccactcgcagaaagaaaggggcattcaaaacctgacagggattccttctcctagggttgctctgaggtaaccgctcgtcttgatgctggcagtcaagaaggcaaagagttgacttctacttttgaagtgtaaggagttgaccttccttcgcctatctcggattctgctacagattggaacaatagttcacattcgcttgggaataccaaatagaatgcagtcgagacaaccacaagtagaggaacgaccgacacagctggcatgcccccgcaaccttcgatccatctatctaaacatcgttctactacagaactgagttcatcatagcagccagcctcggtaaggttaactagcaacttgactcactgcac

SEQ ID NO: 263283 - DNA, 1203 bp, Zea mays
cgatactgagcttgtccctggcctcatttttgacaagaaggctagccatgctgctggggggccaactcgggtagagaatgccaagatcgctgtcatacagtttcaaatctcaccacccaagactgacattgagcagagtgtcattgtatcggactatgcacagatggaccgcatactacgtgaggagcgcaattatatcctcgggatggtcaagaagatcaaggctgctggatgcaatgttttgctcattcagaagagcatcttgcgtgatgcagtcactgacttgtctctgcactatcttgctaaggcaaagattctggtggtgaaggacgtggagagggatgagatggagttcatcaccaagaccctaaactgtcttcccattgccaacattgagcacttccgcacggataagcttgggtatgcagatgttgttgaggaaatctctgttggggagggcaaggttgtgaagatcactggtatcaaggacatgggtaggaccgccactgtagttgtcaggggctcgaaccagttggttattgatgaagctgaacgcagtctccatgatgccctctgtgtcataaggtgcttggtcaacaagaggtttttgattgctggtggtggtgctccagaaatagagatgtcaatgcagctggctgcttgggcaaaggagcttcgagggatggagagttactgcatcaaggagtttgctgacgcgcttgaggtcatcccttacacattggctgagaatgctgggctcaacccaatctccattgtcaccgaactcaggaatcgccacgccagaggtgagaagaacactggcatcaatgtgaggaaagggcagatcacaaacatcttggaggagaatgtcgtgcagcctttgctggtgagcacaagtgccattacgctggcctgcgagtgtgtcaggatgatcttgaagattgatgacattgtcactgttaggtgagagcatgaagtcggtggtttggtcagattgctctgttctgtctggattgatagtagttaggttactacttagtgtagaacttctattcacgggcgtgtttcaatgttttaaacacaatgttagtacggagaggacagtaatgtacccatccttgcatgacactaccagggttgcatctgctatttccagtttcttatgattggccgtgtatgtatgccttgtttctgtcgccgctt

SEQ ID NO: 263284 - DNA, 450 bp, Zea mays
tggcatcaatgtgaggaaagggcagatcacaaacatcctggaggagaatgtcgtgcagccgttgctggtgagcacaagtgccattacgttagcctgcgagtgtgtcagaatgatcttgaagattgatgacattgtcactgttaggtaagagcgtgaagttggggtcatgtcagcctgctctgttctgtctggattgattattagttaggttactgcttaatgtaaaacttggttcatgggcgtgtttctacacttggttttgatgttagtactatccttgacatgaaactactaccagggttgcatctgcgatctctattttctttacattggccgtgtatgccttcgtttcggtcggccgcttacgcccatgggatttttttgagccggttgtgttgtaatctgttcttggctttatcagctattcagcttatatattttctttttgag

SEQ ID NO: 263285 - DNA, 432 bp, Zea mays
  unsure (1)..(432): unsure at all n locations
ccggnnttgaatacccgggccggccgacgcgtacgcacagattgaaaaattaaaggttagaatagacatgattgggagtgcatgccaaactgctagtaaagttattgcagagggccgtgagagctatgggctgggaagccgtcatggggcaaatcttggtcctacattggacaaagcacaagctgcaaagatacaggagcaggaaggcctacttagagcagcagtaaattatggtgaaggattacgggtacctggagatcagaggcatccacaatctcttcctatccatctgatagaagtgcttcctttaggagacggtgcacaaaattttggtgatagttctggtagttatcccaaaaatatgtcaacatttgcacctaatagtgtcaacagccagggaaatcagattcaggcatccggaagacagttact

SEQ ID NO: 263286 - DNA, 1120 bp, Zea mays
acgctcgagatatcctagggatgtgatccttcattctggccagcacctgaacttcactgttatcggagacagtatggacatgtgtggacatggtcactggttaagtagcaatgggaagatcgtccacatcaatcgggtaactggtgaagcacaagcacgtagtgaaggtgtagcggaagtaatcttcaaaggttcaaattttaagctgcaaacaactatcactgttctcaaggtgaaccagatagttgttgatgctcctgcggagacactgactaatgcagctggcctgccggatggatacatgttttctgtgagatttagtgattcaattgagcacagtattggatcctctgcgagcccaattaatgtcccctttgaatgcaaggttgacccttcttttgttgggtttgttgagccatggactgagcatgccacaaagaaatcctactgcctgtttcatccatattcacctgcacaactgttgcccgtgaagttggaccctaatgaaggaactttacacagttttagttcgtgcaaatctaaaggaagacccaaaggtgaccggatctgcacatgctctttttgtcaaagggttttacataaaagaacctgggaaattaaatctgactccaagttgcaatcatagtgtcattactatcgatggaaatactgatattgagttgttctggaatgctaaagatttactcagagtcagtcgtgttgacacaaatgagaacaatggtgttcttagtcgagttgtttaccgggttgaagcgcttaaaaggctatcgttctctgacaagggtactatcgttcttcctgccactggtcaaactgaggaagttgaagtcagctaccatacatgagaggaggcagagtcaccatcatcatggggcctaaccacaactgctgttatgctcacatgcatcattgtgacaatagtcactgttgcacttttcattaagttgctgctgagacctatcagacaggcaccatcagggagcatgacagcatccacaccagcacgagcaccagcagccgatcccgcagccatggctgatcctgcatccccggctaatggtcagttctctcctcgtacaccccagcctttcatggagta

SEQ ID NO: 263287 - DNA, 567 bp, Zea mays
  unsure (1)..(567): unsure at all n locations
ttggtcgcgtgggcacaattcgtcgagcatccgccgcgctcgacggccaccggcccaccagggcaccatggcgtccgccacgcgtgctctgggggcgctcctccacagggcctcgtctctgtcttcctccgctcccgctctccggggagcctcgctcctccgcggggacgggcctattggaagcgccggactgttccggaggcatgcggcgaggcggcggatttcgtcgttccagccgctctgcatgggaagacgctcctgcaaaatcgctggaaggaaggtgatgttctcttgccatgatgcacaatgtcacattaacgaagttcgggacggctggctgtgcatattctggttggcaaagccgtggaaatatcccgtgcaatcaatcatgttgtgcatgcgtgcaatcaagcaatcaaattcatccaatgaaaatccaatagtaactgctagtttacctttaactncttccgcgtgaaaccagcaaccttgacttatttttacatttaaccccatttcatatgaaaccgttggatctagaatggattcctggatgatttgattgga

SEQ ID NO: 263288 - DNA, 569 bp, Zea mays
cggacgcgtgggctcgggcgcagcaattcgtcgagcatccgccgcgctcgacggccaccggcccacgagggcaccatggcgtccgccacgcgtgctctgggggcgctcctccacagggcctcgtctctgtcttcctccgctcccgctctccggggagcctcgctcctccgcggggacgggcctattggaagcgccggactgttccgcaggcatgcgccgaggccgcggatttcgtcgctccagccgctctgcatgggaagacgctcctgcaaaatcgctggaaggaagggaggcaatcctttggatttcaaaatgtagttgatctaattcatgcatatgctgccaaagctgttactgaacaactagaccaaaatgagaaccttgtatcagtcaatgcagatgtctgcaatttctgggaaaaggatgttatgccgatgcttttctgtaggaggtgcagattttttttttaaaaaaaaaacttcaccccacacaggatgttatattgaaacattgaattagcagtggatcgtgttcagaaagttgggttcattgtagggatcagcttccag

SEQ ID NO: 263289 - DNA, 1755 bp, Zea mays
ctctcgtgtccgccgacgcgtgggttcagagctagtccgccgttcatgtacaaggatgcagccgcaggcccgcagaggaagaggagagcctactctcctgccatggccgcgccgagtccgctcccccgcttcctgatactcctgctcgccgtaacctcctccgcgtttgccgccgccgcggcaaccggggctccggtggtgggggaggactacgtccgtccgccgccggcgcggtgccaccgcaaggcactccttagcctcttcccttggagcaagaaggaggagtccgccgcctcctccgatccgcagcaggtgcacatttctctagctggagaaaagcacatgagaataacatgggttaccaatgataactctgtcccatctgtggtggactatggaactaaagaaagtacatacacaatgaaatctcaaggagaaagcacatcctacagctacttattgtatagttcaggaaaaattcatcatgttgtcatcggacctcttgaagataacactatttattactaccgatgtggagggcagggtccagaattccaatttaagaccccgccctcccaatttcctttgtcattggctgttgttggtgatcttggtcagactagttggacaacatcaaccctgaatcacattaagcagtgtgagcatgatatgcttttactccctggtgatctctcttatgctgattatatgcaacacttgtgggattccttcggcacattggtggagccacttgctagcaaccggccttggatggtgacagaaggcaaccatgagaaggagcacattccattttttgagtcaggatttcaatcttataatgcacgatggaaaatgccttatgaagagagcggatctagatcaaatttgtactactcttttgaagttgctggtgcacacatcataatgctaggttcatacacagattatgatgatagctcagatcagtatgcttggctaaaggctgatcttgccaaggttgatagaaagaggacaccctggctcattgtgttgttgcacgtaccatggtacaatagcaattgggctcatcagggtgaaggcgacagtatgatggcttcaatggagcctttgctgtacgctgctcatgtggatatggtaatagcaggtcatgtccatgcttatgaacgtgcggacgagtctacaattccagacctgatccttgtggcgctgtccacataactatcggcgacggtgggaaccgtgaaggcttggcccgcaggtaccgtaacccgaagccagcgtggtcggtcttcagggaagcgagctttgggcacggcgagctaaagatcgtgaactccacccatgcccactggacctggcacagaaacgacgacgaagagccggtgagaaccgatgacgtgtggataaactctcttgctggttcagggtgcatccaggagggcagccgtgaccgtgagtcgaggaagatcctgatgtctccttgatgcttagcagtatagcttgggcctgcgatgtactgtgtatataatgcgtgctacttgataatctaacacctagtaaaagttaatgcgtcgtgctgcttgcctgcgtgtatactggagactggtttgatctggcgcgtttgctgctcttgttgtgttgtaccactatggatgtttgtagcaaagtgacatacgacggtgttgtaatggactgaagatgaatagatgatgttccagtaaaaaatataatctaaaacctaatacaaagttaaat

SEQ ID NO: 263290 - DNA, 982 bp, Zea mays
ctttggcaccactgattaggatgcttgggcttaggttatatcgcacaagcggtgataactctgttctgtatgaccatgatttggaaagttatgctctttttgataagcatggtcagcaagttccccaggagatagtaagcaaagttggagagacatttgagagaattcttaaggagactgtcatagtaagagatgagcatgcaaatgacatgcctctttttcaagccatagggatcgtgcttgacaggaatccgcatatgaagctgcagggcctggaatatgaagtactgcagtggtgcatatgtaggctggaggcatggttcgctactgacatggacaatatatctctgaaaacttgggatcaggaacatgtgcttaccggcggacatggtcttatggtgaatggctacgaccctgtcatcagagctctcgctcaaggtctagatattcacctcaaccacagggtcacaaagatcatacaacgctataacaaggttattgtctgtgtggaagatggggcgagttttgtcgcagacgctgctatagtaaccgtccctctcggggtactcaaggcaaacatcatcaagtttgagcctgagctaccgaaagagaagctctcggcaatcgccgaccttggcgtcggtatcgagaacaagatagctctcaagttcgacactgtgttttggcccgacgttgaagtgataggtagggtggccccgacgtcaaacgcctgtggctactttctcaaccttaacaaagccacaggaaacccggtcctggtgtgcatggtggccggaaggttcgcgtacgagatcgagaagctgtcggacgaagagtccgtgaacttcgtcatgtcccagctcaggaacatgctgccgcaggcaactgacccggttcagtatctggtctcgcgctggggtagtgaccccaactcacttggctcctactcatgcgatctggttgggagaccagctgacctgta

SEQ ID NO: 263291 - DNA, 431 bp, Zea mays
caacgctataacaaggttattgtctgtgtgatctttgtgaccctgtggttgaagtgaatatctagaccttgagcgagagctctgatgacagggtcgtagccattcaccataagaccatacaacgctataacaaggttattgtctgtgtggaagatggggcgagttttgtcgcagacgctgctatagtaaccgtccctctcggggtactcaaggcaaacatcatcaagtttgagcctgagctaccgaaagagaagctctcggcaatcgccgaccttggcgccggtatcgagaacacgctaacatggaagtgcaacactgatcaacataccacctatgaagtgataggtagggtggccccaacgtgaaacgcctgtggctactgtctcaacctttacaatggcacaagaaaccccttgctggagagcatggtg

SEQ ID NO: 263292 - DNA, 1306 bp, Zea mays
tgcgaccggctagcgccatatcccgcgccgccgccgccgccgccaacgcttaatgctagtgttcctccggcgaggcctcttgctcgtccggcagcccaccacccgcgtccttgccaaaccgtctctccgccctgcttgtctcttcgtccaccacttcgccgtcgacacgatgggtgagggttctgctgctggtaaggacgcgaaggggaaggggaaggggaagaccaaggccgccgccgcggattcggccctggtcgttcgcgacgactcctacctagaggcggtcactcagaagaggattcgcttcttcgaggagatccaggcaaggcaagccgtcgagcggctgaatatcggcggcgaagttatcaaggtaactttgcctgatggcgctatcaaggagggtaagaaatggataacaaccccaatggatattgctaaggagatatcaagtggatttgcagctagttgtttgatagctcaagtggacgaaacactctgggacatggggaggccactcgaaggtgattgtaaattgcaaatgttcaagtttgataccaatgaaggtcgtgacaccttctggcactcaagtgctcatattcttggagaatctattgagagagcatatggatgcaagctgtgtattgggccttgcaccacaagaggggagggtttctactatgatgcttactacaatgatcagacattgaatgaggagcactttggtatcattgaaaaccaagctaaaaaggctgttgcggaaaagcaaccgtttgaacgcattgaggtcagcagggcagaagctcttgaaatgtttgctgagaatgaattcaaggttgaaatcattaatgagttgcctgaggacaagaccattactgtatacaggtgtggtcctttagttgacctatgccgtgggccacacatcccaaatacttccttctgtcaaagctttcgcttgtctgaaggcttcatcatcatattggagaggaaaagttgaccgcgaaagcctgcagagagtatatggaatttctttccctgattctcgacgtctcacggaatataaacattttctagaggaagctaagaaacgtgatcataggatattagggaaagcacaggaactcttctttttccatgaacctagccctggaagctgcttcttccttccacatggtgccaggatatataacaaactgatggacttcatgcgacaacagtacagagatagaggataccaagaggtgttgagcccaaatatttacaatatgcaactatgggagacttctggacacgccgcaaactataagga

SEQ ID NO: 263293 - DNA, 738 bp, Zea mays
cgtgggccgacccaagcctctacacgtgagtcggacatatccctccctctcccctcaacccagcgcccccctcccgccgccactagggtttctcctccccgcccacccccaaaccatccccgaagcttccagtgcgtcgcgccgcaaccatgagcgacggtaaggactccctcgacctctccgccctcggcgccgccatccccaactcggccgagctcagcgcggaagacaaggctaaccttgtggcgtcgatcaagagcgcgcgcggagggattggcgtcgcggcataccgacgtgctcgagaacctcgagcccaaggtcaggaagcgcgttgagaagctcagggagatccagggcgaacacgatgaacttgaggcgaagtttttcgaagagagagctgctctagaagctaagtatcagaagttgtatgaaccactttactcaaagcgttatgaaattgtcaatggtgtggtcgagattgagggtatcacaaaagaaagtgcagctgaaaccccagaggagcaaaaaagtggagatgagacctctgctgagcaaaaagaagaaaaaggtgtaccagctttctggcttaatgcaatgaagaatcatgaaattttagctgaggagatccaggagagggatgaggaagctctcaagtacctcaaggacatcaagtggtacaggatcagcgagccgaagggttttaagcttgaatttcactttggtacgaatatgttcttc

SEQ ID NO: 263294 - DNA, 1205 bp, Zea mays
ccgggccggaccacgcgtcaacgcatcaaggcccctggcgtctcccgaaagtccaaaggcccccctcccccgcgcctccgcggggaccttggtaacaatctgggccgcatccagggggggcattctgcaaagcgcgagcccggttcgttctcgacctttcgtctcgctctcgcccgcccgcccgaccccgcggagccctagcctagccttgccccgaccgcggattccccctcggccgccgcgcgcccgcacccgcacccgcgatgatgaactgcgccggaggcggagaccccgtggaggacttcctgatctccggcgccgtcgacgacgaagatctagccatcttctgcgacggaggacttgggattgagggtgtcaatggagatgcttgtggatttgagcagtctaatttgggcaaaaggagtagagatgaaccatgttcatctggtctaaaatccaaagcttgtcgtgaaaaaatgaggagggacaagctgaatgacaggttcctggaattaagttcggttatgaatcctggtaaacaagcaaagttggataaagccaatatcttgagcgacgcagcccgtatggtggcacaacttagaggtgaggcagaaaagcttaaagaatcaaatgagaagctgcgggagaatatcaaggacctgaaggaggagaagaatgagctccgcgaagagaaagtgaggctgaaggtagagaaggataggctggagcagcaagtcaaagccatgagtgtagctcctacaggatatgttccccatctccctcatccagcttcataccacccggctgcatttgctccatttgtgccgccacagcaagctgcaggcaacaaaagtgctccaatccctgcacctttccctgggatggcaatgtggcagtggctgcctccgaccatcgtggacacaactcaagacccaaagctctggccgcctaatgcttaggggcagagctagctgccttggggtgttcactcgccgtgccgtttcatgcattgggcggcagatcagagtgtcagttagtaggtccctggagaggaggaatcaagtctcgcaactcgcgtcatgtttatgctgtaacagttgcttccagcagtcgtcatcaacttgctttgttctattgaagggtgatgcatgtaattaatatgtggatcttaaccctctagctggcaaatctgtcctttgctgcct

SEQ ID NO: 263295 - DNA, 441 bp, Zea mays
cccacgcgtccgcggacgcgtgggcgaccggacggcccggttcgttctcgacctctcgtctcgctcatccgcccgcccccgcccccgaggaaggaaccctagcctagccttgctccgaccggtcgccgcggcgactgcgacgatgatggactgcgctggaggccgagaccccgtggaggacttcctcctcggcggcgccggcgccggcgacgacggagatctcgtcgccgtcttctgcgacgacggaggacttgggattgagggtatccatggagatgcttgtggatttgagcaatctaatttggggaaaaggggtagagatgaaccatgttcatctggcccaacatccaaagcttgccgtgaaaaaatgaggagggacaagctgaatgacaggttcctggaattaagttcaattatgaatcctggtaaggaagcaagtta

SEQ ID NO: 263296 - DNA, 1154 bp, Zea mays
cggtcccgccgcttcctcgtttcgccgcctccgccgacaccgactgcctacctcagctgccgtcgccatgggcagaaggcctgctagatgctatcgccagatcaagaacaagccataccctaagtccaggtactgccgtggtgtccctgaccccaagatcaggatctacgatgttgggatgaagaggaagggtgttgatgagttcccctactgtgtgcaccttgtctcttgggagaaggagaatgtctccagtgaggctcttgaggctgcccgtattgcctgcaacaagtacatgaccaagtctgcaggaaaggatgccttccaccttcgggtccgggttcaccccttccatgtccttcgtatcaacaagatgctttcgtgtgctggggctgataggctccagactggaatgaggggtgcctttggcaagcctcagggcacctgtgctagggtggacattggtcaggtcctcctttctgttcgatgcaaggacaacaatgctgcacatgccagtgttttttttatttctttttttttttttgtttttttttttttttttttatctcttttaatttcctcctatttttaatttttctctctctttatattttttttttctcttctttatcaattttcttttttttttttttttcttatttctctatctttattattttctctcttttttatttttcctttttttatttattactttttactttttatttttctcatttttttcttttttattcttcttttttttttttatatttttctttcttactattttatttttttcttcttaataattatatgttatttttattttaattcttttatcttttatcttatttctcttcatttttcttttcttcttactttatcctttatttcttcatctttcttttttcttaattattatttcttatttttttttttcattcttttcttattctttttccttttactaacttttattctatttttcttcttatactatttctctttttattttcaattattttttttttattctgttttcttttttatctattttatctttttattcttttttctcctatttttatctttaccttttttcatttttatatattctttttttttttaatttatttccttcttttttttatatt

SEQ ID NO: 263297 - DNA, 988 bp, Zea mays
ccggtccggaattcccgggtcgacccgacccgtcccaccttctttcattcgccgccgccgcctcctctctgctgccgtcgccatggggagaaggcctgcgagatgctatcgccaaatcaagaacaagccataccccaagtccaggtactgccgtggtgtccctgaccccaagattaggatctacgatgttggcatgaagagaaagggtgttgatgagttcccctactgtgtgcaccttgtctcttgggagaaggagaatgtctccagtgaggctcttgaggctgcccgtattgcctgcaacaagtacatgaccaagtctgcaggaaaggatgccttccaccttcgggtccgggttcaccccttccatgtccttcgtatcaacaagatgctttcgtgtgctggggctgataggctccagactggaatgaggggtgcctttggcaagcctcagggcacctgtgctagggtggacattggtcaggtcctcctttctgttcgatgcaaggacaacaatgctgcacatgccagtgaagctctgcgtcgcgccaagttcaagttccctggccgccaaaagattattgagagcagaaagtggggcttcaccaagttcagccgtgccgactacctgaagtacaagagtgagggtagaattgttcctgatggtgtcaacgcaaagctgctcggcaaccacggcagacttgagaagcgtgctcctgggaaggctttcctcgatgccgttgcttaagtgcggatgcgaatcctgacgttttgctttagcgtatcttactttgcttcgtggaacatgaatttcaagtgttttgagggtattacagtgccttatgtgaacttgcctatcttgtgctgaacatcggaatgtatcctccgagtatgtttaatcgcattaattttattggaaattggttgcggaacaaaaaaaaaaagaaaaaaaaacaaaaaaaaaaaataaaaaaaataaaaagggggggcc

SEQ ID NO: 263298 - DNA, 716 bp, Zea mays
ctctctgctgccgtcgccatggggagaaggcctgcgagatgctatcgccaaatcaagaacaagccataccccaagtccgggttcaccccttccatgtccttcgtatcaacaagatgctttcgtgtgctggggctgataggctccagactggaatgaggggtgcctttggcaagcctcagggcacctgtgctagggtggacattggtcaggtcctcctttctgttcgatgcaaggacaacaatgctgcacatgccagtgaagctctgcgtcgcgccaagttcaagttccctggccgccaaaagattattgagagcagaaagtggggcttcaccaagttcagccgtgccgactacctgaagtacaagagtgagggtagaattgttcctgatggtgtcaacgcaaagctgctcggtaaccatggaagacttgagaagcgtgctcctgggaaggctttcctcgaggccgttgcttaagtccaatctacagttggaatgcgaatccagacgttttggtttagcctatcttattttgctttgtgcaacatgaattttaagtgtatggggtattacagtgccttgtgtgaacctgcttatctcgtgctgaacatcgttatgcatggaagtacttatcttttgttctgctaaaaattaaagtgttctgcgactaaatatatcttctcaatctggaatggcttctttaaaaaacaaaaaaagaaa

SEQ ID NO: 263299 - DNA, 463 bp, Zea mays
  unsure (1)..(463): unsure at all n locations
cgggtcgaccgagcgcgtccgcaagttcagccgtgccgactacctgaagtacaagagcgagggtagaattgttcctgatggtgtcagcgcaaagctgctcggtggccatggaagacttgagaagcgtgctcctgggaaggctttcctcgaggccgttgcttaagtccaatctacagttggaatgcgaatccagacgttttggtttagcctatcttattttgctttgtgcaacatgaattttaagtgtatggggtattacagtgccttgtgtgaacctgcttatctcgtgctgaaccccgttatgcatggaagtactcatcttttgttctgctaaaaattaaagtagttctgcggctaaaaaaaaaaaaaaaaaaaaaaaaaaaaaaaaaaaaaaaaaaaaaaaaaaaaaaaaaaaaaaaaaaaaaaaaaaaaaannngggggcggccgttctaaaggatccaa

SEQ ID NO: 263300 - DNA, 457 bp, Zea mays
gattccgggtcgaccacgctcgatcgcgcgcgctctttgtgcgcgcatggagaagcgcgaatgcttgcaaatagacagcctaccccagtcagtctgcgcggtcctacccaattagactcgagacgctaaaaaaaggtgtgtgagatccactggggcacaagtttttgaaaagaaatgtctcacggggtttgagctggccgattgctgcaacagttcatgaacaagtctgcatgaaaggatgcctttcacctttgggtccgggttaccccttccatgtccttcgtatcaacaagatgctttcgtgtgctggggctgataggctccagactggaatgaggggtgcctttggcaaggcctcagggcacctgtgctagggtggacattggcaggtatccttctgtcgacgaagacacatgctgacatgcagtgagcctggacgcgcagtcagtccctgcgc

SEQ ID NO: 263301 - DNA, 530 bp, Zea mays
caaaaaatttattgaaaacaaaaaagtggggtttcaccaagttcagccgtgccgactacctgaagtacaagagtgagggtagaattgttcctaatggtgtcaacgcaaagctgctcggtaaccatggaagactttagaagcgtgctcctgggaaggctttcctcgaggccgttgcttaagtccaatctacagttggaatgcgaatccaaacgttttggtttagcctatcttattttgctttgtgcaacatgaattttaagtgtatggggtattacagtgccttgtgtgaacctgcttatctcgtgctgaacatcgttatgcatggaagtccttatcttttgttctgctactaaaaaaaaaaaaaaaaaaaaaaaaaaaaaaaaaaaaaaaaaaaagggcggcaaaaaaaaaaaaaaaaaaaaaaaaaaaaaaaaaaaaaaaaaaaaaaaaaaaaaaaaaaaaaaaaaagggggggccgttttaaaggatcaaatttaattacccgtgcttgcaaagtaataatttttttt

SEQ ID NO: 263302 - DNA, 481 bp, Zea mays
aggaaactcgcacgcacgcactctcttccccccctcctgcccactctccaacgcggcgcaagcatctagcaaagctgcgcagcgcagccagcaagcaagcttggtccggagagacaacagatataagccagccagagagcagcagacggaggcatggcgacgtccgtggcctgcgccttcttcttcgacgcggagccgctgggcgagcccgggcggcacgcgctggacgcctgcgcgctctgcgccaagccgctgagccgcaacagcgacatcttcatgtacaagggcgacaccccgttctgcagcgaggactgccgctacgagcagatgcaccacgacgcggcgtacgcaaggcaggcggccagcagccggcggaagcagcagcagtcgcagtcgcagcggagcagaggggcctcgtccgtgggcgccaaggcggacgtgtccgtggccagctagtcagtagtaaaagcaagcacagcga

SEQ ID NO: 263303 - DNA, 1059 bp, Zea mays
cttacgcgtgggcggacgcgtgggcggacgcgtgggtatttggcactggcacaaacgcagcatatgttgagaaggcaaatgctattccaaaatgggagggtgagctgccccattcaggagacatggtcatcaacatggaatggggtaacttcttctcatctcatctccccatcactgaatatgatcaagaattagataaggagagcttaaatccaggagaacagatttacgagaagttaacgtcaggaatgtatttaggtgaaattgtaaggagggtgctccttaaaatatcattgcagtccgccatttttggtgatattgaccacactaagcttcaaacccatttccttctgcggactccacatatttcagcaatgcaccatgacgaaacatctgatctgaagattgtggccgaaaattttgaagaaaacctagagattacaggcacatccttggaggctcgtaagctggtcgttgaaatctgtgacattgtggcgacaagagcagcccggctggctgctgcggggcttgcagggatcctcatgaagatcgggagagatcacagcgtcgaggaccaacggtcagtcatcgccatcgacggaggactgttcgagcactacaccaaattccgccggtgcttggagaccacactgggtgagctgctaggagacgaggcgtccaaggcggtggccatcaagcatgccgatgacggctcaggaataggtgctgccctgattgcagcttcacagtctcagtacaaaaacgacttagtggccgtcaagcatgcagatgacggttcaggagtcaagtatgcagaagacaagcgtgcagatgacggatcagaaataggtgctgccctgattgctgcctcgcaatctcagtagagagatgtccgagtggtatagaggtagcaagtagctatgatttgtttccaacgtcttaactgtccagcgtctgcagtttagcatgctagagctggatgcgatctgtaaccaaaaccaggcttggccaactggctgttcataattccaataacagcagggttgcagatgtaaaata

SEQ ID NO: 263304 - DNA, 1878 bp, Zea mays
  unsure (1)..(1878): unsure at all n locations
gcgtagtgcggagctccagtgaaggaaccaaacagcgcaacacacgaacacaccaggcggcaggctccaccccgtccttttcctgccttttccccccgtcgagttaatccatccagtcgccaaaagctttgctaaatttcacgtgtctcgcctcgagtcgtccctaatccgacgatgccttgttctactcctaaaaaaacccaaagatcctgactttctcttgctgctagcctcccttttcccttctcccttaatcgcactgttggaagctcttcgctgtcacccccacccacctccggcgctcttttttagcattttccttgggctctggactccaaaatcccagccttttgtttgcttctctgtctcctgctgattggtgtccccgggtccaggactcttgatttgctcctcgcgggggttcggtcccatggcggcagctgcgctggcaatggcagagcaggtggtggccgagctccgagtgaggtgtgagacgccgccgtcgatgctgcgcgaggtggccgtggagatggcccgcgagatgggcgcggggctggagaaggacggcgggagcagggtcaagatgctcctctcctacgtcgataagctccccacagggagagaggaaggattattctatggattggacctaggaggaacgaatttccgcgtcttgaaagtgcaactaggtgggaatgcgaagcatgtcgttgaccgtgactccagagaagtcggcattccgccacatctgatgtcagggagctcctcggagctttttggtttcattgcttctgaattggccaagtttgttgacgatgatgagaagtgcgctaacatttcgaatggcaagaagcgagaaatagggttcacgttttcgttcccagtgaagcagcgttctgtagcttccggtacgcttgtcaagtggacaaaggcattttccattaatgatgctgtaggcgaagatgtggtggctgaactgcaaacagccatggagaagcaaggtctggacatgcatgtagctgcattgattaatgatgctgttgggacgctggcgggagcaaggtactacgacaaagatgttgtcgctggtgtaatatttggcactggcacaaacgcagcatatgttgagaaggcaaatgctattccaaaatgggagggtgagctgccccattcaggagacatggtcatcaacatggaatggggtaacttcttctcatctcatctccccatcactgaatatgatcaagaattagataaggagagcttaaatccaggagaacagatttacgagaagttaacgtcaggaatgtatttaggtgaaattgtaaggagggtgctccttaaaatatcattgcagtccgccatttttggtgatattgaccacactaagcttcaaacccattgccttctgcggtatgtgtcagcttggctttttttgtagctgcactctttatgttaaaatctggaacaaggttgcgaagcattggcttcaaaatttaaattacatgcttatgtaggccgttcatcatgttttatgatttaattgaacagatcattgtggagtgtagcaacaaaaaatgtcaaattcaattcaagcttggcttgtgctaataattctaggtctatgtggttcacaggactccacatatttcagcaatgcaccatgacgaaacatctgatctgaagattgtggccgaaaattttgaacaaaacctagagattacaggcacatccttagaggctcgtaagctnggtcgttgaaatctgtgacattgtggcgacaagagcagcccggctggctgctgcggggcttgcanggatcctcatgaaagatcggagagatccagcgtcgaggacaacggtcagtcatcgcatcga

SEQ ID NO: 263305 - DNA, 508 bp, Zea mays
cggcagtcccacaagatcacagcacatacgcttcctccattcccactcgctcgcgatcgcgatccgcgaccgccagcgatgggccgcggtgggacgccccgccgcttctgcagaaagagaaaggccaggtgaggtgctcgacgcgggagcgggaccggagtggcgccagcgtcccattcccggccaacctccctgttcatctccatgccgacctgactcggactcttgatttgctcctcgcgggggttcggtcccatggcggcagctgcgctggcaatggcagagcacgtggtggccgagctcccagtgaggtgtgagacgccgccgtcgatgctgcgcgaggtggccgtggagatggcccgcgagatgggcgcggggctggagaacgacggcgggagcagggtcaagatgctcctctcctacgtcgataagctccccacagggagagaggaaggattattctatggattgaccctaggaggaacgaatttccgcgtcttgaaagtgc

SEQ ID NO: 263306 - DNA, 628 bp, Zea mays
cggccagggtggcgactgacgagatggggagagagagaggcgaggaaggagggagagagcacgggggcttgatcgaagatggatgccggagcaaaggtggtgaagaaggccgcggcggggcgtcgcggcgggggcggccccaagaagaagccggtctctcgctccgtgaaggccggcctccagttccccgtaggccgtatcggccgctacctcaagcagggtcgctactcccagcgtgtcggcaccggcgcccccgtctacctcgctgccgtcctcgagtacctcgccgccgagctcctcgagttggcggggaacgcagcgcgggacaacaagaagaaccggatcatcccgcgacacgtactgctggcgatccgcaacgacgaggagctcgggaagctactggccggcgtcaccatcgcacacggcggggttctgcccaacatcaaccctgtgctgctccccaagaaaaccgctgtcgctgctgccaaggaaggcaaagagaagaagtcaccagaggccgcgcgcagtcgcataagtgccgctcgagtctgcatgtgtcctgcttcttgctttgactaacctctgtgcgtgcgtatgcgtgtgtgagccttattggtgtcgggatgtg

SEQ ID NO: 263307 - DNA, 635 bp, Zea mays
cctcgctgccgtcctcgagtacctcgccgccgagcggctcgagttggcggggaacgcagcgcgggacaacaagaagaaccggatcatcccgcgacacgtactgctggcgatccgcaacgatgaggagctcgggaagctactggccggcgtcaccatcgcacacggcggggttctgcccaacatcaaccctgtgctgctccccaagaaaaccgctgtcgctgctgccaaggaaggcaaagagaagaagtcacccaagaaggccgccgccgccaagtcgcccaaaaaggtggccgcctcgtaggtccctggcaatgctgatgcactgtctctctctgtcctctctgaactgaaacgctcctagctgtcgttgtcggtcatggtcgttgttgtttgatgcgcttttattgtggttgttcgtgtgtaattgcttgcctttcgcccatttggcatgcactgtgtagggtcacactggtctaggttttcaatctgggaaacaccggtttagattcaaggagcgtgaactgtgaaggcaggtgagagggtgggatctgtgaatcattaggtgctgtttgtaataagattgcaaagatgtgtaaaatttgttttgtgcttcaaaaaaaaaaaaaaaaaaataa

SEQ ID NO: 263308 - DNA, 705 bp, Zea mays
cgatccccacagagtcagggcgtgcaggcgggcgggcgggcgagcgagcgagaggaaaagccaaggcggcagcagtaggcagccaccatcaataaagaaggtccaagcatgtcgggggtgtgggtgttccggaacggcgtggtgaggctggtggagaacccgacgtcggggaacgcggcggcggcgccgggcaagcgcaaggcgctgctgcacacgccgtccggggaggtggtcacgtcctacgcctcgctggagcgcaagctggcggcgctcggctgggagcgctactacgccggcggcggagacggcggcggcgccggcctgctgcagtaccacaagcgcacctccgtcgacctcatctcgctgcccaaggacttcgcccacttcggctccgtccacatgtacgacatcgtcatcaagaaccgcgacgccttccgcgtcatcgacgcctaattataagctagcggatgcagcagatgacagatactcacctctcctcgctcgctcctcgctccggccagtgcatcatctacctcgctgtagctacctacctaccctaatataatagcagctatagccttcgtcacccattgctcgatcgatttagttgccgtgtcgatctcagtgccgcgttggtctaaattaatatatatagatcatgtactgatgatttggtttgttcatgcatgttttctctattttaag

SEQ ID NO: 263309 - DNA, 309 bp, Zea mays
ctcgagccgattcggctcgagatcgatccccacagagccagggcctgcaggcgggcgggcgaggcgagcgtgcgagaggaaatgccaaggcggcagcagtaggcagccaccatcaataaagaaggtccaagcatgtcgggggtgtgggtgttccgggacgccgtggtgaggctggtggagaacccgacgtcggggaacgcgagcggcggcgccggcctgctgcagtaccacaagcgcacctccgtcgacctcatctcgctgcccaaggattcgcccacttcggctccgtccacatgtacgatcgtcatc

SEQ ID NO: 263310 - DNA, 628 bp, Zea mays
agcaaaagactccaattttcccacggctactgaatcacggatgcttaaatctccccaatccgtatctctgtttccctcacagcgcggctgcccgtaaccactccaggtctccagcgaagcaggctcaggcgcaacgcaacaacacaaggcggcggttatggcctctgctgctgcgacggctacgatggggacggggaaggtggtttgcgtcaccggcgcatcagggtacatcgcgtcctggattgtcaggctcctactcgaccgcggctacaccgtccgcgccaccgtgcgagacaccgctgacccaaagaaaacattgcacctgactgcgttggatggtgctaaggataggctgcacttatttaaagctagcctgctagaagagggttctttcgatgctgcagttcatggatgcgacactgtatttcatactgcctctcccttttatcacaatgtcaaggatgctaaggcagagttacttgacccagcagttaagggaacactcaatgttctcggttcatgcaagaaagcttctattaaaaaggtggttggtacatcatctatggctgctgtagcctacaacgggaggccaaggactcctgaggtcacagttgacgagacatggttt

SEQ ID NO: 263311 - DNA, 1011 bp, Zea mays
tttttaaaacacgacgcgacagtacactggtgggaatgctttcagcaccacaaactgccttgctccccttgctaaggtcattcatgacaacttcggcattgttgagggctggatgacaactgttcatgccatcactgccacccagaagactgttgatggaccctcagccaaggactggagaggtggcagggctgccagctttaacatcattcccagcagcaccggtgctgccaaggctgtcggtaaggttcttcctgaattgaatggcaagctcactggcatgtccttccgggttcccaccgtggatgtgtcagttgttgacctcactgtcagaatcgagaagggggcctcttacgaggaaatcaagaaagctattaaggctgcttctgagggcccactcaagggtattatgggctacgtggaggaggatctggtttccaccgacttcaccggtgacagcaggtcgagcatcttcgacgccaaggccgggattgccctgaacgaccacttcatcaagctcgtctcttggtacgacaacgagtggggctacagcaaccgcgtcgtcgacctgatccgccacatgttcaagacccagtagagagagatatttctgcctccctatcgtgggtcgtccccaatggcctttggtcgcagaccatctttgctgcttgtctatgctgagaataaatgtgaacggtgcccctggacgctggatccatgctggttttggacacgttgtctttttgtgtttaacttatctgctaccgtcctgtaacgaattcactaagttctagttcttttgtgctttgttaagaatataaacaatgaggtttcaattttggtggcgccatccggtctgattgcgtactagtatcatgcatatctgagctggtctttccggagtaacagtttttttgtttagtctgactggttctcagactgttcatttgaactgttcatttggtctgttcatttggtcttaatacatatcgacttttacagtgttgtctt

SEQ ID NO: 263312 - DNA, 723 bp, Zea mays
gaaaatgtttgacggaccctcagccaaggactggagaggtggcagggctgccagctttaacatcattcctagcagcaccggtgctgccaaggctgttggtaaagttcttcctgatctgaatggcaagctcactggtatgtccttccgtgttcctactgtggatgtctcggttgttgacctcaccgtcagaatcgagaagggggcctcctatgaggatatcaagaaagctattaaggctgcttccgagggtccactcaagggtatcatgggttatgtggaggaggatctggtttctaccgacttccttggtgacagcaggtcgagcatcttcgacgccaaggccgggatcgctctgaacgaccacttcgtcaagctcgtctcgtggtacgacaacgagtggggctacagcaaccgcgtcgtcgacctgatccgccacatgttcaagacccagtagaggggttttttccccctgcttctcatggatggttgctgcttgtgtatgccgagaataaatgtggatggcgcgtgcctctgggtcgccaggttcatgctgagtctggacatgttttgcacttttgtttcccttcctgctaccatctgtgacagatccgctcgctaatatgggacctgagattagctttttgctgcttgtggtgaggttgcagttttgttaaaaaaatattaattttttttattcttataactttattttattattttctt

SEQ ID NO: 263313 - DNA, 822 bp, Zea mays
ctcggcccggtcggaattcccggaccgacgcgtccgcccacgcgtccgcccacgcgtccggggctgccagctttaacatcattccgagcagcaccggggctgccaaggctgttggtaaagttctccctgatctgaatggcaagctcactggtatgtccttccgcgttcctactgtggatgtctcggttgttgacctcaccgtcagaatcgagaagggggcctcctatgaggatatcaagaaagctattaaggctgcttccgagggtccactcaagggtatcatgggttatgtggaggaggatctggtttctaccgacttccttggtgacagcaggtcgagcatcttcgacgccaaggccgggatcgctctgaacgaccacttcgtcaagcttgtctcgtggtacgacaacgagtggggctacagcaaccgcgtcgtcgacctgatccgccacatgttcaagacccagtaggctagtagagagatagatttctgcctccctatcgtgggtcgtccccaatggcctttggtcgcagaccatctttgctgcttgtctatgctgagaataaatgtgaacggtgcccctggacgctggatccatgctggttttggacacgctgtctttttgtgtttaacttatctgctgccgtcctgtaacgaattcgcaagttttagttcttttgtgctttgttaaagaataaacaatgaggtttcagtttaaaaaaaaaaaaaaaaaaaaattacaagctcagagactatgacctcaatgacaatgctttttcacctaaacttggacatgcaaaaaaaaaaaggggcgccctttt

SEQ ID NO: 263314 - DNA, 730 bp, Zea mays
aattgattcttttaataaccactcaatttatttctaaaccaatgtctgaaggtaataagcactccttgttggattaatcgccactaccacatgttcagtgtctatgtttggtaatgcttgctgttgattacagggctgcttccgagggtccactcaagggtatcatgggttatgtggaggaggatctggtttctaccgacttccttggtgacagcaggtcgagcatcttcgacgccaaggccgggatcgctctgaacgaccacttcgtcaagcttgtctcgtggtacgacaacgagtggggctacagcaaccgcgtcgtcgacctgatccgccacatgttcaagacccagtagaggggttttttccccctgcttctcatggatggttgctgcttgtgtatgccgagaataaatgtggatggcgcgtgcctctgggtcgccaggttcatgctgagtctggacatgttttgcacttttgcttcccttcctgctaccatctgtgacagatccgctcgctaatatgggacctgagattagctttttgctgcttgtggtgaggttgcagttttgttctgtgtttctgtgttgttagcactcctatgatttaggccttgttccaatctcgcgagataaactttagcagctattttttagctacttttagccatttataatctaaacatgagagctaatggtgataaaaaaaaaaaaaaaaaaaaagggcggccgct

SEQ ID NO: 263315 - DNA, 297 bp, Zea mays
ccatctgtgacagaaccgctagctaatctcacgtcccatattacccagcggttctgtcacagatggtagcaggaagggaagcaaaagtgcaaaacatgtccagaaccgctcgctaatatgggacctgagattagctgttaaaaaatatgtaatattgctaaacatgtctatattcatcatgaacctggcgacccagacgctcgctccatccacatttattctcggcatacacaagcagcaaccatccatgagaagcatgggtgaaaaacccctattgggtcgtgtacatgtggcgga

SEQ ID NO: 263316 - DNA, 342 bp, Zea mays
ttgcccacgcgtccgaccctcgatagggagggtcgtcccaatggcctttggtcgcagaccaactttgctgcctccctatcgagggtcgtcccaatggcctttggtcgcagacaagcagcaaagttggtctatgctgagaataaatgtgaacggtgcccctggacgctggatccatgctggttttggacacggttgtctttttgtgttttaacttatatgctgccgtcctgtaacgaattcgcaagttttagttcttttgtgctttgttaagaataaacaatgaggtttcaaaaaaacccacggtcgcccacgcgtccgcggacgcgtgttcgtatgtgtgtg

SEQ ID NO: 263317 - DNA, 486 bp, Zea mays
  unsure (1)..(486): unsure at all n locations
aaggccgggatcgctctgaacgaccccttcgtcaagcttgtctcgtggtacgacaacgagtggggctacagcaaccgcgtcgtcgacctgatccgccacatgttcaagacccagtagagggttttccccctgcttctcatggatggttgctgcttgtgtatgccgagaataaatgtggatgtcgccaggttcatgctgagtctggacatgttttgcacttttgtttccatttctgccatcatctgtggcagatccgctcgctaatatgggacctgagattagctttttgctgcttgtggtgaggttgcagttttgttatgtgtttctgtgttgttagtactcctatgatttaggtgttcgttatatagaattaaccccccaaatatatgggccaagtgaatagatttaacccaccaaatatctgggcccccccccaaaaaaacacaaaaaaaaaaaaaaaaaaaaaagggaatntattnaangngg

SEQ ID NO: 263318 - DNA, 454 bp, Zea mays
caaagctgattatgggatgatgatatttgctgacaagagatacagtcggcatgataaacggtccaagttgcctgggtggatactctcgcatttgcatgatgcgcacctaaatctgagcactgatatggctctccatatagctcgtgagtttctccggaggatggcacagccatatgacaaggcgggaagcggtggcaagaaaacgctgttaaccgaggaggatctggagaatttggcgcaggatggcatggcgatgtaaaaaaatgagggtactgttgtacatttctttttgtagccattttatggcggtagataacttgtttgaagcatcggtaatgacgtgtggggccaaatcattcttactcgagttcgcacggatttgatcatccgaacatcatggtcgatgttcttctgagtgggtgtgggtgtggggccaaatcatgtcagcgggcca

SEQ ID NO: 263319 - DNA, 483 bp, Zea mays
cccacgcgtccgcccacgcgtccgcccacgcgtccggctgatttgtggcgtcagctactgccactccatgcaaatctgccaccgagacttgaagctggagaacacgctgctggacggcagcccggcgcctcgcctcaagatctgcgacttcggttactccaagtcgtcgctgctgcactcgaagcccaagtcgacggtcggcacgccggcgtacatcgcccccgaggtgctctcccgccgggaatacgacggcaagacagccgatgtgtggtcctgtggagtcactctttatgtgatgctggtcggtggttacccttttgaggacccagacgacccaaagaatttcagaaagacgatcgggaggatcatgtcaatccaatacaagataccagagtatgtgcacgtgtcgcaagactgcaaggagctgctttcaaggatctttgttgcaaactctgcaaagagaataacgatcagggagatcag

SEQ ID NO: 263320 - DNA, 627 bp, Zea mays
tctgctattccgcattacagactggcacattccgggccgtcgcgtcggggcggtatcaaaattttccatcggcttgggagccagccgaagctcaagaatggagaaatgtcagccatatgtccagtcgtcagtcacttcccgtgacaagcaaaagttgtttgtccgattctttggtgtgctctacagagtgttcaacaagacgaacttcatgctgctgttggacgacgattgggagccactgatggataattaccggcctttgggaataaaatctctgaggttcagcacattttctcttggaaatatgtcaccaaagatagaagagcaaaaaattcagtacaccattcataccattggaggaagcttaactgcagttcatggattttttgtccaacttggtgtcaatgtggatacgagtgactgggagcttcaagctctgggaagactttcggttactgtggcaaagcaagccaagctcgaccgcttccccatcaccattagtgatccaatctcagctacgttcggtgaaccatttgagaaagccaacccaagccattcctccacagcaatcgtttgtcgagctggttcaggaattgatatggttgttggccttgtttcttctagtct

SEQ ID NO: 263321 - DNA, 892 bp, Zea mays
  unsure (1)..(892): unsure at all n locations
cggaatctttgccaagcggcgccgctactgtccggcaaggcgaccccgtctctcggccggcgttgatctggcgggcggagtggcggcgcgatgggcatctcggcgaggtggctcaagtcgttagttgggttgaggaaggtggggcggcagcagcagcagcggcgaaaggatgatgcagatgttggtcgaatgattcagcactctcaagatgacaatagcattgctgcacaagaaattccagaggtttcttgtggaaatggtccacctcaagatgactctaatgtaccttcatgcttcgagcctgctcgtagttcagctcatatgccattttgtcaaactgaagaagcccagaaagagatctgggctgctacaattattcagacagcatttagagctttcctggcaaggagagcccgccgagctttaaaagggttggttaggcttcaagcccttgtaagaggtcatatagtaagaaagcgagcagctacgacactccgttgtatgcaagctttggtcagggttcaggcccgtgttagagcaaggcgagttcgcatggctttggaaaaccagactgatcggcaaaatacttcaccagagcacacgatcgtggcacgtgtcagagaaatcgaggatggctggtgtgatagtatcggttctgtgggagatatccaagcaaaacttctaaagaggcaggaagcggcagctaaacgtgagcgagccatggcctatgctctagctcatcagtggcaagcaaattcaagacaacctacagcatttgaacctgacaagaacaacttgggctggaattggctagagagattgattgctgttcagccttgggagaatcngttccttggcacttacgggacagatgggatttttgtagttaatg

SEQ ID NO: 263322 - DNA, 672 bp, Zea mays
aaaaagaataccaaagactggcgggaaccagtttatacagatgactgacggcagctgttgtgtgttcttttttggatcgtcgcagagagcaagatcttcatcgaactctttcattgtcttcacaaacgtcctcgcaccttgcattatcaacctttccaccatgaacagctgatagttgttcttgactatcggattcaatatgctgctgaagttagatgaatatgccagcctgtacttgtctgatagagatgaaaagaagcctggggtcctttcatttgaggaaatgaaaagagtgcgacctggtcgaatccactttgcgattcttttcttgataaactcagggcgagtatctctgtcaagatgaggatgaagacttcgctcaactccaaatctatctttcctattcttcagtaggtcacctcgtctcacatgaatagcatcatagtcaccaagtatctctttcatcttgtttgctgcatccctcagtttccttgttgccattgttggcagaaaagtgtatggcaacatcacagaactccgcttggtccggtccttgcactccataaaccaagcaagaggacttgctgtgcggtttatgaggagagcaccagagtaatttgaattttgtttgagttcagctctgctaaccccttgcacatgcaccaccaagcc

SEQ ID NO: 263323 - DNA, 1051 bp, Zea mays
gattcttatgcttcttctacctcccggcctcctcccccttcttctttgcctgcctggttagtagctcacctcacaccacacagctggcagacagccagacacgcgctgctttctgatctctccccggatcggaggctcctcccaacataccaccctgccagccgcgccgccacgtccacgccggccggccaccaagcaagcatggatatggtttcgcagtccgagcacctgtgctacgtccgctgcacctactgcaacaccgtgctcgcggttggggttccatgcaagaggctgatggacacggtgactgtcaagtgcggccactgcaacaacctctcctacctcagtccacggccccccatggtgcagccgctctcgccgactgatcaccctttggggccattccagtgtcagggaccctgcaacgactgcaggaggaaccaaccgctgccgctggcttcgccgtcatcaactgagctaagcccgagaatgcccttcgtagtcaagcccccggagaagaaacaccgcctcccatctgcttataatcgcttcatgagggaggagattcagcgcatcaaagctgcgaagccagatatccctcacagggaggccttcagcatggctgccaagaattgggcaaagtgtgacccgcgctgctcgacggctgcctctaccgaaacttctaacagcgctcctgctgagcctagagttgtgcccactccccaggtaactgagccacgctttgacctggaggatagggccaaggggcaagtcattgagagcttcgacatcttcaagcatattgagcgcagcatctagaggtcgttcgatgccgctgttgtagcccagtatcgatcgagtaccatcagctatatgtataacctatcccgtatcgccgtcgtcgcctcgcaatcatgcatccccatcctgtacttttacccccgtacgtgttactgttgctgttattctcgttatggttggattgtacgcaccatttaattatgaacagctgctacctatatatataatatttgccttcttttttgaacct

SEQ ID NO: 263324 - DNA, 709 bp, Zea mays
cctggacggtgaacgagttctttggcttctccgcgtccggcgccggcctcgccttcgctgagaatgacacgtccaaggccgacagcgggaagctcgggagcaccgacggctcgccggccggccggccgtcgtccgacgcgtcccaggacttcttcgggcaggtgccggagttccaccagtggtccgtgccggagctcccttccccgcccacggcctcggggcttcactggcagggcggcccgcgccaaggcgcggccaccaccaccgacgtggccgccgtgttcgtgccggacatctcgtccccggagaaccccttctggtgctacgccaccgccgctggccaggcgccgacgaagcgccgcaggagatgttgaagtagggaagatcgagattgtcttgttcagtactggagtggcgtaggcttgcaagaaacaaacacagttgctgtactgtgtactcccatggtgacgtactatctatatactccatatcgcagcagcgtagctcgtagggaagtgcggagctagagtggttaattagggctactctactactaccattgtatttgttttggtgctgttgacgatgattaattaggacgcctaatatgtagtacggggtaggttggttgtgtgtgagcttggcgcgtgctatcagagaattgatgagaaaaaggtaagatggaaataaagaaaacgattgttgtgcc

SEQ ID NO: 263325 - DNA, 755 bp, Zea mays
atttcatcccagaagagccccgtagcttgaagggtattgtatggaagtgtaggtcttgtggcgatacacttctgaggttcacaaaccagggtcctacatctgatgcctgctgcattgagaacgatgacatcaatgcatcctgtgggaacatgctttgttattggcacaaccacaagaatgactgttctggtacatatgaaaaaacgatgaagttagaagcaccatctcaaaagaaagttgcaggaggtgctcagttgcttctgactttgccatcagaaatgtccaacattcaagaatccagttcatctatattgcagttagagtggagtactaaatccacagaaccaaatgctgaagacaagcatctttgtctagggagtggcagcaatgggaaacctcagggaagtagctcctcgaagaaagcaggtaagaggaacagtcctgaaatggttggggaaacaagtgttctgcctgctgcggcccaaggaaaacccaatcaaaaccatggattggttgcgatggcgaagcaagcgcctgcgtctgtggaaggctacagtgatgcagaatcaccggggagacatacatcaaagaaagctggcaagcgacataagcctgatgatcttcagaaaagcagtgttctcccttctgtaccccagggaacaacaaaaccaaagcatgcgttggttgcgacagagaataaccctctctcctcagcagagcgccgcaacgatgcaaaatcgccaaaaaccaatacc

SEQ ID NO: 263326 - DNA, 1528 bp, Zea mays
  unsure (1)..(1528): unsure at all n locations
nccacgcgtccgcggacggtgggcggacgcgtggggcaaacgcggctgcgagcgcggcgcccctctcccactccccagcagccgccagcccgcacacccctccctcgcgcgctcagggtttcggaatggaagccgaggcggcggccaagaggacgcgggacagcggggaggacgccgccgcggcggggatctccgccgtcatcccgggatggttctccgagatcagccccatgtggcccggtgaggcgcactctttgaaggtggacaaggtgctgttccaagggaagtcagactaccaaagcgttatggtctttcagtcctctacgtacgggaaggtgctcgtcctcgatggagttattcaggtgacggagagggatgagtgtgcgtaccaagagatgatcactcacctgcccctttgctccatcaaagaccccaagaaggtgttggttattggagggggtgacggtggtgttctgcgtgaggtttcacggcattcctctgtggaacaaattgacatctgtgaaattgacaagatggtggtagatgtctccaaacaatttttccctcatttagctgttggatttgaagaccctcgtgtgtcattacacattggagatggggttgccttcttgaaaaatgctccagagggtacatatgatgcagtaattgtggattcttctgatccgataggtcctgctcaggagctttttgagaagcctttcttccagtcggtggccagagctttgcgtccaggtggagttgtatgcacccaggcagagagcatatggctacatatgcacatcattgaagatattttcgtcaattgccgccaagttttcaaaggctcagttaactatgcttggacaacagtacctacataccctagcggagttattgggttcatgctttgctccaccgaagggcctgctgttgatttccagcaccctgttttcaacatcgaggaggatgaacattctacgaaatcaaaaggaccccttaagttctacaactcggagatccacacggcatcattctgtttgccctcttttgcaaagagggtaattgagtcaaaggcaagctagacgtgaggatacttcaccaagtccagtcgattgggttaagtaccttaggcgcaacacaaaatttgttgtcgtgtgaaaatgggatgcctccctcccccaccccccacttgatgaataagcacatgagatgagatgcaacggttatcggagttgtcagtctatacgattctgtctgttgtatgtgccggctgccaggtgcagctatgaaaacgttttgcaatagctgttttcggcagtgctctgatcaggttgagttttggacatcatttattatgttcctgcatccatacctgatactccctccgttcttttttatttggcgcggtttagttcaaaaatgaactagtggtgataaatattcgagagaacggaggtagtacctcggatggaatatataagaaataaaactgtgtcatggttgttgccatcctaaaaaaattaatnta

SEQ ID NO: 263327 - DNA, 520 bp, Zea mays
tcctaatctcaaggccgcggctgcgagcgctgcttgccacctacgcaactccagaagtcctccctagacgccgccagccgcgcgcacacccaccgagagctcctcgggctttctttctccgttcctccctcgcgcgctcagggtttcacgatggaggccgaggcggcggccaagagggcgcgggagggcggggaggacgccaccgcgccggtggcgggggccgaggcggcggtcgccggtgctggcgagcaggcggggatctccgccgtcatcccaggatggttctccgagatcagccccatgtggcccggtgaggcgcactccttgaaggtggagaaggtgctgttccagggcaagtcagactaccaaaatgtgatggtttttcagtcctccacgtacgggaaggtgcttgtcctcgacggagttattcaggtgacagagagggatgagtgtgcgtaccaagagatgattactcacctgcccctttgctccatcaaagaccccagaaggtgttggttat

SEQ ID NO: 263328 - DNA, 567 bp, Zea mays
ggttaactatgcttggacaacggtgcctacataccctagcggagttattgggttcatgctttgctccaccgaagggcctgctgttgatttccagcaccctgttttcaacatcgaggaggatgagcatcctatgaaatcaaagggaccccttaagttctacaactcggagatccacacggcatcattctgtttgccttcttttgcaaagagggtaatcgagtcaaaagcgaactagatgtgaagggtatctccaagggctaagtaccttaggcgcgcaacacagaatttgttgtagtgtgaaaagcggatgcctccctcccttttctccccctttgatgaatagtataagcacaggagatgagatgcaacagttatcggagttatcggtctacatggtcctgaccagtcgtatgtctcggctgcctggtgcagctatgaaaacgttttgcaatagcttttttcggcagtcctcacatcatcacggttgtgtttccgcttccatatctgaatggaatacatatacgtatgaaataaaactgtgtaatggctgttgctcggatccttttc

SEQ ID NO: 263329 - DNA, 336 bp, Zea mays
  unsure (1)..(336): unsure at all n locations
atctccaacctcggttcgcgagggcacctagggtttactgcaacaattgctgctacttggccgtttccaattagctgcaaccctgcatgggcgtgtgtttgctttgttttaacttgtttctcaattgtgtggtgttagatatgtactgtcgaactgctgtagttcaactttgacccatgcaatatccttttggatggaagtgaaaaaaaaaaaaaaaaaaaaaaaaaaaaaaaaaaaaaaaaaaaaaaaaaaaaaaaaaaaaaaaaaaanaaanaaaaaaaaaaaaaaaaaanaaaaaaaaaaaaaaaaaaaaaaaaaaaaaaaaanaaaanaaaa

SEQ ID NO: 263330 - DNA, 494 bp, Zea mays
gaaaaaccgggccgacggacgcgtccgcggacgcgtgggcggactcttgggcggacgctgtgggaaatatttaagctttattaggacagtgggacctaggtcaccaactgagtaggcttcacttttgagaacttgattatgcgggtattttgtacagaatttgacagctactcttcctaagtaaagcaatggtatgatcgtatgaggttgtgaaatgttaaagagaggttctataaatacttggcataatggtattcctcgtaggcagtctaattcaaggaacataaaaggcatatattgtgattacctccatgaccatcaaaaacatcgaagaacgttgtctcgctaccaagatctagcattgttgaatgatgtatggatgtatagattggtaaatattatgtcagtggaacaattttaagaaatagtctgaccgataaaaatggtaggcatctttaaaaaataaccatgcttgtagtgtgatgttgaacgta

SEQ ID NO: 263331 - DNA, 989 bp, Zea mays
gaattcccgggtcgaccggcgcttcctcccgttagactaggttaggctaggctagggtgtcgaccagctcgcggaaatggtggccttcaggttccatcagtaccaggtggtggggcgcgcgctgccgacgcccggcgacgagcaccccaagatctaccgcatgaagctctgggccaccaacgaagtccgcgccaagagcaagttctggtacttcctgaggaagttgaagaaggttaagaagagcaacggtcaggtcctggccatcaacgagatcttcgagcgtaacccgacgacgatcaagaactacggcatctggctgcgctaccagagcagaaccggctaccacaacatgtacaaggagtaccgcgacacaaccctgaacggcgctgtggagcagatgtacaatgagatggcttctcgccaccgcgtgaggtccccctgcatccagatcatcaagaccgccacggtgcacttcaagctgtgcaagagggacaacaccaagcagttccacaacagtgagatcaagttcccactcgtgtaccgcaaggtcaggccgccgaccaggaagctgaagaccacgttcaaggcttcgaggccgaacctgttcatgtgatttagctgtggtcagtgtatgtgatcgtaagaatctgtgttttaagttttgacgctaagacttgggtggtttgatgattcaactcgttttgaaacgtgcttggtgaaccatttgtgcatcgacttgtgccgagttgttcgtactcggcacactaatgttgatctatctggagtgggtgatttatttccttacctcggtcatcgcttctcctgcgttactgaatgaacgaatggtaatggtagtctcatggaaaaagagttccaaatttttgaactcatggaattcgaaatttcgtacgtgacacgcgtgtaaatcataatatgtcgtctgtaattcctatactgtgagcgtacgtattgtttatactcttcgttct

SEQ ID NO: 263332 - DNA, 815 bp, Zea mays
cccacgcgaccggccatctcccctgttaggttctaccaggagaccttcggcgtccctccggccacgcgagctcgccgaaatggtcgcccacaggttccatcagtaccaggtggtgggtcgcgcgctgccgaccccaaccgatgagcaccccaagatctaccgcatgaagctctgggccaccaacgaggttcgcgccaagtccaagttctggtacttcctgagaaagctcaagaaggtgaagaagagcaatggccagatgcttgccatcaacgagatctttgagcgcaacccgaccaccatcaagaactatggcatctggctgcgctaccagagcaggactggttaccacaacatgtacaaggagtaccgcgacaccaccctgaacggcgcagtggagcagatgtacaacgagatggcctcccgccaccgcgtgaggtccccctgcatacagatcatcaagacagcgacggtccacttcaagctgtgcaagagggacaacacgaagcagttccacaactcggcgatcaagttcccgctcgtgtaccgcaaggtgaggccgcccaccaggaagctcaggaccactttcaaggcgtccaggcccaacctgttcatgtgatgggcctcggcgggcgggctgtctgttgcacctgtgttttgtgtcttagtgtccagagagataaaggtttttgcctctgcaagctttgctgccccgtggactgatgatttttttggatgatggtattgtattgcaaacccttgactttggtcctactagttatgagaaggctgctgtgttacttgccctgtctcgcgca

SEQ ID NO: 263333 - DNA, 583 bp, Zea mays
  unsure (1)..(583): unsure at all n locations
cggtcttgaattcccgggccgaccgcacgcgaacgcgcacgcgtgggcggacgcctaggtggcatctggctgcgctaccagagcaggacgggttagcacaatttgaacaaggggtaccgcgacaccaccctgaacggcgcagtggagcagatgtacaacgagatggcctcccgccaccgcgtgaggtccccctgcatacagatcatcaagacagcgacggtccacttcaagctgtgcaagagggacaacaccaagcagttccacaactccgagatcaagttcccgcttgtgtaccgcaaggtcaggccgcctaccaggaagctccggaccactttcaaggcttccaggcccaaccttttcatgtgagaggtatatcgtacccgtgttctgtgtcttgagcgcccgagagataaggattcttcctgtgcaagtttttggtgccctgttcgttgagcactttgtttgattccagttaaggatttgaatgatgctgtgtaaaacaatgacttgtctgcaattagttatcaactactgctattttaaaaaaaaaaaaaaaaaaaaaaaaaaaaaanggacggccgca

SEQ ID NO: 263334 - DNA, 821 bp, Zea mays
agcgggggtcctctatagtcgatcctttcgtccgtttatatctgcaccacccctccggcgacgccagcttattaaaatggtggggcgagacgttccatcaataccaggtggtgggtcgcgcgctgccgaccccagaccgatgagcaccccaagatctaccgcatgaagctctgggccactaaccaggttcgagccaagtcgaagttctggtacttcctgagaaagctgaataaggtaaagaagaccaatggccagatgctccccattaacgagatctttaaacgcaacccaaccaccattaagaactaccgcatctggctgtcgtaccagagcaggacccggtaccacaacatgtacaaggagtaccgcgacacgaccctgaacggcgccgtggagcagatgtacaacgagatggcctctcgccaccgcgtgaggtccccctgcatccagatcatcaagactgcgacggtgcacttcaagctctgcaagagggacaacactaagcagttccacaacagtgagatcaagttcccgctcgtgcaccgcaaggtcaggccgccgaccaggaagctgaggaccacgttcaaggcttcgaggcccaacctgttcatgtgatttagctgtggtcagtgtatgcgatcataagagtcacaagtgtttctgtttttttttaagttttgacttcctaatagtaatacttaatcggtttgatgattcaactcgttttgaagcgagcttggtgaaccaatcgacgtgttgcgggttgttcgctctcggcatacttgaagtggtaatgttgatctattcggattccttacctc

SEQ ID NO: 263335 - DNA, 345 bp, Zea mays
ttaaaatccacccaacccttccggccaacggccaatttaaacttggccagggggaccaccacaaacaatttcccaactcggcgatcaagttcccgctcgtgtaccgcaaggtcaggccgcccaccaggaagctcaggaccaccttcaaggcgtccaggcccaacctgttcatgtgatttaactgtggtcagtgtatgtgatcgtaagaatctgtgttttaagttttgacgctaagacttgggtggtttgaagattcaactcgttttgaaacgtgcatggtgaaccatttgccgacttccggcttgttcgttgaaaaaaagaaaaaaaaaaaaaaaaaaaggaggg

SEQ ID NO: 263336 - DNA, 496 bp, Zea mays
gaattcccgggtcgacccactcgtccgtctactcatatttttccacatattctctttgtcttccttgtatctagacccttgcgccagcggttatttgggcttcagagaaggcaactgtatatttgctcaaatatttgttgtctcaaatgttcacattcgctctgtttgcacttgtgaggttaaataattaacaaatgtcaccttggtaccagatgcaatccattcattagctttgagaagcttctcattaagaagtcacgtgaacttggttgcattgttcctgcttattattgtaagctttcgtgtttcagatccttaatgaaaccaaagagctgcaccatataaccaaccacaagcattaaaaccaggttgtactcatccaacattttactttcatatttgctgaagatgtcaacaaacaaaatagacaatgcagtaagtgtggcactactttgcatgtgctaacagcttggctaatggtttttcaatcttaatt

SEQ ID NO: 263337 - DNA, 812 bp, Zea mays
ggcgaccacgcgtccgcggacgcgtgggcgccaacgcgccggcgccctccgcccctgcgcctcagcctgctaccgtgcctgcgccgccctgtgctccggtcctccgccctccgcatctgcctggtaccgtgctagtgccgcctgcgcatccgtcctccgcctgggtctccgccctccgcggctccgccttgcgactttaccctgcacggcccgccgccggccggtcgcccgtccggagccactgacccgagtttccgtccagcactccagggaccagcgcctgttcgtccagagtaccaacagatctcgtcaagaggtctgaaggatgaggaagggactgcatcctcagatgcaatggatttcatatgtgacgcagagtggtaggctgatcaatatcatgatgaccaaggtgaaccatactggcaaagtgtaccacatgagggccaagcggcaaatggctcaaagcctcggccagattgcgaagttcaaacgtcgatatgagcaggaagcagagaaaagcaaagacaagtaggatggtgttgggaaggaggtgtagcctctgtggtcatagtcagttgtgttgactgcgaagttttcagctaaggaatttcgattgaatgattttattttagatcacatcatcttttgctccacttcaccattgggttgtaccccatcttgagcgaacactctggcacttgttgcatcttaaagccccaagaagaaagtctatggatcgcctttgtttgaccttcgagtttttgggtcatattttttataaaaaaaaaaaaggccgccgttttgagatcaag

SEQ ID NO: 263338 - DNA, 1373 bp, Zea mays
tcttgcgtccgcccacgcgtccggatatttgggaactttggtgaagtggtgaatgtggagctatcaatggaccgaatggttaaccttcctcgtggctatggatatattgaattcaagaagagagctgatgctgagaaggctcttcttcacatggatggtggtcaaattgatggaaatgttgttaagttgagattcactcttcaaccacgccaaagggctgcatcacctatgaaagctccgccccctcctccaaaaagagatgctcctcagattgaaaaaggtcttagcagtgctgaaaaggatgcccagcagcgtcctagggaatcatctccacgaaggaagccagcttcaccaccgcggaaacgatctccaaatcgaagggctgaatcgcccaggcgtccacctgacccatcacctaggcgtcgtcctgattctccgcctattcgtcgccgaccagatccttctcctgtcaggcgtggtggcacacctcctcgcaggagaccactgtctccagttagaaggcgttctccttcaccacctaggaggcataggtcaccgatgcgtccttcacctaggaggggacgtggcagtccttcaccacgcaggcgctcccctgggcctcttaggcggcgctcgccacctccaaggcgtttgaggagcccaccaagaaggccaccacctccacgtcgcttcagtcgctctcctcctcgccgaccccttcgctcccgctccagatcaatttctccaagaaggggacgagggcctccattgaggcgtggtaggtcagactcatcatattctcgatcacctactccaccaccaagaaaggggccaaggagggtatcaaggagccgcagccctagaaagcctcctagagcaggaagaagcgtctccagtgacagccgcagcagcagttcaccttcccctagacgtggcaggtagaaggaacccgttgcattgtgtatccggcaggtaaagccttttatcccctgactcagatcaagtgttggtttgaggagaagataaaagaaccctacggcaatgcttccagtggatctgcttaacatgcctggtgggctcactggcttgtgatttgtacccgagacagaattatctgccatgtgacatctggctcatgtacttgattgtaccccaagtatcttgaacttgtttccgcacaggagtctggatcttttttttttgcattaaaccattgtgctacttggtctaaagcgttactgggtctttcgtttcaggagtctggatccttcctctctttgcattaaatcattgtccccccaaaaaaaaaaaaaaaaaaaaaaaaaaaaaaaaaaaaaaaaaaaaaaaaaaaaaaaaaaaaaaaagggcggccg

SEQ ID NO: 263339 - DNA, 802 bp, Zea mays
tcgggctcttttcacagactcctcaatctcttgcgttccgtccttccccgaactcgctcaaaaccctagccaaacgccacaaggtcgccgtcggtcgcccggccgaatccgctgccgccgctgccgacggggacgatggcgaagcctctgcgtggccactccgcgtatcgctccacctcgagatcttgcttccgctcgccgtcccactccgtctcctccggctccgtctcgtcccgctcccgctccttctcgtcgtcgtcgtcccagtcccggagccgctcccctcctccggctaagcgcagttcgcctggagcacggaaagggcgatcaccttcaccgccccctaaaaagggttcaccttcaaagaaagtccgttcgccatcaccaccacttaaaaaggcttcaccccctaggaaagcgtcgcctcctgctgaatcagctgttctctgcattgatcatttatcaaggaatgttaatgaggctcacttgaaagagatatttggaaactttggcgaagtggtgaatgtggagctatcaatggaccgaatggttaaccttcctcgtggctatggatatattgaattcaagaagagagctgatgctgagaaggctcttcttcacatggatggtggtcaaattgatggaaatattgttaagttgagattcactcttcaaccacgccaaagggctgcatcacctgtaaaagctccgccccctcctccaaaaagagatgctcttcagattgaaaaaagtgttagcagtgctgaaaaggatgctcaacagcgtcctaaggaatcatctc

SEQ ID NO: 263340 - DNA, 420 bp, Zea mays
caaggagccgcagccctagaaagcctcctagagcaggaagaagcgtctccagtgacagccgcagcagcagttcaccttcccctagacgcggcaggtagaaagaacccgtggcattgtgtatgcggcaggtaaagccttttatcccttgactctatctgtatcgtttgcctgtgcttgtgacttgctgtgagttcaagtattggttcgaggagaagatgagagaacgctacagcaatgctccaaacggatctgctcaacatgcctggtcgaccgccctagtttgtgtggtctaccctagacagaattatctgctgtgttggcttgtgtactttgattgtaccccaagtattttgaagttctgaacttatttctgctaaaaaaaaaataataaaaaatataaaaatattatctaataatttt

SEQ ID NO: 263341 - DNA, 444 bp, Zea mays
ttggcattgtgtatgcggcaggtaaagccttttatcccttgactctatctgtatcgtttgcctgtgcttgtgacttgctgtgagttcaagtattggttcgaggagaagatgagagaacgctacagcaatgctccaaacggatctgctcaacatgcctggtcgaccgccctagtttgtgtggtctaccctagacagaattatctgctgtgttggcttgtgtactttgattgtaccccaagtattttgaagttctgaacttatttctgctaattggtgtctgaagtggatatgttgaatgtattttgttttgttggatagagttcctcagcattgccaccgtatgaaagatgaatctattgatcaaccaatttgtgcaaaaaaaaaaaaaacaatatgaaaaattaatactaaaaaattattaatatctttcaatattaaactttt

SEQ ID NO: 263342 - DNA, 763 bp, Zea mays
aattcccgggtcgagccacgcgtccgggttcgttttggtgccgcagctgtttaagatggaggatgtgagcatgggcatgtgggtggagaagttcaacaggacgcggcgggcggtggagatccggcacgacgtgcggttctaccagtcgggctgctacaacggctacttcacggcgcactaccagtccccgcagcagcatgatctgcctgtggcggaagctgcagtccgggagggcccggtgctgcaacgtcagatgacgcattgcgagagaaagcctgattttgtactctttcttgatcaaagaggagagaaacagatggtggtggacgacgggtcggcagcccgtaagcgcagctcttctgcgatggacacagctgacgacgacccgttacgacggtgggtttgcaggaggaggttgctcttctggaccttgtgatgcgatgattctttcattcttttggtcggtggcccgtttgagctgctgattctgacagccctggtcggcgtccatggtcggggattctcttatgctgctgctgctgctaccacctgttgatatttttaggtggtagatccagtacatgaggctactaagtagggctccggatcatatgggatctatccttgtgctttgcgtcaaacttctttgacctagaaatttttaacttgggtgggttcggttggtaggctgtgtttgtctataaaaaatgattttctgagtttgtatttgtgttggcttatcttatatacgaacttgtgcgtg

SEQ ID NO: 263343 - DNA, 633 bp, Zea mays
cctgtctcctcctcgttctctcagccagttcggcgcaatgccaccgccggcgccgctcttcctctcgctcgcctccacgccacctcctgcgcttatgcccgtacaccaccccagggccccgcaatcccctaagcctagtccctgcggttgcctcctccagaaaggccgccgacgttctcgcgtgccccgtcgcctccgcgcgccactccgactacttcgatccgcgggctccgccgtcgtcgcgcggaggccgagggtacgggcgccctcccaacggcgcgcaggacgggagggtcttcacgagctacagcatctacaagggcaaggccgcgctgtcattcgatcctaggccgccgctcttcgtgccgctcgattctggggcgtacaaggtggccaaggagggcttcgtgctgctgcagttcgcgcccgccgtggccacacgacagtacgactggacgcgcaacaggtgttctcgttatctgtgtgggagataggaaccctgcttactcttggtccaacagattcatgcgagttctttcatgaccctttcaaggggcggagcgaagaaggtaaagtgcgtaaggttctaaaaattgagccaacaccagatggcaatggtcgctttttcaacct

SEQ ID NO: 263344 - DNA, 2010 bp, Zea mays
tctttggtttcaatattggaggtggtgctggcaaaggaagaggaggtattttcaacattggaaaagctacagtgataaagatggacaagaactccaaaaataaggtgttttttaaggatgtagccggttgtgacgaagcaaaacaagaaataatggagtttgtgcatttccttaaaaaccctaagaagtatgaagatttgggagctaaaatacccaaaggtgctctacttgtaggccctcctgggacagggaagactttgctcgccaaagctacagcaggagagtctggtgtgccatttttgtctatttctggttcagatttcatggaaatgtttgttggtgttggaccgtccagggtacggaacttgttccaagaagctaggcagtgtgctcctagtattgtattcattgacgaaatcgatgctattggtcgtgcaagaggacgtggaggtttttcaggttcaaatgatgaacgtgagagtactttgaaccagctgcttgtagagatggatggatttggaacaacttctggtgttgttgttcttgctgggacaaatagacctgacatcctggataaggcattattaaggccaggaagatttgatcgccagatagcaattgacaaaccagatataaagggccgtgatcaaatattccgcatatatcttaaaaagcttaagttggacaacaaaccatcattttattctcaaaggctagctgccttgacacctgggttcgcaggagctgacattgccaatgtttgtaatgaagctgctttaattgctgcgagaagtgaggaaactcagattaccatgcagcattttgagtccgcaattgataggattatcggtggtttggagaagaaaaatagggtcattagcaaactggagcgccgtactgttgcttaccatgaatctggacatgcagttgctggatggttcttggaacatgctgagcctcttctaaaagttacaattgttcctcgtggaacagctgctttaggctttgcacaatacgtcccaaatgaaaatcttttgatgacaaaagagcagctttttgatatgacatgcatgacattaggtggccgtgctgcagaggaggttttgattggcaaaatctcaactggtgctcagaatgacctggagaaagttaccaaaatgacatatgcacaggtcgccgtgtatggttttagtgaaaaggttgggcttctgtccttcccccagaaagatggtggtttcgaaatgagcaagccttacagtaatcagacagcatccatcatcgacgatgaggtccgggaatgggttggcaaggcctacaagaaaacagttgaattgataacagagcacaaggagcaagttgcacagatcgcagaattgctgctcgagaaggaagtcctacaccaggacgatctaaccagggtactaggagaacgtccattcaaggcactggagccaaccaactacgacctctttaagaaaggtttcgaggatggtggtgacaacagccaagcaccagcagagaacgccgagctgcctgatgattcatctcccccagttggtgacgttgtacccacgtagtgtttctctcctcaacgtcagagctgtacattgagcgctcattctcgatagattcttgtttgttggttgcatcataaaaaagatctgtataaattcgcgcccaagctgattatgccactgtggaaatgcatttggatttccgtagtgtcagtccggtcgatagggtgccttgggttcttcatggcacgagcaaatgttctgattcttgtattcgaatgttttgaaatattctgtctgacgggactgcggagttggcgccaaaagtgtgcttgttcagttgttctatctgaaggcttagctgtctgtagctgtagctggtaacaacagtggctaaaatggtacctctgaaatctttgtgacagtaacaagccatttttctttgaaaaaaaaacaatacgaaaaaaatagaatgaaaaaaaaaaagggcggccgc

SEQ ID NO: 263345 - DNA, 757 bp, Zea mays
cccacgcgtccgcttactattatcgttgaggctgcgacattgcctttaactaaaaagcaggtggaatcaactctggcaatgcagaatttacagccgcagattaaagcgatccagcagagatatgcgggcaaccaggaaaggatacagctagagactgctcggttatacaggcaagctggtgtcaaccctttagcaggatgttttccaacattggcaacaatacctgtatggattggtctttaccaggcactttcaaatgtagcaaatgaggggctattgacagaaggatttttctggattccatcactgggtggtcctacaacaattgcagctcggcaaagtggtgctggaatttcgtggctcttcccatttgtggatggccatcctccgctaggctggtatgacacgatatgctaccttgtattgcctgtgctacttgttgcttctcaatatgtatctatggagatcatgaagccacctcagagcgatgacccatcacagaagaacacaatgctcattttgaaatttcttccatttatgattggctggttctctttgtcagtgccatcaggattgtctatttactggtttacaaacaatgtcctcagcacaggccagcaggtgtggctacggaaaatgggaggagcgaagcctgtagtgactgagggaggtagtggaataattaccgcaggacgagcaaaacgctctaatgctcaacctgccggagagaggttcaggcagctaaaggaagaagaga

SEQ ID NO: 263346 - DNA, 521 bp, Zea mays
cccacgcgttcgcccacgcgttcgcccacgcgttcgcccacgcgttcggtccttcacgcaagccaaagcccctcggatcggatccggtctcctccgtgtcccattcgccacgcagcggcgccacaggagacggagacggagatgaagctgtccatccagtcgctcgccaggaagctgtccctgccgtccccgaagcggggcggcggcggcatcgtcgaggacgggaagaagaagaagaagcgctcgctgtcgcgcggcgaggcgccgtcgttcgcgtcctcttcttcatcctcctcctcctcctccgccaccacgacgccgcggtccgtgctggcggcggcgccggcgctggagatcccgcggcgggagctggaggccgtgctgcggcgcctgggccacgcggagccgtccgacgccgagctcgacgccgtggccgctctcgccgcgcagcccccgtcgggcgacgccgacgcggacgccgacgccgacctcatggaggcgttccgcgtgttcgacgcgga

SEQ ID NO: 263347 - DNA, 669 bp, Zea mays
ttgatcataaaggactccatctttggtataatcttcactcacttgttttgaccaaaggggaagaaagtacttcgagggctctaatgattccgtttttggcgattcatgccaaaaagggggagaaatcatgagagcccaaagcaaaaggaccgcaccaccaccaatttcaaaaacttagtgtttccaaaagtttattatcaattggtatcctattgtgttcaaaagggggagaaagtagtatttcaaaaatggtatatcaaaaccctcttgaacactaagaggaggatctcatttagggggagttttgtttagtcaaaggaaaagcatttgaaacagggggagaaaatttcaaatcttgaaaatgctttgcaaaactcttattcatttacctttgactatttgcaaaagaactttgaaaaggatttacaaaagaatttgcaaaaacaaaacatgtggtgcaaacgtggtccaaaatgttaaataagaaagaaacaatccatgcatatcttgtaagtatttatattggctcaattccaagcaacctttgcacttacattatgcaaactagttcaattatgcacttctatatttgctttggtttgtgttggcatcaatcaccaaaaagggggagattgaaaaggaattaggcttacacctagttcctaaata

SEQ ID NO: 263348 - DNA, 911 bp, Zea mays
aaaccacaaaaagttttttactttctgaaaaaaaaagtagtgcgaggtttctaacatcacgccgctgtatcgtcatggcaatgacacgtcccccagctatttacattgaatgctgtaccgggatctggcagttctgccttacggcaatacctttgcaacaccaccaccacggcaccagctctccgtttgcatctgtacgggctgtagccacacagaagaagaagaaacctgaacaacgtctccgagttcgtactgtataccaacgaatccgcatcgcggaatcgtgcccctgtcgtgtacacgcgctgcggtcatgtgcggcgcctcagcctttccagtccctccaggtaagatctgagccaggcaaactcgtgcctcatcctctccatgtgcgcctcagccacctgcatctcctccctgagtaggctgaggcgcttctgcgcccactccatgctttctttgctgtacccgaaactgcccgtcgagatcccgtgaggagccatctggacctggggggacctagttagcagaactatgatggttacctgcaataggacaatgatagccaccagcgccactgctagtactggaccaagttggcttgatctcatgtgtgacgttagtgaaccccacagttcttgtgaagtggacccgatggaagaatctcttcctgttctctgctggggatcttgaaaaggaggaatgaggctcctcgcaccagatacatcctgtgaggtactcaccatgggtactgctacttctccggtattttcctcgttcgttatagcccctgattgagcaccagaatcagctgtgctggaagtgccttttgatcgatcacactcctgcttcaaaagatcatgcgccgagtttaatccagagtctgaaaacttctcggcatttatctgttg

SEQ ID NO: 263349 - DNA, 1319 bp, Zea mays
gtgcttgattccaagccgaccctaaggaatcacaccttacggttgtaaaacgaatcttgagatatctggcttatactcctaagtttgggctttggtaccctcggggatccacatttgatttgattggttattcggatgccgattgggcggcgtgtaagattaataggaagagcacatcggggacttgccagttcttgggaagatccttggtgtcttgggcttcaaagaagcaaaattcggtcgctctttctaccgccgaagccgagtacattgccgcaggccattgttgtgcgcaattgctttggatgaggcaaaccctgcgggactacggatacaaattaaccaaagtccctttgctatgtgataatgagagtgcaatcaaaatggccgacaatcccgtcgagcatagccgcactaaacacatagccatccggtatcattttcttagggatcaccaacaaaagggagatatcgagatttcttacattaatactaaagatcaattggccgatatctttaccaagcctcttgatgaacaatcttttaacaaacttaggcatgagctaaatattcttgattctaggaatttcttttgttaacttgcactcatagctcatttatataactttgatcatatgctatgactaatgtgttttcaagtctatttcaaaccaagtcataggtgtatcgaaagggaattggagtcttcggcgaagacaaaagcttccactccgtaactcatccttcatcgtcgctccgagccactctctatctttgggggagagagcatgcagtcaaagcaaaaggactccgactttggtataatcttcactcatttatttatgaccaaagggggagtaattcttaagggctctaaatgactccgtttttggcgattcatgccaaagggggagagagtatgagcccaaagcaaaaggaccgcaccaccacctaatttttttaaaaagatggaaaatcttcaattggtcaatttcaaattggtatcttattgtgttctaaagggggaggaagtagtatttcaaaattgatatatcaaaaccctcttgaacactaagaggaggatctcatttagggggagttttgtttagtcaaaggaaaagcattttaaacaaggggagaaaatttttaaactagaaaatgctttgcaaaaatcttattcatctacctttgactatgttgcaaaaggactttgaaaaggatttacaaaaagaatttgcaaaaacaaaacatgtggtgcaaatgtggtccaatatgttaaaaacaaagaaacgattcatgcacatctagtacgtaacatt

SEQ ID NO: 263350 - DNA, 629 bp, Zea mays
ttaaaccacaaaaagttttttactttctgaaaaaatgggagtgcgaggtttctaacatcacgccgctgtatcgtcatggcaatgacacgtcccccagctatttacattgaatggtgtaccgggatctggcagttctgccttatgaccaaaggggaagaaattacttcaagggctctaatgattccgtttttggcgattcatgccaaagggggagaaatattaagcccaaagcaaaaggaccgcaccaccaaacttcaaaatttttcgaaaatgatgatttatgtttgtcttttcaattggtatcttatgatagaaatttcttcaattgatatgatattttcaattggtatatttaaagatggaatttcaaaactagtatctaagtataagttccaattggtatctattaaaaccctcttgaaaactaagaggagaattttattcagggggagttttgtttagtcaaaggaaaagcatttgaaacagggggagaaatttcaaatcttgaaaatgctttgtgtaatcttattcatatacctttgactatttgcaaaagagtttgaaaatgattttccacaaggatctgcataaacataacaagtggtgctaatgtggtccaatatgttaaa

SEQ ID NO: 263351 - DNA, 644 bp, Zea mays
tgctgtcacgcgtccgcccacgcgtccggttagtcttccacctaacacttcaaaattagttttattatctggtattccaacaaaagtcggacaaatatcaattcctgggtgcattgttcattgctttggtgttattacagaacacctattcaaagaggtcgattgtttgctccttggagctgcacaagggcttgtcctttctgatcctttcagatgctgtggctctagcaagttcaagagtgtcaactttcctagcatttctgttgttcctcctctgccattgttaattgccaatgttgtgggtggagatggttctattcttctttatgaaggagaaattcgtgatgttctgataacactgacaaatgccggaaccgtgccagttgaagaagcaaatgttgcattgtcagggaagaatcaggattctgttatttcgattgctcatagcacatggaaatctgcgctccctattaaaccgggtggagaagtgacatttgcagtgactctaagagcctggcatctcagctcagcagatttggaagcagatggcagtagatctcctgtaaattcaaggagaatagcaagagaaggaaccaatccattcttggatattcactatgctggtcctgctgcgaatcttgaga

SEQ ID NO: 263352 - DNA, 2082 bp, Zea mays
cccacgcgtccgcccacgcgtccgatcctccctccattgtttcccggctctccgtcccttgggagttgggccttggcatttccttaagatagaaaaggggggaaatcggcttcctactccccgtccttatcgccagccgaaccgacattgttttctccccccttctcgccttctccttctcccccctagtctagaggcgtttgctccccaatcccttcggcccgcccgctcgacgtgatcccaccggcagccatggatccatacaagcaccgcccgtctagtgggagcaactccagcttctggaccaccaactccggcgcccccgtctggaacaacaactctgccctcaccgtcggacagcgaggtccaatcctccttgaggattatcatctaatcgaaaagcttgctcagttcgacagagaacgtatccctgaacgtgttgtgcatgcacggggagccagtgccaagggtttctttgaggtcactcatgatgtctctcaccttacatgtgctgattttctccgtgctcctggggtccagacacctgttattgtccgtttctctacagttgtgcatgagcgtggaagccctgagaccttgagggatccacgtggttttgctgtcaagttctacaccagagagggtaactttgacctcgtgggtaacaacatgcctgtgtttttcatacgagatgggatgaaattccctgacatggtccacgctttcaagccgaatccaaagaccaatttgcaggagaactggagaatagtagatttcttctctcaccacccagagagcctacacatgttcaccttcctctttgacgatgttggcatcccactcaactacaggcacatggagggctttggtgtcaatacctacaccttgatcaacagggatggaaagcctcaccttgtgaaattccattggaagcctacttgtggtgtgaaatgcttgctcgacaatgaagctgtgactgttggaggcacctgccacagccatgcgacgaaggatctatatgattccatcgcagctgggaattaccctgaatggaagctctacatccagactattgatcttgaccatgaggataagtttgactttgacccgctcgatgtcaccaagacctggcctgaggatatcatcccgctgcagcccgttggacggatggtcctgaacaagaacgtcgacaacttctttgcagagaatgaacagattgctttctgcccagcgattattgttcctggaattcactattctgatgataagctgctccagacgagaatcttctcctatgctgatacccagaggcaccgccttggtccaaactatctgatgcttcctgtgaatgcaccaaaatgtgcccaccacaataaccaccatgatgggttcatgaacttcatgcacagggacgaagaggtgaactacttcccttcgaggtttgatcccgcccgtcacgcggagaaggtccccattcctccccgtgttctaacaggctgtcgtgagaagtgcatcattcagaaggagaacaacttcaagcaggctggcgagagatatcgttccttcgaccctgcaaggcaagaccggttcatccagcgatgggttgacgcactgacagaccctcgcgtgacccatgaacaccgtaccatttggatctcctactggtcccagtgcgacgccgctcttggccagaagctggcttctaggctgaacctgaagccgagcatgtaagatcgacgaggaagaaagcaggcaccggtggccaaggatgcaacgcaacatggagcgtgtgatgtttacaccaatataattgaataaacaggggatgtgcgcgtcgttgtacttatgctgatgctgatggtcggtggtcgattatatatactggaacttctggtgtatgctcttctcttctggggagacgtaatgtaacgaagaagaatgtgtcattgtggcctgtggtacaaaccctgctgtgtatgggcctgtctataagaaacagcgatgagctgtgacgttatgtttctgacagtttatttactaatgagcacatctttaatttactagaacgaagagaagttgagg

SEQ ID NO: 263353 - DNA, 359 bp, Zea mays
tcttactgagcaagcttttcgacagagaacgtagccctgaacgtgttgtgcatgcacggtgagccagtgccaagggtttctttgcggtcactcatgttttctccccccttctcgccttctccttctcccccctagtctagaggcgtcgctccccaatcccttcggcccgcccgctcgacgtgatcccaccggcagccatggatccatacaagcaccgcccgtctagtgggagcaactccagcttctggaccaccaactccggcgcccccgtctggaacaacaactctgccctcaccgtcggacagcgaggtccaaccctccttgaggattattcatctaatcgaaaagcttgctcagtt

SEQ ID NO: 263354 - DNA, 1309 bp, Zea mays
ggcagagaaaaccacttggatctgcaccagctgggtgcgaggatgctccagcacgcgcacgagcgcgaacgagatgcttctgaggaggaagctggaggagcagcagcaggccgctgctgccgagctgcagcaggccatggagctccagagccgtcgcctgatgaggctgcagctgctggacctgaagccgcgcgcgtcgccgagccccatcggcagcatgcccctgggccccacccaaagggccgtcgactcgccgcccgattccggcagggaggagtcgtccgccggcgacgcgagcccgaacgcggacagtgaccaaagcgccgagcacaacctgccggacagcccgttcgcgtcgccgacgaggtccgcggccttggctcgcgaccctttcgcggccatcgaccgggagatggctgcctcgcccggtcgtcgaaacggcgccggttccttcgctggcatcagcagcagcagcggcgtcctcgccggccatctgaggccgtcggctctggacatcccttcgccgttcttccccatgtcgatgaccaggctgtcctccgatcacggcgccggcgcgatcgggatgtaaagttatatagtcctcgctgctacttgcctaatcatagaatacttaactagaagcaaaggaaagaagatatagtagtgggagtagtataggagaaacaaaacatcgcagcgtagttcctttttttttactttgtttgtttgtttgtttttttaccatgaaaccaaaggtcagcagatggcagcagcaagcaacagattatagcgcttgctctcctattacattacattacatgatgcatttagcactaattagtagtagttactattaccagcccatctaggtagctgctcctccatgaccatgatatgcacagcagtactaggggggaggaggggtgtgtgatgcacaagaagatgctgctgctacccacatgggactacactggatgcagacagacgtgacagaccagctggtccagcgtgaagatctcacaggattagaagaaacaaacgagtcccggtcccaccagtgtaggtgtcattgaaggaggaccggcccacagcctgctgctgctgctgtgcaaatcattgttggctgcgtcccttcagccctctagccctagcagtagcagcgccggatgcagctccctacaaacaaacaaaaaagttgggttttttcctgttctttgaattttacttttgcctctgtcgaatgaaatctctactctagttgatacaaagaaatgaaagtggaagatatggaaataatttgctctggtgc

SEQ ID NO: 263355 - DNA, 1981 bp, Zea mays
atgacatttattctatcgaggatcttgcacaggtgatttatgacctccatcagataacatcctaaagctaaagtatctgtacagcttgtgtctgaagctggaattggaactgtagcttctggagtttcaaaggcgaatgcagacataattcagatatcaggtcatgatggtggtactggagctagcccaatcagctccatcaaacatgctgggggtccgtgggaacttggtcttacagaaacaaatcagacacttatacaaaatggattgagagagagggtagtacttagggtggacggtggattcaggagtggtcaagatgttcttattgctgctgctatgggagctgatgaatatggctttggttctgtagccatgatagctactggatgtgtcatggcacggatttgtcacacgaataattgtccagttggagtggctagtcagagagaagagcttcgtgcaaggtttcctggtgttcctggtgatcttgttaactacttcctctttgttgccgaggaggttcgagctgcattagcccagttgggttatgagaagttggatgacatcattgggcgaacagatttgcttaaaccaaagcacatctcattggtgaaaacgcagcacattgatcttggatacctcctatcaaatgctggattgcctgaatggagcagctcccaaattaggagccaggacgtccacactaatggccctgttcttgatgagacaatccttgcagatcctgagatagctgatgctattgagaatgagaaggaagtttccaaggcatttcaaatctataatgttgacagagctgtctgtggtcgggtagcaggtgtgattgccaagaagtatggagacacaggttttgctggccagctcaacatcacgttcaatggaagtgcagggcagtcctttggttgtttcctgactcctggaatgaacattcggctagttggggaggccaatgattatgttggaaagggtatggctggtggagaactggtggtagttcctgtagacaaaacaggatttgttcctgaggatgctactatagttggaaacacttgtctgtatggagctacaggtggtcaggtatttgtgagaggcaaggcaggagaaagatttgctgttagaaactctctatgtcaggcagtggttgagggcaccggagatcattgctgtgagtacatgactggtggctgcgtagtcgtacttggcaaagctgggaggaatgttgcagctggaatgactggtggtcttgcctacattctagatgaggatgatacacttgtcccaaaggtcaacaaggaaatcgtcaaaatgcagagagtgaatgctccagctgggcagatgcagctaaagggcttgattgaggcctatgttgataaaacgggcagcgagaaaggtattgcgattttgagggaatgggaggcctatttgccgctcttctggcaactggtaccgcccagtgaagaagactcgcctgaggcttgtgcagagtttgagagagtacttgccaagcaagcaaccacccaattgtctgcgaagtgatcgaatcagactacaggaaggtggtaggtgttttctatttgacacaaagtgatctcatcttatcacttcaagaaaatcgaagaccataaccggcgctctgaggcaccgaagtgcccgtctgaagactgcaactttgtggaggctctgcccaggccatctttttgagttgagctaacagaaccgagggttcttctcgacgctcgtgcacctaggtaacccctgtaaattggtttgctgacgctaggctgcaaggggcctgccctgtttgaactgctgtactgtacatgattcttggccgttgccctgtgtaattatgttttggttagctcgtaaatttatacgcatccaatggaggcatacaatgcaagtcgcaagcgcaatagtacagtgcatgataaactgtacggccaggttggattggaat

SEQ ID NO: 263356 - DNA, 760 bp, Zea mays
gaattcccgggtcgacccactcgtccggttggttctgcgcctatgtggagccggctgctgttctgggtgtcttggggctaaatcacggggttgccatgatgccacgtacctgtggcaagatgatgatgacaggttatctggcgacaatatccctctttacgattctgctgatgactaacctactagcattaacaaggaaatgctcgtatcaagtgatggcatgggtacccaattcagcatcatcagcagagtacagagtaccgaaaatcctgtaaacactggaactaacgaatttgcgccaattatcgccgacgaactgacaacaagctcaaatggattagcaccaatgaacgttgaaccattgactgtaagctcaaatgagctcacgccaccgaacgccatgccaatggtagctcgtctagtcgagaatgggtcaaccggatacagcgcacaggacactcacgacgcttctcagaattcagcgcccaaagctgcaaatcacgcgaaccaaactggacctcagaacaacagcaaccattcagcgttggtccctgtgaagcccgcgccgaaacgccgtggcaggaaaccgaaacgcgttgtgcacaagcagctggacatcccagatatctgcgaccggcttacatcgtctgtggcgtgcgaagaaatactgtactgtgagggaatggtctgctatgactatgatcagaactcccttctcttgaaacagtgtattagtggcgaacagtgtgaagttaagaca

SEQ ID NO: 263357 - DNA, 592 bp, Zea mays
ttcttcgcgtccgcccacgcgtccgctcgcccaatgcgtagttgtatctgcatctccaacaccaccagcagaggttccagttagtttttttttagattagaaaaatcgagtccaacagactcgccgcactgcgcgggatcgacctcgtcgcaactcccgtgtgcgccgccaataatggagacccgggacacggatgcgacgccgctcccctactcgtacacgccgctgccggccgccgacgccgcgtcggccgaggtctccggcaccggcaggacgcggagcaggcggcggcccctctgcgcggcggcgctcgtgctctccgccgcgctgctcctagccgtggccgcgctcgtcggcgtcggtagccggcccggcgcggtggggatgacagagtcggcggcctcgtcgccgacgccgagcaggagcaggggccccgaggccggcgtgtccgagaagacgtccggcgcgtctgacgacggcggcaggctccgtggagccggcgggaacgccttcccgtggagcaatgcgatgctgcagtggcagcgcacgggattccactttcagccgcagaagactggatgaacgaccccaa

SEQ ID NO: 263358 - DNA, 482 bp, Zea mays
cgtaccggtttggaattgccgggtggacccacgcgtccgctgatagaatgattgaagacaaggaacgagagataactaaactcctcaaggaaaacaggggccttcaccagtctttagatgctagaccaacagttagcaacaatgatcatcaaagtcaaggacctgttaaggatacaatgagtgttgaattggctgagcaacaaattttgcttctcgcaaggcaacaagcacaacgagaagaggaattggctcagtcacagaggcatatcttagcacttcaacaagaaattgaagagctcgagcgtgaaaatcgtctccatgatcaacaggaagcaatgttgaaaaccgagcttcgcaatatggagagatcacaaaagcgagaaggaatagatatgacatatctcaaaaatgtgattctaaaacttcttgaaacaggggaagtgggagcgttgttgcctgtggttgggacgttactacagttt

SEQ ID NO: 263359 - DNA, 667 bp, Zea mays
gatatgatgaagcttgcaaatcgaatgcagtttgggattccggaggagagctcactaggggatgggttgggggaaggttatggcatgcttggacaagcagggagtggcaagctacgtgtctcagctggacaaagcaaacttgctgctaaagtggcgaaaaagttcaaggagaagagctatggtagcagtggtgcaacatcaggattgacatccagtttggcatttacaccagttcagggaatagagttgtcaaatccacaggtccaaggaaaccttctcggaggcggaactcaaagtacttacttttccgagaccggcacattttcaaagatcaggaggacgcaatagaatcctctttgcaaccatcacatctcatttgcactgcatttgttgatatccttgggatgcactgtagaaaattcaaaagtcaatcttgcaatgttccagagactttagaatggcaattcacagttaacagtgatgcttcgagcacttaatcccaggatatttgcgaccgaacctgacttttgagaattctgatgtccatagtctatattgcctcgtgtacaagttcaagcgaacaatttttatctcatggttactactagatgagataagaacacgggtctggctaaaaaaaaaaaaaaaaaaaaaagggcggcgcaga

SEQ ID NO: 263360 - DNA, 1701 bp, Zea mays
tctcctcacgcgtccggtataatcctccaggcaatgatgtacatgctttcgctagagaattgaatgaaatgtttgactcagaatgggaatcagtagaaaggaaatttagaggccgaaaccttgttcaagagcagaagacaaaggccataaaagttcgagctatcgtggattcgaagtctacagttgctagagggcaggttgcctgctcaaatcctaaatctttggctgcaagagggccagtaccttgctcaaattcgtttgcaaagaagacactgacagatgcattatcctccaaagtaaaaatcaaattttccgtgcgcagctctgcgcatacctcttccaaagatatactcgttcaagcagctggtagcaaagaggggtccttaaatcactctgtccctactggcaacaaagaggcatcttcaaattgtacttttcctatcgctaaggagaaggctaaaatttcaagggcacgagaaactgagcgctgctctggttcaattggaaaacaatcatggtcttgcaatgacatttctacttcgcctatcgcctcctctgtacaaggtgaggaaagttacctttgtgatgaacctttgtcaccaagcagggctcttcgtgcagcaatgctcaggagtcgttttgctgggactatagtgaaggctcaacagaaggcacttctagatcatgggaagaatatagaccctgtgaaattgcaattggaaaaggagaggctggaaaagaggcagcaagaagagaaagcaaggatcgaggcccaggtgaaggctgctgaagcagctgcacaacaaaagtttgaggaagaaatgaggatgaagagaaagcaggaaagggaggcagcacgcctggcactacgcatgatgaagaagactgttgatattgacaacagtgacttcctaaaggagctggagaacttcagcaaaacatggcaggcaaatccacctggcaaattaatcgtggattttatcagtggggacttgccaccggggttagggagtccgctggagaggctcggcctcttcatgaaggaagatttcgaggatgaggtagaacaggaaatggaggacagagtgtcaccctcaatggatgttgacatcaggaaagatttccaggaagacttaggacatgaaatgcaggacagtgcatcacccgtgactgtcattggcacaaagaatgacgtacagggagtggcaggacatgaaatggaggacagcggatcaccagccacagtcattgacacgaagaaagaagagacagaacatgagatggtggacagcgtatcacctttgatggatgttgacacggaggaaggggagatcagctgctgacggtagctacacctctcttcacccgcataatttattgaggcagacatccttgcttggttgttagattaggcaatttcataagcagagtgatgcagaaacattagttttatctgctttcatcgtagaaccatgtggtgtggagaacatgtctcagacgaaatgacgagtggttttggatttgctgcggattttaattttcgtggtcttgtcagtctggcaagagtatgatgactctgtatgttgaatttgacctcccccgctggatgacatgtataaaaggatgagaaaaaaaggatagtttggagctaaaaaaaaaaaaaaaaaaaaaaaaaaaaaaaaaaaaaaaaaaaaaaaaaga

SEQ ID NO: 263361 - DNA, 1600 bp, Zea mays
agaggagctggccgcgtcgtatcgactcctgccgccgaaaggccgagcccgagcccgtgtcccggtgcccgttcccgcaaccctaatcccctaccaccgtcggctctcgccggcgaagaagagggagccgcgcggcgtcgccagggagcacgcgccccctcccttcccggctccctccgcgccgtggggaggcgcgtccacccggatccgccctcaccgcgaggcagaggggaggagagggagccaggtccggcgcacccgctgtcgtccgcgccgaagagcgttaagagtctccccacaggcttggctgagggaaacttgtgctctgcgcatcttggacactacttcaccatttaccaagtcttgagttattgctccggtgccagacaaaaaaccaaactctctggccgaacacagtgatggcgcaagcctgtaagaagaggagaggagtttatataagcagtgaatcaggagactctgatacagattctgatgttgagggaagcaaacactctcaaaagtctggggtgacatcaatttctacatgcgagcaccagtcatcttataacctcaaggctgcaagtatgaaaagtagcaggatgataaggctgtgtggaaatatcgtaaggaagctcatcgatcacaaatgtggctggcttttcaaagaacctgttgatccagatctatatgggattccagactactttgatgttatccgcagtccaatggatttgggcactattaagaataaactcacaaaaaagaaatatgtaagcattgaggagtttgcagcagatgtgaggctaacattttcaaatgctatgaagtataatcctccaggcaatgatgtgcatatttttgctaaagaattgaatgaaatgtttgattcagaatgggaatcagtagaaaggaaatttagaggccgaaaccttggtcaagaccagcagacaatgaaggccataaaagttcgagctatcatggattcaaagtctacagttgctagagggccggttgcatgctcaaaccctaaaactttggttgctagaggtccagtagcttgctcaaattcgattgcaaagaagacactgacagatgcattatcctccaaagtaaaaatcaaattttccgtgcgcagctctgcgcatacctcttccaaagatatactcgttcaagcagctggtagcaaagaggggtccttaaatcactctgtccctactggcaacaaagaggcatcttcaaattgtactcttcctatcgctaagctatcttctactttcaggaggctaaaatatcaagggcacgagaaattgagcgctgctctggttcaattggaaaacaatcatggtcttgcaatgacacttctacttcacctctcgcttcctctgtgcaaggtgaggaaagttaccttcatgatgaacctttgtcaccaagcagggctcttcgtgcagcaatgctcaggagtcgttttgctgggactatagtgaaggctcaacagaaggcacttctagatcatgggaagaatatagaccctgtgaaattgcaattggaaaaggagaggctggaaaagaggcagcaggaagagaaagcaaggatcgaggcc

SEQ ID NO: 263362 - DNA, 688 bp, Zea mays
tcgtagcgagagcaggaaagggaagcagcacggctggctgtacgcatgatgaagaagactgtcgatattgacaacagtgacttcctaaaggagctggagaacttcagcataacgtggcagtcgaatccacctggcaaattaatcgtggattttattgatggggacttgccaccggggttagggagccctctggagaggcttggcctgttcatgaagaacgatctcgaggatgaggtggaacaggaagtcgaggacagcgcatcaccctcgatggacgttgacatgaggaaagatttagcagggcatgaaatgcaagacagcatatcacccgtgaaggtcattggcacgaaggatgacttccagggagcggacattaacacgaggaaagatttccaggaagacgcagcagggcatgaaatgcaagactgcatatcagccgtgaaggttattggcacgaaggatgacttccagggagctgtagggcatgaaatggcgaacagcctatcaccatccactttcgttgacacaaagaaatattccgaagggacagaacatgagatggtggatagcatatcgcctttgatggatcctaacaccgaggaaggtgagatcagctgctgacgttagctacacttgtcatccacatcatttgctgagttcgtgaggcagacattcttgctggtttgtt

SEQ ID NO: 263363 - DNA, 507 bp, Zea mays
cttggttgttagattaggcaatttcataagcagagtgatgcagaaacattagttttatctgctttcatcgtagaaccatgtggtgtggagaacatgtctcagacgaaatgacgagtggttttggatttgctgcggattttaattttcgtggtcttgtcagtctggcaagagtatgatgactctgtatgttgaatttgacctcccccgctggatgacatgtataaaaggatgagaaaaaaaggatagtttggagctagtgtatgttgttggagtttatggtggagccagatttggtgagcgtgtcgtggacgtaaatgtaggtatagctatatacttgaaatattgataagagtgtttggttcaaaggatcaattcattccagttaaacatcatgagcttgttaatgggtgtttggttcgagagttcgttaatgggtgtttggtttgaggaataagctagtctactattttttttatttggttgttgaatgtaattttttgacctgtc

SEQ ID NO: 263364 - DNA, 548 bp, Zea mays
cccacgcgtccggtccgcgtcgtttcgactcccgccgccgaaaggccgagcccgtgcccgtgccgtgctcgcaaccctaatcccctttccccgttgcctctcgccgggaagaagagggagccgcgtggcgtcgccagccagcacgcgccccctcccttcccggctccctccgcgccgtgggcgaggcgcatccaacccgatccgccctcaccgcgaggcggaggacctggaggggagggagacaggtctggtgcaccctctctcgtccgcgccggcgagcgccaagtgtcccccacaggcttggctgaggaagacccgtgctctgtgggtcttggacactgcttcaccatttaccaagtcttgagttattgctccgttgttagacaagaaatcaaactctctggccaaacacaatgatggcacatgcctgtcagatgaggagaggagcttatatcagcactggattgggaggctctgatacagattctgatgttgagggaagcaaaccctctaaaaagatctgggtgacatcaatttctacatgcgag

SEQ ID NO: 263365 - DNA, 1096 bp, Zea mays
accgggccggaatttcttttttggacccacgcgtccttcttgtggcgggggcctcagccagaagggtttttttagctatggctatgcaagctcccctggtaaaagggcatccatggaagacttctatgagacaaaaattgattgtgttgatggtcagatagttggtctttttggagtttttgatggtcatggtggtgctaaggtagcagagtatgttaaagaaaacctgttcaacaatcttgttagtcatccaaagttcatcagtgatactaaagtcgctatagatgatgcttataaaagcaccgacagtgaattcttagaatctgacagtagtcaaaatcaatgcgggtcaactgcatcaactgctgtacttgttggtgatcgtctcttcgtcgcaaatgttggtgactctagggctatcatatgcagggaaggaaatgctattgctgtttcaaaggatcacaagcctgatcaaactgatgagcggcagcgtattgaagatgctggaggttttgtgatgtgggcaggaacatggcgcgttggtggtgtacttgctgtttcgcgtgcttttggtgacaaactcttaaagcaatatgtggttgtggatccggagatccgagaggaagttgttgatgacacactcgagtttcttatccttgcaagtgatgggctgtgggatgtggtctctaacgaggaagctgttgcgatgactagatccattaaggacccagaagaggctgcaaagatgctcttgcaagaggcgtacaagagggagagcagtgacaacataacttgcgtcgtcgtgcacttcttgcatgggcaaggtagcagcggatacgcttaaagcgtagcagtaaaattattttacgcagtggtgtgctctgatgtacatgcgtcgattgatttcccgatgttaaatggagaaacgtaactacgtaaggtaggaaacgtgtattatgatgggttgaactgggaaatgcgtgtaccctatactatatatatatactgtagtgtggtcccgggaggaccatgtttgggtctgaagatagtgttgtattgttgtcggaaaaaagataattgcgctttaggttttgtt

SEQ ID NO: 263366 - DNA, 571 bp, Zea mays
gcgcaaaaagcgcagaacgccagaggttttctccgcagtctagaaaatgtgccaaacccgtcgcttcgtcttcctctccttccggcttccggccccgctcctccccaaaatcccccaaaacctgacgagctggagggccgatccgcggctccccgccgcctgatccgagcagtctcctcggcccagccggggatccaagcgggatggggtacttgagctccgtgatcggccaccccaccgatggatcctccgtcagcggcggcggcctcagccagaatggtagatttagctatggctatgcaagctcccctggtaaaagggcatccatggaagacttctatgagacaaaaattgattgtgttgatggtcagatagttggtctttttggagtttttgatggtcatggtggtgctaaggtagcagagtatgttaaagaaaacctgttcaacaatcttgttagtcatccaaagttcatcagtgatactaaagtcgctatagatgatgcttataaaagcaccgacagtgaattcttagaatctgacagtagtcaaaatcaatgctgttctactgc

SEQ ID NO: 263367 - DNA, 433 bp, Zea mays
tgtggtctctaacgagtaagctgtcgcgatgactagatccattaaggacccagaagaggctgcaaagatgctcttgcaagaggcgtacaagagggagagcagtgacaacataacttgcgtcgtcgtgcacttcttgcatgggcaaggtagcagcggatacgcttaaagcgtagcagtaaaattattttacgcagtggtgtgctcggatgtacatgcgtcgattgatttcccgatgttaaatggagaaacgtaaccacgtaaggtaggaaacgtgtattatgatgggttgaactgggaaatgcgtgtaccctatatactatatatatactgtagtttggtctgtattgtggtcgcagacgatgtttgggtctgaagatagtgttgtattgttgtggaaaaaaagataattgccccttaggttctgtttgtttcc

SEQ ID NO: 263368 - DNA, 701 bp, Zea mays
gcccgccgccgcggccgtctccgccgctccgcccctggcagccgtcgccgccgccaccagcggcagcggcttccagaaccactctctatacccggccatcgccggcagcactggtggtggaggagttggcgggtccggcaatatctcctccccgttctcctcgtcgatggggggatcgtctcagctgcacatggacagtgctgccagctactcctacgcagctcttggtggtggaactgcaaaggatctcaggtacaacgtttacggaataagatctctggcggacgagcacaaccagctgatcgcagaagccatcgactcgtcgatagagagccagtggcgcctccccagctcgtcgttcccgctctcgagctacccacagctcggggcgctgggcgacctgggcggccagaacagcacggtgagctcgctgccgaagatggagaggcagcagccaccctcgtccttcctagggaacgacaccggggccggcatggccatgggctccgcctccgcgaagcaggagggccagacgctgcggcacttcttcgacgagtggcccaaggcgcgggactcctggccgggcctcttcgacgagaccggcagcctcgcctcgttccccccggcgacccagctgtcgatgtccatacccatggcgttcttcgacttctccgtggccaggttccagtcgcccaacggtg

SEQ ID NO: 263369 - DNA, 1030 bp, Zea mays
cccacgcgtccgaaagtttatgggctcacagtcgatgtcttttgggggctcggtttcgcttaactcgcccactagcaaagatggttctgttgacaacaaagttggtcgtgatgtgcagaaccagtccctttttagccctcaagtcgactcttcctccctactgtacaatatggtacctaatcttacctcaaatgttgctgataataatatatcagcgtttccctctggatcaacatatctgcaaagtccaatgtatggttgtctggatgactcttctggtttattgcaaaatacaggagagaatgatccgacaactagaacttttgttaaggtttacaagtcaggatcagtggggagatccttggacatcacccggttctctaattatgctgaacttcgagaggaactgggtcagatgttcggcattaagggtcagttggacgaccctgatagatcaggctggcagcttgtatttgtcgacagggagaacgatgtgcttctccttggagacgacccgtgggagtcatttgtgaatagtgtatggtacatcaagatactttcacctgaggatgtgcataagatgggaaagccaggaaacgatccacgctacctatcttagctacctatcttaaatcgatacatggagctctttctggctcccatgacgattctgtggcacactgtagcggtgtccatggcagtccggtgtgctgtgctcgcatgttcgaccgtgccacctctagcatgtacaccgtgcgcgtcttcagaactcccccgttacttgtatccggtgcaggccaccgctctggactgatatcttgtaggttccacttaggaatcagtatcagcgactctatcctagttggtttgtagctcgcacggcactcgttcttgtgtcgcatcgaaatcttcaggctaaatgcttagttgaaactgttcccgtgattcttaagctatctatgtatttgaggattccccggcatgcttttggcgatgaactccaataatttgaatgcacgaggattgtttg

SEQ ID NO: 263370 - DNA, 926 bp, Zea mays
cggagaaaggccacctagagtttctctgtgggaaattgagccactgacaacctttcctatgtatccatccctgttcccactgcgagttaagcatccttggtgttcaggacttgctgctcttcatgatgacagcaatgctttgatgtggctgagacgagtaacccgtgaacggggctttcattctttgaacttccagtcacctggtataggttcctggggacaacagagactccatccatccttacttagcaatgaccatgatcagtatcaagcagtggttgctgccgcagctgcctcccagtccggtggttatctgaagcagcaattcctacaccttcaacaacctatgcagtccccacaggagcagtgcaatctcaatccgctgttgcagcaacaaatactacagcaagcgagccaacagcagatggttagttctgatgctcaaaatattcagtccgtgctcaacccaggtgctattcagcagcagctccaccaactccagcagatgcagcatactcataatgaccagaagcaaaagattcaaccagatcaacagtaccaagttgctagcagtgcggttctcccgagtccaacatcattaccaagccatttgcgtgaaaaatttggcttctctgatcctaatgtgaactcttccagcttcatctgcgctagcagcaacgagaatatgctggaatcaaacttccttcagggaagctcaaaatctgtggatttgtctagattcaaccaacctgtagttagcgagcatcagcagcacaacaggcatggaagcaaaagtttatgggctcacagtcgatgtcttttgggggctcggtttcacttaactcacccactaccaaagatggtcctgttgacaacaaaattggtcgtgatgtgcagaccgagaccctttttagccctcaagttga

SEQ ID NO: 263371 - DNA, 757 bp, Zea mays
tctaacatttagttgggcgccaaattgcatccaggcgaaagcttgaacatcagctatttgagcccatttctgaaggcgttaggctccaattacagcaacggtgcaaatttcgccattgctggcgctcaacgcaaccgcgagatgttccatttgcgttgcacatacaagtgcaggagttcttgtacttcagagatagatccttggaactcatcgatcaaggtctaagtggtccaattgatgcacaaggattccaaaacgctctatatatgatagacatagggcagaacgatgtaaacgctcttctgtcaaactcgccctatgatcaagttattgccaaattcccaccaattcttgctgagattaaggacgctgtccagactctatatagcaacggtagccgaaacttctggatacatgggacgggggctctgggttgcctgccgcagaagcttgccataccaaggaaaaacgacagcgatcttgatcagtatggctgtctcaagacctataacagagctgcagttgcgttcaacgcagcgctgggcagcctctgcgacgagctgagtgcgcagatgaaagacgcgacgcttgtgtacacggacctgttccccatcaagtatggtcttgtcgccaaccacactaaatatggttttgacaagccgctgatgacatgctgtgggtacggagggcctccctacaactacgacttcagcaagggttgccagtctaaggatgtggcggcctgcgatgacggctc

SEQ ID NO: 263372 - DNA, 1530 bp, Zea mays
acgaggcctccatttggaccaccgggaccagaacccgatcgggcacggcggagaacgcgagtacccaggctctaataatttgtacaaaaccgatggaaacttctaaatctcctcaatcgtcaaagaacagtcatattgtggtgccttctgatagtaatggcccccgatttgacaatgatggtttttcttcagaagctgcatcaaatcaaatggtcgttttcaactctgaagcaggagataaagagcaagatgaactgggggaaaaccgtttgcagaagtcaatcataacaaggggaatatcgccatctattggagcattcactgtccaatgtgctaaatgttttaaatggaggcttattccaacgaaagagaagtatgaagaaattcgtgaacgtattatagaggaaccttttgtatgcaaaagagctcgtgaatggagacctgatgtaacatgcaatgacccagaagatatatctcaggatggtagcaggctttgggctattgacaaacccaatattgcacaaccccctcgcggatgggaaaggcagattaggataagaggtgaagggggtaccaaatttgctgatgtatactatacctctcctactggaaggaaacttaggtctctggttgaagtcgataggttcctccaagagaatccggagtatggtgctcagggtgtaactttagctcagttttcgttccagatacctagacctctacggcaggactatgtgaaaaagaaaccgaagttgataaatccaagtgatgaagcaagtacgattgcctctaagtcttttcaaccagaagaagtgaaacccatagcctgggcagttgctacaaaacacgagggcgatgccagtgaagaagcttctctcaccgatgaggcacctacatcagaagtcatgctagcccggaagagaaaagcaggaagctctttgtcggtagagccaaaccatctctctgatgaacttgaaccaaagctggaggatgcttagaacggggagacgtctacctgataagtaaaagttagcagcatcgtgatgccaactgccccctatcatggttttattggccctctgcttgtttctcatttccctttggagccagtttctctgttttgcgaggtcacacaagccttatttgtagtattacaacacagaagctggctgacccaaaatccgacactctgggggcagcaacttaacaaaatgtttgtacgagggtttagagccccacggtgcttctttggataagtatgtttattaccttgtacttagctaggaacctgcttatatgtaagatctttgtgtacgacggagaattgtcacagcggcataattctggtgcatcttggatttaatctcctgttctttgttagaccggccagtaggcagtagcaaaggttttgaaatgtctcaagttatataactactgtggtattgctagtgtaattctctgagcatgttttttatttgatattgtgatccttgtatcttttaaagagctgttttgtagaactcaaggtgc

SEQ ID NO: 263373 - DNA, 481 bp, Zea mays
ccctcgcgtccgcccacgcgtccgaacgcgagtaagcactcccatcctcaatccctcccctccgcggctccgccgtaaaccccgctgttcttcgccggagcactccctccccgttcccccgccgcccccggccccccgacctcgatatcttcggagcccgccgttgggggcctactgcatgctcaaatcgtagacactgggtcggggcgtggtagagatccgtccgggctcggatcgatttcttcgttcgctggtacccaggctctaataatttgtacaaaaccgatggaaacttctaaatctcctcaatcgtcaaagaacagtcatattggtggtgccttctgatagtaatggcccccgatttgacaatgatggtttttcttcagaagctgcatcaaatcaaatggtcgttatcaactctgaagcaggagataaagagcaggatgaactgggggaaaaccggttgcagagtcaatcataa

SEQ ID NO: 263374 - DNA, 512 bp, Zea mays
attggggacggggcggagaacgcgagtaagcactaccctcctcaactcctaccctccgccgtaaaccccgctgttctttgccggagcaccccctccccgtctccagccccagtctcggtccccccggacttcgatatcttcggagaccgcctgcatgctcaaatcgtagacactctgggtaggcgcaaggtggagatccgtccgggcacggatcaatttcttcgttcgctggtactcaggctctaatatttttacaaaatcgatggaaagttctaaatctcctcagtcatcaaaaaacagtcggattgtggtgccttctgatagcaatcgctcccgatttgacaatgacggtttttgttcagaaactgcatcaaatcaaatggttgtgttcaactctgaagcagcagatgaactgggagaaaaccgtttgcagaagtcagtgattacaaaggggatatcaccatctattggagcattcactgtccaatgtgctaaatggtttaaatggaggc

SEQ ID NO: 263375 - DNA, 430 bp, Zea mays
gaaccaaagttggaggatgcttagaacgggaagacttctaactgaaaagtaaaagtgggcagcgtcgtgatgccaacttacccccctgccatggttttattggtcctctgcttgtttctcgttttccttgggagtcagcttctctgttttatgtggtcgcacacggccttatttgtagtattacaccacagaagctggctgacccaaaaaccgacattttgggggcagctacttaacgaaatgtttgcacgagagtttagagccctatggaacttgtttggataaatatgtttattacgttgtagtacttagctaggaacctgcttatgtaagatgatctttctttatgtaagattaagaactgtcagcggcctagttctgctgcacctcggatcaaaaaaagaggcaagaaaggaatgaaaacaacaag

SEQ ID NO: 263376 - DNA, 735 bp, Zea mays
gcacggcggagaacgcgagttagcactcccatcctcaatccctcccctccgctgctccgccgtaaaccccgctgttcttcgccggagcactccctccccgttcccccgccgcccccggccccccgacctcgatatcttcggagcccgccgttgggggcctactgcatgctcaaatcgtagacactgggtcggggcgtggtagagatccgtccgggctcggatcgatttcttcgttcgctgcgaaccataaaataagccatcacaactgcatttaaagcaaggcttcccactgagccgaaggtcctgagttcgacacagtctctcttcaaaaaatacaggggtacccaggctctaataatttgtacaaaaccgatggaaacttctaaatctcctcaatcgtcaaagaacagtcatattgtggtgccttctgatagtaatggcccccgatttgacaatgatggtttttcttcagaagctgcatcaaatcaaatggtcgttttcaactctgaagcaggagataaagagcaagatgaactgggggaaaaccgtttgcagaagtcaatcataacaaggggaatatcgccatctattggagcattcactgtccaatgtgctaaatgttttaaatggaggcttattccaacgaaagagaagtatgaagaaattcgtgaacgtattatagaggaaccttttgtatgcaaaaagagctcgtgaatggagacctgatgtaacatg

SEQ ID NO: 263377 - DNA, 2443 bp, Zea mays
cgatgcctgtgaagtatgacgacgaggaggagatctcctcctcctccgccgaggaggacgatgaccagtccgccgccgccgcctccggatctggtgaggaaggggatgacgatgaggaggatgctgcggcgctgcccacggaggaggaggaagctgagggcgaggggcagcaagaggaggaggtcgacgaggaagagatcgaagccgtcactaccggcgctggagctgaggacggagaggacgccagtgccgctaccgccgctgaaggcgaagaggagtcccagtccaccgaggacgacgaatccgtcgcaagggacaaggacaacggcgacgagactgatgcagtggttgggaagcgtgagaaaacaaggctaaaagaactccagaagatgaagaagcagaaaatccaggaaatactggatactcaaaacgctgccattgatgctgacatgaacaataaagggaagggacggttgaagtaccttcttcagcagacagaaatatttgctcactttgcaaaaggaagtcagtccaacgagaaaaagcctcgcgggaggggacgccatgcatcaaagatgactgaagaagaggaagacgaagaatacctcaaagaggaagaagatgcccttgctggtgcagggggtacacgtttagtttcacagccttcatgcatcaagggaaagatgcgtgattaccagttggctggacttaattggcttatacgattgtatgagaatggtatcaatgggatattagctgatgagatgggtcttgggaaaacacttcaaactatttcattgctgggctatctgcatgagttcagaggtatagctggtcctcacatggttgttgcgccaaagtccactcttggcaactggatgaaggaaatccaacgtttttgccctatcttacgtgccgtgaagtttttggggaacccagaagagcggaaccatataagggacaatttgctgcaacctgggaaatttgatgtgtgtgtgactagttttgaaatggcaatcaaagaaaaatctgcgttgaggcgcttcagctggcgctacataatcattgatgaagctcaccggataaaaaatgaaaattctcttctatcaaagactatgaggatttacaacactaattatcgtctcctcatcacaggcactccactccagaataatctccatgagctctgggctctcctcaatttcttgctacctgaaatatttagctctgcggagacctttgatgaatggtttcaaatatctggggaaaatgatcaacaggaggtggtgcagcagcttcataaggttcttcgcccattccttcttaggaggctcaagtctgatgtagaaaagggcctacctccgaagaaggaaacaattcttaaagttggaatgtctcagatgcaaaagcagtactatcgtgctctgcttcagaaggatttggaggttattaatgccggtggtgaacgcaagcgattgcttaacattgccatgcagctgcgcaagtgctgcaaccatccatatttgttccaaggagctgaacctggcccaccctacacaactggtgaacatctagttgagaatgcaggaaaaatggttctactagataaattgctgcccaagctaaaggagcgtgattccagagtccttattttttcacagatgaccaggcttttggatatcttggaagattatcttatgtatagaggttatcagtattgtcgaattgacggaaatacaggtggagaagatcgtgatgcatccattgaagccttcaataggccaggaagtgaaaagtttgttttcttactttcaactagggcaggtggccttggtatcaacttggccactgctgatgttgtggttctttatgacagcgattggaatccacaagctgatctgcaagctcaggaccgtgcacataggataggtcaaaagaaagaagttcaagtgttccgcttttgcactgagtacactatcgaggaaaaggtgattgagagagcatataagaagctagcattggatgctttagttattcagcaaggacgattggcagagcagaaaactgtcaataaggatgaccttctgcaaatggtgcggtttggtgctgaaatggttttcagttctaaggacagcacaataactgatgaggacattgaccgtattatagctaaaggagaggagacaacagctgaacttgatgcaaaaatgaaaaagttcacagaggacgccattaaatttaagatggatgataatgccgaactgtatgattttgatgatgagaaggatgaaaacaaggttgatttcaagaaacttgttagtgataactggatcgagccacctagaagagaaaggaagagaaactactctgagtctgattactttaagcaagcgcttcgccaaggtgcaccaacgaagcctagggagccaaggattccaagaat

SEQ ID NO: 263378 - DNA, 1368 bp, Zea mays
cccacgcgtccgcccacgcgtccgcccacgcgtccgcccacgcgtccgccgccaggcgaatcaaaccaccacctgatttgtttaccccccgaaaatttgccgtcttctcgtctcgctcccctctttgcgccgcccccagatccggcaccgcccgctgctcgaacccgcaccccacgcccgcaggccgggaccggtgggcgcgcgccgggcagtaggagggagaggaagggcggcatggcggcgccgccggcgagggcccgggccgactacgactaccttatcaagcttcttctcattggggatagcggtgttggcaagagttgcctcctgttgcggttctctgatggttccttcactacaagctttattaccacaattggtattgactttaagatacggacaatagaattggatggcaagcgtataaagctacagatttgggatacagcgggccaagaacgcttccgtactattaccactgcgtactaccgtggagctatgggtatcttgctggtttatgatgtcaccgatgaatcttctttcaacaacatccgaaactggattcggaacattgagcaacacgcctctgataatgtcaacaagattttggttggcaacaaggccgatatggacgaaagcaagagggctgtacctactgcaaaaggacaagcacttgctgatgagtacgggatcaagttttttgaaacgagtgccaagacaaacctgaatgtggagcaagtgtttttctccatcgcacgtgacatcaagcagaggcttgcggagactgattcaaagccagaggacaaggcaatcaaaattaacaagccagaccagggttccgaggcaccagctgcccagcgatctgcttgctgcggctcataagcagatgcacgatggccatagcctttggttatttgacattatttatttcccgcttggctgttataggaaggatttgaagaagccacttatgatataccgatgtggttgtactcgtggttgcttccattctttgaagcaaccacctcttgctgttgacgtagctattgctattgctattgctgggagctattgcactcttgcattgggatccgttggaaaaactctcccctccctacagtgtgtaatgaatgaaatccatgtcgttgggtttgcatggaataacgtgtcgctcttgtgtgtgtgttttaagtgtcgccgttccttgataatcgaatttgttgggaccaagaatatatctacctggaatgtctgtatcccaagaaagtctggatcttcgatttaggttaaaaggaaacgtatctggaaatagaccgctgcatgttgtaatgtttgaaaaaagagtaaataaaacttgtacagttgtat

SEQ ID NO: 263379 - DNA, 634 bp, Zea mays
cccacgcgtccggccaagacaaacctgaacgtggagcaagtgttcttctccatcgcacgtgacatcaagcagaggcttgcagagactgattcaaagccagaggacaaggcaatcaaaattaacaagccagaccagggttccgaggcaccagctgcccagcgatctgcatgctgcggttcataagcagacgcccgatagccataatcattggttatttgacactatttatttcctgcttggcttttataggaagaatttgaggaagccacttatgatatactgatgatgtggttgtactcttgtttgcttccactcttcgaagcaaacacctcttgctgttgacgtagctattgcactctggacatccgttggaacaacctctctcctccctacagactacagtgtgtaatggacgaattccatgtcgttgggtttgcattatcgatcaatgcatggattaacgtatcgcccttgtgtggattgttgtgttttttttctctcatgttgctgttcctttagattgaatttgttgggaaggaaaatatattttccttttcttatgtatatcaggtgcatttttatcttttgtacctggaatgtatgtatccacggaaagcgtgaatcttcaatttag

SEQ ID NO: 263380 - DNA, 455 bp, Zea mays
cggacgctgggccgtgacccgacccatcataacaaatcaaaccatcacccgatttgtttacccccgaaaatctgccgtctcctcgtctcgctcccctccctgcgccgcccccagatccggcaccgcccgctcctcgatccccgcaccccacgcccgcaggccgggaccggcggggtcgcgcgccgggcaggaggaggggaagaggaagggcggcatggcggcgccgccggcgagggcccgggccgactacgactaccttatcaagctgctcctcattggagacagcggtgggtgctgctagatctctctgtctcagtaaacgggtgtgtaagggcgtacgctctacacccgctcgcgttcgtgggatcggagttggattccggtgttggcaagagttgccttctgttgcggttctctgatggttccttcactacaagctttattaccacaattgg

SEQ ID NO: 263381 - DNA, 526 bp, Zea mays
gagcactatagtacgagctccacagtccaagttcgcactcgcgagtgctagcatctctcgggaatagcggagtcgcgtggcttcgtgatggcggctgtgatggtggtggccgtggtatcggtggcgccgcgcggcgcggaggcgaagacgacggtcgagccgtgctcggggtccgactcctgcccggcgctgctgggctacacgctctacgccgacatgaaggtgtccgaggtggccgcgctcttcgccgtcgacccggcggcgttgctggccgccaacgcgctcgacttcggcgccccaggggcggcgcaccgcatcctgcccatgggcctcttcgtgcgcgtgcccacccgctgttcctgcgccgacggcgtccgcaagtccgtctccgtacgctacgccgcgcgcccggtcgacacgctcgccaccgtcttcgacgtccgcttcgcagggctccgcttcttcgaccagatccgcaacgagaacggccttaccttcaacgaccctgacgcgccgctggacgccg

SEQ ID NO: 263382 - DNA, 885 bp, Zea mays
cctagacctgtcagtaacagcttagggactacagttatgggtgtcataagaggttctgctagaggagtgatcaagtcagatactacgtttcacgcattatctgatgctggtagcactgattcccgcaccactataaccacaagagcaagtgggttaatgacaagttctgaggcacttataactcctgcacccttcaaaactgatgtgtctgccttagtctctaatactccatcgggagtttctgggagtggtaaacgtcggttttctgaggcaccgggacaatcccagtacagggatcgagctgcagaaagacgaaatctgtatggatcatctcatggcactgatactgttggattggattcaactggtgactatccgtcccgaaagggtccaagtgagatagggtcgatgccatttcctcctggcgtgggtgaacgttccagtggtgaaattggcaacagcgaaaactatgaagttattaccgctgatagagcaatcgatgaaagcaatgtgggcaaccgcattctacgcaacatggggtggcaggagggactgggtctcggaaaggatgccagcggtatcaaggaaccagtccaggcaaaatccgtcgacgccagggctggactgggaagtcagcagcggaagcctgatccatcccttgaagcccaagccggggacagctacaaaaccatcatccagaagaaggccatggcaagattcaaggagatgtcttagctacactgttttatctattttattgctgcattttgtagtccgtttttaacagcatgcatttttttgtttgctcgtgtgttttttaaataaactgagccgctgaattgtgatttattatcctgaaaggggcactacatagttcgagccccc

SEQ ID NO: 263383 - DNA, 414 bp, Zea mays
aattaccgggtcgaccgactcgtacgctcggaaaggatggcagcggtatcaaggaactcagtccaggcaaaatccgtggacgtcagggctggactaggaagtcagcagcggaaggctgatccaatcctggaggccaaagccggagacagctacaaaaccatcatccagaagaaggccatggcaagattcaaggagatgtcctagctagaccttttttttttgtatattcggttgtcgtattttgtcgtccgtatacttttttttttacaatctgtgcactgttttgcttgtgttttttttcttcacaaacctagccactgaattgtgatttattatcctcaaaggggcaccgtgtttatcttattattactatgtagttcgagaccaaaaaaaaataattaattttttatttat

SEQ ID NO: 263384 - DNA, 1359 bp, Zea mays
gaaatttgtacgtgtatgataaaaacaaggatgggaacacagacgggacgtttccagcggtcaaggcccagtctcactccatggttgcacatgcaaagtcgagtaagagcaacccagtcgctaggtggcatatatgtcaaggttcgatcaatgcaatttccttttcaccagatggcgcatacttggcgactgttgggagagatggttatttgagagtattcgatttttcaaaggaacaactaatatttggtggaagaagttattatggtgcactgttgtgttgcacttggagctcagatggaaaatatctattaacaggtggtgaagatgatcttgtgcaggtatggggcatggatgatagaaagatagttgcttggggtgaaggacataattcatgggttagtggagttgcttttgattcatattggtccccaccaagttctgatggaaatggagaaaatgtatatcgctttggttctgttgggcaggacacccaactacttctgtgggacctggcactggatgagattgttgtcccactacggcatccttcaagtgcctcacctacgtttagcagcgggagcccttccacacactgggacaatgcatgcccttcaacaggtgttcttcaaccttctcctagaatgcgagatgtcccaaaactatcgcccctagttgcccaccgagtacatgccgatcccctatctggtatggtgttcaccagtgaatctatcctcaccatctgccgcgagggcctcatcaaaatctgggttcgaccagagcagagcgaaaacaatcagcaatcgaattcttcagaatttgctttaggccctgcttcgaaggatagggcgatcacatcttccaataaagcaagtagctccagctttaagaagctgccgcctgttcttgtcacatgatgaatcaacgggatggttcttgtggatatttctgcttcacgtggcattagtggtggatatgaatcttactccatggttgatggggatgaaactctcatatggagtctgcagactgcaagtaatgagggtgagcatttgatggttgatgttcccaggaagcagggccagcgttgccagtttttttggcacgaaagagtaaatgggagctcttgtacagacacatacttaatgataaaattgtaaaaactcactgtccgtttcataatattcaatagccaccgaaagatgattggacgaccatgttatcgattttagctggtgggttgatagtatccttaaactttggtacttcggagacttgtaattatggaccataatatctgagcgatgcttcagtctaacctgccgtaagttgtgtttaaaaaaaaaaaaaaaggtaaaa

SEQ ID NO: 263385 - DNA, 1786 bp, Zea mays
cggacgcgtggagagaaggagaaattatatgcacatttaaaaactgtgcattgtcgctttagtgtaaccatttgatatgtggacatcatgctcgaataaatcatacatgtgtgttactgttcattggataaatgctgattggtgtattcagaagaggattattggtttcttcaatgtcaaaggacgacacactggtaaaaagttgtcagagacctttactgaagctatggttagatggaatcttgataagaagctattttccttgaccttggataatgctagtgcgaatgaaatggcagtcaaagatataatttcagatctaaaagatggccaggcttccttagtttgtgatggtctgttttttcatgtaagatgtgcatgtcatatactaaatttagttgctagagatggcctgaaagtaatttcgaaaacaattgacaagatcaaagctcttgtactagctgtgaagggatctccattgcagtggaaggaacttatgaagtgtgctagcgagtcagaattagatacaaagaggggcatctcacttgatgtttcagcaagatggaattcaacttatttaatgctgcaggatgccttgtactacaaggatgcttttgcaaggcttaagtcttcaaatcgtcatatgtatgtaaaaatttatccatctccggatgagtgggacatggcactaaaaatctttcaatgcttgaaaaaaggttatagtctcgctgaaattctctctggcacttcatatccaacagcaaacttgttctatagaggtttttgtgacataaaagtattgctagatgactggtgttctagtgatgatgccaccatcagtgaaatggcaattgccatgagtcaaaaaattgagaaatattgggaacattctaacttggctcttgctgtggcatgctttcttgatcctcgatacaagaaaaaagttatagagtattacatgaagaaattccacggtgatgggtaccatgtggaacttgaaaaaattgttaatgtggtaagagggctctattgtttttattctagctctacacctgcaccagcaaagagtacatcaccggaaccagctaatagtgcatcagatattttaatggcaagtgtatctgatgaactggacagttttctgtatggtacaaatgaacctactctagttcggtccaatgagttggaaaagtacatggcagatccacttttgcgtcttggtggtccatttgatggcccatttgatattttagcgtggtggaagagcaagagggaagtgtatcctattctttcacaaattgttcgagatgtgatggccatacaagtatcaacggttgcatctgaatctgtttttaatgctgctggccgttttgttgatccttatcgtaatcgtcttgagccggagatggtagaggcattgatatgcaccaaagattggatagctgcagaaagaaaagattctaagattgttggttcaattgtgagtgaccttgaaattgagactttatctaccgtcatggctaacaaaataagagctgtggatgacaaggacatagaatggaaggccccggagcatgatggtgagaaccaatatattgatagtgatcttgatgttatggatgccccccatgaactttgagctatagctgtaggcttctagtttcagcttaatgtctcctgcctttgagttactatgttatgtgtcttgggacttttataaactattatcgtgattgtgcatttgtgggtgtctgctcaattaattagacattgatgttgacttgtt

SEQ ID NO: 263386 - DNA, 1031 bp, Zea mays
tctctcacgcgtccggctcgattgaacaaattggagcagcactacactcctccacgcctccacctccagcctcccactgatctggcctctctcgagttaatcctagatcaatatgagaaggggctacagttacagtccttcaccaccaaggggctacaggagaagggcccgcagtccaagtcctcatgatcattatggtggtcgtggtagggatctcccaaccagtcttctggtcaggaatctccgtcgggactgcaggccagaagacctccgtcgcccatttggacagtttggtcgagttaaagatatatatcttccaagagattattacactggggatccccgagggtttgggtttgtccagtattatgatcctgctgatgctgctgatgcgaagtactatatggatgggcaggtagttcttggtaggcaaataacagttgtttttgcagaagagaacagaaagaagcctcaagagatgagagctagggacagagtcaggggtcattcttatgatgacaggaggtattctcgctctaggtcgcctcgttattataggggccgctctccttcacgcagccaaagctactcgaggtctccacctcagaatccaagacacagacttagagagaggtcctactccggctcacctgtggacagcagatcaagaagtgggagcccttatgaggatggatatcgcaaatcatcacggagagagaggtctctttctgtcagcggatgaagcagttttacggtctagagctattgctgtgaatctgcgcatggtggcctacttgctatgtctttctgaaccatatatgttctgtctagattatcattcccagtaccagagaagtatcgtgagactgtttgctgtactttctagtcttgaggatacagaagggggtcaccgattctctcagtagatggactattgaccactagctacgccagttccactgctttgtgtatttacaggcagctttgcggtttgaataaaattgtttgcatcgtgaaagctaattggtaaa

SEQ ID NO: 263387 - DNA, 1240 bp, Zea mays
gatcgattgaacaaattggagcggcactacactcctccacgcctccacctccagcctcccactgatctggcctctctcgaggaatctatggattcgatgtgaagtcccaaagggtagcttttagggagggggaatgatgagatgttggaagttcacaagttgtgtctttcttaaaggctggtaacctttatcctagattaatatgagaaggggctacagttacaggccgtcaccaccaaggggctacaggagaagggcgcgcagtccaagtcctcatgatcattatggtggtcgtggtagggatctcccaaccagtcttctggtcaggaatctccgtcgggactgcaggccacaagacctccgtcgcccatttggacagtttggtcgagttaaagatatatatcttccaagagattattacactggacgcaacacaagcctaaaagattattgttgaagagaaggaagaaatagagaaattcaattaagtgatctgcaacttaaaagagtactcagtactgctcaagacatgggaagaaatagagttacaagtttaagagatactcacatcatgaagagtttcaagtctgaatttaaactctcatgagtgcaagggagccccgagggtttggctttgtccagtattatgatcctgctgatgctgctgatgcgaagtactatatggatgggcaggtagttcttggtaggcaaataacagttgtttttgcagaagagaacagaaagaagcctcaagagatgagagctagggacagagtcaggggtcattcttatgatggcaggaggtattctcgctctaagtcccctcgttattataggggccgctctccttcacgcagccaaagctactcgaggtctccacctcagaatccaagacacagacttagagagaggtcctactccggctcacctgtggacagcggggcaagaagtgggagacccggggaggatggatatcgcacaacgacacagagagagaggtctctttctgctaacggatgaaacagttatacgggctaaagattcaagatgagaatccgcgcatggagaccgacttgcaatgtaaaaccgaaccatatacgatctgaatagattatcatcccaagcaccagagaaaaatcgggagaatagtagcagtactttctagtcatgaagatacaaaaagggggcaccgattctctcaggagatgggctaatgaccactagctacttcagagccact

SEQ ID NO: 263388 - DNA, 1023 bp, Zea mays
tcggacgcgtgggcggacgcgtgccggaagttctgtgggtagaggactagagactgcagatcgagggtctggcagcgggccgtggcagttgggtgattacgacgaagagagatgggcctcctcgacaagctgtgggacgacaccgtcgcaggcccgcgcccggacaccgggctcggccgcctccgcaagcagcctgtgcgtcccgccgccgtcaagatcagtgatccggccggggacgctgcggcgttcgtgccgccctcgccggcttcgggtagcgaggagacgccggtgaaggtgacgcgcagcatcatgatcaagcgccccgcggggtacccgtcgtcgccgaggagcgcggcaagcacgccgccggcctcgccactggggactaccccgcccatctcgccgtttgccggcgccggtggtcgcttcagaaggaaatcatcatccgacgcatatgagagggcaacccctccagggacgaccagccaccctcctcccttcgaagtgtgaaccggctgcaccctcacacttgttttgctccttgacaagcatctcttcacctataataaggtagaggcagggaggagagaagacgacatcaagaggggaacggggatgagttgcgggtttacctctgctgtgatatattgtaggtgccactatgtgtattgttcccccctatctactacgtggcataggttgtattctagtatgttgaaagctcatggtgccgtgctgtatcaataaggtgttatgcgcatagagtggctcaggaccagggctgcgtttgcgctttgccactggctgtgttgtatgtttcttctgctgctatgccattagggtttagggatggtgtgtggatggcgtcgtgcttgtagtgttagctgggtttgaagcggactacatgtaggtttgttcaatgtctggtatctattagctgaaggtgtttgcctgtaagttgtaaaactctgtgaactgtgatgcgggataatgctaaaaataaatgatcgttctaagtggccc

SEQ ID NO: 263389 - DNA, 739 bp, Zea mays
  unsure (1)..(739): unsure at all n locations
aaaagggccaggcggcgcncccggagacgcgtggcccctttttagggacatcctcattatcgagaccaagccccccacggggggccctttttcgcggaggagcgcggtaggcaccccgccggcctcgccactggggactaccccgcccatctcgccgattgccggcgccggtggtcggttcagaaggaaatcatcgtccgacgcatacgagagggcgaccccgccagggacgaccagccaccctcctcccttcgacgtgtgaactgaccgcaccctcgcacttgtttttgctccttcacaagcatcatctacggtagacagggaggaccggagaagacatcaagaggggaacggggatgatctagtcgcgggttgtcttacctctactgtgatatattatattgccgctatatctgtatggtaccgcgctgtgtgtgccatgtgcatagggtggggtgggtgcctcacggtcagggcttcgtgtgcgctatgccgcagcttggatctcgccgtgggccgtgtcgtgtgtttcctcctgctctgctatgtatgtcatcactgacggtgtgtggaggttgggttcatatatatgcttgtaatgctagctgggtttgaggtgtggactacgagagtagttttgttcaagggctggtatttagtagctgaaggtggtttgcttgaaattttgagaccgggatgcgggataatgctaaaatgaatagattatcgttgggtggcc

SEQ ID NO: 263390 - DNA, 1135 bp, Zea mays
cgggacctgtccggaattcctggttcttctcacgcgcccgaatactcgtccgcaagtttcgtgggtagaggaggcactagatactgtgccagatcggggtctggtagtggcagttgggtgattacgacggagtgggatgggcctcctcgacaagctgtgggacgacaccgtcgcgggcccgcgcccggacaccggcctcggccgcctccgcaagcagcccgcgcgccccgccgccgttaagatcagtgatccggccggggacgctgcagcgctcgtgccgccctcgccggcttcgggtagcgaggagacgccggtgaaggtgacgcgcagcatcatgatcaagcgtcccgcggggtacccgtcttcgccgaggagcgcggcaagcacgccgccggcctctccactagggactaccccgcccatctcgccgtttgccggcgctggtggtcgcttcagaaggaaatcatcatccgacgcatacgagagggcgaccccaccagggacgaccagccaccctcctcccttcgacgtgtgaactgaccgcaccctcgcacttgtttttgctccttcacaagcatcatctacggtagacagggaggaccggagaagaaagacatcaagaggggaacggggatgatctagtcgcgggttgtcttacctctactgtgatatattatattgtagatatatctgtatggtttccttcctagtatgtggcatatgatgtataataataatacgtcgaacgctcatggtactgtgctgtgtgtgccatgtgcataggggtgggtgcctcagggtcagggattcgtgtgcgctatgccgcagcttggatctcgccgtgggccgtgtcgtgtgtttcctcctgctctgctatgtatgtcatcactgacggtgtgtggaggttgggttcatatatatgcttgtaatgttagctggtttgaggtgtggactacgagagtagttttgttcagtgtctggtatctagtagctgaaggtgtttgcttgaactctgtgaactgtgatgtgggataatgctaagaagatgaatagatgatcgttgggttgtcttcccgaaaaaaaaaaaaaaccaaagaaaaaagaaaagctctagtcggagacaggaaaagaatta

SEQ ID NO: 263391 - DNA, 659 bp, Zea mays
ccgacgcgtgcgcgcacgcgaacgcgactttcagtttcatcatcaagcaccgcgcaggttgcccggttacatcgaggagcgcggcaagcacgccttcgacctaaccactggtgactactccgcccatctcgccgtttgccggctccggtggtcgcttcagaaggaaatcatcggccgacgcatactagagggcgaccccaccatggacgaccagccaccctactgccttcaacgtgtgaactgaccgcaccctcagacttgcttttgctccttgacaagcattatctactgtagacatttaggaccggagaagacatcacgaggagaacggagattatctagtcacggatcgtcttacctctactgtgatatattatattgccgctatatctgtatggtaccgtgctttgccacagcttggatcacgccgtgggccgtgtcgtgtgtttcctctgctctgtttctatgtatgtcatcactgatggtgtgtggaggttgggttcatatgcttgtaatgttagctggtttgtggtggactacgagagtagttttgttcagtgtctggtatctagtagctgaaggtgtttgcttgaactctgtgaactgtgatgtgggataatgctaagaagatgaatagatgatcgttgggttgtcttgtc

SEQ ID NO: 263392 - DNA, 465 bp, Zea mays
aattcccgggtcgaccgactcgtccgcggactcatgggcggactcgtcggcggacgcgtggggctatagccagccaggattggattgtggcgggcagctacccgtggattcctccacgtgtacgattgcgaatcgaggaaggaaatacgccgtctttgtgaacacccgaaatctatcacgtctttggctgttgacgatgatgcccttgagctggtgctgtcagcgtccatcgatggcaagattttgatctggagctactggcactactaccgcgcacgtagaggtagacgtagtacctggcatttggaaaaaacatttgacgcgggaagccagtgtctgaagcaagtcgcgtttattgctccaagtgtccatcgcagcagcagcactatcatcgctactgctcgagacggaacaagtaagatttgggatcccgatcgttctgaccgatgccgtgagctcacattg

SEQ ID NO: 263393 - DNA, 446 bp, Zea mays
cccacgcgtccggtacatacagagattatatgcagcgtccgcccagcgcgccccatagacgtccatccgacttagccatggatggtcatcactcaagctaacgagttggttcatgtttgggactaccatacaaaggtagtggaatggacgattcagattaagggagcgaaagttagttcagctaaatttatagccagccaggattggattgtggcgggtactacccgtggattcctccacgtgtacgattgcgaatcgaggaaggaaatacgccgtctttgtgaacacccgaaatctatcacgtctttggctgttgacgatgatgcccttgagctggtgctgtcagcgtccatcgatggcaagattttgatctggagctactggcactactaccgcgcacgtagaggtagacgtagtacctggcatttggaaaaaacattttgacg

SEQ ID NO: 263394 - DNA, 492 bp, Zea mays
cccacgcgtccgcctgtatcccagccgccacaaacagccagccggccgtcaggatttctccttgcgttcctgcatggccgcccggccactaacagactgccggccgccaggagctatccatgcatttctgcatgggcctcatggccgagctatgctcaagtgccgcctctggtttccctttttttttttttttaattttcttctccccagccgctgctccactcggccgccagggagcatcacgcttgtttctttctctgattctttgtctgagcagccgctagagcacagagctactggccgaacgtgcccgagtacggccgttcctgcgcgttgcatgctcctatctctctcttttttttttctttctttcactgtttactgattttggagattactaacgcacggttggcttcaatgcaccggagatggccggcctgagccgcctcgcatccccatcccgccgacgtgcgcgtcccttcgggtgggcgc

SEQ ID NO: 263395 - DNA, 788 bp, Zea mays
cccacgcgtccgggaagaggcacatctcctggaggaccttgcttcaatggacagaaaatttgctgaacattataatgtcttggagcaaattcttgctgtgcttatacagtttgttaaagacaagaaattggagcatcagcaccaatttgatgatctgaagaagacctggcttatcaaaaggtgtcggacaatgaatgctaaactaagctatttggagcatcatctattgcgtgacacttacaacaaggacacagtaccagcactgcacaggatcaggaagtatcttgtagaggccacaaaagaagcatccaattcttataatgaagcggtttcgcggttgcgtgagtaccagggtgtagatccacggttcgatgtgattgcgaggcagtaccacgagattgtaaagaaactggagggcatgcagtggacaattcaccaggtggagatggacctgaaacctcaccatgaccacgcagctgtttaagtccacatctgttggaggccatgtttattacctgaatgcagcgggtgcgagttaggggggttgcagtggatttgatttgagtcagagggtttctgtttgtgcatgtttttttttgtgtatatccatgttggataatagcaccatcaatgcttgcttagttatacggtcatgtattcggtttgtttgatgacgagaaacactagaagagagcgagacatggaaaacaccagaacaattatcattgtactacgcatccactgccatgtcatacaaaacaaggcaagtctagatgacttttattagg

SEQ ID NO: 263396 - DNA, 1374 bp, Zea mays
ctataggtaatgctgacacgcctgccggtatccggtctcggaatttcctcgggtcgtgggcccacgcgtccgcccctttgcaagtatagtctctctgctaagcgaagcgaagcttcaagctagtctcggcggctctagaagacgatgggcaaggacgacgtgatcgagagcggcgctggcggcggcgagttcgctgccaaggactacacggaccctcccccggcgccgctgatcgacgcggcggagctggggtcctggtcgctgtaccgcgccgtgatcgccgagttcatcgccacgctgctgttcctgtacatcacggtggccaccgtgatcgggtacaagcaccagacggacgcgtcggcgtcgggcgccgacgcggcgtgcggcggcgtgggcgtgctgggcatcgcctgggccttcggcggcatgatcttcgtcctcgtctactgcaccgccggcatctcggggggccacatcaaccccgccgtcaccttcggcctcttcctggcgcgcaaggtctccctggtgcgcgcgctgctctacatcgtggcgcagtgcctcggcgccatctgcggcgtcggcctcgtcaaggcgttccagagcgcctacttcgaccggtacggcggcggcgccaactcgctcgcctccggctactcccgcggcaccggcctcggcgccgagatcatcggcaccttcgtgctcgtctacaccgtcttctccgccaccgaccccaagcgcaacgcccgcgactcccacgtcccggttctggctcccctccccatcggcttcgccgtgttcatggtgcacctggccaccatccccgtcaccggcaccggcatcaacccggccaggagcctgggcgccgccgtcatctacaacaaggacaagccctgggacgaccactggatcttctgggtgggccctctcgtgggcgctgccatcgcggccttctaccaccagtacatcctccgggctggcgccatcaaggccctcggctccttcaggagcaacgcgtgatgagcggggcttggctgtggagcaatggcgggcgacctacgggcggggggccgtgagcgaggagaatgccatcattcatcgatcgacttgggtgccggtggttggttcgggtcgcctttttttgtttcagcagctgctgcgttgcgcgcgtgcgtgagatttggtttggtttcgttcccctgcaatgtaatcatgtcgtgactctctcaagggattattccgctctgctcttatggtctctgttttctatttaatgattgttattaccatgtagcagtaaccatcgtcatcagtgagaaccttgtagcttctgtctaaatcaacccagacgtgtggagtggatggatcgttccttcc

SEQ ID NO: 263397 - DNA, 1330 bp, Zea mays
cccacgcgtccggcaaagcgaagcccgcgcacagagatctagctgagctgagagctcgcacagcagctgctgcaggtctcctgacatggcgaaggacatcgaagcatcggggcccgaggccggcgagttctcggccaaggactacaccgaccctccgccggcgccgctcgtcgacgcggatgagctcaccaagtggtccctctaccgcgcggtcatcgccgagttcatcgccacgctgctcttcctctacatcaccgtggccaccgtcatcgggtacaagcaccagacggacgcggcggcgtcgggccccgacgcggcgtgcggtggcgtgggcatcctcggcatcgcgtgggccttcggcggcatgatcttcatcctcgtctactgcaccgccggcatctcaggtgggcacatcaacccggccgtgaccttcggcctgttcctggcgaggaaggtgtccctcgtccgcgcgctgctctacatcatcgcgcagagcctgggcgccatctgcggcgccggcctcgtctagggcttccaggagggcctctacatgggcgccggcggcggcgccaacgccgtcaaccccgggtacaccaagggcgacgggctcggggcggagatcgtcggcaccttcgtgctcgtctacaccgtcttctccgccaccgacgccaagcgcagcgcccgcgactcccacgtgcccatcctcgcgccgctccccataggcttcgccgtcttcctcgtgcacctggcgaccatccccatcaccggcaccggcatcaaccccgcgcgcagcctcggcgccgccatcgtctacaacaggtcccacgcatggaacgaccactggatcttctgggttggccccttcatcggtgctgctcttgccgccatctaccacgtggtcatcatcagggccctccccttcaagagccgtgactgattatacgtacattgtttattaccaacaccaaccatgcagcatacggatcatcgttatatattaagctatatatgcatgtcttgttaattactagtatatgtgctagtaagtggtgcgtgctcgctcttccatcgctgtcgtcgtctcatctgctattgttcgtcatatatatatgtccatgtgagctagctagtgtgtatcacgcgcggaggccagttcagctagccatcagtctgcaatgcactttgtgacttctctgtttagtcctctctcgcttgggttttggtacggtgaagtatataaactaagcatgcatatgtgtaaaaattcaaattcaagtgtatgcatgcatgccaataatgaaagttaagaagaagactccctgtttatgat

SEQ ID NO: 263398 - DNA, 1375 bp, Zea mays
cccacgcgtccgcccacgcgtccgctctcccagtgtcccagctcagcttagcaatccgtctctctatctacaggcgggggaattaatagatggagggcaaggaggaggacgttcgcctgggcgccaaccgctactcggagcgccagccaatcggcacggcggcgcagggcacggaggagaaggactacaaggagcctccgccggcgccgctgttcgaggcggaggagctgacgtcgtggtccttctaccgggccgggatcgccgagttcgtggccaccttcctgttcctgtacatcagcatcctgactgtgatgggcgtgacaagtcgtccagcaagtgcgccaccgtgggcatccagggcatcgcgtggtccttcggcggcatgatcttcgcgctggtgtactgcacggcgggcatctccggcggccacatcaacccggccgtcaccttcggcctcttcctggcgcggaagctgtcgctcacgcgcgcgctcttctacatggtcatgcagtgcctgggcgccatctgcggcgccggcgtcgtcaagggcttccaggagggcctctacatgggcgccggcggcggcgccaacgccgtcaaccccggctactccaagggcgccggcctcgccgccgagatcgtcggcaccgttcgtgctcgtctacaccgtcttctccgccaccgaccccaagcgcagtgcccgggtctcccacgtcccggtggtggccccttcttccgatggggtccgccgtgttcatggtgcacctggccaccatccccatcaccggcaccggcatcaacccggcgaggagcttgggagccgcggtcatctacaacaaggacaaggcctgggacgaccaatggatcttctgggtgggcccactgatcggcgccgccatcgccgccgcctaccaccagtacgtgctgagagccagcgccaccaagctcgggtcctaccggagcaacgcctaataagtccggcggcgggagctgtgggcgccaccgatcgatccaagtgtagatacgtacgcccccgactccgtccagtatatgacgccctgtgttcgtccacatctgccaccacagtcccctccgcttggtgctgttttcttctttccttggcggggaaaaaaagtgtgatatatctttgctttctgtatatgtgagaaaatgcattctgtaagccagtcatgtgagtttttatttaaccacagtctacttttagaacgatttaaacggccctgaatcttacttgcaaatttagagtaaagtacggggaaaagaacctcacaagtcaccaagggacttgacagttggttggtatgtgttaggcctgcggcccaaataagcaagcccatcgggcgggctccgtttc

SEQ ID NO: 263399 - DNA, 450 bp, Zea mays
ctcagcaagcaattgtcaaccgactctatcttagctctctttgcaagccagtaggtcaccactcaaaagcttgtgaagcaggtgagatgggcaaggaggtggatgtgtccactctagaggccggcggcgtccgtgaccgtgactacgcggaccctccgccggcaccgctgatcgacatcgacgagctcggcaagtggtccctgtaccgcgccgtgatcgccgagttcgtggccacgctgctgttcctgtacatcacggttgccacggtgatcgggtacaagcaccagacggacgcgtcggcgtcggggcccgacgcggcgtgcggcggcgtgggcatcctgggcatcgcgtgggcgttcggcggcatgatcttcatcctcgtctactgcaccgccggcatctcgggcggccacatcaacccggccgtcacgttcggcctcttcctggcgc

SEQ ID NO: 263400 - DNA, 573 bp, Zea mays
tcctttcgtccgcccacgcgtccgatccattcgaccattccttaacatccttgttgcaagcggcgccagctttgctcgcgctctctcgcagctgctacgctaaagcaagcctagtctctagaggaggaggcggagggggaggccatgggcaaggacgacgtggtccagagcggcgcgggcggcggggagttcgccgccaaggactacacggacccgccgccggcgccgctggtggacgcggcggagctgggttcgtggtcgctgtaccgcgcggtgatcgcggagttcatcgcgacgctgctgttcctgtacgtgacggtggcgacggtgatcgggtacaagcaccagacggacgcgtctgcgtcgcgtcgggggccggggccgacgcggcgtgcggcggcgtgggcgtgctgggcatcgcgtgggccttcggcggcatgatcttcgtgctggtctactgcaccgccggcatctcggggggccacatcaacccggccgtcaccttcggcctttttctggctcgcatggtgtcgctggtgcgcgcgctgttgtacatgttggtgcagtgcctgg

SEQ ID NO: 263401 - DNA, 438 bp, Zea mays
cccacgcgtcgccacaccgcaaccgcaagcaagcgaagcgcagagcctgcctgaccagagctagctgagctacagccaacagcagctggtctgactgacatggcgaaggacatcgaggcatcggggcccgaggcgggcgagttctcggccaaggactacaccgaccctccgccggcgccgctggtcgacgcggaggagctcacccagtggtccctgtaccgcgcggtcatcgccgagttcatcgccacgctgctcttcctctacatcaccgtggccaccgtgatcgggtacaagcaccagacggacgcgtcggcgtcgggccccgacgcggcgtgcggcggcgtcggcatcctcggcatcgcgtgggccttcggcggcatgatcttcatcctcgtctactgcaccgccggcatctcaggtgggcacatcaacccggcc

SEQ ID NO: 263402 - DNA, 533 bp, Zea mays
ctgttgaccttccccatcaccggcaccggcatcaaccccgcgcgcagcctcggcgccgccatcgtctacaacaggtcccacgcatggaacgaccactggatcttctgggttggccccttcatcggtgctgctcttgccgccatctaccacgtggtcatcatcagggccctccctttcaagagccgcgactgattatacgtacattgtttattaccaacagcaacccaaaatcgatcaaacagcaaccatgcagcatacggataatcgttatatattataagctatatatgtataatatccagcatgtcttgttaattactagtatgtgcgctagtaagtggtgcgtgctcgctcttccatcgctgtcgtcgtctcatctgctattgctcgtcatatatatatggccatgtgagctagctagtgtgtatctagcgcggaggccagttcagctagccatcagtctgcaatgcactttgtgacttctctgtttagtcctctctcgcttgggttttggtacggtgaagtatataaac

SEQ ID NO: 263403 - DNA, 488 bp, Zea mays
tgggttggccccttcatcggtgctgctcttgccgccatctaccacgtggtcatcatcagggccctccccttcaagagccgtgactgattatacgtacattgtttattaccaacagcaaccatgcagcatacgaatcatcgttattaagctatatatgtataatatccagcatgtcttgttaattactagtatatgtgctagtaagtggtgcgtgctcgctcttccatcgctgtcgtcgtctcatctgctattgttcgtcatatatatatgtccatgtgagctagctagtgtgtatcacgcgcggaggccagttcagctagccatcagtctgcaatgcactttgtgacttctctgtttagtcctctctcgcttgggttttggtacggtgaagtatataaactaagcatgcatatgtgtaaaaattcaaattcaagtgtatgcatgcatgccaataatgaaagttaagaagaagactccctgtttatgat

SEQ ID NO: 263404 - DNA, 668 bp, Zea mays
cctcgctacggcaccccaagcgcaacgacggcgagtttcaggctccggttctggctcccctccccatcggcttcgccctggtcatggcccacctggccaccatccccgtcaccggcaccggcagcaacccggccaggagcctgggcgccgtcgtcgtctacaacacggacaagccatgggatgaccactggattttctgggtgggcccgctcctgggcgctgccatcgcggccttctaccaccagtacatcctccgggcgggcgccatcaaggctctcggctccttcaggagcaacgcgtgatgagcagagctaaagaaaggccttcgctggactgcgtgctggagcaacggcgatcgatcgatctagcgtggggagaggcggataggcgggcgcgcgagggaggagaataagtttgtgccggtggcccggtctcgtcggtcgcttttgttccagcatgcagctgcgtcgcgttcgtgtgcgtgcgtgggggtctccttaatttccccggcccctgtaatcatcaatcaccatgtgtgcgtataatatctgctgccaagggatcgattattccccccccccctctctctctctctgctcttgtagctccttctgttttatcgttattatgtagcgacaacaacgacgacgaccaccatcatcagtgag

SEQ ID NO: 263405 - DNA, 308 bp, Zea mays
agcaaagcgaagctagcgcacagagatctagctgagctactagctatagcagcagctgctgcaggtctcctgacatggcgaacaggacatcgaagcatcggggcccgaggccggcgagttctcggccaaggactacacggaccctccgccggcgccgctcatcgacgcggatgagctcaccaagtggtccctctaccgcgcggtcatcgccgagttcatcgccacgctgctcttcctctacatcaccgtggccaccgtcatcgggtacaagcaccagacggacgcggcggcgtcgggccccgacgcgg

SEQ ID NO: 263406 - DNA, 680 bp, Zea mays
  unsure (1)..(680): unsure at all n locations
cccacgcgtccgcccacgcgtccgcccacgcgtccgcccacgcgtccgccgaccccaagcgcagtgcccgtgactcccacgtcccggtgttggcccctcttccgattgggttcgccgtgttcatggtgcacctggccaccatccccatcaccggcaccggcatcaacccggcgaggagcttgggagccgcggtcatctacaacaaggacaaggcctgggacgaccaatggatcttctgggtgggcccactgatcggcgccgncatcgccgncgnctaccaccagtacgtgctgagagccagcgccaccaagctcgggtcctaccggagcaacgcctaataagtcccggcgccgcggacgcgtgtgggcgccaccgatcgatccaagtgtagatacgtacgccccgactccgtccagtatatgacgccctgtcttcttccttgggggaaaaaagtgtgatatatctttgctttctgtatatgtgagaatgcattctgtaagccagtcatgtgagtttcacagtctacttttagaacgatttaaacggccctgaatcttactttacttgcaactttagaggaaagtacgggaaaagaacctcacaacaagtcaccaagggacttgacagttggttggtatgtgttaggcctgcgagccaaataagcaagcccatcggcgggc

SEQ ID NO: 263407 - DNA, 576 bp, Zea mays
  unsure (1)..(576): unsure at all n locations
cggctcgagtcnccatcgtgttcgcggtgttcatggtccatctggccacgatccccatcaccggcaccggcatcaacccggccaggagcttgggcgctgctgtcatctacaacaacgacaaggcctgggatgaccactggatcttctgggtgggtccattcatcggcgccgccatcgccgcggcgtaccaccagtacgtgctgagggccagcgccgccaagctgggatcgtctgcctccttcagccgctagatcgatggcctcccgccggacaaggacagccggaggcgtgaactgtagatataccagaggctggacaaggacagcgtgtcgtcgttggttgcctctagccatgcgtcgttatatatgcatgccttatgatcagtttgtatttccactgcattttgcttgctttaattttccttccaagctagtgtgattgttgtgctgtacttatccgtgtacgacgagtcgacgactgggtaaaatgaaaaagaaaagaaaaaaatgcatatatttaagtttttaacaaaaaacaaaaaaaaaaaggacgaccgttcgcgatcctagaactagt

SEQ ID NO: 263408 - DNA, 558 bp, Zea mays
gccgttttcatggtgcacctggccaccatccccatcaccggcaccggcatcaacccggcgaggagcctgggagccgcggtcatctacaacaaggacaaggcctgggacgaccaatggatcttctgggtgggcccactgattggcgccgccatcgccgccgcctaccaccagtacgtgctgagggccagcgccaccaagctcgggtcctaccggagcaacgcctaagttccgcccggccgcgccaggagctgggcaccgttccaattctgttcctccacatgacgccctgttctgtttccgtgtggccaggactccgctcgctcgctgctgttttctacttcggaccaaagtgtgacatatctttgctttctgtatatgtatgtaggaatgcatcatgtaaggagaatttggaatacaattgcgtgagtttttatccgatcacaatctattgagtagtggaataaaaaaaaagtcatgccctttcttttaaaaaaaaaaaaaaaaaaaaaaaaaaaaaaaaaaaaaaaaaaaaaaaaaaaaaaaaaaaaaattaacaaa

SEQ ID NO: 263409 - DNA, 1789 bp, Zea mays
cccagcgttttcgttcacagttcaccccacttgctctctttctccccagtagcaacgaccgcgcgtcctccgccgccgcactaaaccctactccatgtacccaggtctgcgtcgggcccttgccggcgatgagaacccgtcagttccaaagatggctcgtcgtggattgatggaacaggacttaagcaaactggatgtgacgaagcttcaccccctgtcacctgaagttatctcacgccaagcaacaatcaatatgggtaccattggccatgtggctcatggaaagtccactgttgttaaagctatatctggtgttcagactgttcggttcaagaatgagctggaacgtaacattactataaagctgggttacgctaatgcaaaaatctacaaatgtgaggatgacagatgtccgcgaccaatgtgctacaaggcctatggaagcggaaaagaagatagccctctatgtgatgtgcctggatttgaaaacactagaatgaaactcctgagacatgtttcttttgttgattgcccgggacacgacattctcatggctacaatgcttaatggagctgctatcatggatggagctcttcttttgatcgcagcaaatgaaagttgtccacagccccagacatcagagcatcttgctgctgttgaaatcatgcgtcttcaacatatcatcattctgcagaacaagatcgatcttatccaggaaagcgcagcgatgaatcagcatgaagcaatccaaaaattcatccagggaacaatagctgaaggtgcacctgtggtgcctatatccgcccagctgaaatacaacattgatgttatctgtgaataccttgtgaagaaaatccccatccctgaaaggaactttacctcacctcccaacatgattgttattcgctcctttgatgttaacaagcctggttcagaggttgatgaaattaggggtggtgtagctggtggcagtattctcaggggagttctgagggtgaaccagaagattgaagttcgccctggcattgtcatgaaagatgagaatggaaacattaagtgcaccccaatctactcaaggattgtctcactgtacgctgagcagaatgaactccaatttgctgtcccaggagggcttattggtgtgggaacaaccatggacccaactctaacgcgtgctgacaggctggttggccaggttcttggtgaagtaggttcactacctgatgtttacgtagagcttgagatcaatttcttcctactccggaggctgttgggtgtgaggacgaaaggtacagagaaggcagggaaggtgtcgaagctcaccaagggtgagatcctcatgcttaacatagggtccatgtccacaggcgcccgtgtgctcgctgttaagaacgatcttgccaagctacagctcaccgcgcctgtctgcacgagccgaggagagaaggttgctctgagccgtcgcgttgagaagcattggcgcctcatcggatggggccagatccaggcaggtacaacacttgaagtaccagcgtgcccggtgtaaagcgtcatactcagacgtgagctgaagttgagtgcaaaagagaaaaaagagtttgttgttagtcctgtccctgcgttactgcagatccaaagtcctgggtcactctaattttattttgtttcgttcaattttggaggccgtttgcattatgactcctgtgaacattaccaggtcggaaaccagtattgtgaactttatgagtacggcatatggatcagcattgccaatttcttctttcgcacc

SEQ ID NO: 263410 - DNA, 421 bp, Zea mays
acgcgtgggtggtcggagctggggcctcagcttgatcccaggctgccgttcgcggaatctctcttcccacctagcgacgactgggcgacctccgccgccacactaaaccctactccaggtgcccaggtctgcgtcgggcccttgccggcgacgagcacccgctagttaccactgtgcggtttccaagatggctcgccgtggattgatggaacaggacttaagcaaattggatgtgacaaagcttgacccactgtcacctgaagttatctcacgccaagcaacaatcaatattggtaccattggccatgtggctcatggaaagtctactggtgtgaaggctatatccggagttcagactgttcggttcaagaatgagctggaacgtaacaatactataaagctgggctatgctaatgcaaaa

SEQ ID NO: 263411 - DNA, 850 bp, Zea mays
  unsure (1)..(850): unsure at all n locations
ctccacgcgtccggtggccggctcttctccaggccctcgccctccgccctggcggccccccgtcgttccggctcaccggcgtcgggccgccgcagcccgacgagaccgacgccttgcagcaggtgggctggaaacttgcccagttcgcgcacaccatccgcgtggacttccagtaccgtggcctcgtcgcggccacgctcgccgacctggagccgttcatgctgcaaccggagggcgatgacacggatgacgagcccgaggtgatcgccgtgaactccgtgttcgagctgcaccggcttcttgcgcagcccggtgccctcgagaaggtcctgggcacggtgcgcgcggtgcggccgaggatcgtgaccgtggtcgagcaggaggccaaccacaactccggcacgttcctcgaccgcttcaccgagtcgctgcactactactccaccatgttcgattctctcgagggcgccggcgccggctccggccagtccaccgacgcctccccggccgcggccggcggcacggaccaggtcatgtcggaggtgtacctcggccggcagatctgcaacgtggtggcgtgcgagggcgcggagcgcacggagcgccacgagacgctgggccagtggcgcagccgcctcggcggctccgggttcgcgcccgtgcacctgggctccaatgcctacaagcaggcgagcacgctgctggcgctcttcgccggcggcgacgggtacagggtggaggagaaggacgggtgcctgaccctggggtggcatacgcgcccgctcatcgncacctcggcgtggcgcgtcggcgncggcggcggttcctgatcagggaggggtggttgggg

SEQ ID NO: 263412 - DNA, 2246 bp, Zea mays
cccttcttatcgcccacgcgtccgccctcgcctccgcccctcctcccgctgccctcggctcccacgacgcccggctagggttttgcctccttcccgctgccgccgtctcagcgagcgagactgagctgtgcttagtaagccatgtcgctgcgcccgagcgagcgggtcgaggtgcggcggaaccgctacaaggtggcggttgacgcggaggaggggcggcggcggcgcgaggacaatatggtggagatccgcaagagccgccgcgaggagagccttctcaagaggcgccgcgaggggctccaggcccaggtccctgcccctccctcgggggtcgagaagaagcttgaaagcctcccagctatggtcagtggggtttattcggatgacaataaccttcagcttgaggccaccacacagtttcgcaagttgctatctatagagaggagccctcccattgaagaagttatcaaatcaggtgtagttccaagatttgtgcagttgctcacaagagaggatttgccccagctgcagttcgaagcagcatgggctctcacaaatattgcttctggcacttcagaaaatacaaaggttgttattgatcatggggctgttcctatatttgtgaagcttcttgggtctggtagtgatgatgttcgtgagcaggctgtgtgggctttgggcaatgttgctggcgattctccgaagtgtcgtgaccttgttctcgccaatggtgcattgatgcctctgctagcccagttgaatgagcatgcgaagctctccatgttgaggaatgccacctggactctgtccaacttttgcaggggaaagccacagccatcatttgatcagactaagcctgctctgccagcacttgcacgacttatccattccaacgatgaggaagttctcactgatgcttgctgggctttgtcatacttatctgacggcactaatgataagatccaagctgtaattgaagctggtgtttgcccccggcttgtggagctccttctccatccatcaccgtcggtgcttatacctgctctacgaactgttgggaacattgtaactggagatgatcagcaaactcagtgtatcattgatcatcaagctcttccccgcctcctgaatctgttgacgcagaaccacaagaaaagcattaagaaagaggcatgctggactatttcaaatattactgctggaaacaaagatcagatacaggctgtcataagtgccggtatcatcgctcctttgttgcaactgcttcaaacagcagagtttgatatcaagaaggaggctgcttgggccatctcaaacgctacctctggtggttcccatgagcaaatcaagtacttggtgtctgagggctgcatcaagccattgtgtgaccttcttgtctgccctgatccgagaattgtaacagtttgtctggagggtcttgagaatattcttaaagtagggcagcatgacaagaccatgggtgcaacaggtgacactaatgtcttcgctcagatgatcgatgaagcggaaggcctggaaaagatcgagaacctacagagccacgataacaatgaaatctatgaaaaggctgtgaagcttcttgagacatactggatggaggaggaagatgacgcaatggctactgccggggaagctgctcctgctgtttttgactttaaccaaggtggcaaccctcctggtgctggtggtctgaacttcaactgatacagtctttgatcgaaagggtgttaattccctcagtgatgggcttggcattggcttgtcgtgacaaatgtagtctggtcgactccacgtgggatataatggtttgtggtgagtccaataaactcaagatttcgaagggagatgggctgagcattatttcccaagtgaaccatggctatcagtatcaatatcgcagggtctgtaacatggattatataatcgtcgaacattagagcgtgggttcttgagaacactactctaggttgtgcgtcgtttaattatatctggctactgtaaagcctgggtccaatcatgtgcaaggccgttgtccggagttcctcgggaatggtctgcgttgcaggttgtccggagtgggtaaacctttaggccttgttcgtctctgctggattggtggcccgcaccgattcctgaccggattgtttctctaatttatacaaactttaattaaaaaaaaaaaaaaaaaaagggcggccgcccgggaatacggacggtactgcagg

SEQ ID NO: 263413 - DNA, 715 bp, Zea mays
caggtgacattaatgttttcgctcagatgattgacgacgcggaaggcctggaaaaaatcgagaacctacagagccatgataataatgaaatctatgaaaaggctgtgaagcttcttgagacttactggatggaggaggaagatgatgcaatggctactgctggggaagctgctcctgctgtttttgactttagccaaggtggcaaccctcctggtggtggtttgaacctcaactgaatacagtatttgaccaaaagggtgttaattccctcatgacaacctagtctggtcgattccatgtgggataatggtttgtggttggtccagtaaattcgagatttcaagggagatgggttagcattattcccaagctgtcatggatatcagtatcgcagggtctgtaacaggaccataatcgtcgaacatgagtctgggtttttgagcaggctactctctagggtttgcgtcatttatgttttatatctggctactgtatagcctgagtctaattatctgcaatgccgtaggacattcctgagtggtttggttttgaggttcctcaggaatggtctgcgttgcaggttgtccagagttgtaaaccttcaagtggtttgagtatattgctcggccttgctttactacggtcgatccaacctgttggaggccaaatgacttataaaaagctgttggcagctgcattgttggcggttggtgat

SEQ ID NO: 263414 - DNA, 720 bp, Zea mays
ttcttacgcgtccgcccacgcgttcgtccacgcgtgcgtccactcgttcgtccacgcgttcgttcacgcgtccggctgccctcggctcccacgacgcccggctagggttttgcctccttcccgctgccgccgtctcagcgagcgagactgagctgctggggaagctgctcccgctgtttttgactttagccaaggtggcaaccctcctggtggtggtttgaacctcaactgaatacagtttttgaccaaaagggtgttaattccctcatgacaacctagtctggtcgattccatgtgggataatggtttgtgcgttggtccaagtaactcgagatttcgaagggagatgggctgagcattatattcccaagtgaaccatggctatcaatatcgcagggtctgtaacaaggattatataatcgtcgaacattagagcgtgggttcttgagaacgctactctaggttgtgcgtcgtttaattatatctggctactgtaaggcattcctgattggtttggttttttaagttccccgggaatggtctgcgttgcaggttgtccggagtgggtaaacctgagtgggaacatttgagcatattgctcggccttgttttactccggtcgaggctaaattgatttctaaaagctgtttgcttttgcattgttggcgggaaaataaggcgaatgttttgatgccaaattcaatttcgagttaagaggcc

SEQ ID NO: 263415 - DNA, 273 bp, Zea mays
agccatggttcacttgggaataatggctatcaatattacagaccctgccatattgatagccatggttcacttgggaataatggctatcaatatcgcagggtctgtaataggattatataatcgtcgaacatgagagtgtgggttcttgagaacgctactctaggttgtgcgtcgtataattatatctggctacagtaaagcctgagtccaatcatgtgtaaggccgtaaggcattcctgggtggtttgtttttttaagttcctcgggaatggt

SEQ ID NO: 263416 - DNA, 444 bp, Zea mays
cggacgcgtgggcggacgcgtgggcggacgcgtgggcggacgcctcctcctcccgctgcccttggctccccaagcctcgacgcccggctagggttttgcctccttcccgccgccgctgtttcagcgagcgagaccgaggggtagagaaagagcggtgcttagccacccatgtcgctgcgtccgagcgagcgggtcgaggtacggcggaaccgctacaaggtggcggttgacgcggaggaggggcggcggcggcgcgaggacaatatggtggagatccgcaagagccgccgtgaggagagcctcctcaagaggcgccgtgaggggctccaggcccaggtccctgcccctccctccggggttgagaagaagcttgaaagcctcccagctatggttagtggggtttattcggatgataataaccttcagcttgaggccaccacacag

SEQ ID NO: 263417 - DNA, 537 bp, Zea mays
gccaacatgtttccaaggtattggaaagcgtgtgaaactaccactgaacaatttattttatctccatctattttatctgttcctatagttatttatatttaacattttgtaatatgttagtctatgaaattgtgtcatgaaactcttcatcaagagagcatatttcatgctttatttcatcctacgctgggtgacgtggtgacattgggaatggtgtgataaagctaccactgaggccttactatccatttcgtgctcatctatgctgttgttatttatttttattacttggatggtagcatgctgctgctgtttgctgattctgcggtacctatgtggctatgtgattagcatgcatatctgtttcttgttgcttactgttccttattcctcccttggtctactgagactatgttcaacggtgcacccttggctccccctcccctaacactgtagccgatttaggggctacagtgtgcccctatccccttcaccgacttcctcctccttctcctctcccctcccgattccttctct

SEQ ID NO: 263418 - DNA, 1499 bp, Zea mays
tgttaaagaaggattctgatgttttattgaccaacctgaaattcctagaggaaaacacaagaaagattcaaaagtcttttgatgatgaaagaacagctctcagaaaattaacagaggaacaccgagcagctaatgaaatacgtcaaaaggcctacattgaatggactgagcttagatcagagccctccaagaagaatgaatacttcttcaggtacagggatgaccggaatgcagcagaaattttcagagctaatggcgatataaatggacttaaatcacactgtaatagtcagattgagggagtcatggaaatgtggaacaaaaacgaggaattccgcaagcagtatgttgagtcaaacaaggttagcacactaaagagattagggacccatgatggacggaaacttggccctgatgaggaccctccagtcatatcaagcagaagaccaagcagcatctatccattgtctgcctcaagcccggaagtgatcaccttagcttcaacaccagcacctgtggtggctgctgcagctgcagtcccttccaaagagaactcctttcctgctttggcagcccctcagaccagtaagcgcgccaaatcaaaagcatctggtagctctgcccagattaagaacaaatctgttatagtatcagaggaagaagatttggaacagactttaaaggagaaggctcatcaattggagttagctaggaaggcagaggagttagataggaaggcagaggagttggcgcggaaggaggaggaactaagaaaagagagggatgcagctgaaaaggagcggcttaggatggagcagaaggctaaggctaaggaggctgaggagaggaagaggcggaaagcagagaaggacaaggaaagagccgagttcaaagcacgcaaggaagctgaggagagagagaagaagaaagcaaagagagacaaaaagaaaggcgcagcaccagcagattcgagcgccattggtgacagccatgctgctgcttcggctacagcagatactgacagtaatgcatcagacaacccaagggaagctgacgtttctcaaccagcggtggctcccaggaggccggctagaccagcggcggcaatcaagcaactgaacaggttgcagcccatgccagcgcccctgcgtaacaggggcaggaggaaactgcggcagtacatcctgatcgcagcggcggtgctaacggtgctggcgctgttcgtggcaggcaactacattcccaggctgaggtcgcactcctaattttatcgttaggaaaggagtgccagttctgtcgcggtgaacctggtggtggttctacctagaggattcttcttttttcgactgttcgggttggtttgtatttagcttcccttattataggtttgtgataaaagttattaccggatggtggtgaaatattcgttagaacatgataataatgactatagattcttttttgtacataggtctctggtgctaacctaacggaaaatg

SEQ ID NO: 263419 - DNA, 298 bp, Zea mays
cccacgcgtccggattaatgaattaaaatcccaacggaagcagctgtccgccaccatgggctcaaaggctgaaatcaatgaggcatttgaccaaaaagatcacattcatgagcggcataaggtgttaaagaaggattctgatgttttattcagcaacctgaaagtcctagaggagaacacacgaaagattcaaaaatcttttgctgatgaaagaacagctctcagaaaattaacagaggaacaccgagcagctactgaaatacgtcaaaaggctacagcgattggactgagcttagat

SEQ ID NO: 263420 - DNA, 659 bp, Zea mays
ccggtccggaattcccggggttactaacttactattgttcacattaatgtgcattatgttgacttctaaattgctccaggcggtggctggagaagcgaatttaggtcccacttccagatttcgaaagcagaaaggcacttatcaacattaatcttagaacagttcagattgctgcggatgttaacatcgatgaggttgctcggaggacagaaggctatagtggagatgacttgacaaatgtttgccgtgatgcttcgatgaacggtatgcggcgcaagatagcaggcaaaacccgcgacgagatcaagaacatgtcaaaggacgacatagccaaggacccagtggccatgtgcgactttgtggaggctctggtgaaggtccagaagagtgtctcgcctgcagacatagaaaagcacgagaagtggatggctgagtttggatctgcctgagacctcggtcatctccttcaacattggtttctgtggttgacacgacaagtgtatgttgatatccgctgaccgctggtgcatagatcagaggcacgaactatcttgtatattttcagggatactacaaattaagttcacgattatttcatttcaatccctgatatgtacaaaaaactaggttttttttcctttgtctttttccttctatct

SEQ ID NO: 263421 - DNA, 296 bp, Zea mays
cttcagacatagagaagcatgagaagtggatggctgagtttgggtctgcctgagacctcggccatctgcttgggtcctgttcaaacattcgttttgtgtgggttgacacggcattccgtagcaatgatacggtgttacccgccggtggtcttgcttcatatagaccagaggcacgagctatcttgtctgtttccagtgatgctaggaattgagttcacgatcgtttcagttcttggtatatgccctttctgctgtcaaacgtatctcatcaagtagccgtggccgcctctatttcc

SEQ ID NO: 263422 - DNA, 1553 bp, Zea mays
gacaaagaggtcatctggcccccaatctggtggagtaaccccgatggcccgtcagaactctggccctctgcctcctgtacttcctacaactgggctaatcacatcaggtcctatcacctctggtcagttaaattcatctggtgctcaacgcaaagtatcagggcctcttgattctagtgtatcaatgaagatgcgtaccacatcttttgcacacaacccagctgtcacaaatctcaatgtgggagatggttactcgattaagggcagcattccgaccacaataatctggttggtcgcgttgctctttttggttgggtttgtagctggtggcttcattctcgctgctattcataatcctatcttgcttatagtcgtggtggtgatatttggctttgttgctgcacttgtgacctggaacatctgctggggaacaagaggtgtgattgattttatcggtcgctattctgatgtagaccttagaactgcaaaagatggagagtatgttaaggttactggggttgttacttgtggaaatttgccccttgagtcctcattccaacgggtgccacgatgtgtgtacacttcaacttgcttgtacgagtacaggggttgggactcgaaagccgcaaacgccacacaccgacggtttacttggggtctcaggtcaatggaacggcacgcggtggacttctacatctccgatttccagtccgggctgcgagcactggtcagggcaggatccggcgcgcgcgtgaccccatacgtggacgagtccgtcgctatcgacgtaaacccagacaacaaggacatgtcgcctgagttcctccggtggctccgcggaaggaatctctcgagcgatgaccggactatgcgcctcaaagaagggtatatcaaggagggcagcaccgtgagcgtgatgggtgttgttcaaaggaatgagaacgtgctgatgatcgttcctccggctgaacccatctccactggctgccaatgggccaaatgcatcctcccgaccagcctcgacggtctggtcctgagatgcgaggacacgtctgacctggatgtggtaccagtctagttggttccggcgcggaggaggagaaaaagatgccttgactcgatttgagttggtttctgtgggttgttagtgttggagggaaaaaaaatgtgcaaatgcagggtgtgattatgggctaagtaaagttacaatgtcagtggtcggtcagctacctggagattggtcgtacagtatgtcatgtgtaatttttgtcgtctcgttttggttgagccatgggtggtgcttgtaacaaaaggatggcttggtgtcagtactacctaccctaccatggagcctgtttggagattcagtggtctggtttcccattcatattttgttcttttttcttttggcgtagggttccgacaatgccctggaagcctgcagtttccttctgtacccagatctacatggaaatcgcttacctaaacttgagaggcatattttccggtggtgagaaaccaatgtaaaaaaaaaaaaaaaaaaaaaagggcgt

SEQ ID NO: 263423 - DNA, 898 bp, Zea mays
cccacgcgtccgcacgcggtggacttctacatctccgatttccagtccgggctgcgagcaggggtgagggcaggatccggcgcgcgcgtgaccccatacgtggacgagtccgtcgctatcgacgtaaacccagacaacaaggacatgtcgcctgagttcctccggtggctccgcggaaggaatctgtcgagcgacgaccggactatgcgcctcaaagaaggatacatcaaggagggcagcaccgtgagcgtgatgggcgtcgttcagaggaacgagaacgtgctgatgatcgttcctccagccgagcccatctccactggctgccagtggggcaagtgtgtcctcccgaccagcctcgagggccttgtcctgagatgcgaggacacgtctggcctggacgtgataccggtctagctagagaggttggttctggcgaatcctctggcgcggaaagggagtagggaaaaaaatgccttgacgtttggtttggtctccgtcggttgttagggttggaaggatgtgcaaatgcagggtgtgattattgggctaagtaagtaagtataatatgagtggtcggtcggttacctggagcttgatcgtgatagtatatggtatgtaatttcctcttctcttcttttggctgagccatggatggtgtgcttgtaacaaggatggcttgatgtcagtatactaccctaccataccatggagcatatttggagattcagtgggttccagtccgtattatgctcctgtttttttttgttgtagggttccaacaatgccttgaagcctgcaatttccctgtgtacccagatctccatagaaatctatttgcctaaacatggactatagcaggtgaattttcgatggtgaaaaaaaactgtgattgattcct

SEQ ID NO: 263424 - DNA, 667 bp, Zea mays
acccacgcgtgcgggacgcgtgggcggacgcgtgggcggactcgtgggtccttttccggtcttcccgaccgagcgatccagccagcgagaggttgcgagtagtagccgccgccggaggagcacgccaaggccgccgcctacgaggacggccatggggttctgggtgaccacgctcatctttctcctcgccggcgtcgccgcatccctcttcacgctcctctgctgcaaccgcgggccctccacaaacctattccatttgaccttggtgactacagctgtaatttgttgttggatgatgtatgctatcgtttaccttgctcagatgaagccattgatcaaccccatcctgagcggggagtgatctctcctctgcattaaaaagaatgaaagctagatctgctgtaccattattcaatctgtgaacttcctattcatttggccccacctgatgaaataaataaactgccatgagttttttttttttttgctactccttcactgcagacattgagaaggttcgctgtgattagtgtatgcaattgtatgatatacgcaataataatagtatctaaatatctgtgtgccgctcattggaatgtctgggtgcgtgtacccaactttgttcgtcacgactcaggtgtttgtctgcttgtaatggaattatgaa

SEQ ID NO: 263425 - DNA, 569 bp, Zea mays
cacgtgacgtggctgtcagcaagtagcagcttctgtcgcgtctccccctccctgaccgagcgatccagcgagagggagcgagtagcagccgcagccggaggagctcgccgaggccgccgaagacgaccatggggttctgggcgacgacgctcatcttcgtcctcgccggcgtcgccgcatccctcttcacgctcctctgctgcaaccgcgggccctccacaaacctgttccatttgaccttggtgactacagctgtaatttgttgctggatgatgtatgcaatcgtctaccttgctcagatgaagccattgatcaaccccattctgagcggagagtgagcgctgcatctgtattgaacagaacgaaagcgagacctgctgtaccattgttcagtccgtgaactttatattcattttggccccacctgatgaaataaataaataaactgccatgatttttttggtgccactcttcacccgtgattaggggatgcaattgcatgatatacgcagtaattacatataaatatctatgtatcgatcatgtgcttgaaaaaaaatataagaatg

SEQ ID NO: 263426 - DNA, 674 bp, Zea mays
tcgcaaacggacggactatctggcgccccaacttgtggactaccttcagtttctgcgcactacggtgcctataacttgggcaagcagatggtcccatgctattacttccagaaagggaactgcttgaagggggatagatgccctttctatcatggaccacaaacagctagtaatgatcctgtagagcaagcggcgaaggtttcttcctttcctttggaaccgtcccaggctcaaaataacgaagaggctgtagctccaaataattcaacgcagcaagaggcccgaatgactgaaaacaggacttcgattcatgtttccaagagtggtgagggtgcaactcctgctgatgtagcttccaatgcattgaagcctgggaccaacttcgagcaggcacccagtaatacgcttgcagcaaagaaaagttccacaactgaggatcatcctatgcactatcagaaccaggttcctgtggagatcgatcctgtcaaagactggaaccaaaattttgaagtgtctcctactgattacctgccacaagatagtagggaggctgatgatattttgggggagtcctctcctggttatgatgttcttgtagacaatgatggagatgctgctgaagaacttgcaagggatatgtacccggcagaagattacgagtatgttacatctga

SEQ ID NO: 263427 - DNA, 1318 bp, Zea mays
cggacgctcggtcggacacgtgggcggacgcgtggagcggagccacaccacaccacccttggtccggcactagcactagctatccagtggagacgaagatggcgacggcgcggtggctgcaggttgccgccatggcggtggcgctgctggcggagtgggcgacggcggcggcgcctcggaagcccgtggacgtgccgttccagaagaactacgtgccgacgtgggcgcaggaccacatccactacatcgacggcgggcgggaggtgcagctgtacctggacaagtccaccggcacgggcttccagacgcggggctcctacctcttcggccacttcagcatgcacatgaagctcgtcggcggcgactccgcgggcaccgtcacggccttctacctgtcgtcgcagaactcggagcacgacgagatcgacttcgagttcctgggcaaccggacggggcagccctacatcctgcagaccaacgtgttcaccggcggcaagggcgaccgcgagcagcggatctacctctggttcgaccccaccaaggagtaccactcctactccgtcctctggaacctctacatgatcgcgttcttcgtggacgacgtgccgatccgggtgttcaagaacacgagcgccgacctgggcgtgcggtacccgttcagccagccgatgaagctctactccagcctgtggaacgccgacgactgggcgacccgcggcgggcgcgagaagacggactggtccaacgcgcccttcgtcgcctcctaccgcggcttccacgtcgacggctgcgaggcctccgcggaggcgcgcttctgcgccacccagggcgcgcgctggtgggaccagccggagttcagggacctcgacgccgcgcagtaccgccgcctggccgaggtcaggcgccgctacaccatctacaactactgcaccgatcgcgaccgctacggcgccgccgtgccgcccgagtgcgcccgcgaccgcgacgtctgatgatgatgcgttgggccggcaagctgcttgatcgagagcagcctgtaatgtatgtatggtatggtattgttgtgtgtcaggttcgtcgtcgtgggtctgcagagacacagagagagtccgatccggcgcgtacgtgtgcccgcgtgggcacatgcatacgtacatgcttgtgttgtactgtacgctcgtatctcctcacaccgaaatgaattgcgattaagtatcgaaatttcggcagcttatccatcatgtaatgagttcctctgcagtacttaaaactctcatcgtctcttgtctgtatatctatacaacttcttgctcgaagt

SEQ ID NO: 263428 - DNA, 769 bp, Zea mays
  unsure (1)..(769): unsure at all n locations
accacccttggtccgggggtaggtgtattatttatagtgccggggcggtccagccacggcgcggtggctgtaggttgccgtcatggcggtggcgctgctggcggagtgggcgacggcggcggcgcctcggaagcccgtggacgtgccgttccagaagaactacgtgccgacgtgggcgcaggaccacattcactacatggacggcgggcgggaggtgcagctgtacctggacaagtccaccggcacgggctttcagacgcggggcttctacctctttggccacttcagcatgcacatgaagctcgttggtggcgacttcgagggcaccgtcacggccttttacctgacgtcgcagaactcggagcacgacgagatcgacttcgagttcctgggcaaccggacggggcagccctacatcctgcagaccaacgtgttcaccggcggcaagggcgaccgcgagcagcggatctacctctggttcgaccccaccaaggagtaccactcctactccgtcctctggaacctctacatgatcgcgtaagcacccgcatcatatccatcgcattgcgtttgcgtccgtcacacatcatcactctgcatctgcaatgcaatgcaatcctccgctgctccgtcctctctggaacctcacatgaaccaggtaggattccctaaaatttaccgcggtaaaagctcactgctctgctcaccggcgccggngagggtacaactgcagcacgacggcagcggcactacagtcgagtactgaaaa

SEQ ID NO: 263429 - DNA, 666 bp, Zea mays
  unsure (1)..(666): unsure at all n locations
cccacgcgttcgcccactcgtccgcccactcgttcgcccacgcgtccgcgcactcgtcggcaaccaatgaacctggtgcactgatgaatcttgtagaagaatcaactgccgatgatgcagatgatgatgatactaaagattgtaaaggtttatttaagaacttaaagttctacttgagtcgagaggtgcctagggagtccctgttatttataattccagcatttggagggactgtttcatgggaaggagaaggagctccatttaaagaaatagacgaagatatcactcaccaggttgattccatttgcaataatttattacaccaaagtttaactatatagacggagacattgtgtaccatccctaaagtaagatgccactctaagtaccacgacagcaatgccatactagggcaatagttactacaatacaatttttgtatgtggctaactgttcatattttacactctaccatcatatgatcatatctagcgaagtaaaataaaatggcctgtggatttttttatgcttgctagtatccatattgtaataaaaaataggagtatgatatcacatcctcacactatatnagcctttattttgaagagtcaatgatatgccctttgacggatacatgactcacagtgataataatgactaccacac

SEQ ID NO: 263430 - DNA, 2206 bp, Zea mays
ctaaaacccatctcctcctctcttttcccctcccttttccagcacggggagcgacctgcgccgccgccacgatgccgaagcactaccgccctgcgggtaagaagaaggaagggaatgcggcaaagtacatcacgaggaccaaggcggtcaactacctgcaagttagcctcgcaatctttaggaagctatgcattctaaagggtgtctttccacgtcagccaaagaagaaggtggaagggaaccacaagacctactaccacacaaaggatattgcattcctcgctcatgaccctttgatcgagaagttcagggagattaaggtccatcgaaggaaggttaaaaaggctgttgctaagaaaaacagggatcttgcagacaggctgttgaatcggccaccaacttacaagcttgataggcttgtccttgaaaggtatccaacattcgttgatgctcttcgtgacttggatgactgccttacaatggtgcatctgtttgcggcattacctgctgttgacggtgaacgtgttgaggtcaaacgaatccataactgccgcaggttaagccatgaatggcaagcatacatatcccgaacccattctctgaggaagacatttatttccgtgaagggcatatattatcaggctgaagttcaaggacaaaagatcacctggctaactccgcatgctcttcagcaagtattaactgatgatgttgatttcaatgtgatgctttcttttctagaattctatgagactcttctaggatttgtgaacttcaaactctatcattcaataaatgtaaattatcctcctattctggatccacgtctggaagctttagctgctgagctctatgcattgtgccgatacatgtctgctggttccagaagaatgattgggaattcacaaactgacgaagtaatggaagataaggatgagaaaagtaaagctgaggaagtaattaaggaagagaaggttgtgaagaataaagcaagctcaaaagcagatgaatctgagctcagattagcacagcttcaacatcagctcccaaccaatgaacctggtgcactgatgaatcttgtagaagaatcaactgccgatgatgcagatgatgatgatactaaagattgtaaaggtttatttaagaacttaaagttctacttgagtcgagaggtgcctagggagtccctgttatttataattccagcgtttggagggactgtttcatgggaaggagaaggagctccatttaaagaaatagacgaagatatcactcaccagattgttgataggccgacacaaagccatgttttcctctccagggagtatgttcaaccacagtgggtctttgattgtgtaaatgctcgtatcatattgccaacagaaggttatcttgttggaagagtacctccaccacatttgtctccttttgtggacaatgatgccgagggctacatgcctgagtatgcagagacaataaagaggctccaagctgctgctcgcaatgaggtgttgcctcttccaggtattggtgatgaagatctagacaattcactggtagcagcaatgatggatcgaacagcttctaacgaagctgctgaaaagaagaggaagctggagatgctagagaagcaatacatcgatgaactgaagaaggaaattgatggcgttgctttctctagtttgtcaaacaaggaagcagataaatcaccgaatgcaaaagatgatactcagtcagatcgtgaggaggatgccagtaaacaagaggaggatgatgatgatgatattggtactgctctcatgtctcgcaagcagagaggcctttataaggctatgaagatgggcaaagaaaagaaaaaggagaaagttgagctactcaagaagagaaaaaagaacgcggattctggcgcttcttccaagaagcggcactgatgtgtcacaaatcttcatcgcattggtgtgtcatctctagtagaaatgttaccatgatcagctctgcgtgccaatcccccatgatgggtgggttgccttttgatatctgctatgtatgcttaagatgagttcaaggatatgtaacatgaaacttgaatagaaaagttttgatctgtcttacgaagcatttagactcgttattattgtgaaacttgaatagaaaagttttgacctgtcttacgaagcatttatagttattattgagaagcctggat

SEQ ID NO: 263431 - DNA, 554 bp, Zea mays
gggtcccaattcccaattccacgctcgcccacgcggttttaaatttttccgacaattttaattccaagaatatattcggtcaaggaggttttggaattgtgtataaaggctgtttgagaaatggaactttagtggcagtgaagagattaaaagatcctgatgttaccggtgaagtccagtttcaaacagaagttgagttgattggccttgctgtgcacaggaatctcttgcgtttgtatgaattttgcatgacctctaaagaacgattgcttgtatatccatatatgctaaatggcagtgttgctgaccgcttgagaggaagctatgcattctaaagggtgtctttccacgtcagccaaagaagaaggtggaggggaaccacatgacctactaccacacaaaggatattgcattcctcgctcatgaccctttgatcgagaagttcagggagattaaggtccatcgaaggaaggttaaaaaggctgttgctaagaaaaacagggatcttgcaaacaggctgttgaatcggccaccaacttaacagcttgataggc

SEQ ID NO: 263432 - DNA, 673 bp, Zea mays
gcaactttgcaggcattgctttcatgctcgcacttttgtctaccttttacaggatttgaggaaccgcaggatacctaaggttggctacccaactctgcgtgcatttgttgagttgatctctcaattcgatgtgcctgacgagtcagttaacaagaaaaatgagaaggctattactgttgctgcaaagccacttaatcctgccatgtttgatgatgttctcagaaactttacaccagatgtgccggctggaataactgctcggccaaggcaggaagatgctcaagagtttttaagttttgccatggatagagtgcatgatgaactgctgaagcttaatggtaatggtttgaattcaaaggagggtatggttgtttcttccgctgatgatgatgcttgggagacagttggaagaaagaacaaatctgcaatagttagaacacatagttttgttccctctgagctaagtgctatttttggagggcagctacagagcgttgtgaaagctgcaggtaacaaagcatcagctactgttcaacccttcctactgctccatcttgatatattcccagatgctgttcagacacttaatgatgcacttcgtctgttctctacccctgaatctttggaaggatacagaaccactgctggaaaggctggtttggtgacagctaga

SEQ ID NO: 263433 - DNA, 521 bp, Zea mays
  unsure (1)..(521): unsure at all n locations
cggacgcgtgggaactaccttcgccgctctccttgatccgcaattttctcccacatctctcttctgcccacttgcctccatcttggcctccccctccactccccacccccgaacatccggcgccgtccacacccttgcaccccgactcccctcgtccttcgtggccacgatgggggcgtccatggcatcgccttaggggcgatcgatctgggagaaagtgctggagcacgtggcgtcgtaccaccagcagcaacggaggcagaagctacgcaagagcctcacctacaccggcagtgagttctcgttcgctgtccggggtcgtggggacgaccccgcctccacgtccgttggggcacagaacgaggacatgcctcttgagcacgtctttaaaatcattagatccgatggcaaaagtgtgtgtttatggttcctgagtcagatgatctttcttcaagtttaggtacttttatgctttatatagctcatgcaatatgatttattttaacacatattnggaatag

SEQ ID NO: 263434 - DNA, 1346 bp, Zea mays
cttccccagcgcagcccctcccccctgtagcctgtatccgccccccacactctgcgtctgcagtcttctttctcgcgtcggcagtcagcttggcagggccgaaccaatggcggtcgacccgcggcaggtggtggcgggcttcctcaccctctccatgttcgtcatgctcggcaacatgatcaagcacgaccacttctctcccgtcaccgaggagctgggcttggaggcaacaggtgtggtgtcgaacacaaggaagcttgacaacgatgctgaaatgagcagcgtcgatacggctggagtggaggacctgatggacgctgtcgaggaagttaaaccttgctggaccaaaccaagtccaaaaaatcagccgtctaatggttttgttacattctccttgactatgggccctgagtatcacatctctcagatcacagatgctgtggttattgcgaggtatctaggtgcaacacttgtactcccagacatcagaggaaatgaattaggaaataagcgaaaattccaagacatgtacaatgtggataagttcgtgaggagcctggatggtgttgtcgaagtaatagaggatatacctgatgaagtgagtgctaagaagccagcagtcatcagagtaccgaaccgtgtgactgaaagcttcatcacaggcaccatccagcccatcttccaaaaaaacaagtacttaagactagcggtcattttctcttccgtaagtttaaggccaaaggagacgaacaacaaggacatggacgcaactgcttgccttgcgatgttcggtggcctcgagctgaagcacgaatattctgaggtggccagaaaaatgctggataggcttcaagaattaagcaagaagtcagatgggaaggtcttggcgatcgatttgcggaccgacttgctggaaaagaagagttgcaagacaacccgcggcgctcgaagaaaaggctgctatagccctgatgaggtcctggctttcctgaggagtgttggcttctctgctaacacaaccatctacttgacagagacgtcgtggcacaaaggcctggatgttctgaaggaagaattcccaaacacttggtataccaaggatgacattatgccagctgagaacaaaggtgaattcctgaaatccagcaatgcagacctagcaagcgctttggaccttgagatctgctcgcagagtgacgtgttcatccctgctgtcgctggcctgttctacgggcatgtcacaggtaagaggattgcatctggtcgtacccagatcattgtgccttctcagtccagcacctcgactcatgcttcagatttcacctccacctacatctccaacaaga

SEQ ID NO: 263435 - DNA, 322 bp, Zea mays
ctcgagccgcgccccgcttcatctgtcgtctcctccagtgcagtccctcctccccctgtctccgccccaactctctccagtctcctcgcgtcggcagtcggcctggcagggctgaatcaatggcggtcgacccgcggcaggtcgtggcgggcttcctcaccctctccatgttcgtcatgctgggcaacatgatcaagcacgaccacttctctcccgtcaccgaggagatgggcttgaaggcaacaggtgcgcgatccaacacaatgaagcttgataacaatgctgaaatgaacagtgtcgatatggctggagtggaagacct

SEQ ID NO: 263436 - DNA, 1268 bp, Zea mays
cccggttcgacccacgcgtgcggccacgcgtccgcccacgcgtccgcaatttaccgctgacaccctccacaaaccgcgaatgtcctccccgggtcctctccctcctccccagtcaatccccacacagtctcggccgggccctcgcgaggccgccgtggaaggacccccagcgatgggctccggcgaggaggacacaggaggcggaggaggggcggtgcggggcgcggtgctgaaggcgctcgtggttgtcggcggcgtcctgctgctccgccgcctgcgccgctccactacccgatgggaccacgcgcgagccgtcgccgacgcgctctccggagaaaagttctcgagggagcaggcgaggaaggatcctgacaacttcttcaatttgagaatgctcacatgtcctgcaaccgagatggtggatggttcaagggtgctctactttgagcaggcattttggagatctccagactagccttttagacaaagattctacatggtaaagccctgtccgaaggagatgaaatgcgatgttgagttgagttcatatgcaattagggatgctgaagagtacaagaatttctgtgaccgtcaaaaggatcagaggccacaggcagaagaagtaattgcagatatcgcagagcatctgaccaccatacacttgtcacgatgcggacgaggaaagcgttgcttatacgaaggatctaccccacctgaaggttttcccaacaactggagcggcgcgtcgtactgtacgtcggatctgtccatccacagaaacggcgaagtacatatctgggacaaaggttttgacgacgaagggaaccaggtttgggggaccaaggctggcccctacgagttcaagcctgctcccaaatccaaatatgacgacatgttctcgccgttaaatttctcggctcctttgtcgctagagaagaagctggataaagcatatgtaattgatgaccagtagggcctgccctaaatttttgttcataggaatggaataagtgaatagaatgtatatgtatatcctgtactgagttataatgcattctttgttttgagcaacctgtgcatcttagttgtccatgggtagcatggtgaggcatggtgatgccttgtccgcccagatttgagtcagtacgcaagatgacccagtcactgtaaactatggtatgttatttatgccatgtcaggaaagatttgttccaaaaaaaaaaaaaaaaaaaaaaaaaaaaaaaaaaaaaaaggacgaccaaggtcga

SEQ ID NO: 263437 - DNA, 1076 bp, Zea mays
cagtacggtcggattccgggtcaccacgcgtccggcgcctcgcgagaggcagcgagccagcgaccggcaacagttttctcggaaggcagcctcttcctcgtcgccgccgacgtcacccgccgcggctgtcggggatgccggtcagggtggtcgataccgccacgccttcctcgcagccctccccagggcaagaagcaaatactggacacccatctcctcctagatgttcactcttaagtgctggaagatcttttgctggaactcagaatgtttcaagtctgcagaaggatgaagcatggaaagtgaatgtccgcatccatggttgcgatcttgaacagggttatctatgtggaacgatggaagcgcttaatgttccattagcagatacacctgtagtgacattctgggagggggagatagtggatgctaaaaattacacctttttcactggcaagtgggaggcatcaccagatgatgatataagacattggtccaagttcccatcatttacgcctcttctgagtcagattgagacagatggtggcaagtctctggactttagcaactatccttacatatttatgagatggaaagagcaatattttgtcaatgttggagtcgactgtgggttaaccatcgctggtttctactacgtctgcttttcttgtagcgatggctccattaatggattttattatgatccaaatagcagtccatttcagaagctcgagctgaagtgtaccaatgagaaaaaatccgggttcaccttttcatcctacgagctgcagtgacaggacagatgccctcgacagacaactttctgttagcatatagtgtgtgtactgaactcgtactccctaatgaaaggaatgagtggtcgtttacgtaacagtttgttttctagcaagactaagcaaactgtcactttgtaatctgcagaagcatcttgtcctttctaaaatctaccttttgtattacgttcctattccacaattgttatctgcaatcggggatatacacatagtatgtccccactgtgcgtggttcctgggaaaaaaaaaaaaaaagggcgacaa

SEQ ID NO: 263438 - DNA, 1029 bp, Zea mays
catcgtccttacagacgagacacgagaggcatcgagccagcgaccggcaacagttttctcggaagtcagcctcttcctcgtcgccgccgacgtcacccgccgcggctgtcggggatgccggtcagggtggtcgataccgccacgccttcctcccagccctccccaggttcccctaccctcctcgcatccgccgtctccaataaatacgctatgcgcgcatcaggtccgctttgtacgatcaggtctagatcttatcggattaccgctctcttgtgttgcctcggcgtgatgcgatttcgttggatttctgttggaagctattttttctgatctagattggcctaaaagcaactccaagaaggagttctaaacttgagccttaaaatttgtattaggaccttttgatttatttaggatcttcaacaaccaggccttaaaatcaggatacccagctgggatccttacccagcttccatcttctctgcacgaggcaacgcgcttttttctagcatatccttctcgtcagctacgcattcgttcgcaatcggccgcatgaggcccacatcatccttcctcaagggctgcacagttaagcgcgacggctgcacacggctgcaaggtacagctcgacggctgctggtaggggcatcaccgcatcatccctgcacggtaggctcttgacccctgcacaatacggctggagggctacgagacgagtggtggcggagtctgctcgctggaggttgggcgcgtggaccaggtgaatagttcatttagaacctgctgcagatttgcaacaaaaacatgtatgcaactaggagatctatgatccatctcgaagatgaagaattagatgatgaacttgaccacctcatgcttctcatgatgggtgaatatcggaagaggaagcataagcagcgaaagaagcatcgaggttcagtttttggacacaaggtttacaatcaaaatagagatgaacacgggcaagaagcaaatactggacacccatctcctcctagctgttcactc

SEQ ID NO: 263439 - DNA, 615 bp, Zea mays
ggcaagtgggaggcatcaccagaggatgatataagacattggtccaagttcccatcatttatgcctcttctgagtcagattgagacagacggtggcaagtctctggactttagcaactatccttacatatttatgagatggaaagaacagtattttgtcaatgttggagttgactgtgggttaaccatcgctggtttctactacgtctgcttttcttgtagcgatggctccatcagtggattttattatgatccaaatagcagtccatttcagaagctcgaattgaagtgtaccaacgagaaaagttctggattcaccttttcatcctatgagctgcagtgacagggccagatgcatatagtgtgtactgaactcatactcgcctaatgctgctgtattgaaagaaacgagtggtggtttatgcaacacttcgttttctcgcaagagcaagaccaagcaaactgtcactttgtaatctgcagaagcatcttatcttttctaaaatgtacctttcgtattatggttgtgttcatggtatggtgcgtccaaattcagttggatagggaatgtgagggctagatgttgatccagagaaatgctatataccttttccac

SEQ ID NO: 263440 - DNA, 640 bp, Zea mays
agaaacatgtatgcaactaggagatctatgatccatctcgaagatgaagaattagatggggagcttgaccacctcatgcttctcatgatgggtgaatatcggaagaggaagcataagcagcgaaagaagcatcgaggttcagtttttggacacaaggtttacaatcaaaatagagatgaacacggtatgaaattataccttgactattttgctgagcacccaacatatcctgagaagatgttccgacgccgttttctaatgagttcctctcttttcaaacggatagctaaagctgttgaacaacatacctctagattcttgtcgaattgcatctatggcagtgtttagcgaggagcttcacgaccctttcgtggctggtccggctttctttgatccatgcgatggagtttgacgacggaagagatgggcttgccggcaggtgggagcagggcgcgccgactagatggcagccctgtgcgccaacgagggacgaacgtggccgggaggaagcgcacaaactctggagggcagccttgttcaccgatgagtgacggccgtggacggagagacgagacgtgcgggcatcggtgcgcggtggcgagtcaccaagatgagcggagaggtggggagcacgggaaat

SEQ ID NO: 263441 - DNA, 354 bp, Zea mays
aaagaacagtattttgtcaatgttggagttgactgtgggttaaccatcgctggtttctactacgtctgcttttcttgtagtgatggctccattagtggattttcattatgatccaaatagcagtccgtttcagaagctcgaattgaagtgtaccaatgagaaaaattctggattcaccttttcatcctatgagctgcagtgacagggccaaatgccctcgacagacaactttctgtcagcatatagtgtgtactgaactcatactccccaaatgctgctgtattgaaagaaaggagtggtggtttatgcaacacttcgttttctcgcaagagcaagaccaagcaactgtcactt

SEQ ID NO: 263442 - DNA, 531 bp, Zea mays
ccgtgcgttcgcccacgcgtccgcccacgcgtgcggccacttttacgcggcgattgggtttcccgaagagggcaccggtaatgtcaacgacgacggaggcggcaaagagcggctcagccgcaccggtgcggtgccagcggatcggctgcgacgccgtattcaccgacgatgacaaccgcgagggctcctgccaataccacccctccgcacctatgtttcatgacggcatgaaagaatggagctgctgcaagcaaagaagccatgatttcagcttatttttgcagatacctggatgcacaacaggaaagcatacaaccgaaaaaccaatcacaaaagctgtttcatctaaccgtacaaaggcaacaccgatccagtcctctaagcagggtgtgggagttgatgtgtgtgcaaggtgtcgtcaaggtttcttttgctccgatcatggatcacagcccaagccacaaaagccagctgctaccgacgatacaaacaaggaacctgttgagaaatcagctgttccaccgcccaagg

SEQ ID NO: 263443 - DNA, 585 bp, Zea mays
  unsure (1)..(585): unsure at all n locations
accggnccggaattcccggggcgacccacgcgtccgctccaaacgcagcagagcccctagcgccgccggtctcttcagcctcgcagcacaccgccgccagcccgagtgaccgctgcagcctagggtttccggcggcgatggcgggtaagggagggaagggtctgctggcggccaagacgacggcggccaagagcaccgacaaggacaaggacaggaagaaggcccccgtgtcgcgctcctcccgcgccggcctccagttcccggtgggtcgcatccaccgccagctcaagtcgcgtgcctccgcgcacggccgcgtcggcgccaccgccgccgtctattccgccgccatcctcgagtacctcaccgccgaggtcctcgagctggccggcaacgccagcaaggacctcaaggtcaagcgcatcaccccgcgccacctgcagctcgccatccgcggggacgaggagctcgacagcctcatcaagggcaccatcgccgtatcgcggcgtcatcccgcacatccacaagtcgctcatcaacaagaccgccaaggagtgaatcaaggccgtgctgctgcttctgcctgac

SEQ ID NO: 263444 - DNA, 632 bp, Zea mays
tttctacgcgtccgcccacgcgtccgccggttgcgatccgccgccatcgcttcaagcagcgaaccctagccgccctcagcgacggattgcagatctcccagccatgacgttcaagcggaggaacggcggacgcaacaagcacgggcgcggccacgtcaagtacatacgctgctccaactgcgccaagtgctgtccaaaggataaggctatcaagcggttcttggtgaggaacattgttgagcaggctgctgtgagggacgtgcaggaggcttgtgtgcatgatggatatgttcttcccaaattgtacgcaaaggttcatcactgtgtctcatgcgcaatccatgcgcacattgtccgtgtccgctctcgtgagaacaggaggaaccgtgagcccccgcagcgcttcaggcgccgggatgatggcccaaggccaggtcagggcccaccgcgcccaggtgctgctgccacagcagctccccctgctgccgctcctcgtacctaagttcaggaatgcgtttcagggcttagttctctcacctatgggataatggacttttcctgttttgaaaaccaatgtactgtacccccttgatgtctttagtttagcccaatttgtggttcgctcctctgtc

SEQ ID NO: 263445 - DNA, 748 bp, Zea mays
tgggatcctataaagtaaacacacgcgcccgtagagccgccgccgccgccgtttcgcgcaccgtaccctagccctcgtcagcggcggcttcgagctcatccagccatgacgttcaagcggaggaatggcggacgcaacaagcacgggcgcggccacgtcaagtacatccgctgctccaactgcgccaagtgctgccccaaggataaggctatcaagcggttcttggtgaggaacattgttgagcaggctgccgtgagagatgtgcaggaggcctgtgtacatgatggatatgttctacccaaattgtatgcaaaggttcatcactgtgtctcatgcgcaatccatgcgcacattgtccgggtccgctctcgtgagaacaggaggaaccgtgagcccccgcagcgcttcagacgccgggatgatggcccaaggcctggtcagggcccgccgcgcccaggcggtgcagctcctgcagctgcacctgctgctgctcctcgtacctaagttctggaattagtttcggggcttagttttgtgaaacattacctgttttgagaaaccattgttactgtatccccttgatgtcaaactttttagtacaatttgtggttctgaaaaggttggttgaatgttgcagctaagggttgaatgtactacagctaatggtgccgctaaaattagcttaggacgtctaaacagtatagctaatagtcccggagctaatgtgtaactgcactgtgagcaacat

SEQ ID NO: 263446 - DNA, 612 bp, Zea mays
  unsure (1)..(612): unsure at all n locations
actgtggcaggttctatgtggccgttactgtgctagccctggagtacctgcacatcgtcgggtttttatacagggacgtgatccctcatatcttgctgaagaacattgttgatcaaaanatgcttttttactttttacattttcttatgttttactattattatataattcccttattaattgcataatttagtcggatgannnntctntttatctatttataaatacccctccttatattttcattttcacacgatattttgtacataatgaaaatgttcttcccaaattgtacgcaaaggtatcatcactgtgtctcatgcgcaatccatgcgcaacattgtccgtgtcccctctccgtgagaacaggaggaaccgtgagcccccgcagcgcttcagacgccgggatgatggcccaaggcctggtcagggcccgccgcgcccaggcggtgcagctcctgcagctgcagctgctgctgctcctcgtacctaagttctggaattagtttcggggcttagttttgtgaaacattccctgctttgagaaaccattgttactgaaaaaccaaaatgtcaaactttttaaaaaaaaaaaaaaaaaaagggcggccg

SEQ ID NO: 263447 - DNA, 478 bp, Zea mays
  unsure (1)..(478): unsure at all n locations
cggacgcgtgggatgacgttcaagcggaggaacggcggacgcaacaagcacgggcgcggccacgtcaagtacatacgctgctccaactgcgccaagtgctgtccaaaggataaggctatcaagcggttcttggtgaggaacattgttgagcaggctgctgtgagggacgtgcaggaggcttgtgtgcatgatggtatcatagtcgcccttattagttgcataatttagtcggatgatctatttataggttatctagagaaaccgnccttaatatcttcatttgcacaggatatgttcttcccaaattgtacgcaaaggttcatcactgtgtctcatgcgcaatccatgcacacattgttcgtgtccgctctcgtgagaacaggaagaaccgtgagcccccgcagcgcttcaggcgccgggtataattcttgcacatgcttatcttgataaccatatcgattggatccctttgttttat

SEQ ID NO: 263448 - DNA, 517 bp, Zea mays
tttcgccggtttctgtccctcctccccctcctccccgcctctgcgggtactggaccaccgtggagcgggcattcatccaggctaggtccattccttcctttgctcgttctcttctccatcgcggaagctccacccgagttgacgccagaagagaatcggtgccctagggtgttctcgcagaattattttccagaagatttgcagatcgagtcgaaccctatgccccacgttaagcctgccgccggcctgcccccttaccaccaccgggcgctccctggccccgggcagggtccagttcccacgggacatgggatgatgcaccgggaggtccgtgatcagtacgggccgccggggccgaggatgcacctaccaccgctggggcacgggcccgctccgttcccctacgacatgctgcctccgctgcccccaccggaggtcctggagcagaagcttgtggcacagcacggggaaatgcagaagctggttattgagaacggtcggcttgctgcaagccacg

SEQ ID NO: 263449 - DNA, 1741 bp, Zea mays
tttcactctagaccgaaatcggagcgcccgataccataccaatagcagcagagcagtagcagcacagctccctcccccgtcctctccaaatctcgccggattccgtccaccgccaagccctcgcatctgccgcaggttcgcgtctgtgcccgagcgtgttgcactgccggtggtgttggcggtggttggcggacttgccgcccagggtcgggcatggactacgggccctctgacaccagcggaactgatgatgatcttccacaacttccacataggagtatcagaggcagcggacgtgtgagcggtcatgggagaactattgttcctgccggttcatatgctagagcaccaactgacatggaagcacaaattcaacaacttgagcaagaagcatattgctcagtccttcgtgcattcaaagcccagtctgatgccattacatgggagaaggaaggtctcatgactgaacttaggaaggaactaagagtatctgacaaagcacacagggagctgttaaataaagtcaacaacgataatattatatgtagcataagggaatggagatcaacaggagggcttcaagcaagcatgtccaataacccacaaccgattcatgaccctgttccaagtcctaccacctctggccgtaagaggcaaaagacatctcaatctgttcctgctttacctgcacctcctgcaatgcattcacaacagctggctacaccaacacagccatcgtcttcaactgctaggaaagcagtacccccagtccctaaaggcaaaaagacgaaaccaggtcagaaggtaccaggtggctctgcagccaagcctataccatcttcagcaggtcctagtggaagaggaccgcacatgaataggggtggttctgctcctgaagctcaagctcagaatgtcgatccattgattggtcgtaaagtgatgagtcggtggcctgaagacaatagtttctatgaagcagtcatatacgaatatgatgctgaaacgggccttcatgcactggtttatgacatcgatacggcagatgaaacctgggagtgggttgatcttaaagagatgggacctgaagacataagatggcaagaggatgactctgggatagaccctgtggtgtatctgcgcagccgaggtggcccaagtagtggggtcaggaagccaacaggtcgcggtgggcccatgccaggttctggaagaggaagaggattaccgaagaacatgcctaggaaagattttccacctccacaaaatggtgttggcaagagaagttccgatgacattgatatccttcatactgagagcctaataaaagaggtggagaaagtttttagcgttagcaatcctgatccacaggaagtagaaaaggcaaagaaagcactgaaggagcaagaacagtcgttgattgacgccatagcaaggcttgctgaggcatcagatggtgaaagtgacgggcacaatcgtgggcgaaggaacttgtatgctgctaaccagcatcaagcaagctacgttggtgccatgcccgtcggtgacagagctggtgccatgtaaacactgcatgaacgcatgcacaacataaaataactgcctgttgtacaatccatcgcctaatatttatcctggatttaggtctctgtaggctcttttgctttgggatgcttttttttttacaattgtaattcagaacgctgaccatgtaaagcttgtagatgcgtgtttctgtctctag

SEQ ID NO: 263450 - DNA, 462 bp, Zea mays
gttaacttatgaacaagcattcatttcgtcttaactttcaatgcctgcaggagcaagaccagtcattgattgacgccatagcaaggcttgctgaggcatcagatggtgaaagtgatggggctcaatcgtgggcgaaggaacttgtatgctggtaaccagcatcaagcaaactatgttgatgacatgcccgttggtgaccaagctgatgccatgtaaacactgcatgaacatgtatacccaacataatataactgtctgttgtacaatccattgcaaatatttgttctggatttaggtctctgtaagctaagtatcgttcgtttcgggaaactaatttttttagaacagtaattcagaatgctgacaagtaaagcttgtagatgtttgtttctttccctagtttttttgttagtgtggtctcatgttctatatgcttgataaaacgaaaaaaatcacctttgt

SEQ ID NO: 263451 - DNA, 735 bp, Zea mays
gtgttggcaagagaagttccgatgacattgatatccttcatactgagagcctaataaaagaggttgaatgtttattattacaatgaactgcagatcttgtgcacttcatttcacttctcttctgctatatctgctcatgtaggtggagaaagtttttagcgttagcaatcctgatccacaggaagtagaaacggcaaagaaagcactgaaggagcaagaacagtcggtgattgacgccatagcaaggcttgctgaggcatcagatggtgaaagtggtaaatactaatccatttgtttcttagccataggtttatggaaatttgcaagatgctgcagaaaacactcatttctgcttccagtctagtaggatggttgccccaaacaagggtcaaggggagtggttttcagatttgttgtacagtgcatgatgtatatattacgcagtgttgtagcacaatggacatttgccctcgtaattttagtcaaccttaaatgagatatgcacgcggtcatcttttgcatggccacaagtggcatgaggtaaacattttaatcttgttgattcctgcgaagcttctgacgtgctttttcgtttgatgggaacagacaggcacaatcgggggcgaaggaacttgtatgctgctaaccagcatcaagcaagctacgttggtgccatgcccgcaggtgacagagctggtgccatggtaacactgcatgaacgcatgcacaacataa

SEQ ID NO: 263452 - DNA, 786 bp, Zea mays
cacgcgtcagcccacgcgtccgcggacgcgtgggtgaattcacccctatgttgtacccactcctcattagctctgtgggtatcatagcttgcttgataaccactctttttgcaactgatttctttgagatcaaggctgtagatgaaattgagccggctctcaagaagcagcttataatttccactgctgtgatgactgttggcattgcacttgtcagttggttagggcttccatatacattcacaatcttcaactttggtgtgcagaagacggtgtataactggcaattattcctatgcgtggcagttggtctgtgggcaggactagttattggatttgttacggagtattacacaagcaatgcatacagtcctgtacaggatgttgctgattcctgcagaactggagctgctacgaatgtcatctttggccttgctctgggatataaatccgtcattatccctatttttgctattgcttttagtatttttctcagcttcagccttgctgccatgtacggtgttgctgtggctgctcttggaatgctcagcacaatcgctactggccttgccattgatgcctatggtcctatcagtgacaatgctggaggaattgctgaaatggctggcatgagccacagaatccgtgagagaactgatgctcttgatgctgctggaaatactactgctgccattgggaagggttttgcaataggttcagcagccttggtgtctcttgccctctttggtgcttttgtcacccgtgctgaaatctctactgttgaag

SEQ ID NO: 263453 - DNA, 1741 bp, Zea mays
ggctagggttttttcttgtcacaccttccctcggtcccttccatctcctagccgccgccgccgccgccgccgccgctgcccaaaaccctacctaccctcttctccccctcactctcctttcatctccattctaatggcggcccaacccgtccggcgaactgctagtgcttgtatctactatcttcatcaggtacttcgcgatcctactgaagtattccccgccgccgctgccatggccaccctcaaccctttcgaactcctcggcgccgacgacaacgacgacccgacgcagctgattgcggcggcggcggctgctgctcagaaagccgaggcgaagaagtccgccgtggcgcctgctgggaaggctgcccagcctgcggcgaccaccaagttcccgaccaagcccgctcctccctcgcagacggttcgggatgcacgcggcggtggctcatcagctcgtggaggctttggccgtggtgaacgtggccgtggcagaggtggacggggatatggccagaaccgtggcttcagtggtgacaatggcaatgagttccagggaggttatggtggcggaggctatggggatggtgctgtaactggtggatctgaaggagaaagggagagagacactcgtcccccgtaccgtggcggaggcagacgtggtggttacaggaatgttgagtttgctgatgactctgagaggccaccacggagaaactatgagcgccacagcgggactggccatggctatgagatgaagcgtgatggcgcagggcgtgggaactggggcactgccactgatgaacttattgcccaggatgcagaggactctccgaagatggaggaggctgctcctgttgctgagaaacaaggtgagcagaatgatgccccagcagcagatgagaacaaagataacaaggatgctactgcaaatgaggaggaagaaaaggaagaggacaaggagatgactctggaggaatttgagaaaataagagaggagaagaggaaagcactacttgcattgaaggctgaggagaggaaagttgaagttgacaaggatttgcagtctctgcagccactttcaaacaagaaagaaaatgatgaagttttcattaagctgggttctgacaaggataagaagaaggaaaatgctgagcgtgatgagcgtgccaagaagtcggtgagcatcaacgagttcctgaaacctgctgaaggagaaaggtactacggcggccgtggccgtggaaggggccgtggggatcgtggtggttttagaggcggatacggagggggatacagtcgtggcccagctgctgctgctccatccattgaagatcaagctcagttcccaagccttggtgggaagtgaagggcgcccagctgctgctgtcaccgagcgttgtgttgtctgctgttgtcatatttaaattttgtccgacgttaaatttctgtgccacggtttaaacggaacaaataatgatgttgcatgtggctatctttggttatgtggtacttgacgttgaataccggagttgttgtttatcagaattaacctccaatttttgtaggccagcttttaccattttgttgtcttagcatgcttgcttgtttggctgtcctgtatggcactgctgcagctgcaatccatattagttgcagctggattaaagccggctatattagttgcagctggattaaagctgcagcgaacttgtcaaaaaaaaaaagaaaaaagaggagt

SEQ ID NO: 263454 - DNA, 567 bp, Zea mays
  unsure (1)..(567): unsure at all n locations
cattaagtcttcattaagctggggggtgttaatgataagaacctgccggttgttccccgngangagcgtgccaagaagttggtgtgcatcaacgagttcctgaaacctgctgaaggagaaaggtactacggcggccgtggccgtggaagggtccgtggggatcgtggtggttttagaggcggatacggagggggatacagtcgtggcccagctgctgctgctccatccattgaagatcaagctcagttcccaagccctcggtgggaagtaaagggcgcccagttgctgctgtcaccgagcgttgtgttgtctgctgttgtcatatttaaattttgaccgacgttaaatttctgtgccccggtttaaacggaacaaataatgatgtggcatgtggctatcttaagttatgtggaccttgacgttgaaaaccggagttgttgtttatcagaattaacccccaatttttgtaggccagcttttaccattttgttgtcttagcatgcttgcttgtttggctgtcctgtaaaaaaaaaaaaaaaaaaaaaaaaaaaaaaaaaagggcggccg

SEQ ID NO: 263455 - DNA, 571 bp, Zea mays
  unsure (1)..(571): unsure at all n locations
ttcggtcccttccatctcctagccgccggcggcgccgtcgccgccgctgcccggaaccctacctaccctcttctccccctcactctcctttcatctccattctaatggcggcccaacccgtccggcgaagctgctagtgcttgtatctactatcttcatcaggtacttcgcgatcctactgaagtattccccgccgccgctgccatggccaccctcaaccctttcgaactcctcggcggcggctgctgctcagaaagccgaggcgaataagtccgccgtggcgcctgctgggaaggctgcccagctgcggcgaccaccaagtttccgacaagccgctactcctcgcagacggttcgggatgcacgcggcggtggctcatcagctcgtggangctttngccgtggtgaacgtggccgtggcagaagttgacggggatattggcagcaacgttggctcagtggtgacaatggcatgacttccaggagtttatgtgcggagctatgggatgtgcttaactgtgtctgaagagaaggaaagaactctcccgtacgtgcgagcaacgtgtgtacag

SEQ ID NO: 263456 - DNA, 985 bp, Zea mays
cgaaccactcctcctacagaaatcacctgccggcctggcctttccgtagctacaaccgcagccaccaccagcagtccagcacgactagcggaataatatccaccggcgacgggaacgggaggcggcgcggccggagattcgaagcgatggcgttcacgatgcgggcagtgaaggtgcctccgaactcggcctcgctggaggaggcccggcaccgcgtcttcgatttcttcaagcaggcatgccgctctatccccaccgtcatggagatctacaacctcgacgacgttgtcacgccctctcagctccgctcgaccatcgctaaggagatccgtaaaaaccagaacgtcaccaaccccaaggtgattgatatgcttctgttcaacgcgacggaggagctgaacaacatagtcgaacatgcaaagcagcgccatcatgtgattgggcagtatgtgatcggccaagagggcctggtgcatgagctggggtcgaaggatctagggaactctgacttcctgaagaaattctacacaagcaattacttctgatctgtgttgcagatttacaacatctggtatactccgggtggtgctctgaataagacgacactgaggacctatcaggaccgattgtttcgcactggaggttttgatctatttggcccttgaatcctgtgttcaatgtgatactgctgtcagctgtttgtcttgtttactgttgtacttatcaaattgatgttttagtcgattcgagtctacaagattgaactttgttgctacagtgagtaccgaccagtggcctttttttttgttgagaaacagccctcaacctttagcagagaaagggactaaacatgtcttccaacataaaaactaagggcctgtttgtttttgtttgtttttgttttttgttaagcctgtttgtttaggtttaatttgtacagacttctactgcttctacagtgtttttttttgtgtcagatttattt

SEQ ID NO: 263457 - DNA, 1333 bp, Zea mays
aagagaaactactctgagtctgactactttaagcaagcacttcgccaaggtgcaccagcaaagcctagggaaccaaggattccaagaatgccgcacttacatgatttccagtttttcaataaccaaaggctaaatgaattgtatgaaaaggaagtgcggtaccttatgcaagcgaaccagaagaaagataccattgatggtgaagacgaagatcagttggagcctttgacagcagaggagcaggaagagaaggaacaattattagaggagggttttgcgtcatggacaaggagagacttcaacacatttattcgtgcatgtgagaaatatggtcgcaatgatattaaaagtatatcatctgaaatggagggtaagacagaagaggaagttcaacgttatgctagagttttcaaggagagatacaaggaactgagtgattatgatagaattataaaaaatattgaaaggggggaagcaaggatatcccgcaaggatgagattatgaaggctattgggaagaagctagaccgctacaagaacccatggttagagttgaaaattcagtacggccaaaataaagggaagttctataacgaggaatgtgaccgctttatgctttgcatggtgcacaaacttggatatgggaactgggatgaactgaaagctgccttccgtatgtctcccttgtttcgatttgattggtttgtgaagtccagaactacccaagagttggctaggcggtgtgatacccttatccgactggttgagaaagaaaatcaagaatatgatgagcaagagaggcaagcaaggaaggagaaaaggcttgctaagaacacgactccaacaaagagagcagcactaaggaattcagagggtgagagtgctccgttgagctcattcaagaggcgacggcagtctcttatggacgattatgtgggctcgggaaggcgaaagagagggtgatgtgatgtttgacatcctgcctttggagctctcagcgagatgcagtctctgcaatgctttaagcccgtacgtgctgtgcttagtttcttgtgcacgtgagttgaatgcctcaagggctggtgactttgtagtgtaagttatgcaacgatgacatagattagttattataaatcctaaatgaggtatgtatgcgcatgctgtattgtagtgctgtagattcggacttcgcaattgcaactgttgctacacttttggtcagtgatgatgcctttcgctgcaacaaaaaagactaaaaaaacttaagtatgaaaaaaacccacgcgtccggttctagatcgcgagcggccgcccgcgatctagaccaccgtcc

SEQ ID NO: 263458 - DNA, 827 bp, Zea mays
  unsure (1)..(827): unsure at all n locations
accggnctcggaattcccgggtcgacgcacgcgtccgggcaggcaaggaaggagaaaaggcttgcttagaatacgactccaacaaagagagcagcgcgaaggaattcagagggtgagagtgctccgttgagctcattcaagaggcgacggcagtctcttatggacgattatgtgggctcgggaaggcgaaagagagggtgatgtgatgtttgacatcctgcctttggagctctcagcgagatgcagtctctgcaatgctttaagcccgtacgtgctgtgcttagtttcttgtgcacgtgagttgaatgcctcaagggctggtgactttgtagtgtaagttatgcaacgatgacatagattagttattataaatcctaaatgaggtatgtatgcgcatgctgtattgtagtgctgtagattcngacttcgcaattgcaactggtgcttcacttttggtcaatgatgatgcctttcgctgcaacagttgaggctccagttcaatatttgaagataaatccggtcccttctgtctagggatggccatgggtacctgatacccgttcggtaaaaaccgtattagagcacatgtatggcgattttttatatccatgggtattttattgatcatttattatacccctcggctatggtggtcttgggtatgttctttcttgccatatatctgctactagatagaaaacctgctcacatgacacgtcttttatatttaaatattaaatattgaacaattaggtaactaccctaatattttgtgctattgctgagactcttttggtccaaaagtgtctaagtttgtgctattgttg

SEQ ID NO: 263459 - DNA, 869 bp, Zea mays
  unsure (1)..(869): unsure at all n locations
cgtncgcagaataatctgattctgcttaattccatatttgactttttacaagtatttatatcccaactgatggttatctgatctaaggattagagctatgagatctcttctaatccttatccaactaactagagataatctctcctttttattagctaatccttatctaatcttatctaactaactagagataatctctcctttttattagctaatccttatctcatccgcatgtggcctgtggcttggccgtgggccttagccctcctagccactaatgtccctgcgcctggtgtaggggatgtcggtcataacattaacattagaaaattttgatccagcaagcaaaccagaagaaagataccattgatggtgaagacgaagatcaattggagcctttaacagcagaggagcaggaagagaaggagcagttattagaagagggttttgcatcatggacaaggagagacttcaacacatttattcgtgcatgtgagacatatggtcgcaatgatattaaaagtatatcctctgaaatggagggtaagacagaagaggaagttcaacgctatgctaaagttttcaaggagagatacaaggagcccagtgattatgatagaattataaaaaatattgaaaggggggaagcaaggatatcccgcaaggatgagattatgaaggctattgggaagaagctagaccgctacaagaacccatggttagagttgaaaattcagtacggccaaaataaagggaagttctataacgaggaatgtgaccgctttatgaactacccaagagttggctaggcggtgtgatacccttatccgactggttgagaaagaaaatcaagaatatgatgagcaaga

SEQ ID NO: 263460 - DNA, 807 bp, Zea mays
tgggagagaatacaggggagaacccgagagccgaacgaagagaccgagcccccgccgcccgcgggtctgttcctttcgtgccgcttcgtggtggcgccgtggcgcccaccaccacctcacctctcaccacctatagcaataccacgagtccacgatccatggaatagactagactacaccgctcggccggtgacgacgacggcgacagccgacagtctatccccaactacgctctgcaccagcgccttatccgccgcctggggtttgttctggcgcggtggcagttgataaaggcggaagggattagagcaaggagagggatcggcgatgagcttcgcggatctggaggcgggggcgctcagggcgcccctcgggaggaaagcgagaggggggccaaacgacgcgagagcgctcgtcttccagataaccaccgcggtggcctcgtaccgccgcctcctcaactcgctcggcacgcccaaggacaccatcacgcttcgtgataacctgcataagactagtcagaacatccttcaattagcaaaggatgcgaaagataagctccaaaaggctgctgaagcagacaagagcactgatacaagtgcagacaagaggatagctgatatgaagcttgccaaagattttgctgccacaatggaggagttcaggaaacttcagagtctcgcgattcagagggagacggcatataagccagttgttccacagaatacgcggtcaaactattctacggatgagcgaagttccgaatctggtaatatgcctgagcagcgtgcattacttgctgaatca

SEQ ID NO: 263461 - DNA, 745 bp, Zea mays
tgtacgtttggactttgacagccgacagtctatccccaactactctctgcaccagcgccttatccgccgcctggggtttgttctggcgcggtggcagttgataaaggcggaagggattagagcaaggagagggatcggcgatgagcttcgcggatctggaggcgggggcgctgagggcgcccctcgggaggaaagcgagaggggggccaaacgacgcgagagcgctcgtcttccagataaccaccgaggtggcctcgtaccgtcgcctactcaactcgatcggtacgcccaaggacaccatcacgctttgtgataacctgtctctcctcgagccctcttatgctttacatatctagcgatcagcgtaaacccttgcgtgaatttgctagcttgagtactagtatgccttgcccaattcaaatttggagcaattagtctgctcttagatccataggatcgctaaatcatgtcttaaacaacatgttgctttttttgctcactcatgtcgctttcttagttgccttacgatctagtgctttgattcactcgcaggcataagactagtcagaacatccttgaattagcaaaggatgcgaaagataagctccaaaaggctgctgaagcagacaagagcactgatacaagtgcaaacaagaggatagctgatatgaagcttgccaaagattttgctgccacaatggaggagttcaggaaacttgagagacttgctgattcagagggagac

SEQ ID NO: 263462 - DNA, 863 bp, Zea mays
gaattcccggctggacgcactcatcctcccactcgtccgcccacgggtcaagttctcgcgcccacagccaaatttttctccactcaatcgcggcataagctgcactgcagccatggacgccagcggagccggtagcaaggcgaagaagggggcggctgggcgcaaggctggcggccccaggaagaagtcggtgtcgcggtccgtcaaggccgggctgcagttccccgtcggccggatcgggcgctacctcaagaaggggcggtacgcgcagcgcgtgggcaccggcgcccccgtctatctcgccgccgtgcttgagtacctcgccgccgaggtgctggagctggccgggaacgcggcgaaggacaacaagaagacgcgcatcgtcccgcgacacttgctcctggcgattcgtaacgacgttgagctcggcaagctgctgtctggcgtcaccatcgcgcacggcggtgtcctccccaacatcaacccggttctcctgcccaagaaggtggcggagaaggcgtccagcggcggcagcaaggagagcaagtcccctaagaaggccgccaagtccccaaagaaggcagccaagtccccgaagaaggcttagaaattagtcactccactagcgctctgctgtagcatgttcgtgtttagatctgtggatgttatgtgttccggcctaatttcctctttgccttgtggctcctgatatgttcatcggcatgtttgccgtgttgtgttccttgttctgattttgcaattcatcatcttgttgaatgaacttactatcgggaaaatgaagcataataacgatgaaaaatgattgttctgaataaaaaaaaaaaaaaaaaaagggcggccgc

SEQ ID NO: 263463 - DNA, 472 bp, Zea mays
cggacggtgggcggacgcgtgggcggacgcgtgggcggacgcgtgggctcaagttctcgcgcccagagccaaatttttctccactcaatcactgcagccatggacgccagcggagccggtagcaaggcgaagaagggggcggctgggcgcaaggctggcggccccaggaagaagtcggtgtcgcggtccgtcaaggccgggctgcagttccccgtcggccggatcgggcgctacctcaagaagggccggtacgcgcagcgcgtgggcaccggcgcccccgtgctatctcgccgccgtgcttgagtacctcgccgtcgaggtgctggagctggccggcaacgcggcgaaggacaacaagaagacgcgcatcgttccgcgccacgtgctcctggcgatccccaacgacgttgagctcggcgcgctgctggctggcgtcaccatcgcgcacggcggtgtgctccccaacatcaac

SEQ ID NO: 263464 - DNA, 671 bp, Zea mays
gtcgtctgtacttgccaaactgccactgatatgattgggtcaatgaaaccagaggagcttcagaaaatgctcgaagttgcctcttcattgaatagcactagctccgctggtccaaatctgggacccaatatgccagaaatgtctcctgatatgcttaagatggcatctgacatgattgctagtatgcctcctgatgacgtacagaaaatgatgagttttgcttctcagatgggtgggcctggtggtgcccccaggagttcagagaatattaactttggaccttcagtgagagctacaacgagtaattctgcccgtggatcatcatctcaacctgttttggagaaccctgatgaactatcagatgaccaaaggatgagccagtcatcctctagtcttccaccttctacagctgatatgcaagaaaccatgaggaattctatgaaagaccctgcaatgcggcagatgcttacatccatgatgaagaacatgagccccgagatgatggcatatatgagcgagcagtttggaatgaaactgtcaaaggaggatgccgcaaaagctcaacaagccatgtcgtcattatctccagaggatttggatagaatgatgagatggatggagcgagcacagaaaggggtagaagtcgcgaagaaaacaaagaactggctctt

SEQ ID NO: 263465 - DNA, 1329 bp, Zea mays
gcagtcctgtcctgtggaccgtatgacgtgtttatttatgggcggcgccttcgtctccactccccaccggaggaaggaagcgagaagaccagaaggtgagaagagagagagagagtgtgtgtgatcggtacaaggatcaccgctgtgcctgcgcgtgctgcttcaccgaatcgagtcagatcctgtccgaatccgagctaagggatggcaaccggtagtgaagcctcgaaggcagctgaggctgtggttgactggcataaacacgacagcaagaggatgctccatgcggtttaccgtgttggggatctggaccgcacaatcaagtactacacggaatgctttgggatgaaactgctgaggaaaagggatgttcctgatgagaagtacaccaatgccttccttggctttgggccagagaacaccaactttgcagttgaattgacatacaactatggcgttgacaagtatgacattggaacgggctttgggcatttcgcaattgctaatgatgatgtgtacaagttagctgagaatatcaaatccaagggtggtaagatcacccgcgaacctggtcctgtcaagggaggatccactgttattgccttcgcacaggatcctgatggctacatgtttgagcttatccagagggctgacacacctgagcctctttgccaggtcatgcttcgtgttggtgaccttgagcgttctatcaagttttatgagaaggccctagggatgaagctcctaaggaagaaggatgtacctgattacaagtataccattgccatgttgggctatgctgatgaggacaagacaactgttctggagctgacgtacaactatggagtcacagaatacagcaagggcaatgcatatgctcaggttgccattggcaccaatgatgtgtacaagagcgccgaggcggttgatctggcgaccaaagaactaggtggcaagattttgcggcagccagggcctctacctgggatcaacactaagatcgcctcttttgttgatccagatggctggaaagtggttctggttgacaacaccgacttcctcaaggaactccactgaaggctcgggatacccaggtgctgtgctaggatgtagtaatgcttgtctgtggtgtaataagatgtgggtggtttgtttctgccctgatgaacttataatactgaatgttgctacagaggttgtgcttctgccagtgaggtttgggatttgctatgtaactgtgcctgcgggctccgattctggcgctgttcgtacactgtagaagccagtgaatcccaataaacccagcttcacaggctcctcttatcccgt

SEQ ID NO: 263466 - DNA, 564 bp, Zea mays
cagtacggtcggaattccgggtcgaacacgcgcctgcaacggtccgcgacgctggcgaccgtggggatgtgtacaagttagctgagaatatcaaatccaagggtggtaagatcacccgcgaaccaggtcctgtcaagggaggatccactgttattgccttcgcacaggatcctgatggctacatgtttgagcttatccagagggctgacacacctgagcctctttgccaggtcatgcttcgtgttggtgaccttgagcgttctatcaagttttatgagaaggccctagggatgaagctcctaaggaagaaggatgtacctgattacaagtataccattgccatgttgggctatgctgatgaggacaagacaactgttctggagctgacgtacaactatggagtcacagaatacagcaagggcaatgcatatgctcaggtctctatgaaatctttatctggagcatttttttctagttgtattttggcatttcttaattgtttagctgatgtaagcgcaggttgccattggcaccaatgatgtgtacaagacgccgaggcggttg

SEQ ID NO: 263467 - DNA, 640 bp, Zea mays
tcctcctctgtctcatcggggacccctgtccctcgtggcgacggccggtcgaccgccgctgccgaggacttcgccggcgacgaccacccccacgcccactacattatatgttgaagaatggcttggagctaacagtactgacaccaacttttggttatgatcagaagcgactggtgtgcagtaatgaatctctaattgtttgcaatataagaaccagatacctcattcaaatggtttttccatgttacagattggtagccaagaacaaagaggttagctagtggtgatatgcgataaagttttcatatatacaacaataaagctgagaattgtggtctgcaaataatacagttttccttctccatatgtattgtacttagagcaaccaatcttagtgattaacatggccagtttaacccgattctcaaacacccaaattgtgctatttcacaaattacttgatcatcaaactatccttttgtctgtttaaacatatccatttaccctccattcgggtctatgtttgggtttgggagccttatttggatcctggcattctccataaccggtcatatatctactgctgctgatattatatctctgtttcattatttcatagttttatatttgaacttctgca

SEQ ID NO: 263468 - DNA, 1096 bp, Zea mays
gtcgaccgccgctgccgaggacttcgccggcgacgaccacccccacgcccactacattatatgttgaagaatggcttggagctaacagtactgacaccaacttttggttatgatcagaagcgactggagtgcagtaatgaatctctaattgtttgcaatataagaaccagatacctcattcaaatggtttttccatgttacagattggtagccaagaacaaagagaaaaacacacaacagtaatgggtcacgaccatatgtctcgtataaagatgcatatggcagaaggttcttttggtgacaggatccggtgccagcaacctgggtgcaatgaggttgtcgatagaagggtagtgtactgcaaaattcacagtggagagttgtcatgccaacagttcagttacctccagagcggactggagagctcaggtttatctgtgccccctgttaacgacagccagtttaagggatctgtttccattgcagcagtgccatgcactgagcaagagttacatgtcaagcacgaagggggtgatcgaggtaaactaaaggatagttctgggtacactttgggtcagactgcacaatttgtcttccctggggcaggcatgttttgcaagaacgatagctgcagcaagcaagcacatgagaactcaatctactgtaagttgcatagcggtgttagcaagggctgcatggtccgaggctgtacaagaggtgcacatggaggcacacctctgtgcattgggcatggaggcgggaaacggtgtgtgatccctggatgcccaaatgccgcgtgtggtcaaggcctcagtgaccgctgtgtgaggcatggtggtggcaggagatgtagattcgaagggtgtgcgaagggcgcacaggggaacaccgattactgcataaggcacggtgggggaaggcggtgcaagtttgaaggttgcacgaagagtgcgcagggacggacagatttctgcattaagcatggtggtggcagccggtgcaagttccaaggatgcggcacgagcgcaaaatggggaacagatttctgctctatccacaggaaggctttgttgggaggcgacaatgccgccgtccc

SEQ ID NO: 263469 - DNA, 296 bp, Zea mays
cccacgcgtccgcggacgcgtgggtttcaacgttgatgatcatcagcacatagagaacggcaacctcggaaatatgaagcggtttcaattcagagagctccaggctgcaacagaaaacttcagcagcaagaacatattaggaaaaggcgggtttggtattgttttaccgggggcagcttccagatggaagtcttgtagccgtcaagaggctcaaagatggtaatgctgcaggcggggaagcacagtttcagactgaagtcgagatcccaagcttagcagtgcacaggaacttcttc

SEQ ID NO: 263470 - DNA, 275 bp, Zea mays
cggacgcgtggctaaaaaaagggggcgctgctctgcttttctccccctcgtctcctcatccgcagtcgcacacccgccattgcattcgcagcaccagcgccgcttctccttcctcgagctcacccctctcttctcttctcctattcgctcgcgtgctctctctctctctctctgctgcctcagccgccctcgctgtcgctgagccgacagattcattcggccggtcatggctgacgcgttgtgcaacggcgtcgtggcgtccccgtgcggccggg

SEQ ID NO: 263471 - DNA, 1058 bp, Zea mays
cccggggcggccgcgccttttttttttttttttttttaccatagtctctttatattgcacattggactattggagtcgctgatcaatagaaggcattattacacaatcgtacgtttgcaccaaggcattcattgaaaactctgcatcgaaggcatcacattagccttcccaatcacacgacactagcaatgttcaaaaccccaactgatccaagctaaaaataaaataaaataaaataaaaaaaaaggatagcatcccaccacgcatgccaacattttattgatgccccggggcgaaatctccacgaaagctaacttaattaacccaaacaaaccgtctcagcgtagaggcgcagagacggacgctaagactcgatctacctaatgaaccgaaaccgaggacgtcgacgacgaggggcggggcggcgggggacagtgacgtggtggaacggcggggcgtgcggccatctagttggccttggcgatgaggtcctgggcggtggcgaccgtgggcagcgccgggatggcgcccttcttggtggtgcagatggcgccgcaggcgttggagaacttgagagcctcgcggagcttctcctcgttgtggaagatggagtcgtccttggcgacgttgacgaggagggagccgacgaaggcgtcgccggcgccggtggtgtcgacggtgtcgaccttgaagccgggcacgctgcccttgaagtccttggtgaagtacctgcatcccttgtccccgtcggtgacgacgagcagcttgagcccgtcaaaccacagggacagcacgttcttctcgtcgttggcgtccccgcgcgtgaggaaggccacctcgtcgtcgctgaccttgatgaagtcggcctccttccagatgctgaggatgccctcgcgtgcggcgtcgggcgacggccagagcgggaggcgcacgttggggtcgtaggagcagagcacgcccgcggccttggtgcgcgcatggcggccatgtgcgccgagcggacgagtccgcccacgagtccgcccacgagtccgcccacgagtccgcccacgagtccg

SEQ ID NO: 263472 - DNA, 1492 bp, Zea mays
acgcccacgcgtcggcgcagcctcatccccttgcccacttctacagcccctctgctgcagcaagaaggaaagaagctagcgcttatagcttgtcagccatggccaccgccgccgcgtctagcctcctcaagtcctccttcgcgggctcccggctcccggccgccacgcggaccacaccggcgtccctcgtggtggccaccggcccgcgcggcgccggcgcggggcccatctgcgcgtccatgtccatgtcctcctccaacccgccctacgacctgacgtccttccggttcagccccatcaaggagtccatcgtgtcccgcgagatgacccgtcgctacatgacggacatgatcacctacgccgacaccgacgtcgtcatcgtgggcgccggctccgcggggctgtcctgcgcgtacgagctctccaaggaccccgccgtgagcatcgccatcgtggagcagtcggtgtcgccgggcggcggcgcgtggctgggcgggcagctgttctcggccatggtggtgcgcaggccggcgcacctgttcctggacgagctgggcgtgggctacgacgaggccgaggactacgtggtggtcaagcacgcggcgctgttcacgtccaccgtgatgagccggctcctggcgcgccccaacgtgaagctgttcaacgccgtggccgtggaggacctcatcgtcaggggagggcgcgtcggcggcgtcgtcaccaactgggcgctcgtgtccatgaaccacgacacgcagtcctgcatggaccccaacgtcatggaggccaaggtcgtggtcagctcctgcggccacgacgggcccttcggcgccaccggcgtcaagaggctccaggacatcggcatgatcagcgccgtgcccgggatgaaggcgctcgacatgaacgccgccgaggacgagatcgtgcgcctcacgcgcgaggtcgtgcccggcatgatcgtcaccgggatggaggtcgccgagatcgacggcgccccgaggatgggcccgacgttcggcgccatgatgatctccggccagaaggcggcgcacctggcgctgaaggcactgggcaggcccaacgccgtggacgggaccatccccgaggtgtcgccggcgctgcgcgaggagttcgtgattgcgtccaaggacgacgaggtcgtggacgcctgagcgagcatccacgcgccagcatgcaagcagcgtcttatctgggccggcgccatcacggggtttcttttttaatctgggactttgttgttgttggacgaatgaattcccttcgatcggttagctttaatctgtctcgttagtgtgtcgtgttcgtgtagcaccatgccacagctaccatgccgtgtgctctgtcacgtgggggccactcgtggggtctcctgctgctgtcagaacgaataagagaagatggaattgtggtgaaacaataaaaatgcatggtttaaattgtaaaaaaacccacgcgtccgcggacgcgtggg

SEQ ID NO: 263473 - DNA, 939 bp, Zea mays
ggtggtgtcaacggtgtcaacattgaacccgggcgcactgcccttgaagtccttggtgaagtacctgcatcccttgtccccgtcggtgtcgacgagcagcttgagcccgtcaaaccacagggacagcacgttcttctcgtcgttggcgtccccgcgcgtgaggaaggccacctcgtcgtcgctgaccttgatgaagtcggcctccttccagatgctgaggatgccctcgcgtgcggcgtcgggcgacggccagagcgggaggcgcacgttggggtcgtaggagcagagcacgcccgcggccttggctgcgcgcatggcggccatgtgcgccgagcggcacggctcggagatgagcgagatggagccgtagtggaacaccctggcgcgccgcaccaggcccaggtccagctccgcctccgtcagcagcatgtccgcgctcgggttcctgtagaacatgaactcgcgctccccgtcgtgcttgagcgtcacgaaggccagcgccgtccgcgcgtgcttgtcgaacaggcacccctccgagttcacgttgttctgcttcaggatgttcaccagcatgtgcccgaactcgtcgtcgccgaacttgcctacgaaggcggaggatccgccgagcttggcgatggcgcaggcgacgttggcgggcgcgccgccgggtgccttgacgaagccgcccgactcggccagcgacagcccggccacgtcggggacgaagtcgatcagcatctcgccgaacgacaccaccaggttgttggacgccgccgcggcagcagctccgccgtctcctagaggcgccatttggtcgcgcttgcttgctgctgcgaggtggacgcggctacgagagagagagtcagagagaagagagagagagacgggggctggtggggaagggaaggcgaggcgatgacgcgtgggcggacgcgtggg

SEQ ID NO: 263474 - DNA, 505 bp, Zea mays
ttttgcccacccgttttgtcctcagtccctcacacactcactatacactgctctgctgcagcaagaaggaagaagctagcgcctccctagctctcgttgtcagcaatggccaccaccgccgcgtccagcctcctcaagtcctccttcgcgggctcccggctcccttcggccacgcgcaccaccaccccgtcgtccgtggccgtggccaccccgcgcgccggcggcggccccatccgcgcgtccatctcctcctcccccaccccgccctacgacctgacgtccttccggttcagccccatcaaggagtccatcgtgtcccgcgagatgacccggcgctacatgacggacatgatcacccacgccgacaccgacgtggtgatcgtgggcgccgggtccgcgggcctgtcctgcgcgtacgagctgtccaaggaccccaccgtgagcgtggccatcgtggagcagtccgtgtccccgggcggcggcgcgtggctggcgggcaagctgt

SEQ ID NO: 263475 - DNA, 889 bp, Zea mays
ctcgtcgagcattccgaggtcctacagtcagtcgtattaatacactgctctgctgcagcaagaaggaatgaagcgagcgcctccctagcgctcgttgtcagcaagggccaccaccgccgcgtccagccgcctcaagtcgtccttcgcgggctcccggctcccttcggccacgcgcaccaccaccccgtcgtccgtggccgtcgccaccccgcccgacgccggcggcggccccatccgcgcgtccatctcctcctcccccaacccggcctacaccaccggcgtcaagaggctccaggacatcggcatgatcagcgccgtgccggggatgaaggcgctcgacatgaacaccgccgaggacgagatcgtgcgcctcacgcgcgaggtcgttcccggcatgatcgtcaccggaatggaggtcgccgagattgacggcgcccccaggatgggcccgacgtttggcgccatgatgatctccggccagaaggcggcgcacctggcgctcaaggccctgggcaggcccaacgccgtggacgggaccatgtcgccgccgttgcgcgaggagttgatgattgcgtacaaggacgacgaggtcgtggacgcctgagtgcggcaagcagagaggaggatcgacgccagcagcgtcttatcttaattgccttgttgttcaatgatgaatcgatcgaattcccttgggttagctttattattgttgttgttattattaatttgactcgctatagtgtgtcgtgttcatagcaccaccaccgcgccatcgacatgccacacctgtgctctgtctgtcacgtcacgtgcgagtcctactacgggaaaaaatgcatggtaatcgtggagttgcttctcaaaaaaaaattttttattaaaaaatatt

SEQ ID NO: 263476 - DNA, 723 bp, Zea mays
ttggcgccatgatgatctccggccagaaggcggcgcacctggcgctcaaggccctgggcaggcccaacgccgtggacgggaccatgtcgccgccgttgcgcgaggagttgatgattgcgtacaaggacgacgaggtcgtggacgcctgagtgcggcaagcagagaggaggatcgacgcctgcagcgtcttatcttaattgccttgttgttcaatgatgaatcgatcgaattcccttgggttagctttattattgttgttgttattaaaaaaaaacccagcgtccgcggacgcgtgggcggacgcgtgggcggacgcgtgggcggacgcgtgggctggcgctgagggcactgggcaggcccaacgccgtggacgggaccatccccgaggtgtcgccggcgctgcgcgaggagttcgtgattgcgtccaaggacgacgaggtcgtggacgcctgagcgagcatccacgcgccagcatgcaagcagcgtcttatctgggccggcgccatcacggggtctcttcttttaatctgggactttgttgttgttggacgaatgaattcccttcgatcggttagctttaatctgtctcgttagtgtgtcgtgttcgtgtagcaccatgccacagctacgccatgccgtgtgctctgtcacgtgggggccattcgtggggtctcctgctgctgtcagaacgaataagagaagatggaattgtggtgaaacaat

SEQ ID NO: 263477 - DNA, 538 bp, Zea mays
gcgctctatgaatcttacaagaccaggcaggatcatgcatccagagaacaagaacgagtgtcacagctcatggaaaatctagactctgaaagagaaaattacgaagcaatgcaaaagcaacttgaagcccgttcattcctcgacagaagagaggctacaaagccaaagcttgtgactgataagtgtccaagtgtgtcgggtgcacctccaagctctgatcaaatgattgttgctgtacagcagcaaacaccagtggctttacctagcaaagttcctcctgctaaaggtacgaagcgcgtggcccctttgcctcggagggcaagagtacgaggagctttgttgcaagatactgaagaaaatgctgatgataatacttagatattgctgatttatcagcattgattaactctttggcatgtaaacttattagtacatttctgctggacttatgtcaaacttgtggaattaaagtacacgcagctcatggtgtagaaaaggtatgagactgtgttcctacaagaaaggatgggttccctag

SEQ ID NO: 263478 - DNA, 536 bp, Zea mays
ttctcacgcgtccgcccacgcgtccgcccatcggctagagaagatcgagtgagaagttgcgcgtgtgaagccatcacaccaattaaagatcgagatcatccatggctagttctctacttcagcagctgctgtctctgctgctgctcctgctgccctctcctcttcgtctccgggagcatctatcaggaaaccatgctgtcagcgccaacaacttccaccccatctttctggtagctggggtgagctgcagcgacctggaggcacgcctcaccgaggagtaccggccgtcggtgccgcactgcggcgccatgaaggggaaggggtggttcggtctgtggaagaacagttcggagctgctgtctcgtgactacgtgcagtgcttcgaggagcagatgagcctcgtctacgaccctgccatcaacgagtaccggaacctcgccggcgtcgagacgcgagtgcccaacttcggcttcacatgagccttcagccccaagaaccccctcaagtcagactggtgcctcggaaagctgagagcc

SEQ ID NO: 263479 - DNA, 2291 bp, Zea mays
cggacgcgtgtgccgtcgcacgcgcgcgctggatgactgactgaccacactagcgcagcgcgcacaggagcaaaggggggcatcctctatcgcgcgcgcgccatggccaccaggccgggccctttgactgaatggccatggcaaaggcttggaaacttcaagtacttggtgatggctcccgtggcggtccacggcgcgcggcgggtggtcgcgcggggctggggcgacatcgacctggccttcgcgctcatcctgccgtcgctgctgctgcggatggtgcacaaccagatctggatcagcgccgcgcgctaccagacggcgcgcagcaagcaccgcatcgtcgaccgcggcatcgagttcgaccaggtcgaccgggagcgcggctgggacgaccagatcatcctcaacggcctgctcttctacgttggctacctggcgatccccagcgcgaggcgcatgccggcgtggaggtcggacggcgccgtggcgatggcgctgctccacgccgggcccgtggagttcctctactactggttccaccgggcgctgcaccaccacttcctctactcgcgctaccactcgcaccaccactcctccatcgtcaccgagcccatcacatccgtgatccatcccttcgctgagcacatggtctactacgtcctgttcgccatccccatgctttcgactctctacatggggaacgcctccgtcctgggcatcgtgctctacatcgcctacatcgacttcatgaacaacatggggcactgcaacttcgagctggtgcccaggtggatgttccagctcttccctcccctcaagtacctcatgtacacgccgtcgttccattctctgcaccacacgcagttccgcacgaactactcgctgttcatgccgctctacgactacgtatacagcaccatggacaagtcgtccgaccagctgtacgagacctcgctcaggggagcggaggagacgcctggcctcgtccacctcacgcacatgaccgacctgcagtcggtctaccacctgcggatcggcttcgcctccgtggcgtccagaccgtctgccaccggcgccatgtggtggtacatgtgggtgctgtggcccgtggcgtggctgtccatggcgctcgcgtgggcctacgggtcctccgcgttcgtcgtcgagaggatcaaactcgggaagctgaggatgcaaacgtgggcagtgccaagatacaacttccagtacggcctgagctgggagagagaatcgatcaacggcctcatcgaaagggcgatactagatgctgatgcgagaggtgtcaaggtgctcagcctaggactgctaaaccaggcgaaacagctgaacggcggcggcgagctgttcaggcacaggtatcccaagctcagagttcgcctcgtcgacggaagtggcctagcgactgctgtggtgctcaggagcattcctcgtgacgcgaagcaggttctcctccacgcaggcccttctaagatagcgtgcgccacggctgctgcgttgtgcgagaggggcgtccaggtcgtcatgaacccaaacaaggaatatgacatgctcaagtcacagattgcagatagcaaagcaagctattgggaacgacgctccgacaaccaccacacgcctcaggtttggctagtagacagcatcgacgacgaggaacagaagatggcaccgaaaggagccgtattcgtcccaatctcacagttccccatcaagaaaatccgcaaggattgcacctacctgagcactccagcaatgaagatccctgaaaccatgcaaaatatccatgcctgcgagaactggctgccaagacgggtgatgagcgcctggcgcatcggcgggatacttcacgccctggaagggtggaccgtgcacgagtgtggggacgccatggtgcatgctgagaaagcatggtcagctgctattaggcacggattcgttcctttgacgaaagcctgaaagcctgtacgcaactctagacgccattcgacgatggctggaaaactacgtttcagcaatcggtagcacaaattctccccagctacagaagccgactatatggtctgcttgacgagtcgtccagggaggcacggcgtgatgaatggcgaccttgattccaacagcatatagtaactatatatatagttatgttgtggcattgtatgatgcaagtgcgagaaactgctttgtggctgtgtgggtgacatatacaattataataaaatgtcgatttggcttgtccaaaaaaaaatataaaaaaaaaaaaaaaaaaggaa

SEQ ID NO: 263480 - DNA, 646 bp, Zea mays
  unsure (1)..(646): unsure at all n locations
aatnaccgggtcggccgacgcgtccggccatacttttctcaatctcacacttccccatcaagaaaatccgcaaggattgcacctgccggagcactccagcaatgaagatccctgaaaccatgcaaaatatccatgcctgcgagaactggctgccaagacgggtgatgagcgcctggcgcatcggcgggatacttcacgccctggaagggtggaccgtgcacgagtgtggggacgccatggtgcatgctgacaaagcatggtcagctgctattaggcacggattcgttcctttgacgaaagcctgaaagcctgcgaagcccggggttctgtggctggggcctgcgatagatatatgtacgcagatctggacgccattcgacgatggctggaaaactacgtttcagcaatcggtagcacaaattctcccccgctagagaaggcgacttatatggtcggcgtgatgaatgacgaccttgattccaacagcatatagtaactacagttatgttgtggcattgtatgatgcaagtgcgagaaactgctttgtggctgtctgggtgacatatacaattataataaaatgtcgatttggcttgtccaaaacaacaaacccaaaaaaaaaaaaaaaaaaaaaaaaaataataaa

SEQ ID NO: 263481 - DNA, 613 bp, Zea mays
  unsure (1)..(613): unsure at all n locations
cagccacttacacgtgacacacaagtgctggaaaacacggcacaccaagtggagcatccattttattactacttcctccaaactaaaagcacatccaaccagaaatatcctgggcctgtctggtccatcaacagtgcgggcccagaccggcctagtacactacaggacaccacatgcatccggcccgttccactgaccaagcatgttggtgccataaaatcggcgcatgtgatcgcctctgagaaagctgcagtggtgccacgtttgtccggctaaaagttaacatgcctttcgaatgtgaacccaataataatgcggtgcgggtgcggccgggaaatcacaggccgaaccgaactgctgaatgaaagagacccctcccgctgctgctgtgtcaggtcagcgacgagacttttgctccagctgccggggaccatccaaaaccagccattatagatcaaatcaagtagagtttaagtgctaggaaataattcaatgcatggtgtatctttggtaacgtgacatgacaacaatgcaatgcaacgcggcgggtttccccaaaaaaaaaaaaaaaaaccaccaaaaaaaaaaaaaaaaaaaaaaaantaatnaaaaa

SEQ ID NO: 263482 - DNA, 999 bp, Zea mays
  unsure (1)..(999): unsure at all n locations
taccaaccttccggatccagtgccgcacgcctcactcaccgtccgcgacacccatgacacgcatgaggcggaagcacgccggcgccgccgacgccgacgtctagggttcctatcccttccatatggattccctgccgcggaagcgcaagggcgcgcgcgccgagtgctcgctggccggatgccgccacgatgcgcctggcggccgcaagcgcacctgcccgtagcccaagccgtggcccgagaagaagaagccctcttccgtcgatgagggctccgacttcgttcgcggctgcgtggctatgactgatgcngtgcgggtgcggccgggaaatcacaggccgaaccgaactgctgaatgaaagagaccactcacgctgctgctgtgtcaggtcagcgacgagacttttgctccagctgccggggaccatccaaaaccagccattatagatcaaatcaagtagagttcaagtgctaggaaataattcattgcatggtgtatctttgccgtgatccatcccttcgctgagcacatggttgcatacgtcctgttcgccatccccatgctgtcgactctctacatggggaacgcctccgtcctgggcatcgtgctctacatcgcctacatcgacttcatgaacaacatggggcactgcaacttcgagctggtgcccaggtggatgttccagctcttccctcccctcaagtacctcatgtacacgccgtcgttccattctctgcaccacacgcagttccgcacgaactactcgctgctcatgctgacaaagcatggtcagctgctattaggcacggattcgttcctttgacgaaagcctgaaagcctgcgaagcccgggcttctgtggctggggcctgcgatagatatatgtacgcagatctggacgccattcgacgatggctggaaaactacggatcagcaatcggtagcacaaattctcccccgctagagaaggcgacttatatggtcggcgtgatgaatgac

SEQ ID NO: 263483 - DNA, 1462 bp, Zea mays
cccacgcgtccgagcaggggctctggaggcactggtgcaactaacaagttctcaaaacgagggtgtaagacaagaagctgctggtgctttgtggaacctgtcatttgatgacagaaaccgtgaagccattgctgcagtgggtggcgttgaagctttggttgccctagtgcaacaatgtttgaatgcttcagaaggtcttcaggagagagctgctggtgcattgtggggattatctgtttcagaagctaatagcattgcaattgggcagggtggtggggttgcaccgttgctcacattggcacgctcagaggttgaagatgttcacgagacagctgcaggggcactatggaatcttgctttttattctggtaatgctctccgcatagtcgaagaaggcggggttcctgttcttgtaaaaatttgctcatcatcacggtccaagatggcacgcttcatgtctgcactagcactagcatatatgtttgatggaagaatggatgaagttgctttggttggagcatcctcagctagcagttccaagagtgttaatattgagggagctagaagaatagcatttaagcatatagagacctttgtgctcactttctcagatccacaaatgttctctacggctgctgcctcctcagccccagcagcgctgtctcatgttgctgaagcagtgtttatacacgaagctggacacctgagatgcagtcgctctgagattggtagatttgtttccatgcttcggaatccttcaccaattcttcgtgcttgtgctgcctttgcccttcttcagttcacaatcccaggaggtcggcatgcagtgcatcacgcaggtctcttgcaggaagcaggggcaggtcgggtgttgcgcgcagcagcggcagcgacaacagcttctattgaagctaaaatctttgccaggattgtactcaggaacttggagcaccatcagttagggatgtcaacatgaacacccagcagaggttcatcctccaataaacaaaggcctctgcatcgatgggctgcttggccaatgcagaatcaaacagtttggccttcggagccttttgacatcacaacagttttggtctgtgcagacagtgactgaaggagctccaccgaaggtataacccacaactgtgaagtgactgaatgaaaacataagtggcgacccttcgcgtattggacgtttaaggttgagtgtgcaattttctagagttcattttgcgtgtacaagtaaaacttttttagagtcgatgagaattataaactggcatatagcttaacttatggatatttattccttattcgttagcgttgaggtgtgtggcggcgtcatgtagaaagttaggttattcctcctaggatacatgtaactttataaatgtactgttatgtattttcttccttatgattgattctgtgcatttatagatcgaggtgttgttaagcactt

SEQ ID NO: 263484 - DNA, 951 bp, Zea mays
tcccgaaccccagttccgacctaggcgtacgcgtccggcagccacactagagtggtcgagtccgtccgtgtctgtcctccgctgtccgctggctgctgctctaacccaatccaaggaggatgccgaggagcccgcagctgagcctgagcggctgcagctctctcttctccctgtccagcaccagtacgagccgcgacagcgccgccctgaaggcgccggtgccagcgccaccggcaggcgcggtgcccccacggcgcacccctctcctgtcgctcagcgtcggcgaggaggaagaggacgagggtgaggacgaggaggagtacctgctgggggccggcgccctggatctgcagctgacggggcccggtggcggcagcaacagcagcggcggctacgacgacgagcggaagaacatccggatgatgaggaacagggagtctgcgctgcgctccagggcaaggaagagggcctatgtgcaggagctggagaaggaggttcgtcgcctggtgaatgagaacctcaagctcaagaggcagtgcaaacaactgaaactagatatggctgcactggtccagcaaagcagcagcaagagcagctcccacatcagaagaacctcctcatccactcagctctaggctgctaccaataggaatatgtatgtgaatttaaagccatatatgaccaaggaagaatgggaggaagacgaacaaagctagctagactagactgcagcccctctaatccatggccattcgctgattaatacgataatatctcttatttgttggcttcttctagcttgcttcaatttcctagtacagcagtttatgtagtatttcctagattgttagcgcaaagctgcctttttcacccatggcatccactctagtggtgtccaggtagtgtcgatccaattttagtatagaggtcactcaaacctctctccatgac

SEQ ID NO: 263485 - DNA, 528 bp, Zea mays
  unsure (1)..(528): unsure at all n locations
cggacctggtgccttctgcctcccggcgcccactcggccttgcggataatttgcggctcggtcccgcgcgtgctcggcctcgcgtccggtggccgcttcgatgtacctgaccgccgtttccttcccccccgcagccgccttctcgtcctcatcccagaagctgctgcctaggtcggccggggtcggccggcgtctggtggtgcgggcagacgtcaaggtcatatcgacgggcgaggcctgccgccgcgggctcgccgccggcattgacaagctcgccgacgccgtcagcgtcaccctcggccccaaagatgttcattgcagggaggaatgttgttattgaccaagatgatgtacctaaagtaattaatgatggtgtcacaattgccaaggctatagagctcccaaatgcacttgagcatgcaggtgccacgctacttcaagaaatagcatccaagacaaataagcgctgtggtgatggaactacaacggcnantggttttggctcgggaaatcatcattcttggggtg

SEQ ID NO: 263486 - DNA, 726 bp, Zea mays
cccgtcctgccgtccctctatctaaagtcgccgacgacgacccagtgaaaagtccacagccttttccaagaggaagggatgggctgctgcagcagccggagctccgattcgccggccagccgcgtgacgcggtggcgctccacagggatcgtggcgctccgagacgccagattgaaggaagtgccaaatgaagttctacaagtgggcaattccttgagaactctggatttgaccaataacaagctagttgagattccccaggaaattggtacacttgcgaacatgcaaaggcttgttttggctggttatttggatggaaatcatcccagcctaccttgggtacctgcgggatcctaaaatcctcacacctgacccaaatagggtatctatcttgcctggagaattggggtcactggcaaaccctcagcaactttctgttcctcaaaattttttactgtgcctgcctaagagcataggagatttgcgcattatgtcagtactcattgtatctgaaaacaaactaaaggaacttccagaatcaattggaggttgcagttccctggaagaatttcaagccaatggaaatgctattgaagatgtgccagcgtcaatttgcaacctagtttgcctgaaatccttatcactgaacggcaacaaaattcgtcagcttccacaaaacttactgaaagactgcacggctcttcagagtttatccctgcacgacaa

SEQ ID NO: 263487 - DNA, 480 bp, Zea mays
cggacgcctgggccgttctcccgggtcccgcactcccgccccttttccttttgctccttccttcctcgggaagcctagggcttaggctttaagcgccgcgatgtacggcggcggcggcggcgggcactacgacggaggcagcggtggcgccgggaacgctaacgcgctcttcggcggcgggggcttcatgccctcacagtccacggtggtcccggagaacagcggcctctctaagggtcggagcgcgcagacgctgctcccgctcaccgtgaaacagaccatggacgcggcgcaaaccagcggtgacaggtctaatttcgccatcaacggcgttgaggtgtctacgattaggcttgttggacgcatgctaggtaaggttgagcgtgtcacagatgttgtattcactcttgatgatggtactggcaagatagatgtgaatcgctgggaaaatgaggcttccgatgctaaggagatggctga

SEQ ID NO: 263488 - DNA, 2477 bp, Zea mays
cggcggccgccctttttttttttttttttttaaaaggatgacctcggaagaaacgttttggcaagcatactgtatacaggagtgccaagcatactcagtattctcatacaactcagtctgaacatgcgacacagaactcgcggcttacaactacagaggcacagtcgtaagatgatacatatgcaaacgttacagacatctagtagatagatacacatagttacgctactacaactaaaacaacgtcatagataagttcctttagataatctagtaccctatgctttggtactgcagcctagcactcgtgaagagggttgttcttaggtaaatcgatcacagctcgggctgggtgcgataggcagccttcaggaagttatcgaaggggctggcaggtgggagctttactgcagaacatgattcagatgatgtgcggaacgtggcagggtttaccttgggaatgatggaatgatgggcagtgggaaggcttggcataggattgtccggggttgattcgtgtccattgacaagccagctcgatagcttcttcctggtgcccaatccaagggcttcacattgactagtcattgtaccatatggaagaggtgaggttgaaacagatgcacctgcaacctggccagccacatgtagtgctgattccaacaattgaccgacacctaaaacatgtggaacagactgtggtagagtaatctttgagatagagctagcagtgttggtgattggtgactcgtgcaagccacaatctactgaagaggttcttgaacattcctcatcaaaagaaagggattcatcagaaaatgcttgtgcattgaagttggcccagtcaagtgctgaattcgacccaaacagaggcatctcttcaggcgtgaacaactcagtcagctccttcactattacatccttgcccatctcaatgaaattagaaagtgcagaggcaataacatcaagcactcgatgatcgttaatccctacttttgtcctgcagtcagaaagcatggatttggcaatctcttgatcactttcagaaccatagctgcctagatccgattgcaaccttacatagagttgcaagtcttcacctattcttaggtaagggtcaattttggaagatgaaaaacaccttagcaagtccgacagttcagcgacgtgacaaacttttccagcaaaggccagcatactcattgctaatgtaaaaatagaccgttggcaataagccggcagaacttcactcggggttaaagcaacacttcgaagagataatggcaattggaaaaactgaatgatattgccattgcttgaattcttaaggcgggaagaaagaactgttaggctgtatgaatgtccaatagcctcataattaaaaggggtattatctgtttgatttgcctgaatccagaatgaagacagcaattggttggtttgatcttcagttagcatggcaatattggtctcctctacagaacttcgtgttgcacatctttcaatgaaagaggaaaccagcttagagaaataagctgggttttttcgtttatcctcttcatgcatgttcatttccttcacatcatcatgcatgatatttcgaggcttatctgaactcaaactctccttttctctccttaacttctccagtagagcagtagctgaagcaaatacagatgtattccgagactgcttttttgtttcatataggtactctgattcactccgcagatggcttggccctcggccaataatagcagaaaacatgtggtgtgctcccacacgagtatcaatatcagtatgtaacatggacttcagtatctgctggagaagtgcttctggaaataccatcagattgttggaagatactgatgtcaacgagattatgtgtgaaatgatcagcaagcttccaagggttgctctggcaacagttggcatagaaggcaaattctccaatgtgattgccatcatatcatagagtggccgtacgtcattaattcctctaacaacttccataagacagtcctccaagacaatctgaaggggttcgttcaaattctgatcttcaacattgcctgattccacggcctcaagtgttttccttaagtgcttgcacaagtcacctgccactacaagttcaacagcaaatcctcgagatcgaagttgtcgtgccaaggacgttgctgtctgaataatatctgattttgtctgaggatcgtgtaaaacatttttgtgatccaagtgccggatgatggtggttagaatcagctgttcattgcctgaactcttttccagataagccatatcagacaaaacaagcaaagccaagccatgtcgtggggcccactgtttcttcatatcaaagtatgaaagcatcggatctagaatgcgacgcatggttgtactctctctggccagttctgcaagcttttggacacaaatatgtgaccatacttctggggagtcacgttcatccc

SEQ ID NO: 263489 - DNA, 456 bp, Zea mays
cccacgcgtccgctcattgctgcctttggtgcgtgcatcgtctgcagaagaaagaaggcagcaaataaggagtctaggaaacccgatgacggccactggactcctctcacggactacagcaagtcacggtcgaacacctcagcgaagacagcgaccacagggagccgtacatcaacgttgccatccaatctgtgccgccatttctcgtttggcgagatccaggcggccaccaagaacttcgaccaagcctctctcctcggtaaaggcggctttggaaacgtgtaccttggagagatagacagtggcacgatggtggcgatcaagcgcgggaacccgacgtctgagcagggcgtccacgagttccagacggagatcgagatgctgtcgaagctccggcaccggcacctcgtgtcgcttatcgggtactgcgacgacatgaatgagctgattctagtg

SEQ ID NO: 263490 - DNA, 1691 bp, Zea mays
cggacgcgtgggcggaccgtgggtgtacattcaacgtgtgtagtgtgtgagtttagacactggggtagtggggtgaggcaataaaaaccctatcccagtaaacgccgcggctccttccgctaccaccttcatccatcctggcgtcggtgtcttgccctgccccagcgccgccgctccttcccccaccccgaagcgccgcctcttctgcctccgtcgacggtggtggtgctcctgatccccgccgttgaactggccataggagagcaaagaggaaggggaggccacgagggcgccagtagatatattcatcttcatctcggcttgcgatatttttgaattttctattccgtattgaaggcgtcgatggccttgtccgccctaatcagcaccctcctcgccgccgccatctggtgcgccgcttacctcgccgctgccatctcctccgccttctgattcccactccccactccccaaccctaacctcccccctgtagcacaccccacctccagctttgtaggtcctactatacttgcaacctctcccgccgactcgcttcgatctacccgccctcgcgtcaccatggggtacgcgcagctcgtcatcggccccgctgggagcggcaagtcaacttattgctccagtttatacgaccattgccagaccgtgggaaggacaattcatattgtcaatcttgatccagctgctgagcacttcgactatcctgtagatatggatatcagagagctgatttcattggatgatgttatggaggagattgggttggggccaaatggcggtctcatctactgcatggagcaccttgaagacagcttggatgattggtttgatgaacagctagagaactacctagatgatgattatcttgtgtttgattgccctggccagattgaactcttcacacatgttccagttctgcggaactttgtcgagcacctgaaacgaaaaaatttcaacgtttgcgctgtttaccttcttgattcacagtttgtcagcgatgtaacaaaatacatcagtggttgcatggcttctctatctgctatgattcagcttgaacttcctcatatcaacatcctttcaaagatggatctggtctccaacaaaaaagatgtagaagagtacctggacccgaatgcacaggttcttctttcacagctgaatcggcagatggcacctcggtttggcaagttgaacaagtgtttagctgaactggttgatgattacagcatggttaatttcattccacttgatttgagaaaggaaagcagcatacaatatgtgctatcttctatcgacacatgtatccagtatggggaagatgcagacgtgaaggtcagggacttcgaagaagacgaagactaaccactggtgatgctgtgggaggtgcaaactggttgccagcagtcgtgtagggcggagtgagactttgggactgtatggcgcaggcatgcaaaaacgtcgtaggatgctgatgacagctatgtggtctatgtaagacgaactaaagcagatactccatttggcaagtcctagtaaaacgtgtgcgcgccttgatggtcctgttctccctcaatgctccgttgggtgtttatcaaaatcaattcaacggttgccgtatttatagaaacttaaaaaaaaaaaaaaaagggcggccgcccccggaattccgggc

SEQ ID NO: 263491 - DNA, 303 bp, Zea mays
cccacacgccgccgcattcggacgctcgcctcccaaaaccccacgaagagatgcatctgccgccgctgcggcgtgtaccggcgagcgctgctagtgccggcgcgcggcctcctcgaggcgcgcgtgccttgggtgcgagaacgggccctcgaccacgtcgtggagcgggaggccacctggtgccgtttctccttgccaaggacgtgctcctcgccgccacgccgccgccgcacgccgtgccgctgcactcgcagtcctccacaatccctttcccgttccgcccgctgcgcttcctgcggctct

SEQ ID NO: 263492 - DNA, 456 bp, Zea mays
cccacgcgtccgcacacgtcggtccaaactcgcgccgtccgctcgcggcttctccaaccaaagccgtgcagccaaatccggagggtagcgtagcacggggacgacgccatgagccgcgcgctcctctcccacgtgctgcaccgtccgccgtacttcgcgtacacctggagtggcgttgctgcccgaggaggactgctcgcttctggcatacacccactccgtcgtctcaattgcagcgcggttgaagccgttcccggccccaccgaggaggcgcctgctactcaggcaaggaagaaaagagtagtttctggtgtacagtcaacaggatccggtcaccttggaaattatctaggggcaattaagaattgggttgcacttcaggattcatatgagacattctttttcatcggggatcttcatgcaattactgtaccatatgaggctccactgctttct

SEQ ID NO: 263493 - DNA, 531 bp, Zea mays
gttgtcctcaagcagtcaagctcctcctcctcctcccccccagtccctcccaggctcccaccccgccttgctcgcagcctccccaaaaccctagccctagccctagccctagccctagctctcccacacccgcactgggagatggacggcggcggcacgcaccgcacgccggaagacgtgttccgggatttccgcgcgcggcgggctggtatgatcaaagcgctcaccaccgacgtggagaagttctaccagcagtgtgacccagagaaagagaatctgtgtttgtatggtcttcccaatgaaacatgggaagtgaacttgcctgcagaggaggttcctcctgaacttccagagcccagctctgggaattaattctgctcgtgacgggatggatgaaaaagattggctgtcactagtcgcggtgcacagtgatgcttggttgctggctgtggccttttacttcggtgcaagatttggttttgacaaagaatccaggaagcgcctttttgtcatgattaataacctccctac

SEQ ID NO: 263494 - DNA, 1050 bp, Zea mays
ggatgttgaggcgtttattgctgcatgcagtactgctaatggagacgtcacggtagtagagcaagcagagaacataattcaggcaatcaagtcagtcagagcccaaggcgctgaattcagatatgagccaccggcggcatcggaagacatattttccatctttgaagagctgcgtccaagtgaggagcctgtcattaaggagattgagccatgctacacgaatagctctgccaaatgtgaatcggaaattcaacaggttagcccaatgaccgatatattcctcgaaacgaaagccaaagtttactcaaacaaaagccctaaagatgaaagcgacgccgaagatggcagcagctgggagacaataagccatgaagacatgcggggttcgagcggttcgcctgatggaagcgaaccttcagtcagcaataagataagcatttcttggaacagcagaaatggtttcgagtacagggagaacgagaagctggaagatgacttagctgatgcctacctggcaagcatgaaccagcccaagaagaaagaatcggccatttcaaagctctggaagtcgtcccgcccaaagaacagcgagatatgcaagaaagacgcagttgaaacggtaaatgcaagatcgtcaaacgtgcggctctcagtcgggacctattccactgttgaaagtggcatccaagaaatagggctcagtccaccgtgtgttgagcagtggagctcaccagactcgatgaacgtccaattcaaccggggattcaagggctgtatagagtacccgcggatgtcccagaagcacagcttgaaggcgaagctcatggaggcacggttggagagccataaggtccagctccgccaggtgctcaagcagaagatctagtgcaggccagaaccagaaggcgaaacattgtaaacctagcattcaatccaaggaataatgtaaaggagtacctagatgcttcgtttttcatgttttagagtaacctgtattgcatgtacaacaaggactagaaaaaaaaaggacagggctggtctttgaggtcc

SEQ ID NO: 263495 - DNA, 538 bp, Zea mays
tgcccacgcgtccgcccacgcgtccgcccacgcgttcgtccacgcgtccgcccacgcgtccgcttcctagcaacaccaatcatcatgtcacacataggcctctcgggaacatttgccttcttcgcatcgcttggttatttggggatctctgtatggatgatgaacgtagaaagtgacccacttgacagccatactataagcaagtctgagttgcaattaattctagctggaagagctggatctaaagtccaaggcagtaataaattcccatcccttagggaattgttctcaaggactgaattcttggctgtcactttggccaatgtggtcaacaactggggctattttgtcctattgtcgtggatgcctgtgtacttcaaaacggtttataacgtcaatctgaaacaagcagcgtggttcagcgccataccttgggcagtcatggctatgtccggctatgttgcaggagcctctgcagatttcctgatcaaatctggtttccccataggactagttcggaaaattatgcagtccattg

SEQ ID NO: 263496 - DNA, 370 bp, Zea mays
gcgcgcggcgccagcctccggcgaccggcacccgcctttcttttatacctccgccgcggcgacccacgcctaccttcgacccccctaaccctaccaaagcccgaactctcgagatcacaggacgcggatccaaaccagaggcccctgcctgccctctactcccccaccacaccacagcctaccgccatgtcggcgaccgctacggacgaggccgcggtggaggcgcgcctccaggagctgcgggggaggctcgggaagaagcagcacttcgaggaggccgtaaacgagctcgccgccgccgtccgggaccgctacgccggcgcctcccccgcgctccgcaaagcgatgtattcaacggtttgccgcgttg

SEQ ID NO: 263497 - DNA, 499 bp, Zea mays
  unsure (1)..(499): unsure at all n locations
taccggtccggaattcccggttccagcgtcgaccgacgcgttcgatcctgtgctaaacccggttcagtttctgtctcagtggaaggaagttaagagtctcaaggccctaaccagtgcatggtaaaatgttggataaggagaatgtaaactcagtggcagatgtaggtccaagccatgactgtaattatgcaagccacacaaggatgaaccctagcttgtcaagtaagaaggaaaattctttagacgctagcctctctacctggttggtttcttctgagaactcagcattggacaatgtgcaaagcatatctccttgttccatctcgtcagttaacctgaagcaatcatcgtctccatctccacaatgatctccaagaactaaccgcgaaggatctccgatgttgggtacagttggaagttactggtattgcacagagtatgacaatgagcactgttcttctagatccaattcangaactactgggattcccaattcaac

SEQ ID NO: 263498 - DNA, 1337 bp, Zea mays
ttgcactcagctccagcgcggcgcaacgcaaacccagacggcccgccagacccagcggtcgcttactcgcatcgcagcgcactcgcgccacagtcggcatcacagaccagatccctgcgggtgcggcggccatggccgagaacttccaactccagggccggcacggcaagtcccgcgtccgcgtctcccgcgtctggcgccgcccggccgcggcggggggcgacgtcatcgttgagtggaacgtcgccgtcagtatcgtctccgactgcctcccctcctacacctccagcgacaactccgccatcgtcgccacagattccatcaagaacaccgtgtatgtcaaggcgaaagagtgcacggaagtggtgtccatggaggaattcgccgtgattcttggaaggcatttcacctcgctgtaccctcaggtttcagaggccacggtgactatcgtggagcgcccatgggagcgtgtgactgtcgacggaaagcctcattcgcatgggttcaaagttggtgttgagaagcacagcacagaggtcattgtaaaaaaatctggaagcctgcgtataaattctggaattcaaggatactcgctgctaaagacaactcagtctgggtttgaagggtttgtgacggatcgctataggcttcttcctgatacaagggaaaggatagtagcaacagaagtaactgcttggtggaggtatccctttgaacatgtttcgcagctcccatcgaagaagccattctgcttcacgcagagataccaggacgtaaagaaagtccttgcagagacgttctttggtcctccggatgttggtgtgtatagtccatccgtacaaaatacgctatacctcatggccaaggaagtccttacaaggttcccagatatatcgtcagtccagcttagaatgccgaaccttcactttctgcctgtcaacttggggagcaaagaagctccgctggtgaagtttgctgatgatgtgtacctgccgacggatgaaccacacgggacgattgaagcaaccttaataagccgtcccatgtcaaagctgtaaaaaaaatgtagtcgtcaggctggtattagactcctgcttcgtctccccagcatccccaggcttaaaatggacagtaagctgtaagggaaagataaactgtcataaatcgtagcccctatgctttatgtgtggtggtggtaataagtgcacagacttgtattggatgttgtcagctgtagcctgtaggcgtccagcttgtgacgtttcgccactgtaatcgtgtacattgctcgtcttgtgtggaaaccagttaatatctttggaagctttgggccgttt

SEQ ID NO: 263499 - DNA, 392 bp, Zea mays
accggtcttgaattcccgggtcgacgcatggtatgtgagcggctggcagtagcgggccgggatggaattggtcttgaccgtaccgtgtccgatggagacgtcggcgtatgacgtgttgtccagcaccgtaaactaggtcgcggcatcgaccctgggtggatgaacggccgcgagcgcgatcagcgccgccgtgccgacacctgctacgacccacagacgctggcggattgacgtggattgcatcattgaactcctggttggaaaaaggagaaaagggcgcgtttgagcatgcggcgcacgtgtcgcgccgaccggcggcgcgggctagaacatcgtctcgatgcccgcatagacaccggtttggccgtgacccggcgccgggttcgtgcccc

SEQ ID NO: 263500 - DNA, 2433 bp, Zea mays
gagaagctggctttgctcgaagctgagaatgaaaagttgactggtgtgaacgagacattaaaagacgaatggatgctaagctggccatgtttgatgagcttcaggaacggtttagctctactcatgctgagaaggaagaagttgcagagaaggtagctgttcatgagaggacaatctcacacctgacagaggaacacacaagaaccttggagctccattctgtagctgaatcaaagaacggagaaattgaagctcagctccgtgaggctcttgagacaatagcacagaaagaaggtgaagctaaagaattgtgtaagaagctggatgcccttgaaattgagttgggatattatgaggagcaggcaactgaagctgctgctgctgaagagaatcataaggttaaatttgatgaagcttcacagaagataaaaatcttggaggaacaacttgcagagacacagagcaagttggagcatttccttatagagaaggaaagcttgactcaaacaaatagtactttgaatgaggagttggaagtacatcagaacaagttgaacgatttacaacttgcacttgctgctgcagtagcagaaaaggaggaggcatctgaagagattcattcgctgcataaaacgctcgatggaatgatcgagcacaaagcagaattagaaatacaggtatcttctactatacaagagcacgaagaactgaagagcaagtaccaaaatacaatggaagagaaacagacgttgagtgataaatatgaaaccgcaaagaaagagctcgaggatgcaatagccaagttggaggaggaaatgaatgtagacaagtcagaaaaagagtctcacatctcaaaactggagcgacagattacattatctgagataaagtacatggaggagataaagaccatgcaagtggagacaactgaaaagaatgaagcactaacagccaagatgcaggaacacacagacctacagcatgagaaagatgagttggaacaacagttgctggaagtgaggaaggaactggatggtgcctaccacaccatagcaaatcaggaagaacaggcttctgtgagggagataaagtgggacgcttttaggaagtacacggaggatcgtctggaagctgagcagcagcgtgctgaggagctggaactacaagtagcagctcttaaacaacagctccaagaagctgagatccattataagcaaaaggaagaacaagtttctctaagggaggttcaatgggaagcggatcaaaaccattcgctggatgagcttaacgctcagcgtcagtatgccacagacttggagaaacaaatcgaagatctgacacagaagttaacatcagctgatgcacactacaagcagaaggtgacagaagagagggacaaacttgttgaggtcaccaaagagttgagcgagttgacacaaaaagtaagcgagagtgttgaattggagaggaaggtgcaggaccttgagcagaagctgcagctagcttattccaagtctgacgaacaggcagtggatactgtggagtcgagatcccgtgaattcagcctggattcatcaacgacttcaggcaagcagcaagacaaaactcaggctgtctcaccaaacccaaccctgcaaggagtgcaagaaccttccggcatcatggccttcaagttcatcctgggagttgccctgctgtctgtcctaatcggcgtgtttcttgggaagcggtactagcgctcaggtcgtgctgaaagggctcagccagcggcaagtttgaaaggattggtggccttgatggtaatggttcgacgacttcctgggagaagggctcatcggcgtgtttctttttgccgtaattttcagttttcgggtaagggtaggcggccaaggaatttgattttcgatcattcctgccctttcatgcaaatggccaactgcttgcgactggttttgcctacagcaagtttccgtatacatttcttgtccgtaaagatcacaagtccagcgacgaaacatgaagcatttgctactatatgtctgtctatatgctcgtatggagagagtgcaagttttgctaccttgtacagattccaccaatccagtgcttttgatgattcaaaaaaaaaaaaaaaaaaaaaaaaaaaaaaaaaaaaaaaaaaaaaaaaaaaaaaaaaaaaaaaaaaaaaaaaagaaaaaaaaaaaaaaaaataaaaacaaagaaaaaacacaaaaacaaatagtaaagaaaaaaaaaaagggggggcacctaaaaaggttaagcctaaattacccttaaaaggaaaataaaaacttttaaaaaggggccacaaaattaaattcaagggccctttttttaaaacttcctgaaggaaaaaacccggggtttacccaatttaacccccttaaaaaaaaacccctttttccaaaaggg

SEQ ID NO: 263501 - DNA, 957 bp, Zea mays
cgcgtccgcccacgcgtccgcccacgcgtccgcccacgcgtccgcccctcgtctcatctcaagagcgactagagagagagaggaagagaacaagcgataagctcatctcgcacgcaagatgcgggctccaaggggcggaggcggctgccgcggcggccaggagcatgtggaactgatccctggcatccccgacgacgtggccgtggactgcctggcgcgcgtcccccacgcctcccaccgcgcgatgcgccgggtctgccgcggctggcggagcgccgccgcggcgccggccttcgcgtcggcgcgcgccgcggcgggcgccaacgaggacctcgtgtacctgatgcagttcgggaacccgtccgccgacgacgggcccaaggacggcgacgacgggcccggcagcaccccggcgtacggcgtggcggtgtacaacgtgacgacgggcgagtggcggcgggagcgcggcgcgccccccgtggtgccggtgttcgcgcagtgcgcggcggtggggacccgcgtggccgtgctgggcggctgggacccgcgcaccttcgagcccgtggcggacgtgcacgtgctggacgcggccacggggcggtggcggcgcggcgcgcccatgcggtcggcgcgctccttcttcgcgtgcgccgaggccggcggcaggatctacgtggcggggggccacgacaagcacaagaacgcgctcaagacggccgaggcctacgacgcggaggccgacgcctgggacccgctgccggacatgtcggaggagcgcgacgagtgcgacggcatggccaccgtggccggcgaccggttcctggccgtcagcgggtaccgcacggcgcggcagggcgggttcgagcgcgacgccgagtggttcgacccggcggcgcgggcctggcgcaggctggagcgcgtgcgcgcgccgccctccgccggcgcaggtcgtcgtcc

SEQ ID NO: 263502 - DNA, 699 bp, Zea mays
gaaaacccggctcgacgccacgcgtccggcggcagcggccagtgtggtcgtcaccgaggcctgcgccgtcgacaaggtgcgcgggtgcgccgccgagcgcggcgtgccggtggtcgccgtcgacggcgccttcgacgggtgcctggagctgcgggccctggtggacgccgccgagccgctcgccgccgacgaggaggtcggccccgacgacgtcgtcgcgctgccctacttctccggcaccaccgggatgcccaagggcgtcatgctcacgcatcgcagcctcgtcaccagcgtcgcgcagcaggtggacggcgagaacccgaacctgtacttcagcaaggatgacgtggtgctgtgccgtgctgccgctgttccacatctactcgctgaactcggtgctgctggccggcctgcgcgcgggctccaccatcgtgatcatgcgcaagttcgacctgggcgcgctggtggacctggtgcgcaggtacgtgatcaccatcgcgcccttcgtgccgcccatcgtggtggagatcgccaagagcccccgcgtgaccgccggcgacctcgcgtccatccgcatggtcatgtccggcgccgcgcccatgggcaaggagctccaggacgccttcatggccaagattcccaatgccgtgctcgggcaggggtacgggatgacggaggcaggccccgtgctggcgatgt

SEQ ID NO: 263503 - DNA, 1861 bp, Zea mays
ttctacagctcttgtcttttgtttctttttttttttttatgaaacacggtactccgtagctgtattgccgtaatcaggcttgttctttgggtcaaaaacaacatagagacgacgtctatatcgtttatgaacattacacacagggccaacaaacagacaaactaaaacctctttctggcaacatgtgttccacaggaatacgtgtcccttctgttgccagttcatgaatagtagtgttaccgccattacatcgccttttttttcgcagcagcgtggtggccgtccgagaagaagctgcatacgggcctcagtgaacaccggcggcgagcctggctctcaagtccttcctcaggatcttgcccgacgggttcttggggatggattcggtgaagaagaccttgtggatcttcttgtagaaaaccacctccttggcgacgaattgcttgatctcatcctcggtgacttgagaacttcggtccgcacgatgaaggcgaccgggatttcaccagcaaggtcatcgttcattgagacgacggcggcgtccttgatctccgggtgcgtgatgaggagcgcctccagctccgccggcggcacctggaagcccttgtacttgatgatctccttgagcctgtcgacgatgaagatctcgtcgtcgtcgtccacgtagccgatgtctccggtgtgcagccagccgtcctggtcgatggtgttcttcgtcgactcggggtcgttcaggtaacctttcatgatctgctccccgcggatgcagatctcgccgggctggttccggccgagggcggcgccggtgtcggggtcgacgatcttcagctccgcgttccgcaccacggtgccgcacgacccggacttgaccgggtacggctccttggcgaaggccaggcacatcgccagcacggggcctgcctccgtcatcccgtacccctgcccgagcacggcattggggatcttggccatgaaggcgtcctggagctccttgcccatgggcgcggcgccggacatgaccatgcggatggacgcgaggtcgccggcggtcacgcgggggctcttggcgatctccaccacgatgggcggcacgaagggcgcggtggtgatcgcgtacctgcgcaccaggtccaccagcgcgcccaggtcgaacttgcgcatgatcacgatggtggagcccgcgcgcaggccggccagcagcaccgagttcagcgagtagatgtggaacagcggcagcaggcacagcaccacgcggctcgagcgaaccgctgcggcacgcgtcccgcttctggtttgcttgcctgttgccccccagatcttgccaactaattggaggcagccgagctgatctcccatcccgcaacgcgccgtctcgacggcggatcggtttcttctgcttctacctcgtgatctttgggcaagacgataagacacgtccaagcgtcgccacaaccaagggcggcttggttgcagtcaagatggggaaggacggagaatctgccaagctgaaggaggagaagaagtccaaggaagagatccatctgaaggtcaagagcaaggacgagcggtccggcgaggaagacggcaaggaggaggtcgaggtagagattgaggccaagtttgttgagaaggaagaggtcaaagactcgggtgacggtgcgggaggaaagggtaccaagaagaaggatacaaaggagaaagacaagaaaaagaaggaaggtggtgaggattcagggaaggcagaggaagacaagaaggataaagcgaaggattcggagggcaagggccaagtgaagaaggaaaagaaggatggtgctggggacgacggaggcgaggagaagggcaaagaaaagaaatataa

SEQ ID NO: 263504 - DNA, 533 bp, Zea mays
gcatccgctcacgcgtcggcccacatctcaagtgaagagaagtagaactagtggagagaggagaacaggagattagatcagctcgcacgcaagccaaaggaaaaggcaagatgcggagcccaaggggtggaggcggcctggagcacgtggatctgattcccggcatccccgacgacgtcgccgtggactgcctggcccgcgtcccgcacgcctcccaccgcgcgatgcgccgggtctgccgcggctggcggagcgccgccgcggcgccggccttcgcgtcggcgcgcgccgcggcgggcgccaacgaggacctggtgtacctgatgcagttcgggaacccgtccgccgacgacgggcccaaggacggggacgacgggccgggcaacaccccggcgtacggcgtggcggtgtacaacgtgacgacgggcgagtggcggcgggagctcggcacgccgaccgtggtgcaggtgttcgcgcagtgcgcggcggtggggacccagatggccgtgctgggcggttgggacccgctgagc

SEQ ID NO: 263505 - DNA, 339 bp, Zea mays
aagagacgatcccgataaatacgtgctaccaagcccgacgtccgcgatgctgctagagggggggctcttcgtgagatcaaggagcgcatcaagaagtccaaggatgagatccatctgaaggtcaaaagcaagggcgaggcgtccggcgaggaatacggcaaggaggaggaggtcgaggtagagattgaggccaagtttgttgagaaggaagaggtcaaagacacgggtgacggtgcggcatgaaagggtaccaagaagaaggatacaaaggagaaagacaagaacaagaatgaaggtggtgacgattcatggaaggcagaggaagacaagaagggtaaa

SEQ ID NO: 263506 - DNA, 1437 bp, Zea mays
cggcgtgtgggcgagagacgagagagagggaggtggggaattaaaaaacggacatgagagggcgggggtgacactatacagggggggcgggcggagaaccaggagcggcgtcgagctaaaagccccggcggcggtcatggccaccgcagaccagagccgtattttcatgaaggacgtcaaacgcgtcatcatcaaggtgggcactgcagttgtcacgaggcatgatgggcgagtatccacaggcaattttggtgttctttgtgaacaggtgaaagagataaatgctctaggatacgaggtgatcattgtgtcctcaggtgctgttggtgtggggaagcagaggctcaattacaggaagcttgtcaatagcagctttgctgatatgcaaaagccacagacggagctggatggaaaggcttgcgctgccgttggacagagtggcctcatggctctttatgatatgctatttactcaacttgatgtgtcctcctcgcaacttcttgtgacagatagtgattttgagaatccaaactttcgggagaggctctgtgaaactgttgagtcactattagaccttaaagttgtaccaatatttaatgaaaatgatgccatcagcactagaaaggctccatatgaggattcatctggtatattctgggataatgacagtttagccggtcttttggctatagaacttaaagcagatcttcttgttctactcagtgacgtggatggcctctacagcggtccacctagtgaacctcaatcaaagatgatacatacatacatcaaagataaatatcataacgaaattacttttggggataagtcacgtgtaggtagaggaggaatgacagctaaagtgaaggctgctctcgtggcttcaaacagtggcacacctgttgttattacaagtggatttgcatctcagagcattgttagagttctccaaggagagaagattggtactctcttccataaggatgcaagtctgtgggagccatccaaggatgttagtgctcgtgagatggctgttgctgcaagagaatgttcaaggcgtctgcagaatttatcatcggatgaacgcaagaaaatattgttagacattgcagatgctttggaacaaaatgaggatctaattagaactgaaaatgaagctgatgtatctgcagcacaagatgctggatatcagaaatctttggttgatagattgacattgaagccagaaaagatagcaagccttgcgaaatccatacgcactcttgcaaatatggaagacccaatcaaccagatactcaaaagaacagaggttgctgaagacttagtgcttgaaaaaacatcttgccctctgggtgtgctgttgattgtttttgagtccaggcctgatgccttagtccagattgcgtctttagcagttcgaagtggcaatggtcttct

SEQ ID NO: 263507 - DNA, 959 bp, Zea mays
cggacgcgtgggaaaaattcggaggagaattcaagaactccaggaatgccgatctgctggatgccgcacactggctgaagcaaagatacacatagagcaaaagaggaaaaaagaatacgagctgaatgcgcaaaaagctaaggatagcagtcaacttaatgcaaataataaatcagtacaaaagatgaatcgacctatgaaaattgagtccgatgggaatttggatccaaagaaaggtggtgctggcttggattctcctaagactacaggacctacaagtgttaagcagtgggatgactgggatatagttggtcttcctggggcagagctattaagtgctagcgaaaagcttctatgctgtcagaacagattgctacccagccattacctgagaatgcaggaggtgctgatgcaggagatattcaagggtagtgtcctaaagaaggaagacgcacacgtcttgtttaaggttgatcctaccaaagtagatagtgtttatgatatggtatctaaaaaactgggcaaccatgaggaggccccaaccgtctagcttacgcttttgaggttgcctgctgtgacatgccgaaggaaacaaatcttggtctggcccttcgcagcgtgtctgaatcagggctgaaggtggtggaaatatactaaatctaatcggccatagttagctgaaattcatatcagctgtcagtagcacagtaaggcattcccgccaagctgtaaaattattgccccgacgagaatgtgtagcatgaatttgaattttttttctgctattgctgtgtactgttgcagggtagtgccttattgtagtatatgtataggtgcctgagttttatgtatcatcgtgtatgtaccatttgggcgctctatttatgccattgtaccaaccccatcgattattataattcatctcgcagccaaattcttaaaaaaagaaaaagaaaaga

SEQ ID NO: 263508 - DNA, 975 bp, Zea mays
  unsure (1)..(975): unsure at all n locations
gcgagatcgtgcgcgcctccgagatctccacgaagggtggtgccagacctgctgctcgcgtgtgcagcgagatcgtgcgcgcctccgagatctccacgaagttgtggtaacatggggctcaccttcacgaagctcttcagccggctcttctccaagaaagagatgaggatccttatggttggtctcgatgcagctggtaagaccaccatcctctacaagctcaagctcggagaaatcgtgaccaccatccctacaatcgggtttaatgtggagactgttgaatacaagaacattagcttcactgtctgggatgttggaggtcaggacaagatcaggccattgtggaggcactatttccagaacacccaaggccttatctttgttgttgatagcaatgacagagatcgtgttgttgaagcaaaggatgagctccacaggatgctgaacgaggatgaattgagggatgctgtcttgctcgttttcgcaaacaagcaagatctaccaaatgcaatgaacgctgctgagatcaccgataagcttggtctccattccctgcgccaacgccactggtatatccagagcacttgtgctaccacaggagaaggtttgtacgagggtcttgattggctctccaacaacattgcaaacaaggcctgaatggacaattctgctgtttcacggagcacatctgcacatggcgaggcatggtcattttgattggaaagtatcgtatttctatgctaggcttttcagagagattactctctaagaaactgatcttggcattggtactagtagatcgtttactgagtaatgcagtttattttaatgtatcccagttgtgttgtaagatacaactatgcgtccgaattacccattcaatttgaatctagatacgtagtttttgttatatacttatacttggatatatatntgttaatacatggtaaaagtaatatatcaagaaaaatattt

SEQ ID NO: 263509 - DNA, 701 bp, Zea mays
gctttcaaaacttttttggcccttcaaatgtgttctacgcataatgaagtcaagattccagtaggcgtatattaggagaggagtgcgcatcttgattcaatccatgtcaagtcagaggctgattccagattatcccatgcaagtataattagatggtactgtcttgctcgtttcgcatacaatcacgatctaccaaatgcaatgaacgctgctgagatcaccgatatgcttggtctgcattccattctccaactccactggtatatccagagcacttgtgctaccacaaaattagaaggtttgtacgatggtcttgattggctctccaacaacattgcaaacaaggcctgaatggacaattctgctgtttcacggagcacatctgcacatggcgaggcatggtcattttgaccctcagacgatcattgtttcattggaaagtatcgtatttctatgctaggcttttcagagagattactctctaagaaactgatccgatattaagacactataattggcattggcactagtagatcgtttactgagtaatgcagtttattttaatgtatcccaattgtgttgtaagatacaactatgcgtcggaattacccattcaatttgaatctagatacgtagtttttgttaacaaaaaagaaaaaagaatgcaaaaaactttcaatgaaaactgaactattgaggat

SEQ ID NO: 263510 - DNA, 375 bp, Zea mays
agaacaggtccgcgacgcgtgcggacgcgtgggcggcacgcaccattcccacgggctcacgtagaccgggaccagcctccgccccaccaacccttgcctccccacacctcagcatgaaccactcgtctctttttctccgccccgcccgaagccgaggaggagaggggagcagcgagatcgtgcgcacctccgagatctccacgaagttgtggtaacatggggctcaccttcacgaagctcttcagccggctcttctccaagaaagagatgaggatccttatggttggtctcgatgcagctggtaagaccaccatcctctacaagctcaagctcggagaaatcgtgaccaccatccctacaatcgggtttaatgtg

SEQ ID NO: 263511 - DNA, 759 bp, Zea mays
cacacgcgtccgcccactacactcccggcggcggcggcggcggcgcacagcggcagcagcatccgaagatggtgaagttcctcaagcccggcaaggccgttatcctcctccagggccggttcgccggcaggaaggcggtgatcgtgcgcgtgttcgaggagggcacccgcgaccgcccctatggccactgcctcgtcgcaggcctcgccaagtacccaaagaaggtgatccgcaaggactccgccaagaagacggcgaagaagtcgcgcgtcaagtgcttcatcaagctcgtcaacttcactcacctcatgcccacccgctacaccctcgacgtcgatttcaaggatgtcgccaccggtgggcccgacgcactctctacccacgacaagaaggtcgccgcctgcaagacggccaaagcgcgccttgaggagaggttcaagaccggcaagaacaggtggttctttaccaagctccgcttctagatgctcggcctcccgaatagtcctgctttagctgtcgatttgttgtatcggacacactccatctctgttttcgtattaccatgaatatttcgtgtttagtcctggggctctcagagataaatttgctaagatatgccgttgttgtgttacatgttttcgtgataggtctggttaaaattttgttctgttttacggcttgcgggtttcttgttggtgccagacatttgtgatgcatcttgttagtagtgtttcatcaagtatgctcttttgtttctcc

SEQ ID NO: 263512 - DNA, 679 bp, Zea mays
tcgcactacccaaacccaaccggcggcgcacagcatcgccaccaccgtccaaagatggtgaagttcctcaagcccggcaaggccgttatcctcctccagggccggttcgccggccggaaggccgtgatcgtgcgcgttttcgaggagggcacccgtgatcgtccctacgggcactgcctcgtcgcgggcctcgccaagtaccccaagaaggtgatccgcaaggactccgccaagaagacggccaagaagtcccgcgtcaagtgcttcatcaagctcgtcaacttcacgcacctcatgcccacccgctacaccctcgacgtcgacttcaaggacgtcgcctcgggcgggcccgacgcgctctccacccgcgacaagaaggtcgccgcctgcaaggccgccaaggcgcgcctcgaggagaggttcaagaccggcaagaacaggtggttctttaccaagctccgcttctagatggtcggcgtcccgaatggtgcccgtcggtttcttgtatgggacacactccaagccatgtctcttttcgtattgccatgaatacttcttcgtgtttagtcctggggctctcaggtatattgtgcgtgtgtacttcgaatgtttggtcttggagtcctactgaattgatggatgttcaaatttttaaaaaaaaaaaaaaaagggcggccgc

SEQ ID NO: 263513 - DNA, 636 bp, Zea mays
tttccgggttgacccaagccttcggttccggccgacggcgccgctgcgccattaacgcaggaggcttccaagattgttaagggccgtaatgcccggcagggccgttttcctcttcaagggccgcttctccgccaggaaggcagttatcgtgcgcgtgttcgatgagggcacccgcgaccgtccctatggccactgcctcgtcgcacgcctcgccccgtcccctccgaaggtgatccgcatggactccgccaagaagacggccaagaagtcccgcgtcaagtgcttcatcaagctcgtcaacttcactcacctcatgcccacccgctacaccctcgacgtcgacttcaaggacgtcgcctcgggcgggcccgacgcgctctccacccgggacaagaaggtcgaagcctgcaaggccgccaaggcgcgcctcgaggagaggttcaagaccggcaagaacaggtggttctttaccaaactccgcttctagacgtcgggcgtccctcatagtgtctgatttagttgtcaatttcttgtacctgaaaccctttaaggtatctctgttttgctatttccatgaaggcttcgtgcttgttatggatctcggagaagattttgttaaaaacatgtcgatgatgt

SEQ ID NO: 263514 - DNA, 382 bp, Zea mays
cggacgcgtgggcggacgcgtgggccaacccctacactcccggcggcggcgcaggagcagcagcaccagcacccgaggatggtgaagttcctcaagcccggcaaggccgtgatcctcctgcagggccggttcgccggcaggaaggcggtgatcgtgcgcgtgttcgaggagggcacccgcgaccgcccctacggccactgcctcgtcgccggcctcgccaagtaccccaagaaggtggtccgcagggactcggccaagaagacggcgaagaagtcgcgcgtcaagtgcttcatcaagctcgtcaacttcacccacctcatgcccacccgctacaccctcgacgtcgacttcaaggacgtggccaccggcgggcccgacgcgc

SEQ ID NO: 263515 - DNA, 250 bp, Zea mays
ttcccgggtcgacccacgcgttcgcactctataggcggtctcaaaactcagcttatccagtgaacacgcaacccttccgggtcggcggcatcagcttcggaccgatgctcaatatgacactgctactttgcgctacttgactgtcgtcaaggctctgttcatgagcacgatgccaaaaaaggattcggcggtccagacgccgtcgttagacaagagcaaggggacagtgttcgagattccatggtttttc

SEQ ID NO: 263516 - DNA, 1916 bp, Zea mays
tgttaggtcccgaccccttcatcttcgtcctgtggcgacgctaaatccatcggcgccgtcgccgcgctcaagctctccgaccgcacctgcaccggcgtcctcgcatctcaccccctttcccgggatatccacatagagtctctttctttaacattccatggacacgaccttattgtggattctgatttggagctgaactacgggaggcgatacggtttgcttgggttgaatggctgtggaaaatctactcttctcacagcaataggctgcagagaacttcctatccctgaacacatggacatataccatctaagccatgagattgaagcttctgacatgtctgcactgcaagccattgttagttgtgacgaagaaagagtgaagttggaaaaggaagctgaaattttggctgcacaggatgatggtggtggtgaagcattggagcgtgtttatgagcgtctagatgcaatggatgctggaactgcagaaaagcgagctgctgaaattttatttggtctgggttttgacaaacaaatgcaagcaaagaaaactaaagatttctctggaggttggcgtatgaggattgctttagcaagagcactgtttatgaatccaacaatccttttgcttgatgagcccacaaaccatctagatcttgaggcttgtgtctggttggaagagacactgaagaaatttgaccgcatacttgttgtcatatcacactcccaagattttctaaatggagtgtgtactaacattatccatatgcaaaacaagaagctcaagttatacaccggtaactacgatcagtatgttcaaactcgctccgatcttgaagagaatcaaatgaagcagtacaaatgggagcaggaacagattgcttcaatgaaggagtacattgctcgcttcggtcatggttctgcaaagcttgctcgtcaggctcagagcaaagagaaaactcttgcaaagatggagcgaggtggtctcaccgagaaggttgttagggacagagttctagtgttcaggtttacagatgtaggcaaacttcctccacctgtgctgcagtttgttgaagtcaagtttgggtatacaccagataatctcatatacaagagtcttgactttggtgttgatcttgactctagaatcgcattggttggtcccaatggtgcagggaagagcactcttctgaagcttatgactggtgaccttgctccattagatggcatggttcggcgccacaatcacctgcgcattgcacagtaccatcagcatcttgcggacaagctggatctggacatgccggctctggcttacatgatgaaggaataccctgggaccgaagaagagaagatgcgagctgctgttggcaggtttggcctatcaggaaaggcgcaggtgatgccaatgaggaatctttctgatgggcaaaggagccgtgtcatctttgcatggttggcatataggcagccgcaactgctactgctcgatgagccgacaaatcatttggacattgagaccattgactccctggcggaggcactgaatgagtgggatggtggtttggtcttggtgagccatgatttcaggctgatcaaccaggttgctcaagagatttgggtgtgtgagaatcaggcggtgacaaggtgggaaggtgatatcatggatttcaaggcacacttgaagagcaaggctggtttatctgattagagggctttttccagcaaccatgagctttttaactctgtatcacgaagtcccagttttccaatagcgaactatcagagttactttattgtatcggatttcttttgacttgcattgcaacctgattaccttatactacctggaatatttatttatatatcttttgaaatgctaaaaaaaaaaaaaaaaaaaaaaaaaaaaaaaagaaa

SEQ ID NO: 263517 - DNA, 1064 bp, Zea mays
cgcaagcggagggaccaaaccgcaaaagcgcacagatcccgttccccctccgacccgttcattccgcttggttttctcctcctccgtcctcttcgctccccgtcagaccatccctgtgaggctgtgacgcaaccgggcgccggcggtctctcctgcaccacagggcacgccgcctcccgcgcacgtgttctcctcttccggggattcagatctggggattgctattctgtccgtctgactccgtccgtcccgaggcgcggcgaggggagcgagatgggttacattggccaccacggcgtcgccacgctgcggcgctacaagtacagcggcgtcgaccactcgctcgtcgccaagtacatcctccagcccttctggtcccgattcgtcaacatcttcccgctatggttcccaccgaacatgattacactgacaggtttcatgtttctactgacatcagcattccttggcttgcgtccgcccacgcgtccggatacagcaccccccagatgggttcaccttgctcatggactgcttctctttctttatcagacttttgatgctgtggatggaaaacaagcaaggcgtaccaactcatcaagtcctctatgcgagctttttgaccacggatgtgatgcgcttgcgtgtgcttttgaatccttggcttttggaagcacggcgatgtgtggaaaggctaccttctggttttggttcatttcagctgtcccattttacttcgcaacctgggaacacttttttacaaatacactttttattcttcctatagtcaacggaccaactgaaggccttatgctgatctacttgtgccattttttcacctttttcacaggagccgagtggtgggcacaggattttcagaagtcaatgcccctgctgggttgggttcctcttatctctgaaatcccggtgtatgacattgtgctatgtcttatgattgcttttgctgtaatcccaacaattggatctaacatccacaatgtatataaagtcgttgaagcatgaaaaggaagcatgcttttggcactagccatgctcttttctttggt

SEQ ID NO: 263518 - DNA, 816 bp, Zea mays
ttgtgtagcactctccatcctcattgctagcggctcgattctcctccatacccttgtgcacgcacagccgacactgcagtgaggaacttgaacagaggaagaagcccggctgagcgctctctcgtctagctagctgcgctgcggcgatgaagatgcatcgcttcgctctgcgtggcctggggtttctcgtcctgtggatgctgcattgcggaagcgagctcgccgcggcggtgcctccagatggctggtacgattactccgcctacaccgactgcaggggccagccggagccggcgctgtacaacggaggcattctcaagttcggcagcagcggcggagacccggacggataccgcacgacggagaccggcgtcttctccccggcgttcgtggtgtacaacctcaacaagaccaccatgtacaccttctcatgctgggtgaagctggaaggcgcgtactcggctctgatcacgcggggctttggcgccggacagcaccggcgccaggtgcatcgccacggttcgttgccaggagcgactgctgggccttcgtcaagggcggattcgtcctggactggccgacgcagacctcggtcatcttctttcagaatgctgacaagacgcccatgaagatcaccgtggcgagcgggtcgctgcagccgttcaccacggaccagtgggcgatgcaccagcaggataccatccggaagaggaggaagcgcgtggcgaccatccacgtggccgacccgcaggccgcccgcgtggtgggcgcgtccgtgtcggtgcagcagacggccaaggacttcccgatcggttc

SEQ ID NO: 263519 - DNA, 450 bp, Zea mays
  unsure (1)..(450): unsure at all n locations
agaaactatgcgcggcgcagaacatgaacatcacagtacagtagagcgcggcgtgcgctagctgcaggtttatttgcgtggcgtccagtgcagaggccagccggagccggcgctgtacaacggaggcattctcaagttcggcagcagcggcaggcgacccggacgggtaccgcacgacggagaccggcgtcttctccccggcgttcgtggtgtacaacctcaacaagaccaccatgtacaccttctcatgctgggtgaagctggaaggcgcgtactcggctctgatcaccgcgaggctggcgccggacaacaccggcgccaggggcatcgccaccgtggttgccaggagcgactgctggggcttcgtcaagggcggattcgtnctggactggccgacgcaaaccttggtcatcttctttcaaaatgctgacaagacgcccatgaagatca

SEQ ID NO: 263520 - DNA, 700 bp, Zea mays
gatcccctttcccccaactccccccccaagcagccgcgaagagagatcccgcgctcaaccggcgctgctcggccgcggcccccctcggctcctccttccctcccttcctccttccattggtggccgccggggacggggagcgaagaagcctccctcactccttccctccgttggtcgccggggacggggagcgaataagcctccctccctccttccctccggtggttgccgaggacggggagcgaatcctccattcctccttccctccggtggtcgccagggacgacgggatcgaagatgttctatggggccatggtttgggatccgtggctgatcgtgtcgcagatcgtgtgcctgcagtgcctctactacctgtcgctgggcgtcgccatggcgctcctcgtcggcacccgcgtcccgcgactcacccttctctacttcttcgacttcgccacgctcaccccgcgcacccccacgggttggtgcgccatcgcatcattcattcttgccgctgtcgcaggtgctgggttcatgctttatgtgactgagagagccaagaagtgcctggactttgcagcaacactctacataatccatctcttatttgcattgcttatggtggatggccagtttccattacatggtggggtgataatatcacctggtttgcaatcatggctctcctaggtgaatacctatg

SEQ ID NO: 263521 - DNA, 616 bp, Zea mays
cccacgcgtccgcccacgcgtccggagatcccgcgctcaaccaccgcttctcggccgcggcccccttcggccctcctttcctccggtggccgccggggacggggagcgaagaagcctccatccctcctttcctccgttggtcgccggggacggggagcgaagaagcctccctccctccttccctccggtggttgccggggacggggagcgaatcctccattcctcattccctccggtggtcgccggggaccgggatcgaagatgttctatggggccatggtttgggatccgtggctgatcgtgtcgcagatcgtgtgcctgcagtgcctctactacctgtcgctgggcgtcgccatggcgctcctcgtcggcacccgcgtcccgcgactcacccttctctacttcttcgacttcgccacgctcaccccgcgcacccccacgggttggtgcgccatcgcatcattccttcttgcagctgtcgcagggtacgccgcagctccctaacctcactctcatccacttggttcgtctgaaactggaacggtatcttctggtagtagtcaaaacgcgaaatatgcctgtcgcgcgcgtgtgttgccttatcgcttccggttgc

SEQ ID NO: 263522 - DNA, 960 bp, Zea mays
attggcatctgtctcctgtcgcgccggccaccacagcgcagaagaacacagcacccgcctgcctcgccgccgcaatggccgccgccgcctccgctgcgagatccttcctccggtccagcggctcatcgtctctccgcagcgcggcggccagagccgcctcgcgtgcgggaccgggaccggctccgctgccgaggcggatgcccacctctgccccccgtgtactcctaaggtcgccggtggaaatgagcagcgtgtgtctggagtccttgatgcccatgcacagcgccacggcttcagcgctcatgacgtcgcttctcgccgccccggcttgcaagggattcggttggctatcagaaggtcaagctgaaactagatgaacttcatgggacccaaaaggcctgtgattagtgcgatggaggtcaacttggatgaagactagactgctatttattttgccatctctgttgccttggttttgcccattataaatggaacatagagcaatgtagctttcgtcgctgttaatttatatgatgttattctagagcttgagcccagattattgtgtttctatttgtagatggatgatttgtcgttactggagatctgcagtgatggtatcttgtctggattatggatacctcgtgaatttaaagtacttggttggcgtctcagttaacatgttttgtgctctgggattgcagtttgtatgaaatttgcagaattgatcctgagatttattttggctggttagctgtcaaaaagactttggtcttgacgacttgcctgatcaagtagatctggaatgaataaacttaatagaagggttttcaaaaaaaacaaaaaaaatcaaaaacaaaaaaaaacaaaaaaagcagaagagacacaacaaaaagacaaacaatccaacaagccgggtgtgctccttaataaaaaaaaaaaaagggcggccgcccaaaa

SEQ ID NO: 263523 - DNA, 451 bp, Zea mays
tcccgggtcgacgcacgcgtgcgcaggacccgcctgcctcgccgccgcaatggctcgccgccgcctccgctgcgagatgcttcgtccggtccagcggctcatcgtctctccgcagcgcggcggccagagccgcctcgcgtgcgggaccgggaccggctccgctgccgaggcggatgcccacctctgccccccgtgtactcctaaggtcgccggtggaaatgagcagcgtgtgtctggagtccttgatgcccatgcacagcgccacggcttcggcgctcatgacgtcgcttctcgccgccccggcttgcaagggattcggttggctatcagaaggtcaagctgaaactagatgaacttcatgggaccccaaaggtgaacaatttttatagatcccaccaataatgactggtgatggctagattccatcactatttcacgcgtcggaatgatt

SEQ ID NO: 263524 - DNA, 858 bp, Zea mays
tccggtctggaattcccgggccgaccgcacgcgtccgcccacgcgtccgtgtggcatgttcgagcggtttgatctggaggtgaagcccaagccacatggcacaattgggctcacagtctcctttgtggagagtgtgtggagtgctgcaaagcagttcaagtgcatcaatgtggcgcttatgtcacactcagggcaggttgacttcgaccaggacatgacagagagggagaaaatggattacctccgcaagcaggaacgcgattaccagcagcgtgtaaggggtgccaagccctgcatcttgccagaaaatgtacgtggagaggtgctgggaatgatgaagaagcaggagaaggtgagcgccaggatgctgcagaagatcagggaccatgtccagaaatggtaccacaacgagggtttcgtatgcgcacaggttgttaactttggaaaccttaacaccaatgaggttgtgtgtgaggtggtcgagggtgacatcaccaaggtggagtaccagttccaggataagcttggaaatattgttgaaggaaatacccagcttgcgatcatagaccgagagctgccgcagcagctatcgacctggccacatctttaacattggagcagggaaacaggctctgaagaacataaattcacttgctttgttttccaacatagaagttaatccacgtcctgaagagacaaaggaagggggcatagtagttgaaattaagcttaaggaactggaacccaagtcagctgaagtaagcacagaatggagtattgtacctgggcgtgaaggccgaccaactttggcatccatacaacctggaggaactgtgtcatttgagcaccggaacatct

SEQ ID NO: 263525 - DNA, 748 bp, Zea mays
  unsure (1)..(748): unsure at all n locations
tttcctagtcactcaacggggggggcctaaatagaacaccctgcttttcctcccgcngaagaggagcggaaagagaaatgcgctgccctgaaggctgcagtagaggcgttttaagaattacttgaagaagcatccgaggacatcaaccagaaaacagactaccaagaattcaaaagaaaatggggtgctgatacaaggtttgaagccttggatcgaaaggaaagggagattctttttagtgagaaagtcaaggctgtggaagaaaaagtccaatcaatgcgcaaagctgtcatagctaatttcaaatcaatgcttcgagaaagtaaagatataacttcaactagccgatgggcaaaagttaaagaaaatttccgtagtgatccaaggtacaaagccatgaagcatgaagaaagggagactatatttaatgaatacatagtggaactaaaatctgctgaacaggaagcagagcaagctgccaaggccaaagtggatgagcaagccaagttaaaggagagggaacgtgaaacacgtaaaaggaaagaaagagaggagcaggagatggaaagagtaaaaatgaagatacgtagaaaagaggctgtgtcatcataccaagctttacttgttgaaatgattaaggatcccaaggcatcgtggactgaatccaaaccaaaacttgaaaaaaatccacaaggtcgtgctcgaaatcctgacttaggccaaggtgatgcagaaaagttgtttcgtg

SEQ ID NO: 263526 - DNA, 595 bp, Zea mays
tttccgtccttatactttcccccactattgcaaggcgaggttgaagctatcgatcccgggaataaagctgctgcggaaccggtgggagatgtagctgcgctatcgtcaaggctggctaggaggctactacatggatcatggtgccctcctcggtgccaggggatatgcttggatcagagtagggaacattcatgctatggacacaaactcaggtggacgtggtgttcgacaattcaaaacatacctattacatatattggaaaaggaaaccccaggcgtttcaaagttagagtttcacagcttgcagcgaatttgggttctttttaatttgttgctttagtattgaattaacgtatgatcattgtggtttatggttcgcattggaatttatgtgttgttcgtgcttgatgaattttctccaaaagaacaagggagacaataagaggtgtgtaatatgaactctacctaatgccttgttgctctacaaaatgtcccatatgtattcttctgtactctaatcttgtttgttgttggttggtcatccttatactttcccccactattgcaaggcgatgttgaagctgccgatcccggg

SEQ ID NO: 263527 - DNA, 556 bp, Zea mays
cggacgcgtgggcggacgcgtgggcggacgcgtggggtcaatgggtaatacccattacacccatacccactctaaacatgagagatggtgatggtgaaggagatatgcgggttcagggaggcggagacggcaaggagaaaaggatggtacagacaatcgctgagtaggcatcagctagtcagccgagggcgggtgatgcacatcggcggcatggaagaatgccagcatcactgcccggcagttccctggcaacaacttatatctcagttctctgtgtgctctccatattgatcttttgttcaattgaatatcttctgttgatgtcaaatgcagcgatctgtaaacaccttgatcaggaaggtattagtttttgctgtcgaacaacttatgatgataatgctattacaaatgcggttgagatatttaatacctctagtggcgccgttcacttcatggcatcaaataacgactctggtgtgagatactacgacatggagagattccagctattcaagcattttcagtttgaatggccagtgaatgtacgtttctttgg

SEQ ID NO: 263528 - DNA, 1885 bp, Zea mays
tctgcaaccgtgcctttttctctccgcccaatctcccattaccccagcggcccagcgtgcggagacgggagacgcgctccccagtccccacccccctctcgtgtcgtggcgacgactggggggctgtcgctgccgccctacgtcaggtggccaggtcgtattagggcacttcgccggcgacgagtaccacaaggcagtggacactttctctggtatcagaggatcaatgtccaattattatgatgactacgatgacattgacgggatggaggatgattatgatatggatgatcccattgatgacatggtagacgagcagcaagggattagggattctgatgcggaagataatgattatggacaaccaaatgataagatcccagatacttcatcagcagatgcaagaaaaggaagggacattcaaggaataccctgggagcagataaacataacccgtaaaaaatacagacagtccagattagaacagtacaaaaattatgagaatgtacctaactctggagaagaagctatgaaggattgcaaaccaacagagaaaggtgggatatactatgagtttagacgaaatactagatcggttaaatcaactattctacattttcagcttagaaatttggtatgggcaacgtccaagcacgacatctacctagtatctcattactcaattcgtcactggtcagcattgagtggtgtggatactgaacttatcaacgtccaaggacatgtggcaccaagggagaagcatgcaggaagtttattagaggggttttatcagactcaagttagtaccttgacagtcaaggacaatttactggtagctggtgggtttcaaggagagctgatctgtaaacaccttgatcaggaaggtattagtttttgctgtcgaacaacttatgatgataatgctattacaaatgcggttgagatatttaatacctctagtggcgccgttcacttcatggcatcaaataacgactctggtgtgagatactatgacatggagagattccagctattcaagcattttcagtttgaatggccagtgaatcatgcttcgttgagtcctgacagaaaggtggttgttattgtgggtgatgatcctgatggtctacttattgatgcaaactctggaaagacagttcattccataaaaggacatcgggactactcatttgcatcggcttggagccctgatgggcgaacatttgctaccggcaaccaagacaagacatgccgaatctgggacgtgaggaacctttcaaaatccgtccatgtgttgaggggtaaccttggagccatccggtccatccgcttcacctcggatggccagttcatgtccatggctgaacctgctgactttgtgcacatctacgacgtgaagagtgactacaacaaaaggcaggagctggacttctttggcgagatatccggcacatcgttcagcccagacactgacacgcttttcgttggtgtgtgggataggatgtatggcagcctgctacaatttggccgcctgtacaactactcgtatcttgactccctgttttgatgtggatccaaacgggtgttgaactgttgggttttggtgtacctcagtgctctgaatgttgtcagcataaattaggtggttatccctaatcaggatattaagttgcaaagataattgaattaataaatgttgtaccgtgcccgatgtgtatatgtaaaaagaaatgtatacatgtgcctattgagagaccgagttgagatgtgacttaggggttgtttgtttgggattataatctattcagattatataatctaatttatttgttttaaaaaaaaaaaaaaaaaaaaaaagggcggccgctcgcgatcttgaactagt

SEQ ID NO: 263529 - DNA, 692 bp, Zea mays
cagctagaaacatacaacgctcgccccacgattcacgagtcaggacccttgtttgcctatacgctgccagcctgccttttctaagttcttcttccatcgctccacccccacccccttctctctcgtagcaacgtttggggcgccgtcgctgccgctctactcgggtgcccaggtcttgttcgggcccttcgccggcgagccaggggacactttctttggtatgagaggatcaatgtccaattattatgatgattacgacgacattgatgagattgaggatgactatgatatggatgatcctgctgatgacatggtagacgagcagcgaggggttagggattctgatgcggaggataatgattatggacaaccaaatgacaagatcccagatacttcatcagcagatgcaagaaatggaagggacattcaaggaataccctgggagcagctaaacataacccgtaaaaaatatagacagtccagattagaacagtacaaaaattatgagaatgtacctaactctggagaagaagctatgaaggattgcaagccaacagagaaaggtggaatgtactatgagttcagacgaaatactcgatcgattaagtcaactattctacattttcagcttcgaaatttggtatgggctacgtccaagcatgacatctacctagtatcacattactcaattc

SEQ ID NO: 263530 - DNA, 845 bp, Zea mays
agaagcttccccttccgtctccatatcttcttcttggtccgccgtctccactccgcgttccctggctccctgcgttgcgtcttgggggagagagagaagtgggagacccgcgagaggctgccgtgtagggactagggaccgtagagtaagcgacagcgaaggagggagagggggatggccgggatcgggccgatcaggcaggactgggagccggtggttgtgcggaagaaggcacccaccgccgctgccaagaaggatgagaaggccgtcaacgccgcgcgccgctccggcgcggagatcgagaccatgaagaagtacaacgctggtatgaacaaggcggcgtccagcggcacatccctcaacaccaagcgcctcgacgacgacacagagaacctcgcccatgagcgagttccaagtgacctgaagaaaaatctcatgcaagcaaggctcgataagaagttgacccaggcacagcttgctcagatgatcaatgagaagccacaggtgatccaggagtatgagtcaggcaaggcaattcccaaccagcagatcattggcaagctcgagagggccctgggaacgaagctgcgtggcaagaaataaccaggagcagcatagggaagacaaggcaaactgtctgcttattatttgctatgtttggtatctcaagtcatgcggactgtttgtgttggtacaagagtgaattaactgtgttctcctgaatgcttgctgcttgtcatatgagtatatgatctagctctaaaaaatttgtgatgaagatgtcaactgatatgacaacctcataaccagcgtgatcaagatgatgctcattactgcagtttggc

SEQ ID NO: 263531 - DNA, 627 bp, Zea mays
atcttcttcttgtcctccgcctccatgtcgcgttcccgccgttgcgtcttgaaaggggagagagagagagagaagagagagagaagagagagagagagagaggagtgggagacccgcgagaggctgccgtgtagggaccgtagactcagcgactgcgaaggagggataaggggatggccgggatcggaccgatcaggcaggactgggagccggtcgttgtgcggaagaaggcacccaccgccgccgccaagaaggatgagaaggccgtcaacgccgcgcgccgcgccggtgcggagatcgataccatgaagaagtacaacgctggtacgaacaaggcggcatccagcggtacatccctcaacaccaagcgcctcgacgacgacaccgaaaacctcgcccatgagcgagttccaagtgatctgaagaagaatctcatgcaagcaaggctcgataagaagctgacacaggcacaacttgctcagatgataaatgagaagccacaggtgattcaggagtatgaatcaggcaaggcaatccccaaccagcagataattgcaagctcgaaagggcctggaacgaagctgcgtgcagaataccagacatatacgaaacaggaactgctgtata

SEQ ID NO: 263532 - DNA, 870 bp, Zea mays
cgctctttcgtccgcccacgcgtccgcccacgcgtccggggagacccgcgagaggctgccgtgtagggaccaccgtagactcagcgtctcagctactgcgaaggagggataaggggatggccgggatcggaccgatcaggcaggactgggagccggtcgttgtgcggaagaaggcacccaccgccgccgccaagaaggatgagaaggccgtcaacgccgcgcgccgcgccggtgcggagatcgataccatgaagaagtacaacgctggtacgaacaaggcggcatccagcggtacatccctcaacaccaagcgcctcgacgacgacaccgaaaacctcgcccatgagcgagttccaagtgatctgaagaagaatctcatgcaagcaaggctcgataagaagctgacacaggcacaacttgctcagatgataaatgagaagccacaggtgattcaggagtatgaatcaggcaaggcaatccccaaccagcagatcattagcaagctcgagagggccctgggaaccaagttgcgtggcaagaaatagctttcctacgagtttgtgtcccggagcatcataatagggggaagacaaggcaagctgtctgcttatttgtctatgtttggtatctcaagtcctgcggactgtttctgttggcacaagagggaataaatgtgttcacggacctgtaatgcttgctccttgtcatatgaccttgctctaaacatttgtgatgaagctgtcaaggtaatatattttctctaaatatttaaactaaaaaaaaaaaaaaaaaaaaaaaaaaaaaaaaaaaaaaaaaaaaaaaaaaaaaaaaaaaaaagaaaaaaaacataaaatggatgaaagaataaaa

SEQ ID NO: 263533 - DNA, 507 bp, Zea mays
gagagaatgggaaacccccaaaaggcgcccttttaggaacaaggaaccttaaataaaccacaccaaaggaggaaaaggggaatggccggaatcggcccgataagacaggactgggacccggtggttgtgcgaaagaaggcacccaccgccgctgccaagaaggatgagaaggccgtcaacgccgcgcgcccgctccggcgcggagatcgagaccatgaagaagtacaacgctggtatgaacaaggcggcgtccagcggcacatccctcaacaccaagcgcctcgacgatgacacagagaacctcgcccatgagcgagttccaagtgacctgaagaaaaatctcatgcaagcaaggctcgataagaagttgacccaggcacagcttgctcaggtgttcctgtggattcattagattttagaacttcagcagttccattcatagtgtctgaaccttgatttgtcgtttgagtctatcccgacttgcttgggactaaaagtctatgctgt

SEQ ID NO: 263534 - DNA, 736 bp, Zea mays
agccacgcgtccccgctgtagggttttctggtcctggtaggcgagctggggaagacgcaaggtactgcggctgcgcgcgaggggtcgtcggacgaccgacgaggacgagcggcataggcgcgtgcatggcgctcacgaacttcatcctcacggtggtgggggtgggcgcggcggtgatgctgctgcggaaagacgtcaagcagtcggccaccgtcttccgccgcaacgtgcgccacatccgcaactggctcgaggaggagtccgccgccgccgccaaatctactgaacagtcttcagtgaaggagttggagtcccaagctgccaagaaagacgctgtgcccaaggacgacaaacattagatgatcttacaccctgtttcttgtaatgcgttggcagtttgaggtccaggattttgaattggtcctttaaaaaaaatgtatgtgttggaggacctttagttctggtggaaattttactgaataatggaagacatcttaggttcaaggttctgaaatgggatcttatatctcaatgagattatgatggtggatatctgcacatcatgtctaatctttgtcgagtcttcctgtgcttcagattaaattgtacctggaaaaaggtgtaccatcctcactctacactaatctgacaacccgttatacatgtaatccgataatggtccttgtattcagtatttgatgacataagcattgattgcgtataatctatttttatc

SEQ ID NO: 263535 - DNA, 457 bp, Zea mays
cccacgcgtccgatttggttgcacaaacagtaccattcaagagtgtcactcacggcagctggttggcttgcacaagaacacatattccgcatgtacaaaacattaaggaaggactacctctcttcctctccaattatgatgatcgaagattgtatggtatttacgaagcttcagggaatggaaagtcctgtcctgaatcaaatgcatggtcacaagttagctagggcaaaacaagctatcctgctcaggttgcaatgcgggtaaaggtgtggtgttttccgctagcagagaatcagttcagaaatgcaattatagccaattactaccagaaaattcccggtgtccctggccagaagcttcattttttcaagtttgaattggatcatgctcaaacacgtgttttgatggatattgggttttactccttctccttctcccaacagtttctggacgcccc

SEQ ID NO: 263536 - DNA, 517 bp, Zea mays
tctcgtagagagaggacggcagtcacagtcaggcggtctgtaggcacatccatggagtactactacgcctaccagcacagcaacagcaacagcagcggcggcttgagctcaaaggagaagaggccgtcgctgtagcgggggcagctcaagcggcagatcgtgaggaccatcagcaacctcgtggtgccgaggcacgccgccggcgctgggtcgagggagaaggcagatcgcggcagcggattcggcggaggacggagctacaactgatgatggatctctcggagaaggcgtgatcagagatacgattcgcagcgccaggtttgtgtgtacgtactacttgccgatgccgatgcaaaagcagcacgtagcgcatctgttcttcttagagcttagtaatagctcaattatccttgctttcccccctgttgtacaaaacaaaacttgcaggcttttttagatggttgatagagttttgttacataaatgtaatgttagcttcatagcttgtgtgaggtca

SEQ ID NO: 263537 - DNA, 1521 bp, Zea mays
tgtttcggactcgaggccaagttcatctccggacgagcataccgtgagccccaacgctccaggtggtcagcttcacttccgagcgcccctctcccgacagccgtctcctcctcaccgctgcttcatcacctagccgtcgccacccatcgcctacagcgacagccgtcttccgtcacagcggagcgcccctcagatccaagggacgctgcacgagcgcaagagcaggttgttgagaaggggaatataatcatggatatcatgcagactagtgactcttcacatcatggaattgtagaaaatagcccgtacagaattccatatgacagacatgcagaaggtggtcaacttggtgcttcatggtattttagtagaaaagaaatagaggagaattccctttcgaggagagacggcattgatctgaagaaagagtcttatcttcgcaagtcatattgcacatttctgcaggatttggggatgagacttaaagtacctcaagtgacaattgctactgctatagtgttctgtcatcggttctttcttcgtcaatcgcatgccaaaaatgacagacggacaattgcaacagtatgcatgttcttggcgggaaaagttgaagaaacacccagacctctgaaggatgtcatacttctttcatacgagatcatccacaaaaaggatcctgctgcagttcaacgaataaaacagaaggaagtatatgaacaacagaaggaacttattttactcggggaacgtgttgtgcttgtgacacttggttttgatttgaatgtgaaccatccttacaagcccttggttgaagcaataaaaatattcaaggttgctcaaaatgcacttgctcaagttgcctggaattttgtcaatgatgggctccgcacttcactttgcctgcaatttaaaccgcaccatattgcggctggtgcaatcttcctggctgcgaagtttcttaaagtcaagcttccatcagatggcgagaaggtctggtggcaagagtttgatgtaactccgtggcagctggaagaggttagcaaccagatgttggaactctatgagcagaaccgtgttcaaccaccaccatcacaaggtaatgatactgaaggcagttctgtaactgctgtgaatcaacgtgctctgggtaaagttccaggagtagttgatgaacctcctgcccatgaacataaccaagcacccaggcaatcgagccagcagaacatgtcaggccaccatggctatgaccaccctcatccggagaagcgaaactatagggtacccccaaatgaagcaagggatgacagtgctaacagcagcgagggtcccaacgtgtcagcctcgatgatggatgcaatgaaaaagataaacaaggataaggtgaaagcggccctggagaagcggagatcaaaaggtgacctttcgagaaaggttgatgtgatggatgatgatgacctcattgagagggagctggaacatggcgtggagttggcggttgaggatgagaaggtcaagcaggag

SEQ ID NO: 263538 - DNA, 706 bp, Zea mays
caagtggtggaggcctggtggtaaattgtttatcaagatcgctagagcagttaaatggactgctattatcttctgggatagatttgggtaacttcatgcaaaaatttactcatccaggaaaatttttctaccattttgaacttctggtagtcttgacttcatcacttcttatgaaccacatcattatattaatttgtatagagtccatgtcatgcttcccagcaggatcaaggtcgttgtcgtctccaggtccatcaaatgcgacaaggtcgagcgcacgcaattcagctccgaagtcatctcctttcaacagaaagatgcaagtaacaccaagtcacttgcctttgatggttgatacatttcactgtatatcattgcacgacagatccatttagtacctttttctgagttaaactacttcaaacattgctgaagactacaaccagttgttgtaattgaagcgggtcaagacatagcatttgcaaagatttagttcattctcatcactctgcaatattcgggttctctactatgtgtaatctcatatcaagattaatgagtatcgtgatcgtataattttgaatcctatcaacccatatggcaaggcaaagaaaatgacagtggacatcattctagattttacaaaatcaaaggagcaaccagacatggctgtcatgatctaagatacttcaacgtgattggatcg

SEQ ID NO: 263539 - DNA, 540 bp, Zea mays
ggtaacttcatggtttttagcattatgttcttttccttccagacttatgttctatactttgggaaacattgttctctggtattagataaattttcatggtctactgacatttgaatgcagcacaccattccccttcccaaaacccatgcatgtggtcgtgggtaaacaattgaagtcaataagattccccatcctacaattgacgagattaatgaagtccatgaacagttcatcattgccatgcgggacctctttgagaagtacaaggcgaaagctggatatcctggccttcatctaagagtcctatgacattccacaaccagactcaaagttagaattcagcaataacatggctctattactcttccttcaactggggtgtcaaactgcacctcgcaggcactcgggcggtagttgttccattatggtgatgataataagggtgtgtttggtttggcttttggctttggctttggccccctaaaagccattgtcagaccaaagggctgaatctggaaagcagctttttctaaaagccga

SEQ ID NO: 263540 - DNA, 393 bp, Zea mays
ggtgtttatgaagtcaaaaaaccacaatgctagattactttggttgaagaggaaaattagtgcttgtagagcgctcactactatcatgtgatgtgaggtgaatgtggcgatgaagagataggcttacaggaattcactgaataaaccaatacgcttgttcttgcccaagaatgccaatatgtttcttatcttattgtaatgaaaaggtcgttttgatattattgagctgttcaagtttttgaaaaggaactgtatgagcttaagaaatgattgtctaggttacattgaaacatagaactgtatggctggtacaaaccaaatgtgtggctggtacaagtttctaaagtcttgttcctggtgctgacaaattaatcaagtatttgctatttttct

SEQ ID NO: 263541 - DNA, 398 bp, Zea mays
caagatctgcggccatggtcaaagggccgctggggctggatttcgccgtcgcagcactgaactactgggtgcacaagggcattgcattcatctgcgagatcaggtgttgttttcaagtgcttcctcataaggaggttagtgagttcaagaaggccatcactgactgctcgaagttcttgtagcagtcgaacgttgcttattgaagctgcaaaaggaacgtcgatagatctagcattacgaggcacaacaacaagtggttgtaattgaagcgggtcaagacatagcatttgcaaagatttagttcattctgatcactctgcaatatttcggaatgatcagatgctcgacaaaggcatggtggtgatgggagctcctcaaggccaacaaaatggtttcaa

SEQ ID NO: 263542 - DNA, 386 bp, Zea mays
aatttttctaccattttgaacttctggtagtcttgacttcatcacttcttatgaaccacatcattatattaatttgtatagagtccatgtcatgcttcccagcaggatcaaggtcgttgtcgtctccaggtccatcaaatgcgacaaggtcgagcgcacgcaattcagctccgaagtcatctcctttcaacagagtccatttagtacctttttctgagttagactacttcaaacattgctgaagactacaaccagcctacagttgttgtaattgaagcgggtcaagacatagcatttgcagagatttagttcattctcatcactctgcaatattcgggttctctactatgtgtaatctcatatcgagattaatgagtatcgtgatc

SEQ ID NO: 263543 - DNA, 729 bp, Zea mays
ctcataattcacctatgacattgtcaggaacaactacaagctcataagaggcaactcctacaacaacagcaatgatgatgatgatgaggaaggaactttgtggaattacgtaattcttgatgagggacatctaataaaaaataataagacacaaagggcccaaagtttgtacgaaataccttgtgcccatcgcattgtgatcagtggaacacctattcaaaataacttgaaggaaatgtggactctgttcaatttctgttgcccagatgtcttgggtgataaacagcagttcaaaataaggtatgaaacggctatccttcgaggaaatgacaaaaatgctaccgctcgagagaagcacgtaggctcaaatgtagcaaaggaactaagagagcgaatcaagccatactttttgcggcgcctgaaaagtgaagttgtctttgatactggtgcatcagaagaaaaaacattagccaagaagaatgagctaattgtctggctgaagttaacaccatgccagaggaaactatatgaagcttttctaaatagtgagctggttcatttagcattgcagccaaaggcatcaccgttggctgcaatcacaaaaatattgaagaagatatgtgatcatccactgctattaactaagacatgtgctgatggtgtgttggcatgaatgggtgccatgttgaatgatcatgacattggaatggtggctaacatggccatgaa

SEQ ID NO: 263544 - DNA, 490 bp, Zea mays
ggtgtcgggtgtggaacttatcctctcccgcccttgctttgaagggtggggggctagggcgggccgcactgcgcaccgagcgggcgccgggcggacgacgaagcggcgaggcagtcactcgggagagatgtcgggcggcaggaggagggggcttgtgtggagcctccccgtggcgaggtcggatgcgctcggcaaactgggccctgccttcggcatcggcgctggctgcggcgtgggtcttggcttcggcctcatcggaggtgcaggcatcggagctggattccctggtttacaattggggtttggagctggagctggatgtggaataggaataggttttggttacggctttggaaaaggcgttgcctatgatgaaagtggaaagtattcgaacatcaggagaccggtccagagctccagaagcattgctttcgatgagaggttcgatatcatgtttgacgaactgatggagagcaccaggaaactggtc

SEQ ID NO: 263545 - DNA, 415 bp, Zea mays
cgtccgaccactattacccgttccccgggtccacctacctggcgccggtgctcggcctgctggtgggggacgccgccaatctttccgccgcggggctgcaggagctcaacgtcatcgcgtcgggcggcccaatttcggtgcgcttcggcggtaatgtcagggcggttccggcaggcagtgcagcgccaaggtgcgtggtgttcgatttcgatggcgtgccgcagttccgggacctggaggcacaccgatatgtgctcgacgtatcgccaagggcatgtctcgatagtggtgaactccagtgggattgctcctgctccacctccacctggcgcgatagccccgtcgattccgaccactggaggaaataccaagggaagctcaaaggcgtggaagattgccgtcagtgtgggtggtg

SEQ ID NO: 263546 - DNA, 478 bp, Zea mays
gaatacccgggccgaccgcactcgtccgctctggaaagcgaaagggcctctagactagtggttaaggcttcggagtagcaccacgcgaggcccgggcttgattcccctcgagggcggattttcgggcttggttaaaaaatctcctcgatgtgcctcattcgctctcgggttacgatgtcctgtgcgccattgtttcggttgacgccggtccgttagtaatttgaggccagggttcggggattttctcggctgggactattgtttcggtctcttcttaatgttataccgggagggtggtcattccctcggtcgagttattattctctggaaaaggtgcaacactttaaccatgttggtttgcttcatgtggatgtcctggtttgggtaggtgtgacttgtgagtagtaaaacttttatctgggtgttggaattgtagccatttggtacattatgaaaatatttcttgccttctagacct

SEQ ID NO: 263547 - DNA, 654 bp, Zea mays
accggtcttgaattcccgggtctgccgacgcgtacgcccacgcgtccgcgctctcccaaggttcgcatggctgtattcaatcagcatcatgttgatggccttgatttgacggtgaatccccttttgtacatgatgaagtgctatccgggtgtgccggagcagaagttgagggcacatctgggttcgtttggtgtttcgggaagccttgccctccaatctatgtacactttatcaggtggtcagaagagtagggttgcattcgcgaaaataaccttcaagaagccgcacatcattctccttgacgagccttctaaccatcttgatctggacgctgttgaggcgctcatccagggtttactcatttttcagggaggggtgctgatggtgagtcacgatgagcatcttatcactggaagcgtggacgagctttgggtggtgtcggaaggcagggtgaccccgttctcgggcactttcaaggactacaagaagatgctcaagtaacaaaaacatgtattatcgaccatagcctatatatctatatgcttgctattatgttgtattaccgtataaattttgggagtaaagcatcgaaattattataacccaaaaaaaaaaaaaaaaaaaaaaaaaagcgcacgcgtggtcggacgcgtg

SEQ ID NO: 263548 - DNA, 783 bp, Zea mays
cccacgcgtccgcccacgcgtccgcccacgcgtccggtttttgaatacggttgtcaccgatatccttcatctgcatggtagaaaactacatgcttacaaaggtgactatgacacatttgagaggacaagggaagagcaccttaagaatcagcagaaagcctttgaaacaaatgagaaggccagacagcacatgcagacattcattgacaagtttcggtacaatgcaaagagagcatcacttgttcaatcaagaatcaaggcattggagcgaatggaacatgttgatgcagttgtcagcgatccagactataaatttgaatttccaaccccagatgaccgccctgggccaccaatcatcagcttcagtgatgcctcatttggttaccctggagggcctaccttgtttaaaaatttgaattttggtatcgacctggacagccgcatagcaatggttggtcctaatggcattggcaagtccactatactgaaactaatttctggggatctgcagccaacttctggaacagtatttcgctctcccaaggttcgcatggctgtattcaatcagcatcatgttgatggccttgatttgacggtgaatccccttttgtacatgatgaagtgctatccgggtgtgccggagcagaagttgagggcacatctgggttcgtttggtgtttcgggaagccttgccctccaatctatgtacactttatcaagtggtcagaagaatatggttgcattcccgaaaataaccttcaagaagccgcacatcattcttct

SEQ ID NO: 263549 - DNA, 562 bp, Zea mays
cctgaagtggccaaagacattcattgttgtatcacacgcaagggagtttttgaatacgggggtcaccgatatccttcatctgcatggtagaaaactacatgcttacaaaggtgactatgacacatttgagaggacaagggaagagcaccttaagaatcagcagaaagcctttgaaacaaatgagaaggccagacagcacatgcagacattcattgacaagtttcggtacaatgcaaagagagcatcacttgttcaatcaagaatcaaggcattggagcgaatggaacatgttgatgcagttgtcagcgatccagactataaatttgaatttccgaccccagatgaccgccctgggccaccaatcatcagcttcagtgatgcctcatttggttaccctggagggcctaccttgtttaaaaatttgaattttggtatcgactggacagccgcatagcaatggtggtcctaatggcattggcaagtcactatactgaactattctgggtctgagcattctgaaagtatcgtctccagtcgatgcgatcacacacagtgaggctga

SEQ ID NO: 263550 - DNA, 1221 bp, Zea mays
gttctttcctgcgatctggaagattcttcagctaaagagacccctgaagcccataaaaaagcatggaaattgctgaagggtgcagatggtgtactcgttcctggaggattcggagataggggagtccagggcaaaattcttgccgcaaaatatgcacgcgagaacaatgttccttatcttggcatttgcttgggaatgcaaattgcagtgattgagtttgcccgttcggtgatgaaactacgaggtgccaatagcacggaattcgatccagctacaacatcaccctgtgtcatcttcatgccagagggctcaaaaacccagatgggagctacaatgaggcttggatcgaggagaacctatttccatgtcagtggctgcaaatctgcaaagctgtatgccaatgccagctctgtagatgaaagacatcgccacagatacgaggtgaaccctgatatggtcccagacttcgagagggccgggcttcagttcgtgggcaaagatgagagtgggaaacgcatggggatcgttgagcttccctctcacaagttcttcatcggtgcacagttccatcctgaattcaagtcgagaccagggaagccatctccgcttttcttagggctgatagccgcggcgtctgggcagctagaaccattgcttcagcgcagcaacccgacaacgaaagcatgttcgatcagtaaagtcccgaaactgaaactgtaccccactgggcctgtgaataatccactgaacagcttggtgaacgggtactacccaaatggcactgggatccacacctagaagcgtagcgcttagcgatggtttggttggtatttgctgctatggtttttttgcttgtacccctcctttttcatgtgttcctttttttcagtttgttatttgtctctgatcaactgagagaagagaaggctaagattcagcaagcccccagctccagcgacacatggttccgacatttttaacgaggaacgccttccagtccgttgaagcgagctagccatagggtggtgaggtctagtgtgatgttgttgttgtttttttctctttcctttttttttggcctggaactaaggcgcgaagtgttttgagtagcgctagtaaaccctggaagaagttatctaacctattggtccattatggaagaccttatttaaggcctgaatacccaaatgcttggccatcattgctttgttccccccaacc

SEQ ID NO: 263551 - DNA, 381 bp, Zea mays
tgttcacgtacagggctcaaaaacccaaatggcggcctcgatgaggcttgggtcggggaggacctatttccatgtccgtggctgcaaatctgcgaagctgtaagaaaacactagccctcatgcttccttcagggtagcgcatgattgtacacgtacatttgatgcggtgaaacataaccgtcgtgagtatgcatcaggtacggcaacgccagctctgtagatgaaagacatcgccacagacacgaggttccgtgatctaatcgagctgtccgccataccgacttataatagcgcatgccactggtaatctctgttggctcagagaagaagagagctcttcgatctgcttttctttgaggtgacccctcacatggtcccaga

SEQ ID NO: 263552 - DNA, 821 bp, Zea mays
  unsure (1)..(821): unsure at all n locations
cggnccggaaaacccgggccgaccgcacgcgtccgcccatggcagcgaccagtgagttcaaatgtttctgcttctacatctactgaggccagtgggagcgaccagaaagactggctggagggaatggtcacagaatatcttgtcgcgacatttgctgattacttcggtgacgttaaaatgtatattgaagaaagaccatttcgaagatttgtggaggcttgcatagaagaaacaatcgtggtctatgttgaccatctcctttcccagaaaaactacataaaagaagaaacgatagagaggatgaggttagatgaagaggtgcttatggatttcttcagggaacacatcaacgtgacaaaagttgaaagcagagtgcggattctggcagatatgagggagctagcttcagctgagagtttggatagctttactctcatttacactaatatactggaacatcaacctgattgcccgcctgaggttgtcgagaagcttgtggcaatgcgggaaggcattccaaaaaaggaagccaaggaggttgtacaagaatgcaaagagatatacgagaactcgcttgtggatggcaaccctcagaagtccggttttgtgtttggcaaattgaagtgcttgacagcaaagaaaggcatatggaggaagcttgggcagtaagtgtggactcgagcagagtggacaaaagtaccacctatgcaaaaactgtacgtttcacttctctatgatcattnctttgttcttttgtcgatgctactggtgggggttcacgtttagactatcagtgtgtactcagcttgaggagcaaaaat

SEQ ID NO: 263553 - DNA, 354 bp, Zea mays
ctataatctgcgttgctatgaactttcatcagagctaagtagcagtacattggaggcgcttccacacaactatgctgaacaggttaattttgaagacacctgcaaaggatttcttgaggttgccaaggaggccgtcctccaaactgttagtgttatttttgaagacccaggtgtgcaggatctactcgtgaagctttaccagaaagactggctggagggaatggtcacagaatatcttgtcgcaacatttgctgattactttggtgatgttacaatgtatattgaagaaagatcatttcgaagatctgtggacgcttgcatagaggaccacttgtggtctatgtcgacatctcc

SEQ ID NO: 263554 - DNA, 920 bp, Zea mays
actaccacgcgtccgcccacgcgtccgcccacgcgtccgtccacgcgtccctcgctctcaagcttcaaaatcccactagcgaaaggaaaacgggagaagctaggaagcagcagccgcggcatttcttccttgagcgttcgccttcggctgctcaacgcgtgcttggtttcaggagagccttggtggcatctctgtttcatggccgagatctgctgtgaggcggcggcggcggggtcggaccagaagggggagtgcgccggcagccgcgcggcgcggcggcggaggatggagattcggcggctcagggtggtggccgaggaggcgtccgccaagaggcggaggctggaggcggatgaggaagacgcggttggggggcgagcgccgaggtacggcgtgacgtcggtctgcgggcggcggagagacatggaggacgcggtgaccgcccgtccggagttcatcaacggccaccacttcttcggggtgttcgacggccacggctgctcacatgtggcgacgtcgtgcggggagcggatgcaccagattgtggccgaggaggcgacagctgccgcaggctcgtcggtttcggacgagaccgcgcggtggaggggtgtcatggagaagagctacgcgaggatggacgccgaggccgtcgtctccagggagaccgccggcccggcgcccacctgccgttgcgagatgcagcttcccaagtgcgaccacgtgggctccactgccgtcgtggccgtggtggggcctcgccacctcgtcgtcgccaactgcggcgactcccgcgcggtcctctccagcggaggcgccacgatccctctctcagctgaccacaagcctgaccgccccgacgagctcgaacggatccacacaacatacgacctcgcgacacggggatgtgctggacacgccac

SEQ ID NO: 263555 - DNA, 477 bp, Zea mays
accggtccggaattcccgggccagacgtatcggccacgccgtccgagtctgcgctagaatctacacttcatatgtaggatatgcctgctggctgatagagatgggtgggcatcggtgacccgcccgtcccggagttcatcaacggccaccacttcttcggggtgttcgacggccacggctgctcacacgtggcgacgtcgtgcggggagcggatgcaccagattgtggccgaggaggcgacagctgccgcaggctcgtcggtttcggacgaggcggcgcggtggaggggtgtcatggagaagagctacgcgaggatggacgccgaggccgacgcttctagtgatactgcctgaccagtgcgcatctgccactacgagatgccagatgcaaagctcaaacacacgggctccactgctgtcgacgccgttgcagtgcctagccgtctggtcggctgcaaatgcggcgactgcgctgcgg

SEQ ID NO: 263556 - DNA, 1331 bp, Zea mays
ttctagatcgcgagcggtcttcctttgtttgtttttttttttttttttttttttttttttttattaatattaattttacaaggtaaaatactagtagaatattgtccagatacacaagtgactgggtacatagttaatatcgtagcaggtatacggtaactttctagggccaataaaccaagcatacaatacaattatgtttcacttatgaaggaaagcaacggtcgttatgcaagaactatccacactagggtaactttggacgtggtccaggtagctgaacaccgcagcttcactggccggcaatccttctgagcctgagcccacagcaccaagcttcctttggttgaagttctctacctcctgcaccaactcatccttggttctgctgcatgatgtgatgaccaatataccaccacgggaaaccaagctatcaacggactgccaatacatcattctcttcacaggtccatcaggatggagcccaatcgcatcaagagtcccttcatccatgacaagttcaaatcttctctccaacttcgactccaaaacatcatcaaccaagaaattaatgtgctcaaacccatcaccgagtgcaaggctacgagcaagctcaattgccctttcactatagtcaatcccagtcagatcagaaaacccctgcttcgcaagctgctgcaagagtctgccactcccagtcccaatgtcaagtagactgcagctgggtaaatctctacttgagcacaaatttttggtccaacctacgcggatatccatgatatcagtgccaaaccagtcatcagcgtggctgcgttcatggaaatttgcaagatcctcagcgtaagcaccatcctgaaaattctgcaagcccagcaagggaggctcaacgtagctggagtcatggacatccttgtcgaagctgaagtcggaggaggggtggacggcaaccgtcgtggagggcgcggcaacagaggaggcggaggaggaggctaggaggacctcggcggtgtcggagtaacgctgatcgtcgtcgagggtgctgccgtagtcgctcttgatcgaccacgagtccgcggccaccgaccggtcgtcgtccgacgccatctctcctgggggcgcgacggggacccaagccccgccgctgaccatcctggaagggaagatctccgggtcctctggcggccatcgaatccctgccatggctctcgccgtcgcctcgccggaaccctagtcttctcgtgccgctcgcgtgctggttgtgccggaaggaggggaacgacgggtgcgaggcggtcggcgtctcagcggaggggttggcctacgtgttggtg

SEQ ID NO: 263557 - DNA, 302 bp, Zea mays
cggtcttgaattcccgggcagaaggtctgaactgttcagagttccttgtttgttcactaaccattctttgtcaatcttctttgaaaaggagcttggcctcataggcttccatttgtgagtaaatctgcgcacttttaggagaactcggagttcgtcctagatgcaaaagtacctggctggttatggagaggtcagctgaaggcttgagggttgactttggttttgatatggcaatcactggtgggtgaagattggcacccgattaatttgaagcttgaatcgtccttaattacaaaactctt

SEQ ID NO: 263558 - DNA, 650 bp, Zea mays
gtctaaatgcacattcaccggacataaaacactggagaataagcacaagccattagtgctgaaggaattgagaaaactatggaacgtggaagaacaagatcttccatgggaagtggcggactattcaccttcgaatacattactagtggatgattcccctcccaaggctctgcgcaatcctccgcatactgccatttttcctcactcctacagttacttaaactggaatgacgattcgctgggtcccaatggagaccttcgtgtgtatctgcagaacctagccgctgcagataatgttcagcattttgttcgtgataatccgtttggtcaacctttcattactgagagcgatccgcattggaacttctatgctcagattgctgatagagggcgtgcacccttgacatgttgtgcttgaactcccaagggtcgtgcttttttctgggagttctgtggttatccatgatcaaaagatcatgatcagtatacagtgatcttctctgagtagtttgcttgtatccctgtactgaagattacagagtttctgctatgggtttaaattgcaggctctacgaaaggtatcagaccaaatgaatgaattgtctgacattatctcagtctcaaactgtttgcagccatgcttttttttc

SEQ ID NO: 263559 - DNA, 531 bp, Zea mays
acgcccttgcgtttgcccacgcgtccggctaacactcctgtatccgagctactactcctagtcctagtacaggctacagaggcagagcgagcaaaactgcctgtacatagcaaccatcaacggcgaccgatccaagtagtgagcattagtggatctactacgtacatatatagaaggaaacagctgcagctctctctctctcgctgtttcctgcgtgatctgcttgtgtagctactagctagctagcggagcggaacccatgggctgcgaggaggaagagaggctgctgttcccgtccttcgtctttcccgagagcttcgaggaggccgccacccccggctccggtggtgagcagaagaaggctcggcagcgtcggaggcgcaagccgcggccggcggaggttggcgagggcgcggacgagcaggccaggaagcggcggctgagcgacgaccaggcgcggtttctggagctcagcttcaagaaggagcgcatgcttgagaccccccgcaaggtgcaactggacgtcgagct

SEQ ID NO: 263560 - DNA, 1228 bp, Zea mays
cccacgcgtccgcggacgcgtgggcctcgctcaccaagccaacagccaaatcgaattcgccgacgactctctttattcctcccgctcgccgctgcggccgccgccgcctgagggcaagaagcgagcgagcgcaccgcggatctccctcccggccccgccgcgcgcaccggtgaagacgacgagcccctcgtgaatggtgggagcccgcgcgacgtccgtcgcctcgcagccgcagccggaggaggcctccttccgcggcttcggttactgcatgcagggctggtaccaccgctgcatcggtctcgacccctgaaccccgccgccacttgcttctttgatttgatttcattcggttcgttcggtgcccctcccgtcctggatctgttgcgcgagagcgcggcagcgcgcgagattcgcccccttctcttctcataggaagcaggaagcaagccgatcgctcgctgagcgccgccgccgatggccgtcgcggtgccgatgaagctctggagggtggagacccgcggcaaggccgccgccgcggggcccgacgaccccctgcgcgtcctggtgacggtgaccgtcctcgggagcgccggcccgttgcgcttcatcgtcctcgagggcgacacggtcgccgcgctcatccgcggcgcgcttcgctgctacgcccgcgagggccgcatgccgctgctcggcaccgacccggccggcttcgtcctctccaccgccaacggcggatccggcgcactcggagaagacgagaggatcagcttcaacgggtgccggaacttcctgctttggcagaaggctgcggctcagggtgccgccgccaaccacgccgggtccgatgctctgacggcaaccctgagccccggcaggaagggcagcggtggattcaaggctactgatccgagccatggcaggaaaggcggcggcggctggaaggctggactgaacaagttcctcctcagcttcagcatcaaggtgtgatccatgcgtggacgagagaaggggggcgtttcttggtgtcgaggcaccgcgcaacaataaaaatgcattgcattggtttgtctgttttttcaattaatcaggattgtttgttgccgccagtgagatggcgaagtgtaattcgtcatgcgaatccgagtcgagtcgaggcaatgtgattcatcgtatgtttgagtcgaaaaaaaaacccaaaaaaaaaaaagggcggccgctcgcgatc

SEQ ID NO: 263561 - DNA, 433 bp, Zea mays
cctggatctgttgcccgagagcgcgagagcgccgaggattcgcccccttcgctcctcctcagcttcggcatcaaggtgtgatccatgcgtggacgagagaaggggggcgtttcttggtgtcgaggcaccgcgcaacaataaaaatgcattgcattggtttgtctgttttttcaattaatcaggattgtttgttgccgccagtgagatggcgaagtgtaattcgtcatgcgaatccgagtcgagtcgaggcaaagtgtgattcatcgtatgtttgagtcgagtcgtgtcagttgcttagtttatttggctgttctatttccaaatcatcggatcgggttcctctggtatcttgttaaaggttcttcattcaataatacatttgtgcgtgctggtctaaaaaaaaaaaaaaaaaaactaagaataaataatcatc

SEQ ID NO: 263562 - DNA, 1381 bp, Zea mays
acgccctctctctcctctctctctctcaaaccgaaaagaaaggaggaaagtgggatagctcaatctcttcttccttcgtcattcctctcccgtaggttctctctccctccctccctccctccctccctcagcacacataaactcgagatacacatatatatcagtaggagaggatggatgtgcgaacctagcctgctgcctttgtagctgcaaattaaattgagctgtacctgttggtcttcctcctcgctcttcttggttctcgctggttgccgggagctgggatcgaaagtactgctgttgttcgcacggcgaggcggcggcggagaccggtcagaaggaatgtcttcggcccaaatcgcgccggcagatcatgtgtgctatgtgcactgcagcttctgcaacacagttctcgcggtgagtgtcccggggaatagcatgctcaacatcgtgacagttcggtgtggacactgcgcaaatctactgtcagtgaacctgagagcactgatgcactcactcccagaacaagatcatcagctccaggagaacatcaaggtccatggcatcaacggcactttgcacgatgatcatcagtactgcggccatttggatcagctcggttcttcttcgtcgtcaaggttccggcggcttccagtgatgtgttcgccacagaacgagcagcacctgctgcaggagcaaacacttaacaacaatgctcgtcctccagagaagaggcagcgggttccgtcggcgtataacagattcatcaaggaagagatacgcaggatcaaagcgaacaaccccgacattaaccacagggaagccttcagcacggcagccaagaattgggcacattatccaaacatccatttcggtttagacgactccgggcgagagggcaagaagaagctcgtggatcatgaggcggcggcgtctgtcgtcgcagtcgcagcagcaccgactgctgctaaaaagatccagggtttctactgatggtagcagatagatgtgtagattgattgatacatcatcgaccgggtggaagaattgataccacaaaaactgctttatatatatgtactgtgagtaaacagttaaaattaaacttgtgagatgtaccgtacatatgaagagctagctagtagtgagtcataaagtgggaaagtgaagcatatatagtcgtaaaaacaatcacatgaattgctattaggcaccatatatatgcacttaattatattggttgaggagacctaataaatcatttgacctaccatgcatataattgcagtgcgaagcaccatatatatatatgcagtggcagcatgcagaaaccaaaaaagtgtataggtacagtaagtaccagcagctaggctcagggctg

SEQ ID NO: 263563 - DNA, 764 bp, Zea mays
gcactgcacgtatccggtctcggtaattctccgtggtcgactccacgtcgtctcgtgtcccggggtaacaagctatgtctcagtcatggtgaccatgttcggtgtgtggcacctgcacgagaatctacgtggtcagtgtaatcttagagcacgtcatgcatctcatgtccctgaacatagatcatgctccagtgagaacatcagtggtccatggcatcgttgcgtgagcatcatcagtgcggcggcggccaccatctggagctgggctcttcgtcgtcctcaaggttccggctgccgatgatgatgtcgtacgcgccgcagaacgagcacttgctgcaggaacagacactgaacaacgctcgtccggctcctgagaagaggcagcgggttccgtcggcgtataacagattcatcaaggaagagattcgcaggatcaaggcgaacaaccccgacattagccacagggaagccttcagcacagcagccaagaactgggcacattatccgaacatccatttcggcttaaactccggccgagagggtggcaagaataagctcgtggacgaggctgtcgcggcggtggcggtggctccgaagaagatccaaggtttctactgatcgatgccggtcgatcgagggatcagcgctcgtcgtcatcaactggccggccgggtgtggaagaattaataataccacacaacatataaatgtactgtgatgagtaaattaaagaagtatagctgggaattgagggagagagagat

SEQ ID NO: 263564 - DNA, 593 bp, Zea mays
tcgtgggtcgatacaagcctctacactgacgtcctgactacgcgtccgcagttctcactctagcgctctctctccctcgctctctctctacacatatatatcagtataggatggatgtgcaaacctagcttgctgctgcctttctagctgagaactgagctgtagctgttggtacggttttcctcctcgctcttcttctcctccttcttgctgctggttgccgggagctgagatcgatcgagagcactgctgttgttcgtgcggccggcggcggcggcgcgcggcagtgggcggagacgacgaccgatcggtcagaaggaatgtcgtcggcccaaatcgtgccggcggaccatgtgtgctatgtgcactgcaacttctgcaacacagttctcgcggtgagtgtcccggggaacagcatgctcagcatggtgacagttcggtgtgggcactgcacaaatctactgtcagtgaatctgagagcactcatgcactcagtcccagaacaggatcagcttcagcaggaagacatcagggtccatggcacgttgcgtgagcatcatcagtgtggcggcgggcaccatctggagctgggc

SEQ ID NO: 263565 - DNA, 529 bp, Zea mays
aattaccgggtcggccgacgcgtccgcacgacacgaaccaggcaaccagctgccgattgaggaacctagcggaacactgttcaggtgacggcggcgcactaccggtggcggatacggcggcgtcgtccccctcagcccctcctccatccccggcgcggccgcgccagcagccggcctgcagatttatggacggatctgattgaataaaccgtgaaggagatgccctggaatagattcatgcccttcttttcaaaatgttgtacttctaccgttcagacatcttcatcatattcatctttttcctcgtccttctccccgatacaaccatggttatttgtgggtcttggcaaccctggtgagaagtatcaatccaccaggcacaacgtgggttttgatatgatagatgcatttgcgcaatcccagggtatacccttgactacacattacttcaaagcactctttggtgaaggtttggcgccatttacgcaccctgagaaagaatatgactcctcatatttggtgatacatg

SEQ ID NO: 263566 - DNA, 986 bp, Zea mays
ccagcaggtaccggtccgtattccttttcttacccacgcgttctttaaaccgtagttaaagcagtgacgagcgtggactacatactcctaactcagagaggaccagtagctccttggaaactaagttgaaggagaaagacagagatgattcaaccgatacggatctgttagtatctcccagcactagaacccctgtttctaagcgaaataagggtgctaagagatctcatattgatattttgagcagtgttccaaagaagtctgctgatgcagagagtactaagagaactgttgagccgagaagtctaaatgggtcactcaaaagtcaaaagtcaaaaccgatttctgggttagtacagtgctcaacacaggactcaagcggtaccgacttggtaggacaccgaataaaagtttggtggcctttggataagcgattttatgaaggtactgttcaatcatacgattcatccaagaaaaaacatacggtgctatatgatgacggagatgtctgacgtgcttatattggctaaggagaagtggatattgattgaaagtaatgattcatcagtgaagaagcaaaagaaggatcttgggacaaaccaaggaagagcatgggagggaactagcagcaacaagtctccgcctagccaaccaaagtcaaaaaagaggtccttgcctccaaagaagaaagggcaacccaatgataagcgaagaaagactgcagaaagaaacaattctgtagaagaggagggtattggagctggtgacaatgattcagattcatccagtcctcttgcgcactcagatgttgacaaagatgtaaactctgttggccacatggaggaagtaatagttagcttagctgagaaagagaagaccaggaaggactccaaaggcatggaaatgaaagagaagggaaggaaggactccaaagacgtgaaaataaaagagaaggctgggaaagagtccaaagacgtggaaatgaa

SEQ ID NO: 263567 - DNA, 1967 bp, Zea mays
tccacatcgtcttcgcttccactccccacgttccccgcctgcttcctccaggccccggccagatccgcgcgcccgcggggaagagggcctcctctcctccctcctcccttggctcgcgctctggtcgaggaggcggaggccggtgccggcgggcgggcggggaggtaggtagcagcttgcggttgcgggagggaagctgcgcgcgctaggctgccatggcggtggagaagacgctgcccggcgcgagtgcggggaggaccgtgctggtcacgggcggggcgggctacatcggtagccacgccgtgctgcagctcctcctcgcgggcttccgcgccgtcgtcatcgacaacctcaacaactcctccgagctggccgtccgccgcgtcgccgcgctcgcgggggaccactcccgcaacctctctttccacaagattgatctccgtgacaagggagcactggaaatggtttttgcttctacaagatttgaagctgtcattcacttcgctggattgaaagctgtgggtgaaagcgtacagaagccattactttattatgacaacaacgtcattggcacgataaatcttctagaagttatgtctgttcacggttgcaagaagttggtgttctcatcatcagctgcagtttatggatcacccaaaaactcaccctgcacagaaaattttcctcttactccaaacaatccatatggcaaaacaaagctcgttgttgaagatatttgccgggatatctaccgttcagatcctgaatggaagatcattttacttaggtacttcaatccagttggtgctcatcctagtggatatcttggcgaggacccacgaggaattcccaacaatcttatgccctatgttcagcaagttgcggttggtaggaggccagctctaacagttttaggaaatgactatgcaacaagagatgggactggggtccgagattacatccatgtggttgaccttgctgacggacatattgctgcattgcagaagctttttgagaactctagcatagggtgtgaagcgtacaaccttggaaccggaagaggtacatctgtgctggagattgttaaagcatttgagaaggcttctgggaagaaaatacctctgatttttggtgaaagacgcccaggtgatgcagagattctgttttcagagactactaaagcagagagggagcttaactggaaagcaaaatacggtattgaagagatgtgccgcgaccaatggaactgggccagcaagaacccttatggctatggatcacctgactctatcaagcagaatggtcaccaaacaaacggatccgctgactcctccaagcagaatggccaccgcacaaacggttcaactgactcacccaagcggaacggccaccatgcgtatgggtctgctgactcacccaagcgcaacgggcactgcgtttttggatcatcagacctcaagccgaatggtaatggccacctgcgctgagcagaactgtttggcctgtgagctccctgtacattcggttgcgatgtgagctccctgcacgttcggtcgaggtctatcgtgaacccactatccgagattgatgtggatcattgggttgacaggtcatacagtatagagccggtggcagaggaattcctgtttgctgtgggtaaagcttatcttctgctttcgtgttttttcttgcttctttcgattatggtgtaggaatgtggtcataatgtattagctgattatcctttccctgctaattggactttattacgcttcattaagtttggctgattactgtttaacggggaaaagttgcacctgtgtacgattatttatttgtacctgtaatatttatggagaactagcctcgccgcaaatagccctgatgaattcagctgcagtttattcccagagtgggctgttgtttaatgtgaatgtacccatgatgcctctgaaaacccccagcag

SEQ ID NO: 263568 - DNA, 1081 bp, Zea mays
ctagctagctagtggttggacttcttttaccagatggaatacacatactacgtacacaagcatttcaacgaactaaaacccgcgatctgaagcgactagtcgaaggcggcggcggcgatggggagcgacctggagacggagaagaagaagaccccggtggcgctgatgcccatcgcgaagcccctcgctggaaagaagctctgcaagcggaccctcaagctcgtgcgacgagcctctgaggccaagtgcctcaagcgcggagtcaaagaggtagtcaagagcattcgccgcgggaacaaagggttgtgtgtgattgctggaaatatttctcctattgatgtgattacacacgttccaatactatgtgaggaatctaatgttccttacatatatgttccatcaaaagaggatcttgcgaccgcaggaaccactaagaggccaacttgttgcgtcctggttctgaccaaaccaaacaagggggagctcagtgacgaggtgaaggataaactgaagtcagactatgaccaagttgtaacggaagttgctgaggctacatctgcaatgttctaaggaccattcagggaccacatcatctgagaatcatgcagctacattcttggcgtactatgtaacctgatccctgtcagtctgccctgcttgcgtgaaccgcaccagtatgctttgcatggtggctggagggatatgactatatgagtttacctatatattatggactatccttgttggcgtattgttttattaacgattatatttagccagttataatccgttaggtgagcagattgtttgcttgggttaccagatcttggtagccagtgggtgcggttccaggtcttctgttgatgacttatcacaagatgtgcttgtgattcccgtgtatgaggaattgcgacatcgtagaggcgtaggctatgttcagtagatcgtgccttgcctcgtgtataataatactgttttgtatcgtagtcaatattgcttacagagatgatgatgagtaagcttgtggacataagcagtgccttatatcacggttaggttttggcctttggttcgttgggtt

SEQ ID NO: 263569 - DNA, 598 bp, Zea mays
tataatgagtcatattatgataccgcgattccacatgtctattgctgctgcggcgatggggagcgacactgaaacggttaataaggcctcggtggcgctgatatcaatcgcgaaacccctcgctgggaagacgctctgcatgcgggccctcaagctcgtgcgactagccgccgaggcgaaatgcctcaagcgcgtcgtcaaataggtagtcaagaccattcgtcgcgggaacataggattgtgtgtgatctctggaaatatttctcctattgatgtcattacacatgttccgataatatttgaggaagctaatgttccttacgtatatgttccatcaaatgacgatcttgcgacagcacgaaacactatgaggccgacttgttgcgtcttggttctgaccaaaccaaacaagggggagctcagtggagaggtgaaggataaactgaagtcggactatgaccaagttgtaacggaagtcgctgaggctacatctgcaatgttctgaggaccacattatctgagaatccggcaattccctgtgcacgtctttcttggtgtagtatcctgcccagcttctgtgaaccgaaccaatatgttt

SEQ ID NO: 263570 - DNA, 566 bp, Zea mays
ctcgagccggattctcagataatgtggtcctcagaacattgcagatgtagcctcagcgacttccgttacaacttggtgtagtatcctgcccagcttctgtgaaccgaaccaatatgttttgcacggtggctggagcgagatatgactatgagtttacctatatgctatggaccatccttgttggcggcatatgattctaccagtgattagatctagccaattacaatcagttctgtgagcagactgtttccttgggttgccagatctcggtagccagtgggtgcggttccaggtcttctgttgatgacttatcacaagatgtgcttgtgattcccgtgtatgaggaattgcgacatcgtagaggcgtaggctatgttcagtagatcgtgccttgcctcgtgtataataatactgttttgtatcgtagacaatattgtttacagagatgatgatgagtaagctgctggacatagccagtgccttataaaaaaaaaaaaaaaataaatataattattttatatatttttttttattatataataattatattattaattaattaattt

SEQ ID NO: 263571 - DNA, 1383 bp, Zea mays
gttgaggcttccaaggaggttacggctgaagaaaagtcagcagcttcaacagaaaagagaaaacttgaagatgaagatattgcaaacactgaaccaatcaagcgacaacgtcggtggactgcagacgttgccaaagttccagagagacaagcattgagtcaaactggtcctgaaactcctaaggatatttttcagcctgctttcaaacgatcttttgggaggtctgattcaacagcaagtgtagattctcctaaggaacggattgtaccacctgcagagaaacctgccacaacttctttgagaattgaccgatttgtacgcccatttaccctgaaagctgtgcaggagcttcttggtaaaactggatctgtacaagacttctggatggaccatatcaagactcattgctatgtgacattttcttcggtggatgaagcaatggctactagggatgctgtttacaacctacagtggcccccaaataacggcaataagttggtcgccgaatttgttgatcctcaggaagtgaagctcaaggttgacccccctcccccgccagctgctcctgttagcccagctgctatcacaagggcacctcctcttcaacagactcaaagtgtgccacgccaggctgctacaccaaaagagcaactgccacctccaccaccgcctccccttgctaagccacctatggctgacccggcggctatagcgagagagaggcttccacccactccgaagaagccagagcctcctgttgtgacacttgatgatctcttcaggaagacacagtcctctccaaggatctactatctgcctttatcagaagaggaggtggcagccaagctcgccacacagggcaaaggaaaaaaggagtaggaggtgttggcttccattttcggctatctcggagtttgttgtggaacatggcgtgcggtggtcacagcatcagacaggtgctactgctgcagaccatttgaaataaccggcggccgtgactgccgcggcggaagagtagtcgtagggctgtttctgtggaaaagggactagtgtaggagcagcagcagcggcttgtatttcttaaagagattattagttttggttgggtctccgactgcagtgtgtgctaaagttatttgagctgcatgaggttttgtttgggtactctagtattgaccccaatctatatgtgttgaggtgtaaattagtttaagttaccaccctaatccccctcaatagatgtgggttgagttaaatattagagtacctaaactaggcctgaagcgtctgaagaacttggtttaatctatcctgccaggtactgttaaaaggccccagttttagtgttgagtctatgaagaatattgttgggattccttgtct

SEQ ID NO: 263572 - DNA, 526 bp, Zea mays
tgcctttatcagtagaggaggtggcagccaagctcgccgcacagggcaaaggaaaaaaggagtaggaggtgttggcttccattttcggctatctcggagtttgttgtggaacatggcgtgcggtggtcacagcatcagacaggtgctactgctgcagaccatttgaaataaccggcggccgtgactgccgcggcggaagagtagtcgtagggctagtgtaggagcagcagcagcggcttgtatttcttaaagagattattagttttggttgggtctccgactgcagtgtgtgctaaagttatttgagctgcatgaggttttgtttgggtactctagtattgatcccaatctatatgtgttgaggtgtaaattagtttaagttacatcctaatccaccttaatagatgtgggttgagttaaatattagagtacccaaactaggcctgaagcgtctgaagaaacttggtttaatctatgctgtcaggtactgttaaaaggcacccgtcttagtgttgagtctatgaag

SEQ ID NO: 263573 - DNA, 360 bp, Zea mays
ctttatcagaagaggaggtggcagccaagctcgccgcacagggcaaaggaaaaaagggataggaggtgttagcttccattttcggctagcttggagtttgttgcggaacatggcgtgcggtggtcacagcagctgacacgtgctactgctgtggcgaaagagttgtagccttgtagggctgttctgtggaaaaaggacactagtgtaggagcagcagcttgtatttcctaatgagactgttagttttgattgggtctccgagtagagtgtgtgctgaagttatttgatctacatgaagtgttcatgtacttagtttaatttatgctgccaggtactgtaaaactgaaagatactggttct

SEQ ID NO: 263574 - DNA, 557 bp, Zea mays
cgcgttggctggcgtcggtccgccgcccgcactaccacgcgaccacgcccccgctcctctcgtctctatcttcgcctcttccatcgcaggattcagcggccatgggcggcggcaacgcccagaagtccaagatggcgcgcgagaggaacgccgagaagaacaagggcggcaaaggcagccagctggaggccaacaagaaggccatgaacatccagtgcaagatctgcatgcagaccttcatctgcaccacctccgaggccaagtgcaaagaacatgcggaggcgaggcatcccaagaacgacctctaccagtgcttcccccacctcaagaactagtaagcagcagaagcatatgctctgctcagctaaaagacaagtactacatatatatatatacgctgtgtgtcaattaatgggttctaggctgctgctgatgcggctgcttcgttcgtgttgccccgtctgattatgtactgtaacccttggctgtcagcctgctgtgctaaaaaccattggttctgtgtggattcatgctgcctgcctgtgctgtgcttgctc

SEQ ID NO: 263575 - DNA, 288 bp, Zea mays
cgcccccgctcctctcgtctctatcttcgcctcttccatcgcaggattcagcggccatgggcggcggcaacgcacagaagtccaagatggcgcgcgagaggaacgccgagaagaacaagggcggcaaaggcagccagctggaggccaacaagaaggccatgaacatccaggtatcttacctcctcttgcttgccctgtgttcctgtcgagattttgggggttttcccagattcgcttgggtttcaggctactccgtctggattcggcagatccagccacggcgcgatt

SEQ ID NO: 263576 - DNA, 696 bp, Zea mays
taatcgtcacgatacttcagatgataaaagattgttggaaatagctaacactacacgcatgagcgatccaccttcagccgtccagcttaaatctccgacaggctcttcttctggagatgggtttgatgttatgactctagccacagatcagcctgctggaccagtttcagcaacgcctaaggtacctaatgccagagatgatgataagttcaatgatggcatgtacgaagacttgtgtgtagatgatgctgaccttacattcgaggattatgaagagctatttggtacctctcacattcgaacagaggaactctttgatgacgctggaattgacggttacttcgaattgaaagagacaccacctttttatttcaacgagcagcccaaagctatgcagatagaatgtggcaacgtggtatcagctgattgtgcgatgtcaaacccaggggcaagggctgattccagcctttgtattcccgtcaggcaggtcagatctagtatatcccactccttatctggtctgactggtgagagcagcgctggagatcaccacgactgtggggtgtcaccaatgctcctcatgggtgagccaccctggcattctcctggtggtccagaaggctcagtcgctggaggcagcagagatatgcgctctcacacggtacaaggagaagaagaagaggagaaagtttgaca

SEQ ID NO: 263577 - DNA, 865 bp, Zea mays
tctcacgcgtccgccaacgacacaaatccgaaaccctcgcatcggcctgtacctagccgccgtcgccacagagccctcatctcgtccgtcctcggcggcctccgcggagcagccgtcgctggagcctggagaccaaagatccggccagatctgatgtcaggagggactggctcatccgggcgcgcggccccgcggtacgccccggatgacccgacgctgcccaagccgtggcgcggcctcgtcgacggcaccaccggctacctctactactggaacccggagacgaacgtcacgcagtacgagcggcctgtgccccccgagagccagcttctcccgcctccgccttcgttgccacccccgcctccacggagccgcgaccgccgcgacaggtccagatcccgatcccgcaccccgccccggcgcgaccacagggaccgcgaccgtgaccgtgacaggcgccacgacgagcacgcgtcctccaagacggcgtcttcccaccaccatcccgctcccgtagccgtcgccgacgatcctttcaccgaggcataccgccgtcgccatgagatcaccgtcacggggataatgtgccgactccaataacttcatttgaggctggtggcttcccgtcagaaattctgaaggagatacaacgtgctggattcgcaagcccaacacctatccaagcccagtcatggccaattgctgtgcaaaatcaagatggtgtagctattgcaaagactggatcaggcaaaactcttgggtatctacttcctggggttatgcattataagcgcctgcagaacagcactagggatggcccaacaaggcttggtttggccccacaaggggacttgcaacacagaat

SEQ ID NO: 263578 - DNA, 516 bp, Zea mays
tcttcgcgtccggacccgtggaggtctggcccaggctgtcaacgtccatccatatattggatcgggtggcagctgctgcaaggggcctcgtcgatcaactatccatgcctgagcgcctccacggactctgttagagccttttctacttcgccttgtgtccgcaagtctacacattgtggacacattttattcgtatggccttacattgtcctcatgcattggctgtatttgcgcaatgtagagttaaaaagggatattttaaccaaatttatgcgcttatattaattcttctattgtccttactttgcccttgtttgttgctttccccccattttactttttgtagatacaacgtgctggattcgcaagcccaacacctatccaagcccagtcatggccaattgctatgcaaaatcaagatgtagtagctattgcaaagactggatcaggcaaaactcttgggtatctacttcctgggttatgcatatcaagcgcctgcagaacagcactaggaat

SEQ ID NO: 263579 - DNA, 397 bp, Zea mays
cggacgcgtgggctctacgaccacctgcaccccaaggcctcggcggcgccgtcgcccgtggcgtcgtcgtggaagctgcgcatcaagatcctgctggacgcgtcccgcggcatcgagtacctgcactcctacgccgtgccgcccatcatccaccgcgacatcaagtcgtccaacatcctgctggacggcgggtggacggcgcgcgtgtcggacttcgggctgtcgctgacggggtccccggagccatcgtcggaggagtcgcggtcgcagcagctggcggtgacgacgaaggccgccggcacggtggggtacatggacccggagtactacgggctgcaccacctgacggtgaagagcgacgtgtaccggttccgtgtggtgatgctggagtcgctga

SEQ ID NO: 263580 - DNA, 1659 bp, Zea mays
cccacgcgtccgaattcatcaagctcaacacgatttcaattcgattccagttcatccatccaacgcctcccgcctgtacgtatagaagaaagaaggaagaaccgtcaccgtcaaattcatcaagctcaacacgatctcaattcgattccagttcatccatccaacgcctcccgcctgtacgtatagaagaaagaaggaagaaccgtcaccgtacgtcctcgccagtacaaataatggccctgctcaaagccgcgcgcgtcgccgatgtgcccaccctggacgtggtggtggcccccggcctggtggcggttgccaaggcgaggagcgccgcggctgtgggcggccggttctcggtgatcgggcaccgcggcaaggggatgaacgcgctggcgtcggaggacccgcgtctgcgggaggtccgcgagaacacggtccgctccttcaacgacgccgggcgcttccccgtcgactacgtcgagttcgacgtccaggtcaccaaggacgggtgcccaatcatcttccatgacaacttcatcttcacacaagacgatggtaagatttcacaaaagcgtgtggccgatattcagctggaagacttcctgcagtatgggctccagaacgagcaggggaaggttggcaagcccctgcttcgcagattgaaggatggcaggatggtgaactgggacgtgcaatcagaggacgctctttgcacactcgaagaagcgttcgacaaggtcaatccaaggttgggcttcaacgtcgagctgaaatttgacgacagtcttgaatacaccgaggaagagctcactcgcatcctccaggccatccttaaggtggttttcgagtacgccaaggacaggcctatacttttctccagttttcagcccgacgctgcgcagctcatgcgcaaattgcaaggcacataccctgtctacttcttgacgaacggagggacggagctatacgccgacgtgaggaggaactcgctggaggaggccgtcaagctgtgccttgccggtggcctgcacggaatagtttcagaagcccgcgggatcttcaggcaccctgccgccgtgccaaagatcaaggaggctaacctctccctgctaacctatggaacattgaagtaagtggtggtggtggctcgcaaaaatagatagataggattaatttgtggcactgcctgcctgtgtgtgcatgtcctggatggatttagatgctgagagttgccgtctgtgtatccttctcgcagcaacgtgccggaggcggtgtacatgcagcacctcatgggagtgaacggggtcatcgtcgacctggtgccggagatcaccgaggcagtctctgagctcatcgccctgcccgagcccgacctcgacctggaagtgggcagcttgagcaaccaggcggcagctagaggagccacaacaccgaatttctcgcagcgcgagatctcgttcctgctgaggcttattcctgagcttgtccaataatgcctagacttcctggtgtctgtctgtctgtctatcatggatgaattgactaatgtgttactgatgtactgatccgcatacaagaaaacaagcccttgtgcagggtattatttgataaagtggataatatcattattaataataaaaaataaaaaaaaagggcggccgc

SEQ ID NO: 263581 - DNA, 522 bp, Zea mays
tgtgccttgccggtggcctgcacagaatagtttcagaagcccgcgggatcttcaggcaccctgccgccgtgccaaagatcaaggaggctaacctctccctgctaacctatggaacattgaacaacgtgccggaggcggtgtacatgcagcacctcatgggagtgaacggggtcatcgtcgacctggtgccggagatcaccgaggcagtctctgagctcatcgccctgcccctgcccgagcccgacctggaagtgggcagcttgagcaaccaggcggcagctagaggagccacaactccgaatttctcgcagcgcgagatctcgttcctgctgaggcttattcctgagcttgtccaataatgcctagacttcctggtgtctgtctgtctgtctatcatggatgaattgactaatgtgttactgatgtactgatccgcatacaagaaaagaagcccttgtgcagggtattatttgttaaaaaaaaaaaaaaaaaaaaaaaaaaaaaaaaaaaaaaaaaaaaaaa

SEQ ID NO: 263582 - DNA, 424 bp, Zea mays
acatagtccactgtccaccgcagctccgtcgaccgtcgtacagacgctgccggcgacgcgcgaagaagaggccgcgaagatggccgactcgccaacgatcgatgccgtctttcacaacgcggtcatcgtcaccatggatgatgcgttccgcgtcctccaggacggcgcggtcgccgtcgccggcgaccgcatcggcgctgtgggcccctccgctgatgtcctcggcgccttcccctgcgccgtgcagaccctcgacctgggtggccgcattgtccttccagggctcgtaaacacacacgtgcacacatcgcagcagctggcgcgagggatcgccgacgacgttgatctgatgacgtggctgcacgggaggatctggccctatgagtcacacatgacggaggaagactcctatgcctccaccctc

SEQ ID NO: 263583 - DNA, 1376 bp, Zea mays
cagacattgcgcagtgtaaggtcgtatgtgggtgtgttattaactcactattattatactttcatttttatgtgtttcagcttatgactattaacgctccggtgtgatagatacttggaagtggtatgtccaacaaaatgtgggatgcccttgtggaacatgcaaagacttgtgtcttaagtgggaaatattacatatactattctgatgagagcagaagtattggtgctattttcaacaacatctatgcattctgtgggttgatttctggcgaacagttctattcatccgagagtcttgatgatagccaaaagctgtttgctgatgcattggtaaagaaagcatatgataactggatgtatgtcattgaatatgatggcaaaggtctattgaaccttaaaccaaagaaaaaggctgcatccactggtcaagctgagacgcatgcttctgcgggtggttcgacttcgtatcaacaacacctctcctcaacgagcatgccagggtcatcaccatcaggtggaactgattccgcagggtatggtgtcgaccaatcagcaacacatctatctcaactccagagttcatccaccaatgtccaggcgccatacgatgacacattttcgttcttaccacctaacatgctgacagggtctgcaaacgatgccatgggtctggaactgggccagttgcaccaagtaatttctcagggccaggcaattcagccagcaaacgtgggatatggtgattggcccagaaaccgtgacagtcagtatcccgatgacttcactgaagacattcgcgttaagagccaccagttgctcgagggcgaggacatgcagcagctgctgagggtcttcagcatgggtggagcttctggcagtttgccagacgacaccttcaacttccagtcctacatgccctctccgttgcccaacctcgggttcgaaactgagcgtagccattcgtctggcaaagctgttgttggctggctcaagatcaaggcggcgatgaggtggggaatcttcgtcaggaagaaagctgccgagagaagggcgcagctagtcgagctggaggattgacaccgtggctttacaatggtcaaggttgccttgtagattactagtagttatctgcccccataccttcctgttaccgttgaaacaagtttctgaaactcttttctgaaatgtacaacgagtagttctactattttcttgtacagaattcaccttgttttgattgtgttagttgtggaacattgctctgctaagtttgacacatgactggacccgtatgcttgtgtatcttattttccatagctcttcagtgcagaatgtaccgcaacgatgcgaattaatccaaagattatgtgtacg

SEQ ID NO: 263584 - DNA, 482 bp, Zea mays
ccccaccacatcgaactgtgcgcgcgctgcgcggtcggtcgctcccctcctctgtccgcgatctcggctggccgcctgggcttggccctcgccaccgctcccgtctccggttccggcggccgagccaggtttgctcgggtcttcgtgccagcgacgatgcaggacaagcgtgggctcgaggacgccggcgacgggcgccctgatgccaagcggccgcgccctccggctctggccagtgttattgttgaagcgctaaaggtggatagtctgcagaggctctgctcatcattggaaccaattcttcgtagagtagtcagtgaagaagtggagcgcgcactgggcaaacttggccctgcaacaatcggtggaaggccttccccaagcgaattgaaggtccaaatggaagaactctgcaactcgaattccgacaaggctgtcacttccccttttactggagaaaagttgaggggagcgggagctgc

SEQ ID NO: 263585 - DNA, 1117 bp, Zea mays
ttccatgcgtccgcccacgcgtccgagcgtgggctggaggactccggcgggggcgccggcgacggacgtcctgatgccaagaggtcgcggcctccggcactggccagtgttattgttgaagctttaaagatggatagtctgcagaggctctgctcatcactggaaccaattcttcgtagagtagtcagtgaagaagtggagcgcgcactgggcagacttggccctgcaacaatcgggggaaggtcttccccaaagcgaattgaaggtccagatggatgtgctctgcaactccaattccggacaaggctgtcacttccccttttcaccggaggaaaagttgaaggggagcagggagctgcaattcatgttgttttgtttgatgctggcactggctgtgttgtatcctctggaccagagtcgtctgccaaacttgacatcgttgttctagaaggtgatttcaacaatgaagatgaggagggctggaccggagaagagtttgacagtcacgttgtgaaggagcgtgagggaaagcggcctattttaactggtgatctacaagtcacactaaaagaaggtgtggggacagttggggagcttacattcacagataactctagctggataaggagtaggaaattcagacttggcttgaagattgcctcaggattttgtgagggtgttcgcattcgtgaggcaaaaacagaagcctttatggttaaggaccatagaggagaattgtacaagaagcactatccacctacactgaaagatgaggtctggaggttggaaaaaatagggaaggatgggtcattccataagaggctgaacaaatctggaatatctacagttgaggatttccttaggcttgtggttcgggatccacagaaattacgcagtatacttggaagtggtatgtccaacaaaatgtgggctgcccttgtggagcatgcaaagacttgtaccttaagtggaaaatattacatatactattctgatgagactagaagtattggtgctattttcaacaacatctatgcattctgtgggttgattctggcgagcattttattcactgagagcttgatgataccaaagctgttgctgatgcatggtaaga

SEQ ID NO: 263586 - DNA, 391 bp, Zea mays
tcggttcgagggaaaacgacctattttagccggcgttctacaagtcacacgaaaagaaggtgtcgggacaattggggagcttacgtgcacagataactctagctggataaggagtaggaagttcaggcttggcttgaagcttgcctcaggattttgtgagggtgttcgcattcgtgaagcaaaaacggaagccttcatggttaaggaccatagaggagaatgtaagtcccaaaaaattgtttttgtatttctattgacacatatctaaactattccagattcatttatcctagtgtacaagaagcactatccacctaaaaaaaaataaataaataaaaaaaattaatttttttaattttataataattaattttattatattttttttttt

SEQ ID NO: 263587 - DNA, 387 bp, Zea mays
  unsure (1)..(387): unsure at all n locations
caatgaggtgggggatcttcgtcaggaagaaagctgccgagagacgggcgcagtcgtcgagctggaggattagcgtcgtcgtggctttacaacggtcaaggctgcgttgtaaattactagtagtcatctgtgcccccacataccctcttgataccccattgaaacaggtttctgaaactgttctgaaacgtacaacgagtagttctgctatcttggtcagattacagaaattctccttgcttggctggtggtagtgggggaaccatagcttttgttaagttggacacatgactgaaccagctggggatttttaattttttccaaaanaaaaaaaaaaaaaaaaaaaaaaaaaaaataaaaaaaaaataaatttaaaaattaatatat

SEQ ID NO: 263588 - DNA, 520 bp, Zea mays
gctgctgcataaccctatctcttcctagttcctacgccgcggcgacgcggcctctcccattgacgctgttctccgatttggcgggacgtcccttgcccgctccggagtccggtccagcggagccagctacggcacagatcggcctccgtccgccccttcccatctcaccagactctccaccgccgcggtgagcgtgcctcggctgcttcctagattactgcttcaggcggtgctgatgcaaaatggttctatgtcagggcgtttctgttggaaatgctcagttgctagcttttcctggtagatcatcaagttttaagagcacccagtttcatgttaaaacggatcatttttctgcaagagctctacgtgctggcactgattccattcatcatggcatgcctacatcattcccaagggagaattctctcaagggcatcccatcactatcagggcagcataatcagcatccaaggtccgttagttgtcgggcatcctcgctggcatctttcagctaccctga

SEQ ID NO: 263589 - DNA, 1707 bp, Zea mays
gaaagctgccacatccagagccagggtggctcggctctcctctcgcagactgcgccgcagcgcctagcgctcggctggcagccgccccggccggtcggccccgcccctgctgcctacatccgcctgcagccaggagatctgcctccagcgaccgccctgcctgcccttgtggcttctgtggttctgcacaccagcacacgcacttgtccccaaacaacggcggcggcgatgagtatctcagaagagcttcccggcgaaggatctgacggtgaggaggaggtcttcatcaacgaggaggacatcatccacgagataaccatcgacgaagaagatctccccgaccgcgacgacgaagatgacgacgtcgtcaacgggatggttgattccgaagacatcgatgattctacatacgcatttcaaggccaccaagatgaagtcttcattgtcgcctgcagtcctacagattcatcacttgtggcttctggaggcaaagatgataggggattcctgtggaggattggatcagaagagggtgccctggagctgactggacataaggatactgtcggcacagtggctttcagttcagatggaaatttgttggcttgtggaagttttgatgggcaaataaatgtgtggaatacagctacacgaactctcaagggaacccttgagggttccgggtcaggttttgagtggcttaaatggcattctcggggacatttgataatcgcaggatcagaggattgtaatgtatggatgtggaacgctgaccataatgccattataaatacatttgctggacatagtaacacagtgacatgtggtgattttactccagatggtaaacttatatgcactggatcagatgatgcatctttgaggatatgggacccaagaagtgcacaaagcaggcatgttattcgaggccatggttatcattctgatggattgacatgcttatcgatgacttcggattcacaaacggttgttagcggctccaaggacagttctgtgcacattgtgaatttaaactcgggccaggtcgttggctcattagcaggccacaccagttctattgagtgccttggtatctcgtcaagctatggctgggtagctacagggagcatggatcaaaagctgatcatctgggacctcacgcaccaatccagccgatgcatttgcgaacatgatgagggcgtgacatcgctgacatggctaggttcgtcaaggtacgttgcgtcaggatgcattgacggcaaggtgcgcatctgggacagcctctctggagcctgcgccagggagttcagtgggcatgcagatgtagtacagtcgctggccatcactgctgacggcaacaccatggtctccgcctcatcagatggctccgcccgtgtgtttgacatctccatgttcaagtgaaggaaaccgggacggagtacatgtttatgctatggcttgattgtgatgcacgattgatcatggcatgccatggtaatatgcgattgtactactctgctcatggaaaaatcgtgcatttgtattgcatatgactccacttgtagtatctattacagcagaacaaaggatgtatttatatatattccgtttttcccctttggagagaaggaatcaattgtgatagcagtgatagaattcggacgggaattctgtctcaaaattatattaatatgagctagttttgga

SEQ ID NO: 263590 - DNA, 346 bp, Zea mays
catgatcatgtggtcctacaacggcatctactcaggctggcttcgcttccaccatggccggctaccagaagtgactgcttggaactgaaaactattcaccagcttcaacactatcttggagcgttctacggataattgctattgtttcttaaagggttggtctgaacacagctagaaatacttgaacttcagttatattcgaacttccgtgaactggatgatgatgtccaaatcttctagaaaaggtggtggaaagtacatggatctggcacaaaattgccatcgagaaagtccgattatcatctagctgcaaattggcgtatgaatgcctgctagctggtaaacg

SEQ ID NO: 263591 - DNA, 473 bp, Zea mays
acgctttgatgagtgtccctcgctggcaaggacattgcttggtggcgcggcagccaccggttgttggttcatcgccggcggtggcgccgatggtggtgggcagcgatcgtgggcgttgatggcgtgcgtcttggtttcggttgagctgctgcctgctatatgtattctgagaacagcttccttgtccctggtgtcttcgcaccaccagttctgtggtattccgtctacgaattcttcctgcgtgtaaaaatcttcatgatgtagtgtaatttccaccgtttcacctggttttatcacaccgaccgctggttggacctcgagccaaagtgggaagccaaaggatgcccttggaagaagctctgattcagttccatcctccttcttggttgactgcccgtcacataggatctcgaaagctgctttgcttgtttcgcatttatacgtaatttggaatacaatattctcttgatttt

SEQ ID NO: 263592 - DNA, 437 bp, Zea mays
  unsure (1)..(437): unsure at all n locations
cccacgcgtccggtggcgcgtgacggtcggagatgtcccggaagaggcagccgctggcgagcgccggcccgcggcgcgccggcggtggtcgagggggtgagcctagtgggagcacatcgtgcttctccctgccccagcgccccgccgagccgaagcggcagaggatcgcccttcgcgatgtcaacacggaggtgatgcagaacaccattgcgctcgagcccctcgccaggagagtggaagaatttgacaagggcaattggaccgaagaaaatacacagatactatgtgatcttgttgttgaacagattagggaaggaaactatcttcatggccacatgaaaaatacagcttacaaggtcatggctcanaagtattatgaatgcactaaccttttccatgcaccaaagcaacttgaaaatagatacaaccagtgcgag

SEQ ID NO: 263593 - DNA, 886 bp, Zea mays
cccacgcgtccgcccacgcgtccgcccacgcgtccgctccctctccgaaatcaaggtagcgtacaccgctgcagtttctagagccctctctgccactcgtgatcccactagtcacaatgcctgccctcgccaagcccgcctcccgcaccgccaagcccgccgcggctccgaagccgaagcctgccgccgccaagccgaaggcggccaccgctggtgcctcccacccgccttacttcgagatgatcaaggaggctatcacggcgctcaaggagaggaccggctccagctcgcaagcgatcgccaagtatgtgggggacaagcacggcgcgtctctgccggccaacttcaagaagatgctttccatccagctccgtgggtccgcagccaagggcaagctcgtgaaggtcaaggcttcgtacaagctctcggacgccgccaagaaggcatcccccaagaccaaggctaagccggcaaaggccgccgctgccaagaccaccgcccccaagccggccaaggccgccgccgccaagtcaaagaaggcagcggctgccaagccaaagaaggccgctgctgctgggaccaagcgcaaagtgcccgagaagaaggtcgtggcgaagccgaagaagtcccccgccgccaaggccaaggccaagccgaagaccgtgaagtcccctgcctccaagaaggcacggaaggcctccgcatgagatgggttgctttaggtctaagctctgattgtggttggtgtcagttaggtactgtacaaactaagtgtgtgcccaaagtgtctcaggcggtgtgttatgtgcttagcaagttctatctatcagagtgttttagtttaacaatggttttacctctggcttttgtagtcaggtttctgtct

SEQ ID NO: 263594 - DNA, 503 bp, Zea mays
tgttccaagctttcttacgccttttacaaggccttcgctattaccagcgctgggtcggtaaatgccggcgctgccaagaccaccgtccccaatccggccaaggcctacgacggcaagtcatagaaggcagcggctgacacgccaaagaaggccgctgctgctgggaccaagcgcaaagtgcccgagaagaacgtcgtggcgaagccgaagaagttctccgtcgccaaggccaatgccaagcccaagaccctgaaatgccctgcctacaagaaggcacggaaggcctccgcatgagatgggttgctgtaggtctgaggctctgattgtggctggtgtcagctaggtactgtacaaactatgtgtgtgcccaaagtgtctcatgcggtgtgctatgtgcttagcaagttctatctatcatagtgttatacgctaacaaacacttgaaaaacgccttgaataaagcagaaagataaaccaagtgaagcaacagaacaactaaatga

SEQ ID NO: 263595 - DNA, 1219 bp, Zea mays
acggtcggcgtcagcaggcggaggcgcggtgcgcgcgctgtcccagaaggagcaggacatacagatgatgctcgcggccgacgtccacctcggcaccaagaactgcgatttccagatggagcggtatgtctttaagcgtcgcaccgacggcatctacatcatcaacctgggcaagacatgggataagctccagctcgcggcgagggttattgttgccattgagaacccgcaagacatcatcgtccagtcggcccgcccctacggccagcgtgctgtcctcaagttcgcgcagtacactggcgcccatgccatcgctgggaggcacacccctggtaccttcactaatcagctccagacctccttcagcgagcctcgcctgctcatccttactgacccaaggactgaccatcagccaatcaaggagtctgctctggggaacatcccgaccattgccttctgtgacactgactctcccatgcggtatgtcgatatcggcatcccagcgaacaacaaggggaggaacagcattggatgcctgttctggcttttggccaggatggttctgcagatgaggggcactatcctccctgggcacaagtgggaagtcatggtggatctgttcttctacagagacccagaggaagcaaaggagcaggaggaggaagctgctgttgcccctgagtttgccgcaatcactgattaccaaggagctgatcagtggggtggtgaccagtggacctctgatgtgactgcgccgcctgttgctcctactggtgctgattggggtgctgctccagctccggttcctaccggtgatggctgggatcaagctggggcccctgcacctgtggacggcactgtacctcctctggttgctcctactggttgggaccaagcagccccgccaccgactgcccaaggctgggagtaggcgttgtccactctgagacctgtcttctgcggctgaagttcagtatttttctgtggtctgaatgtccaaattccggtggcatcttctatagctatgctttgctttgctttgaacacttgtgttttagggctttctagctgaacccgttgtccaatattgctgacgttgaaatttttggttaatcttaaaactggaaatgatgcttgcggttccctgagaaaaaaaacaaaaaaaaaaaaaacaaaaaaaaaaaaaaaaaaaaaaaaaaaaaaaaaaaaaaaaaaagaa

SEQ ID NO: 263596 - DNA, 726 bp, Zea mays
tgctgtccaaaatgacattggagatgtggttattccatgttttattggtaacattgccagtcttatttgataataatgtcgtttgcaggttgatctgttcttctacagagacccagatgaagcaaaggagcatgatgaggaagctgctgcggcccctgagtttgctgcagtcactgattaccaaggagctgatcagtggggtggtgaccagtggacctctgatgtggctgcaccacctgttgctcctactggtgctgattggggtgctgcaccagcttcggttcctaccggtgatggctgggatcaaactgtggcccctgttcctgtggatggcactgttcctccagtggtcgctcctactggttgggaatcagcagcccagcccactgcccaaggctgggagtaggcgttgaggcatcactctgagacgtcttgtgcgggattattccaaagtatgaatgcccgaagtcagacgacatattttgtagctaatttgctatgctttgtgcacttatgtttttagggctttctagttgaaccggtgcccctgttctgtttttaaaattgcctctatgtaagaggctgtgcagtataagtactagcccctttgttttctgtcgaccgcattgcatggtttggttcgaacctttcgatgtcgtagttctatatgataatacattcagttgattttgatatatgaaaaaaatatccaaaaaaaaagggcgg

SEQ ID NO: 263597 - DNA, 583 bp, Zea mays
tcgcctacgcgtccgaagatccctccctaattacaatcttcctcagcgccgccgctcccagacaccgagcccgactgcccaaccccgatccggcgatccgtctccttcttttcctcctttctgccgtccccgatcactcgcaaccatggcggcggcagcaggcggaggcgcggtgcgtgctctgtcccagaaggagcaggacatacagatgatgctcgccgccgacgtccaccttggcaccaagaactgcgatttccagacggagcgctatgtctttaagcgccgttccgacggcatctacatcatcaatcttggcaagacatgggataaactccagcttgcagcgagggttatcgttgccatcgagaacccgcaggacatcatcgtccagtctgcccgcccatatggccagcgtgctgtcctcaagttcgctcagtacactggcgcccatgccatcgctgggaggcacacccctggtaccttcactaaccagctccagacctccttcagcgagcctcggctgctcatccttaccgacccaaggactgaccatcagccaattaaggagtctgctctggggaac

SEQ ID NO: 263598 - DNA, 565 bp, Zea mays
  unsure (1)..(565): unsure at all n locations
gcggtggcccccgtgcgggccccgccgcggtttccccggcgcgccacgcgtgcgttttgatgccttccgcacctccgagccgccactcccaagacacagagcgtcagagcccgatcccgatccagcgaggcggcgaccctccctcctccccttgcttcgctcgtccagccctgaccacccgcatccccgtcagtcatggcagcggcagcaggcggaggcgcggtgcgtgcgctgtcccagaaggagcaggacatacagatgatgctcgccgccgacgtccaccttggcaccaagaactgcgatttccagatggagcgctatgcctttaagcgccgcaccgacggcatctacatcatcaaccttggcaagacatgggagaaactgcagcttgcagcgagggttatcgttgccatcgagaacccgcaggacatcatcgtccagtccgcccgcccctatggccagcgtgctgtcctcaagttcgctcagtacactggcgctcatgccatcgctgggaggcacacccctggtaccttcactaaccagctccagacctncttagcgagcc

SEQ ID NO: 263599 - DNA, 471 bp, Zea mays
ataggagatcccctcactgcattccctctgagcgccgccactccctgacatcgagaccggctgcccgaccccggtccggcgatccctctgcacccctttctttgcgctgccagccccaatctctcgcatccctgtcaaccatggcggcgtcagcaggcggaggcgcggtgcgcgcgctgtcccagaaggagcaggacatacagatgatgctcgcggccgacgtccacctcggcaccaagaactgcgatttccagatggagcggtatgtctttaagcgtcgcaccgacggcatctacatcatcaacctgggcaagacatgggataagctccagctcgcggcgagggttattgttgccattgagaacccacaagacatcatcgtccagtcggcccgcccctacggccagcgtgctgtcctcaagttcgcgcagtacactggcgcccatgccatcgctgggaggcaaaccctgg

SEQ ID NO: 263600 - DNA, 503 bp, Zea mays
gatcagtggacctctgatgtggctgcgcgcctgttgctcctactggtgctgattggggtgctgctctggctccagttcctaccggtgaaggctgggatcaagccggggcccctgtacctgcggacggcactgtacctccagtggttgctcctactggttgggaccaagcagccccgccgacagcccaaggctgggagtaggcatagtctactatgagacctgtcttatgcagcttaagttcagtattttttgtgaagtctagtcttctgcagcttaagttcagtattttttgtgaagtctagatgtccagaatcttttggcatctgctatagctatgctttgctttgctttgagcacttctgttttggggctttctagctgaccctgttgtccaacgttgctggcatggaaatttttggttaatcttaaaactggaaagagcgtgtgaaacgatccttgtgactctgttaaaaaaaaaaaaaaaggggaaatttagttgccag

SEQ ID NO: 263601 - DNA, 390 bp, Zea mays
gccccctgtacctgcgaacggtactgcacctccagtggttgctccaactggttgggaccaagcagccccgccgacagcccaaggctgggagtagctactatgagacctgtcttctgcagcttaagttctactatgaataggcatagtctccatgaagtggtgaactgtatcgccgatacgcggttcagctctgcaacggcaacccgcgatcctagcttagatgtgaattcggttgtagatatactgcgcgaacaacttggaagtagaagaagagttgagtactcgtagatgctctttttatttctgcgtgatgttggtacggggcctctgacatgaaagtcataataaactagtcaaagttccttttaaaaaaaaaaaaaaaaaaaggaa

SEQ ID NO: 263602 - DNA, 479 bp, Zea mays
ggcttaagttcagtatttttctgtggtctgaatgtccaaaatctggtggcatcttctatagctatgctttgctttgaacacttatgttttagggctttctagctgaacccgttgtccaatattgctgacattgaattttttggttaatcttaaaactggaaatgatgcttgcggttctctgcattataggtcctgatcattgctagtaatgaattgcagcgctgctactactgttttgactgagtgtgcccagctgctagcagttatgccagtgtgctatctgcatctgttcaaactagtggcaaacctcacttttgtcgtgatgtgacagtgaagcgaaatagcaacttgtatcgggtccaaatttctctgctattggatcactgttacaattgctccgactcttgcaaacctcattttggtctatgttggggcttgggagtgcttgatgatgccctgatctcggaatggcggcatag

SEQ ID NO: 263603 - DNA, 1084 bp, Zea mays
ggggcgctttgctttaaagccccgaccggcgggatttacattattaaccttggcaagacatgggaaaaacttcacttgcagccgggggttatttgtcctctagaaaacccaggggatttattttcacaccgcccccccctatatgcagcgtgctgtgctcaaaattgctcaatacactggcgctcattccatcattgggagggacacccctggtaccttcactaattagcttcagacgtccttcaacgaggctcgactgcttattcttaccgacccaaggactgaccatcagccaattaaggagtgtgctctggggaacatacacaccattgccttctgtgatactgactctcccatgcgggatgtcgatatcggcattccagcgaacaacaaggggaggaacagcattggatgtctgttctggcttctgtccaggatggttctgcaaatgaggggcactattcttcctgggcacaagtgggaagtcatggtcgatctgttcttctacagagacccagaggaagcaaaggagcaggaggaggaagttgccgtagcccctgagtttgccgcaatcactgattaccaacgaactgatcagtggggtggtgatcagtggacctctgattggggtgctgctccggctccagttcctaccggtgatggctgggatcaaactgtggcgcctggtcctgtggatggcactgttcctccagtggtcgctcctactggttgggaatcagcagcccagcccactgcccaaggctgggaataggcgttgaggcatcactttgagacgtcttgtgcgggattattccaaagtatgaatgcccgaagtcagacgacatattttgtagctaatttgctatgctttgtgcacttatgtttttagggctttctagttgaaccggtgcccctgttctgtttttaaaattgatgctatgaaagagcctatgaagtataagtactagcccctttgttttctgtcgaccgcattccatggtttggttcgaaccgttcgatgtcgtagttctatatgatactcagtggacattaatattaatacattcagttgattttgatatat

SEQ ID NO: 263604 - DNA, 1474 bp, Zea mays
ctttcgcttccgcccacgcgtgcgtccgcgcagatcgagtcatcaagctagctagcccggagcacgcctagacacgccagcagcaatggcggctcagctggccgtcgcgtttctcgccttgttgtcctcctctgccttcttggccgtgtctggccagaagttcaacgccatcttcagcttcggcgactccatgtccgacaccggcaacctgtgcgtgaacggtccccccgccggcctgacgctcacccagccgccctacggcgagaccttctttggccgcgccacctgccgctgctccgacggccgcctcgtcgtcgacttcctggccgagaagttcgggctgccgctgctgaagccgtcgaagcagggcggctcagacttcaagcagggcgccaacatggcgatcattggcgcgaccaccatggactcgggcttcttccagtcgctgggcatcgccgacaagatctggaacaacgggcccctcaacacccagatccagtggttccagcagctgatgccgtccatctgcggctcgacgcaggcctgcaagtcgtacctgtccaagtccctgttcgtgctgggcgagttcggcggcaacgactacaacgcgcagatcttcggcggctacaccccggagcaggcgagcgggcagagcgccaccatcgtggacgccatcggcaagggcgtggagcagctcatcagcctgggcgccatgtacgtggtggtcccgggcgtgctgcccgtggggtgcttcccgatctacctgacgctgtaccagacctccagcgccggcgactacgaccagtacggctgcctgaagcgcttcaacgcgctgtcggcgcagcacaactcgctgctgcaggccaaggtgtcgagcctgcagagcaagtaccccggcgcgcgggtcatgtacgccgacttctacagccacgtgtacgacatggtgaagagccccggcagctacgggttcagcaccaacctcagggcctgctgcggcgccggcggcggcaagtacaactaccagaacggcgcgcggtgcggcatgcccggcgcgtacgcgtgctctgacccggcgtcgtcgctcagctgggacggcatccacctgacggaggcggcgtataggaagatcgccgacggctgggtcagcggggcctactgccacccggccatctcggcctagaggctgctccgggaccgggggtcgggggctggttggtggttcgctggcccctcaagttaggggaggggaatcggattaattgtaatttttttagctggaatcgaagcaggcaagaagacgatggaggtggtctgcaactgcaagaaataatcaattatataagcataattctctcgtgatcatcgtgcgacacagtgctaagatcacttgtgtaaaagaaaaaaaacaaagtcaatcgaaaaaggggagatcaagttagacgggggaaagccgtaggggaggcaatttgatgcc

SEQ ID NO: 263605 - DNA, 422 bp, Zea mays
gtgacgaggtgggctgatgccgcaacagctaagtcccaacctacgccattaacgtccggtatataagcaagcagcgaacctctgcaaacatggtcatcagcgaagcacaaagcgcagatcgtcgatctagcgagctcggagtcggagcacgcctagacaccaaagcaatggcggctcggcggctcctcgtcgcgttccttgccttgtgctctggcttctcggccgtccacgggcagaagttcaacgccatcttcagcttcggcgactccatgtccgacaccggcaacctgtgcgtgaacggtccccccgccggcctgacgctcacccagccgccctacggcgagaccttcttcggccgcgccacctgccgctgctccgacggccgtctcgtcgtcgacttcctggccgagaagttcgggctg

SEQ ID NO: 263606 - DNA, 1803 bp, Zea mays
  unsure (1)..(1803): unsure at all n locations
cagacttgtggctctgaggaaggtgcctagaagaagtaccccgctttttcctgccaaaanagantactntgnttccagggagcaaccatctttgtttacaaaagaggagaaaggttttgcaccctcaaacatctggtcagccgtctcctcctgtgagtgctttcaattcaactgagtcacatgagcctttgagctccacatacctaccaatcacagtcagctcctacccagaagttggtgccacacaagggatgctgcaacagctcatggggaggcaggaggacatggaaaagcagctgagtactgtggttcctgcgtccatcgcaaaggagggcaaaagacttgagacatcattagggcgcactgtagagaaatcgttcaaggctaatattgatgcgttttgggctcgtctccaggaggaaaacactaagcgtgaaaaggctgatagagatcgaatgcagcaatttgttactctcattacaagctcaataaataaggacttaccttctaatctggagaagtcacttaagaaagaaatttcttcacttgggcctgttgttgctcgtgcaattacgcctattattgagaagtgtctaacctctgctgtttctgattcagttcagaaagggttgggtgacaagttgttcaatcagctggaaaagtctattactggaaaacttgaagctacacttgccaggcaaatccaaatccagttccatacatctggaaaacaggctcttcaggatgctttacgtactagctttgaatcattgcttgttccagcgtttgagcaagcatgcaagacaatgtttgagcaaatagatggtgcatttcaaaagggaatgtctgagcactccaccgctattcagcatcaagtcgagtcttcacatagtccgttagcgctaactctaaaagaaatcatcaattctgcatcatccatcacccagagtttttcatcggagttacttgatggcaatcgcaagctactggcacttgttacttctgggaatgccatggcacataataccagtgctttgcagcccattaatggtcctatgggtggatcccaggaggttgaggctccgttagatcctatgaaagagctgggcagactgatatctgaacgcaagtttgacgaagcatttacaatggctcttcaaaggagtgatgtttccatagtatcgtggctatgctcccaggttgatttgcgggcattatgtgcaatggtcccagtacctcttaaccagggggtccttctggccttattgcagcagctagcaattgacattcacaatgagacatcacggaaggttcaatggatgacagatgttgccatggcaatcaacccagcagaccagatgatcgcggttcatgtgcggcctatctttgagcaagtctacaaccaactggcccaccagcggacactccctaccatgaccgcagcagatggcaccagcatccgtgtgatcatgcatgtaattaactcagttctgcttagctacaagtgattgtagctacgcaactgtgggaagtatggcctattctatcttgtatagagaaattttgaatggccacaacccacaacccaggagacattgtggccgagaatacttgcaagagggcggaggttactccttggtgtaaatttggcttctgtcgctcgtgaattcggactattgtagtaattgggcatcatcgaattcttcatttgacatgatcaccgggtcttgtatttccgtcataccttaatggaaatgggtcgaatatatcagttggactttgtagcacggacagtttggaacc

SEQ ID NO: 263607 - DNA, 617 bp, Zea mays
  unsure (1)..(617): unsure at all n locations
ctgagagtttctgctggaaacatcttgactttttcctccatcagatttgggactcgaagctgtcaaagaaactcagattgtttgtgagaatatggataaaactcggagttccttggaccaaactgttgaaatgatcagtgagcgctcagttacaactgataagtacagcgtggaagaatcacagtcatcatctgatcgaccgacatcagaccagactggtatcagtgaaaatgttctgaagaagcttggggaaatgcctgagaaaattgattattcctctgcttctagggagcaatcatcttcatttacgaaagaggagaaaattttgcatcctcaaacatctggtcaaccgtcacctcctgtgagtgctttcaattcaactgagtcacatgagcctttgagctccacatacctaccagtcacagtcagctcctactctggagttggtgccacacaagggatgctgctacagctcatagggaggcaggaggacatggaaaagcagctgagtactgttgtccctgcatccatcgcaaaggagggcaaaagacttgagacatcattagggcgcactgggnagaagtcgatcaaagctaatattgatgcgttttgggctc

SEQ ID NO: 263608 - DNA, 580 bp, Zea mays
aacacgcgtccgcagcagaccagatcatcgcggtgcatgtgcgaccaatctttgagcaagtctacagccaattggcccaccaacggacactccccaccacgaccgcatcagatggcaccagtatccgtgtgatcatgcatgtaattaactcggttctgcttagctacaagtgattgcagctatgcaactgtgggaagtatggcctatttgatatcttgtatagagaaattttgaatggcaaatagaacacaacccacgagagtatacttggaagagggtggaggttactctctagtgtaaattttgcctttgaaattaaaatatttgtagtaattgggcatcctctaattttctaggtcatgttcatttgtcgtatgatcaatgggtcttgtatttcagtcataacttgtagctcggacagtttggaaccaacagcagctgcttggtgttggttggtccacacaaaattttgaagtcccatgtggacattgtttctggtggcaactgcaaaattggtgttattctacccgaggactcaaagaccccccaaaaaaaaaaaaaaaaaaaaaaaaaaaagaaa

SEQ ID NO: 263609 - DNA, 457 bp, Zea mays
cctacgcgtccgcggacgcgtgggtctagatcgcgagcggccgccctttttttttttttttttttttttttttttttgatccactcacgcaaattagcacaacttttatggcaaccaaaccaacccccgccgccgccgcagccgcagctactctagggatctagagtcagttaaaaacaggaacaagaatccagagccaagcagccaacgtgaacaatgtacacacacgcacacgccgatcaccagatccaacggccctcgctaatccagcccaccccaatcgcaccccaaaaaaaaaaacaagagcagattaaaccaaacaaataggcacgcatcacaaggcaattccgaagaaggaccagcagcgccaggccgcgccctcactggctgagcgcgccgccctccgacacggcgggcgagtccgagacgccggaggactcgtccatggactcgtgcg

SEQ ID NO: 263610 - DNA, 560 bp, Zea mays
atcctttcatgtctcgacggcttcccttcttagttcggccggttcatttgaaacccttgtactctagcggcccgcacaaagccggcggagcgccgcgccaccatgtaccggcttttccgccgcagcttctccatggctgccgagggttccgccgccgccgcctcttcctctccacccccctccacctccatgtcctcgaccccgcggcaacatctgccggacgagctgtaccgccgcatcatgaatgtcgggcgcccaagcatcccgttatcccccgtcctggagcaatggaatcaagaaggccataccgccaagaagttcgtcatccaggccatcgtcaagaagctcgtcggcctccgccgcttcgcccacgcactcgagctgtcgttctggatgaccgaccgcaggcacctccacctttcggtcggtgacgtcgcgtaccggctggacctaatcagcaaggtgcacggccttgagaaagccgtcgagtacttcggcatggtaccgaagcagctgaagaagccgcagtgctacggctccctcctgaaatgctatgtgga

SEQ ID NO: 263611 - DNA, 715 bp, Zea mays
  unsure (1)..(715): unsure at all n locations
gggcagctgcgcttcgacgtgccggaccagatgctggcgttcgtgcggtcgcaccgcgtgcatggtgcgcggccacaacatcttctgggagaaccaggacgcgacgccccggtgggtgaagaacctgacggcggacgacctccgcgccgccgtcaacacgcgcatccagagcctcatgacccgctaccgcggcgagttcgcgcactgggacgtgaacaacgagatgctgcactacaacttctacgagcagcggctggggcccaacgcgtccgcggagttcttcagcgtggcgcaggacgccgacccgctggccacgctcttcatgaacgagtacaacgtcatcgagacctgcgacgaccccttctccaccgtcgacacgtacgtgtccaagctcaaggacctccgctccgccggcgccatcctggaagggatcggcctggagggacacttctccaagcccaacatcccgctcatgagggccatactcgacaagctcgccaccctggggctgcccatctggttcaccgagatcgacatcagcaacaagttcgacgcgcagacgcaggccgnctacctggagcaagtgctggcggaggcatactcgcacccggccgtcagcggagtcatgctgtggacggcgctgcaccccagcgggtgctaccagatgtgcctcacggactggaaacctcagcacctgcccacgggggacgtggtc

SEQ ID NO: 263612 - DNA, 508 bp, Zea mays
ggccgagaacaggcagagcaccgggatctagggtttcgcacccaacacccggagtgagcggcggcgagggatcggatcgtcggcggcgatggaggacgaggtgcagagggcagcggtgagcagttggaacgagcttgactatgaggcggaagcgcgtttggtggcggaggcgagggcgtcgtgggataggaaggcaaggggggaggaggaggatgaagaagaacatgatcctgagatgaccttggactactacgcctaccaggctaaaaagtttcgcaacacctggaacatcctctatttcggccacttcggtcgcttcgaggacaccacaaggatccctcctatgcgctttacagagaagccgcctgactccccggcgtacccgcgcactacactgcaggtcttttcgatcaaagttgcagggatagaggggggtttacagtggccacttcatgtggttgggaaggttgccctacgcgacgcagttgatcacaatcgcaatatggtc

SEQ ID NO: 263613 - DNA, 1518 bp, Zea mays
cgacttagccctcgatcacgggcgcacaacaacacagcgacgctatctgaccgagtgttcaaataaatacccacacgggcacgccacgagacgatgagacccctctgctccaatccgccgctccactccaagtcacacggaggcagccatcgtagcctcgcccgactccgcttcccctgttctttgggcatggagctgatcacaaatgtcaccgagtacgagaagctcgcgaaggagaggctgccgaagatggtgtacgactactacgcctccggcgcagaagatcagtggacgctcaaggagaaccgggaggccttctccagaattctgtttaggccacgggtactgatcgacgtctcccgtatcgacatggccacaaacattctgggcttcagcatttccatgcctatcatgatcgctccttcagccatgcagaaaatggctcatcctgatggagagcttgccacggcaagagctgcagcttccgcaggaacaataatgacattgtcctcatggtctacttccagcgttgaagaggtcaactcagttgggccgggcatacgtttcttccagctctatgtctacaaggacaggaatatcgtacggcaactcgtgaaaagggctgagatggctggcttcaaggccattgcactcacggtagacactccaatacttggccgcagggaagctgacattaagaacaggttcgccttacctccacatctggtgttgaaaaacttccaagcgctggatcttggcacgatggacaagacaaatgattccggccttgcttcctacgttgctggtcaagttgaccgcaccctttcctggaaggacgtcaagtggctgcagacaattacctcgttgccgatcctagtcaaagggatcgtgactgcagaagacactaggcttgcgatcgaatatggcgctgctgggatcatcgtgtccaaccacggcgcgcgccagctagattatgttcctgcgactatcagctgcctggaagaggtcgtcagggaagcgaaaggccggctaccggtgttcctcgacggcggcgtccgccgtggcacggacgtcttcaaggccctggcgttgggagcttcaggagtgttcatcggccggcccgtgctgttctcgctggcggtggacggcgaggccggcgtgcggaaggtgctgcagatgctgagggacgagctggagctcaccatggcgctcagcggctgcacgtcgctgagggagataacccgcgcacacgtcatcaccgacagcgaccggatcggccgctcgcggctgtagaatcattgtgcagttcacctcaggaatgatgttggtctcgactgaactgtcctgattcgggatctatttgtagctcttgtgctctcattttacgttaggcaaataaggaagctgcgtgcgtatgtgtgactgctgctgacgtttgtttgcgccgctgtcgtggttgcctggttggcacttggcagtgttgattggcgttagtggttggtttgggtgaaaggagtt

SEQ ID NO: 263614 - DNA, 409 bp, Zea mays
ctccaagtcacacggaggcagccatcacagcctcgcccgactccgcttcccctgttcggtgggcatggagctgatcacaaatgtcaccgagtacgagaagctcgcgaaggagaggctgccgaagatggtgtacgactactacgcctccggcgcagaacatcaggggacgctcaacgagaaccgggaggccttctccagaattctataatgggatagagtgttcccagcctacatcacgaagatgacggcctggttaataaaatcacgttaggccacgggtactgatcgacgtctcccggatcgacatggccacaaacattctgggcttcagcatttccatgcctatcatgatcgctccttcagccatgcagaaaatggctcatcctgatggagagcttgccacggcaag

SEQ ID NO: 263615 - DNA, 349 bp, Zea mays
acccgatgcagctaggcttgcgatcgaatatggcgctgctgggatcatcgtgtccaaccacggcgcgcgccagctagattatgttcctgcgactatcagctgcctggaagaggtacgccgaccaaatccttctgtgattcagagcttcagagtcttcaggggggtaaaggcgaaaagcttgcttgtgcttcctggctttccatgttcctgtctgctgaggttttcactataaagtgcgacgtgaattcaggtcgtcagggaagcgaaaggccggctaccggtgttcctcgacggcggcgtccgccgtggcacggacgtcttcaaggccctggcgttgggagcttcagga

SEQ ID NO: 263616 - DNA, 938 bp, Zea mays
cccacgcgtccgcggacgcgtgggtagtcatcttcgtcgctcgagtactcgagctgaaaggggaagaccaagctccctttttgaagaaagtcctcgacaaatgttccatagtctcatgggggagagggacagacatagacacataaccatggaaggaattacagaggttttggctgcattggagaggattgaacagcaagcagagctgacctatgatcaattgctaatgctggaggctaatctattttttggcgcctttgcctcctatgatcggcatagagacatgcggatggatattgatgatatgtcctatgaggaattattggccctggaggagagaataggctctgtgagcacagctctttcagaggagcagttcacaaaatgcctcaaaagaagcatatatagtcaggtcgctctagaagtgaacaaatcaaccgttgatgacatgaaatgcagcatctgtcaggaagagtacgcggagggcgaagaggttgggaggctgccatgcgagcaccggtaccatgtgtgctgcataggccagtggcttgggcagaagaactggtgtccagtatgcaaagcgtctgccgtgccttccaagggctgaagcattggggatgctggaaaccccgttccggattacaaaccatccttgcttttgtctacgtacattgttcttttccctatatgcattagatatagatcatgtctagatgtatgacgctagaacagcttgcgatttgggaggaagctaagagagtaatagttagctggttaataatagttcatagctaatatttgctagataactattacttggctacctattagctgtgcctttcacattgtggtacaggacaaatgcttgtcagatcgtgaacaaccttataacttgatgaatggcctaagtcaaagaggaatatgttgtgccaatctcc

SEQ ID NO: 263617 - DNA, 1915 bp, Zea mays
  unsure (1)..(1915): unsure at all n locations
tggaaaaatctggagggttgggttgagaaggtggaggatgaaaccgttcacatgaggccaaaaatatctgatctcccgaaaacattggccttcaatgaaaaagagctttgcaaatatttcaagcctggtgaccatgtcaaggtgatctcaggagttcaagaaggcgctactggcatggttgttaaagtggaagggcatgtcttgatcatgttgtctgacacaactaaagaacatatccgtgtgtgtgctgatcatgtcgttgaaagctctgaaattaccacaggaatcaccagaatcggtgattatgaactgcatgatcttgtccttttagacaacttgtcatttggagtaattataagggtggaagctgaagcatttcaggttctgaaaggagtgccagatagacctgaagttgtgctcgtgaaattaagagagataaaaagcaaaattgataggcgctcatcagctaaagatcgttctaataatattatctctgcaaaagatgtcataagggttgttgaaggagcatgcaaggggaagcaaggacccgtggaacacatacacaaggggatgctgtttatttatgacaggcatcaccttgaacatgcaggctttatttgtgcaaaagcgcaatcttgccttcttgttggtggatcaaccggtggccatcgaggaaatggtatggacacagttgatgcacggcttggtgctttgagatcttcagcaagcattctgcaatctccaggaaggctgcccccaagaggacctaatatgaattatggcggaaggtttggaggcggccgtggtggtaggtgtgatgccttggtgggtaaatgtatcaaaattaaatctggaccttataaaggatatcgtggccgtgttaaagaggtgactggtgcacttgtacgtgtagagcttgattcattgatgaagattgtcacagttaaaagagacgatatcgctgacacacctactgttgcaacaccattccgtgaacctcgttattcattgggtggtgaaactccaatgcacccgtctcgaacaccacatcatgcttatcagactccaatgcgggaccctggagcaacaccaatacatgatgggatgcggactcccatgcgaagtcgagcctgggctcctatgagccctccgagggacaattgggaagatggaaatcctgctacttggggtagcagtccagcttaccagccaggaaccccacaagctcggccatacgaagcccccacacctggatcggggtgggcaaacactccaggagttagtttcaatgacgctcctactcccagggataactatgcaaatgccccaagtccatacgtgccttccacgcctgttggccaaccaatgacgccaaactcagcctcatatcttccaggcacacctggtggtcaaccaatgaccccaggcaatgctgggatggatatgatgtcgccgataataggtggtgagggtgaagttgcatggctgctgccggatgttttggtcaatgtgttgagcggaggtgatgacggccctggcgtggttagggaggtactcggggatggatcttgccgagttgcacttgggtcttcgggcaacggtgacatggtgacggtccttccgaacgaggtcgaggtcatcaggccgaagaagagtgacaggatcaagatactgaatggtagtttccgtgggcacacaggaaaacttataggtatagatggttctgacggaatagtgaggcttgacgacacatacgaagttaagatattagatatggtgattttggccaaactggcgacttgaaatggatgtatattttgttttgtaacgtgtccaccatagaacatattttgtaacaatgccctcgtttgcaataaagctttttgttgcttacgactccaaaaaanaaaannaa

SEQ ID NO: 263618 - DNA, 2214 bp, Zea mays
tggtcgcgtgggcggacgcgtgggcgcgagcgccgcccttttttttttttttttttttgatctcaaaaatcatgatgcttcaatgcaaaatatttacagctatacatcgcgttactcccgattttttttcagatgaattttactcaccagtcgtcagcatgtacaaagcagtaagtaggatagtgtattataccatcaccaatgctaatgggtgacgtttcatacagaagtggacgatgtacatgtgcgcctgcggccggcggccggcctactcctccctgggtatccaccggctccaccagatgcttttgcgctggctgttgagctcgtccatgctctccttgatcgttctcatgatcttcctctgcaggcgcagcacggaggcaagcgcgttccgctgggtgctgcttttctttggttttatttccctaagctcttgaagctgtgcttctgtaaagcctcccacatcttcagttcctgaccttgccatgaggccgataacccaccgcgctgcttcactgtagtccttctgggttgcgcggaacagttgcagccgtacgttttgcatgacggagaggccaaggagcccttcacggttgaagtacgggtgtgccaatgcggccttagcactggtcctctgccgtgctttgtaccggaccatcgaggtgaggagttcccatccgataccaccgtctaaatccatgatgtcaaagcccctccggagctcagcactcgctcgtggctccaccagattcctccaagcttgtaagtcataatcacatcttttcagttggcgattaaattgtatgaggttgctatcagttcgtagtgaagggaatgccatctgtaagaatatgaggcccaagctatatatgtcgaatctgtcaggaagattcagctgccacaggactggagacaaagttgttgcaactggaacagaaggagcagacggggtttgtgtgctcataatatattgttctggagcagcataccttggatccaaaaggaactctttaggaatatagttaattcctacccgtaagtcagctgctgctccaagatcaataattttgaaggttcgtgatccctctgaaaatatcacattttgaggttttatatctctgtgaacaattcctgtcgaatgaagtccgtcaagagcaaataagagttgtctcatcaccgtttgaatgatcttattctctctcgctattccctttggcaagtcttggataccgccaagaatttttgtctccacattgtaagggaattccttgctttgcatgagatcataaagtgtatcctcaccttcaaaacgccaaataagccaatattcttcagctcccttaccttttgctttggtctcgcaaaagccataaataaaatccgcacagctactagcgcatgccctcctgacacgttcattcatccaaatctccactgcaccatactctgttgccttcttcacgaccaaatccccttgcttcttcgccgcttcggggttcgccagtgaagccttacacacgaccccgaatgcgccctccccaagcttcttcccaaataccaagtcatccttgcggaaggaagggcggaagaggcgttcggcgaaggcgaggacgaacatgtcgaagaaccccggcgcgacgccgggcgtggaccagaggtacgacacggtagcgagcgcgagcgcgacgccgggggccgtgatggtgagcccgtcgttccgggggagcgtgctgcggtagatgacgtcgccgcactgcatgacggtgcaggggagccccacgcccaccgcctccaccagctggcggcccagctccgtcgcgacgccgccgagctccgccgtcaccggccggaacgacgcggcggcgtggcccgccggccgccggcgccggcgccggaggagggtgtcgtggccggggaggaaggaggtggagagaccgaggccactagcggccatttcggatttttcggaacacatacacaaggggatgctgtttatctatgacaggcatcaccttgaacatgcaggttttatttgtgcaaaagcgcaatcttgccttcttgttggtggatcaactggtggccgtcgaggaaatggtatggacacagctgatgcacggcttgatgctttgcgatcttcagcaagcattctgcaatctccaggaaggctgcccccaagaggacctaatatgaattatggtggaagagtttgga

SEQ ID NO: 263619 - DNA, 1549 bp, Zea mays
cccacgcgtccgcccacgcgtccgcggacgcgagtccttcgccacgaacaaaagcgcatcgatctcgctgtcgtcactcctcgtcacccagccacgaacagaggcaccacccagcatggccctgcaggcggcgctcctcccatccaccctctcatccgtccccaagaagtgcagcctcgccgtcgcggcgaaggacacggcattccttagcgtatcccagaagaaggtgcaggcggcgtcgctgtcggtgagaacgcgggtggcgacgacggcgcctgtggccacgccggggtccagcacggcggccaaggatgggaagaagaccgtgcggcagggcgtggtggtgatcacgggcgcgtcgtcggggttgggcctggcggcggccaaggcgctggcggagaccggcaagtggcacgtggtgatggcctgccgcgacttcctcaaggcggccaaggcggccaagggcgccggcatggcggacggcagctacaccatcatgcacctggacctggcctccctcgacagcgtgcggcagttcgtggacagcttccggcgcgccggcatgccgctcgactcgctcgtctgcaacgccgccatctaccggcccacggcaaggacgccgacgttcacggcggacggatacgagatgagcgtcggcgtcaaccacctgggccacttcctcctggcgcgcctgctcctggacgacatgcagaagtccgactacccgtcccgccgcctcatcatcctcggctccatcaccggcaacaccaacacgctggccgggaacatcccgcccaaggccgggctgggcgacctccgcggcctcgcggcggggctgcgcggccagaacggctctgccatgatcgacggctccgagagcttcgacggcgccaaggcgtacaaggacagcaagatctgcaacatgctcaccatgcaggagctgcaccggcggtaccacgaggagacgggcatcacgttcgcgtcgctctacccggggtgcatcgccaccacggggctgttccgcgagcacatcccgctgttccgcctgctcttcccgccgttccagaagttcgtcaccaagggcttcgtgtcggaggcggagtccggcaagaggctggcgcaggtggtcagcgaccccagcctcaccaagtcgggggtgtactggagctggaacaaggactcggcgtcgttcgagaaccagctgtcgcaggaggccagcgatccggagaaggccaagaagctctgggagatcagcgagaagctcgtggggcttgcctgagctcgccggcacggcgacagcgacatgatgaatctgtcgagcagaggagctttcgcttcgttgtattatgtgtaccattagcatccattttgtttgtttctagaagttggtaatgaccgtcggagaagagcctgtaattgttcgatcatgtattgcttacaatttttttttaaaccgatgaaataaaacaatcaggcttaacatctcataaaaaaaaaaaaaagagataaaaaaaaacaaagaataatacaataaatagatcataaaaag

SEQ ID NO: 263620 - DNA, 979 bp, Zea mays
gactagttctagatccccccgcggagccgagaggaagaagaagaacccagccaaatcctcagtcttcaggctgctcacagctcgtgccgtccactctcccccgaggcagtctcttgcgttcgctgctcgacatggcgctccaggcggcgacgtcctttctcccctcggccctctccgcgcgcaaggaggggtcggtgaaggactcggcgtcgttcttgggtgttcgtctcgcggcggatggcctcaagctggacaccaccgctctgggcctacgcaccgtgagggtgagcaggtcggcggacatccgcgcgcagacggcagcggtgtcctccccgtcagtgacccccgcgtcgccgtctggcaagaagaccctccgcaagggcacggcggtcatcaccggcgcgtcgtccggcctcggcctcgccacggcgaaggccctcgcggagacaggcaagtggcacgtcatcatggcctgccgcgacttcctcaaggcgtcgcgcgcggccaaggcggccggcatggacaaggacagcttcaccgtcgtgcacctggacctcgcctccctggacagcgtccgccagttcgtcaggaacgtgcgccagctggagatgcccatcgacgtggtggtctgcaacgccgccgtgtaccagcccaccgccaaggagccgtcctacaccgccgacggcttcgagatgagcgtcggcgtcaaccacctcggccatttcctcctcgcccgcgagctcctcagcgacctccagtcctccgactacccctctaagcgcctcatcatcgtcggctccatcaccgggaacacgaacacgctggcggggaacgtgcccccgaaggcgaacctgggcgacctgcgcggcctcgccggcggcctcaacggcgttggcagctcggtgatgatcgacggcggggagttcgacggcgcctaggcatacatggacagcaaggtgtgcaacatgctgacgatgca

SEQ ID NO: 263621 - DNA, 450 bp, Zea mays
cctacgtcgccacgaacaaaagcgcatcgatctcgctgtcgtcactcctcgtcacccagccacgaacagaggcaccacccagcatggccctgcaggcggcgctcctcccatccaccctctcatccgtccccaagaagtgcagcctcgccgtcgcggcgaaggacacggcattccttagcgtatcccagaaggtcagtgatcagctgcatctgcatctgcatgctgcactcgcagtcacaatgcgcttgaattgaacgtgtcactcactctgtcgtgagcatgccatgcgtgcagaaggtgcaggcggcgtcgctgtcggtgagagtcacttcgccatctaccggcccacggcaaggacgccgacgttcacggcggacggatacgagatgagcgtcggcgtcaaccacctgggccacttcctcctggcgcgcctgctcctggacgacatgc

SEQ ID NO: 263622 - DNA, 515 bp, Zea mays
cggacgcgtgggcggacgcgtggggaagtacatcaccaaggggtacgtctccgaggaggaggccgggaagcggctggcgcaggtggtgagcgaccccagcctgaccaagtccggcgtgtactggagctggaacaagaactccgcgtccttcgagaaccagctctctgaggaggccagcgacgccgacaaggccaagaagctctgggagatcagcgagaagctcgtcggcttggcgtgatgcccaccgtggccggcgccggcagccggcgacagtttttcctacctaggacatgctcattagttggtctcactctcagtcgagtagtcgacgtgtggtgcgcccgtgtcagagtgccaagccaagacagaaagtgagtacaaacgtgtaaaatatgtgctactgcgacgtgatggtttgggcagtggactgtatgtatctctactctctaggcttctgctttgctttgcatatttaattttctgctaataagaggacagcaaatgcctttcgagct

SEQ ID NO: 263623 - DNA, 398 bp, Zea mays
aatcgttcgttcaaaacgctggggtcaaagcggttctcgtcgccgaatccctcatcaagcaggaggatccagggaaagcagtcgctgggcttttcggcaaagatatctcgcatgctggtgctacctagagacgacgcagatgagcaacagaataagccagaaacgctactctttcgcagagtccgggttgcatcatttcgtgtaggggagaaaatcgagcgttgcaatctgaaatccaccctttcgcagagttttgatcgggcggcttgtttacctgacctgccaacttccccatgctgctataactttgtgtgacctagccatgtcaataatgacagattttagtgcaaactaatggacccaacaaatggcaggcgttctaaaggatccaagcttac

SEQ ID NO: 263624 - DNA, 579 bp, Zea mays
ttcattcgtccgcccacgcgtccgcccacgcgtccgcgcacgcgtccgctataattataggcaaggcgtgtgacaagggacacagatggatatgttcgaaaaccatctctgattgtgttgaggctctaattggggcctattatgtcgaagggggattaaaagcagcttttgctgttctcaaatggttccagattgagactgaaatcgaggaagagttaattatggaagctctgtcgagtgcttcagtgcgaaactatcttccaaaagttgatgtagttgaattgcttgaagcaaaactaggctacacttttcaaatgaaaggtttgttaatagaggctctcacccactcatcacagcaagaatctggagcaacatactgctaccaacgcttggagttccttggtgatgcagtcttggatattttaataactcgccatctgttccttagtcataaagacacagatgagggggagctgacagatttacggtctgcatcagtaaataatgagaattttgcacaagttgcggtaaagcacaatctccatcagtttctacaacattcttcggggttcttacaag

SEQ ID NO: 263625 - DNA, 713 bp, Zea mays
ccggactgcctggctcgacccacccacgcgtgcgttgtgtcactaatgctagccagccaactaagaagtgaaattgcatacagagattctgatatatcaagcttcgtgattttggaagctatgacaacacttagatgctgtgaggacttctctatggagcgattagagttattgggggactctgttcttaagtatgcagtgagtgcccatcttttcatgacatttcttaataagcatgagggacagttatcgtccagaaggcaagaaacaatatgtaatgccacactttataggcttggtattgaacgcaggatacagggttacatacgtgatgctgcatttgatcctcgtcgatggcttgctcctggacagctgtccagacgtccttgtccttgtgaatgcccagtaaattctgaggttgtaactgaggatattcataggattgatgacaagtctataattataggcaaggcgtgtgacaagggacacagatggatatgttcgaaaaccatctctgattgtgttgaggctctaattggggcctattatgtcgaagggggattaaaagcagcttttgctgttctcaaatggttccagattgagactgaaatcgaggaagagttaattatggaagctctgtcgagtgcttcagtgcgaaactatcttcaaaagttgatgtagttgaattgcttgaagcaaaactaggctacact

SEQ ID NO: 263626 - DNA, 436 bp, Zea mays
ccggtccggaattcccgggtaggcgtcggggtttcttcaaccgctcgccagggcctggccaccgcgctgggcatgcgcaagctaccgcgcgcacccgctggccgccgtgaaacggcgggccaccgcgcagggcgagccgtgcctggccacgctgcgttgccgggggtatgggcgggagctcgagtacgaccgcgttgaggctgccgaggggctgctgtgcatgggtgtcagacaaggcgaggggagtggaggaaccccaagttcccggttgcatgcagatcgcaaattatgcgcaggagagaaaataggaagtgggaaggtctttcctctatttttctcaaccgcacaagatgcaccagcgcaaggaaaatttgcatgcgttcatgcgcgaagtggggcttcgcaggggcgggcgcctcgccatgctctggtgatg

SEQ ID NO: 263627 - DNA, 2333 bp, Zea mays
cggacgcgtgggcggacgcgtgggtccggtacgcgtgggcggacgcgtgggtagatcgcgagcgccgccctttttttttttttttaacaactttctgccttactgaaccactgcaaaaccagaacaggttcactcgctcttgctctcggtctgtctaaacctttgggcttacacctggcagaacgcacatatccaatatacatccatcaaccatagcaccaggtccaaaagaaaattccaagaaataatagtcgacttaaatcagacatgatcaatcaagaccaagcaatatccttctatgtatgtactagaacaaaaagatgtgacatgcacacattgtgttggatgtgttggtatcatcaatcaaggaccttcttgacttcctgaacaaacttcgctctctgagagggatccatcttatctaatagcgtagaaagaccctgcgagaatgcttgcagatctgaactggagtcagcaagatcagagagcgaatgagacactttttgagccctaagcttttggatatgccccttgtagttttcaggactgtccttccaggcaacaaaagcatcatcgtcatcccatccagtgcttcctgttgtggcctgagaagcaaggtaccattccttgatgagctccattgctaattggtgcgtaaatttatcaccgactatctgccttatttcttttgcaagaacatcttctgcgatcctcctccgtagccttttatagaagaacgagcgtgattcttcccagtctacaactttcttaatcacacctttagctgccattcttagggaagtatcatgcaattcagcaaaccgtattgcaatctgggtatataaaggcagcaactgtttcgtacgtgcttctatactcttccgaatcccttctatgtctggtagacttccatttccatgatttacatcttggagttttgctttcagatttatcaactctgggtcaagcctacccatacagtcttggagttcctctgacctgaacttgatttcaattaacccttgaggttcgagaacattacctttggcagtcctttcagcataacactcaatgcggtctggatttattttgctatcgaccacaacccaagctcctccacgaagctctccagccataggaatgtacacaaaagcaggctgattatatgtcctaaggttctcgacaattgttgacccagcctgaagaattccttcaaagagatctctttgtccaccagagaagcctctccaattagccaggatgaacagaggcaatccttcacggttgaagtctaataatgcctgagcggtcttggttgcagaatctgggaaccacacttgtccagcacgagggacagatcgctcatgggaatcaagctgacctggatcagcagggatgatctgcatcatggtctgtgtctccacagctatgacgcccacaggaattcctccaagctttgctctgccagtaaccactgtttttgcccatccttcaaatgtctccacaaagctgtctttgtcaaacataccacccaaccatttcccttggctgtcatctacaccacagatagctgcacgtggatcgcatgtgttctcagggatgtaagcaacaggtctgtctggagggtccagaggtttggtaataggaagaggtccaccaatgtttgcaggaacatagctgagccacctcaatatattggaaacaccttcaaggtcatctggaacagtgaggtggacaacaccattggtcgccatgatcttaggaccaccaagctgcatgtgggagctgtacacttcccgcccaaggagcttgttcagggcagaaaaccctgttaaaataataggctggtcaagacgctgtatgcaccgtataccaagtcgagcaagataagctcctattcctacagtccgcccagtcacaaatgtaagtgtaaatgtctcctcatatgccctagaataagcactggcaatagcagcacttccatgtatgttctcaacaccaagcccatcctccttgcccacaacagagtcaataatccacctaatttcaccattatctagctccagcttatgtgctataacagaagagctaatgcgagcatagtcttcttcagtcagatagatgtactgaaaccctcgttcagggctgccttcgtcagaccacccaacacggaagcaagatttcacttcatcagctatgccactcctagcaccagagtttgcccccaagtatataaggggaagcttcctttcgcaagccaggttggtgacagcttcaaaaaatgcatcttcccttgggccgaatgatccagctctgaaagtaatatcattact

SEQ ID NO: 263628 - DNA, 585 bp, Zea mays
aagcccgtcgcattaaaaatttattgggaaatcaaagtttggaaacgctgaagatgctcaccttatcccataccaaacaaaacctttgtcctaccaaaactctggtgccctagttcagcgacatttatttcatgtagtggtacgtcacatgtgcctacagaaacatattattcgagttcaaaatttaatgaaccactcaattgtttactagcatccgcattatacaccctaaaattacagcgccgctggtaatacatctcagaactacagtgaaacaactttctgccttaaccactgcaaaaccagaacaagttcactcgtgctcttcctaaccttaactcggtctgtataaacctttgggcttacacctggcagaacgcacacatccaaattcatcaaccatagcaccacgtccgaaaggaagtttcaagaaaataatggtcgacttaaatcagacatgatcaatcaagaccaagcaatatccttctatgtatgtactagaacaaaaagatgtgacatgcacacattgtgttggatgcgtttggtatcatcaatcaaggaccttcttgacttcctgaacaaact

SEQ ID NO: 263629 - DNA, 479 bp, Zea mays
tctttttttttctttctttttttttttttttttttgtcgaatgctaattcaacaactttatttcacgtagaggtacggtacatatgcttacaaagaacatgttatttgagttcaaactttaatgaaccgctaaattgtttatttggatccgcattatacaccctaaaagtacagcatggcgccactggtaatacatttcaaaactacggtttaacaactttttgccttactgaaccactgcaaaaccagaacagggtaactcgctcttgctctcgggctgtctaaacctttgggcttacacctggcagaacgcacatttccaatatacatccatcaaccatagcaccaggtccaaaagaaaaatccaagaaataatagtcggcttaaatcagacatgatcaatcaagaccaagcaatatccttctatgtatggcctagaacaaaaagatgggacatgcacacattgtgttggatgtgtt

SEQ ID NO: 263630 - DNA, 727 bp, Zea mays
acagcccaagccaacaatcttcagacgcggactgtttcagcgcgcaccaccagttccttgttcggtcggaacgcagcgcagcggcggcggcgatagggagagaggagagagtctgcaggatccagcaggccgagggaggagtcagcggcgggccggagaatatgagcggcaacggcgcgaagaaggtggtcgatgcggcggtgaaggccggcaggacgatcatcgactgggacggcatggccaagttgctcgtcaccgacgaggcgcgcaaggagttcgccgccctccgccgcgctttcgatgacgtcaaccaccagctccagaccaagttctcccaggaaccccagccgattgattgggagtactacagaaaaggaattggatcaaaagtggtggatatgtacaaagaggcttttgaaagcatcgagatcccgaagtacggaggcactcttattaatgcgggcatttgccaactttgtaaagggccaaagtgttgctataaataatgcattggagcgctatcaggacattgacccaaccttctcagggacacgcgaatacaagcttttggcagaccttgcagcctctacggatgaaggagacgttggcaagtttactgatgcagtaaggagtttgacagcatgacacgcctgtatccttggtaaacaactctccttctgaagggcaagaacgagctgaagcatcaggaggaggatgaggatgatct

SEQ ID NO: 263631 - DNA, 976 bp, Zea mays
cggtctcgtgggttcggtctgaacgcagcgcagcggcggcggcgatagggagagaggagagagtctgcaggatccagcaggccgagggaggagtcagcggcgggccggagaatatgagcggcaacggcgcgaagaaggtggtcgatgcggcggtgaaggccggcaggacgatcatcgactgggacggcatggccaagttgctcgtcaccgacgaggcgcgcaaggagttcgccgccctccgccgcgctttcgatgacgtcaaccaccagctccagaccaagttctcccaggaaccccagccgattgattgggagtactacagaaaaggaattggatcaaaagtggtggatatgtacaaagaggcttttgaaagcatcgagatcccgaagtacgtcgacacagttactccccagtacaagccaaagtttgatgctgtgattgctgaattaaaggaggctgagaaagagcatcagaaggagtcagaaaggatagagaaggaacttgctgaaatggaggaaatgaggaaaaagatcagtacaatgacagcagatgattactttgagaagtaccctgaactcaggaagaagtttgacgatgaaatccgtaacgataactggggatattgaagagattggagagaactcttatgatgccatttccatgtccgtgaagaaccaataattttcctgtgccctgaattgggtggtttccatagcatgtgcacggggtttgggtggaatgcctacagaatcgactgtgtcaagctttcttgattccgtagaaacatgttttgtttgacctcatcatagaggatctccgcttttatcgtacaaagattgtgatatgttcttagcttctttctacctgaataagaggatttctgcagacccttttccaaaaaacattatgtgaagcattggtttggatgcttcaatcccaaaaaaaaaaaaaaaaaaaaaaaaaaaaaaaagaacga

SEQ ID NO: 263632 - DNA, 819 bp, Zea mays
cgtccaccttcaccgccaccgatcggtagcaacgcgcaccaccgcgtcgtcgtacggcagcacacggaaagagagagagagagagagagagagagaggaatgggcgaccacgagggtcacggggtcgatttcgagaagaaggccgatcagaagctctccggctggggcctcttcggcaataagtacgaggaagccgccgacctcctcgacagggctggcagcttcttcaaactcgcgaagaactggagcagagcggctgcggtatacaaaaagattgcagattgtcatttgcagggggataacaagcacgatgctgcctctgcttatgttgaggcagcaaactgctacaagaagttctccctgcaagatgctgcacaagcacttaacagtgccgttaatcttttccaggaaatcagtagactgaacatggctgcaagatacagcaaggatatcggtgaaatctatctgcaagaacaagatttagagaatgccgcagtctacctgaatcgcgctgctgatctttttgatagtgagggacaatcctctcaggcaaacagcatgacacagaaaatcgctgaaatatatgctcagctggaaaagtaccagaaagcaaccgagctctttgaagaaattgctcgtaaatcaataaacaataaccttctcaagtacggcgtcagaggcactcttcttaatgcgggcatttgccaactttgtagaggggaatgctgttgctataaataattcattggagcgctatcaggacattgacccaaccttctcagggacacgcgaatacaagcttttggcagaccttgcagc

SEQ ID NO: 263633 - DNA, 927 bp, Zea mays
attatattatcttgtttttttttttgtttttattatcttttttttgttttttgacaccacctgatttcattagatcaatggctcaaaatgggccgtaggattacacaaagcagaacggagattacaaaaggggagaacaataccaatggcccaacacagcccggtcggattacacaaacatgacgcaggctataacggctaggacgacaacagccgatcgacgactagcaccaccagagaacaacatactcgccagcacatgaggaccattgcgcatccacatggcccctcgtagcaacgtcgctccactgccgtgcggccctctaggtgagggaccgcgcaagcgtgagccgatcccagagacgatgatctcccttcaagccggcagcaacacccgacagcgcatccgggctccgcatgccaccatccagcgccgtacgagagcaggagaggcggaaaacaccgacccgacataagatctatgtgtcccttgttgacagaagagcgttgacggagcagaggtgccaatagggacaaagagacctgcaaagaaaaccctgacgaccaagccatgacgtgggccttgcaaaggtgggcaccttccacgtactgacatggagctttcgctgcaaggagaccgccatggagcccagtcccgccaaggtcatggcaccgccgagaatgggcattggagcagaccgagcgaaggtgttaggaccccccgcgcaccgggcacaggagctttcgctgctcaggactcccaccacatccacgatagggccccgccaaatggtgggcttcggcggagcaccaacagatcgggcgtcctgccccgacccagctggcagagaccgccggagagggccccgctgcatttcggcaatggctatcctcgtccgcttcgtaggggttggatccaggttgacg

SEQ ID NO: 263634 - DNA, 1574 bp, Zea mays
aaaggccaacccctattgcatggtggcagcaaatgggacacgtgtgtaaagctggattggtaatgtaggcagcacttacgggcgaccgtaagcagggtgactgcactaaagacaagaaatttgatccacccgctgccccttcccgtgtcggcccggaagcagaagcggcagaagggctccgaggcggcggcgcggctccccgccgtggcgccgctctccaagtgccgactccgcctactcaagctcgaacgcgtcaaggactaccttctcatggaagaggagttcgttgccagccaggagcgcctgcgccccagcgaggataagacggaggaggaccgatccaaggtcgacgacctccgcggcactcccatgaacgtcggatcgctggaggagatcatcgacgagacccacgccatcgtctcctcgtccgtcggtcccgagtactacgtcgggatactctccttcgttgacaaggaccagctcgagccgggatgctccatcctcatgcacaacaaggttctttctgtggttggtatattgcaagatgaagttgatcctatggtatctgtgatgaaagttgagaaagcacctttggaatcttatgctgacattggtggactggatgctcagattcaagaaattaaagaggcagttgagcttcccttgactcatcctgagctgtatgaagacattgggatcaggccacccaagggagtcatattatatggcgaacctggaactggaaaaactctactcgccaaggctgttgccaattcaacatctgcgactttcttgcgtgttgtcggtagtgaacttattcaaaagtaccttggggatggtcccaagctagtcagagaattgtttagggtggctgatgaactttctccctcaatagtcttcattgatgagattgacgcagttggaacgaagaggtatgatgctcattcaggaggggagcgtgagattcaaagaactatgttggagctgctgaatcagctagatggttttgactcacgtggagatgttaaagttattctagcaacaaaccgcattgaaagtcttgatccagccttgcttcggccaggccgtatagaccggaagattgaattccctctaccagatattaaaactagacgacgcatcttccagatacacacatcgaaaatgacattagctgatgatgtgaacttggaagagtttgttatgaccaaagatgagttttcgggtgctgatattaaggccatctgcacagaggctggattgcttgccttaagagaacgcagaatgaaggtgacccatgcagatttcaagaaggcaaaggagaaggtgatgtacaagaagaaggaaggtgttccggatggtctctacatgtagccaatctattcatcatgccgaacaagttacccgattgtgtgtgtactagcacatctcttcatcatgggagatatgttaccacaatacttgttgcatactgtgctaagtggtcaggagaaccttgtattaattaattatcctttcattgtctcaaagtaaaaatttcccttgcgctacgaaagcgtgaaaaaaagccagcc

SEQ ID NO: 263635 - DNA, 687 bp, Zea mays
tcgacacacgcctccgggatatgtcaaagtaattctagcaacaaatcgtattgagagtcttgatccagccttgcttcgcccaggtcgaattgacagaaagattgaattccctttacctgatgtcaagactaggcggcgcatcttccagatacacacatcgaaaatgacactggctgatgatgtaaacctagaagagtttattatgtcaaaagatgagttttcaggtgctgacatcaaggccatttgtactgaagctggcttgcttgctttgagagagcggcggatgaaggtaacgcatgcagacttcaagaaggccaaagaaaaggttatgttcaagaagaaagaaggcgtgccggagggcctatatatgtgagactcatcagcagcgctattagtctttgtgagagaactggcgtttgtaatctgcttaaatggtccgaaaatgtttgcttacagcatttattttggttggaaacacacaactcaaacaaacagttatcctattatgagtacttggatatatgaaatggcagcatcgagtcaagatgaggttgaatgttggttgtctgtgcaggcgtggacatgtatgacaagcatcctaggtttcaatcctaggttaatatgataattttatttttttatataaaaaaaataacctctgactaccacaaagcaattacttacatt

SEQ ID NO: 263636 - DNA, 425 bp, Zea mays
ggaagattgaattccctctcccagatattaaaactagaagacgcatcttccagattcacgacatcaaaaatgacattagctgacgatgtgaacttggaagagtttgttatgaccaaagatgagttctcgggcgctgatattaaggccatctgcacggaggctggattgctcgccttaagagaacgtagaatgaaagtgacccatgcagatttcaagaaagcaaaggagaaggtgatgtacaagaagaaggaaggtgttccggatggtctctacatgtagtagacgtctcctgccttgtcagaacaagttatcctcgtctctctcgtcatgggagatttgattgccacggcacttgttgcacacctataagtggtctgagaacgtgtattatgctttgattggttcaagtaaaatttctcttggag

SEQ ID NO: 263637 - DNA, 382 bp, Zea mays
agctaacctgatcgttttcctcatttcaccttccaccctcccccactttctccttctcaccgagtcacaaagccaaaccctaattcacggccgccggagatgggacaaggttctcccggcgggatgggcaagcagcccggcctcccgggcgaccgcaagcagggagacggcaagaaagagaagaaatatgaaccacccgctgccccttcccgtgtcggccggaagcagaagcggcagaagggctccgaggcggcggcgcggctccccgccgtggcgccgctctcaaagtgccgccttcgcctactcaagctcgaacgcgtcaaggactaccttctcatggaagaggagttcgttgccagccaagagcgcctgcgccccagcg

SEQ ID NO: 263638 - DNA, 855 bp, Zea mays
cccacgcgtccgcccacgcgtccgcccacgcgtccgcccacgcctcctgacggttgctctagatccgttcatcctggtggttttgtgaggtcgaaagcggcgagcgaattagaagatgctggacaagctgtgggacgacgtggtggccgggcctcgcccggagacgggcctcgagaagctccgcaaggccaccaccgcccgcccgctcgtcatcaacaaagacgcggacggcggcagctacaagcgggcgcagtcgatgccgtcgaccccgacgacgccggtgacgccgtcgtcgtcgctcgtcgacgacgccgcgcggcgccggcaacgtgtggcgcagcgtcttccacccggggagcaacctggccaccaagggcatgggcgccaacctcttcgaccggccgcagcccaactcccccaccgtctacgactggctctacagcgacgagaccaggagcaaccaccgctagatcgggcgagatggatggacagtgaagaggccatgtttgctggtccttgtggttatctaaaacgcacgcatgctctattatagctagtcatcactatatatatacttgtgtttgtgtattgttgttcttgttctgctggtgtctccgccgtttaatttgacctatgttatggagtgagtgatatatgtgccgtcactcctagtatatagtagtgagtgactagttggtatgtgtagtactgtactatcttttctccatatgcatgttttgccagcgcgtaatgaatgtaatgtcagtactgctactacgtgctctgctacttccaaaaaaaaaaaaaaaaaaagaaaaaagaaatagaaaaaaaaaaaaaaaaggaaaaaaaaag

SEQ ID NO: 263639 - DNA, 551 bp, Zea mays
  unsure (1)..(551): unsure at all n locations
atgacgccggtgacgccgncgncgnncgcgttttgctttgcgccggcaacgtgtggggccccgtctcccacccggggagcaacctggccaccaagggcatgggcgccaacctcttcgaccggccgcagcccaactcccccaccgtctacgactggctctacagcgacgagaccaggagcaaccaccgctagatcgggcgagatggatggacagtgaagaggccatgtttgctggtccttgtggttatctaaaacgcatgcatgctctattatagctagtcatcactatatatatacttgtgtttgtgtattgttgttcttgttctgctggtgtctccgccgtttaatttgacctatgttatggagtgagtgatatatgtgccgtcactcctagtatatagtagtgagtgactagttggtatgtgtagtactgtactatcttttctccatatgcatgttttgccagcgcgtaatgaatgtaatgtcagtactgctaaaaaaaaaaaaaaaaaaaaaaatgggatagatataaaaaataaaaagagagggggg

SEQ ID NO: 263640 - DNA, 498 bp, Zea mays
gcgcgggacaacacaccagtctaaactgaatcatatcaggggaccaacctggccaccaagggcatgggcccaacctcttcgaccggccgcagcccaactcccccaccgtctacgactggctctacagcgacgagaccaggagcaaccaccgctagatcgggcgagatggatggacagtgaagaggccatgtttgctggtccttgtggttatctaaaacgcacgcatgctctattatagctagtcatcactatatatatacttgtgtttgtgtattgttgttcttgttctgctggtgtctccgccgtttaatttgacctatgttatggagtgcgtgatatatgtgccgtcactcctagtatatagtagtgagtgactagttggtatgtgtagtactgtactatcttttctccatatgcatggtttgccagcgcgtaatgaatgtaatgtcagtactgctacataaaaggtagaaaaaaggggtggccgccgtcttttga

SEQ ID NO: 263641 - DNA, 1015 bp, Zea mays
ttcacgcgtccgcccacgcgtccgcccacgcgtccggttctcataaatgaaagacgcggacggcggcagctacaagcgggcgcagtcgacgccgtcgaccccgacgacgccggtgacgccgtcgtcgtcgacgacgccgcgcggcgccggcaacgtgtggcgcagcgtcttccacccggggagcaacctggccaccaagggcatgggcgccaacctcttcgaccggccgcagcccaactcccccaccgtctacgactggtgagcagcaccgtctccgtcgtctccatctcttgcccagcctagctacgtgcgtggtctgcgtgctcaaacaggacagcagcagcagatccaggaccaaactaattgagcaagaaccacgcgaatggttcgattttattttttatttttttaaaatcagtttttcatgcgtgtataataatttctcaggctctacagcgacgagaccaggagcaaccaccgctagatcgggcgagatggatggacagtgaagaggccatgtttgctggtccttgtggttatctaaaacgcacgcatgctctattatagctagtcatcactatatatatacttgtgtttgtgtattgttgttcttgttctgctggtgtctccgccgtttaatttgacctatgttatggagtgagtgatatatgtgccgtcactcctagtatatagtagtgagtgactagttggtatgtgtagtactgtactatcttttctccatatgcatgttttgccagcgcgtaatgaatgtaatgtcagttcttaaattataaaaaattattattaaatttttttaaaataaaatttaaattttttattatattattttttttaatatttcttatatataaattttatataattctattatatttttttattttttaattatatattttatttttaattttctttcctttttttttgtggagtgttgtttttacattcttttcataaaataatatagtaatctttaatttttcatcatatattt

SEQ ID NO: 263642 - DNA, 825 bp, Zea mays
  unsure (1)..(825): unsure at all n locations
tgcgttcctccgtagtatgtatcatgagcacttgattatataagaacgccnaaagcaccgagcgaattataagatgctggacgaggctttaaactacgtggtggccgggcctcgcccggagacgggcctcgagaagctccgcaaggccaccaccgcccgcccgctcgtcatcaacaaagacgcggacggctgcagctacaagcggtcgcattcgatgccgtcgaccccgacgacgccggtgacgccgtcgtcgtcgtcgtcgtcgacgacgccgcgcggcgccggcaacgtgtggcgcatcgtcttccacccggggagcaacctgtccaccaagggcatgggcgccaacctcttcgaccggccgtagcccaactcccccaccgtctacgactgtctctacagcgacgagaccaggagcaaccaccgctagatctggcgagatggacagtgaagaggcccggtgtctctgtcaggccatgtttgctggtccttgtggttatctaaaacgcatgcatgctctattatagctagtcatcactatatatatatatatgcttgtgtttgtgtattgttgttcttgttctgctggtgtttgaggataaagactccgccgtttaagttgacctatgttatggagtgagtgatatatatatgccgtcactcctagtatatagtagtgactagttggtatgtgtagtactgtactatcttttctccatatgcatgttttgccagcgcgtaatgaatggaatgtgtactgctagctactaaaaaaaaataaaagagcttaaagaaaacgaaaaaaaaaaaacaactaaaacaaga

SEQ ID NO: 263643 - DNA, 286 bp, Zea mays
acctggttgctctagatccgttcatcctggtggttttgtgaggtcgaaagcggcgagcgcattagaagatgctggacaagctgtgggacgacgtggtggccgggcctcgcccggagacgggcctcgagaagctccgcaaggccaccaccgcccgtccgctcgtcatcaacaaaggtctcttcagcgggcgagaccaggagcgaccaccgctagatcggggggcgagaggggtccacagtgaagacgccatgtttgctggtccttgtggttatctaaaacgcacgca

SEQ ID NO: 263644 - DNA, 188 bp, Zea mays
cccacgcgttcgcccacgcgtccgcccacgcgtccctcactcctagtatatagtagtgagtgactgcttggtatgtgtagtactgtactatcttttctccatatgcatgttttgccagcgcgtaatgaatggaacgtgtactgctagctaaaaaaaaaaaaagaaaaagaaagaaaaggagaagccag

SEQ ID NO: 263645 - DNA, 1944 bp, Zea mays
tgcctgccgcacatgctttaagtcccactccccacctccccagatctccggcctcctccccaccgcccccattcctcccctcggccgcaaccgtagccgccgcactacggagcaagatcgtcgggtagacggacgggcgggcgggcgggcgcggctctgtatctatctgtcggtgggagaccgcgtgtgtcggttaggcggcgggtggcaaggaagaatggcggcgagcggcagatccgtcgcgtgctgtgccgccgcgctgctcgcggccgcgttgctcctctccgcaccgactgcaacagaggcttatgattcgctggatccaaatggcaacatcaccataaaatgggatatcatgcagtggactcctgatggatatgtcgctgttgtcacaatgtttaattatcaacaatttcggcatatcggcgcacctggttggcagcttgggtggacatgggcaaagaaggaggttatatggtcaatggttggggctcagaccactgaacagggcgactgctcaaagttcaagagcagcccaccccattgctgcaagaaagatccaacaattgtcgatttacttccaggcactccatacaacatgcaaattgccaattgctgcaaggcaggagttgtaaatacctttaaccaggacccagcaaatgctgcttcctccttccagatcagtgttggtcttgctggaactaccaataaaactgttaaggtgccaaggaacttcactcttaagactccaggccctgggtacacatgtgggcgtgccattgttggcaggcctacaaagtttttcaccgcggatgggcgcagggcaacccaagctctaatgacatggaatgtgacctgcacatattcccaatttcttgctcagaagactccatcctgctgtgtatctctctcatcgttttataatgacacaattgtgaactgcccaacatgctcatgtggctgccagaacccaagtgggtcaaactgtgtgaatgaggattcacctaatctacaagctgcaattgatggtcctggcaaatggactggtcagccccttgtacaatgcacttcccacatgtgcccgataagaatccactggcatgtgaagctcaactacaaggattactggagagtgaaaatcactatcacaaacttcaacttccgcatgaattacacgcagtggaacttagtagctcagcatccaaactttgataatatcactcagttgttcagcttcaactacaaaccacttactccatatggtggtggcataaatgatacggcaatgttctggggtgtaaaattctacaatgatctgctgatgcaagccggcaaacttgggaatgtgcaatcagagctgcttctccgcaaggactcccggactttcactttcgaaaagggatgggccttcccacgccgagtttacttcaatggtgataattgtgtcatgccatctcctgaaaattatccatggctgccgaatgcaagccctctaacaaaaccattggcactcccattcttggtattctgggttgccttggctgctctgttggcttatgcatgattagtgggatcaagaggtttagcaagtttcaagttgatgtcagattccatgaggtgcactgcaacaagtcatttgttcattcaattccatggttgcacagaaaagatgaggcgatgccaagaaaaagtcgatatgtctatgtgtttaagttaaagggccaaaatgtatttcttgtttggtatatagcagccctacaacactttggtgaacttagttactgcagattaggtaattacagttgcaccttttgtattttatagcaaacccagaatttttcattggattctacgactgcccctcttgtagtaaatgcaagctttccctgatactcccgggttaagagttgtgggttgggtgagacaatggtgattcagatacct

SEQ ID NO: 263646 - DNA, 1217 bp, Zea mays
attgatgatatgaatgtgtagtgaactaaataaaaaatgtgtagggtccactttatgaatttaccgcaatccacaacgatccatgcagttaaatactagcgactcacatatcaaacgttcccaacccccatggactcccaagtttttagcaaaatcaagcccggaccaaaccagaccgaacacctgagactcctccaactcggcccgggcccaaatgatagcaatcgtattccatggctaaagggcaccaaacttccactggacgcggacagacaaactagttcagcaccaggcgaatctgcgtgcaagtgcaaccacaccaactactcagctggggctgtgtcggctttggtttcagtcactttgccagaatcagtggactcagacttgccacttccctcagatttgccctcgctcacagtgagcttcgccagcaatccagccgtggaaccaccatcttcaccttccttgccctcgttctttgtaagcgactcagctatctcctcaaccaactccttgaacttcttgcagttttctaccgaaccaaacctgatggcaaacatctcctccttaagttcgccatcggcaaagtcagcagcgtgccaaacacacgacttgtcgctgcccgcatgctcctgcatcttcgtggtggaggccacgaggtggttcgcgcagatcttaagcgttttagcctggcgcatgactaggcggaccttgccggtctgcttgtgcttgagaagcttgacagcgcccgtgccccgttccttccattggttaccgtctttgtcgaatcggtacagcttcgccttcatgtcgagcaggacgtcctcgtcctcctcgccggtggtgacggctacctcctcaagccgcacgatgggagccacctgggcgcccgtgtcctcctcctcccccgcggcggcggcggctgaggcgtcctcctcctcctcacccgcctctggccgctccacgacaggctccttgtccgccatgaggtgggtgatcgcggcgcgattcgattcgaacttcgaagaggatgcgacggcggggcaagggaggaattctccggaagctttgggtgcaggcgctggctgcgcctgcgtgctagggtttttgtgcgcggaggggagacgtatagccagcgaggataggtccctctccagagagtggggccccatgtgcggcccacgcgtccgcccacgcgtccgcccacgcgtccg

SEQ ID NO: 263647 - DNA, 867 bp, Zea mays
ctgctactgctgcacgcgccgcggccggtaatggctggaccgacccacgcgatcctttttttcaggacccaccggatgctgctttctccttccagatcagggttggacttgctggaactaccaataaaactgttaaggtgccaaggaacttcactcttaagactccaggccctgggtacacatgtgggcgtgccattgttggcaggcctacaaagtttttcaccgcggatgggcgcagggcaacccaagctctaatgacatggaatgtgacctgcacatattcccaatttcttgctcagaagactccatcctgctgtgtatctctctcatcggtttataatgacacaattgtgaactgcccaacatgctcatgtggctgccagaacccaagtgggtcaaactgtgtgaatgaggattcacctaatctacaagccgcaattgatggtcctggcaaatggactggccagccccttgtacaatgcacttcccacatgtgcccgattagaatccactggcatgtgaagctcaactacaaggaatactggagagtgaaaatcactatcacgaacttcaacttccgcatgaattacacacagtggaacttagttgctcagcatccaaactttgataatatcactcagttgttcagcttcaactacaaaccacttactccatatgggggtggcataagtaagtaaacttgtcttatagaaaagaatagaaataaaccaacctacctcccaacctctcctgatgtagtttgtctgtcccgtttcagatgatacggcaatgttctggggtgtaaagttctacaatgatttgctgatgcaaagccgcaaactttggaatgtgcaatcagaactgctt

SEQ ID NO: 263648 - DNA, 440 bp, Zea mays
taccgcgtccggaattcccgggttcaggagtgaacaagcaattcaagatcttacttaactgtagttcaccattaagggatccattgccagactcagtgtgtggatcttcgaaagcggacctcgaacgtaacatagacttcatatattgcgtgaattcattatccatcttctttctataattgggatctttgtttgatgtcaaccctgtgattgctctctgcagaggcttacgattcgctggatccaaatggcaatatcactataaaatgggatatcatgcagtggactcctgatggatatgtcgtaagtagaattgcccactctaacagctgtatctctttcatctccagcttggtaggccctggtttattctattaaatagccccgtttgacctgtacaatataagttaatgtaacatggtcaatggctgatttggaaa

SEQ ID NO: 263649 - DNA, 628 bp, Zea mays
cccacgcgttcgcggacgcgtgggtagttctagatcgcgagcggctgccctttttttttttgttttttttgtgtactgaaagaaatcaaaaaatagatgcaccttatatgaatttaccgcaatccataacgatccacgcagtgaaatactacacttgcataccgaacgttccaaccccaattaactcaagtttttaagaacaaacccaaacacatgagactgctccaactcgccccaaaaaaattagcaaacatatttcatggctaaagggcagaggaactgattcagcacggggaggatctgcgtgcaaccacaccaactactcggctggggctgcatcggctttggtttcggtcactttgccagaatcagtggactccgacttgccactttcctcagatttgccctcgctcacagtgggcttctccagcaatccggccgtggaagagccatcttgaccttccttgtcctcgttctctgtaagtgactcagcaatctcctcaaccaactccttgaacttcttgcagttttctaccgaaccaaacctgatggcaaacatctcctccttcagttcgccatccgcaaagtcagaagcgtgccagacgcacgatttgtccggacgcgtggg

SEQ ID NO: 263650 - DNA, 357 bp, Zea mays
gatgaggcgaagccaagaaaaagtcgatgtgtgtgtgtgtgtgtgttggtaagttaaagggccaaaatgtatttcttgtctggtagtatatagcagctctacaacactttggtgaacttagttactgcaaattaggcaattacagttgcaccttttgtattttatagcaaacccagacttctattggattctatgactgcccctcttgtagtaaacgcaaggcttcactggtactcctgtttaaagattggtcaaatagaagagacggcggtgattgtctgattgagataactaagttctggtgtcttgatccatttgacccctctgctgcaaagaaaattgacacaaattgctaat

SEQ ID NO: 263651 - DNA, 316 bp, Zea mays
aaccggtacagttcgccttcatgtcgagcaggacgtcctcgtcctcctcaccggtggtgacgagtacctcctcaagccgcacgatgggggccacctgggcacccgtgtcctcttcctcccccgcggcggccgcggcggaggcgtcctcctcctcagacgcctcggatcgctccacgacaggctccttgtccgccataaggtgggtgatcgcggcgcgattcagttcgaagaggacgcgacggcggggaagggatgagagacgagtaggtgttttccagaagctttgggaattggagcaggcgttggtgcgcctgcg

SEQ ID NO: 263652 - DNA, 1415 bp, Zea mays
ggacctgcgaccccaaatcaattccaaattcaatccggtctcagtggttggcccgccgctgccagtgccagatcgaatcggactctcggctcgtgtgcagcccaccggcgagacgccgaagctatatttttatgcccatctgatccgatgcgtggtgtggcgtcgtctccgcttttactagatcatcagtagccagctcaggagccgagcctggtcagggtagccaagcccatcccggtcctctcccggcgtcttctccctccgcaccgcggctccggcgatggcgggcgtcggctccgcgctgcgtcggctctacctctccgtctacaactgggtcgtcttcttcggatgggcgcaggtgctgtactacgcggtcctgacgctgcgtttgagcgggcacaaggccgtctatgccgccgtcgagaggccgctgcagttcgcgcagacagccgccatcatggagatcgttcatgggctcgtagggttggtgaggtctccggtctctgcaactcttccacagattggatccaggttgttccttacgtggggtgtcttgtggagttttcctgagacccagtcacaccttcttgttactaccctggtcataagctggtctatcactgagatcatcagatactctttctttggaacgaaggaggcatttggctttgcgccttcctggttattatggcttaggtacagcacctttatgttgttgtatcctactggtatctctagtgaagttggtctgatctacattgccttgccttacatgaaggcatcggagaaatactgtattaggatgcccaacaaatggaacttctcatacgattacttctattcatctgtccttgccctcctgatctatgttccaggaagcccacacatgtaccgttacatgctctcccagaggaagaaggcgctatcaaaggccaaagcggcgtgatgatgccgcgcaagcaagggaatcggtggactggtttgcgtgatggatgccggaacatgttcaagttttcgacatcccctgtagaatctagtggtcgggggatatatattactagaatggggctcttcatatgaactgccccgtatgcgtaatgtgttgtaccggagtcatcatttcagatatcagctgttgcgtggttaaatcgtagtttgcttccggatcacccatcagttggggggtggatttccatgttgattatatatggcaatgcgttccgcatccttccctcaactggtgctgtgctctcttgtttctagcgtacaatgtatgatggattttatcccgggccaggaacattttgcatgctctagcttcatgttgattattatatagccaaattagcaatggatttcttacttatgaccctgattttttttaaaaaaaaaccgcccagggggatccccccctg

SEQ ID NO: 263653 - DNA, 451 bp, Zea mays
cggacgcgtgggcttctacgccgtcgtcgaggccgctgcagttcgcgcagacggcagccggcttggcgggttggcgaggtatccggtctctgcaactcttccacagattggatccagattattccttacgtggggtgtcttctggagttttcctgaggtgattgactgactcgagaatttgccgacgcttgaagaacgacctaatgtgagcttttacatacttgatgaacagcttgagctcttgagcaaggtgctgaatgcaggggatgacatgattggtgttgagcgcttagaagaagattgtgatggcaaggttctatctgtttgaggttgcttcaccattcctcaaagcacattgcatcttgctttagcgcttttttgattgccgtcgtcgaggccgctgcagttcgcgcagacaacagccatcttggaggtatctaattccaatatt

SEQ ID NO: 263654 - DNA, 443 bp, Zea mays
ttcttattgaccagggatatagcttcaaggttatcactagtttgccgccggctgaagaaggacctaatctgagctattacacacttgatgaacaacttgagctcttgagcatggcgctgaatgcaggggatgacatgattggtgttgagcgcttacaagaagattctgctggcaaggctcttattagagcacgacgctctgccggatcaatgagtgccttctctggagctggtggaatggtctacatggagtacagcactggcaagggaaagggtgatcagaagaaacacaaggacccgtaaaagaggcatcagtcgttcaagaaacgctatgcgtagcctgttgcgctttgctagaaatgatttggttcatgacaaccttgttttggcatcaaagtcgttggtttaaacacacaaggccatgatatgcacagttgctgctct

SEQ ID NO: 263655 - DNA, 562 bp, Zea mays
caattatttatcggataatttgtgtgtcgtcgcaacgcacggactattctattatatttctggacctacaattggatgttgatattatgctcctgccataaagtccaatgtatcatgctaactgtacactgatctgtaacaggtgctcgaccgactcgagagtttgtcgacgcttgaagaaggacctaatgtgagcttttacacacttgatgaacagcttgagctcttgagcaaggtgttgaatgcaggggatgacatgattggggttgagttcctagaagaagattatggtggcaagattcgatgtcgcagtcacccagatgtcattgcttgttcctgattcacgacgagatgtatgcggttaggttgaaatccctcgagaacaatggggcgcacggtgctctcagattaagaagaagatggcgacgatagcacgagcatagatggcggcgagcgggcgcggacgacagcacaacggtcgcgcgagctgtggccagatgggttattttcatcttggtgcaggataactgacgaccccaaccccaagaggtggtgcacgacg

SEQ ID NO: 263656 - DNA, 1661 bp, Zea mays
aggtggcccttctccgcggaagccggcgggccgccgcctcccttacccctctcgccgtgctcctccgcaccgtcattccctagcattccccacgggcgaggtaaagaaacattctcccaccccctccagccccataggtgccaccgggatttctcttgcggttgcttggcccagatctgcggcgcattcggcgtttctgatctcgcgtgcacctcgtttccctcggcggtggatcagtggcggcttggtcgagatgggcgatgcggttgatgacatcatctgtgcaacggatgcggcggtcgccgtcgaggatgcggccagtgggaagcccgcaatgctctctagcttaggggggcagggtgaggaagagcatgaggagaaggacaatgaggacaagtcaggcgagagcgaggtgatcaacccgccagaagacgctggcggggaggccacctcacccctggaaggcaggaagcctcgcctttccaaggggaatcaaagccatgtacctaatgctgtcaaatctaagagtccaaggagtggagatgaaaatcagacaaggagaaaagctcccaactcttcttttcctaaggcacccattgtccaggagtcccatggtgactctggtgtcggcagtaataaagctggcaagaatgagtctcactcatccccaattgatgcagcattgcccgatgagtccaaggagaaaaggaaaactcaaaagccaccagcacagctctcttccatcaaaagagatgaagaacagtcaaatggtgagagtgcaaagcctcgaaaagttggaagcacgccatcatatggtttcaccttcaagtgtgatgagagatctgaaaaaagacgagagttctattcgaagcttgaggagaagattcatgcaagagagttagaaataagcaatttgcaagccaagtcaaaggaaactgaagaagcagaactcaaaatgctgagaaagagtttgaatttcaaggcaacaccaatgccaagcttttataaggaaccaacccctgccaaggttgaattgaaaaagatccccccaaccagagctaaatcaccaaagcttggtcggtctaaaaacaagtccatatcagagactgaagaaaatactactacggaccaacctgcccgtctgagccttgacgaaaaggtttctcaaaacggtgtgaaaaaaccaaccccgtcgagttcagcaaagaagccccagagaaagtcactccccaggctgccatctgaagaaacttgtccgcttgatgccacctcaaggcagctgaagaacaacaaactggatgaagttaatgctcaggagacaggatcagctacagggcaggtacaaggaagtgagacggaaacagattctgttcagagcgcaactcaagctggagctaaccctgatgaacagagtgtcgctcagtgaacagagtgtcgctcagtgaagatctcggtggccaagccaagtgatttgtgatggatggtgtgccttatctttgtgtgatgttgtgcttgtctactagagtgacttgtggcctgtatcatgctgtgttatactcctgtttttgttttcctgcgattgagcctgtatgttgcttatcaatctagatagcttttgttcataatctacagatatatccaaattgtcctaagtcatttgc

SEQ ID NO: 263657 - DNA, 430 bp, Zea mays
agtcggccttctccgtggaagccggcgggccgccggctcctttgtccctgtcgtcgtgctcttccgtaccgccattccctagcactgtccacgggcgaggtaaagaaaccatctttccaccttctcccaccccctccggacccataggtgccaccggcatttgtcttgcgattgcttggcccagatctgcgtgcattcggcatttctcgtgcgtagatctcgcgtgtacggtgtacctcgtttccctcggcgggtggatcagtgacggcttggtcgagatggacgatgtggttgatgacatcatctgtggaacggatgcggcggttgccgtcgaggatggggccagtgggacgcccgcaatgcctagcttagggtgccagggtgaggaagagcataggaagggcaatgaggacaactcaggtgagagcga

SEQ ID NO: 263658 - DNA, 467 bp, Zea mays
ttggaacgacgggtaactaaccagctccggcccaaacacagccacgagcacctacacccccccgctgtcacctctccttccatcgccacaggcggcccttctccgcggaagccggcgggccgccgcctcccttacccctctcgccgtgctcctccgcaccgtcattccctagcattccccacgggcgagtggcggcttggtcgagatgggcgatgcggttgatgacatcatctgtgcaacggatgcggcggtcgccgtcgaggatgcggccagtgggaagcccgcaatgctctctagcttaggggggcacggtgaggaagagcatgaggagaaggacaatgacgacaagtcacgcgagagcgaggtgatcaacccgccagaagacgctggcggggaggccacctcacccctggaagggttgaagcctcgcctttccaaggggaatcaaagccatggacctaatgctg

SEQ ID NO: 263659 - DNA, 588 bp, Zea mays
cggtcttgaattcccgggtcggccgacgcgaacgaagagattgtctttgtctcagggggaaattgttttcaacattgggaagagtgtagttgatgacaaatctgatactcttgcatgcaaacggcctggattacagaaagaaggatcaaaggttgtctatggtgttccaaaacatggaaagaagaagtttatggaagtaagcaaacattattacgcaggccagtttgacaagatttctgagggtaatgcatctaacagatttgtgaaacatctggtgacgcaattgccaagggaacgtgaaaatgattccaaagttgatcctattagaggaaggagagtgggtgagacgaggtctagattacctaaacctacgaagtctcagagcgttcgagctagcagtgctcctggaaatgattccttccccatgcatgttcagaatacttgtgtttctcaaaggagttttggttttgcgggaagttcgacaagcacttccaacaatgaaaagtccacttcagaaaaaaataatcctgcgcttggtgtgggctttagaactgaagttccttctgtttctgaactgcaaactgcatc

SEQ ID NO: 263660 - DNA, 391 bp, Zea mays
gcctgccgtaccggtccggaattcccgggtggagggacgcgtatcgcccaccccctcttatctccttcccccagccgccctccgcctccgcgccatcgacacgctggggagcgtcgctgcctgctgctcgcgcggctacacgcaggtcataaacagcatatggcgctagtacagttcaacggtgccttggttcctcaactcggtgaaaagcctcggctgctatcgctcatcacctgcaatcgcaaaggctacctattctgatgcaagattcctgacaccaaaaaccggttcaagaggtagaggtaaacaacttctatcacctagttatagtttgcattcacagacctcttctgaacaactaaaccatgtaccatcgtcaagatttcgccag

SEQ ID NO: 263661 - DNA, 469 bp, Zea mays
  unsure (1)..(469): unsure at all n locations
gtaccggcccggaattncngggtggaccgacgcgtgcgcccacgcgttcggatggattctcaagcgccgcttcgtcctcctctagctttcgcctgcttcatcttcctttgctcatccttctgcgcagcaaatgggatgtacgacagggttggtgcggcggcgtcagatggggagagcaggaggatgcggctgcacaccgacgggagccgcggcgacgcgcacgcgtggcctgggtacctctacacccgagcagttgggagatgcacaccccaattctggagcagcggagccgagccctggcccaacatcgtcccacaggaagcggcggtggcgaaggtgttcgggtctaggtccgtggagcgctacgggccgcgcctcaccctgctggaagctaccatgaggaccgacgatgccggtggcagcgccttcgtgaagctcgtgaagcaagggagcgccgccctcctcaacg

SEQ ID NO: 263662 - DNA, 314 bp, Zea mays
gtccgcatttcaaactgggctccataaagttctgtcgcctcgcctgtgacctgtagggtgtagggtagcagcaggcagcggaggggagagagagagaggggggatggattctcaagcgccgcttcgtcctcctctagctttcgcctgcttcatcttcctttgctcatccttctgcgcacaaatgggatgtacgacagggttggtgcggcggcgtcagatggggagagcaggaggatgcggctgcacaccgacgggagccgcggcgacgcgcacgcgtggcctgggtacctctacacccgagcagttgggagatg

SEQ ID NO: 263663 - DNA, 545 bp, Zea mays
  unsure (1)..(545): unsure at all n locations
gctagttgtttcttgaaccttgaactgctgacctggccaaaggagagaatatatggaaaccaaggagcgaagactcttcaagcctcattacctcatatctatttaactatagtgaaaaaaaatccgaacaaagaatccatggtggtggaatttcggatcaatataagtggcggagttgggattggttcttggtgcaaaagcaagagcaaaagatcatctctatccgtatcctagctttggtggtccgcagaacaggtggttaagaatagggagaaacaagggttaggtggcagaggaggcagtgaaatccggccaaatctcgacgcaacttttcttgccgattgttggtgcgtagtaagatcctagttgaatccgtaggacgggcgctaatcggaggaacttgcatcgattcttgcgtgctgacggtaccggcaaggcggcaagataagagttggtgcctgccgattgcagggacagggacggtgtttgtggaattgcctncttggaggangctggtgagagggagaaaggatgacgatgccatg

SEQ ID NO: 263664 - DNA, 976 bp, Zea mays
gtcggcgcgcccattcccgtctcctccctcctccccaccccaccccaccccatcccacctcggatctgctgcctccaccgtttcaatccacatgcgagcggaaatcgagcgggcgaattgaatcccgtcccgttcgggctcggccagcgagcgagcggcgtccggccggctgggcattggttcgtgctcgctcgatcgatcagaaaatggcgcatcgtgtgaacaacgagtacgactacctcttcaagatcgtgctcatcggcgactccggcgtcggcaagtccaacatcctctcgcgattcacgcgcaacgagttctgcctcgagtccaagtccaccatcggcgtcgagttcgccacccgcaccctccagatcgacgggaagaccgtcaaggcccagatatgggacaccgccgggcaggagaggtaccgtgcaatcacaagtgcgtactacagaggagccgtgggtgcgcttctagtctacgacatcacgaagaagcagacattcgaaaacatacagaggtggctccgcgagctccgtgaccacgcggactccaacatcgtgatcatgatggtcggcaacaagtccgacctgaaccacctgaggtcggttccagaggaagacgggcaggcgttggcggagaaggaaggcctatccttcctcgagacatccgccctcgaggcccttaacgtcgagaaggcgttccacaccgtcctctccgacatccatcagaccgtgagcaagaaggcgctcgccgcgcaagcgtccgcgtccaccaacgggcgctcgatgcaagggaccaccattaacgtcgctgagtcgtccaccgtcacgaaaggctcctgctgctctagctgaagagccgcttccgacaggcctcgtcggaagggttcgtttccgccgagctgcacatcgctgcgtgtaggttgtagatcgcttatttgcgttatctgcctgccttccaaagccattgattg

SEQ ID NO: 263665 - DNA, 803 bp, Zea mays
cggacgaactgaggaaaaaaaaaacacccacacccacacccgcgtccgcgtgctctctctgccccatccgcgcgcccctcctcctccaccgcccgtcccactcccgccgccgccgccgcccggccgtctgctggcgatggcgtaccgggcggacgacgactacgactacctcttcaaggtggtgctcatcggcgactccggcgtcggcaagtcgaacctgctctcgcgcttcacgcgcaacgagttcagcctcgagtccaagtccaccatcggcgtcgagttcgccacccgcagcatccatcagggccgtcccgaccgaggacgccaaggccttcgccgagcgccagaacgccttcttcatggagacgtcggccctggaggcgatgaacgtggaggacgccttcaccgaggtgctcacccagatctaccacgtcgtgagcaagaaggccctcgacatcggcgatgaccccgcagcgcctcccaggggccagaccatcagtgtcggcggcaaggacgatgtgtccgcagtgaagaagtctgcctgctgctcgtcttagcttggaagggggtaggacatgtacttgggttggttggttacttgtgcagtagagagcgcaggacgttatttgcagtcatggtccttgagctgtattcatgtgttaccagctgtctcgttgatttttgccatttgatacatttaattcattcaggaatgcagccggcgggtatagcttagggacatggaagtgtgcggctatcgtatttttttcatataacaaagccttataagcaatgttgctttc

SEQ ID NO: 263666 - DNA, 776 bp, Zea mays
cacatctaggaggcttcttccgctcgctcaggtccctccgcctccgccgtatcggagggagaggaagcggaaggcttggaaggagaagagaatggcggggcggcgcgcggaggaggagtacgactacctgttcaaggtggtgctgatcggggactcgggcgtcggcaagtccaacctcctctcccgcttcacccgcaacgagttctgcctcgagtccaagtccaccatcggcgtcgaattcgccacacggacactccatgttgagggcaagatcatcaaggcgcagatctgggacacggcaggccaggagcggtaccgggcgatcaccagcgcctactatcgcggggcgctgggcgcggtcctggtctatgacgtgagcaagcccaccaccttcgagaacatcagccggtggctcatggagctacgcgaccacgccgacgccaacatcgtgatcatgctggttgggaacaaggtggacctgcgccacctcagggctgtcccgaccgaggacgccaaggcctttgccgagagggagaacgccttcttcatggagacgtcggccctggaggcgatgaacgtggagggcgccttcaccgaggtgctcacccagatctaccacgtcgtgagcaagaaagccctcgacatcggcgatgaccccgcaacggcccccaagggccagaacattaatgtccgccgcaaagaccatgtgtccccaatgaaaaaatctggctgctggtcgtcttaacttggaaaggggtaggacatgtacttggggt

SEQ ID NO: 263667 - DNA, 582 bp, Zea mays
tgctctctgccccgggtcggtttaattattgtgagggggtgctcatccaccgcccgtcccgacggcgccagcccaaggccaggcatacgccagcctctcgcaccacgcgtatcgcgtgcccgcccgaccggctcgtggcggaggcggcgtaccgggcggacgacgactacgactacctcttcaaggtggtgctcatcggcgactccggcgtcggcaagtccaacctcctctcccgcttcaccaagaacgagttcagcctcgagtccaagtccaccatcggcgtcgagttcgccacccgcagtctccaggtcgacggcaaggtcatcaaggcccagatttgggacaccgccggccaggagaggtaccgtgcaatcacaagtgcctattaccgaggagccgtaggggcactgctcgtctacgatgtcacccgtcgcgccacgttcgacaacgtgggccgttggctgagggagctcagagaccacaccgaccagagcatcgtcgtgatgctggtcggcaacaagtccgatctccggcacctggtggccgtctcgaccgacgacgccaaggagttcgccgaggccg

SEQ ID NO: 263668 - DNA, 574 bp, Zea mays
cggggaactgaggaaaaaaaaaacacccacacccacacccgcgtccgcgtgctctctctgccccatccgcgcgcccctcctcctccaccgcccgtcccactcccgccgccgccgccgcccggccgtctgctggcgatggcgtaccgggcggacgacgactacgactacctcttcaaggtggtgctcatcggcgactccggcgtcggcaagtcgaacctgctctcgcgcttcacgcgcaacgagttcagcctcgagtccaagtccaccatcggcgtcgagttcgccacccgcagcatccacgtcgaggacaaggtcgtcaaggcccagatctgggacaccgccggccaggaaagataccgcgctatcacgagcgcgtactaccgcggagcggtaggggcgctggtcgtgtacgacgtcacgcggcacgtcaccttcgagaacgtggagcggtggatgagggagctgagggaccacacggacgccaacatcgtcatgatgctggttgggaacaaggtggacctgtgccacctcagggctgtcctgaccgaggacgccctggcctttgccgtgaggg

SEQ ID NO: 263669 - DNA, 467 bp, Zea mays
cggacgcgtggcactctctcgacccaaagccagatcggcacgacgagcagaggcccccccggagcggcgcggagcaatggcggcgggataccgggcggaggacgactacgactacctcttcaaggtggtactgatcggcgactccggcgtcggcaagtccaatctgctctcacgcttcacgcgcaacgagttcagccttgagtccaagtccaccatcggcgtcgagttcgccacccgctctctccaggtcgacggcaaggttgtcaaggcccagatttgggacactgccggccaggaacgatatcgtgctattactagtgcgtattatcgaggtgctgttggggcgttgcttgtatatgacgtcactcgtcactcaacctttgagaacgttgagcgttggctgaaggagttgagggaccacacagatcccaatatagttgttatgctggttggcaacaaatctgatc

SEQ ID NO: 263670 - DNA, 474 bp, Zea mays
cggacgcgtgggcgcgtccgcgtgctctctgccccctgcccccctcccatcggcgccgccctcctcatccaccgcccggcccgccgccgccagcccaaggccaggcatccgccagcctctcgcaccacgcgtatcgcgggcccgcccgaccggctcgtggcgagggcgtaccgggcggtccacgactacgactacctattcaaggtggtgctcatcggggactccggcgtcggcaagtccaacctgctctcgcgcttcacgcgcaacgagttcagcctcgagtccaagtccaccatcggcgtcgagttcgccacccgcagcatccgcgtcgacgacaaggtcgtcaaggcccagatctgggacaccgccggccaggagaggtaccgggctatcacgagtcgcgtactaccgcggggctgttggagcacttgtcgtgtatgatgtgacacgccatgtgcctttgagatgtggaga

SEQ ID NO: 263671 - DNA, 503 bp, Zea mays
tggcaccgctggtccgctccacggctccagttccagtgacactgcaccagaccacccggctccagcgagatccagacccaaaacctcacctcgcagccaacctctgctcggaggggaagggaagggaagggaagcaatggcggccaacggaggcgggtaccgggcggaggacgactacgactacctcttcaaggtggtgctcatcggcgactccggcgtcggcaagtccaacctcctctcccgcttcaccaagaacgagttcagcctcgagtccaagtccactatcggcgtcgagtttgccacccgcagtctccaggtcgacggcaaggtcatcaaggcccagatttgggacaccgccggccaggagaggtaccgtgcaatcacaagtgcctattaccgaggagccgtaggggcactgctcgtctacgatgtcacccgtcgcgccacgttcgacaacgtgggccgttggctgagggagctcagagaccacaccgaccagagca

SEQ ID NO: 263672 - DNA, 551 bp, Zea mays
cctccatcggcctccgatctctccacgagcctccgctccaatcgaggatccgcggcggcgggcagtggtcggccggcgatggcgcaccgagtggacaacgagtacgactacctcttcaagatcgtgctcatcggcgactccggcgtcggcaagtccaacatcctttcccggttcacccgcaacgagttctgcctcgagtccaagtccaccatcggcgtcgagttcgccacccgcaccctccagattgaagggaaaaccgtcaaggcccagatctgggacaccgccgggcaggagaggtcccgtgctatcacgagtcgcgtactaccgcggggcagtacgggcgctcgtcgtctaggaggtcagcgtgcacagcgagttcgagaaggtggagaggtggatgagggagctcagggaccacgcggacgccaacatcgggatgatgctggttgggaggagggtggacctgcggcaagtcagggctgtcccgaccgaggacgccaaggcctttgccgagagggagaacgccttcttcatggagacgtcggccctgg

SEQ ID NO: 263673 - DNA, 515 bp, Zea mays
cggctacccacaggccgcagtgccccgcttgctattttccgccgccaacgttctccctcctccccgccccacctccgcttcctcctacgcgccacccacacgcctcgcgtccgcctccccgtctacacctccccattctccagcgtcccgcgccccgagaagcgctgcaggcctcaccttcccgtcctcctgccccaggaaccgcggttcaggaaggaaggaaggaggaaaggcaagtgcctgccggtgccggggctcagcagcgcgcgatggcgtacagggcggaggacgactacgactacctcttcaaggtcgttcttatcggcgactccggcgtcggcaaatccaacctactctccaggttcacacgcaacgagttcagcctcgagtccaagtccaccatcggggtcgagtttgccaccaggagcatcagggtcgacgacaaggtcgtcaaggcccagatctgggacaccgccggccaggagaggtatcgggcaattacaagtgcgtactat

SEQ ID NO: 263674 - DNA, 490 bp, Zea mays
accggtccggaattcccgggccgactgcggcttcgctagctgattcccgtcaccatcaagcctcagctccccggcctcccactatctccgcgtcgccgtcccagccacagtcccgcgcgcccagcaccatccatccgtccgcgcagggggaaagcacgctagctgagctgagctgctgagagagagagagaggcaaaccctagcacgcacaagcacagcgacgtatacgcttccccccgccgattcatccatccatccatcgcagcgcgcaccgggcgggcgggccgggacgacgacagctaagctagcacatcgcaatagcatagcatctatctccgtcgcagtacccaccaccaccaccaccatgatcttcccccctgccttcctgcaggattcctcgagctggaacgataaccagcagcagcagcaccaccagcagcagcaaggccacggccacctgctggttgccgtcagcggcagcggcgacgcc

SEQ ID NO: 263675 - DNA, 1463 bp, Zea mays
atatgattaccggcctccaggaataaaatctttgaagttcagcaaattttctcttggaaatgtgtcaccaaagatagaaggtattcgtattcaaaatcttcaaccaggtcaaatcatcatggatatagatttccgttggggtggtaatccaagcataatcctagctgttgatgctgtagttgcatcactgccaattcagctcaaggatcttcaggtctatactgtcatacgtgttatatttcaactgtctgaagacatcccttgcatttctgctgttgttgtggctctccttgctgatccagagccaaaaattcagtacaccctgaaggccattggaggaagcctaactgcagttcctggactttctgacatgattgatgacactgtcgattcaattgtttctgatatgctcttgtggccacacaggcatgttgttaaacttggtgtcaatgttgatacgagtgacttggagcttaaacctcagggaagactttctgttactgtggtaaaagcaacttctttgagaaataaggagatgatcggtaaatcagacccttatgtgaaactgtatgtgcggccaatgtttaaggtcaaaacaaaagtcatagatgatgacctgaatccggaatggaatgaaacatttgacttgattgtcgaagacaaagaaacccaatctgttatttttgaggtttacgacgaagacaaacttcagcaagacaagagactaggtgtggcaaaactagcagtaaacactcttgaatctgagattacccaagacgccactctgaagctgctacattcactggatccaattaaaaataaggacaccaaggataggggcacattacatcttaaggtaaagtaccacccctttacaaaggaagagcagctggaagccctagagatggaaaaacaagccatagaggagaggaagcgtctgaaggaggctgggataattggtagcacaatggatgctgttggttctggtgttggatttgtgggtactggcattggcgctggcctcggtttcgttggttcaggaattggtgctggcgcaggccttgttacctctggtattggtgctgtcagcagtggccttggtaaagccgggaagttcatgggcaggactgtgacagggcctttcagcatgtcccgcaagaacggcagcagctctactgctccccagcatgatcaaccttcggcgtagtatgatgtacagtgaaagacaattgtcatatttgtgacagggttgccattctactctgtatacgtgctatacctaggactatacgtagcacttcgtttttgtttctgccactgcctggtgcctggttatatgaaatatgttttcgtcgttgtattgaaacgaggatctttcaaagtaaagattgctgtaaattgcatcagctttcccgaactatatgaaatttgtgcagtctgttgaagtaaaaaaagataggcca

SEQ ID NO: 263676 - DNA, 828 bp, Zea mays
cccacgcgtccgcggacgcgtgggtacaatccaaactttaatacagttgatgctcgtggtgcaagggaaccatggcatgactggcattctaagatcgatggtccagctgcttatgatgttctacagaactttcaggagcgttggttaaaagcggccaaacgacatgggattaaaaagttggcaaaatcctatgacgatgctctgctcactattgaaagaataccagagattataaacataaatgatgcaatatattttagtgacaatgatccagagacatggcatgttcaggtgtttcggtctattgattcaaactctgccaagggatttccgaaggatccacgagcagcgaccatgaagaatcttgtttgtggaaagaatgtacttattgacatgagcatacatacggcttatgtccatgctatccggtcagcccaacattctatttatattgagaattactacttaattggttcttcatttaattgggattcaaacacggacttacgggctaacaatttaattccaattgaaattgctctcaaaattgcaaataagattaaggcaaatgaaaggttttctgcatacatagtggtacctatgtggcctgagggtaatccaactggggctgcaacacaacgaattctttactggcagaataaaaccatgcaaatgatgtacgagacaatatacaggaccttgaaagaagaaggcctggatgatatgtatgagcctcaggattatttaaacttcttctgtcttggcaaccgtgaagttgctgacagcactagcacttcaaacgcttcgaatacagcaaataatcctcag

SEQ ID NO: 263677 - DNA, 471 bp, Zea mays
tccggaattcccgggtcgacccaggccgtaccgtacggcgccgggcggcacagcggtgtcctcatccgtggcgcaagtgtatgtaagatcgtcgccgggcgactctgcagtctgcgacggcgccttatcatcacacacggaaccagattgcgggcagccatagacgaagagagaaagaaaggtcaacagggcactgcttgcctgctgcgtagtgactagtgtgcctcaaccaaaaggatccatggctcccggagacgactctaaccccgccgcctcctatatccacacggtgcagcacctgatagagaggtgcatgacgttcgggatgagcatggaggagtgcatggaggcgctggctaagcgcgccgacgtcctgcccgtcgtcacctccacagtgtggaaggagctggagaatgagaacaaggagttcttcgacaagtaccaagagtggatatcggagaagcgaaacgc

SEQ ID NO: 263678 - DNA, 607 bp, Zea mays
agaacgcccttttttatttttttttgtatttatattttttatttttttttcaacaaaaatgatcgctcatcattatgaaaaaggaaacatatctgtagtttatggaaatatatcaaattgttctattcctctgccgacccccatcctttttgattcttttcatccgacaaatgttcactgccccaaggcaatccttgtttatatagttcattgcaaactgaaggagcaaaagtacaaaacatacgagaggctctctcatctctacggcgtatgtgaatgccttgttccctctctacctacaccagcaccccccctggactctagggtcttgcatgaactggattgcagcgctggctcgcgggacgctgccagttattttcttgtctttatggaccaagtagtgtgcgtgttttgttgttccattcagcaactacttgactaaaccataatcctccagcggccaaactaaatttaagatgtttgaaccaatcaaaaactcctagagcggtgaggagcacacctgaagcgtaccacaattagagtagacgtctaggggtcccctccccgctggctggtaccatagttcttccacaagcaagaggagaac

SEQ ID NO: 263679 - DNA, 429 bp, Zea mays
gccacgcgtgcgaccacgcgtccgaccacgcgtccgggcggccgctgctagcctgcaacgaacataccagcgagcgagcgggcggaggaggagatgccggcaaaggggcagcggcggacggagaagaacttccgggcggcgcacggcggggtaccgtgcctgcccccgtcgccaaagcagagggagctcgaggccatcccgactaaactccgtcgcctcatcgccttccagaacaagcacaacgccaatgctgacgcgttctcaggaggtgctcccaagaagcacgacgatgggttaaggaagaacaagctagcagcagacaaggcataggacaagaaaaccaagtagcaggcattggtggttcctgctgatagcaaagcatcagatcttaaaggtgatgatgaacgttcagctgccaatgaagatgtg

SEQ ID NO: 263680 - DNA, 642 bp, Zea mays
ttactcaggtctcaggtcactgtctttgtgactgaaaccaccaagccctctgcatctttaaccctccccgtcgtcacgctgacctaaccatgatttgcctcaaagccatctcatcccctctccacctcccgaccctccgccgcctcacccccacctcctccctccgcgccgccgccgccatgtcctcctcctcgtccgctgtggccgccccgatcgagcacttcgtgctcttcaaggcccgcccggaggcggtggcctcgggcgccgcggcggcgatggtctcctcgctgcaggcgctggccacgctcgtcccgggcctggcctacatccacgcgggaccggtgctccgcctccggtccccggccgcggaggcgctgggccccacgcacctcctccacacccgctacgccaccaaggaggacctggcgtcctacgcggcgcacccggcgcacgtggccgccgtgcaggggcacgttctccccaacgcgctcgacatcaccgccgtcgactgggtcaacgccgcgccgctcccgtcccccgcggcccccggcagcgccgtgcgcctcacgctgccgaagttgaagaaagggttgaagtctccactcgttgagaaagttgccgcggcccccaagccccggggac

SEQ ID NO: 263681 - DNA, 644 bp, Zea mays
gccaccacctaccagacagaggctggaagcgacggcgctgccggagatggagacggagacggaggcggcagcggcgaggcgggcgaaggagtctctggagctggctttccagatgtcccagatcctagacaccggcctcgaccgccacaccctgtcgctgctcatggcgctttgcgaccgcggagccaaccccgaggcattggccgccctcgtccgcgagctctcctctgctgctcccccaacctccgccgcggcttcctcccccgtgagcaacggcgccgcggggccggcctcggcaattgcgcccacgttctcctccggccttcgccgtccctagggtgctgctaaaaagtctgaatggaaccggtgtagttttccaagcaagacaagatctcgctgctggaatcgctggatgaaaaggattgcctttacaattccatgtgcgcgctgctgtggtggtgtggttcgaccacaaaacatgtggctgggttcatagagccacagaaatacacgcgcggcgcatccgcacccctctcacgacttcttgggtttaaagcagctgtatgcctgtataatcttgtggattgaggagtcattgtctcttgacgcccatgattggacatttggacagttgcttgtatcag

SEQ ID NO: 263682 - DNA, 444 bp, Zea mays
ctattcatctgaataataaattcgaacttatgatgattggtgtgcgttgtttcagggtcctcggaagaagattatccttgccttggagccaagagcataagggaatggcaagtgtaggaaggtgggagggatttgctaggcatgctcatgtgcaagttcgataaaactctgtaaccacatcttggaaagggacaaagggtaacaacgacaatggtttgtgggcttcttgtaacacatatcctgccctgttgagcatgttcaacgaagtttaggatgttagaaggcaggccacggcgtgtattgatgcaacttctatttctgtgttgattaaatggcgcggtgtacatgttggggctcctaagttgttcttagaatgctatatcctataactatattcttcttatccacagggtatgctatatctgaagctaaaaacataaagcc

SEQ ID NO: 263683 - DNA, 528 bp, Zea mays
ccggttcggaattcccggctcgacgcacgcgtccgcccacgcgtccgcgcttctctctctcctgaggcgcagcggtggggtggggtggggtagggagcggcattgcgagctcacaccacctgcggcgcggcgatcccgggccaccggctatcgggctatgtgatgatccgggccgtgatctcgacggctattcgcggctgaacgggcggcggcgatgaacggagcgagcgccggtgccggcggggaggcgccgctggtgtacaaggcctggaaggggaacaatgtgtttctactgaaggggaggttcatatttggccctgatgcaagatccctgtttatcaccatgttccttattgtcgcgccggtatcaatcttctgcgcgttcgtcgccaaggaattgatggataagttctcttatggtctgggattgccggttatgattgcagcagttctattcacagcatatgatctgagtcttctgcttctaacttctgggagagatccagggatcatacctcgcaatgcaca

SEQ ID NO: 263684 - DNA, 1230 bp, Zea mays
ctccggataaaagataaggagtgtctctcctttgccatcctcctctctttcagctaagtccctgccccctctctttttcttacattcaggtcctcgcagctcctctcttttttcttgtttctttcgatctgcgagccgtccaagtccagtactcttctttccctcaaggaactcttgcagccggcccctctggtttcctcgaattcttgttccccggtccctcctcctgtccccgcgtagatccgtccgtccgaggagcacaccgtccccacccccatgtttacccaccagttcctctgacggccgccgtgctccgatgaagctgagcgtgctccgtatccgccgctcccactccttctccgtcgccttcctctactggttctacgtcttctcatgaacgcatcgcccctctccaactgctgatccttcgccgtctctccctctctctctctctttctctctgagatagtctttcgaatccatctctagggctcctgtttctccccatcctccccccaccccaccccccaccaaacagattcaatccgacaagacaagcatccatgtcgtcgtcacgccggagctcgagccccgacagcaacgacacgacggacgagcgcaagcggaagcggatgctgtccaacagggagtcggcgcggcggtcgcgcgcgcggaagcagcagcggctggaggagctggtggcggaggtggcccgcctgcaggcggagaacgcggcgacgcaggcccgcaccgcggcgctggagcgcgacctgggcagggtggacggcgacaacgcggtgctgcgcgcccgccacgccgagctggccggccgcctgcagtcgctgggcggcgtcctcgaggtgctccagatggccggcgccgccgtcgacatcccggagatggtcaccgacgaccccatgctccgcccctggcagccgtccttccccccgatgcagcccatcgggttctgagaatctgagcctcagccggcgggagagagccaatttctgtcgtcgtgccgctgtctatctcgtattggtatatctattcataaatcatccttgtcatggtttgctcttcttgtcagtgttataaatttgcttcttgttagtgttataaatttggccatcggaaaggatgtgtttgtagttgtaatatcttgtttggagttgtaatatcttatcttgcttatgaaatcgaatatgcctatatatatatatgttatgctgt

SEQ ID NO: 263685 - DNA, 1059 bp, Zea mays
  unsure (1)..(1059): unsure at all n locations
gtgaccaaaccgtcgcttccattcgtctcccgccgcccccagtccccgatccgaagctgtgcctcgtaccatttcgatccaatggcgccgacgtcgaagctgtcgacgggcatcaagcgcgcttcgcggtcgcacgcgtaccatcgccgtgggctgtgggccatcaaggccaagaacggcggcgccttccccaaggccgacaaggccgccgccgccgtggaacccaagttctaccctgccgacgacgtcaagccccgcgttcccagcacccgcaagcctaagcctaccaagctcaggtcgagcatcacgcctgggacggtgctgatcctcctcgcagggcgcttcatggggaagagagtggtgtttctcaagcagctcaagtccggcctgctccttatctctgggcctttcaagatcaatggagtaccgatccgccgtgtgaaccagacctatgtcattgctacatcaaccaaagttgacatctctggtgttgatgtcgccaagtttgatgacaagtactttgccagggagaagaagcagaaggtgaagaagaccgagggcgagctttttgagacagaaaaggaggcatccaagtcactgcctgacttcaagaaggatgaccagaaggctgtggattctgctctgatcaaggctattgaggctgtcccggagctgaaaacctatcttggcgcccggttctctctcagggatggtgacaagccccatgagatggtcttctaagctcttagttttggagttcggaggaagctgttttgtctgtgttcttgtacttctgagttttgtaccagtagcgaatgtttcattgtggttgaagtcttcctgccaaatattataagatctaagaaagttctatccgtgttggtggttcagcagtgcattatctgcatttggttccttaggtagtccatggtatcttgaggtcccattttgtttgaattgctgactgtcaggtgtttttgctgttggtttggaataaccttggcatgtagcttgccgaacctggaataaaccccccccgcttcgttccttgtntntggg

SEQ ID NO: 263686 - DNA, 771 bp, Zea mays
acgatccgtcgtgtcaaccagacctatgtcattgctacatcaaccaaggttgacatctctggtgttgatgtcgcgaagtttgatgacaagtactttgccagggagaaaaggctgaaggtgaagaagtcggagggtgagctttttgagacagagaaggaggcgtccaagtctctgcctgatttcaaaaaggctgaccagaaggccgcggatgctgctctgatcaaggctattgaggctatcccagagctgaaggcctatcttggcgctcggttctcccttagggatggtgacaagccccacgagatggtcttctaaaccgagttttggagttcggaggaagtcgctttggctgtgctctcttgtgacaagccccacgagatggtctcccagagctgaaggcctaccttgtttcattctgcttgaagtctgtcaaatattatgagaagatctaagaaagttttatcggtattggtggttcagcatggcgttatctgcttttggttctttgtgtaggtcaatgttgtcttaagatcctattttgtttgaattgctgactgtcgtgtttttttgctatctttgaacgccttaaccgttccactaagagcatgtttggatgagttaggttttagttactagttgagctaaggctatctccaggacattttccatttcaaacttctccgcaaacattgttaactgttaaacagtgttattcatagttttgcgtcccttgttttttaaaccagtcaaagttaaattaatacttgtaat

SEQ ID NO: 263687 - DNA, 685 bp, Zea mays
ccctaaagcaagtcttaggcaggcccgacctcctgcccttgtacaacgcacgcacggtccccgtcccaatggcccagactctgtccgccgcctcggagctggccaccctgaagcgcccgttcggcaacgacgggttcggcgatggcagcaacaacggcagcgcgaccggcgagaagcccaaggcgcggcggcgggaggcggacccggcggcggcgatggccgcggcgcggcacgagttcggcgagcacggcggcgtgaacatgtccatcgaggcgtcggcgacgttcacggtgatggagccggacacgatgcggcggctgttcgcgggcgagctgggccccgaccgcggcgacatgtacatctacagccggcacttcaacccgacggtgctggcgctggggcggcagatggcggcgctggagggcacggaggcgggctactgcacggcgtccgggatgtccgccatctcgtccgtgctgatgcagctggtgggcgccggcggccacgtggtggcgtcgcggtgcctgtacggcgggacacacgcgctgctggcccggttcctgccgcgcgccttcggggtgcgcgccaccttcgtggacgccgacgacgaggccgtcgtgcgcgccgcggtggtccccggcgagacgcgggtggtgtacgtggagaccatgtccaacccgacgct

SEQ ID NO: 263688 - DNA, 464 bp, Zea mays
cgggccgacccactcgtccgctagacccagcaccagcgcccccaatcctctcaacttccactcgagtagggttctgccggccgtttcctcgtcgtcgcaatggagttctggggtgaagaagtgaagccaggagccacggtttcttgcaaagttggtgatggtttggttatccacctttcacaggctgcactaggggaaccaaagaaagcgagtgagaatgccattgtgtctgtcaaaattgatgataagaaactagtgcttggaaccttatcagttgagaagcatcctcagatctcttgtgatctggtatttgataaagattttgagttatcacacaattcaaagacagctagtgttttcttctgtggctacaagtcacctgttcctctgtttgaatctgattctggtgaagatagttcagatgaagagctagaacccgatctaaattcatacagaataatgaa

SEQ ID NO: 263689 - DNA, 746 bp, Zea mays
tccggaattcccgggtggacgaaccacgcgtccgtttgctttttttttctccctcagaccagttggagaaagacgcgatccaacaaatttgggggcttgtatgcctgccaattctgaacacgtaccaactcaacccttgttcatcgatcttgcagcactgcaggatgtacagggctaagagagctgcttcgctcagggcgaagcgccggcgccttggcaagtacgagctcggacgcaccatcggggaagggacatttgccaaggtccggatcgccaagaacatggacactggggatcatgttgccatcaagatcctcgacaaggccaaggttcacaagaacaaactagctgagcagattaggagggaaatctgtacgatgaagctaatacagcatcccaatgttgttcgcctgtacgaggtgatgggaagtaaagcaaggatttacattgtgctggaattcgttatgggtggagagctccacgatatcattgccacaagtgggagactgaaggaggacgaggcgcgcagatactttcagcagctgataaatgctgtagactactgccacaggcggggcgtgcaccacagagatttgaagctagagaacctgttgctcgatgttgctggaaacctcaagatttcagatttcgggttaagcgctttgtcggaccaagtgaagaatgatggattgctgcatactacatgtggaacacctaactatgttgctccagaggtcattgatgac

SEQ ID NO: 263690 - DNA, 1032 bp, Zea mays
cccacgcgtgcttgacaattttctcgtaaccttccgggctcctcttcctctcctcgcgttcccccaccaaaccctaatccgagcacccagcccctacccgcttccgctcgcgccggcctttggggctctcaccctgagcggtaggaatccgcagggctccggttgggtgccagaagcatccaagtcgttggcgggagaccgggaaatggcggaaaaagagggggcgaaggttggggcggaagagatggaagagcgggagcaggaaggggaggcggaggaggtggaggtgaagtttcgtctcttcgacggctccgacatcggtcccgtgcgctgcaacgccgccgccactaccgtagccgccctcaaggatcgcgtcgtcgccgactggcccaaagataaacaaattatcccaaagactgctagtgatgtaaaactaataagtggaggcaaaattctagaaaatgacaagaatgttgcacagtgcagagctccttttggtgatcttcccagtagtgctatcacgatgcacgttgttgttcaaccatcatcagccaaatcaaaaccagataagaaggcgaacaagttgcccaaaaccactcgttgctcatgtaccatactgtgaactatatgaaggtcaagtccctacgagaccaacaataatttgtacgtccacaaaaatattctgcagagaatttgagaacaaagattcaagatgtccatgccattctctgccaacgggtggcaatggcgaaagacaacgtccacatgttgtaagctatatgtaattgtaacttaggtacaaagagtcgtccctgtgccgtgcggtcagggaaaatagtctggtggttgcgctgttttactctacaagatgtcttatatgatgtacaagatacagacacttctgggtgtagtgaccttgttcccacctcaccttttaaagtttgtggcgctgagtcaatatggatctaagtcaattgattgaagaaacattttcgactaaaaaaaaaaaaaaaaaaaagggcggccgccgac

SEQ ID NO: 263691 - DNA, 407 bp, Zea mays
  unsure (1)..(407): unsure at all n locations
tgctgaaggaaaagacaattttctccttacctcctgggctcaggcctcaggcgcacagccttctgcttctcttcctctcctcgcgtccccccaccaaaccctaacccgagcacccagcccctcctcgcgtctgctcgcgccggcctttggggctctcactctgagcggcagggacccgcagggctccggttgtgtccaggaaacatcccagttgttggcgagagaccaagaaatggcggagaaggagggagcgaaggttggagcggaagagatggaagagcgggagcaggaaggggaggcagaggaggtggaggtgaagtttcgtctcttcgatggctctgacatcggtcccgtgcgctgcaacgccgtcgncactaccgtagccgtcctcaaggatcgcgtcgtcg

SEQ ID NO: 263692 - DNA, 497 bp, Zea mays
cgtaccggtccggaattcccggggttggcgcaatgggagcgcggtgaaaagaagcgggccgcgaggtgaggaggaacaaaacgactggctgtccgaacggggacgcctggttcctcccattccccttccacctctctctttctttccactactcgccctctctctcttgcgcgcgcgtgacaacatccctccacgggcgcgcggcgcgggagcacccaccgacttatcgccggtggggcggggcgggggcgatctgatgccggcgcggcggtgatggcagcgccgtccggcggtgggggcggcggtgcgggggagggctcctcctcggccgccgcagctatgacgatcggggcccacgggggtggaccaagtcacagaagcgatgtggcagatgaatttaggagatgccatgggactggggccatacccagagcgtgttggtgatccagactgtaactattacatgaggactggcatgtgcaggtttgggatgacct

SEQ ID NO: 263693 - DNA, 565 bp, Zea mays
ttctctcgtccgcccacgcgtccggcgacgggctcgatcgatctcactctcagctggtcgctcactcttgcagctccacccttcactcagtcttaggctcttagctctaggctctagctagccgcgccactccttcgtgtagccatcagccttctcatcgccaccaatggccactgccgaggtccagaccccgaccgtcgtggcggccgaggaagcgcccgtggtggagaccccgccgccggccgtcgtgcccgaggagtctgcccccgccgaggccgaggccgaggccgaggctgaggctgctgctcctgctgatcccgaggagcttcccgcggccgagcagcaggcagccgccgagccggaggccgctgctcctgctggtgccgaggagcccgtcgcggccgaaccggccgccgaggcggaggctgctgctcctgctggtcccgaggagactcccgcggccgagcaggaggcagccgccgaggaggaggctgctcctcctgctggtgccgaggagcccgccgcggccgagccggtcgccgaggcagaggctgctgctcccgag

SEQ ID NO: 263694 - DNA, 408 bp, Zea mays
ctcactctccgctggtcgctcactcttgcttctccacccgtccctcgcgcccggtctctgattagctctaggctctagctggccgcgccactccttcgtgtagccatcagccttctcatcgccaccaatggccactgccgaggtagctggatcgatcgaccctagtcttcgattcatatatacatacatgtgcacggatcgtttggatccgaataatacctatatatgaataatggtctctgtctcatcgatgatcggtcggtcgatcgctcatcttcgatgagacgtacagcgatggacgtgcggatcatatatatcctatgttaacaatggaggacgctaagattaagtgtggcgctaagatggaggagtacatgctttgatttttacgcgccgttcacgtgtgca

SEQ ID NO: 263695 - DNA, 567 bp, Zea mays
  unsure (1)..(567): unsure at all n locations
ccggnacggaaggcccggggcgagccacgcgtccgagcggcgcgcgccattcccattcgtgtggttactatactacacacaggaataatangacncggcgcccggccgcctgcgatctcagctctccgttaacacgcaaacgcaagctcccaagcagctaccaaccagccgggagagggagcgcacgcactgcgacaatggccacggccggcggaggggccgggcatctgaagctgctgggcgcgtggccgagccccttcgtgaaccgcgtacgcatggcgctgcacctcaaggggctggagtacgagaacgtggaggaggacctcaccaacaagagcgacctgctcctcgcctccaaccccgtccacaagctcgttcccgtcctcctccacggcgacaagcccatctccgagtcactcgtcatcgtggagtacctcgacgacgccttccccggcgctggccaggccgtccttcccgccgacccctatgaacgcgccgtcgctcgcttctgggccaaatacgtcgacggcaagttgcacggcatgatggtgaatgcgctcatggggg

SEQ ID NO: 263696 - DNA, 616 bp, Zea mays
gaattcccggatcgacccacgcgtactaaggaagggatgtaggtctcaatcaaatatttccgtttgaggcaaagatagcaaatggcaatggcgaacaaacgctgagccgtgacatctaccggctaggtcatcgctttgatttcttcaggatgctgtcttgttactacacaacaattggtttctacttcagtacaatgattacagtatggactgtatatgttttcctctacggccggctatatcttgtacttagtggactcgatgaagcactggctactggaaagaggtttgtgcacaatacacctctccaggttgctcttgcgtcagagtcttttgtgcaacttggatttttgatggcgctgcccatgatgatggaaatcggtttggagagaggattcagaactgcattgagtgattttatactgatgcagcttcagttggcctctgttttcttcacattctcgttgggaacaaaaactcactactacggaaggacgttactccatggaggagcggaatacagagccactggacgtgggtttgtggtgttccatgccaaatttgctgagaactatcgactttattaccgtggccattttgtcaagggccttgagct

SEQ ID NO: 263697 - DNA, 1029 bp, Zea mays
ccggccttgaattcccgggtcgaccgacgcgtccgcggacgcgtgggtgggagttcatttctgattatacaagacactgatcctgatgcggtatctaatatgccacgtggcagaaaagcgtaaggggagctcgggtccacaaatgaagggagggaaaacaggaacacctcaaagtgatgttaagaatcctcccaagaagagagggcgtccaaaaggcatgcacgacagcaataatatgccaaatgctgatagctctgtgactccagccagactgaagggaaaaagtgtcgagaaggatactgaagagacacctaagactggcagtaactctaagaaggaaggtgcaaagccctctcgatctactactggaaaggctcagaatgctgttgtcaaggcaagcagcaaggatgaacctgatagcaccgacaactcaaaagatgatgctggcagtgaagacaagaattcaaaagatgaagtgaaatccagcgaagctaacgatggatccaagaccaatggtctttcaaccaaaaggaagctagaggagaatgaaggtgagtcatcagaggagaagggttctgctaaaactactaccagaaagaagcgcagaagaaagagccgcaactagttgctcagaagctatgcagctcatcatcttaggggcgttccgcccttgcagtctaaagtctcaagatgctggcatggggcatgccatgtactgtacgctttatattcactggaccggttaccagcttagcgctttggtagttggccattatgagtcagctcgtagttatagcagtcttaaactctccataggagctgtaatgtttggtcttactttttttttttgtttctccttgccaacggctgtgcctctggcaaaaatggatttgattcttgcttgggttcaagcttttgtgttaaaacgtgatgcagtctgagttatctgctggcaaaaaaaaaaaaaaaaaaaaaaaaaaaaaaaaaaaacaaaaaaaaaaacaaaaaaaaaaaaaaaaaaggtagaaa

SEQ ID NO: 263698 - DNA, 467 bp, Zea mays
caagaagataatggggcatcatcaaaaagaaaaagtttgcaggaagctcaagagacccctctatcaaagaaaaataaaatacttgatgaaaaccttattggctcaagaatcacagtttggtggccagatgacaacatgttctatgcgggtgttgttgaatcattcgatgcctcttccaagaagcacaaggtttcgtatgatgatggtgatgttgaggtactaatgcttaagaaggaaagatgggagttcatttctgaggatacaagacactgatcctgatgcggtatctaatatgccacgtggcagaaaagctaaggggagctcgggtccacaaatgaaaggagggaaaacaggaacacctcaaagtgatgttaagaatcctcccaagaagagagggcgtccaaaaggcatgcacgacagcaataatatgccaaatgctgatagctctgtgactccagccagactga

SEQ ID NO: 263699 - DNA, 919 bp, Zea mays
cggccctctctatctctctctgactacctccgtatgacgcagcttgtgctcgttcgagactgagacaccccaacacgcctccctcagcgcagatctcgccgccgccgagatgctccgccgcggcgtgcttcttctcgcggccatcctcatcgccgtcgcacactcgcccctcgcgtacgcctcggaggccgagcacaagtataaaacagaagaacctgttaagctatgggtaaacaaggttgggccttacaataaccctcaagaaacttacaactattacagtctcccgttttgtcaaccatctgaaaaccctgcacataaatggggtggtctcggagaggtccttggtggaaatgagctgattgatagtcagatcgatataaagttcataaaaaatgtggacaagggggccatttgcacaattgaacttgatgttcaaaaggttcagcaatttgctaatgccattgaaaactcatattggtttgagcttttcatagatgatctgccattgtggggttttgttggggagactgacaaaaacaatgagaaaaagcactacctttacactcacaagaacattgttgttaaatacaatggtaacaggataattcatgtgaatctaacacaagagtcacctaagcttcttgaagctggcaaaaagttggatatgacttattcagtgaagtgggtgcaaacaaatgtggcatttgcacggcgctttgaggtttacttagactacccgttctttgaacaccagattcattggttctccatcttcaattcattcatgatggttattttcttgactggtttagtgtcaatgatattgatgaggacactaagaaatgattatgcaaaatatgctcgtgaagatgatgatctggaatcacttgagcgagatgttaatgaagaatccggg

SEQ ID NO: 263700 - DNA, 548 bp, Zea mays
cgaatttcccggtccgacccacccgtccgcggccccgtggggtgaaaaaagaaggaaggcagaattggaccgaccccaaaaaccattggggcgtgcggcaaaagctctggttgaaaaaaatgaccgtgactggcaggctcagcaggagcaagaagagcgacatagaatgggtgaatcacttgattttgagataaagaggtgggctgctggcaaagaaggcaacctacgggccttgctaacaacgttgcaatatattctttggcctgaatgtggctggcgacctgtatcattgactgatctgattacagcagcatctgtcaagaaagaatacaggaaagcaacattgtgtatccatcctgataaggtgcagcagaagggtgcaaatcttcaacagaaatacattgcagaaaaggtatttgaccttctgaaggaagcctggaaaaaattcaactcagaagaactcttctaacaacttgtttaggaaaatgttgatcgcaaaacaagtattgggaaggacaggtaggcaagctatggtagatatttttatt

SEQ ID NO: 263701 - DNA, 502 bp, Zea mays
ccggggggaccgaggcgtacgggggttttgtcttcacaacaatgcagcagttgctgcgttagctgcaaaaagagcaggtgccaagaaagtcctcatagttgactgggatgtgcaccatggaaatggcacacaagagatattcgacggggacaaaacagtcttgtacatatcattacatcgtcatgaggatggaaacttttaccctggaactggagctgctcatgaggtgggagttcttgatggtcaaggattctcagttaatataccttggagccgtggtggtgttggagatgatgactacatctttgcttttcagactgtggtgcttccaatagcttcagagtttgccgcagacatcactataatatctgcaggattcgatgcagctagaggtgaccctctgggttgttgtgacgtcactccaactggatactcttggatgacatccctgctagctggttcctcaaatggaagattgttggtgatacttgagggaggatac

SEQ ID NO: 263702 - DNA, 1786 bp, Zea mays
cggacgcgtggcggacgcgtgggcggacgcgtgggcggacgcgtgggtgcctccagacgagacgaggaggacgcggcgccgttcgggcttggcagcaaccagcgtctagcgcagtgcccttctgtctcctatctccccggagtccccgctgcccagcccggtctcactttccagtctccgagactccgagtctcgctcgcaccccgtcccctgcagcctgtgctctgggttggagggaggtgagctgcgagggagcgcggagggggcgaggagatggaggcagattcggcgaggaagagacttgcattgctggccctgcttctcctggcggcgcccgtccgcccggcctcggcggctccggtggaggatggcctgctcagcaatggtgactttgagacagcaccaagtggtggttttgtaaaatctgcttctgttgctgagggtgcatcgtcaatccctggttggacgatcaacggcacggttgaactcatttcagcaggccaacaccagggtggcatgatcctgattgttccacagggggaccatgcagtaaggctagggaatgatgctagcgttgggcaggtggtggacgttgagaagggttcggagtatgctatcacattcagtgctgcccggacatgtgcacaactggaggcactgaatgtttccgtgctaggtggcgtgtctcagacagtagacttgcagacgttgtacaacatagaaggctgggatgcgtacgcgttggcttttcaggcgacggaagagcaggcacatcttcaattcatgaaccctggcatggaggatgatccaacttgtggtcctatcctagacaacgttgccgtcaagaagctcttcaccccagacaaaccaaaggataacgtggtgctgaatggagactttgaggagggtccatggatgttccccaacacgagcttcggcgtgctgctcccaactaaccttgacgagcaaacgtctgccatacctggttggatgatcgagtcaaaccgcgccgtccgctacatagactctgatgagtacaaggttccccagggaaagcgtgccattgagcttctgtcaggcaaggaaggtatcatctcccagatggttgagaccacccctcagaaggtttacagcctgacgttcacactgggcacggcgggggactcgtgccaaccaccaatggccgtcatggcattcgcgggggatcaggcccagaacttccactactccccaatgggcaacgccaccagccaggctgcgaatgtgacgttcactgcacgcgctgagagaacacgtgtggcgttctatagcgtgtattacaacacgaggagtgacgaccacagctcgctgtgtggcccggtgattgacgatgtccgggtatgggcattgaacgccgcggctgggttgaaggcaagtattgggctggttcttggcattgttggtgtcgttggcatggtgttgttctgaaatctgaatctctcggtgccagtggtcttgggaagtatggatgtataacttcttctgttagttggaggcttactagttttggtagtaagcttgaagtttgttgagtgatatgagcttaggttaaaaagctacgagaacctacatggtattgcttgtgttacttcattggtgacatgcagttgtatggtattgtgtggcttgtttgccctagcttgtaatatgagatgtcagaattattcgaagatcatctcttcaatatattagaaaagagtaaagtgtaaaaaaaaaaaaaaaaaactcgagactagttctctctctc

SEQ ID NO: 263703 - DNA, 552 bp, Zea mays
ttcccattcgaccgccttcgattattgtgatggagcggcgccgccagcgaggcgggggagattctactcgttgaccttcgactgaccccagagcaccctcggcggggccgccgccagctgtggcggtagccgtggcatccccaagggtttcggctccgtgaacatggacgagctgctccggagcatctggaccgcagaggagacccaggccaaggcctccgcctctatcgcaggagcgagcgcggggatgccccccacgccgatgcagcggcagggatcgtcgctcacactgccccgcatgctcagcaccaagacggtcgacgaggcgtggagaaatctcgtgcgcgacgaaccgccgcagggggcggacggcggcggacaccagccgccccaccgccagtcaacgctctggcgagatgactctggaggagttcttggccatagctggcgctgtcaaggagaaccccgcttctgcttctccagcgccgccacccatggtgccgtctgggccggtaccttgtgcctctaagagctccccctttttggggattt

SEQ ID NO: 263704 - DNA, 605 bp, Zea mays
gaattccgagggtcgacccacgcgtacgcggacgcgtgggcggacgcgtgggatgacatggaggatgaagagtcggatgatgagaccggagaagagggaggacccgcggaggaagcatccagtactggcagtgacaagaagcctccaagttactcagggaagaagggcaaaagatccaagaggaagcgcatggtgcagtgatcgtcacagttcaatcggatgcgatttttgccacaactggttgattcaattgaccagttaggtgcctcagttgatcacggaagcagttttggcggtctgctggagccctatatttggggtgcagacaaatgaacagctttccgggtcacaggtatttgctgctaagcttatgcaaatggaggtagctgagtatatatgctaggcctgagggtgagtgatggaccggagaacaggagtcgggtacgcgtgcaagcagagagacagggtctgtagaagtagataaggtgtaatctctcgtcaagctgggttccagaatctggattgtcctcaccattcgtatgcattgcattgtatttgctttcctcttgtaacctaatgaaccactgttttggagggtatgatcg

SEQ ID NO: 263705 - DNA, 672 bp, Zea mays
ccggtcttgaattcccgggccgaccgactcgtccgcccacgcgtccgcggacgcgcagtgtgcgctcactccttagctgtttttatctggccgtgaccttgcgtgcgcgacatctagggcgaccgccgcctccgacgacaccctacgcccagcaccccaagtattcatcgcgccctttgccggatacgagcacccaccacaccagatcactgtaatccacgctgaattgaggctgaacctggtggcatattaatctcggatacttgttcaactgcaaacttcaagattcattctcatgcaatcaatggagagcctagcgcaattaaaggtgatgtgtgaaaagctttataattctagagactcggatcagcgagcgcatgcagaaagcaccctcaagtgcttctcagagaacagccagtacatttcgcagtgccaatacatattggacaatgcctcaactccatatgccctgatgctggcgagttcaagcttgctgaagcaagtttctgaccgcagtctttctttgatgctccgtctcgatatacggaattatgtcataaactatcttggcacaagggggcctaaattgcagaactttgtcattgtgtccttaattcagctggtctgtcgaattacaaaatttggatggtttgatgatgacagattcagaga

SEQ ID NO: 263706 - DNA, 1606 bp, Zea mays
ggcccacgcgtccgcggacggtgggagaaatctaaccatggcaaccgccgccgccgccgccgccccgcttgacgacgccaaggccaagaatgttatacgccaggtggagttctattttagtgacagcaacctcccccgcgatgggttcctacgcaggactgtcgaggaaagcgaggatggattggtgagcttggctctcatctgttccttctcgcggatgaggtcacacctaggtctcgaaggggatgcgaaaccagaaacagtgccagaggagaccgtgcttgcagttgccgacatcttgcgccgttccacagcgctccgcgtatcagaggatgggaagaaagttggtaggtctaaggagttgtcgaagccagatgaggttatagagcaagtggactccaggacagttgctgcatcaccgcttccttacaatgtaaaactggaggaagtcgaatctttttttgctcagtgtggcaaggtaaatagtgtgaggctacctcgacatgtttctgacaaaaggcatttctgtggcactgctttagttgaattttcagaagaagatgaggcaaaaggcgtttttgagaaaaatctcatttttgctggggcagacctggaaataagaccaaagaaagaatttgatactgaaagagaggcaaagaaagaagcatatgagaagtcacatcctaataagagcagtcatggtgaaggctatccaaaaggtctgattctggccttcaagctgaagaaaactgcagatgatggtgagacaggaaaaagtggtgggggcaaagtagatgacactgaccttactaagaataatggagcttccgatgctacagagaaatccagtgtagagaatgatgagaagatcactgagaataaaggcaatgtgagtgaggagcaggccgatgccgttgaggaattgaaagggctgtctgctggggaaactttacaatctgttcccaaggttgataaaagcccttcaaataaagatcaagatataatctcgagggaggatttaaaagaagaattcactaaatttggcacagtgcggtatgtggacttcagcattggggaagattctggattcattcggtttgaggatcctgcagcagctgacaaggcccgtgcatttgcagccattgcagatgaaggtggtcggactatgaaaggccacatagtcattttggaacctgtgtctggtcaagctgaaaaggattattggagtgcaattcggggcgttcaggagaaatataaagatagccgaaacaacagaggacgggactggaagaacaaccgaggcggaaagcagtttggcggtgggaagcggggtcgccacttcgactcccgtgacagggcctccaataaagctcagaaagtttagatgcaggatatagatttaatctccatatataatgaggaaaacattattttgcgcttcttcagtttgcatcgtggaattgtcatttgttttttatgtttattttctctttgtgaatgttggcctgcactttgaagagcaatctatgaaccacgaggcatgcagcatgctgataatggaaggggcttggctccctctatggttgttcaagtatattgtactatt

SEQ ID NO: 263707 - DNA, 1255 bp, Zea mays
tgtactttttcaagatattgcatctggagtgttcatgaatcatagtcaagttcgtgttatgggggcaaatgctgcacctgatgaccctgaaaagacaatcgtctttattgatcttgtgccactgggaccaaaatttgacaatgcgacagcatttttagtatttgaaaggttttgtaataagcaggtcatcataaaccctatggattttggaaagtatgacgtattgtatgttctttaccaaggtctccctccgtcaccaccagcagcaagcatgaacaatggtcttagcaatgttaatgatccaagtttacatccgcttgctgccgatgtggtaaatcataaggaaagaaaaggcaggggcataattataattattattctatcaagtgcttttgcttttattttatgtgctggagctgcactggtggtttatttcaagcttagaaaccgcagccatttaactgaagcatcacctgtgccaacaaaacctgcaggtcctggttctgcaatgttggggaacaggctagaaagcagacctatttcggcatcaccatccttcagctcaagtttggtggcatataaaggatctgccaaaacgtttaacctggttgagatggagagagccacactaggatttgatgagtccagaattattggggagggtggttttgggcgtgtctatgaaggtattcttgaggatggagagcgggttgctatcaaggttttaaaacgggacgatcagcaaggtacccgggagtttttggctgaggttgagatgcttagccgattgcatcacaggaacttggttaagctgataggtatatgcacagaggggcatagccgatgtttggtatatgagcttgttccaaatggcagtgtggaatctcacttgcatggatcagataagggagccgctcggtttgactgggacgctaggctcaaaatcgcactaggtgcagcacgtggacttgcatatttgcatgaagattcaagcccacgtgtcatacaccgcgatttcaagtccagcaacatcttactggaacatgacttcaccccaaaggtgtcggacttcggcttagcaaggacagctctgggtgagggaaacgagcatatttcaactcgtgttatgggaacttttgggtacgttgcacctgaatatgcaatgactggccatcttctggtaaagagtgatgtttacagctacggcgtagttctccttgagctccttacagggatgaaaccggtggatatgtta

SEQ ID NO: 263708 - DNA, 734 bp, Zea mays
cccacgcgtccgctgttcttcagttggttcttcatggctgtcaaccttggagtgttcatctctggcactgttcttgtctggatacagcaaaatgtcgcttggtctcttggattcggcatctcctcgatatgccttgttatcgccgcagttgcctttttggttggaacaccgctttacagggttcaacttccaactgggagcccactcaagagtatagtcatggtgtttgttgcctcttataagaagagaggagtggcggttcctgctgatagcacactgttgtttgaagggaatgaatcaagcagcattgtgccgaacaaaattgaacacactgacgaattcaggtgcttagataaggctgctgtcgttgtagaggaccaagagatgaaggacagccatcgcccatggctattatgtacggtaacccaggtggaggaagtgaagattctgatccggatgcttccgatatggttcacctgtgtcttctattcggctgcaatgagccagactgctaccactttcgtccagcaggggaacgcgatgaacactaagatcgggtccttctcggtgccggcggcctccatgaactccgccgaggtgatcttcatgctcgtctgggttgtgttccaggacagcgtcgtcatcccgatagccaggaggtacacggggaacccgatggggctgacgctgctgcagcggatgggcgtcgggcggttgctgacgatcccatctct

SEQ ID NO: 263709 - DNA, 886 bp, Zea mays
tcttccacgcgtccgggccgatacgaagaaagaaagctcgtgacttggtgttttctttcaccattacatgctttttctcctcgtttcagtcccacagcagtcagcatgatgattttctttttgtccctgcaggtttcctcagcgaatcagcactataacaaacccttcagctggaaggccccagccattattttggccttcgaattcttggagagcattgcttactctggtatagcactcaacctggtcgtgtaccttggaaccgtcctccatggaaccaccgcctccaatgcagcgaacgtcgatgcgtggaacggcgccacgtttcttacgccggtccttggagcctttcttgctgatacatactgggggaagtacaagaccgcagctatctccataatattctacgttgttggcctgctcataattaccacctctgccgtcataccgtccctacggcctgcctcgtgtgaaggcggttcatgcccacctgcaacagggtttcagtattttgtgctctttggttcattgtacctcatctccattggtacggggggcgtcaagtcagctttacttccattgggagcagatcagtacaatgatgcgaacgccgaagagagtaaaagcaagcaactgttcttcagttggttcttcatggctgtcaaccttggagtgttcatctccggcactgttcttgtctggatacagcaaaatgtcgcttggtctcttggattcggcatctcctcgatatgccttgttatcgccgcagttgcctttttggttggaacaccgctttacagggttcaactcccaactgggagcccactaagagtatagtcatggtgtttgttgcctcttatagagagaggagtggcggttcctgctg

SEQ ID NO: 263710 - DNA, 1146 bp, Zea mays
cggcccggaattcccgggtcgaccgactcgtgcgcccacgcgtccgaaactatacacctaagcatagcgcctgcagtggcaccgagcacgagagtaacagacctctaaaacctagcagaggcccgcgccgccgccgccaaccgcgacgaggaaggaagcaggaacgcgatgccgaagtcgaagcgcaaccgcccagtgaccttatcgaagaccaagaagaagccaggtttagagcgcaagggcaaagtagtcgccgagataaaagatgctgtcgacaaatacagcagcgcctatgtttttacctacgataacatgaggaatcagaagctcaaggacctcagggagcagctcaagtcttctagcaggatttttctcgctggaaagaaggttatgcagatagcgctggggcgttcgcctgctgatgaagctaaaacaggcctccacaaactttccaagttccttcaaggcaactctggtctgttattcaccaatcttccaagggatgatgttgagaggatgtttcgagaattcgaggagcatgattttgcaaggacaggaagtactgctatcgatacggttgagcttaaggaaggcctctggaacagttcacacatgagatgggacccatttctacgcaagcaaggacttccagttcgcttgaacaaaggtgttgtagagttggttgcagaccatgtagtttgtgaggaaggaaagcccctttcgccagaagcagcgcagactctgcggctgcttgggatacaaatggcgacattccgtctataccttgtgtgtcgctggtcgggcgatgactttgaagtttacaaagaaggcttgatgcacctacgagctgatgaatcctcttaagcttttgtttcctgtatacacaaagggctcacttgctgtctttgctgggacagcttttggtaactgtgcgtgtggccatgtaccagggagtattggaagttagaaagatccaatctgcaggaaaaaaatgctagtgtatttcttcattctgccccatatttactcaactgttgaaaggtgtaagcccatttgaatatcgtatcagcattagttaagaggttgactgatatcatattcttgtaaaaaaaaaaaaaaagggcggccgcccgggaatccggacgg

SEQ ID NO: 263711 - DNA, 467 bp, Zea mays
gacgacgcgtccggagacgaagtgaccaacatacctctaaaaccttgctgagccccgcgccgccgccgccgccagccgcggaagaggaaggaagcaggaacgcgatcccgaagtcgaagcgcaaccgcccagtgaccttatcgaagaccaagaagaagccaggtttagagcgcaagggcaaagtagtcgccgagataaaaaaatccttgtcaccaaatccagcagccccttattgttttaacttacattaccattgaggattaaaaacgttaaaggaccttatggagccactttaaggctttttaccagatttttcttccttgaaaaaaaggtattccaattacccttgggccgtccccttgttattgaacttaaacaagccttcacaaacttttcaaagttctttaaaggaacttttgtttgttatttaacaaattttcaaaggattatttttaaaagtattttta

SEQ ID NO: 263712 - DNA, 645 bp, Zea mays
ggctattgcaagagaagttgcttctgtcaccaaactaggtgtagaggttgctattgttgttggcggtggcaatatcttccgtggggcctcttgggctggatgtagtgggcttgaccgctcatctgcggattacatcggcatgctggccactgtgatgaatgctatatttcttcaagcgacgatggagagcatcggaataccgacccgtgtccagactgccttccgtatgtcagaagttgcagaaccatacatacgccgaagagctgtcagacatttagagaaaggaagagttgtcatatttgctgctggaacagggaacccattcttcacgactgatacagctgctgctctccgttgtgccgaaatcaatgcagaggtagtgctgaaagcaacaaatgttgatggtgtgtatgatgcggaccccaggcagaatccaaatgcccgccttctggagactgtgagctatcatgaagttacgacaagagatctctcagtaatggatatgactgctattacactatgccaagaaaacaacattcccattgtcgtgtttaacttgcaagagcctggaaacattgcaaaggctattgtcggtgagaaggttggtaccttcatcggatgcacaagagatcaggagctaaatgg

SEQ ID NO: 263713 - DNA, 436 bp, Zea mays
aggaaaaacaaccagaatccagatggcacgtagacacaattgcaactggggaaatgacaagcatttagaaaacaggtgctaaggtatgccgttccggagaaattatcatatgaccaaacttgtaggtaccttacaaaaaaactgaacaagagctcaagtccacgacgttatgtgtcagactctctatacaactacagcatagtttgacatggtttactctctactctctctacaactaatgcatagtggtcgtggtgttgcttggccatggcccttcaccaattgggcccttccccctcataaccgttaccaacgcacctttgcgttccatctcctggataaatcgctttacttttggttcaagatttggagcttgtcggacaacaataccaaagacactgttactgctttgagggggagcttccatgcttggacg

SEQ ID NO: 263714 - DNA, 899 bp, Zea mays
gaattcccgggtcgaccgcactcgtccgccgcgcttaggcccctcccacaacccgagaacatccgccgcccgttgcgcaattcgacgagaaaaccccacagcctgcacctcggggacgccggcgcggagggatggagtgccacgccctacagtgatttctcccccgctccgatccccggcgcatgaccgggtcggctggcctatgcatcgcagcaggagttgtcgtcgattgcccctgcctgccccagttaatcccgcccggtcgcaatccagcattagaggcgccgatctcctgccccgtcctgccctgtggattatcgacagcggcgccggataccacggaagagaaggaagacaaggaaggggccgaaactaacttgcttgtgccggggcaaggacgagatcgagggcagccgagccggtacccgaaactctaggcgagattgcaagtgcaggttcccacaatagaagtatacccaatggatcgtggaggttctcaaaagaaaagacataaatcttgtacaaatgttgacatcatcagtaatctacctgatgttattaaagacaaaattctctgctgtttgccaataaaagaagctgtaagaacatgtctcttgtcaaggaaatggaggtacacatgggcttcaatgactgaattgatgttcagagaagatgattttgctttaggcaatggtaatgaagacggtgacagcgacagatttgtttacttcgtcataacgtttctctccctccatgatggccctattttgaagtttgaaatgaatgctcggcgggttcacatgttttctcctggaggacacatctacaggaggctgcttatgttgactatacctggcatatttgctgctctgatgagattatgctgtccatcagagcgt

SEQ ID NO: 263715 - DNA, 898 bp, Zea mays
caattctgatattggtggtaataagcatgatttaacagatggtacagaggaactattttggggttcacctatcacagtgcaaaatgagattttaccctccaaaagttttccagaggaacatgacgctgacaaagctgaatcgcagtttagttctctatcatctgatcctcatagcatggcaagccagcgtgcatggaaacaacctactcaaggtctcaggcttaagtcactgctagaaatccaagctgaggaacaactgcgtgcacagaaaggattaactactgaaactgctaagccagcagcttcagttccttcaatttcttggagtggcatgtcaatatcttccgagcaacattatgggggttcaaatatatcattgggaagtatggaaagtgctgttgagagaaataaaagaagccagttgcatgatttgctggcagaagaagttctggcgaggtcaagcattgcagataatgagaataatgccaacgatgcatttttctctcctctgtcgcctgctgctgttcaggctgatgctcctgcccttgatgataatgacttcattgaggccaaggacaaaaagaacaaaaagaggtcagcaaaaacaaaagcttctactgtgaaggctccatcacctgttgtttcctttgatccaccagctatttcgatgccttctgaaaagggaaagtctgccaagcaagcacaacaggagttagaaatattgccagctccaccaagtggtccatcgtttggagattttgttctttggaagagtgatcagactagctctgtgcctgctccagcatggtctaatgactcagcaaaggtgcagaaacctttgtctttgagagatattcagagagaacaagaaaggagaaccgcatctatccagcaacaa

SEQ ID NO: 263716 - DNA, 1180 bp, Zea mays
tcctgaattcccgggtcgaccgacgcgtacggtgagcctcgtctactgatagtcctgtcctgtttcactctcgccagccaaagacgaccacgccctccgtgctccagccattccccatgatttcgccgacgaatctcctcccggcgcggaagatcacccctgtctcaaatggcggcgcagcgacggcgagcccctcttctccctcggtggccgcacggccacggcgactcccttcaggcctccaatctgtgactggtagagggaaggtttccttggcagccatcactctagatgattaccttccaatgcgaagcactgaagtgaagaaccggacatcaacagatgacatcacaaggctgagactaatcaccgcagttaaaaccccctatttgccagatggaaggttcgatctggaagcatatgattctctcataaacatgcagatagagggtggtgccgaaggcgtaatagttggaggaacaacaggagagggtcacctcatgagctgggacgaacatatcatgctcattgggcacacagtgaactgctttggctctagaatcaaagtgataggcaacacaggaagcaactcaaccagagaagccgtccacgcaacagaacagggatttgctgttggcatgcatgcggctctccacatcaatccttactacgggaagacctcagctgaaggaatgatctctcatttcgaggctgtcctcccgatgggtccgaccatcatctacaacgtgccatccaggagcgcccaggacatcccccctgaagttattctagcgatttctggctacacaaacatggcgggtgtcaaggaatgtgttgggcacgagagggttaagcactacgctgacaaaggcataacaatttggagcggtaacgacgacgagtgccacgattctaagtggaaacatggcgctactggggtcatttccgttaccagcaaccttgttcccgggctcatgcacagcctcatgtacaaaggcgagaacgccacgctgaacgagaagctgtcgcccctgatgaaatggctgttctgccagccaaatcctattgccctcaacactgctctggctcagctcggcgtggcaaggcctgtcttcagactgccgtacgttccgctccctcttgaaaagagggccgagttcgtcggattgttgagtcaatt

SEQ ID NO: 263717 - DNA, 1538 bp, Zea mays
gaaggaagtagaggatgctcaaaagatcagacggagtgtgatggactgctttgagagagcaagcctcccctttcttaatgaagaagagaggaagaagaatcttcattttgttgttgtgggtggtggacctactggagtggaatttgcagcatctttgcatgattttgttaccgaagatttatccaagctttacccctcgattcagcaccttgtcaagatatcgttgattgaagctgcagatcatatactgaccatgtttgacaagaggataactaattttgctgaggataagtttggaagggatggtattgatgtgaaaactggatataaagttgtgaaggtttctaaggatgatattaccatgcaaaatcctgccaccggggatatttcagtcccttatgggatggctgtctggtcgactggtattggaactcgtccattcgttgtggaatttatgaaacaaattggccaggctaatcgccgtgtcttggctactgatgaatggctaagggtccgtgaatgtgatggtgtctatgcaataggtgactgtgctacaataaaccagaggaaagtaatggaggacatttcagaaatattcagagtcgcagataaagataagtctggaaccttgactgtgaaagaaattcaagatatccttgatgatatctacgtgaggtacccgcaagtacagctctaccttaagagcaagcagatgaacggcatcgctgatctagtgaggagcgccaaaggagacgctgagaaggaatccgtggaactgaacatcgaggaattcaagaaggctctttcgctcgtggattcacaagtcaaattcttacctgcgaccgctcaggtcgcatcgcagcagggccaatatcttgctaggtgctttaacaagatgaaggatgctgaagaaaaccctgaaggcccaatccgcatcaggggagaaggccgccatcgcttccgccccttcaggtaccggcatctgggccaattcgccccactagggagggggagcaaactgctgcacagcttcccggggacctggttctccattggccacagctcccagtggctctggtactccgtgtacgcaaccaaacaaatcagctggcgcacgaggatgctggtggtatcagactggacacgccgattcatcttcggaagagactcgagttgcatatgatcaagagggaaaagattttgctgtgacatatattcagatgaacggggccagtacagcctcttcccacttttttttagtctgatttcacataaatgttccccttttgttgttagggaagaatctgacttcccctgcactttgtatagtgcaccacgaagaaattcctttgtacctaccttttctttttgagagagttgcactgcacttttgcggtctgagtaagctcagaattcttttaatagctattttttctaccactaatatgtgatatggagaagggtcagtttggacctgattttgttgtgtgaaaaaaaaaaaaaaaaaaaaaaaaaatttttttttttttttttttttt

SEQ ID NO: 263718 - DNA, 1735 bp, Zea mays
ggacgcgtgggctgccattataataactgctcttgatgaggttgcttggttgtacaacattcgaggaagtgatgtggattatagcccagtggttcactcttaacctattgtaacattgcacagtgctttcttttatgttgataagagaaaagtaactgtcgaggttcagaaatacatgtctggaaatggtatcgaaataagagagtatgaaactgttcaatcagatgcaagtttgcttgcatctggcaagctacaaagttctgtacatgtggaaaagtatatggatgaggtggagagttcaaaaatttggattgattctggctcatgttgccttgcactctactcaaaattgagtccacatcaagttttgacgcttcaatcaccaattgcccttccaaaggctgttaagaaccccacagaactggatggattgaggaaggcgcatattcgagatggtgccgctgttgtacagtaccttgcttggctggataatcagatgcaggagaactatggagcttctggttatttcagtgagataaaagggtcgcataaaaatgaacatttagcaaccaaacttactgaggtgtctgtgagtgacaaacttgaaggcttccgtgcaacaaaagagaactttaaaggtttgagttttcctacaatttcatctgtgggaccaaatgcagcagttattcactataaacctgaagcaagcacatgttcggaaatggatgctgataaaatatatctttgtgactctggggcacagtacctggatggtacaacagacattacaagaactgtacattttggtaaaccctcagcacatgagaagtcatgctacacagcagttttgaaaggccacattgcactagacattgctgtgtttcctaatgggacgacaggacatgctcttgatattctttcacgagcaccactctggagagagggtcttgactatcggcatggtacaggccatggaattggatcttatttgaatgtccatgaaggtcctcatctaattagcttcagaccttctgctcgaaatgtaccgctgcaagcatcaatgactgtgacagatgagcctggttattatgaagatggggcctttggtataagattggagaatgtacttatttgcaaagacgccaatgctaagtttaattttggagataaaggttatttggcatttgaacatataacatgggctccataccagaccaagctgatagacaccgggcttctgacccctgttgagatcgactgggtgaacacgtaccactcagactgccggaagatcttggagcctcatctgaacgagcaggagaagcaatggctgatgaaagctactgagcccgtagctgcaagaggctgagccttttcgtcaacgttgcatgccaccgagcgccaggctcatcttctgcgtggcatacatataagattggctgcccccgctggttaaataataatagcggcgaaggaacaggatagcttgttctcaacgctgatcttcgccgctaaagtggagtgtttggcaggatgctattttctttcccattagggtacgttcgggttttacggaacggtaggtttttatacggaacggtgggctacaacaattccagagccggattgcttctctaattatttatataaggtttgatcagctggaataattttggatccatatttggccaaacgaacaagaacaagccctcccatttgtccagttacccaaccc

SEQ ID NO: 263719 - DNA, 443 bp, Zea mays
  unsure (1)..(443): unsure at all n locations
tccggaattcccgggtcgaccgcacgcgtccgggccgcaccaggggtcgtcggcgccgccaaggctgcagagaaggccacggatctccaggggnggttaaatgctgatgaccagtgtcgtaaaggatcgactggacaagagaatggccaactgggagaaattctgccttcgacattgcttcgatgtacctgaaggttttgtggccgatgaaaatgatagttcttgtgcaaaagaatcacacaaaaatgggacttcagattcagatttggatttggaacttgactccttaaggagaaagctcgaaagtgctaacaaggagtctgaaaatcttgaaagagagatgtcgtcattggaaaggcaaagtatgcacaaaagaaaacttgattcttcaatctctgagatacaaaagttgtttgaagacaagttaatgcagggatttgaag

SEQ ID NO: 263720 - DNA, 595 bp, Zea mays
acccgcctcgagccacgcgtccgcccacgcgtccgctcgcgcacccggttccgcgtgcctttccccacctactctcgcggctctcgccagccagtctagggtttcggtcccggcgtgcttatccgcccccgccggccatgtcgaagcaaggagggaaggccaagccgctgaaggcgcccaaggccgacaagaaggagtacgacgagacggatcttgcatatctgcagaagaagaaagatgaggaaaaagcactgaaggagcttaaggccaaggcacagaagggcgcgattgggggctcgggtctgaagaaaagtggaaagaaatgagactggtcacccgtctccaatacctagaggatgataaggcagctgtctatctgtgttgcgcttcactaagtgtgattgtaacagtggtacctcttgtgttctgtgttccgcgatgttgcagttggttgcttgatcgaaagatgtttcaacctcccatctgctagctatgatacagatggtcccctgataataatgatgacatattctgtgatggatgccacaaaatataataataataaaaaaataaatattaaataatattataaata

SEQ ID NO: 263721 - DNA, 604 bp, Zea mays
ttccggctcgccgctcgcatctcgccagcgcgaactgcagcctccgtgcatatcaccagcctcctcgcgcacgcggtcccgcttgcctttccccacctactcgccgtcgcggtgccgtgcgccggtgctggccagtctagggtttcggccctcgcccgccgatccgtcccccccgccggccatgtcgaagcaaggagggaaggccaagccgctgaaggcgcccaaggtcgacaagaaggagtacgacgagagtgatcttgcttatttgcagaagaaaaaagatgaggaaaaggcgctgaaggagctgaaggccaaggcacagaagggcgcaattggaggctcgggtctcaagaaaagtggaaagaaatgagcattgcccacccacccatctccaaaacacctaagagaacgataagacagctgcttatctgtgttgcgcttcactatatgatatatgtggctgtgagacaatgttgcctcttgtattccgtgtttcgcggtgttccagttggtttgcttgatccgaagatgtttcagcctctcatctgctagctttgatacacgagttatttgctattatgatattcatttgaggtggattctt

SEQ ID NO: 263722 - DNA, 314 bp, Zea mays
  unsure (1)..(314): unsure at all n locations
acaaaacgggggggggtgagaagcccctactggatacatttgacatgaatcaattcaagaagagtctctctctctcactcacacacatcaaacgagacattcgaaaaggcggcctcacacgaggtggctgcaaagctacaatgcacctcgtgaaatgcttcaacatcgagcacattggggccgacaaacatagccatcatcttctttgccacgctgcccttcacgccattgccaggcgccttcgactaagatccctaccttgcaagattaaaaacactagcctatatgggtacttngcaacccttctgatatgt

SEQ ID NO: 263723 - DNA, 634 bp, Zea mays
gaccgaagcgaactctccctccgcatccactgccaccatgagccgcgatcgctacttccaccgcctcctcgacctccacctccacgccaacgacgacctcttcttccccttccctacccctgcctcgtcctgcccctacatcaccgcctcctccgcccaccaccgcttcctcctcgacgaccaccccttctacccaacctcctgcccgctcggcatcacctcccgctccccgatcgacgacaccttcgacctcgacctcctcctccccctccccctccacgccgccgtctccgcgcccccgtgcgcggccttcgacttcgaccccttcctcctcgacaccctcggccaccgcatctccgtcctcgagcgcgcgctcgccctcgccccaccccgccgcaagtacacctacgccgccgaggccaacggcaggaagctcaagtggaccgccgaggacaggcccgccgggggccgcaacctcaagtgggaggccgagctcaggaccccgcacaccgacggcttcgaccgcaagtggaagtgggagtccaaggagtccgccaccggttccaccaaggtcaagtgggccaaggagatcaaggggaagggctggctcgagccttggtccaacttctacttc

SEQ ID NO: 263724 - DNA, 666 bp, Zea mays
aattcccgggtcattatcgatggtccaaatcaagatatagtggttatatgtcagcatttgtagatgcaatccatccttctcgtctgttcaagagcgatctggatgtaagcggcattgaagatcttcgacttcagaaagaagaccatgtaacaaatattgaaggaatgcgtgaagctataaagacgcttcatagaaaacagagacagttagaagacgaagaggcaaatatacacaggcagaaggaagaaattattaatgcgatgagataccacaagaagacacgagaagagatacaaagacgtgttgatatcaaaaagcgaatactgaaggacatatccagagaagacgatgtagaatccagcacgagaaagcttgttaatcaggttgctaagataaatgatgagaggtttcatgcaatgataaaacttaaggatttgcttactgaagctgttgctctcaaatggagtcacacagaaaagaatatgactttaattgagctcgatacaaagatatgggagatggaaaggggtgtgaaaaaacttgaaaaggatgctaatcaggcggctagaaactacgaagattgtagaagaatcactcaggagcataggcgggggctgtctattgcaaaacagaatgcaagtcgatagccatgattactaaagacct

SEQ ID NO: 263725 - DNA, 1258 bp, Zea mays
cccacgcgtccgcccacgcgtccggcggaagacaggtcgcttgttctacttctacctggcgtcgcaggcttcgcaaggcggccacacgccgatacctcctccttcacccgctccgtcgtcccccacagccggccacgccaccatgctgccaccggccgcgcgccttgcggcccgccgcctcctcggcctcgcctccgcatctgcgtcggaagccgccggccgccgggtagcttcctctccgatcgcttccgcaggctactccgccgccgcgtccaggggctccgtctccagcaccaggcccttctccacggctcttaactaccaccttgattccccggagaacaagccggacatgaaatgggagttctcacaggcgaatatgaagaaggtcaatgagattctgtctcactatccaagcaactacaagcaatctggtattattccgctgcttgatcttgcacagcagcagcatggtggatgggtgccagttgcagcaatggatgctattgctaaaatcgtcgaagttgcaccaatcagggtttatgaagttgcaaccttttataccatgtttaacaggactaaggttggtaaataccaccttctggtgtgtggaactacaccttgtatgattcgtggttcacgtgaaatcgaagagacgttgttggagcaccttggagttaaacgaaatgaggtgaccagtgatggtttattttctgttggagaaatggagtgcatgggttgctgtgtgaatgctcctatgattgctgtggctgactactcgaaaggctcagagggttacacatataactactatgaggacctcactccaaaacgagttgttgagattgttgagatgcttagaagaggtgaaacaccccctcgaggtacacagcacccagagcgaaaaaactgtggccctgccggggggaacaccaccttgcacggagagccgaaacctcctccatgcagggatctggatgcctgctaggtttgcttcggagcattacgagcacgcgcataacttggctcgtactgtaaggtgtgcaaactgcacacagcggaggctgtgttatttgtattctgaagctttcttgtgtttcgtcaagaaagcttctctaacttttatcctgcactatcagataaacggtaaattgatagagaataagatgttttcgagctcatgtttagtggcaaacgctttataccaaaaaaaaaaaaaaaaaaaaaaaaaaaaaaaaaaaaaaaaaaagggcggccg

SEQ ID NO: 263726 - DNA, 574 bp, Zea mays
cggacgcgtgggttagaagaggtgaaacaccccctcgaggtacacagcacccagagcgaaaaaactgtggccctgccggggggaacaccaccttgcacggagagccgaaacctcctccatgcagggatctggatgcctgctaggtttgcttcggagcattacgagcacgcgcataacttggctcgtactgtaaggtgtgcaaactgcccccagcggaggctgtgttatttgtattctgaagctttcttgtgtttcgtcaagaaagcttctctaacttttatcctgcactatcagataaacggtaaattgatagagaataagatgttttcgagctcatgtttagtggcaaacgctttatatttttggcaagctgtgaaggagctgaaccagtgacaactcgaagaattcattttgttgtattaagtcttcttgttagcccattaaacgatgagatcgtatacttgaaattctcgaattttacaaatcaacattggattctctgcaatgacagatggttgttatcgtaaaaaaaacgaaaaaaaaaaaaaagaaatgtaagaaaagagatgatgta

SEQ ID NO: 263727 - DNA, 601 bp, Zea mays
cccattcgtccgcccacgcgtccggccacgactactacgagcgcggcaacctggacatcttcagcggccggggcccctgcatgagccaggcgccctgcgccatgaacctcacctccgacggcaccggcgcgcaccacggctggtactgcaactaccgcgctctaggtacgaccagtagtaaatctaaatcgacagaggctagctcctgcctctgctgtgtgtaattactgtatgtgagtgaccgatcccatcggattgcgttcgtcttgtggagacgctgcgtgatcgcgcgattggtttcgctttcgcccccttgtttttgcacgaggaggttctgctagtgcgtacggggagaataaaagcagcattcctgctgtccaaggcctgtcctatattatttctagctgagtttgactcagctggtggggtgtccacgtgtggtaggttggttatgtgtctgcatcagctcacttgcccccggatggcggtcatttgccccttggcattggtttctccgtgcctagccatcgttaatatgtgattgcgagtgattgcgaaggccgtgtttggttcagttattttttctgaccaacttttttgc

SEQ ID NO: 263728 - DNA, 980 bp, Zea mays
ctcattcgtccgcccacgcgtccgcccacgcgtggggccacgcgtacgcacacgtgggctcagattcagatcagatcgtagcagccaaggattccgcgctccgggggtgccatgaagctgaagctcctctctccctgccttctcctcctcgccttctttgccaccgcggcgtacgcggcgtcggcgtcggcgtcgcgcgcggcggccgtcgtcaggggcgcgggcgccccgtcgcagtcggagttggagtcggacccggagaaccagtgcgtgtacacggtgtacgtgcggacggggtccatctggaagggcggcacggactcgaccatcggcgtgacgctgctgggccccgacggcacgggcatccggatccgggacctggcggggtggggcggcctcatgggcgccggccacgactactacgagcgcggcaacctggacatcttcagcggccggggcccctgcatgagccaggcgccctgcgccatgaacctcaccttcgacggcaccggcgcgcaccacggctggtactgcaactacctcgaggccacggtcacggggccccacctcgggtgcgcgcagcagctcttcaccgtcgagcagtggctcgccaccgacgcgtcgccctaccgcctgtacgcggtcgtcgacaagtgcaagacgaagcggcaggagccgcgacgctcgccggccggcgaggccgaggccaccgtgaccgcgctctaggtacgaccagtagtaaatcatcgacagaggctagctcctgcctctgctgtgtgtaattactgtatgtgagtgaccgatcccatcggattgcgttcgtcttgtggagacgctgcgtgatcgcgcgattggtttcgctttcgccgccttgtttttgcacgaggaggttctgctagtgcgtacggggagaataaaagcagcattcctgctgtccaaaaaaaaaaaaaaaaaaaaaaagggcggccgttttaaaggat

SEQ ID NO: 263729 - DNA, 430 bp, Zea mays
cccacgcgtccgcccacgcgtccgcccacgcgtccgcggacgcgtgggggcggggtggggcggcctcatgggcgccggccacgactactacgagcgcggcaacctggacatcttcagcggccggggcccctgcatgagccaggcgccctgcgccatgaacctcacctccgacggcaccggcgcgcaccacggctggtactgcaactacctcgaggccacggtcacggggccccacctcgggtgcgcgcagcagctcttcaccgtcgagcagtggctcgccaccgacgcgtcgccctaccgcctgtacgcggtcgtcgacaagtgcaagacgaagcggcaggagccgcgacgctcgccggccggcgaggccgaggccaccgtgaccgcgctctaggtacgaccagtagtaaatcatcgacagaggctagct

SEQ ID NO: 263730 - DNA, 486 bp, Zea mays
cagtctcgaattcccgggtcgaccgacgcgtccgcccacgcgtccgaaaggcacctgatggtacatctctcaaaactgaagtcagcagcaagggcagctccacggacagcaccacctcctccagctgctgactcttccagcatgagcgaattcaaggcgattgccgcagatgcctcggtgttctcgttcggagatgaagatgattatgaaagtgagtaatgattctatgggtgggtacggtgttgagtttccgctgtacagtttggtgcttctaggaccccccatcatagaatgccaaagtccagagatgttaattcattcttgcatttcgtctccactgtagcagtgtcatcggtctgatgttgtacccagatgatgaaacttgttgtaactcaaccaggtcttgaacctctcctgtttgtttacagaaatgccttgtacacgaactcacttaaacagcgcaactactttttattattgatagtt

SEQ ID NO: 263731 - DNA, 549 bp, Zea mays
accggttcggaattcccggctggagaagctctacgcatgggagaagaagctgtttcttgaggtcatgagttacgaggggtataagcaggagcatggtaagaaggtcagtctgttgaggaagcaagaggtgaagggtgtggattacttgaagatggagaagaaccagatggagattgagagcctggagtccaagatgctggttgccaaccagtccatcgagaccaccacttctgagataatcaggctcagagaatccgagctatttccccagcttcttgagctgattgctggcttgatgagcatgtggaggggtatgtacgagtgccatcaagttcagacccacatcgtgcagcagctggagtacctgaacaatgctcggaataccaacccgacttccaatgtccaccggcaagcagctcttcagctcgagatagaggttgacaggtggtattcagccttctgtagtctggtgaaatcccagagagactacgtctactcattgaccggctggcttcgtctatccctgatctgccaccacgacccactgac

SEQ ID NO: 263732 - DNA, 459 bp, Zea mays
cgacccacgcgtgcgcccacgcgtccgaagtggcacagtttaaatatcttgctaaccgtgtgacttctgagatgggaaatgcaggagacaagatcacctttaaccggcagcatgtacttgaaacctgaagtcagtcaagaatccagtgtagacacctgtacaagtgagataagaagttcatcatctggcaagcaaagaaggttccgttcaccgttgtcagtgagagagctagacgataagtcacctgtcatcagcagggaactgtacctgagtgcgcgaaagtacaagactccctctcctccggttaggagctcactctctgccgagagaggcagctttgccaaaatcgtggagaacactggaagcatcgactgcacaccgatttccaaggtccaaatgccttcaaaagtgtggtccagcttcagcaactcgaagaccacaccttgatctgtcctgaca

SEQ ID NO: 263733 - DNA, 1181 bp, Zea mays
aattcccggggttcaatccttggtgaagagttgtttgttctagggttgggtttttctgaggttgccaaagcacgcccaggcccagccaaggttggctgttgccacttctcagctgatggtaaactgctggctactggtggtcatgataaaaaggtcactttgtggtgtacagattctctgaagcctaaatccttcctggaagagcactcgtttcttatcactgatgttagatttagcccaagcatgtcgcgccttgcaacatcctccttcgacaaaactgtgcgggtttgggatgcagataacactgactattcactccgaactttcacgggccattcagcatctgtcatgtcacttgattttcatccaaacaaagaggatatgatatgctcctgtgatggtgatggggaagtgcgcagctggagcataaataatggtagctgtttgacatgtgttaaggtgtttaaggcaggtgctactcagatgagatttcaacctcgtaagggaaagtatctagcagctgcctcagagaaagcaatctacatacttgatggggagacacaacatgcttgtagaagccccttgcaggggcacaataagaatattcaatcgctttgttgggactctgctggtgaatatctggcttctgtcagtgaagactcggtcagaatatggtcattcagttctggacgtgatggtgaatttgtgcacgaattgaatcgcagtggaaatcagttccactcatgtgttttccacccaacttatcaatccttggtagtgattggttgttacgagtccttggaactttgggacataaaggagaagaacaccatgaccttcaacaatgcgcatgacggtttggttgcagccctggcatcatccagtgctacagggaaggttgcctcagtaagccatgatagaactctcaagctctggaaatgactttataatagcgatcggtgtgaagacgattttctaccaaaaatgaccacatgacgcacatgacgaaaaggtagctgacaagatactctggagccgcgtgggctcaagaactaacggtggtttgtgttgtggttcttgtatgctgttcaatatgctattgaagtttgtaactcctaatagaaacgttcagtcaagactccaagattgtacctcggacaagtagcaaatatttattcccc

SEQ ID NO: 263734 - DNA, 1439 bp, Zea mays
  unsure (1)..(1439): unsure at all n locations
tttagagaacgctgggcaactacttgattcaaatgaagcatcattgttgaaagcagcttcaagtgcacaatcctcagggcaaattttgcatggaactgttggtggcttatcaggcactctgcaacaagttcaggccaggagcccccaacttcctgggcctgctcagggtatcaagacagagattaatcacgttctgactcccagaggtgcaggcccagaagggtcatttataggtgcccaaggatctaatcaagctgggaacaatttgactctgaaaggatggccactcacgggacttgagcaacttaggtcaggaacttcttcagcagaagtcgtttatacagaatcaacagcaattgcaccagcaaatccagatgctgactccacagcagcagcagcagcttatgctgcatgctcagcaaaatatgtcttcaccaacatctagtgatgtcgacaacagaagattgaggatgatgctaaatagaaatgctgttcttggccgggatgggcagacaaacagtggtagtgatattattccgaatattggctctcctagtcaaagtggtgccgatatagatatgcttataaagtagaagaaacttgctcagcagcagcaactattacaacagcatagcaatagccaacagctcccacagcaacatcagcttcagcaacctgctgtctctagccagcaatctcaaagttcaaatcaacatcttcaacaagaaaaactaggaattggaagtatgcctgttgatgggggcataccaaactcatttgggggagctgaacagacagcgaaaaagagaaagaagccaggctcatcctctggtagagccaatagttcaggcacagccaatactgctggtccctctccaagttctgcaccctcgacaccttccactcatacaccaggagacgtgatgtctgtgccacagctgcagcagaatggcggttcagctaaacccatggtaatgtttggctctgatggaactgggagcttgacatctccagcaaacccattggatgatgttgaccgcttgctagaagatggctcattggatgataatgttgaatcttttctatcacaggatgacatggatcctagggacaacttggggcgatgcatggatgctagtaaagggtttggtttttctgaggttgccaaagcacgtgcaagcacagccaaagttgtctgttgccacttctcagctgatggtaaactgcttgctactggtggtcatgataaaaaggttactttgtggtgtacagattctctgaagcctaaatccttcctggaagagcactcgtatcttatcactgatgttagatttagcccaagcatgtcgcgccttgcaacatactacttcgacaaaactgtgcgggtttgggatgcagataacactgactattcactccgaactttcacgggnccattc

SEQ ID NO: 263735 - DNA, 489 bp, Zea mays
  unsure (1)..(489): unsure at all n locations
acaatgcgcatgacggatttaacttttacanatcagtcctcagtgagatggatttaactttacttctatttcatggtttccagtctttggaactttgggacataagggagaagaacaccatgaccttcaacaatgcgcatgacggtttggttgcagccctggcatcatccagtgctacagggaaggttgcctcagtaagccatgatagaactctcaagctctggaaatgactttataatagcgatcggcgtgaagacgattttctaccaaaaatgaccacatgacgcacatgacgaaaaggtagctgacaagatactctggagccgcgtgggctcaagaactaacggtggtttgtgttgtggttcttgtatgctgttcaatatgctattgaagtttgtaactcctaatagaaacgttcagtcaagactccaagattgtacctcggacaagtagcaaatatttattccccaaaaaaatctgcattttgtt

SEQ ID NO: 263736 - DNA, 417 bp, Zea mays
cgcatgacggtttggttgcagccctggcagcatccagtgcaacagggaaggttgcctcagtatgccatgataggactctcaagctctggaaatgacttgtatgaaacccatgttggacttctgtattctggctgttagatgatagacaaacaagactttgccaaaaatgaccacatgacgaaaaggttgctgacaagatactctggagccgcgtgggctcaagaactaacagtgttttgttttgtggtcgttgtatgctgttcagtatgccactgaagcttgtaacttgtaactcgtaatagaaactttggttgaagaaagattgtacctcggacaagtggcaaatatttattctctaaaatattctgcattttgttttttgaaaaaaaaaaaaaaatactaataaatatatataat

SEQ ID NO: 263737 - DNA, 1563 bp, Zea mays
cctcgatccatcgttcatctcacagcccaacccagctcagcaaccgcgaagccgtgttcatctccctactcgatcggcagccgcaagagctgaccctccgcttcccccccaaaaaccctagccatcccaggttgctccggccgcatccccgccgaccgccgaccgccgacgatgcctcccaaggccaagaaggacgctgcgccgtctgagcgccccatccttggacgcttctcctcccacctcaagatcgggatcgttgggttgccaaatgttggcaaatcaacttttttcaacatagtaacgaagttggctatcccagctgagaattttcctttctgtaccatcgaaccaaatgaagcacgggtgaatgttccagatgaacggtttgattggctttgcaaactttacaagccaaagagtgaggtgcctgcatatcttgaagtaactgacatagctgggcttattagaggtgctcatgctggggatggtctgggcaatgcattcctctcacatatacgtgctgttgatggaatcttccatgtcctaagagcatttgaagacgcagaaattactcatgttgacgatacagtagatcctgttagagacatggaaactattagtgaagagctcagactaaaggatatagagttcatgaaaaagaaacttgaggaccttgataagtcaatgaagaggagcaatgataagcagctcaaaattgagcatgaattatgtgagagggtcataggccatcttgaggaagggaaagatgtccgtttaggagattggaaagctgctgacattgagatcttgaatacattccagctactttcagctaagccagttgtctatttggtgaatatgagtgagaaggatttccagagaaaaaagaacaagtttctacccaagatacatgcttgggtgcaggaacatggtggtgaaaccatacttcctttcagctgtgcttttgaacagaaactagtggatatgccagaagatgaagccgccaaatattgtgctgaaaaccagataacaagcatgatcccaaaaattatcaagactggttttgcagcaattcatctgatatactttttcactgctggtcctgatgaggtaaaatgttggcagatcagacgccagactaaagctcctcaagctgctggtgcaattcacactgattttgaaaggggtttcatatgcgctgaggtaatgaagtttgaagatctgaaagaactgggcagtgaatctgctgtaaaggctgctggaaaatacaagcaggaggggaaaacctatgtggtccaggacggggacatcatctttttcaaattcaacgtgtctggtggcgggaagaagtgaagaatgtatgaagatggtagcatcaacagtgttttacgtcttaccccgaatttctcattcaacagtgtttacaccttgccccgtatttccacatttttgaggtcgcttgccagtagctctaggttccggtatcgaaaacttgtacaacaaggctccagactgttgaaggatttgtattaataacacccaccattgtatgtcttgtgcttg

SEQ ID NO: 263738 - DNA, 321 bp, Zea mays
agtgtcgaacaaaggtctaagtgttgtacaactgatctgtttctatattctgcaggatatagagttcatgaaaaagaaacttgaggaccttgataagccaatgaagaggaggaatgataagctgctcaaaattgagcatgaattatattgatccagcacaatgccgaggagactggagactaaacttggaggtgctactgaaggatgtgactttgagtcaaaggtaacaggtagcacatggagagcttgaattgaattcaagcttggatatgattggacaatactgtattagatcacctagaagggtgattgatgcttgtt

SEQ ID NO: 263739 - DNA, 274 bp, Zea mays
gactatttctttgacatttgaactcgccttatgtgaaacactcttccctaaatacattgcaattttcttacattatagatcttagtcatgttatatctgttctaagccactttactggtccaataatatgatatattccttggtagtgtatgctatctgcttgctgatattgtagcacacatgagttgatatacctttttttcattagggtgcaggaacatggtggtgaaccatacttcctttcagctgtgcttttgaacagaaactagtggat

SEQ ID NO: 263740 - DNA, 270 bp, Zea mays
cttaagggtatggcttagctcaacccttctgattacaccaaaactgaatatggtttgggcgcacggaccttatgggaagctagaggtctgagctattgggaagctagaatttatgtttttatcaatgtttagtcattaactaattacttgcatatcggtttgttgtatatttattaactaatcgagtgttgcatacggttttcagaagcatttgaagacgcagaaattactcatgttgacgatacagtagatcctgttagagacatggaa

SEQ ID NO: 263741 - DNA, 597 bp, Zea mays
gaattaccgggtcggccgacgcgtacgctggcgcattctctggatctccatgcatggttgaacaagagacggatggagacagatgcggggcatcttacaggggttgttgtctgtctttgtagcagaagaaacagtcctaaaaaagaatggagagctcctcagataggagcaacgtttctcaggggaaccacctgggttatgcgagaagcacatccatggattccactggtcctcagttagctggtaggtctagctcaatgttgagtaggagaagtagcagacagggctcaaggggatccatcagcctctcaagggagatgggggactccatactgagctcaatgaggcattctcttcagtcggcggatcaattgctaggagacatcgatagctcagttctggctcaactcatcgaaagtggtcgagttctatcacccgaaggcgatgttgatgaggatacagtaagaatctctgaacatcataaggttggccctgttccagatgatgcaataaagcaaaccagtgacaattttgcatcagcacctatatcttcagcggagacaaaagacactatttctaacgtcctagcagattcat

SEQ ID NO: 263742 - DNA, 704 bp, Zea mays
tgtttggttcccctgcttccagaatttatatgacttgtgaattttaaatgaaagaaaagaaaggaaaattatgaatcatggattattgattcatgccataacattgacttttgtgcagggttgttatctatctttgtagccgaagaaacaatcctgagaaagaatcgaaagctccttggctaggaataatgtttctaagtggaatcacctggggtatgcgagaagcacatcaatggattccactggtcctctgttagctggtaggagaagtagcagacatggctcaagtgagatgggggactgcatattcagctcaatgagacattttcttcagttggcgaatcaattactaggagaatttgttagatattaagattaatagtaacatgtattaattcaattttatataatcgttgtgcaccaacattttatttgaaagggagaaataaatcctagcaaaattgactatgggagaagggatataggaacaaaaatggaatatgggagagggaacaaactcatcggcctatgcgccttgattagaatgtctcctaaaagttttaggtattgaaaatatgataggacatttattgtaatatgtttattttctgaaatactaattttgatgtatagaatattgacaaaatcttcatgtcagtttcccttcccaagtaagaatagagcaatgcacttgttctgcccgt

SEQ ID NO: 263743 - DNA, 440 bp, Zea mays
gttatcgtggtccatcgtgcaacttttattgtcggtttctctgattcaattaagtgggaaccttggtagtgattcaattaagtgagaagtgagaaccctcattgtgctatttttttgtttcagggttgttatctatctttgtagccgaagaaacaatcctgagaaagaatggaaagctccttggctaggaataatgtttctaagtggaatcacctgggttatgcgagaagcacatcaatggattccactggtcctctgttagctggtaggagaagtagcagacatggctcaagtgagatgggggactgcatattcagctcaatgagacattttcttcagttggcgaatcaattactaggagaatttgttagatattaagattaatagtaacccgcattaattcaattttatataatcgttgtgcaccaacattttatttg

SEQ ID NO: 263744 - DNA, 487 bp, Zea mays
atctattataggctacctcatgtttggagacaagatgctctcacaaataactttcaatcttctgaaagattcatttgcagcaaaagttgcacgatggaccacgataactattattgtcggtttctctgattcaattaagtgggaacccttggtagtgattcaattaagtgagaagtgagaaccctcattgtgctatttttttgtttcaggtgatcattcctttcacaaagtatccttacacatcttagttatcaactctgtaagttgaggtttttaggatggcgttacattcctgaaattgtttgaatcctttatgggatttcttcatccttaatcacttgcagatattctttagtgataaaaccattagcttagagtatggaagggttgtgtccagcaaggtttatgacggatagtcttcgctgttatgctgcgtactcgatgtgttgcctttcttctaccattctttggtacataactaacacat

SEQ ID NO: 263745 - DNA, 1227 bp, Zea mays
  unsure (1)..(1227): unsure at all n locations
ntccgggcagtggagtagtggtaggaaaagctcgtcgccgagtcgccgtacgggggctcggctcgggtgagcgagcggcggccggcgggtactgaggcctgagggcgaggcgatgggccgcctccgtgacgggcgagccttcctccaccgcgcgcttgtcctctcgtcgctgctccttctcgcctccggcgaaatcttcttcgaggaacggttcgatgatgggtgggatagccgctgggtgaaatctgattggaagaagagccaaggacaagctggaaccttccgacacacagcgggaacctactctggagaccctgacgataaaggtatacaaacaactggggatgccaaacattttgctatatcagcaaaattcccacaatttagtaacaaggaccggacattggtgatccagtactctctaaagattgagcaagatattgaatgcggtggtgcttacatcaaacttatgtctggttatctcaaccagaagaaatttggtggcgacactccttacagacctgatgccacttatagcatccttatcgataaccgggagagagaattcgggagcatgtacactgactgggatatccttcctcctcgtaagatcaaagatgttaatgcaaaaaagccaaaagactgggatgacagggaatatattgaagatcctgatcaagttaagccagagggatatgattcaattcctaaagagatacctgatcccaaggacaaaaagcctgagtcatgggatgacgatgacgatggtacatggaagcctagaatgatacctaatccagaatacaagggaccatggaagcggaagaaaattaagaatcctaactacaaaggaaaatggaagaccccagggtttgtcaatccagagttggaggttgacccagacctatatgttctgaaacctttgcagtatgtggngattgaagtatggcaggtcaaagctggttcagttnttgacaacattttgatttgcgatgacccagactatgcaagacatgttgtagatgaaacttttgctgcaaataaggaggctgaaaaggaggcctttgaaggagctgaaagaaagaggaaggctagagaagaagaggttaattaacatggaatcttactctctttctgctctggtcgctgttgcctgttaacaattctgaaactgtgaatgtgagccttggaggagttaacaggacgttgcttttccacaggaagcac

SEQ ID NO: 263746 - DNA, 687 bp, Zea mays
ggaagaccccatggattgtcaatccagagttttaggattacccagacctatatgttctgaggcctttgcagtatgtggggattgaagtatggcaggtcaaagctggttcagtttttgacaacattttgatttgcgatgacccagactatgcaagacatgttgtagatgaaacttttgctgcaaataaggaggctgaaaaggaggcctttgaaggagctgaaagaaagaggaaggctagagaagaagaggaagcacggagggcacgggaggaaggggagagacgaaggcgggagagggatagggaccgcggcagggaccgatacaaggatagatataagcgtcataggcactacgactaccatgacgagctatagatcctgtattcttttgaaatctgcacgatattggatgtctgtctacggagagcgcacgtgcaaaacttgtatgttgtactcacggatgaagctgaacctgtgattttggcgatgggtagagattggccatcgcgtctgtaactaaatttccacgttgcgatgcaatatgagctgtagtactgtcctcgcactattatttaccgtttgtgatgcatatgtgatataaaccttcaagaaacacacacacgaagggtctgaatgagcacggcctttgttgtttgcttcttataaaaaagaactgttttatctgtgt

SEQ ID NO: 263747 - DNA, 918 bp, Zea mays
  unsure (1)..(918): unsure at all n locations
cggggcccacccacccgcccgtttttatgttggaggccagagccgccgaccgggggcttcgttcgcnggaccaagcggcgaccgccgggaactgaggcctgaggccgaggcgatgggccgcctccgtgacgggcgagccttcctccaccgagcgcttgtcctctcgtcgctgctccttctcgcctccggcgaaatcttcttcgaggaacggctcgatgatgggcggcatagccgctgggtgaaatctgattggaaggtcggcccacgcctccctggaaccttccgacacacagcgggaacctactctggagaccctgacgataaaggtatacaaacaactggggatgccaaacattttgctatatcagcaaaattcccacaatttagtaacaaggaccggacattggtgatccagtactctctaaagattgagcaagatattgaatgcggtggtgcttacatcaaacttatgtctggttatctcaaccagaagaaatttggtggcgacactccttacagcttcatgtttgggcctgatatatgtggggatcagaaaaagaagctccatctcatactttcataccaagggcaaaactaccctatcaagaaagaactaaaatgtgaaacagacaagttgacacatttttacacatttattcttagacctgatgccacttatagcatccttatcgataaccgggagagagaattcgggagcatgtacactgactgggatatccttcctcctcgtaagatcaaagatgttaatgcaaaaaagccaaaagactgggatgacagggaatatattgaagatcctgatcaagttaagccagagggatatgattcaattcctaaagagatacctgatcccaaggacaaaaagcctgagtcatgggatgacgatgacgatggtacatg

SEQ ID NO: 263748 - DNA, 879 bp, Zea mays
aattcccgggtcgaccgcactcgttcggcgctgctgacgatggcttcgtctgtgaattggctggtgcctacgtcttgcggcgacaggtatgtgtgccacccgacggacgctcatgctgcggtggtgttcgtggcgctgtacctcatctagctgggcacggtcgggatcaagccgtgcgtgtccttcttcggcgccgaccagttcgacgagaacgacgagcgggagaagaagagcaagagctccttcttcaactggttctacttctccatcaacatcggcgcgctggtggcgtccacggtgctggtgtacgtgcagacgcacgtgggctggggctggggcttcggcatccccgccgtggtcatggccatcgccgtcggcagcttcttcgtgggcacgccgctgtacaggcaccagaagcccgggggcagcccgctgacgcgcatcgcgcaggtgctcgtcgcgtgcgcgcgcaagtggaacgtggccgtgcccgcggacaagtcgcggctgcacgagacggtggacggggagtccggcatcgaggggagccgcaagctggagcactcggagcagctggcgtgcctcgacagggctgccgtggtgacggccgaggacggcgcggaggcgagcccgtggcgcctgtgctcggtgacgcaggtggaggagctcaagagcgtgatccggctgctgcccatctgggccagcgggatcgtgttcgcggcggtgtactcgcagatgagcaccatgttcgtgctgcagggcaacacgctggaccagagcatggggccccggttcaagatcccctcggcgacgctgtccatggtggacaccatcagcgtcatcgtctgggtccccgtgtacgaccgcgccatcgtgccc

SEQ ID NO: 263749 - DNA, 455 bp, Zea mays
acagctagactgtaacgttttagctttttgcactgaagaagaagaagagttaagaacatgggtattcctccatgtcttgtacatccattccatcccagtctgtccaggcgtagtaacatgtagtactaccactactaacaatctgacccctttgttttctcaacacaacaaccaagtgagtaagtatcacacacaacacgcacgcaccccctgccctcaacatacaccacttgcttgtaggcagagggaacaacacgccacactcagatcagacgactaatagagagaccgagcgaccaatcagcaacgcttcacgcctgctgctccaggtagctttccatgtcgggagcagggggggaggttgagcaaatggtgaaaatatcaaggaggaccatcatatatatataatataacccttgtcaaaagcgacccctaaaaaaaagcccacgagtcat

SEQ ID NO: 263750 - DNA, 1107 bp, Zea mays
ggtctagaataacgggccgagccacgcgtccacccacacgtccgcccacgcgtccgcccacgcgtccgcccacgcgtccgcccacgcgtccgccaagtttttgagcctttcagtattcttggactggaatctggggcatctgaatctgatatcaagaaatcatataggaggctttctattcagtaccatcctgataaaaatcctgatccagaggctcataagtacttcgttgaatatatatccaaggcatatcaagcattaactgatcctatatctcgtgagaattatgagaaatatggtcaccctgatgggcggcaggggctgcaaatgggcattgctttgcccaagtttttactaaatattgatggtgcatctggtgggataatgcttcttggaatagtcggattttgtatattattgcctttgatgatagctgttatttatttgtcaagatcatcaaaatatactggaaactatgtcatgcatcaaactttgtccacttactactactttatgaagccatctcttgctccaagcaaagttatagatgtcttcatcaaggctgcagaatatatggagatgccagttcgacgcagtgatgatgaacccctgcaaaaattgtttgtagctgttagaagcgagttaaatctggacttaaagaacattaagacagaacaagcaaagttctggaagcagcatccatcactagtaaagatggaactgctgattcaggcgcatctcacttgtgagtcattcgctttgacgccagcacttcttaaagattacagacacatgcttgaacttgcacctcgtcttctggaagaactcgttaagattgcagttttaccaaggaatccccatggttttggatggctccggcctgcactcagtgttattgagctttctcaaaatattatccaggctgttccattaagtgcacgaaaagctagtggagctaactccgaaggaatagcgcatttcttgcagctgccacatttcacagaagcaaccgtgaaaaagattgctcgcaagaaaatccgtgcattccaagaactttgtgacatgccttgtggaagatcgtgctgcattgctcacacaagttgctgg

SEQ ID NO: 263751 - DNA, 539 bp, Zea mays
cgtacgcgtgggcggacgcgtgggggaaaaagcgggcttctctggaagatatccccaagtttctccgggagctggagatcgatgatatccggaagaaagaattggcatgtgcccttcatgctcaattcaaagattggttatatgcctcagggaatatccgccagctatactgtttgcaaggcgaatgagcataagatggggttcttgtgtaagcgcgagatgcagcagtacgcgtctgcaagtgcaatccaattccgggcgcctccgaaatctgaaagtgacttccaagctgagttggtgtcgcctgccctgatgcacttggtatttcagctggagccgtttgtggaggcaagtaactgtaacgtttttgtttgttccaattagtttttaccacttttcccattcagttggccgcaaggtttctgcaaatctttcggtactgttgggttcatatttagaaaattcacaaagcggccactcaattctctttttggaaagtaactttatttttttttcaaacaaaaaaaaacaaaaacaaa

SEQ ID NO: 263752 - DNA, 1198 bp, Zea mays
  unsure (1)..(1198): unsure at all n locations
acacgtaggtcgatacaacaccctacagtgccgtcatgcgtcgggccaccccacaccgggcacaccccccgagctcagcttagctccactccagctccaatcacagtcgtgaccagagcgcgagagctagctagagggccgtgaaaatgccgatcaataggatcgccctggggagccaccaggaggtgtaccacccgggcgccctcaaggcggcgttcgctgagttcatctccaccctcatcttcgtcttcgccggccagggctccggcatggccttcagcaagctgaccggcggcggcccgacgaccccggcgggcctgatcgcggcggcggtggcgcacgcgttcgcgctgttcgtggcggtgtcggtgggcgcgaacatctccggcgggcacgtgaacccggccgtgaccttcggcgccttcgtgggcggcaacatcaccctgttccgagggctcctgtactgggtggcgcagctgctggggtccaccgtggcgtgcttcctgctccgcttctcgacgggcgggcaggccacgggcaccttcgggctgacgggcgtgtcggtgtgggaggcgctggtgctggagatcgtgatgaccttcgggctggtgtacacggtgtacgccacggcggtggacccgaagaagggcagcctgggcaccatcgcccccattgccatcggcttcatcgtgggggccaacatcctggtgggcggcgccttcgacggcgcgtccatgaaccccgccgtgtccttcggccccgccctcgtcagctgggagtggggctaccagtgggtgtactgggtcggccccctcatcggcggcggcctcgccggcgtcatctacgagctgctcttcatctcccacacccacgagcagctcccctccaccgactactaaaagccgaagccgaccgacccaggggtgcgcagcgcagcgcagctagcatccagctctctctccccgctcgccgccgccgtttagtttctctcgtgcacgtgcatgcatcgtagactgtctcaggccgccgctgcgccggcgccgctcgcatcgtttgcttttccttggaccagcagtcgtcgccgtcaggttgagctgcttgtaaccgtgaattccggacccgtttgcttctgtaagatttgtgcatttgcctgagtacacctcgatctgcagccaaaaaaaaaaaaaaaaaaaanaaa

SEQ ID NO: 263753 - DNA, 2059 bp, Zea mays
  unsure (1)..(2059): unsure at all n locations
cagcgagcacagtgaactcgtcgcgtgccccgccttatttaacgccctctccccgcagcagcgggaccctggcgaaatctgacccgggccacactccgctgctccgccatggcgatccgctccaaggcctggatctcgctgctgctcgcgctgaccgtcgctctctccgcccgggcggaggaggagcccgccgccgcggcggagggcgaggccgtgctcaccctcgacgtcgacagcttcgacgaggccgtcgccaagcaccccttcatggtcgtcgagttctacgccccctggtgtgggcactgcaagaaacttgctccagagtatgagaatgcggccaaggcacttagcaagcatgacccaccgattgttctcgctaaggttgatgctaacgaggagaagaacaggccgcttgctaccaagtacgagatccaagggttcccaaccatcaagatcttcagggaccaggggaagaacattcaggaatacaagggccctagggaggctgatggcattgtggattacttgaagaagcaggttggccctgcgtccaaggagatcaagtcaccagaagatgcgacggcccttatcgatgacaagaagatctacattgttggtatcttcgctgaattcagcggcaccgaatttacaaacttcatggaggtcgcagagaagctgaggtctgactacgactttggccacactttgcatgccaaccacctcccacgtggtgatgcagcagtggaacggccattggtcaggctgctgaagccatttgatgagcttgttgttgacagcaaggattttgatgtcgctgcactgatgaagtttattgatgctagcaccatccctagagttgtcacttttgacaagaaccctgacaaccacccatacctcatgaaattcttccaaagctcagcccccaaggctatgctgtttttgaacttctccaccggaccttttgattctttcaagtctgcctactctgctgccgcggaggaattcaaggacaaggaaatcaagttccttattggtgacatcgaagccagccagggtgccttccagtactttggcctgaaagaggaccagacaccccttatcctcatccaggatggtgactccaagaagttcttgaaggttcacgttgaggctgaccagatcgtcgcttggttgaaggagtactttgacggcaaattgacgccgttcaggaagtctgagcctattcctgaggtcaacaatgagcctgttaaggtggttgtcgctgacaacgtccacgacttcgtcttcaaatctggcaaaaatgtccttattgaattctatgccccctggtgcggacactgcaagaagctggcgcccatcttggacgaggcagccaccactctccagagcgacgaggaagtcgtgattgctaagatggacgcgactgccaatgacgttcccagtgagtttgacgtccaaggctacccgaccttgtacttcgtgaccccgagcgggaaggtgacatcctacgacagcggcaggacggcggacgacatcgtcgacttcatcaagaagagcaaggagaccgcaggcgccgccaccaccaccaccacccaggcgccaccggcatccgagaaggcagccgccgccgagcccgtcaaggacgagctgtgagcatccaaggtgtggacggctgtggctgcgtaagcatgggaggaaaacctggcgctaacgtgcctccaacgcctagtttttgcgggaccagagggagagagagagagggacggagttagagagagaggggatctgcgacgtgttttgctctgcggcggcatgtctgtgtatcccattgaggttatgtacacaattacaccgcggtcggtgggtgttttttagttaattatcacaagtgacagtagaaaggaacagattgtgatgaggttgaatggatgaataaatcgctagtccgccccaccaaaaaagaagcgtcaatgaaacaggcgcttttgtgacgtgtccaccagcactaacgctggaggcaaaaaaaaaaaaaaaaaaaaaaaaaaaaaaaaaaaanaaa

SEQ ID NO: 263754 - DNA, 840 bp, Zea mays
tacgctgagtacagtcggaattccgggacgaacactacgcgggacctggcgacgggcgggcaggccacgggcaccttcgggctgacgggcgtgtcggtgtgggaggcactggtgctggagatcgtgatgaccttcgggctggtgtacacggtgtacgccacggcggtggacccgaagaagggcagcctgggcaccatcgcccccattgccatcggcttcatcgtgggggccaacatcctggtgggcggcgccttcgacggcgcgtccatgaaccccgccgtgtccttcggccccgccctcgtcagctgggagtggggctaccagtgggtgtactgggtcggccccctcatcggcggcggcctcgccggcgtcatctacgagctgctcttcattctcccacacccaggagcagctcccctccaccgactactaaaagccgaagccgaccgacccaggggtgcgcagcgcagcgcagctagcatccagctctctctccccggcccgctcgccgccgtttagtttctctcgtgcacgtgcatgcatcgtagactgtctcaggccgccgctgcgccggcgccgctcgcatcgtttgcttttccttggaccagcagtcgtcgccgtcaggttgagctgcttgtaaccgttaattccggacccgtttgcttctgtaagatttgtgcatttgcctgtgagtattcaaagcaaaaaaactaaaaagaaatcaaaatgagaagctgaaggaaaatattcaaggatctgaaggaagaaaaaaaacaagctccgtgaaaaaaaaatgggggcggccggtctaaaagaaccaagtttaccaacgcgtccatg

SEQ ID NO: 263755 - DNA, 481 bp, Zea mays
  unsure (1)..(481): unsure at all n locations
gaatataaaataaattgtagatgtagtataaaaagagaagaggatataataaccaacaccacccaggcgccactggcatcagagaaggcagccgccgccgagcccgtcaaggacgagctgtgagcatccaaggtgtggacggctgtggctgcgtaagcatgggaggaaaacctggcgctaacgtgcctccaacgcctagtttttgcgggaccagagggagacagagagagggacggagttagagagagaggggatctgcgacgtgttttgctctgcggcggcatgtctgcctctcccactgaggttatgtacccccctacaccgcggtcggtgggtgtctttttagttaattatcacaagtgacagtagaaaggaacagattgtgatgaggttgaatggatgaataaatcgctagtccgccccgcctcgttggatgcgtcaaaaaaaaaaaaaaaaaaaccacgcgtcgcggacgcgtngg

SEQ ID NO: 263756 - DNA, 389 bp, Zea mays
gtgggtgtactgggtcggccccctcatcggcggcggcctcgccggcgtcatctacgagctgctcttcatctcccacacccacgagcagctcccctccaccgactactaaaagccgaagccgaccgacccaggggtgcgcagcgcagcgcagctagcatccagctctctctccccggcccgctcgccgccgtttagtttctctcgtgcacgtgcatgcatcgtagactgtctcaggccgccgctgcgccggcgccgctcgcatcgtttgcttttccttggaccagcagtcgtcgccgtcaggttgagctgcttgtaaccgttaattccggacccgcgtgcttctgtaaaattcccccctttaaaaaaaaaaaaaaaaaaaaaaaaagaaa

SEQ ID NO: 263757 - DNA, 1290 bp, Zea mays
cgaccgcggtgtaattgtgtacataacctcaatgggatacacagacatgccgccgcagagcaaaacacgtcgcagatcccctctctctctaactccgtccctctctctctctcctcatggtcccgcaaaaactaggcgttgtaggcacgttagcgccaggttttcctcccatgcttacgcagccacagccgtccacaccttggatgctcacagctcgtccttgacgggctcggcggcggctgccttctcggatgccggtggcgcctgggtggtggtggtggtggcggcgcctgcggtctccttgctcttcttgatgaagtcgacgatgtcgtccgccgtcctgccgctgtcgtaggatgtcaccttctcttgaaggatcacattgaggctgaccagattgtctcttggttgaaggagtactttgatggcaaattgacgccgttcaagaagtctgagcctattcctgaggtcaacaatgagcctgttaaggttgttgtggctgacaacatccacgatgtggtcttcaagtctggaaaaaatgttcttattgaattctatgccccctggtgtgggcactgcaagaagctggcgcccatcttggaagaggcagccaccactctcctgagtgacgaggaagttgtgattgctaagatggacgcgaccgccaatgacgtgcccagtgagttcgaggtccaaggctacccaaccatgtacttcgtgactcccagcgggaaggtcacctcctacgacagtggcaggacggcggatgacatcgtcgacttcatcaacaagagcaaggagaccgccagcgccgtccaggcgacggcgacggcatctgggaaggcagctgacgcagccgagaagaccgagcccgtcaaggacgagctgtaaacagccttggcgtggacgctatgggtatgaagcatgggacagaggaggggggacaaaagctggcgccaacgtactcgccaagcctccggctttagtttttgcgagggaagagggcaaagtaagagaatgggagggaggggtctgtggcgtgttttgctctggtgcggcatgcctgtgtatcccattgagattctgtacaattgcaaacagagagcggtacctttttagttaattatcagagatgcctgtagaaagagactggttgtggtgaggttgagtggacgaataaatggcgagtctgcctcattggatgcatcatgaaacgggcacttttgaggagggatggtaatggggaaatttccgtggagaatcgcttttaaaaaaaaaaaaaaagaaaaa

SEQ ID NO: 263758 - DNA, 835 bp, Zea mays
cccacgcgtcctcggacgcgtgggtgcatgcaacacaggctcgatcggccctcgtcttgccttcaacgagcagctagttcacgccccaccaacagcttcacgacttcttcgaagctgttctttaaacatcttgtttaaaacagactctagtatctctttgagctcagcttggtctgtcatgctctagcactagcacaaggtcatggccggctcttttgagttcgacaccgaatgactgaaacgaaggggcagaaaaaaaagatgtccttttcgtcctactagctagtaccaggctttcggtaggtatttctttaatacaaggccagtgtttaatagaagctcgcagaaatgtctttttgaaaaaaagtcaaaagcgaggaaagcgaagccttttaggtgaaatgattagtgcaaatgacagatttagacctgtcatcatgctagagggctgcagaggatgggaatccttggcagaatcagtagtaccttctactgtatgccacaaggcccagttcccatgtgcagatgtgctgctgctcggctgctccccagaactactagcaaaaatgctccacctccactgacacgattacacgaatgcctcctgtgtcctggaaaaagaaacatgctgtagtttttataatagtatcaggaaaagaagaatgttacagacgggaccagagggagagagagagagggacggagttagagagagaggggatctgcgacgtgttttgctctgcggcggcatgtctgtgtatcccattgaggttatgtacacaattacaccgcggtcggtgggtgttttttagttaattatcacaagtgacagtag

SEQ ID NO: 263759 - DNA, 515 bp, Zea mays
aaatggcccggggcacaattcggtggttccccattgggaaacccttcaaaggcctggattttcttgttgtttcgcttaaccggggttttttccgcccgggcgggggaggaaccccccccccggggggagggcaaggccggcctaaccttgaacgtgaaaagtttcaacaaggccgtggccaagaaccctttaatggccgtggagttttacgccccttggggggggcactgaaggaaactggttcaaaagtatgagaatgcggccagaggcacttagcaagcatgacccaccgattggtctcgctaaggttgatgctaaccaggagaagatcaggctcgcttgctaccaagtactatatccaaggtttcccatctcattaaaatctttaggcaccttttcaaatacttttactttatcattgactatatttattcttattatttagaattatacttttcataaacttaattaccactatcttacttcatttttatatacttatcttaattatattt

SEQ ID NO: 263760 - DNA, 1723 bp, Zea mays
gaccggccggattcccgggcgcccagcgttcgttacgcgtccgcccatacttccggcgcggcggagatcgagtcgagcgcccgccacggcgatggcggctagagtcctgccgccgccgctgctctctctcgtactcctcctgctgctgctcccgctctcagcccgggacaccgtcgccgcgggcgaggatttcccacgcgacgggcgggtgatcgacctcgacgagagcaacttcgaggcggcgctgggcgccatcgacttcctcttcgtcgatttctacgcgccatggtgcggccactgcaagcgccttgcgcccgagttagatgaagctgcaccaatgttggcagggttgagtgagcccattgttgttgccaaagttaatgctgataaatacaggaaacttggatcaaaatatggagttgatgggttccctaccctcatgctttttatccacggtgttccaattgaatacactggttcgaggaaggctgatcagcttgtccgcaatctgaagaagtttgttgcgccagatgtttctatccttgagtcagattctgcgataaagaactttgttgagaatgctggtacaagctttcctatgttccttggttttggggtgaatgactcattgattgctgaatatggaaggaaatacaagaaaagagcatggtttgctgttgctaaagatttctctgaggacgtcatggtagcctatgaatttgacaaggttccggcgctagttgcaatccatccaaagtataaggaacaaagcttgttctatggcccatttgaagaaaatttcttggaagattttgtacgacaatcccttctccctttggttgtcccaatcaatacagagacgataaaaatgttgaatgatgatcagaggaaagttgttctcacaattttggaggatgattcagatgaaaactctacgcagctggtaaagattttgcgatctgctgctaatgcaaaccgtgatttggtgtttggatatgttggaatcaagcaatgggatgggtttgtggagacttttgatgtttccaagagctcacagctgccaaagctacttgtgtgggatagaaatgaggagtatgagctcgtggatggttcagagagattagaagaaggtactgaccaagcatctcaaataagccaatttcttgagggatacagagcaggaagaacaacaaagaagaaaattagcggcccttctttcatgggtttcctgaattctctggtcagcttgacctcgctgtacatccttatattcgtcattgcccttctgtttgtcatggtgtactttgctgggcaagatgatactccacagccaagacgaattcatgaagagtgatggaagcttggggagcttcttgcacctgaagtgtaaagatggctaatgtaccaggagatgtagctcagaggttatagatttcaaactttcaacggacgcaagtcttgaagagtggatttggctattgatgctgagattcttcaatttctattggccacaccaacttctacatcctgcctatttatgtttctgttttgtgcccttcaatttgttctttaatttagagcttagaaattagcctctgcctgtgtattttagaaattgtccattccagagtccatttctgtgaaaatatatttattatcatactctgctactgaacgtttgtacaattaatacatgatgtatagactgttctggtgctatggt

SEQ ID NO: 263761 - DNA, 1678 bp, Zea mays
cccacgcgtccgcccacgcgtccggccgggcctgctgtccaccctcgtcacggcagccgggcggcgctctgaactcccgagccggctctccatcagccacgtcgcgcgccgcccaggagaaggagctctttaatctgtgctagcagcggtcccagagaatgcggcagatctcgtcgctgctgcagggcctggcccggtcactctcggtggggagggacagggacagggacagggaccggaaagggaacggcgcaggcgaccgcaagaccgccgtgccggcggtgctgcggacgtcgggcaccctgtggggcgacggctcggacacgttcgccgccgtctgctcgcggcgcggcgagaaaggcatcaaccaggactgctccatcgtctgggagggattcgggtgccaggagggcaccatcttctgcggcatcttcgacggccacggcccgtggggccactacgtggccaaggtggtgcgcgactcgctgccgccgtcgctgctgtgccactggcaggaggcgctcgcgctcgcgtcgctcatcgacgacggcgagaagaagctcggcgactgccagttcgatctctggaaacggtcctacgtggccgcatgcgccgccgtggacgatgagctgcggcgcagccgccgcttggacgcggtccaaagtggctgcaccgcgctatccatcgtcaagcagggggacctcatgatcgtcgccaacgtcggcgactcccgggccgtgctgggcaccacgtccggcgatggcgccattgcggctgtccagctcaccgtcgacctaaagcctaacctgccacaggagaaggagcgcatccggcggtgcaatggtcaagtgtactgcctcgccgatgagcccggggtgcaccgcgtgtggcagcctagccgagagtcgccggggctcgctatgtcgcgcgcgttcggcgactactgcgtcaaggactgcggtgtcatctctacgccggaggtgacgcagaagaggatcagcagcagtgaccaatttatcatcctcgctaccgacggggtatgggacgtgctctccaacgacgaggcggtacatatcgtggcggggacgccggaccgggcgaaggcggccaagcggctggtggagtgcgccgttcgcgcgtggaggcgcaacgtgcgcgacatcgccgtcgatgactgctcggcgatctgcctcttcttccacccgccgccgccgtcgtagacacgaaaacctgtaacgtgccgaagtccacgccaaggaggagggggcaacgaaatgcacatctcaagacagactacgattattgtgcccgtggcgttcgtagagtgcactgccgccgtccaccgttcagaaacgtgcagtttgtcgcgtgagagcgacactccacgattaggaactgcagccggtgcacggccaaacaaaaagatctccggctttcacacgttgccagtcaagatgtacgagaacatcagagaaaaagggtaggaaagacgcattttgtttggccgtgcaccggctgcagttcctaatcgtggagtgtcgctctcacgtgacaaactgcacgtttctgaacggtggacggcggcagtgcactctacgaacgccacgggcacaataatcgtagtctgtcttgagatgtgcatttcgtcggacgcgtggggggctcctgagctgcctgt

SEQ ID NO: 263762 - DNA, 609 bp, Zea mays
  unsure (1)..(609): unsure at all n locations
ccggnctcggaatacccgggccgacgcacgcgtccgccgacgcatgggataagatgccatagtggttgccggggatctgctccacgcgcataggcgttcgcctggcctagaagcgcccatgtccgatcgtccccctcgccccattcgccgatgccgagctccaccccgcccatgttccgcccaggccgagctccgcctccactgtagctccgccccagcgtctggcccaagtggtctttgccacgttcttgagctcccccaacaacacgatggggcagttctacgtggccgcatacgccgctgtgtacgacaagctccggcgcagctgccgtttggacgcggtgcagagcggctgcaccgcgttgtccatcgtcaagcagggggaccccatggtcgtcgccaacgtcggcgactctcgggttgttctgtgcatcgcatttgacgacgacgccatcacgtcgtccaactcatcgtccacctaaagagcaacctgccacgtaagtcactactaaccggccatgaattcttgtgcgttgggacgatggccgatgctgacgttgtgtgagtgtcgttgaacatgatgtgtgtagaggagtagcacatctggtg

SEQ ID NO: 263763 - DNA, 417 bp, Zea mays
  unsure (1)..(417): unsure at all n locations
cagacncgccttcccgcacagcccgacgcctacccgcagccgcgccgtcgtcgcgctcgcgggcgagctcccgggacgacgcgcctgcgccgttgtccagcttcgacttcctcgcactgaagcgggagcttgatgaggaggaggaggcagatggcgacgcgatcggctctgcttgcgaacaggtgattagtgtgacctcggcgcggacctcgggttcgtgtcgcagccctggatcgacaccgcctcgtgggctgttgcattggttgaagtgaagccaagcttactttcaggtgaagcggagaaattcctttttgaggacatatatcaggttggagacgtggtgcttgttgcgaatgaatctgtgatcgataatgaacataaactggttggattgcacagcttggtgggctacaatgt

SEQ ID NO: 263764 - DNA, 362 bp, Zea mays
gagagagagagagatagagagagagagagagagaggggtcctccatggccaggcctgctgtccaccctcgtcacggcagccggccggcgctctgaactctcgagccgagtagccgactctccatcagccacgtcgcgcgcccaggagaaggagctctttaatctgtgctagcagcggccccagagaatgcggcagatctcgtcgctgctgcagggcctggcccggtcactctcggtggggagggataggaaagggaacggcgcaggcgacggcaagaccgccgtgcccgtcccggcggtgctgcggacgtcgggcaccctgtggggccacggctcggacacgttcgccgccgtctgctcgcg

SEQ ID NO: 263765 - DNA, 962 bp, Zea mays
attccgggggcgaccgacgcgtcctggcgtcctcccttctcccggctcttctcttcctcgccgccgtcgccgtctccgtggggggggttgcctccgccgggggcggagaatgcggcctccgcctgccccgcgacgccacgttccctgcggcgcatgcggagcggctcatccgcgcgctcaacctcctgcctaaggagaaggaggcggggccggccgcgggcggcggcgactggcccagcgtggcgcccggggagctcctatagcgtcgcgtccggctgcccggcgcgcccgccggcgtctgggacctcggccaccacgccggatactttcgcctgccgcacacgcacgacgccagaatgttctacttcttcttcgaatcgaggggcaagaagaaggaggacgaccccgtcgtgatctggctcaccggagggcccggctgcagcagcgagctggccgtcttctacgagaatgggcccttcaccattgccaacaacatgtcgcttgtctggaacaaattcggttgggacacgatctcaaatatcatatttgttgatcagccaaccggaactggctttagctacagctctgatgatcgtgatactcgtcatgatgagattggtgtcagcaatgacctatatgactttctccaggtgttctttaagaagcacccagaatttgcaaagaatgacttctttataactggagaatcttatgctgggcactacattccagcatttgcaagcagagttcaccaaggaaacaaagcaaacgagggcattcatataaacttgaagggatttgctatcggcaacggtctcactgatccagaaatccaatacaaagcctacacagactatgcgctggaaatgaatcttatcacaaaatccgactacgaaaggatcaataggttcattccaccatgtgaatttgcgattaagatgtgtggtgctgacgggaaagca

SEQ ID NO: 263766 - DNA, 1196 bp, Zea mays
cagtttacagaaaatgagaaggaaaagccaagtgaggacagtagcaaagaggttctttcaagtcagcaagacttagagagtcatgtagaaacacctcctgacagcaacagtgatgaaggcccatctgcagctagtaaagcgtctggaagcaaactgtcagcttcagctcctccattcaatccaggatcagtgttatcaatgtcccagccatacagcacggtggcagtatatgatgccagtgctattcttcaggcaataccaagtcaagcaatggagattctcccttctgccattgacactagagtgcctcgtggtcctcggtccaccttgtactatcgtactgggcattccttccaaaggaaacaaggttacacgcacagccagagcactattgtaaggggtagctactcccccacaaccatgaacccacatgctgctgaatttgtgcctggaaaaacttcgcaacaatctgatgtggctgacagagaacccagtcctgctaatcatgtggccaattctgatctggatgttgtatcgcagaccacagatgaagtgaaggctgaaacacctgccactgaaaaggcaggtcaagttgagaaagtcgtttcaggtaaaggaaaggaaaacagagggaaagacatcgtgagaaactcatacaaaacagaacttgcaaggcaaattttactcagtttcattgtgaagtcggtgcacgacagtttaggtccctcccgggctgaaccagagaggaagccaagtggatcagatgaagctagtaatgaacagaccagcgtcttaggcaagaacgcttctggtcgcaaagatccagataaacaagagaaagccacggaggttcccaagggcctgaaggatacagagggattcactgtcgtttcaaaacgtcgaaggcggccccagccgttcatgaaccccataaatggcctatattctcagccgtctatttgcacctctgtcagttaaggtctcattgcgttttcgaagacctgcaatagtttggaagatggacctttgcttttgcttaggggttggtagaagaattttgccgtatccaagcgagcagcgagcatgtagtcaaactgtacaaaattttccaggataccctttgtaataataataataataaaactgctgtaatctgcagtagccgtagatctcaataaagtattcctttgtatgtt

SEQ ID NO: 263767 - DNA, 411 bp, Zea mays
agcccacgcgtccgcccacgcgtccgcccacgcgtccgggcgtccccagccgttcatgaaccccataaatggcctatattctcagccgtctatttgcacctctgtcagttaaggtcattgcgttatcgaagacctgcaatattttgggagatggacctttgcctttgcctttgcttagaggattggtatttggtagcagagattttctctatccaagtgagttgtgagcagcgagcatttagtcaaactgtacaaaagttttccgggataccctttttgtaataaaagaaactgatgtattccgcagtagctgtagcgctggatataatgttcctttgtatgttatatatgacagaatcataggaaatagcagatgttaagttaatccaaaaaacaaagaaagaaagtggg

SEQ ID NO: 263768 - DNA, 510 bp, Zea mays
cttctggtcgcaaagatccagataaacaagagaaagcgacggaggttactaagggcctgaaggatacagagggattcactgtcgtttcaaaacgccgaaggcgtccccagccgttcatgaaccccataaatggcctatattctcagccgtctatttgcacctctgtcagttaaggtcattgcgttttcgaagacctgcaatattttgagagatggacctttgccttcgcctttgcctttgcttagaggattggtagcagagattttccctatccaagtgagctgtgagcagcgagcatttagttaaactgtacaaaaggtttccgggataccctttttgtaataaaagaaactgatgtattccgcagtagctgtagcgctggatataatgttcctttgtatgttatatatgacagaatcataggaaatagcagatgttaagttattccgatatacaaaaaaaaaaaaaaaaaaaaaaaaaaaaaaaaaaaaaaaaagggcggccgcatca

SEQ ID NO: 263769 - DNA, 946 bp, Zea mays
gttctagatcgcgagcggcgcccttttttttttttgcgccgccccttcttgtctctctttatcagcaattcagcatcttgttactcatacggaagaaagaatagacgctacaaactagaacttgtgaacacacgctattgacctctaaaccaccttaacaaaatctcaaaattcacgcctgggctttgattctgcaaccgtgactcggatctgtctaccatccaagtcgatgccatcaaggtttgatatggcattgttgacctcctcggcagagccataggtgacgaaaccaaacccccttgacctgccgctatccctgtcgtagatgaccttagcatccagcacctgtccttgctcactgaataggttctccagagtcgagttgtcaacgccccatgcaaggttccccacgtataccttgttccctgaatcgacaaagctgccgccgccgaccacccaccaccaccaccccttggtgctcttggtgcggatccatctctaggtggcggtggcccgcagttcaccctcagaggtcttccttgaaatgtataaccgttgaattgctcgacagcagccccggcttcttcagctgaagacattgtcacgaatccaaatccacggctccgcccagtcattctatcgtatacaacctcgaccatctcgacggagcccgcctgctcgaagagcccggccagctgcgcactgtcgacgctgaacggcaggttaccgacgaacagcttgaggtcctcggagaactccccgtcctgctgctccgcgccctcggtcccgtactccgacgacaccgcgacggcaacgggctcgaagacccgcctcgctggcgccggcgccgacacagagcgcagcggcagcgtgaaggggaggaaggcccaggccgcgggcgcggccggcttcggagaggatagggcgaggaagcggggcgagagcg

SEQ ID NO: 263770 - DNA, 1040 bp, Zea mays
ctcttctccagctcgctctcgccccgcttcctcgccctatcctccccgaagccggccgcgcccgccccacagccttcctccccttcaggctgccgccgcgcgctgtctcggcgccgggtaggcgggtcttcgagcccgtggccgtcgcggtgtcgtcggagtacaagacggagggcgcggacaggagggggaggatggatccgaggagttctccgaggacctgaagctgttcgtcggcaacctaccgttcagcgtcgacagcgcgcagctcgcagggctcttcgagcaggccggctccgtcgagatggtcgaggttgtatatgacagaatgactggacggagccgaggatttggattcgtgacaatgtcttcggccgaagaagccgaagctgctgtcgagcagttcaacggttatgcatttcaaggaagacaactgagggtgaactgcgggccaccaccacctagagatgaatccacaccaagagcaccaaggggtggtggtggcggcggcggcggcggctttgtcgattcagctaacaaggtctatgtggggaaccttgcgtggggtgttgacaactcgactctggagaacctgttcagtgagcaagggcaagtgcttgatgctaaggtcatctacgacagggatagcggcaggtcaagggggtttggtttcgtcacctatggctccgcccaagaggtcaacaatgccatatcaaacctcgatggcatcgacttggatggtagacagatccgagtcacggctgcggagtcaaagccgagacgtcaattttgagattattttcttatgggggtttagaggctgatagcgtgtttcaaaacttttagtttgtagtgtctattctttcctccatatgagtcccaagaagatgataatgagagcctggctgtgaaatggctgtatacaggaagacttttccccgctggaaagatgcatttatttgtttcagctgtacccccccattgccagttcaaatttcccttccatctaaatgtgtccagaaaataaaacaaaaacaaag

SEQ ID NO: 263771 - DNA, 540 bp, Zea mays
gcggcggccctttttttttatttttttttgctttttatgaaggcgccacaagtatagggggggggggaaaaatatgttcctgtggacagcagtttcacttccagtctctcattatcagcatcttcttttgttactcatacggaagaaagaatagacgctacaaactagaacttgtgaacacacgctattgacctctaaaccaccttaacaaaatctcaaaattcacgcctgggctttgattctgcaaccgtgactcggatctgtctaccatccaagtctatgccatcaaggtttgatatggcattgttgacctcctcggcagagccataggtgacgaaaccaaacccccttgacctgccgctatccctgtcgtagatgaccttagcatccagcacctgtccttgctcactgaataggttctccagagtcgagttgtcaacgcccagtgcaaggttccccacgtataccttgttccctgaatctacaacagtaccactactacttcttcttcttccactttttggtgctctccacggtccg

SEQ ID NO: 263772 - DNA, 1587 bp, Zea mays
tttttaccacagttcggacaatctcttcgagtcatagatgtgtctgtcgagatggtttcaatgaaatcaatggaggacagagaccaagaaatcagacgaattgttgaactagggaatgcttgtatacaatccagaaaagatactctaattctcaccagccgccaactcattactggaaaaactcctgaagaaagcttagaaattaattataaagtgagttcagcactagtggagattgtgagaaggattgatagtaaacctcattatatcattgcaaagggaggaatcacttcatctgatattgctacaaaggcgctggaagctaaacgtgccaaagtcatgggacaagcattagctggtgtacccttgtggcagcttggtcctgagagtagatttcctggggtcccttacattgtttttcctggtaatgttggtgataacagtgctcttgctaaagtggtgaaaagttgggcttccccatctagaagttctacaaaagaaattcttcttaatgcggagaagggcggttatgctgttggtgctttcaatgtgtataaccttgagggaattgaagctgttgttgcagcagcagaggctgaaaagagtcctgctattcttcagattcatccgagtgctctaaagcaaggtggagtcccactggtagcatgttgcattgctgctgcagaacaatccagtgtgcctatcagtgtccactatgaccacggcatttccaagtcagacttgcttcaagctcttgaagcgggatttgattcagtcatggtggatggttctcatctaactttaggggataacatcttatacacaaagagcatatcttccttggctcatgcaaaaggtttacttgtggaagctgagttgggtaggctctcaggctctgaagatggcatgaccgttgaagaatatgaagcaagatttactgatgttgcccaggctgaggaatttattgatgagacaagcattgatgctctagcagtttgcattggaaatgttcatggaaaatatccacctagtggaccaaaccttaaattcgacttgctaaaggaccttcgtgcattaacattaaagaaaggagttagcttggtcctccatggagcatctggtctatctcatgagctcgtaaaggagtgcatagacttgggcgtgagaaaattcaatgtgaacaccgaggttcggaacagctacctggcgtccctcagaaagccagaaaaggacttgattcaggtgatggcgtctgctaaagaggcaatgaaagctgttgtagcagagaagctgcgcctgtttggatcgtgtgggaaagcctgagcgaagtacttgcgttgcgccggcaacatgcagtacaagaccgactgcatcatcgggttcgtgatgctgctgctactgtgcagttgcttacagttacagctcattgcgttgaacagctgaagtggttattgtactttgcagtgtagcgcaactaaggctaattcataaatcgtaataatgtatgtatgctgccccgctgtaaaaatgctccgtcgttaataaatgccatcgcgcttgctgtgcctttgtttacattttgaaaaa

SEQ ID NO: 263773 - DNA, 461 bp, Zea mays
cggaattcccgggtcgacccacgcgtgcgattctcacagagaaaggcctcgagagcgtgtcctagttgcggtactggatggccgtgtcaggatggggaggccgacgacgtgaacgaacctggggaggaggagctagcctcgccagctaaccatccctcggggaagaagcgcaggagagtcaaagctgagctggtggaggaaaacgacatcgcaggcccgtcgacggaggtgcctaggactaggaggaccctgagaagcgctaaagccgaagcagtcgaggccgatcaagaggcgtcgtccaccgcagcttcgcagccaggcaggggttctaaaacaaggaagaagtgagtgatgactgatgatgcatgcttataaaggagggagattgcaaatgctcctcctttgccatgtgtagatactaccgtagacgtgctggtatggtatccggtgggtagtttttc

SEQ ID NO: 263774 - DNA, 932 bp, Zea mays
cctggttgcatctgaaattctccctgataaagttccagagggtaacgatgtgtcttccactggaattactaaggacactactggccatagtggagatgttaaagctcccacttcagaaccacatttaggggaaacacgtatcaactcagcatcagaatccataccaaatgatgcgggtcccccaacccagaacaaaaagaatgggccgacaatcaagaaaacattagtaaacggtctcgtggaccaaccaaatgccaactccgggctagaatcttcaggaaacgataaccctagctacaccaactcgagcagtgctgggccagtgccacccgcaagcacccaaccagtcgagtctgctgccgctgctgtagacgttgattcggtcgagaaaggcccaggtacgacaccagagcaaccggcgaagcgaagggcacccaacgttcgacgaggacagagaagggtgctgcgaagcgcaacgagagaaggaagagcgacgtaggggatattgtgttatagcgaattaaagggggcaacacatgatccctagctaggttaactagagctatagcaatgactggccgtttccacgtacgagatgcgtagtgtgcatcaaactgtatccatgttgtattatcgtagtagtcgtaggccttacagtgaccacgcttactggttagagttggtcgttcaggaccagtagtagctgcttgatttgggtttcggtgtcaggatttggttaggtcctgtgtgtagtttgcgcagtcggaaagagactgttggttgtatttgcaggttgcaagcagacagtgttgtagccaccaggtaggaaatccagcgagagctgctcctctctgtatcatggacgctggtgtttcaagcgatgtactcatgtaacccttgttttgtgctgtgctacctgggcctttctgtgt

SEQ ID NO: 263775 - DNA, 1581 bp, Zea mays
ggcaattatggataaatgtggggatactgatgattgtgtttcaacttctgaagctgctgaacaagcagcaaaacttccagaagtgaacattaataatcttccagtccctggcgaagttgaattcataaatggtggtcctccgtgtcagggattctctgggatgaatagattcaaccaaagcccatggagtaaagttcagtgtgagatgattctagcattcctctcattcgctgagtatttccgtcccagattctttctgttagaaaatgttcggaactttgtttccttcaacaaagggcagaccttccgtttggcagttgcatctcttctggagatgggataccaggtccggtttggaattctagaagcaggggcttttggtgttgcccagtccaggaaaagggcgtttatttgggctgctgcacctggagagatgcttcctgattggccagagccgatgcatgtgtttgctagccctgagctgaagataacactgcctgatggccaatactatgcagctgcaagaagcactgctggtggagcgcctttccgagcgattactgttagagatacagttggggatctgcctaaagtgggaaatggtgccagcaaactcacgcttgagtatggaggtgagcctgtgtcttggttccagaagaagataagagggaatatgatggtactgaatgatcacatatctaaggagatgaatgagctgaacctaataaggtgccaacacattccgaaacggccgggttgtgattggcatgacctaccggacgagaaggttaagctgtcaaatgggcagatggctgacctgataccttggtgcctgcccaacacagccaagaggcacaatcagtggaaaggactgtacgggaggctggactgggaaggcaacttccccacatccgtcactgatccccagccaatgggcaaggtcggcatgtgcttccaccctgatcaagacaggatcatcacagtccgggaatgtgctcggtcacagggctttcctgacagctatgaatttgcgggcaacatccagaacaagcaccggcagattggcaatgccgtgcccccgcctcttgcctatgcacttgggaggaagctgaaggaagccgttgacaagcgtcaggaagccagcgcaggcgtgcctgcaccatgagaagttttccttccatcaaaccatgacccatgaagctaagcgctgaggtcgtccttgaggaccagttaattttggttttatcagtcttaatgcactcctgaatgtatatgttagagaagtgtcgattgctgattggttaccctgattcagggtagcggttatatctaaaaacttgaggaaatctagtgtactctagttgtcatgtgttccattttgttggctctaaactttcaactagttttggtgattaatgacaacatgagattaaattaaattttgtagaggcatttaaattaggccactaatagtgactatttagtcgctcaatttttttgcccctaattatggaatttgttttttaaaggatgaccaacaagattaaatggaaaaaaaaaaaaaaaaaaaagggcggccgc

SEQ ID NO: 263776 - DNA, 843 bp, Zea mays
  unsure (1)..(843): unsure at all n locations
aatttccggtcgaccacgcgtacgcccacgcgttcgcctggatgatgagcagccttcactgaatctnaaggataccggaaccaagggtccggttgaccttattctaaagccatctgaagatgacctcaagtgctggccacattgttttgagttccgtctgagggcctctctttcaaaggatggggacttgtcattgatatcacgcatcaggaatgtcaatggcaagccattcagtttctcatcggcttatcacacatatctttctggttctgacatcagtgaggtcgggattgaaggtctggagacacttgattatcttgacaaccttagccacaaagaacggtttacggaacatggagatgccataacatttgagtcagaggtcgaccgagtctacgttagctccccaaatgtactagcagttattgaccatgagaagaaacactcgtttgtcataagaaaggaaggacttcctgacgttgttgtgtggaatccatgggaaaagaaatcgaagaccatggtagacctcggcgacgaggagtacaagcagatgctttgcgttgatgcggctgctgtggagagagcaatctcgctgagaccaggggaggagtggactgggaagctggagctttctgcggttttatccactaactgcagcgaccatcttgatcatcctgtcagcatctagcgtttattcccattgtagtgctatatatttgccttacaagagaagtatgggccccttttgtaaatgagatcaatatgtagctctgttatcagttagcagctcgacttgatcctggaaccgtcacaatttatgacctgtttttttttaatgtgagt

SEQ ID NO: 263777 - DNA, 453 bp, Zea mays
tgccatgcgaggtggaattcagatgtgtttccctcagtttggatactctgggacattggagcgacatggatttgcaagaaacaggatatggtccctggatgatgagcagccaccactgaatcataatgataacggaagcaaagtttctgttgaccttattctaaagccatctgaagatgacctcaagtgctggccacattgttttgagttccgtctgagggcctctctttcaaaagatggggacttgtcattgatatcacgcatcaggaatgtcaatggcaagccattcagtttctcatttgcttatcacacatatctttctgattctgacatcagtgacgtcaggattgaaggtctggagacacttgatcatcttgacaaccttagccacaaagaacggtttacggaacaaggagatgccataacatttgagtcataggtcgaccgagtcta

SEQ ID NO: 263778 - DNA, 794 bp, Zea mays
acagcggcggcggccacagccacacgttctcgcgcgggatctaattccaaacagcactgcccttgcttcttccgttccccaagtgcgctccctctctcgccatccatctcgtgcacgactgggcaaccgttgccgctgtcgaggtgcccaggtcttcatcggtccctcgtcagttcttctccggcccttcgccgccgacaagctcccccagctactaaagagacaggagcaaagagttaacaggagatgaatgcccctgaccgttatgagcgtttcgtcgtgccagagggcaccaagaaagtgtcctatgagagggatacaaagattgtgaatgctgcatcattcactgtcgaacgcgaggatcacactgtaggcaatatcctccgcatgcagttgcacagagacccaaatgttctctttgccgggtataagctccctcacccactccagtacaagatcattgttaggatccacacaacgagccagtcctccccgacgcaggcctacacccaggctatcaatgatctagacaaagagcttgagtaccttaagcaagcttttgaggatgagaagaacaggtacgaggacaggatgaagcaggggttctagatgaatggaatggtgtgggagataaacttcccgtgttagttttatcctaggcgagtcaacaatgaaacgaacgcccaaggattgtgaatgtctgatccctgaactaaggttgcttgctgtcgttttactgtcatgcttgtgtcaatattcgtattattgcaaacacaccaatggagttttccatt

SEQ ID NO: 263779 - DNA, 1979 bp, Zea mays
ccctcgcgtccgcggacgcgtgggttccaaacagcactgcccttgcttctaccgttccccaagtgcgctccctctctcgccatccatctcgtgcacgactgggcaaccgttgccgctgtcgaggtgcccaggtcttcatcggtccctcgtcaggtctcctgcgggctcttcgtcgtcgacaagctccgcctggttgctgtgtgaagtccaaggttgtcacatggattcagcacaagatttccaacccaggacattctctataaagttgtggccaccaagtgaaagcacacggatcatgcttgttgacaggatgacaaacaatctgtccacagagtccattttctctcgcaaatatcgccttttgggaaagcaagaggctcatgagaatgcaaaaacgattgaagaactttgctttgccttggctgatgagcatttcagagaggagccagatggtgatgggagttctgctgtccagctatatgcaaaggaaacgagcaagatgatgttggaagttctgaaaaaaggcccaaggactactgcagaactggaggcacctgtagctgacacacctcttgtgtctgctgatactgtactagatatatctggtggcaagcgtgcttttattgaggcagatgaagcaaaggaactgctgagtccacttaccaaaccaggaaattcatataaaagaatttgctttagcaacaggagctttggtattggtgctgctaatgttgctgggccaattcttggagcacttaagaatcagctcacagaggttgacatctcagattttgtggcaggaaggcctgaggatgaagcccttgatgtgatgcgcatattctccaaagcattagagggttctgtcctgagatatctgaacatctctgacaatgctttgggtgagaagggtgtcagggcattcagtgagctcctgaaatcacaggaatccctcgaagaactatatgtgatgaatgatggcatatcagaggaagctgcgaaagctctatctgagcttattcctgcaactgagaagcttaaggttctccacttccacaacaacatgacgggagatgaaggtgctatgtatattgctgagatggttaagcgttctccaaatgtagagagtttcaggtgctcagcaacaaggataggatctgatggtggagtcgcattgtctgaggcattggggacatgcactcgtctgaagaaacttgatcttagggacaacttgtttggtgttgatgcagggttagctctcagcgaaacccttccaaaactacctgatcttgttgagctttatctcagtgatctcaatcttgagaacaagggtactatagcaattgcaaaagccctcaaacagtcagcactgcagttggaggtccttgaaattgctggaaatgaaataaatgccaaagcagccccagatttggctgaatgtctagcagcaatgcagtcactcaagaagctgaccttggctgaaaatgaactgaaggaccatggtgccgtgataattgcaaaatcattggaagatggccactcagatctcaaggaacttgatgtgagcacgaacatgctgcagagggttggagctcggtgctttgcgcgggcagtcgcaaataaaccagattttgtgcagctgaacatcaatggaaattttatctctgatgaaggggttgatgaggtgaaggaaattctgaaggctggtaagaaatctctggatgtgctgggcccactagacgagaatgaacctgatggagagcctgatgatgaggatgccgaggacgatgaggacgagctggatttgaagctgcagagtgtgaaggttgagcaggatgaggatgattgacgatccttaggttaaatatctttagctactcagtaatcatttggatgtccatgagctacgcaaacttttaattaaaaagaatgtactgaggcttttgcattgtcctgagccttttgcaagggtcatacttaca

SEQ ID NO: 263780 - DNA, 1350 bp, Zea mays
gttccatgccttctcgggaaacaaagcagtagatggatgaggcacatcgcgtcactgcaaccgcctgcggtaccgccagaaataataattaggggatcctgataagtgttggcacaagtagcttgccagcacccaactccaagcaagccataactgcaagaaagcaacggcagcaagaaaccttgtaaacatcggagcatagatcgcggcggtgatggcggccaaggtgaggacggagctggacgtgggcgccgacggcgtggccgtaatcaccatctacaatccgcccgtcaactccctctccatcgacgtcttacatagcttaaaagaaagctatgaagaagcacttcggagaaacgatgttaaagctattgtcgttacagggaaaggagggaaattttctggaggatttgatattagttcctttggtggtgttcaaggaggccaaacaatgcaaccaaaggttggctacatagcaatagatattctcacagatactgtagaagctgcgacaaagccatcagtggcagcaattgatggtcttgctcttggtggaggtttagaagttgccatggcatgccatgcacggattgcaactccaacagctcaattaggtcttccagaacttcagttaggaattattccaggatttggaggaacacagcgactcccacgactggttggtctgacaaaatctttggaaatgatgctgttatctaagccaatcaagggcggtgaggcacaccaactgggtctggttgatgccttagtttctcctaatgatttggtgaatactgctcgtcaatgggctttggatatatatgaatgtaggaggccctggatcaaaagcctttataagactgacaagctagaacctcttggggaggctagggaaattctgaagtttgcaagagctcaagctcaaaagcaggcagctaatcttcatcacccacttgtttgtattgatgtcattgaagaaggtatagttgcaggaccacgggctggactctggaaggaagcaacttctttccaggaactgcttttctcagatacttgtaaaagcttagttcatgtgttcttttctcagcgggcaacgtctaagattccaggtgctacagacttggggttgatgcctaggaaaataactaaagttgccattctaggtggtgggcttatgggttcaggaattgcaactgcgatggtattaagtaactatcctgtgctacttaaagaagtaaatgagaagttcctaactgctggaatcaacagaatccaagccaatttgcagagtcgagtaaggaaaggaaaaatgaccgatgagcgatatgagaaggctatgtctctcgttac

SEQ ID NO: 263781 - DNA, 541 bp, Zea mays
ggaggatttgatattagttcctttggtggtgttcaaggaggccaaacaatgcaaccaaaggttggctacatagcactagatattctcacagatactgtagaagctgctgaacatcaatggaaatttcatctctggtgaagggatcgatgaggtggaggaaatcttgaaggctggtaagaaacccctgaaagtgctgggcccactagatgagaatgagcctgatggagagcctgatgatgacgatgaagaggttgaggataatgaggacgagctgaattcgaagctgcagagtgtgaaggttgagcaggatgattgaccgagttggtatcgagatataagcctgtcgcagggtcttgataactgagttatctacaatgctgttgatctttggttttgtagtcggtttttgttatgaaaaaccagaaccagctatcttgtgacttgtgcaatctgattatagattagaactgctcttatttattcgtttataaaaaaaaaaaaaaaaaaaaaaaaaaaaaaaaaaaaaaaaaagggcggccgc

SEQ ID NO: 263782 - DNA, 956 bp, Zea mays
tcgcccagcgtcggcatcttcgaagagcgctccgggcatctctctaaccgccggcgccggcgccggcgccggccatcgttcacatggctgcgatgccaccggccttcacgggcaacctgaagaaagcacttgcaggtctgagaagaatcaatttagatgggcttcgatggcgcgtatttgatgctaagggtcaggtgctgggacgattggcttcccaaatagccgttgtgcttcaaggcaaggataaaccgacctatgcgccacatgtggaaaatggagacatgtgcattgtacttaatgcacaggatatcagtgttacaggaaggaaaatgacagataagatttactactggcatacagggtatgttggccatttgaaggaaaggaggctcaaggaccagatggagaaagacccaactgaagtgattcgcaaagctgtgctgcgcatgcttccccgcaacaaactgcgtgatgatagggatcgcaagctgcggatattttctggaattgagcatccattccatgaccgccctcttgaagcttttgtgatgccaccacggcaagtacgggagatgcgaccccgtgcaaggcgtgcaatgttaagggcccagaaaaaagagcattcaaacagggccaaggaggaagaagatgctaagaatgccacagctgaggtcactgcataggctcctcatgtgaatttgcatgatgcaaatttgctcgatgctgttttaggcctatcttttttgcttggtagccttttccagtggaataggcactagaggctcggaatgtgccaacctcgttctgaatcacctttttatttccattgcaatttgtaactggaaccctgcctgtcacagctgctttctttttgtaagcgaataagaccgtctgacttgttgaacttctgatctcatgagtgcacaagaatgtctcccgggacatcttctatcccc

SEQ ID NO: 263783 - DNA, 308 bp, Zea mays
cggaaagaagtgctccggggaagcaccgtgacacccttgctcgcccgcatctctctaaccgccggcgccggcgccggcgccggccatcgttcacatggctgcgatgccaccggccttcacgggcaacctgaagaaagcacttgcaggtctgagaagaatcaatttagatgggcttcgatggcgcgtatttgatgctaagggtcaggtgctgggacgattggcttcccaaatagccgttgtgcttcaaggcaaggataaaccgacctatgcgccacatgtggaaaatggagacatgtgcattgtactta

SEQ ID NO: 263784 - DNA, 413 bp, Zea mays
ctagaatggttaaaccctagtagagagacaggcagagacgggggcggagaagcacgtacgtcgtacatcgcccaccgccctttgcctcgcctcgcctcgcctcgcctgcatatctaacagccggagccggcgccggcgccggcgccgacaatcgttccaactgatatggctacgacgccgccaggattcacgggcaacctgaagaaagcacttgcaggtctgagaagaatcagtttagatgggttgcgatggcgcgtatttgatgctaagggtcaggtgctcgggcgattggcttcccaaatagctgttgtgcttcaaggcaaggataaaccgacctatgcaccacatgtagaaaatggagacatgtgcattgtacttaatgcaaaggatatcagtgttacaggaaggaaaat

SEQ ID NO: 263785 - DNA, 988 bp, Zea mays
ctacgcgtccgggactctctgaaggagagcatgtcactttaggctggaatgaaagagaagatctcaaagctgtggttaactatttgcgaacagatgggaatgtatcttgcattggtttgtggggtcgctcaatgggtgcagtcacaagtctaatgtatggagcggaggatccatcgattgcgggaatggttcttgatagcccattctccaacttggttgacttaatgatggagctagtggacacatacaaatatccactgccaaaattcactgtcaaacttgcaatacagcatatgcgaaaaattgtcaagaggaaagctagtttcgacatcatggatcttgatgccattcaggtagcaaaacaatgttttgttcctgctttgtttggacatgcaactgaggatgattttatacttccccatcattcagacaagatatatgaatcatatattggcgacaaaaacattataaaatttgatggggatcacaattcaccacgtcctcaattctactttgactcaatcactatatttttccatagtgtgctaaaccctcctgaagtggcagaggatcattatttcatgacaccacatggtagccttggtcagggtcattgggatacagaacaagacatagagtatcggttctctcaatcacctacagggacagccaatgctactacaacagaagatgccattgcacagttgcgctctagaaggctcatgagtagaatggaggtcccatctggtgccaccaccgaagacaggactgatcgaactgagggtttcgatagtgatcttggtccctcttcatctagtgtatcaacagcaactcctcccaatggtcgcaacggaaggctgctgactccaacctctgatgatggcgagtatgtggagtactcatttgatagcttgtcagatatgcctcacaccgtggaagatgaagattgaatgctaatgcaagcaattcttgaatcactgaaagacta

SEQ ID NO: 263786 - DNA, 992 bp, Zea mays
ttttatatgccccgctcgtattcaagacgctgatacggtctctctgctcagggggccgggccctacaccgcggcgacaggtataaaagacatttcccgacccgtgccctactcgccgtcgtcgccaccgccaccgccaccgccacctacgcaacaccagacgctccagcagtccagcactcggagctcgcgcgcccgacggcccaccatgatcatccccaagaagaaccgcaatgagatctgcaagtacctcttcaaggagggcgtgctgtatgccaagaaggactacaacctggcgaacacccacagattgatgtgcccaacctccaggtgatcaagctcatgcagagcttcaagtccaaggagtatgtcagagagaccttctcctggcagtactactactggtacctcaccaacgatggcattgagcacctacgcaactacctgaacctcccgtctgagatcgtgcctgccacgctcaagaagtctgccaagccacctggccgcccatttggctctggccctcctggtgaccgcccaaggggcccaggtcgttttgacggcgacaggccaaggtttggtgacagggatgggtaccgtggtggtcctcgtggtgctcctggtgactttggtggcgataagagtggagctcctgctgagttccagccatcattcaggaggcctggctttgggcgtggtggcggcagcggcttcggcgcgggcccaacctcttcttccatggagtgaagttgcccttggtttggacatggtgtttcccttcgcatgtggcctttagttttgaaggacagttattatgtactagtaatattactcggatcggccagtgctgacatatgcaaaaaaatgttctgtcgttatacattggttccagtattattgtcttcgcaaaactcttgggttttcaagttactactttttcacaaataaaaaaaaaaaaaaaaaaaaaaaaaaaaaaaaaggccgcccgccccg

SEQ ID NO: 263787 - DNA, 541 bp, Zea mays
ctcccgaccgccgccgtcgccgcctcctctccccagcacccggagctcgaccgaacgccgctcaccatgatcatccccaagaagaaccgcaatgagatctgcaagtacctcttcaaggagggcgtgctgtatgccaagaaggactacaacctggcgaagcacccgcagatcgatgtgcccaacctccaggtgatcaagctcatgcagagctttaagtccaaggagtatgttagggagaccttctcctggcagtactactactggtatctcaccaacgatggcattgagcacctacgcaactacctgaacctcccgtctgagatcgtgcctgccacgctcaagaagtctgccaagccacctggccgcccatttggctctggccctcctggtgaccgcccaaggggcccaggtcgttttgacggcgacaggccaaggtttggtgacagggatgggtaccgtggtgatcatccccaagatgaaccgcaatgagatctgcaagtacctctttcatggaggcgtgctgtatgccaagaaggactac

SEQ ID NO: 263788 - DNA, 948 bp, Zea mays
tcgcggtcgcgtgggcgccgcctcctctccccagcacccggagctcgcccgaccgccgctcaccatgatcatccccaagaagaaccgcaatgagatctgcaagtacctcttcaagggtatgtggttcttggtccactagactcgcagtagggtaacctgggctgattggttgtttcaccttctaggcggtctcaggtcttcaaattattttcgtattactaggagggagtgctcgtgtattattttgagttcacttttttggtccaatttcagcatctcacaaacttacgatctgatatataggcttgacacagcgagcattgtcaaatatttttgtgctccaaatttatttgccccctaaactatggattccttgttatacattcatctgcgttatgttcatgcgatttctgttagtttgatgtatttgctgctgcagagggcgtgctgtatgccaagtaggactacaacctggcgaagcacccgcagatcgatgtgcccaacctccaggtgatcaagctcatgcagagctttaagtccaaggagtatgttagggagaccttctcctggcagtactactactggtatctcaccaacgatggcattgagcacctacgcaactacctgaacctcccgtctgagatcgtgcctgccacgctcaagaagtctgccaagccacctggctttgggcgtggtggcggcagcggcttcggcgcaggcccaacctcttcttccatggagtgaagttgcccttggtttggacatggtgtttcccttcgcatgtggcctttagttttgaaggacagttattatgtactagtaatattactcggatcggccagtgctgacatatgcaaaaaaatgttctgtcgttatacattggttccaaaaaaaaaattaaaaaaaaaaataatatgaaataaaaaaaaaatataaaataaaaaaata

SEQ ID NO: 263789 - DNA, 590 bp, Zea mays
cggacgcgtgggttcttgagcgtggcaggctcaagtatgtctgccaggccactgggccgtccatttggctctggccctcctggtgaccgcccaaggggccctggtcgttttgaagacagaccaaggtttggagacagggatgagtaccgtggtggtcctcgtggtgcttccggtgactttggtggcgataagagtggagctcctgctgagttccagccatctttcaggagttctggcgcgaggcctggctttggccgtggtggtggcagcggctttggcgctggcccgacctcttccatggagtgaacagtgaagctgcccttagtttggacatgatgtttcccctcccgtgaggcgtttaattttgaaggacggttattatgtactagtaatgttttccggatcggctagtgctgacatgcaaaaaaaaatgttccatatttatacattggttccagtatataataatcttttttggcgtcactttttttgattgtcccaagtctatttatttttcttgttattttattttttttttatttatcatcttattttattcttttgtttcatttttttctatataatttatt

SEQ ID NO: 263790 - DNA, 238 bp, Zea mays
tttcttgacctcttcttccatggagtgaacagtgaagctgcccttagtttggacatgatgtttcccctcccatgaggcgtttaattttgaaggacggttattatgtacttgtaatgctttccggatcggctagtgctgacatgcaaaaaaaatgttccatatttatgcattggttccgacttccagtatagtagtcttttcaaaacgtttggattttcaagttagtacgttttcgctg

SEQ ID NO: 263791 - DNA, 346 bp, Zea mays
cgttccagagcgtgccgtgcgacgtccgccctctcgtgaggcagcacgacaatgcatgcatgcatggggcccgcgtgccactcggatcgaatcactagctagctgagtgtggtgttggcgtgctgcaaaagtctaccgctagcttcggctctgggtcaatatgatgcatggtttgttaggcttagatgtttgacttggtatacgcctacctattatacgtgacgtgtgtcttgtaaatcaagctagctccgtaatccgtatgctaccttagcttctttcgtttcatcaatcatactgagctttttggcatatgtttgatatatattactaccttcagttcttcttg

SEQ ID NO: 263792 - DNA, 398 bp, Zea mays
gagcgcctgtgtggaaggagagcagctgcccggcctcaaccccccggtcgatctcgcctgctgcttgttcccgagtgcctgttcccgtcctagtttacatagggccgctctcttccctggattgactgccgccgccggtggcggccggtcttagcgtcatcagagatcccgtctccagcagcagccatctgggctgcccaccatcaccacgtcgtcgtcaaacatcctccctctttagaccatattgccaatgtcgtcggatgctgttgcaaggagcaagtcagcgaggagctaagctttgccttcggctcccgtctccgccgaagcatccgtccgggtcaccgagctttcaagactgacgaggtcatccacatatttctcattcatcacctgcgaag

SEQ ID NO: 263793 - DNA, 644 bp, Zea mays
tgctcgtactcggtccggaattcccgggcggccagcttcctccccgctagctcactagccaggcccgggcgcctcaccgccacggtgaccgccgccttctttgacgcctgcggcctgcctaaccccgaagtctctcagtgcgtgtttggccgaaatccacggggagggcttgtcctcgcctttgctgagctgctccggagcggagccgtgcctacttgagttcaggtttgtttcgccatccgaggccaagattcggagcgtcgccgaagggaggcgatgaagggcaaaggcgggccggtggacaggaggtcctccgccaggtggaggttgctggtgctctgcgcattcagcttcggcatcggcatgctcttcaccgaccggttctggacagcaccggataccagtagccataccatgtctcaacgctggaggcaagagcaagagctccaacttgtatcagaagattgcaccacaaagaggaagcatggggaagacaaggatataatgggagaggtaaccaagacccatgaagccatacaatcattggataagtccatctcaacgctgcagatggagcttgcagcaatgcggagcacacttgagctgctccgatctagtggttcaccagtaacctttgaaactag

SEQ ID NO: 263794 - DNA, 656 bp, Zea mays
gctaaggagaaagccccgcccatggcgcggctgatgaaattgatgccatcggaacaaagcgttttgacagtgaagttagtggcgatagagaagtgcaaaggacaatgttggaattgctgaatcagcttgatggatttagcagcgatgagaggataaaggtgatagctgcaacaaatcgtgctgatattcttgatcctgctctgatgagatctggtcgtctggaccgtaagattgagttccctcatccatcagaggaagcaagagctagaatcctgcagatccactcgaggaaaatgaatgtgaatccagatgtcaactttgaagagttggcgcgttcaaccgatgatttcaatggcgctcagctaaaggctgtttgcgtagaggctggcatgctcgctctacgccgagatgctacagaggttacccacgaggatttcaacgaggggatcatccaagtgcaggcaaagaagaagtccagcttgaattactacgcgtaagggggggaacgcccggtacttggtgatcattcagttgtttgtgacactgccattgtctgggcaggctaacttactatttgtactataagcaagctgttgcttttgtgtcttactccgtatgagagtatcatttatgaaatattaaccaagtctgcctgc

SEQ ID NO: 263795 - DNA, 583 bp, Zea mays
cctacgcgtccgccctcgcgtccgcccatgcgttcgcccacgcgtccgaagaaagaaaaaatcgagaggacgccagggccgattctctgcgtgacttggggcgtcgtcgccgagttttctccggccgagggcggcgcgaccggacaaccagcgtgagcgcgaccggcgacatgactcgcggcaaccagcgtgaccgcgaccgtgagcgcgcggcggcgcggaagcccaacgccaagaactcccaggacgggctcaccccggagcagcgccgcgagagggacaagaaagctctggaggagaaggcggccaagaaggcgcagcaggcagcggccggcggcaccggtacctccacggacaacaacaagaacaaggcaggtggcaagaagtaggaggcagtggcgcgccgccacctctgtacgattaatcgatgccttgagcttgtaacttgttcgcatccttgtaggtgcgatgcttgttgggtcataaactctgatgatatcgagatttggtgatcagaataatgcgtggttttcaaaaaaaaaaaaaaaaagacaaacaaaaaataaaaagacaacaaaaagcc

SEQ ID NO: 263796 - DNA, 455 bp, Zea mays
caaagacagagaaaatcgagaggacgccagggccgattctctgcgtgacttggggcgtcgtcgccgagttttctccggccgagggcggcgcgaccggacaaccagcgtgagcgcgaccggcgacatgactcatatccttcccaaaccccgattatggatctgcgcatagggaaactcttgctctaatccatcttttgcttgtatacgatctcgatctgtttcgttgtttcgattccctgttcctccttccttaacttgcgcgcacgcggcaaccagcgtgaccgcgaccgtgagcgcgcggcggcgcggaagcccaacgccaagaactcccaggacgggctcaccccggagcagcgccgcgagagggacaagaaagctctggaggagaaggcggccaaaaaagcgcagcatgcatcggccggcggcaccgggacctccacggacaacaacaagaa

SEQ ID NO: 263797 - DNA, 323 bp, Zea mays
attcttgggtcgacccacgcgtgcgatattctccgcgtgacttcaggtgtcgtcgccgagttgtctccggccgagggcggcggcgcgaccggtaaccagcgtcacgttgagtgtgacaggcgacatgactcgcggcaaccagcgtgaccgcgatcgtgagcgcgcggcggcgcggaagcccaacggcaaggggccccaggacgggctcaccccggagcagcgccgtgagagggacaagaaagcgctggaggagaaggcggcgaagaaggcgcacaggcagcggccggcggcaccgggtacttcacggacaacaagaataaggc

SEQ ID NO: 263798 - DNA, 282 bp, Zea mays
cgccgcagcggcgagcggcgccacctctgtacgattatcgatccatgcctttagcttgtaacctgttcgcatcctcgtagatgcgatgcttgttgggtcataaactcgttttctgttactctgatatcgagatttggtgatgagaataatgcgtggttttctggctttctgttctgtcccattccttgaatggctgaatcatctagagttaggatgtggaggaacttttgcttgctgtcaacacatgtatgctgtcagttaacttttttttagattaaatag

SEQ ID NO: 263799 - DNA, 1183 bp, Zea mays
cttcattagtggatcactggatgagaaagttcgcatttggaatgtccgagatcgtaagattgaggattggaatgatcttcatgagatggttaccgctgcttgctattcccctgatggacaggttgcgatggtgggctctcacaagggatgctgtcatatatttgatacatctgagaaggggcttcagtacaaaagtcagatagatttaagaattaggaaaaagaagtcaggccagaagaagataactggcttccagtttgctcctggaagctcctcggaagttctgattacttctgcggattcgagaatacgagttgttaacggcgatgaatttgttcacaagtttaaagggtttcggaacacgagtagccaaatctcagcttctgtagctcagaacgggaaatacgtgatctgtgccagcgaggattctcacgtctatgtgtggagacatgacaacagttcccaccctagcaggagcaggagcacagttgacgtaaccaactcatatgagcatttccactgccatggcgtgaccgtggctgtcacatggcctggtgctgaagcccggggctcgtttggatctcgaagcagcaggcacagcgattcagatggagcagtgaactctggccgagacatcccagctgagaacagccagcacaattctgacgcaggcaccagtagacatccaggcgatagagcatccacatcctggcctgacgaaaagttaccgtcagccaagagcagccctggtcactgttcctccgatctttgcattggagctatggatgtccaacgccggtctgcgtggggcttggtgattgtcaccgctggacggggaggcgagatcagggtgttccagaattttggcttcccagtccaagtgtaaagctagcgtgagagcatgcagatagggaggggtttgtttggttctttttactgtacatatatcggtagatcgtcgacagtttttttactgaaaagttctccctgtttccctgtgtcgttggatgcatcggattgtagtccagaaccacactaccaatatgcttaacactctcacttcttgttgatacagtgcaaagcatagtgtaattgtatgcttagcgcacctctccccaatagttatgtaaattttagctctctaaatcacagatttaagaagttgctaaataactttgggagt

SEQ ID NO: 263800 - DNA, 491 bp, Zea mays
ccctcgtgtccgcccacgcgtacgcccacgcgtgcggcacctgttgacatccaggcgatagagcatccacatcctggcctgacgaaaagttaccgtcagccaagagcagccctggtcactgctcgtccgatctttgcattggagctatggatgtccagcgccggtctgcgtgggggttggtgattgtcacagctgggcggggaggcgagatcagggtgttccagaattttggcttcccggttcaagtgtaaagctagcgtgagtgagatcatgcagatagggtttcgtttggttctttactggatataccaccggtagatgtagattgccgacagttttacgaaaacttccctgtgtttctctgtctccttgggtgcttcaaggttggccccccagaaccacactatcatatagttagcaatatcacttgttgatacaatacacagagctctgtaactgtatgcttagcacacatcaacttaatttgttct

SEQ ID NO: 263801 - DNA, 1252 bp, Zea mays
caaagggcctttattgttgttcggcgtacgcgaccagtgaggtgcggttggccagccagcggcgagccaaaccgagcgtacgccatggatcgcgagtggggctccaagcccggcagcggcggtgccgcctccgcccagaatgaggctattgaccggcgggagcgtctccgccgcctggccctcgagaccatcgacctcgccaaggatccctatttcatgcgcaaccacctcggcagctatgagtgcaagctgtgcctgacgctgcacaacaacgaggggaactacctagcccacacgcaagggaagaggcaccagaccaacctcgccaagcgcgccgcccgagaggccaaggatgcgcccgcgcagccccagcccaacaagcgcaagcttgccccccgcaagtctgttaagattggcagacccgggtataaagtaaccaaacaatatgatcctgagatgaagcaacactcgtttctttttgaaattggttacccggaaatcgaagataattgcaagccaaggcaccgtttcatgtcatcatatgaacagaaagtccaaagttgggataagggttatcagtacctactttttgctgcagagccctatgaaattattgcattcaagataccaagtacagagattgataaatcagcgaacaaattcttctcttactgggatcctgacaagaaggaatatctactgcaactgtacttcaagccaagaccgccagaagctaataaaccaccaccagctcctccggggactttgcctaatgggactggggttcctggtgctccaacaaggccaccggcgcaagcccctccacccctgccacaagttccaccgcccccgcctcatgcaccttctcctgcacccatgggaatgccccctaggattcctccaccacctattggggctgttcaggctccgccacctccagcacgagtggcaaatggtctgcggccaatgattccaccgccacctaacttcactcccggagcacccccaccgcgccctccaatgcaaggctttcctgggcaacagcagtagttgactgcttagcaggcaatgttccagtaattggcagtcagtaaaagtttcaagcttgtgttgactattgtttttcggcttaaaactttgtatgttgtctgggactatactcaaacggcagcttgttggatttttttgtatccacatttattcaagagcttgtcccacaaaaaaaaaaaaaaaaaaaaaaaaaaaaaaaaga

SEQ ID NO: 263802 - DNA, 567 bp, Zea mays
gagattgacaaatcagcgagcaaattcttctcttactgggatcctgacaagaaggaatacctgctgcaattgtacttcaagccaaggccgccagaaggtagtaaaccaccaccagctcctcctggaactttgcctaatgggactggggctcctggtgctccaccaaggccaccggggcaagctcccccaccacccccgccacaaattccaccgccccctcctgcacctatgggaatgccccctaggattcctccaccacctattggggctgttcaacctccgccacctccagcacgagtggcaaatggtctgcggccaatgattccaccgccacctaacttcactcccggagcacccccaccgcgccctccaatgcaaggctttcctgggcaacagcagtagttgactgcttagcaggcaatgttccagtaattggcagtcagtaaaagtttcaagcttgtgttgactattgtttttcggcttaaaactttgtatgttgtctgggactatactcaaacggcagcttgttggatttttttgtatccacatttattcaagtgccttgtt

SEQ ID NO: 263803 - DNA, 560 bp, Zea mays
ccgcaagtggggcaagtgggcggcggaggtccacgacccgtccgccggcgagaggcagtggcttggcgccttcgacaccgctggtgcggcctccgcggcctacctgtccgcctcccggagcttcgccgacgagaagcgccgccgccgcgggctgcccgtcgccgcgtccacaccagacactccggcaagcggcagcaccccgacggcttcctcctcgtcgtccgcctcgaccgctccgttcgcgcacccgtcgccgtcgtccgtgcttgaaccgagcaaggaagcgcggaacacgcagtccccagaggcgacgccggcaccgccgtcggccgaatcagcgcagctgcacggaggacccagaggtctaccaggaccttctgcgcggcctgcagctgcccgacatcgacccgctggacttccgcgccgggctggacgccctggatctctccgatgcggacttcggcctggacgacgaacatgacctcctgctccgggacttcggggacgaggagatggagatcgacctcgacctcgacgacatcaacgacgtcttcccggag

SEQ ID NO: 263804 - DNA, 709 bp, Zea mays
ccaaatttggcggtgtcttatagcaagattaccttacaatggaattgggatgaagcagagcacgtctgccatgcaaacaggagtaaagctgcggtcaagcaggcaagaatctcctgtggagcctgtccaacctaaagcagcattaggaatttctcttgatttgcttgaaaacatggacgaaagtgatgtttcaactcccatgggatcaactaggagaaagagatctttgaagagccctgttgagagaatgaatgaaaagctggccttggctgaggtgagacaggacatagattctgttcacagcaaagcgaaccttttagtttttcaagctgataggtgctggagggaggaaggtgccgaagttatgctagaactatcagaaaccaataagtggtgtatagttgtgaagatacaaggtgttactaggtacttgcttaaaccttcagatatgaggtcatatgtcattaatcgtcatactcaagcctacatgtggacagttgatgatgcatggaagcttgagttcactgataggtgggactggctgttattcaaagagttgcatgttgtgggctgtgagcgtaattctcagggaaaggcaatcccaattcctggggtacatgaagtttctggtgagatggaagggattgttacagatcctttcttacgccctgtgccagactatatcatgatggtggatgatgaagttggg

SEQ ID NO: 263805 - DNA, 1133 bp, Zea mays
cccacgcgtccgcccacgcgtccgcccacgcgtccgggttctgtcacttctgtgacttctgtctgcgtctcgctctccggcgactggtgggccgccgccaccctaagttgcggaggtttacattggtctcttcgccggcgacgagcacccaccaggagtcttgacaagtttttccaatggaccaagtaccgaatggaaggcataaggtttcttttgcgaagccaagagtagttgtgctttcagattctgactctgactctgaaggttttgtagaagagctaactcctgttcactcaaagtcaaacgggaaggcttcatctgcgagcctaaaaactggtggaaaggcttcagccctttctaaaggtgaggcaagcaaaggaaaagcatacagtagtgacaaaggtggaaagggttcttcatcacatgcagtgcctaccaagtctgatgcagaactaaagctagagcttgatatccctccaaattctagaatgctaatgaattgtgaagcagctgaactattgcaagaaattcacgagcacatggccatactatcagaggaccccaagatcaaaattcctgagtcatttgacaaagcttttcagtattcaaaagatggaaatcatttcaccactgcaagctctgtgaaacaagccattgaacctcttaaaaaatgtggggtcagtgatggagagatatgcatgatagcaaacattgggcctgagaccgttgaagaggtttacgcactagtgccatctctcaaggctaataggtcagctatcgaaggttcagtcaccgaggttcttaccgccctcgcaaacataaaagctgctaagtgaatctccaatggaactagaccgacaataaatcggaagcagctgtcttgttgatcgaggagcgcggaatctgcaaactggcccttcagtgttttggatgtgctgcggaaacgtgttatgatgtgtatataaaaaacgtagcatgtgctgcatgaactcctgtaggatgtctaactactgaagtgcagattcagcctcaactagtctactcgaactgacgaatactgtctgaacatgtggctactgcttgaacatgacatgttgccatctgttggattgtgcttctgtacggcccaaaaa

SEQ ID NO: 263806 - DNA, 423 bp, Zea mays
cccacgcgtccgcccacgcgtccgagaagaagtctcccatccccgagattcctggtatgcgaccgcttcagataagccaaaaagctaaggcttgagctgttggatgctgccctggtgttgttggctggatgagttgtgttgacctaggaagcagcagaatgcccagtgagctgcccaaaccaggtagaacagtgagcacttggaatgcccatgttacactcgttatataatttggtggtcggtgcagtattacttgtcatgtctgcataaattttgcattggcgggtgagtcggcaaccaatttatgtctgacttgggaacgtaaacgaacgaatggttgatttggtgctacatagagggccccctttgggcatcaaaaaaaaaaaaaaaaaaataaaaaataaattaaaaaaaaagggcggc

SEQ ID NO: 263807 - DNA, 476 bp, Zea mays
cggtctcggaattcccgggtcgacgcacgcatccactcacgcctactctccatctccatccggccttccaggctcaaaccctagggaatctacccagaaatcacaccccaagcagggtcctatcgtatcaagaagccgtcgcgggggccggatcgccgcggctcggagaggagcggacggacaatcatctgcggacaggtaaggattcggaggcgggatcaggagctgagggaacctgttcgaggtggcctagactcgtagggatcgcgttgacattgggagaaatcacggagaggcggaaaccgagcaatagccaataggggaagggaagagcaacagtacccgtggcaccaagaattcgttgcatagatccaggagaagaacaatagaaatctgggcagaacgagagcagaactgactacaagatgcctcaattgagaactgccagcaggccggcgctcgccagcaactctgct

SEQ ID NO: 263808 - DNA, 554 bp, Zea mays
caccgggacggtgggcgtgacgcgtgggcggacgcgtgggtagcagcgtaccagtagcccagtacccagtagtacccagtagccatctccatccaggctcaaaccctagggaatctacccagaaatcacaccccaagcagggtcctatcgtatcaagaagccgtcgcgggggccggatcgccgcggctcggagaggagcggacagaaatcatctgcggacaggtaaggattcggaggcgggatcaggagctgagggaacctgttcgaggtggcctagactcgtagggatcgcggtgacattgggagaaatcacggagaggcggaaaccgagcaatagccaataggtgcatagaatttggtgaataggtagctaacgtcctctctgaatatttcttgccaatctggcaatttcatccaaagaaatatttcacgcctccaggggaagggaagagcaacagtgcccggggcaccaagaattcgttgcatagatccaggagaagaacaatagaaatctgggcagaacgagaacagaactgactacaagatgcctcaat

SEQ ID NO: 263809 - DNA, 557 bp, Zea mays
cgaacaaccaattctcatccatgccattcaattttggttctcacttaactggtatttcccttctcatggcttccggaaacaatttgtccggagaaattccacaatcaatctgtgaagcaacaagccttatgctccttgatctctccaataataatctgcttggctccatcccttcttgtttaatggaggatatgagtaacctcaatgtattaaatttgaaaggaaatcaacttcatggaagattaccaaatagcctaaagcaagattgtgcattcgaggcattagacttcagcgataatcagattgaagggcagttacctagatctctagttgcttgcaaagatttagaggtttttgatatcgggaagaatcttattaatgatgcatttccatgttggatgagtatgcttcctaaacttcaagtccttgttctaaagtccaacatgttcactggggatgtggggccatctatttcagaagatcaaaatagttgtgaacttggaaaacttcgaattatttgattggctttaaacaatttctctggattattgcgaaac

SEQ ID NO: 263810 - DNA, 454 bp, Zea mays
  unsure (1)..(454): unsure at all n locations
accggnccggaaaacccgggccgacccacgcgtacgcggacgcgtgggttttttttaaattaatataaaaaatatttataaattcgtacagggaaagtactgggtgttccttgctcatccaatacagagctccctttgggcatccatgcttcttggtgatgaacaaatattatagaacgtcctatatatatgtactagtaaaaaacatctcatatgaatcgaattaagcaaacaaagggggaaaacaattgaaggaaaggaatgaactttggtcagctagatgctatgagccagcagtgacggtcgatagattaggccaccatctgctcctgctccgaccactgcgcaaatatgtcgccggcgtggccgtccttgacaagagagttcacccacgagacgtctggctcggcgggagccggcgcgggggccggggactgcccacggaacgcgaaag

SEQ ID NO: 263811 - DNA, 371 bp, Zea mays
atatcaagtgatataaataaatataaaactcttggtatgtagtaattcgtacaagtaaaatactgggtgttccttcctcatccaatacagagctccctttgggcatccatgcttcttggtgatgaacaaatattatagaacgtcctatatatatgtactagtaaaaaacatctcatatgaatcgaattaagcaaacaaaggggaaaaacaattgaaggaaaggaatgaactttggtcagctagattaggccaccatctgctcctgctccgaccactgcgcaatgatgtcgccggcgtggccgtccttgacaagagagttcacccacgagacgtctggctcggcgggagccggcgcgggggccggcgactgc

SEQ ID NO: 263812 - DNA, 797 bp, Zea mays
ggacgtgtgatagtattgcactttgttaataagggcatggtttctacatgtgatatggatgtgctgagtgacactagcactgatgataatatacttgctcatgtggaattcaatcctgatggtttaccagatggatgggtgaaagaaacgatatctagaaagttcaatgatggaatcagaaaagaccagtactataccgatcctgttagtcaccgtgtatttcgcacgcttaagtctgtattgagctaccttggaaccggagaaatatctaggcattcctatttaccaaggagaaatgtcattgacatgtattcatttgataagtgtgcacatctgcccaaaagcatggtgaaaagattgatagcaaaaggacaagcaaagaaaaaattcatgagagcaccagttttagacaaggacttatctaatgggcagacttcaaatcactgtgaaggtgctattgggttaactcaatctgacccggaaggagataagtttggatctatggaagcggcatgcgaaaaggggaccagttcagagactatgaaacagcgaatagggaggccaaagaaaatcttgaagcaaacaaatgatagcatttcggatcgtgacaagggttcacatcaggagcacatcgaggccaaagaggaagttgatatctgtggtgggaaagacttgacgcatttgaaaactctggagcgtaccgaggctcagaatagcacaatgataaccaaggaagtaaacaacaacgacacagcagagaaaaacctatccaagatagagggagacaactcggatct

SEQ ID NO: 263813 - DNA, 926 bp, Zea mays
tccattcccaatttgcgttcccactcccaccaccgcttcttcccgtatcccttgtcctccctaatttcctctcacaaaaagcgggtgcggcttcctgccactcacctcggtctcggggggcgccgtgcggcgggcgcccgtgctgctggtttcgctccaggggagaaggggcagagggagtagagcaggttaggtccgtttgcgttttcttttgcgggtttgtaggtcaaaagctccgcgagcactttccgctccacctcctcacgctcggaatcaaatcgatgccccccctgatttggttcctggtatcggtgcatgagcttgctccaagagatctcccttttggttcggcgtcaggggttctgtgaggtcacgcggcttcttcctcttggcgctcctcacatgtccgggcgcttcgatctctgcccactgcgcgagtgattctgctgttgcagcagctgttaggtgcgcgcgggccgttatggggtgaaccgaagcgttcctcgcagggctgtgggtttattacgccgcctgtttgcttccccgcaccttgtccttgtgcccatacttctttgcttttgtcacgcctgaaccgtgtcttcttgtagtatctgaggcttggcagttggcaagtacaaactagcaacttgcttaggtataaagtataaaccagtgtctggtgcagagcccaaaggggtcacgaatcgttgatgcatagatctgcttctggctgagataaggctctaagttcgctctgttgatggggctaccatgagccacgggaacgggatgttgaattctgtcaaggtggagaaggtggccagcagcagtcgctgcaaatggccagcctaggccgatggatgtgctccacgacggcagctcgccgccgttccttaccaagacgtatgacatgggttgatgaccca

SEQ ID NO: 263814 - DNA, 1030 bp, Zea mays
tctcaacaatgttcgtcagttggcaatgtatcacaaggaacgattgcaggagcttctggagcctgtagttcctcttatcgtgaaatctgtgaagaacccaagaagtgctgtatgcaaaactgcactaatgacttgtgctgacatctttaaggcctatggtgacttaatggttcactcaatcgatccactgctagtacaactgtttctgaaggcttcacaagataagcgttttgtctgtgaagctgcagaggcagctcttatatcgatgacaagttggatctcccctttactactcttgccaagaatgctgccttacctcaagaacaagaatccacggatccgagcaaaagcatcagtgtgtttcagcaagagtgtaccacgccttgatgtggtgggaatcaaagaatatggtatggataagctcatccagattgcggcaacccaacttagcgaccagcttcctgaatcaagggaggctgctcgcaacctggcactggaactgcaagcattctatgagaagtctcaggcctcaacttctgacgaacacgaggtcgaggcctctgcctcgccagatgctgaatcatgggaggctttctgccagtccaagctctccgcattaagtgcccaagccattcttcgtgtgacctctactactacaaaagagtgcgtcacctctgccccaaaagaagggttggctgtgggttgctagcacaagccacaggggagatattgcgatttttcaccctgttcgctgttttgctgtacatgcttttggtttgtcctgcggtgcacccagtcgtgaaaaggttaatcattggttcaggagttcaggtgtgaccacggtgttaatattggtgtgggatatatatccattatagttggttgtacaatcatttggttccactacttggtattggagtgtagattttttttccatggttcagtgttatacacaacagtccttattttttgtttttgatgctggtcctgttattttcaaggaaatgacatattttgtgcttcggacctt

SEQ ID NO: 263815 - DNA, 1108 bp, Zea mays
ggtccgcaattcccgggtcctaccactaccacagcaccagcgacggaccgggcaggcagagaaaaagcagaccagacgagacctctcgcgttccgtcctcctccctgcccctgctgccgttccccttcttcctcagttctcccgcccgctgctgccctccgtccgcgtccagatcccgccaccaaccgatccggcgccctccagcatggcgggggcgggggcgaaggcggcgggagccctggctctggcgctcgtgctcgcgctcgcgggggccaactcggagggcgacgcgctctcggcgctgcgccggagcctcagggaccccggcggcgttctgcagagctgggaccccacgctcgtcaacccctgcacctggttccacgtcacctgcgaccgcgacaaccgcgtcacccgcctagatcttggtaatttgaacttatctggtcatctggtgcctgagcttgggaaactggagcatcttcagtatctggaactttataagaataacattcaaggaacaatcccttctgagcttggcaatttgaagaatctaataagcttcgacttgtacaagaacaacatttcggggacaatacctcctgcccttggaaagttgaagtcccttgtattcttgcgtctcaatggcaatcatttgactgggcccatcccaagggaactcgctggaatatctagtctcaaagttgttgatgtttcaagtaatgatttgtgcgggacgattcccacgtctggaccatttgagcatattcctctgagcaactttgagaagaacccgcgcttggaaggtccagagctacaaggcctggccatatacgacaccaactgctagagggcaccacgaagaaaagaactgctagaaagtaacgagcgaacaaggttaccagaaattgggcgatatagatttactaggtctggatctgtaatcctccctgcatagctcttattcgtaactcgctgtcggcacgaaagttggtgtgtgttttagcagaatgctttctgtccgtgaaagtaaacttgaaactgcttattacgactgaaatgatattgtcgttcccccctgcgccaaaaaaaaaaaaaagtgggcggcgcc

SEQ ID NO: 263816 - DNA, 782 bp, Zea mays
gagaaaagcagaccagacgagacgtcgtgcgtcgcgtcctccctgccgttccccttcttcagttctcccgctgctgctgccgctgccaccctccgtccgcgtccagatcccgccaccccaaccgatctgccggcctccagcatggcggcgggggcgggggcgagggcgagggcgaaggcagcgggagccctggcgctggcgctcgtgctcgcgctagcgggggccaactccgagggcgacgcgctctcggcgctgcgccgcagcctcagggaccccggcggcgtgctgcagagctgggaccccacgctcgtcaacccctgcacctggttccacgtcacctgcgaccgcgacaaccgcgtcacccgcctagatcttggtaatttgaacttatctggtcatctggtgcctgagcttgggaaattggagcatctgcagtacctggaactttacaagaacagcattcaaggaacaatcccttctgagcttggtaatttgaagaatctaataagcttggacttgtacaagaacaacatttcggggacaatacctccttcccttggaaagttgaaatcccttgtattcctgcggctcaatggcaatcatttgactgggccgatcccaagggaactttctggaatatctagtctaaaagttgtcgatgtttcaagcaatgatttatgtgggacgattcccacatctggaccatttgagcacattcctctgagcaagtaagttacattcctactttgcatcttcttgcatactttataaagatagttaca

SEQ ID NO: 263817 - DNA, 648 bp, Zea mays
ccttcctgaattccccgggcgggccacgaatccaccggcaccaaccgatccactgccctgcatcatttcatcggcaagatccaacaccacaagagccgtttttcaaacgctggtgctcacgctcactgttaccaactccaaatgctacgctctctccacgctgctccggagactcaggaacccaagcgacaatcttcacagctgataccccacgctcatacaccactgcacctctttccacgtgacctgccaccccaacaaccgcgtcaccctcctaacatctttataattagaactcatctggtcatctggtccctgaactttgcaaactcgagcatcttcagtatctggaactttataagaataacattcaacgaacaatcccttctgagcttcgcaacttcaagaatctaataagcttcgacttgtacaagaacaacatttcggggacaatacctcctgcccttggaaagttgaagtcccttgtattcttgtaagtttaattctgtaaattctgtttacatattataaatacttgtcagattgtcacatcttagcagctaaaagtggatttgaatttgatactagttttgctgaagatgatcattctgtcttctttaaattgtgttaggatgtggtaggtcaagc

SEQ ID NO: 263818 - DNA, 478 bp, Zea mays
ctcaatggcaatcatttgactgggccgatcccaagggaactttctggaatatctagtctcaaagttgtcgatgtttcaagcaatgatttatgtgggacgattcccacatctggaccatttgagcacattcctctgagcaactttgagaagaacccacgcttggaaggtccagagctacaaggcctggccatatatgacaccaactgctagagggggcaccacgaacaaaagaatcgctaggaagaaatgggcgaacaaggttaccaaaaagtgggcgacatagattattaggtctggttctgctgccactctgtaatcccccctgcatagctcttatttgtaacttgctgtctgcacgaaagttggtggatgttttagcagaatgctttctgcccgtgaaagtaaacttgaaactgcttattatgagtgaaatgatgatgttatttccaaaaaaaaaaaaaaaaaaaaaagggcgccg

SEQ ID NO: 263819 - DNA, 352 bp, Zea mays
tctttcttgggacgattcccacatctggaccatgggagcacattcctctgagggacttttagaagaacccacgcttggaaggtccagagctacaaggcctggccatatatgacaccaactgctagaaggggcaccacgaacaaaagaatcgctagaaagtaatgggcgaacaaggttaccatatattaggtctggttctgctgccactctgtaatcccccctgcatagctcttatttgtaacttgctgtctgcacgaaagttggtggatgttttagcagaatgctttctgcccgtgaaagtaaacttgaaactgcttattatgagtgaaatgatgatgttatttcccttgcc

SEQ ID NO: 263820 - DNA, 1303 bp, Zea mays
cccacgcgtccgcccacgcgtccggttagatctcccttgatccaaacagccccatacgttgccttgggcaatcgagctaatcaatctccgtgcaattccacctcccgaagacccgaactgagtccctccaccgacccaaaccctagcgcgcacccacctccctccccctttcccggcgtgcggtccggtgtcggagatgcgggcgctgctcgcggacggcgggatggcactggcggtgtcgccggaggccaacgagtcgtcgggtggcgctgcggtgtcgctagggccgttatcgtgggcgtcggagtgccacggggtactgtacaacctggccttgatgctgccatcgctggcctttgtggggttcctggcgtggcaggcgcggcggagcttccgtaggctcagctacggccgctctcacgtcgttgtcgtcgcgtactacgcgctcctctgggccgtcgccgtactcaacctcctctggtgcttcctgcaggcatggcaatgtatgcctgacagggcattctcttggaatatactgtcactgtttacaaaatcaggaatgttattcttggaagtgagtctcatagcctttctacttcaaggaaatgatgccagcggttttgaatctttggcacgaacctttgttatatctggagctgtagttgctgctgatgtattgctcaagactatatatgtttttggcttcggtgttcctttgttcattgatactgatcaaggaactagtgggaaatggggcctgtggattctccacaaacttgtgcttactggagtctatgggctgattgttttcatgcatcattcaagatggagagacaggctgcctgcaaaaccagcatactacaactatgtatgtgtgatgttgctactgaatggcatatcactgtttggatgtttccttattgcaagtggagctggatttggtttatggttatataatctcacaaccgtatgctatcattctctttaccttcccctcctatatgtgactttcttagcagacttcttccaggaggaagacatgctcctagagaacgtctactattctgaaatgaaggatgctgggttcttcgatgctgactgggattaatccgtggctactgtgctgtatgacccatcccatatgaagtacgctgtatttgtttttattttatctgtgtactctcaacgtagaacaggaaatgtatgtagctagtcgtggtagtgaatggaaatatgtaatcttactgctgcatacttcagaaaatcagaattcaagtgatttcacggctgagattgccatctc

SEQ ID NO: 263821 - DNA, 405 bp, Zea mays
ttatcgaccgccttattttattatatatttatatttttgcaaaggaagttttcactgccaaacagtgcacaagccgaattttacatgccatggtatccttctccgtacaaatcgaaagaaattggcaccaaaattatgtacttgcagggtgtctatctaccattcactcactcactcacgccaagaacaaggatgcagttttggagcataacgcaacgcaacagctacctacctaccttttgcagttcaccgtggcgcgggcgctacaacttggctctccaggtccagctgcccgccggaggacccggccaccaccttggcgccggccttgggcgcctgctgcggcggcgggagcacggtgcgcgcgcggcagacggggcaggtggcgcgcgcgcagagccaagc

SEQ ID NO: 263822 - DNA, 631 bp, Zea mays
ccgggtccacccacgagtccgaccacgcgtccggcagaacatgacgtccctgctcgtgtccttcgtggtgggcttcatcattgaatggcgggtcgccctcctcatcctcgtcaccttccctctcctcgtgctcgccaactttgcccagcaactgtcgatgaagggcttcgcgggcgacacggccaaggcccacgccaagacgagcatgatcgccggggagggcgtgagcaacatccggacggtggcggcgttcaacgcgcaggacaagatcctgtccctcttctgcagcgagctgcgcgtgccgcagatgcacagcctgcgccgcagccagatctccggcgcgctcttcgggctctcccagctctccctgtacgcgtccgacgcgctcatcctgtggttcggcgcgcacctggtccgcacccacgtgtccaccttctccagggtcatcaaggtgttcgtggtcctggtgactcacagccaactccgtggccgagaccgtcagcctggcgccggggatcgtgcgcggcggcgagtccatccggtccgtgttgtccgtgctcaacagccggacccgcatcgacccggacgacccggacgcggagcagctggactcggtgcgcggcgagatcga

SEQ ID NO: 263823 - DNA, 842 bp, Zea mays
cgtggaaaactttccggttccaaaggacctttggccccttccttttaagaacctacctgggtaaaccctttttgaaaaggctcctgtgcttagacctgtaacagaatggaaatttatgtggtggccctatcatggaaccgaggtatcagggaagtcgtggactggatgtcgaagaaaagtggtattcctgcttctgagcttagggagcacctattcatgctgcgtgacagtgatgctacacgccatctgtttgaggtatcagctgggttggactctttggttctcggtgaaggacaaatccttgctcaggttaaacaagttgtgaggagtggacagaacagtggaggcttgggaaagaacattgataggatgttcaaggatgcaatcactgctggaaagcgtgtccgctgcgagaccaacatatcatctggtgctgtttctgtcagttcagcggcggttgaactggccctgatgaagcttccgaagtctgaagcactgtcagctaggatgcttctgattggtgctggtaaaatgggaaagctagtgatcaaacatctggttgccaaaggatgcaagaaggttgttgtggtgaaccgctccgtggaaagggtggatgctattcgtgaggagatgaaagatatagagatcgtgtacaggcctctctcagacatgtatcaagctgctgctgaagctgatgtcgtgttcaccagcaccgcatctgaaacttcattgttcgcaaaagaacacgcagaggcactcccccctgtctctgatactatgggaggtgttcgcctgtttgtcgacatatctgtccccaggaatgtcagcgcatgtgtgtctga

SEQ ID NO: 263824 - DNA, 815 bp, Zea mays
tttttctcctctgcagccaactcgtcccctcgggccaacgcgaggccaaaaccaatctcacctcctccccctgaccccctcccaccaccgaggacccttccccaagaactgccccgagtcctggagcgggagagaggtcgagggaggagcccaataagagtttctcctcgcctctctctctttctgctcgaaaaattattgtcgcattggtttggttcccttgccaaaggaggcggctttctgtcctcgctgatctaacatgatggcgagcaccgcgtcagcgaccgccgccgccgccgtggcattcggggcagccgccaagccgcggggaccggcggcggcgctccgcgcaagagtgcctgccggcggcaggcggcgctccggcatggtggtgcgctgcgacgccgcgcgcccggaggcccaggcgcaggccgtggccaaggccgccagcgtcgccgccctcgagcagttcaagatctccgccgaccggtacatgaaggaaaggagtaccgtagctgtgataggcctcagtgtacacacagcaccagtggagatgcgtgaaaaacttgcggttgcagaggaactgtggccccgtgctattcaagaactcactagcctgaaccatattgaagaggctgctgttcttagtacctgtaatagaatggaaatttatgtggtggcgctatcatggaaccgtggtatcagagaagtagtggactggatgtcgaagaaaagtggtattcccgcttccgagcttagggagcacctgttcatcttgcgaagcagtgatgccacacgccatctgtttgaggtgt

SEQ ID NO: 263825 - DNA, 538 bp, Zea mays
cgtcccgtggtctctaccttcatgccacaaccaccaccaccaccgtcactgcattctcaaacgagcagtgcctgaacccaagtgcagtgcagcagccatgggagcagcagcagcaggtggccacgcgctgcgcgccgtcggcgacgtcgtctcgttccccgcgaccgtcgccgccttcgtggaggcgctgctccagggctgggccgaggccagggccgggctgctggtgccgctgctccgcgccgcggtgctgctgtgcacggccatgtcgctgatcgtgctggccgagaaggtgttcctgggcgcggtcagctccgtggcgaagctgcggcgccggcggccggggcgggtgtacaggtgcgaccccgacgaggaggcggatgcggcctcctgggcctatcccatggtgctcgtccagatccccatgtacaacgagagggaggtttaccagctatcaatagaggcagcctgcaggctcacatggccggtagatcgactaatagtgcaggtgctggacgactccaccgactccgtcatc

SEQ ID NO: 263826 - DNA, 584 bp, Zea mays
gcaagcggatccagctgggagtttgaagttaaagcagatgactgaacaacttcggcacgaggaaaaggagaatgcacagctgaaccaaagcttgcagctgatgcagctcaagtacgcttctcgtgagaatgtcttcaggacactaaacgaaaaggtgaaggatgctgaacaagcatgcagaaattatcagcaacggattagagagctggaaagtgaattaggcaatgagaaaagggtttctagggattctgctagatcctcaaggccgccacttgttcctacgagacagaagcagcctcacggaaggaacgcgccaccttcaggcccttctagatggaggctcaaagcccccacaatccacaacaaagagaacattcctgtgacgatgagcaaatcaaatcctggggatgacactaataaggctgttggcagagcaaggcgcgttccacttactccggtgattcgacaaatccccatccagcccaagaggcggccttcgatagcactactaccatctgtgagagagcatctttctgtgctaaacgaaaagagagcatctgtctctactgtcgcaagtaaacatg

SEQ ID NO: 263827 - DNA, 1160 bp, Zea mays
  unsure (1)..(1160): unsure at all n locations
cggcctacgcgactgcttccctctctctcgagtctcgactctcgactgcgccgctacagcctgacgcgatggcctcgtcggcgacgagagaggttctcatgcttgaggcgcctccgccgtccgaccccgctgcggggccctggcgcgcggtgccggacgcggaggccattgacgcgctgccctacatcgacggcgactacggcgatgcggcggtgaagcgggaggtcgatcgcctcgtcgaggaggagatgcgccgagggaagcgcaagcctgcagacttcctccgggacctgccccctgttcccaccgccggattcgagaatcatcctatgcttgctaaagaatatgaacgtgttagggctggcaaacctccttttatgctagatatgtctcgctatggtttggagccacctccaatgaacaagaggaatgatgttggcgcttggaggcaggctctacggaatgctcagagccagttgcagcatcaaattataaggatagagaatctcgagcttatgctgaaatatggcgtagatgtttggaagctccagaacagacaaatggaatcagttctgtctaggatgcaaaagatggctgtagaatacaatgaaaggatagaaaatgtcaatcgcgagaggaagttccaccagcaaaatactggaggacagctgcatgccctgaaaatggaatggcaggagctgtgtcaaaaaaatatagctattcaggctgcttgtgttgacctgcagaatcatattgaccagcttaaacttgaagcaaaagaactgggaatgcccatggacgacaactcaggaaccgacccacaagcatcatgaggatttgagatacagaggtggcaaggaagaagctacgcttcatttgagtctggcagctggacgtttcattagccattgtgattacctgtcctgcaattgtcatatgggacagtctgtttgatattgaaaacaatgtggactgtgcctagcaatcccatgacctgtgctcctgaaaacacctcgcagaggaagaatctaaattcgtgtattgttgtccgttgaagtgccctaacttgtggcaagagaaatgcagctgatgtatgcagactctccagttgacattaagttcccacatgaagcttttctgtttaaaaaaanggaagnaaa

SEQ ID NO: 263828 - DNA, 794 bp, Zea mays
ttttgcacttgatcaaatgtgcttttactatgatgtatgggtgacaggatatgtatattctgcacatttcaatgtgtctgtaaagtaatgttgatttcaaaattagtttagttagattttatagaacaaatctccactgctctatttcctggttgacaaccccctcactggatggagataaaaacacgaaatgttttactgatctggacaggagcatcccaagatctttcgatcctatgtttagaggggcaatagataactgagacatccttgcagtaacttgtggatccttgcattaactataacccctctcgtttacttttgcagaggaattttgccagcaattgatcttattagcgtgaatgctttggttgggatattctactttgttggatttggactgttctgtctggaatcattgctcagcatctgggtcatccagcaagtgtacatgtacttccgtggaagtggaaaggctgcagagatgaagcgtgatgcgacgaggggtgcaatgagagccgcattttaagtgtggtgtggtattttttttgtgatgacagtcctaggcccaagcgcatacttccggtggataggttgtgcaccgaacaaaaagcagatgtttcttccttggttgctgactatgataccaaactgccagtaggttatcatgatgttacaagtgacattatatcactccccgtcctgatctaacaagaatggggaatgtgcagcttttacagctttacttaatcgttttgttcttgctagttgaaatgtggaatggattatgaatc

SEQ ID NO: 263829 - DNA, 595 bp, Zea mays
gggaagcggaattgaacaagagggagaaggaactaaaacggagagaggaggctgcagcgagagctggcattgtcattgaggagaaaaattggcctccttttctgccactcatccatcatgagatcaccaatgagataccgagtcaccttcaaagaatgcaatatgttgcatttgcgtcgtttcttgggttggtttgctgcctcttctggaatgtcatagcagttactacagcttggatcatgggggaaggcgttaagaggctaatcagagggttgttgcaccaccttttttgctaatgttaaggcaagctggccattgcttttatcgccttcttgccctttaaattttttataggggaatgcttgcttttctttttttttccctcctttattatcttttcctgtttagttccatttttcttgtttagtataagtttttttctcaccttctttttctctctctctttttttttgattcatttaattccctgatgaatttttctttttagaacttttgaatttattgcctcttttaatttccttttcccatttctctttttctctttattctattttcttttttctcttctcttttt

SEQ ID NO: 263830 - DNA, 911 bp, Zea mays
ttcccggttcgacccacgcgcccgaaaacggagagaggaggctgcagcaagagctggcattgtcattgaggagaaaaaattggcctgcttttctgccactcatccagcatgatatcaccaatgagataccgagtcaccttcaaagaatgcaatatgttgcatttgcctcgtttcttgggttggtttgctgcctcttctggaatgtcatagcagttactacagcttggatcaagggggaaggcgttaagatctggttgttggcaataatctacttcatatctggtgttcctggtgcatatgttttgtggtatcgtcctctatataatgcaatgaggactgatagcgcattgaagtttggattgttcttcttgctttacgtgttccacattcttttctgcgtattttctgctgtggctcctcctgttgtatttgaaggaaaatcattggcaggaattttgccagcaattgatcttattagcgtgaatgctttggttgggatattctactttgttggatttggactgttctgtctggaatcattgctcagcatctgggtcatccagcaagtgtacatgtacttccgtggaagtggaaaggctgcagagatgaagcgtgatgcgacgaggggtgcaatgagagccgcatttcaagtgtggtgtggtattttttttgtgatgacagtcctaggcccaagcgcatacttccggtggataggttgtgcaccgaacaaaaagcagatgtttcttccttggttgctgactatgataccaaactgccagtaggttatcatgatgttacaagtgacattatatcactccccgtcctgatctaacaagaatggggaatgtgcagctttttcagctttacttaatccgtttgttcttgctagttgaaatgtggaatggattatg

SEQ ID NO: 263831 - DNA, 622 bp, Zea mays
ggaattttgccagcaattgatcttatcagcgtgaatgctttggttggggtaagctgagcagctttttgtttgataaatgagatatatagctttgaaagtattgataaattatcttcatctagtatccttgatgcgaaatataattctctgatttgtttagtaactgagtaatccatacgagtgttctgcagatattctactttgttggatttggattgttttgtctggaatcgttgctcagcatctgggtcatccagcaagtgtacatgtacttccgtggaagtgcaaagcctgcacagatgaagcgtgatgcgacaaggggtgcaatgagagccgcattttaagtggtatttttgtgatgatagtccaaagtcccaatcgcacacttccggtggataggttgtgccaacaaacagaggcgggcatatgtttcttccttggttgcctgactgtgactaaactgccagtataggttaccgtgatgttacaagtccctgttttacctacaatacataggcaacgtgcagcttggacttcgtcgttttatttttggtagttgaactatggacttatgaatccaaaaaaaaaaaaaaaaaaaaaaaaaaaaaaaaagggcggccgc

SEQ ID NO: 263832 - DNA, 284 bp, Zea mays
aataggttgtgccaacaaacagaggctggcatatgtttcttccttggttgctgactgtgactaaactgccagtataggttatcgtgatgttacaagtccctgttttaactaaaatacatagggaatgtgcagcttgtacttcatcgttttatttttggtagttgaaatatggacttatgaatcatctttagttaagttgtacagtgctgttaactatttatactagtttttgagcggctatttgtacttgttgaaggagtaatacatagtggtgatattggtgg

SEQ ID NO: 263833 - DNA, 925 bp, Zea mays
cccacgcatccgatccactccaaacaaggggaaggcgagcgacagcaaacccaccccatcgcccctcctctgtctcctctcttgcccacccgccccaatgtcgccgcccctcgagccccacgactacatcggcctctccgcctccaggagcaaggcgccggcggaggaggccgcgtccggagctgggcccatgtacgtgaaggtgagcatggatggcgcgccctacctcaggaaggtggacatcaagatgtactccagctacgaggacctctccctggcgctcgagaagatgttcagctgcttcatcgctggtcaaagtggtctgcataaatcatcgagcaaagacaggctgactaatggctcacaggtggatgccctcaaaagaccaggagtatgtccttacatatgaggataaggatgcagactggatgcttgtcggtgatcttccctgggattattttacctctatctgccggaagctcaaaatcatgaggggctctgatgctgttggaatagctccacgaaccgtcgagcagacaggtcagaacaaataagctttggcctttgcctgcatccaaggaagacatctgagctagctgggagactatgttgaaggctgaagcctgaaatagttgccgggaatcgtcaaaacccgtcaagtgtttagtgtagttttcacgtgtccttgagacatgtgcatttgtatgtctgtgacgtgatccgttagatcgtgcaatcgtaggttgctgttcttgtgccctttaaaggccagacagatcagggagctctctgcttccttagtgcacttgctttgcagcattccttgttattctactctgaaatcatacatcatgccacaagaaccgatggttcgtgatgtcaagagagctgaaaaagggcggctgctcgcgatctagaacttttc

SEQ ID NO: 263834 - DNA, 947 bp, Zea mays
cccttgcgttcgcccacgcgtccgtggtgggatgggcgggcgtgcggaactaccgggggaggaccctcgccgtgagcgccttcaggagcaaggcgccggcggcggaggacgccgcgtctgcggcccggcccatgtacgtgaaggtgagcatggatggcgcgccctaccttaggaaggtggacatcaagatgtactccagctacgaggacctctccgtggcgctccagaggatgttcagctgtttcatcgctggtcaaagtggcctgcataaatcattgagcaaagacaggctgactaatggctcgaaggtggatgccctcaaagaccaggagtatgtacttacatatgaagataaggatgcagactggatgcttgtcggtgatcttccctgggaagtagatacctcggggttggaggagctcaccattagggcggttctttgcctaccgatagcgaggaacggcggtggcctcacagtctcacacaggggcagtgagttattttacctctatctgccggaagctcaaaatcatgaggggctctgatgctgttggaatagctccttcgaccgtagagcagacaggtcagaacaaataagcttggtctttgcctgcacccacgcaagaaatctgagctagctggaaggccatgttgaaggcttaaatagttgctcggaattatcaaaagtcgtcaaatgttagtgtagtttccacgtgttcttgagacgtgtgtatttgtatgtctgtgatgtgatccgtcagatctgttcttgtgcccttcaaaggccaaatcagggagctctctgcttcctgtgtatgcttgctttttccagtattccctgttattctactatgaaatcatccatcgtgccacaaagaactgatggttcctgatgtcaaaaaaaaaaaaagccaagtattctttttacaggaaaaattggtgctgcc

SEQ ID NO: 263835 - DNA, 937 bp, Zea mays
cttctctctaatgatagcatagggagagaaggcatactccgaggcatccttctcctttccctctccttccccaaacccttttcctctttccctcgccccaagaacttcatctcatctccaggcgccccttttgcgcttgcgcaggaggagctcacggggacagtgggcggagagctcgatcgctgcaccactacttcactggaggtccgcccactcccatggaggagatcacccaacactttggagttggcgcaagcagccacggccatggccacggccagcaccaccatcatcaccaccaccaccacccgtgggcatcctccctcagcgccgtcgtagcgccgctgccgccgcaaccgccaagcgcaggcctgccgctgaccctgaacacggtggcggccactgggaacagcggcggtagcggcaacccggtgctgcagcttgccaacggtggcggcctcctcgacgcatgcgtcaaggcgaaggagccctcgtcgtcgtctccctacgcaggcgacgtcgaggccatcaaggccaagatcatctcgcacccacactactactcgctcctcactgcctacctcgagtgcaacaaggtgggggcaccaccggaggtgtcggcgaggctgacggagatagcgcaggaggtggaggcgcggcagcgcacggcgctcggcggcctggccgctgcgacggagccggagctggaccagttcatggaggcgtaccacgagatgctggtgaagttcagggaggagctgacgaggccgctgcaggaggcgatggagttcatgcgaagggtggagtcgcagctgaactcgctctccatctccggaaggtcgctgcgcaacatcctttcatctggctcttcttgggaggatctagaaggttgcgtatgattatccttcctttcttatattgtttcacaatggtttct

SEQ ID NO: 263836 - DNA, 653 bp, Zea mays
ggtcgacgcacgcgtccgaccacgcgtctccaccagcctcgtcgttaggacgtaaggtaagacacccaggggcgagccagtgagtacagagagtagccttacgtagcgaagctcagagcaagcgagggtacggtcaaggggggtgatggcgctgtctcgacgcatggcggctcccgtcctcgtcctcatgctcctcctcgtcgccacagagctggggacgaccaaggtggcggaggcgaggcactgcctgtcgcagagccaccggttcaagggcctgtgcatgagcagcaacaactgcgccaacgtgtgccagaccgagaacttccccggcggcgagtgcaaggcggagggcgccacgcgcaagtgcttctgcaagaagatatgctagtagtagcctcggctttgctggcacaagcaggtcgtcggcacgcaacgcaattcaagcatcatatcggtcctcctcccgcgttgctgtctactcgaccccgttttctctttcgatcgatttcgttgtttcctgttgctctcttcttttcccgcgaataatatgctccatgggatctcactgttgtactttctgcatccgttggtagtcaggacgatccttcttcccgctgtcacgtgtgattcaaaatggatgtactaatgcaact

SEQ ID NO: 263837 - DNA, 403 bp, Zea mays
cccacgcgtccggttctagatcgcgagcggccgctccgatctagaactagtcctgtgctgcgtccaccagcctcgtcgttaggacgtaaggtaagacagccaggggtcagccagtgagtactgactgagtagcccgaagctcagagcaagcgggtgccaactgccaaggggggtgatggcgctgtctcgacgcatggcggctcccgtcctcgtcctcctgctcctcctcgtcgccacagagctggggacgaccaaggtggcggaggcgaggcactgcctgtcgcagagccaccggttcaagggcctgtgcatgagcagcaacaactgcgccaacgtgtgccagaccgagaacttccccggcggcgagtgcaaggcggagggcgccacgcgcaagtgcttctgc

SEQ ID NO: 263838 - DNA, 429 bp, Zea mays
  unsure (1)..(429): unsure at all n locations
cccacgcgtccgacaccctgccaccaacgacaggtaccttcttcgggcccttctcaccatttcctcatttaagccccgtgtgccttgctcctcggtgtttcctccagatagtagtgtttcctcagtggactagtgtgaagctgtgcttagcgtagcggaagggaggaaggacaaggcaaggcaactgatggcggcgggcggcggaggcggctcgccggcgccgttcgtgtggaagacgtacacgatggtggaggaccccgggacggcaggggtgatcggctggggcagcggcaacaacagcttcgtcgtcgccgaccccttcgtcttctcgcagacgctgctccccgcgcacttcaagcacaacaacttcttcagcttcgtcncgcagctcaacacctatgtcagttanatcacacactcgagctagct

SEQ ID NO: 263839 - DNA, 732 bp, Zea mays
tcactcctcacccttcaatctttcgttcccaactgcgtttcctcctccgcgtcttcaaggaggggagacctgaaacgaatccagtccaggctggtggctgccggcgctggacctgaacgctggtgcatactgcgtaggcaagagcaggcaatggcggaggcgaatgcggggaaggagaagaaggaagtggtgcggctggagcgcgagtccgtgatccccatcatgaagcccaagctcaccatgaagctcgcctacctcatcgaacatcagtctgacagagaagaattcttgaagctctgcaggagggttgagtacaccataagggcttggtaccatctccagtttgatgatatgatggaactgttcgctctcttcgatcctgtgcatggtgctaaaaaactcgagcagcagaacttcctacctgaggaaatcgacacgcttgagcagaacttcctgtcctatttctttcgggtgatggaaaagagcaattttaacatagtaaatgacgatgaggttgaacttgctcattctggacaatatctgttgaatcttcccattaaagttgatgaatcaaagttagatgacaaacttctgtcgaagtattttaaggagcaccgtcatgaaaacctgccccacttctcagacaagtatgttatatttcgtaggggcattggattggaccgcactagcaactttgtcttcatggagaaagtggacatgatcataactcgt

SEQ ID NO: 263840 - DNA, 694 bp, Zea mays
gtcgacccacgcatccgggagattggttctgttggcaaggctatacttgagaatatccatcattttatgtgcatgctgaagggaatccatcagcttcaaaggaaatattagatgcactgcaaagtgccagcaagtctcttggttctgataatgttaaagtaaaacaagcagcttcatcaaatcctggtgttccaccatcttcattaatgtcattcataaggaagaacatgtcaacttctggagttgtgttggaggattttgattcccacttctccaatagattttatcatagctatctggataactctgtaaacatcaattcctcgtcaatagctgcagccgccgctttggttgccaggtcgatgtatattcttgctagtgatgactcagttgttgaccttataacactaaacactataaaagtgaacgtttcattggtcgaagaacttattggatgcctgcttacttgcaatcctggtctttcgtgcggccttgtgaaaagattcatttctccaagcaatccctgcccaagtcattatgttggtgcttttctggatgacccatctggcacgcagcttccttcatatgcagatgacacgtctcggtttgtatggaactttttggcagacagaactaattcaccaggcaataaaagctcatgtactggaaagtgtggtgatgaaggtgaagtttg

SEQ ID NO: 263841 - DNA, 492 bp, Zea mays
ggcacgtgaatttgccaatgaacttcgtgcaagtacaaaagcaccgaagaatcctgctgtttggcttgaaggttctggcggctctggtcataatggaagcagttctgatacttcacaggtctcagatgcatactcaaagatgcttacaatatttatcccgcttcttgtggacgagagttccttttttgcacattttatgtgctttgaagtacctgcacttgttccagctggttctcctaatgctaataagagcaaatccggaggaaatgacccggatgatgatctgggtcttatggatccagatggcaacgatctgaaacctgacagtacctctgctgaactgggtacattgaatgaagctcttcaagaattactcgatggaatccaggaagacttctatgcggtcgtagattgggcttataaaattgaccccttgcgttgcatctcaatgcatgggattacagagcgttacctttctggacagaaagctga

SEQ ID NO: 263842 - DNA, 1451 bp, Zea mays
attgccgtatcaaatgataataccttttttgtgactgcatctgatgactcgagtgtcatcatctgggatacaagaaaattggaaaaggacattgctttcagatctaggttaacatacagcatgggtaatagccgagctctatgtacgacaatggttcatggtacttcacaggttattgtcggtgccagcgatggaacattacacttgttttctgtggattgtgcacgcagcgttgggactgtcgtggaaaggtatgctggaattgttgatgtaaaaaggaacgagattaaagaagacgcaattctcagcgttgtaaattgttcaaccgacagctttagcccgactgttcttttcagcactgaacattgtggcatccataaatgggatacaagaaccaactcagaatcttggtcttttaaatcctctccggaggagggctatatatcggcacttgttgtgggcccgtgtgggaattggttcatctcaggttcttcgagaggcgtccttacactgtgggataataggtttttagtacctgttaaatcgtggaattattcaacattaagcccaatagagaaactatgcttgcttatacctccaccaagttcgatatcctctgctggaaggccattagtttttgttgccgctggatgcaacgaagtttctctgtggaatgctgagaatggaaactgccatcagatgtttagaacagcaagcactgacaatgaagctgtgatgtcaaaggcgccatcgaggcctgttaacaagccagtcatcaaagatataaggcgagcaggcaattataagtacagaatcgatgaattgaatgacccacctgtacgccatccagggatacgttctttgctgcccttgccaggtggtgatctattaactggaggaacagatttgaagattcgttactgggatcaagcaaggcctgagcaaagcttctgtattgctggtccctcggcgaaagaagtccgttcggcaaaaggagatatcttggagaaagcagttggaaacgatgagtcttacgatataagatccagttttggaatacaggtcgtgcaggaaatgtacaaacagagtagctcggtctccggtttgacgcccaagactcagctcgcggtggcagctgcagattctgcagggtgccatcgtgacgcaatactcgcgttggcatccttcaacttgtctagccagagattggtatcaggcagcagagacggcgctgtcaaagtgtggaaatagcttctccagcatggggtaagattacaagtcctcaggcgtgtacatattttggcctgtctagtgctcatacagtacatatgccactagttattgctgtacagaagattattccgatcaatagtcgaaattgacacgtaagctttcatcctgtgtgacctgacctgtgtatataaataccaatggcttacctcccttcccgt

SEQ ID NO: 263843 - DNA, 709 bp, Zea mays
cccacgcgttcttccacgcgtccgggggagcatgtcctcgagcgctccctctcggaatcgaggagggaagtccggaggggtaaaaatgcggaggcagcagacatgggcggcgaaactcaacccggccgcaacgcacgcgtgcgcccaaacggccggagcaagccaaggctcaatccgaagctcacaggctgcaagcaatgtggatgtgcacagtttccggaccgattggctcaagaacagcaagattggcagaagcaggagcgtgcattacacatctcctgggaacctggacaacgggatgcttcggttctatctgacaccgatgagaagctccagaactgcgaacagggggaggaggagaagttcgcgcttgtttgcgcgaggacttttcggtttcatataagtggctcaagtagagcgttagcccatgccatgcgtttttttaaagatggcagcagcagaagcaacttttctttggaatctacttggtttctaaggattggcatcctcgtaagttgcccgtcatatcctttcttgtaggtgactgtttgatcccaacttagactcaaagaagcttcactgttagttgcagatttgctgctcatttctttttaaaatgtttcttatagatggaatctggacacacctgtgcagattagtatcacaatgtaattatttttgttgataataatacttgcaccatttgttc

SEQ ID NO: 263844 - DNA, 410 bp, Zea mays
aattaacgggtcgacgcacgcgtacgcccaacgctccgtccccgcggcccaccaaccgccgccgccgccgcagccatgcacggccgccggcacctcgcggcgtcccttacccgggccctgatccaggcgccatcccgctccatctcttccaccccgtctctcctccaaaccctcgacccctcagtgccgtcgcctcccgccgcgggagcagggcggctcgcggagctgcggcggcggctgcaggcggacgcgccgtcgctgggtgacttcacgtactcagtggaggtggggacgcggcagcgcccgctgcccaagcccaagtggatgaacgagaccgtgcctggcggcgccaagtacgcggccatcaaggccaagctgcgggagctgaagctgcacacggtctgcgagga

SEQ ID NO: 263845 - DNA, 1622 bp, Zea mays
gattcccgaaatctccggctcgccccctctccgagactccgactgcctcccctgaagctagctagcctcctagcccctggtctggtcctcccgctgtgcctgtgaggcgctgctctaccaaggaggccgctggctgctccgctgcgctgcagtgaggctgcaaaagctggcggcttcttctcactgggcgtcgccataaacagtggagattcccatccccattttcccaattatggatagccagcggcaaccgggggagcaccgctgaggccgctcgcccgccatcccgcccgccattgctcccgtcgagggtccaggaggtatttggtgtgattgtgatgttgtatgagttttcgtgcgccggcgcgccggctcaaactccaaaagtgcaaatattcacacgagctcgtggataagttgtgtggcagtgatgaatgtattggctccggctctcaggttgcaagtcaggacacttttggaactttgggcgccattgtaaaacggcgaactggcaacaagctggtaggtttcctcaccaaccgacatgttgctgttgacttggactacccagaccagaagatgtatcacccattgccacccaaccttgggcctggtgtttatcttggagctgtcgaaagggcaacatctttcatcacagatgatgtttggtatggaatctatgctggagagcctgcagagacatttgtacgcgccgacggggcattcatcccatttgctcacgacttcgacatctccacagtcacaactacagttaggggtgttggtgacattggggatgttaaggttatagatctgcagagtccacttaatagcctcatagggaggcaagtatgcaaaatcggcagaagttctggtcacacaactggaactgtggtggcttatgcccttgagtacaatgacgagaaaggaataagcttcttcactgacctccttgttgtcggcgaaaaccgccaaacttttgatctagaaggtgatagtggaagccttattatcctgactggccaggataatgagaagccgtgtcccattgggataatatggggtggcacagcaaaccgtgggaggctaaagcttaggtgtgaccatggccctgaaaattggaccagtggagttgatcttggccgccttctggatcgtcttgaacttgaccttatcataaccaatgaatcactcaaagatgccgtgcagcagcaaaggctcgcgttggtggctgcagctaactctgctgttggggagtcgtcgacagcagctgttcctgccccagaagaaaaggtggagatcttcgagcctctggggatcaaaatcgagcagttgcctcggcacgacgtttcggcctctgaagcggaggaggcagctgcgatcaatgtggaagagcgccagttcatctcaaactttgtcggcaggtcccctgtgcgcgacgaccagggtgctccgaggcaaatcgcgaacctgaacaatccgtcagaggaagagctcgccatgtcgctgcacctaggtgaccgggaggccaagcggcttcgcactgacacagaatccgaccttgacctggagaagtgacgcactcatttcaacgtattcacattgaggagtcataaaagtag

SEQ ID NO: 263846 - DNA, 548 bp, Zea mays
  unsure (1)..(548): unsure at all n locations
tgnggatcaagattgagtcactgcgtcggcacgacgtttcggcctctgaagcggaggaggcagctgggatcaatgtggaagagcgccagttcatctcaagactttgtgggcaggtccctgtgcgtgatgaccagggtgctccaaggcaaattgcgaacctgaacaatccgtcagaggaagagctcgccatgttgctgcacctaggcgaccagtagcccaagcggcttcgcagacagaatccgacctcgacgggaaacggcgaagcgctcatttcagtgtctctacatcgaagagtcgcaagtagtccgaagaaggtcacctggagttcagcaaactgaacctgcatcagtagcttagaccagcagcttcctggcccaaacattataatgaactatgctgaaacttgattcagcacttacatgatttgggtggtattcccttcagttttgctgtgctcgtgaagactttaatatgtacaatgctgagtccctgtatcaaaacaatgcaggtagtgataaaatcgtattgatcaccttctcttttctacc

SEQ ID NO: 263847 - DNA, 1763 bp, Zea mays
cagagtttctgtagatcaaagtgttgtggaccttgatatagcgttcagacttggtggatttgcatcaacgacaattcaactccttggaattgttgctgtcatgagcaaagtcacatggcaagttctgattcttatagtccccatggctgttgcatgcatgtggatgcagaggtattatattgcttcatcaagggaactaactaggattttgagtgttcagaagtctccagtgatccatttgtttagtgaatcaattgctggtgctgctacaataaggggttttggtcaagagaagcggtttatgaaaaggaatctttatcttcttgactgttttgctcgccctttattttccagccttgctgctattgaatggctctccctgcgaatggaattgctttcgactttcgtctttgctttttgcatggcaatacttgtgagctttcctcctggcacaatcgaaccaagtatggctggcctcgctgtaacatatggacttaatttaaatgctcgcatgtcaagatggatattgagcttctgtaaattagagaacaggataatctctgttgagcgcatttatcaatattgcaggcttcctagtgaagcaccattgattattgagaactgccgtccaccatcatcatggcctcagaatggaaacattgaactgattgatctcaaggtccgctacaaggacgatctaccattagttcttcatggtgtaagttgtatgtttcctggcgggaaaaagattgggattgtagggcgtactggaagcggtaaatctactcttattcaggcccttttccgcctaattgagcccactggagggaagattataattgacaacattgacatctctgcaattggccttcatgatctgcggtcacggttgagcatcattccccaagaccctacattgtttgagggtactatcagaatgaaccttgatcctcttgaggagtgcactgatcaagaaatttgggaggcactagaaaagtgtcagctaggagaggtcattcgttccaaggaagagaaacttgacagtccagtgctagaaaacggggataactggagcgtgggacagcgccaacttattgcactgggtagggcgctgctcaagcaggcaaaaattttggtactcgatgaggcgacagcatctgtcgacacagcaacagacaatcttatccaaaagatcatccgcagtgaattcaaggactgcacagtctgtaccattgctcaccgtattcccaccgttattgacagtgaccttgttctggtccttagtgatggtaaaatcgcagagttcgacacgccccagaggcttttagaggacaagtcatctatgttcatacagctagtatcggaatactccactcggtcgagctgtatatagagaggctgcttaaaaccccgccccaaacctggcaacagaggctgggaggcaaatagcccgtatctgccagtgtacttgcttgcgccatagaggtccctgcgaacaccggagggcggcgtagaagacgaggtgtacatgagtgggaggaacactgggcgttccctgacctgaataccgtggaatcggcgagggagcgcggttggtattggtaggcaccaggggaggagttggtgacactagtacattacccgaagctgatgcttcagtatgtatgtataacaacaatgcatactgcttctccctttgcagagtggagaaccaagggaataactcgtgcgtaataagaggagaaagatttgttttttggctt

SEQ ID NO: 263848 - DNA, 1086 bp, Zea mays
ccctcgcgtccgcccacgcggccgacgagcccaccgaattccctgcgattcctctcccctcgcctcctcgtctccccctaggggatcgtcggagaggaatcgcaaagagggccgtctcatccgagttaaggaagccatggagcacaaggaggctgggtgccaggcccccgagggacccatcctctgcatcaataactgtggcttcttcggcagcgcggcgaccatgaacatgtgctccaagtgccacaaggagatgataacgaagcaggatcaggccaagctggctgcctcctctatcgacagcatcgtgaacggcagcgacgccgtcatggagccggttgttgctggcagcaacacggtagtagctgttgcccaagttgagttgcaaacaatgaacgtgcagcagcccgctgatgttgccggacccagcgagggggtggcggcgatctccaaaggggggaaggtagggccgaaccggtgcagcgcctgcaggaagagggttggacttacgggattcaactgccggtgtgggaacttgtactgcgcactccaccgctactccgacaagcacgactgcaagttcgactaccggactgctgccagggacgccattgccaaggctaatccggtggtgaaggcagacaagctcgacaagatctagggggggttccctacggttgggtatcaggaagattgtaaaccgcggtaactcgtcatgcggaactgctgccttgccccccgcgcctttctcttccatgtttgctgctacaatcttgttgttgggcattgcagtgcacggtgcacacttgtgtagcccgcctcgagaattcctgcctctgcatctggtcagttctaaaatgatttgcatgttggctatgttgtgtaagctctatttatggtggtctcgctgagacgggtatttggcttcgcagttatctagctatgtgatgtactgttgtcttgtccctgggtattatatggtacactgcagccagtaatagtaatctgcaactgtgcgttaaatggtccgtcgttttaaaaaaacaaaaaaaaaaaaaaaaaaaaaaaaaaaaaaaaaaaagaaaa

SEQ ID NO: 263849 - DNA, 671 bp, Zea mays
gggtcgagccccgcgtccgcccacgacgtccgcccacgcgtccgcccacgcgtccgatcgtgaacggcagcgacgccgtcatggagccggttgttgctggcagcaacacggtagtagctgttgcccaagttgagttgcaaacaatgaacgtgcagcagcccgctgatgttgccggacccagcgagggggtggcggcgatctccaaaggggggaaggtagggccgaaccggtgcagcgcctgcaggaagagggttggacttacgggattcaactgccggtgtgggaacttgtactgcgcactccaccgctactccgacaagcacgactgcaagttcgactaccggactggcggcaaggaaccccattgccaggctaatccggtggtgaaggcagacaagctcgacaagatctagggggggttccctacggttgggtgtcaggaagattgtaaaccgcggtaactcgtcatgcggaaatgctgccttgccccccgcgcctttctcttccatgtttgctgctacaatcttgttgttgggcattgcagtgcacggtgcacacttgtgtagcccgcctccgagaattctcccgcctctgcatctggtcagttcaaaaatgatttgcatgttggctaaaaaaaaaaaaaaaaaaaaaaaaaaaaaaagggcggccgc

SEQ ID NO: 263850 - DNA, 2159 bp, Zea mays
tttgtcttcccacgccctccccgctcagcttcgcgtaattgcatttaagcccctttggcactcattgccgtccccctcggctccatttcttggaggtgaccgcagctctccggcggaaggcggcgcagatggcttccgcggcgacacagtgcttcagctactcctcgttgccggccacgtgggctctgcggcagcggggcggcggtgccagcgtgctccggctctcttcccggcggaccttctcggtctccgcggcggccgggttcgacaaccagaaccgcgagtatgtgatcgtcgggggagggaacgctgcgggttacgccgccaggacgttcgtcgagcatggcatggctgacggccgcctttgcatcgtctccaaggagccagttccaccatacgagcggccagccttgaccaaaggctatctttttcctccggacaagaaaccggctcgcctacctggtttccatacatgcgttggatctggtggacagcgacagactgctgaatggtacaaggagaatggtatagaggtgctgtatgaggatccagttgtagcatttgatggcaaaacgcaaaccttaaagacttcatcggggaaagttctgaaatacggctcacttattatttctactggatgtgaagcatcgagattacctgagaaaattggagggaaattacctggagttcactacatacgggatgttgctgatgctgatgctctagtatcctcattgggaagtgcaaagaaggtggtggttattggtgggggctatattggcatggaggtagctgcagcagcttgtggctggaatcttgacacaacgattatattcccagaggaccacattatgccaagattatttacgccctcgcttgctaagaagtatgaggaactgtatcagcaaaatggtgtcaaattcataaagggagctcttatcgaaaaacttggagctggctctgatggaagggtgtcttctgcagtacttaaggatggatctgtagttgaagctgatacagtaattgttggtataggagcaaaaccagttgtcagcccgtttgaagctgttggagttaaccctaaagttggtggaatagaggttgattccttgttcagaactagtgtacctggcatctttgcaattggagatgtagcagcgttccccctgaagatgtacaatagaattgctcgagtggaacatgtggatcatgctcggaagtccgcacaccactgtatagagacgctcctaacatcccagacaaaagcgtatgactaccttccatacttctactcgagggtttttgagtacgagggaagttcgaggaaagtctggtggcagttttatggcgacaatgtcggcgaagcagtcgaagtagggaactttgatccaaaggttgcgactttctggatcgactctgatagccggctgaagggtgtttttctcgagagtggaacctcagaggaattctcgcttcttccgcagctcgccaaatctcagcctgttgttgacaagtcaaagctccaggccgcgacttctgttgaagatgcattagagattgcaagaagctcactccggtccagtgccatggtttagctctcagaatctagtactttcttgaacccgaggctgtgcgctgctcgagcggttcatagcgtcgagaccacgtcagcaataacgcacaattacatagaatctattcccactggggttgtaacattcttcagtgcacctgcgtcggctatttccagcttgaaataaacctggttgccctttgaggggttgatgaggatgatagattgaagcctttatgctacttttttcttgatggtcttctgatcactcatgcattcatgtttactgctcgacatatagttcgtttaacagtccctcttttccgaagttactgtaagacgtgttttcccctatattcattatttttgctgtgtatctagacatagggctagtttgtaaactcaaatttccttcggattagagaggattgaagaagaaattagttttgaagggaatttgagttttcaaactagttcatagtatatatgtgagcgtatgctaagtgaaaatttgtatttattaaaaaagttaaaacatcgtatactttgaaaagaacataaatttggaatggagggtttacatagt

SEQ ID NO: 263851 - DNA, 2246 bp, Zea mays
ccttcgtttccgcccacgcgtccgaacaagtttagatataaaaatatagcatcgcccgcgctctggagagtctggatcctcctgaacctccaagcagcaagcgatgaaaggagggacgcaagcaattagcctgatggtgcaccttgctgtgccatggctctgccttgcttcttgggcagctctgctaccagcgctagcatctggaaatgtgggtgcagcagctccgatactgagagcagagtacatgaatttgaacttcagcaccgcttcggcgacccccgacaagtacaagagcttcatcgcttctgttcgtgctggcttggtgagcaaagcggggggcaacagcagcgggatccccgtgctggtcgacgaagacgacccgctcgcgctcgagtcgtttctaaacatcactctggtgaacaaggcagggcgctccgtaagcttgaagatggatgtctccagagcctacttcgtggcttacgtagcagggcagcgctcgtgcctcctcaagagatcaggccgcacgttctcgtcggcgatctgttactacggtggcccgtggggaacaagttcggctcctgtcacgcgacctgctgctgctgccggcgacggcgaggatcctggggtcgcggcatggcgagcgagagatctcgacgaggccatctcgtcactgttcctgttccccactggcaacgctaccgaagaggagctgagacggggcgtcgccgcctgcgacatgatggtcgcgagcgcggcgacgttcccgtacgtcgagcggcggatgagcgccggcatgtgggacagcaacggcgtggccaacgacccgagcctgcgggggctccaggcgcgctggccgtggctctccgccgccgtccagcagtccttccagggcgccttcgccgccccggtccctgtccagcggagcaacggcaagtggatgcgggtggacaacgtgcgtagcgcggtccccctcgtgtccttcctggagcacggaagctgcaaccggacgcggggggcgccggccttgctcataaggtccgtcgtgcaagagccggacgaggacatgcagccgggcggcggcgctcgagccacgacggcggcgtgcggcctgccggccgagccgacggtgcgcctcgtcggcccggaagggaggtgcgtggacgtgccttacggctactactacaacggcaaccaggtgcagctgtggagctgcaagtccaccagcgccgtgaaccagctctggacgctcaagagggacggcaccatccggtccaacggcaaatgcctgaccagcagcggcgacgcggccggcgctcgcgcggtggtcgacgactgcccgcgcttccccacgggccgcgtcgtctgggaggtgcgcgtggacggtaccgtcgcgctcaagtggtcccgcggcctggtgctggccgtgacctcgtcgactctcttcgcggggctcacggtgcggcaggacgaccgcggcaccggccagtcgtggacgccgaccaacgtcaccgcgcccctggacgccgccatcgtggggttccgcgacctctgcctgcaggcggactacgcggggtccgtatccgtcgctgcctgccgcgacggcgtgcagtggtcgctctaccccgacggctccgtacgcccgcccgcgtggctcctccttcaatggcagtgcctggctgctgatgccagcgggggtgtgacggtgaaactctgcgacggggctggatcgtcttgcgagcgctgggtgttccgcaacgacggcaccatcttcaacaccggcaccgggatggtcttggacgccaggccatctgcgggggctaatgctactgctagccaagtcatcgtgtcgcccgccactgggagtcccacccagcagtggacgctcatgctgtgatctcatctacggctcatgagtcatgactgtgggggcagggcagtactgcactgcaacagctagctggtgtgttttgtgtatatatctggcgagctaggttgttaaagcaagcattagctattttaccagtacaataatgcatgcttgctactactactagtaatgcagtctagctctgtgtaccattgcctgcacggctgcacggcccctgttggagtactctataataaatgtacccctagtaaaatctgttttcagtttaccttgccgaaaaatataaacagggctagtttggaggggtgtttggtttgtcactccattcatcgtgaatccattactcaaatttggtggg

SEQ ID NO: 263852 - DNA, 539 bp, Zea mays
  unsure (1)..(539): unsure at all n locations
nccacgcgtncgtccacgcgtncgnctacgcgtncgcccacgcgtncgccgcaacgacggcgccatcttcaacaccggcaccgggatggtcttggacgccaggccatctgcgggggctaatgctactgctagccaagtcatcgtgtcgcccgccactgggagtcccacccagcagtggacgctcatgctgtgatctcatctacggctcatgagtcatgactgtgggggcagggcagtactgcactgcaacagctagctggtgtgttttgtgtatatatctggcgagctaggttgttaaagcaagcattagctattttaccagtacaataatgcatgcttgctactactactagtaatgcagtctagctttgtgtaccattgcctgcagggctgcacggcccctgttggagtactctataataaatgtacccccagtaaaatctgttttcagtttaccttgccgaaaaatataaacagggctagtttggaggggtaacaaaaagtttaaaaaaaaaaaaaaaaaaaaaaaaaaaaaagaa

SEQ ID NO: 263853 - DNA, 368 bp, Zea mays
cggacgcgtgggtgcgggtggacaacttgcgtagcgcggttcccctcgtgtccttcctggagcacggaggctgcaacaggacgcggggggcgccggccttgctcataaggtccgtcgtgcaagagccggacgaggacgaggacatgcagccgggcggtggcgctcgggccacggccacggccacggccacgacggcgacgtgcggggccgagccgacggtgcgccttgtcggcccggaagggaggtgcgtggacgtgccttacggctactactacaacggcaaccaggtgcagctgtggagctgcaagtccaccagcgccgtgaaccagctctggacgctcaagagggacggcaccattcggtccaac

SEQ ID NO: 263854 - DNA, 1543 bp, Zea mays
  unsure (1)..(1543): unsure at all n locations
cgccatggccaccatggcgaagaagagcgtaggggaactcacggaggccgacctcgaggggaagcgcgtcttcgtgcgcgccgacctcaacgtgccgctcgacgagaaccagaacatcaccgacgacacccgcatccgggccgccatccccaccatccagtacatcctcagcaagggcgccaaggtcatcctctcaagccacttgggtcgccctaagggttttacacccaagtttagcttagctccccttgtaggacggttgtctgagcttcttggcattcaggtgcaaaaagccgacgatgttattggccctgaagttgagaagctggtggcggccttgcccaacggtggggttctgctgcttgagaacgtaagattctacaaggaagaggagaagaatgacccagagtttgcacagaagcttgcctccctagcagatctttatgttaacgatgcatttggaacagcccacagggcgcatgcatcgaccgagggagttaccaagtttttgcagccttctgttgcagggttccttctgcagaaggaactcgactaccttgtcggagctgtttcaagccctaaacgcccttttgctgccatcgtgggtggttcaaaggtgtcatccaagatcggggttattgagtccctgttggagaagtgtgatatccttctcttgggtggtggtatgatcttcacgttttacaaggcacaaggtctccctgttggtgcttcattggtcgaggaagacaaactcgagcttgcgacgtctctccttgcaaaggctaaggaaaagggcgtctcccttatgctgccaaccgatgttgtcattgctgacaagtttgcccctgatgctaacagccagattgttccagcatctgcaattcctgatggttggatggggctggatattggcccagattctgtcgcttcattcaacgcagccctggatacaaccaagacggtcatctggaacgggcccatgggtgttttcgaatttgacaagttcgctgtaggaactgaggctgtggcaaagaagttggcagaacttagccgcaagggtgtgacaactatcatcggaggtggagactctgtcgccgccgttgagaaggtcggagttgctgacgttatgagccacatttccaccggaggtggtgccagcttggaattgttggaaggaaaggagcttccaggagttactgcattggatgaagcagccactgtgactgtatgaagcaagttttcattttgtttcatcttcttttttggaagttaccgggggagggactcccacctgaataaggtgcgcaaggccaggattgttggctcaaccacagggagcgcacgccaccgcatcatcttcatgtaccattgtatacttgctacattcttgcttgctcctcctcagccgctcgaaatgtaggagatcaatgatttatagagctctggaaatcgtttgaacaaggagtaagcgacccaagtaatatgcttactgagtcatctttcctttgtcccgtaacaaattacataaaaccccttngaaggt

SEQ ID NO: 263855 - DNA, 508 bp, Zea mays
agattctgtcgcttcattcaacgcaatccctgaatacaaccaaagacggtcttctggaacgggcccatgggtgtcttcgaatttgacaagttcgccgtaggaaccgaggctgtggcaacgaacctggcggaactcacgccgcaagggcgtcacaactatcatcggaggcggagactccgtcgcccccgtcgagaaggtgggagttgctgacgttatgagccacatttccacgggaggtggcgctagcctggaattgttggaaggaaaggagcttccgggagttgttgcgttgaatgaagccgccactgtgactgtatgaagcatgctttcattttgtttcgtcttcgtcttcacgtgccgttgtatacttgctacattctcgcttgcacctcctcagccgctcgctcgaaatgtaagagaccattgttttatagagctaatggaaatcgtttgaacaaaaaaaaaaaaaaagggcggccgctcgcgatctagaactagcacgcgtccg

SEQ ID NO: 263856 - DNA, 3013 bp, Zea mays
gccacagcgcccgttgttgtatcttgtcactgatcagtgttgtttgctttgctttgccgtgctaatggcgcccgctccatgtggccgttcgtcgcagagggtgttccacttcggcaagggcaagagcgagggcaacaagaacatgaaggagctgctgggcggcaagggcgcgaacctggcggagatggcgagcatcgggctgtcggtgccgccggggttcacggtgtcgacggaggcgtgccagcagtaccaggaggccgggcgcgccctcccgccggggctctgggcggaggtcctcgacggcctgcggtgggtggaggagtacatgggcgccaccctcggcgatccgcagggcccgctcctgctctccgtccgctccggcgccgccgtgtccatgcccggcatgatggacacggtgctcaacctggggctcaacgacgaagtggccgccgggctggcggccaagagcggggagcgcttcgcctacgactccttccgccgcttcctcgacatgttcggcaacgtcgtcatggacatcccccgctcactgttcgaagagaagcttgagcacatgaaggaatccaaggggctgaagaacgacaccgacctcacggcctctgacctcaaagagctcgtgggtcagtacaaggaggtctacctctcagccaagggagagccattcccctcagaccccaagaagcagctggagctagcagtgctggctgtgttcaactcgtgggagagccccagggccaagaagtacaggagcatcaaccagatcactggcctcaggggcaccgccgtgaacgtgcagtgcatggtgttcggcaacatggggaacacttctggcaccggcgtgctcttcactaggaaccccaacaccggagagaagaagctgtatggcgagttcctggtgaacgctcagggtgaggatgtggttgccggaataagaaccccagaggaccttgacgccatgaagaacctcatgccacaggcctacgacgagcttgttgagaactgcaacatcctggagagccactacaaggaaatgcaggatatcgagttcactgtccaggaaaacaggctgtggatgttgcagtgcaggacagggaaacgtacgggcaaaagtgccgtgaagatcgccgtggacatggttaacgagggccttgttgagccccgctcagcgatcaagatggtagagccaggccacctggaccagcttctccatcctcagtttgagaacccgtcggcgtacaaggatcaagtcattgccactggtctgccagcctcacctggggctgctgtgggccaggttgtgttcactgctgaggatgctgaagcatggcattcccaagggaaagctgctattctggtaagggcggagaccagccctgaggacgttggtggcatgcacgctgctgtggggattcttacagagaggggtggcatgacttcccacgctgctgtggtcgcacgtgggtgggggaaatgctgcgtctcgggatgctcaggcattcgcgtaaacgatgcggagaagctcgtgacgatcggaggccatgtgctgcgcgaaggtgagtggctgtcgctgaatgggtcgactggtgaggtgatccttgggaagcagccgctttccccaccagcccttagtggcgatctgggaactttcatggcctgggtggatgatgttagaaagctcaaggtcctggctaacgccgatacccctgatgatgcattgactgcgcgaaacaatggggcacaaggaattggattatgccggacagagcacatgttctttgcttcagacgagaggattaaggctgtcaggcagatgattatggctcccacgcttgagctgaggcagcaggcgctcgaccgtctcttgccgtatcagaggtctgacttcgaaggcattttccgtgctatggatggactcccggtgaccatccgactcctggaccctcccctccacgagttccttccagaagggaacatcgaggacattgtaagtgaattatgtgctgagacgggagccaaccaggaggatgccctcgcgcgaattgaaaagctttcagaagtaaacccgatgcttggcttccgtgggtgcaggcttggtatatcgtaccctgaattgacagagatgcaagcccgggccatttttgaagctgctatagcaatgaccaaccagggtgttcaagtgttcccagagataatggttcctcttgttggaacaccacaggaactggggcatcaagtgactcttatccgccaagttgctgagaaagtgttcgccaatgtgggcaagactatcgggtacaaagttggaacaatgattgagatccccagggcagctctggtggctgatgagatagcggagcaggctgaattcttctccttcggaacgaacgacctgacgcagatgacctttgggtacagcagggatgatgtgggaaagttcattcccgtctatcttgctcagggcatcctccaacatgaccccttcgaggtcctggaccagaggggagtgggcgagctggtgaagtttgctacagagaggggccgcaaagctaggcctaacttgaaggtgggcatttgtggagaacacggtggagagccttcctctgtggccttcttcgcgaaggctgggctggattacgtttcttgctcccctttcagggttccgattgctaggctagctgcagctcaggtgcttgtctgaggctgcctcctcattggcaaccggattgcctgctgctggtggatgtggtgatcaacagtattattacagagccatgctatgtgaacattactagtagcagtgctcataaaagctacaatcccatgtcctttttttccccagtcatgtaaaacttccaaactgctccatggttcaaaactctgttcttcaatacatcatcaattatcgattatatacgtggcaaaaaaaattcaaaaaaaaaaaaaaaaaaaaaaaaaaaaaaaaaaaaaaaaagaaaaagaagaaacagcggaggac

SEQ ID NO: 263857 - DNA, 2671 bp, Zea mays
gcatcttatagagatcgacccactcgtccgggttcacggtgctcaacctggggctcaacgaccaagtggccgccgggctggcggccaagagcggggaccggttcgcctacgactccttccgccgcttcctcgacatgttcggcaacgtcgtgatggacatcccccacgcgctgttcgaagagaagcttgaagccatgaagaaagccaagggggtgaagaacgacaccgacctcaccgccaccggcctcaaagagctggtgagccagtacaaggacgtctacgtggaggctaagggagagccattcccctcagaccccaagaggcagctggagttggcagtgctggccgtgttcgactcctgggagagcccgagggcaaagaagtacaggagcatcaaccagatcaccggcctcagaggcaccgccgtgaacgtgcagtgcatggtgttcggcaacatggggaacacctctggcaccggcgtgctcttcactaggaaccccaacaccggagagaagaagctgtacggcgagttcctggtgaatgcccagggcgaggatgtggttgctggaatcagaaccccggaggatcttgatgccatgaaggacgttatgccacaggcctaccaagagctagtcgacaactgcaggatactggagagccactataaagaaatgcaggacatcgaatttactgttcaggagagcaggttgtggatgttgcagtgcaggacagggaaacgtacgggcaaaagcgccgtaaagatcgccgtggacatggttaacgagggacttgttgagcgccgtgcggcgatcaagatggtagagccaggccacctggaccagcttctccatcctcagtttgagaacccatcggcgtacaaggaccaagtcattgccacgggcttaccggcgtcacctggggccgctgtgggccaggttgtattcactgctgaggatgctgaaacatggcattcccaagggaaatcagttattctggtgagggcggagaccagccctgaggacgtcggcggcatgcacgcggctgccggaatcctcacagaaagaggtggcatgacctcccatgccgccgtggtggcacgcgggtggggaaaatgctgtgtctcgggatgctctgggattcgtgtaaatgacgcagagaaggttgtgaagattggaggcaatgtgctgcgcgaaggtgagtggctatcgctgaatggatcgaccggcgaagtgatcctcggaaagcagccgctctccccaccagccctcagtggcgatctgggaacattcatgtcctgggtggatgacgttagaaagctcaaggtcctggcaaacgcggatacccctgaggatgcattggctgcacggaacaacggggcagaaggaatcgggttatgccggacagagcacatgttcttcgcttcggatgagaggattaaggctgtgaggcagatgattatggctcccacagttgagctgaggcagcaggcgctggatcgccttctgccttaccagaggtctgacttcgaaggcatcttccgtgctatggatggactttcagtgactattcgacttctggaccctcccctccacgagttccttccagaagggaacgtcgaggaaatcgtgcgtgaactgtgttctgagacgggagccaaccaggaggatgccctcgcacggatcgaaaagctttcggaagtaaacccgatgcttggcttccgtggctgcaggcttggtatatcgtaccctgagctaacagaaatgcaagcccgtgccatctttgaagctgctatagcgatgaccaaccagggcgttcaagtctttccagagataatggttcctcttgttggaacaccgcaggaattgggacatcaggtggcccttatccgtcaagtcgctaacaaagttttcaccagtatgggtaaaactattgggtacaagatcggaacgatgattgagattcccagggcagctctagtggctgacgagatcgcggagcaggctgaattcttctcctttggaacgaacgacctcacgcagatgacctttggctacagcagggatgatgtggggaagttcatccccatttatctggctcagggcatcctccagcatgaccccttcgaggttctcgaccagagaggagtgggcgagctggttaagcttgctacagagaggggccgcaaagctaggcctaacttgaaggtgggcatttgtggagaacatggtggagagccttcatcggttgctttcttcgccaagactgggctggattacgtttcttgctcccctttcagggtcccgatcgctaggctagctgcagctcaggtgcttgtctgagggtgcctctgctcgttggcagccggatcgcctgctgttggtgcatctggtgattaataatactactatgacagagccatgctctgtgaagagtattagtagcagcgctcataaaagctacagttccgtctcttttctcagctatgtaaaacttccaaactgttcatgcttaaaactgagggttttcttggtgtgaggtgtgcatgtcgttgttgaggccattgctgcacattccacctattgaggccctcctcaaattaagcctcgaaaaagctgatatcttttcgtagaactctagactccggtgaatgcaactggctggtttgcttccg

SEQ ID NO: 263858 - DNA, 550 bp, Zea mays
cctctcaccttttcgctgtactcactcgccacacacaccccctctccagctccgttggagctccggacagcagcaggcgcggggcggtcacgtagtaagcagctctcggctccctctccccttgctccatatgatcgtgcaacccatcgagctacgcgcgtggactgccttccctgggtcggcgcaggaggggatcggaaggatggcggcgtcggtttccagggccatctgcgttcagaagccgggctcaaaatgcaccagggacagggaagcgacctccttcgcccgccgatcggtcgcagcgccgaggcccccgcacgccaaagccgccggcgtcatccgctccgactccggcgcgggacggggccagcattgctcgccgctgagggccgtcgttgacgccgcgccgatacagacgaccaaaaagagggtgttccacttcggcaagggcaagagcgagggcaacaagaccatgaaggaactgctgggcggcaagggcgcgaacctggcggagatggcgagcatcgggctgtcggtgccgctggggttc

SEQ ID NO: 263859 - DNA, 698 bp, Zea mays
gatggcggcggcggtttccagggccatctgcgtccagaaaccgggctccaaatgcagcagggacagggaagcgacctccttcgcccgccgaacggtcgcggcgccgaggcccccgcgcgccaaagccgccggcgtcatccgctccgactccggcgcgggacggggccagcagtgctcgccgctgagggccgtcgttgacgccgcgtcgatacagacgaccaaaaagagcaaatggcgcctcagtctcccgcgcgcaagctacaacggttcagggtccggtgctgcggcggctgagccgtctaccgtgggagacaccttggaacgggaggagggcggcggcacagaggcaggcgcttcggctgatgagtcatccaaccggaagcagccgccccctgttgaccccaagattgagaaggagctcaagaaggtagttcagaagactgcggcaacctttgcaccaagggcgtccacgaaaacaaagaaccctgctgtccctggaagtaccctgtacaccgtctttgaagtccagggctatgtttccatgctgttgggcggacactttccttcaatctcatattcccatcgaatgagccagacatctggaggttaatgggaatgtggtccatttggatgttcactataccttcgcttcgggctcgtgactgctccaataaagagaaagaagctctcaactactt

SEQ ID NO: 263860 - DNA, 560 bp, Zea mays
ttcccggttcgagccacgcgtcacgcgttcggatccacctgacgcagatgaccttttggttcagcaggcatgacgtgggaaaggtcattggcggctatcttgctcagggcattctccaacatgaccccttcgaggtcctggaccagaggggagtgggcgagctgctgaagcttgctacatactggggcccgatagctaggcctaacttgaaagtgggcacttgtggataacacggtggagagccttcctctgtggccttcttcgcgaaggctggcctgggtcacgttcctcgctcccctttcacggttccgattgctaggctagctgcagctcaggtccttgcctgaggctgcctcctcattggcaaccggtttgcctgcttctggggaattgggggtccacccgtttttttcccagaccctccctttgaacccttctctggtcccagctcttttaagctttccatccctatgcctttttttccccaacctgtttaactttctcactctgctccacggtttcaaatctgttctttaaaacaccatctcctatcaccgttt

SEQ ID NO: 263861 - DNA, 689 bp, Zea mays
ccggtccggaattcccgggtcgacccaagccgtcggttccgggtgacattccgactcctgtaccttcccctccacgagttccttccagaagggaacatcgaggacattgtaagtgaattatgtgctgagacgggagccaaccaggaggatgccctcgcgcgaattgaaaagctttcagaagtaaacccgatgcttggcttccgtgggtgcaggcttggtatatcgtaccctgaattgacagagatgcaagcccgggccatttttgaagctgctatagcaatgaccaaccagggtgttcaagtgttcccagagataatggttcctcttgttggaacaccacaggaactggggcatcaagtgactcttatccgccaagttgctgagaaagtgttcgccaatgtgggcaagactatcgggtacaaagttgggacaatgattgagatccccagggcagctctggtggctgatgagatagcggagcaggctgaagtcttctccttcggaacgaacgacctgacgcagatgacctttgggtacagcagggatgatgtggggaagttcattcgcgtcgatcttgcttagggcatcctccaagatgaccccttcgaggtcggtggccggagggcagtgggcgaacgggaagtttgcacagagaggggcgcaaagcaggcctaacttgaagtgggcat

SEQ ID NO: 263862 - DNA, 1191 bp, Zea mays
acgcagcatttcccccacccacgtgcgaccacagcagcgtgggaagtcatgccacccctctctgtaagaatccccacagctgcgtgcatgccaccaacgtcctcagggctggtctctgcccttaccagaatagcagctttcccttgggaatgccatgcttcagcatcctcagcagtgaacacaacctggcccacagcagccccaggtgaggctggcagaccagtggcaatgacttgcggacgcgtgggcggacgcgtgggcggacgcgtgggcggacgcgtgggcggacgcgtgggcgcgaattgaaaagctttcagaagtaaacccgatgcttggcgtccctggccgccggcttgggtttatcgtaccctgaatggacagagatgcaagcccgggccatttttgaagctgctatagcaatgaccaaccagggtgttcaagtgttcccagagataatggttcctcttgttggaacaccacaggaactggggcatcaagtgactcttatccgccaagttgctgagaaagtgttcgccaatgtgggcaagactatcgggtacaaagttggaacaatgattgagatccccagggcagctctggtggctgatgagatagcggagcaggctgaattcttctccttcggaacgaacgacctgacgcagatgacctttgggtacagcagggatgatgtgggaaagttcattcccgtctatcttgctcagggcattctccaacatgaccccttcgagatgtcctggacgcccgtacacctaccaggtcctggaccagaggggagtgggcgagctggtgaagcttgctacagagaggggccgcaaagctaggcctaacttgaaggtgggcatttgtggagaacatggtggagagccttcatcggttgctttcttcgccaagactgggctggattacgtttcttgctcccctttcaggagatgcaagtggacacataaccatttcctatcaatacaatagaacccacaagcaaaaaagttttggttcgaccggaaatggtcgataaaggcaagggcgaaagcatcgtcattggtgatcctcgcacatcaaacatattgcaaggagggattgctcagaaagctttggacaagaagactaacaaatccggaggcaccgagggcaggctcaattgagtagctgagcacgacaacctgactcgag

SEQ ID NO: 263863 - DNA, 544 bp, Zea mays
cccacgcgtccgcggacgcgtgggcgcgcgtgggcggacgcgtgggcagaggtctgacttcgaaggcattttccgtgctatggatggactcccggtgaccatccgactcctggaccctcccctccacgagttccttccagcaggccgcccatcgcggccgttgtaagtgaattatgtgctgagacgggagccaaccaggaggatgccctcgcgcgaattgaaaagctttcagaagtaaacccgatgcttggcttccgtgggtgcaggcttggtatatcgtaccctgaattgacagagatgcaagcccgggccatttttgaagctgctatagcaattgaccaaccagggtgttcaagtgttcccagagataatggttcctcttgttggaacaccacaggaactggggcatcaagtgactcttatccgccaagttgctgagaaagtgttcgccaatgtgggcaagactatcgggtacaaagttggaacaatgattgagatccccagggcagctctggtggctgatgagatagcggagcaggctgaa

SEQ ID NO: 263864 - DNA, 319 bp, Zea mays
tcggctgcatttatttgtcactgatcgttgatcagcctagctagctagcgctgttttcctgtgtgctaatggcgcccgttcaatgtgcgcgttcgcagagggtgttccacttcggcaagggcaagagcgagggcaacaagaccatgaaggaactgctgggcggcaagggcgcgaacctggcggagatggcgagcatcgggctgtcggtgccgccagggttcacggtgtcgacggaggcgtgccagcagtaccaggacgccgggtgcgccctccccgcggggcgtctgtgccgagatcgtcgacgggctgcagtgggtgg

SEQ ID NO: 263865 - DNA, 430 bp, Zea mays
ccctgagcaagatagacgggaatgaacttccccacatcatccctgctgtacccaaaggtcatctgcgtcaggtcgtggtgatcaacagtattattacagagccatgctatgtgaacattactagtagcagtgctcataaaagctacaatcccatgtcctttttttccccagtcatgtaaaacttccaaactgctccatggttcaaaactctgttcttcaatacatcggcaattatcgattatagacgaaggacatgttattgtagcttttatgagcactgcttctagtaatgttcacatagcatggctctgtaataatactgttgatcaccacatccaccatcatcaggcaatccgtttgccaatgttgaggcagccttttacaagcacctgtgctgctgtttgcctatcaatcttaacccttaaagggg

SEQ ID NO: 263866 - DNA, 240 bp, Zea mays
cggctcgagcgacaagccctacgggattgggggtcttgatcttcttcttggagcagacgacagcgaaggaggatgcgcggaaatgctgcgtctcgggatgctcaggcattcgcgtaaacgatgcggagaagctcgtgacgatcgccatgtgctgcgcgaaggtgagtggctgtcgctgaatgggtcgactggtgaggtgatctttcatagcctgggtggatgatgttagaaagctcgcga

SEQ ID NO: 263867 - DNA, 1594 bp, Zea mays
cgcccaagcgcgcggccaccaccaccccctctcctctcccgtcctatccatccggcacgcccagcatccatccactcctcccctgctccggctccggctccggctccgccatgggcctttcaacagtttactccccggccggaccgcgcctcgtgccggcccctctcggccgctgccgctctgcccagccccgccgcccgcgccgagccccgctcgccaccgtccggtgctccgtcgacgccaccaagcaggcgcaggatggcgtggcgacggcggtcgcgacggaggcgccagcgtcgcggaaggagtgcttcggggtcttctgcaccacctacgacctcaaggcggaggacaagaccaagtcgtggaagaagctagtgaatgttgctgtgtcaggcgcggccgggatgatatcaaatcacctgctgttcaaactcgcttctggtgaggttttcggacaagaccaaccaatagcacttaagctactcggctcagaaagatcgtttcaggccctcgaaggtgtagctatggaactggaggactcgctgtatccactgctgagggaagtcagcattggcatagatccttacgtggtctttcaagatgtagattgggcccttcttattggcgctaagccccgaggtcccggcatggagcgagctgcgctactggatatcaatggccaaatctttgctgaccaggggaaagcacttaatgcggtcgcctcgcggaacgcgaaagtcttagttgtcggaaatccctgtaacactaatgcgctgatttgtttgaaaaatgccccaaacataccggcaaaaaactttcatgcattgacgaggttggatgaaaatagagcaaagtgccagctggcactaaaagcaggtgtattttatgacaaagtatcaaacgtgactatttgggggaaccattcgacgactcaggttcctgatttcttgaatgccaaaattgatggaagaccagtgaaagaagtcattaaggataccaagtggttagaggaagagttcaccctcacagttcaaaagcgtggaggtgtgctcatccaaaaatggggcagatcatcagctgcatcgaccgctgtttcgatagtggatgctattagatccctcgtaactcctaccccagaaggtgactggttttctacaggggtttatacgactggaaatccttatggcatagcagaggatatcgtgttcagcatgccatgcagatcgaagggtgatggtgattacgaactagctagtgatgtgttgatggacgattttctctgggaacggattaaaaagagcgaagctgaattgcttgctgagaagaaatgcgttgcccatcttacaggagaggggaatgcattctgtgatcttccggaagataccatgctaccaggagaagtgtagtttagttacagaagcaacagcagcggaatgcatttgccaatacattagctgagacttgaaacatctgcttgccagatgcagcaactacttttatatatatatgtgtatattcaataattgtgccacacgaatttgactatgatgcaaacctcttacacaggtaagtcttttttttttccgtaaaa

SEQ ID NO: 263868 - DNA, 775 bp, Zea mays
cggacgcgtgggccaccttggtccatcagcagcgagcgaacaggcaaaaaggaaaggccgagaagcgctttatccggccgtacgtagcgataagagtggtgcacccgtagcggcacggcatggcggccacggcgtactccgtggcgctcctcggcggcgcacgcctgccggccgccttcctccctcgacgcagcagcgtgtgccaccaccagcttcgcctccaagacgcaccgaggctgatctccctgcaccgtgccagggccgcttccgaggacacgtcggcctccggcggcgacgagctcatcgaagacctcaaggcaaagtgggacgccgttgaggacaagcccaccgtcctcctgtacggcggcggcgccgtcgtcgcgctatggttgacgtccgttgtcgtcggcgccatcaacgccgtgccgctgctccccaagatcctggagctcgttggcctcggctacaccggctggttcgtctaccgctacctcctcttcaaggaaagcaggaaagagctggtcgacgacattgagaccctcaagaaaaagattgctggaacggcggaataagcgctagctctcgtggaaagctttagaaccaacgacgagaggggccgtttcttctttgcaaattaagatatctatcaaccgaggaacgtaccaatgcagctactggtcgcccatgtcattgtgtgtgatgcatagcataccttaccttctgtatccataacgaaatttaagaggagagaattttgccttgccagccgtttctc

SEQ ID NO: 263869 - DNA, 780 bp, Zea mays
cccgcacaagcagaggccgagaagcgctttagccgtagccgtagcgataagagtgagctagctggtgcacaccggcatggcggccacggcgtactccgtggcgctcctcggcggcgcgcgcctccccgccgctccgcgctccgccctcctccctcggcgcacgtctgccagcttcgcttccaagatgcaccgaggctctccctgctccgtgcgaaggccgcttccgaggacacatcggcctccggcgacgagttgatcgaggacctcaaagcgaagtgggacgccgttgaggacaagcccaccgtcctcttgtacggcggcggcgccgtcgtcgccctttggctgacgtccgtggtcgtgggcgccatcaacgccgtgccgctgctccccaagatcctggagctcgttgggctcggctacaccggctggttcgtgtaccgctaccttctcttcaaggaaagcaggaaagagttggccgccgacattgagaccttgaagaaaaaaatagctggaacagaataaacgctcatggaaagttttagagcgtcctttcttctttggaaagagatctattcgatcggagaaccaatgcaactacttgagtactattattgcccatgtattgtgtgctgtatatcttctgtatacaaaggaaggttcgtttgttatgtacgtagtagcattgtagtttaaatgtatcgtattacctatctgctaaattcttctttttgatttagcaattttattgtacgtaaacaaaaataagggtaaaacaaatag

SEQ ID NO: 263870 - DNA, 355 bp, Zea mays
cgcgtccgcccacgcgtccgcccacgcgtccgcatcggcagcgagcgaacaggcaaaaacgagaggccgagaagcgctttagcgataagactggtgcacccgtagcggcacggcatggcggccacggcgtactccgtggcgctcctcggcggcgcacgcctgccggccgccctcctccctcggcgcagcagcgtgtgccaccaccagcttcgcctccaagacgcgccgaggctctccctgcaccgtgccagggccgcttccgaggacacgtcgcggcatccggcggccaccagctcatcgaagacctcagggcaaactggggacgccgttgacgacaagcccaccgtcctcctgt

SEQ ID NO: 263871 - DNA, 339 bp, Zea mays
aactcatcggtcatcaccctccccggtggtcaccacaatgggagatgagatgagtgacggccggcgggcagacgggagctacgggccggagtacggccccgtccctcgtgagtttcagcacgcctggtaccctcagttgccatccaggaccaggaggaggtccccgtggcctctgcatcatggggattacccttggaggctttcggagcacaggttcagaagaccacctttcgagcgctccagttcctggcacccgttgcagccaccattccatatccaccgtgtccatggcaacagcggcagtggcgcgcccctaaacccgagacacaagcgaggaga

SEQ ID NO: 263872 - DNA, 547 bp, Zea mays
  unsure (1)..(547): unsure at all n locations
tcgcgctttaggatttcgcgctgagcacgggggagctggactacatcaacggagctgcgctggtgaggtactcgatcgcgggcaacttcctggggctgccagcgatcaccgtgcccgtcgggtatgacaggggagggctccccgtggggctccagttcatcggccgcccgtggtcggaggccacgctgctgcacctcgcctacgccatgcaggaggcgtgcgggaagaaggtgctccggaagcccaaggtgcactacgacctcctcaccaaagagtagctccagcgagcatcgatccggcagattgctctctatgaggcgcgcggttgctgattgcatgcacctctagtgtgattgattgtttgtttgattgattgagcttgtgatgagagagtgggggaagttgaatggaatgccgtcaatgtcggacaactctcaactaggagaagaaaaaaaaacatggttgccagcaccatgcatgtgcaccaccattcgttttttaatgtcgccctcattgaaaccttntgtgaagaaaaggaggaaanaaa

SEQ ID NO: 263873 - DNA, 357 bp, Zea mays
tggtcgggtatgacaggggagggctccccgtggggctccagttcatcggccggccgtggtcggaggccacgctgctgcacctcgcctacgccatgcaggaggcgtgcgggaagaaggtgcaccggaagcccaaggtgcactacgacctcctcaccaaagagtagctccgattcgtattgtgtcatgcatgatgctggcatgatgctggtgcacatgcatgatgctccgattcgtgtacttctaatgtgttaagatagagaccattcgtgtgccctcgatgtcgtcgtcattgaaacattatgcaagtattgtgtatagtgcgctcttcacgagaacacttgagaggtacgaaacaag

SEQ ID NO: 263874 - DNA, 431 bp, Zea mays
cccacgcgtccggtttcatcggaggtattgtgaggttccgccggcgtctcggcggaagggaaccacgatctgcatctcagtcgtctccccaagcaccatcgcctatcatggatgcctacaggcaccagttgcagccagcaaaagcaaacttacaagtgagctggttcctcccgcggattcaccagtaataaattatccaatgctttagacctagcaaagtgctacaaagaaaaggtcgtgcacatcacctacagcgaggcctacaaagcagctttttgttaatgacgttgattagaaggatggacgggctgactgtgctgcagccaaagctaggcttattagctcctgcaagctcactggaatagatagttcagaacaaataagtgacattttgcgtggcattgaaagaagagtgatactgctttggtcat

SEQ ID NO: 263875 - DNA, 653 bp, Zea mays
cccacgcgtccgcggaccgtggcaaacctaacgtaccctcttccgcgccgccatgtctgggaggaagaagacgcgggagcccaaggaggagaacgtgacgcttggccccgctgtccgcgagggagaacacgtctttggcgttgcgcacatcttcgcctccttcaacgacactttcatccatgtgacggatctgtctggaagggagacgctcgtccgcatcactggtggcatgaaggttaaagctgatcgtgatgagtcctcgccttatgctgctatgcttgcctcacaggatgtcgcgcaaagatgcaaggagcttggaattactgcattgcacattaagctccgtgctactggtggaaacaagaccaaaacccctggccctggtgctcagtctgctcttagagctcttgctcgatctggcatgaagataggccgtattgaggatgttactccagtccccacagacagcacacgcagaaagggtggtagaagaggaaggaggctgtaatttcgagtcctgacgtggtgccctgtcagatgtagcagttcaagtctgtctgcatctaatatactgagttattaggttttgtatcgattgaagttcggggctctgatgctacatactatttgcatgctcacatacgacattcaga

SEQ ID NO: 263876 - DNA, 420 bp, Zea mays
  unsure (1)..(420): unsure at all n locations
cccactcgtccgcccacgcgtccgcccacgcgtccgcccacgcgtccgagataggccgtattgaggatgttactccagtccccacagacagcacacgcagaaagggtggtagaagaggaaggaggctgtaatttcgagtcctgacgtggtgccctgtcagatgtagcagttcaagtctgtctgcatctaatatactgagttattaggttttgtatcgattgaagttttgaggagtgaactcttgaatgcttaccaatactcattcttgacatggcattcaacatagcagcacaattacaagaggccctactgactgtttgtctgtgtttgatcggtactggggagcggtgtcaacctatggtttcgggtgaccctaaaaatggacagcatgttcctgacttcctatggctttaatcntga

SEQ ID NO: 263877 - DNA, 820 bp, Zea mays
gttcttaggaagtggcctggacagtctaacaaccctagagattgtgtggtgtggagatctgagggcagttttccctttggacactgatgcccagagctaccaagatcatcggcgaaaccaggcaatcaccgtggaatttccttcccttgagcgtattcacttgcacgagtcaccgaagctgcatggcttatgtggccgtggaaggttgtacgcaccaaagctcgagagcatggtgatcaggggctgctggaacctcgcacgcataccatccgttggcgatggcggcgaccgcattaccaagaaggtgaagtgcgactgtgagaaggagtggtgggacaggctggagtgggacgggcttgaagaaaaccaccatccatccctatatgagccaactcatccaaaatattacaagaaaaccatgctcaggacctccgtgctcagatgagcattgctcatgcctaataatggtgatcgatatgggccatgaccagtgtgatgtgctgctctatatatgggccatgatctgtggtcaccagagtgtttgttcacagatttgaaaaacaacaagcaaaaccaaaacacacatgcagcggacgcgtgggctgtcagcataagagacgaaacgtccgtgcgctatgtgccgctcactagcaaggacgcccagttgcacgcaagctgagtgatctatcatgtcaaaaaaaaaagttatcctcacctgacaaggtgaggcattcaatcgaatcgctacccttgtaaatgtattaatcctactgtctcagtaaatgcgctggcttggaaataatgtaaatgatggaacatc

SEQ ID NO: 263878 - DNA, 1054 bp, Zea mays
cgtaagctcggtccaaatttctcttcggttcgtcgccctcgtccccactccccacctgcgcagctgcgctgcgccatctcgaatcctctccttccaccatctcgaacctctccttccgtctcctccccggccgattcctccagtctccagccaccttcaactgccggccgcaagtggccccgcgtctcacccctaaccccagtgaagaatctaggcgtcgtctatccagccccgtcatcatcaccatggaggagcatgggctgtggtccagcggggccagcgacaagaacaagtccatggttgagcagctgcagaggtacggggtcatcaggtcgaccaaagtcgcggaggtgatggaggccatcgacagggggttgttcgtgccacctgggggctcgccataccacgatagccccatgccgattgggtacaatgccaccatatcagcaccacacatgcatgcggcttgcctggagctactggagaagaatcttcagcctggaatgcgagctctcgatgttgggtcaggcactggatacctaactgcttgctttgcactgatggttggaccagaagggcgagcagttggtgtcgaacatatcccagagttggttgctacttctactgaaaacatcaagaaaagtgcagcagccccacatctaaatgatggatccctcagtatacacgtttctgatggcagggaaggttggccagaactggcaccctatgaagccatccatgttggagctgcagcaccgcagatccccgaggcgctgatcgagcagctgaagcccggcggcagaatggtgatccctgtcgggacagtcttccaggagctgaaggttgtggacaagaagttggatggcactgtcagcataagagacgaaacgtctgtgcgctatgtgccgctcactagcaaggacgcccagttgcacgcaagctgagtgatctatcatgtcaaaaaaatgttatcctcacctgacaaggtgaggcattcaatcgaatcgctacccttgtaaatgtattaatcctactgtctcagtaaatgcgctgg

SEQ ID NO: 263879 - DNA, 684 bp, Zea mays
ctgacttaggtgtgcacataacaacttagttgctgtgagctgtgttatagttcagatacattttaatagcacttatcctttttcttttattgactgaataaaggaacctgattcagctaatgaggttgtccaatactgctctactagcagggttttgttatattgcttgtcataccatgtggatctcccccatttgtgagggtcttgtcctcgtatgatgaaatttgctgcagctttagagcctgtttggttcgtggctaactgtgcacactttgcttaagtttagtcgtttaaattgaagaactaaccttagacagaaaagttagacaaagtgtggcaggttaggcagcgaaccaaacatacctttagtattccttagtctggcactctggccttatgtgcattcagcattgttggttgttctatatacccttaacacttgatgcaccaagagatgtttaaaatggatgcagatggcagggaaggttggccagaactggcaccctatgaagccatccatgttggagctgcagcaccgcagatccccgaggcgctgatcgagcagctgaagcccggcggcagaatggtgatccctgtcgggacagtcttccaagagctgaaggttgtggacaagaagttggatggcactgtcagcataagagacgaaacgtctgtgcgctatgt

SEQ ID NO: 263880 - DNA, 449 bp, Zea mays
cccacgcgtccgcccacgcgtgcgcccacgcgttcgcccacgcgtccgcctatcaaaaaccgagctagggttttagggggagacagagaagcagagggaggctccatggacaaccccgagatgcagcgattcattcagaaagagcagcagaaggcgatgatgaacgagatggtcggcaagctaacgagcgcgtgctgggacaaatgcatcaccagcgctcccgggagcaagttcagctccggggaatcaacctgcctgaccaactgcgctcagaggttcctcgacatgagcgtgctgattgccaaacgcttcgagatgcagtgaggcgtcgtcactcgaagctgttgcctggtcaatcgccctaagcttttcctttgatttgaggttccattgaggactttcggacgattcaacacaagagtttagtgtattttttttatgtcttaccc

SEQ ID NO: 263881 - DNA, 1404 bp, Zea mays
gcgtgatgtatggtctgtattcagcctaactaatttgccagcgagtgatgcggtgacgtgctgctgctgttgtagtaggtggtggagcaagcccagtccccaatcccaccctgccacccaaccttgcttcttctccgatagctatttctctgctttctctccaatcttcccgggtttccctgattaaagatggctgaatcctttgttctcaataccggctcgaggatcccatcggttgggcttggcgtatggcaaatacaacctgacgctgccaacgacgccatctacgctgctgtcaaggctgggtatcggcatattgactgtgcagcagcatacaacaatgaggaggaggtgggcctggctttgaagaaattatttgaagatggtgtggttaagcgtgatgatttgtttatcacctctaagctatgggctgctaatcatgcacctgaagatgtggaagagggaatcgacaccacacttcaagatttgcagcttgactacttggacttgtacctcatccatggtccaatccgcatcaaaaaaggaactagcacgatgacccctgaaaactttctccctacagatatccctgctacatgggcagcgatggagaagttatacgactctggcaaagctcgtgcaatcggcgtgagtaacttctcttgtaagaagctgcatgatttgcttgccgttgcacgagtgcctccagcagtcaaccaggttgagtgtcatccggtttggcagcaagacaagctccggaagctatgccaatccaatggtgttcatctttctgcattctcgcctttaggctcacctggatctccttggatcaatgggccaagtgtcctcaagaaccccattgtggtctctgttgcagacaagttgcagaaaacgcctgcccaggtcgctctacgctggggaatccaaatgggccatagtgtactcccgaaaagcgccaatgagtccaggattaaggagaacattgacatatttggctggtctattcctgaagatttgatggccaagttctctgaaatcaaacaggtcaggctgctgacagctgagtttgtagttcaccctcaggccggctacaatacattggaggacttttgggatggtgaaatataaaagcatacaaatttgttcagaataaaagagccaggcgaggaaacaaccacaaaaaaggggagatcgaatgcataggccccaatacgatgaatttgggggtttacgtgattgctgaacacaagtattgtgtgactaatctgtgttttgatgtggtaaatgtaattgggttagtcacaataagagataagtgtctttgccacaagacttttggttcattggttgaagcatgatgtaaaccgtaaaggatattcatgaaaactaaggacgctatagagc

SEQ ID NO: 263882 - DNA, 439 bp, Zea mays
ggtagctggcaccaggagccgtgggcaagggaagaggccacaccctgccctgctctgcggcagccagaatgggtgtgaaggcgtctcaaacaggctttgtggtcctggtgctgctccagtgctgctctgcatacaaactggtctgctactacaccagctggtcccagtaccgggaaggcgatgggagctgcttcccagatgcccttgaccgcttcctctgtacccacatcatctacagctttgccaatataagcaacgatcacatcgacacctgggagtggaatgatgtgacgctctacggcatgctcaacacactcaagaacaggaaccccaacctgaagactctcttgtctgtcggaggatggaactttgggtctcaaagattttccaagatagcctccaacacccagagtcgccggactttcatcaagtcagtacc

SEQ ID NO: 263883 - DNA, 548 bp, Zea mays
gagaaacagaagaggaaaaggaatccatggcggcgacgctggcgaggagggcggggcgctccgcggcgacgacgctatggggcgcggcgaggggcttcgcatcggtggggtccgacatcgtctctgcggctcccggcgtgtcgctgcagaaggcgcggtcctgggacgagggcgtcgccaccaagttctctaccacgcctctcaaggacatcttctacgggaagaaggtggtcatcttcggcttgcccggtgcatatacaggggtttgttcacaagcgcacgttcctagttacaagaagaatattgacaagttgaaagcaaaaggaatcgactctggtatctgcgtagctgcgaatgatctcgtatgtactggatggatgggcaaaaaagctagacgctgaagatacaattgagttctatggcgactatgatgggagtttccacacacgcttggatatggagatagacctttctgctgctgtgcttggccgccgatctcacaggtggctcgcctttgttgacgatggtaagatcaagtgtttcaatgt

SEQ ID NO: 263884 - DNA, 936 bp, Zea mays
acagatttttgtggagaggttgagcgtgttcttaacatggtggaaggagttcttctagtggttgattctgtagaggggcctatgccacagacaatgtttgttcttaataaagctctagaatttgcacatgctgttgttgtagttgtaaacaagatcgacagacctactgctcgtcctgagtttgtggtgaattcaacatttgaactatttattgaattaaatgcaactgatgaacagtgtgatttccaaacagtctatgcaagtggaattaaaggaaaggccagtctatctcctgacaatttagctgatgacctaggacccctttttgaggcaattcttagatgcataccagagccacaccttgagaaagatggtgccctgcaaatgcttgtatctaatactgattatgatgagcacaaaggaagaattgcaattggacggctgcatgcaggagaacttcagcgtggcatggaggtcaaggtttgtacaccagacgatgcttgcacggttggtaaagtgagtgagctttttgtttatcagaacttcagccgtgcccccgttgaatctgttagtgctggtgacatttgcgctgtatgtggaatcgatgatatcatgatcggggaaactattgctgataaagttacaggaacaccattgcccactatcaaagtggaggagccaacagtcagaatgtctttctccatcaatacatcaccttttgttggacgggaggggaaatatgttactagccgaaatctccgtgacaggttgtatcgcgagctcgaaaggaatttggctatgaaagtagaagacggggaaactgctgatacatttcttgttagtggcagaggcacactacatctcacaatattgatagaaaatatgcggagagaaggatatgaatttatgattggacctccaaaggtcataaaacag

SEQ ID NO: 263885 - DNA, 587 bp, Zea mays
cggacgcgtgggcgcccaccagtggtgtccattcacgcacctagggttttcgcgccgccgccgccgccgccgccgcagccgcaacaatgccgtcgcacaagaccttccggatcaagaagaagctggcgaagaagatgcgccagaaccgccccatcccctactggatccgcatgcgcactgacaataccatcaggtacaacgccaagcgcaggcactggcgccgcaccaagctcggcttctgagcgtcgggattggccggctgctgcgtcggaaggctagggtctaagagctatcttccttctgttttatcaatgtgtcagtttttctgtaagctagcaagtgttgctatgacgcttttattaagattctggtgagcggtgatgttaagagaaaattggcactactgtggtgtaccccaagattccttgcagcattgctatgctaagtaaagaaccctttatcttattatatatgtaaaaaaaaaaaaaaaaaaaaaaaaaaaaaaaaaaaaaaaaaaaaaaaaaaaaaaaaaaaaaaaaaaaaaaaaaaaaaaaaaaaaaaaaaaaaaaaaaaaaaggggcggccgc

SEQ ID NO: 263886 - DNA, 484 bp, Zea mays
ctcctcatcctcggccgccgccgccccgagtgtctcctcctccgccgccgccgccgccgcttccgtcgtctccgcccgccgaggccatgccgtcccacaagaccttccggatcaagaagaagctggccaagaagatgcgccagaaccgccccatcccctactggatccgcatgcgcaccgacaacaccatcaggtacaacgccaagcgcaggcactggcgtcgcaccaaactcggattctgagcggtggaagaaatgctggctaacgacgcttggggggtatagggctctgcaagctaggaagctcttgtttaattttttttgcttgtgttatttgtcattgtagtaccatgttttgtctgatggttaaagaaccgcctttatgctatggtgaatttatttaaccttgcagcgccttaatcagttgatctctagccaattatttttccagtttgctatgcttctctgattgtacatggttgtct

SEQ ID NO: 263887 - DNA, 528 bp, Zea mays
ccgcgtacgtagctcgcctgctcgccgccgccgccgtcgctccgtcgtcgccgccgcttcgtcgtctccgccgcagcgatgccgtcgcacaagaccttccggatcaagaagaagctggcgaagaagatgcgccagaaccgccccatcccctactggatccgcatgcgcacggacaacaccatcaggtacaacgccaagcgcaggcactggcgccgcaccaagctcggcttctgagcgcgcggatcggccggctcctgcgtcggaattctagggtctctacctttcctttggttttatcgatgtctcttgtgtttctgtaagctagcaaacagttccagaaagcttttgttaagattttgatgacgctaagaggattgatgctactatgctgtactcaggattccatgctgcattgcgatgctaaattaaagaacctctgttaccttactttatgtgtagtgttgcagtgattggagccctagatttgatcactgggtcagttccgatgcatggattgtggtgtctctc

SEQ ID NO: 263888 - DNA, 338 bp, Zea mays
caagaagctggccaagaagatgcgccagaaccgccccatcccctactggatccgcatgcgcaccgacaataccatcaggtacaacgccaagcgcaggcactggcgacgcacgaagctcggcttctgagcggtgcgagagatgtatggccaacgatgcttgtggaggatagagctctgcaaaagctaggaagctcttgtttaagattttgttgtgttaaagggagctgactgagaatattgtcctctctgatggttaaagaacggccttttatgttatgctgaatttatcgtgcctgcattgccttaatcagttgatctcgagctgatggttttgcctt

SEQ ID NO: 263889 - DNA, 444 bp, Zea mays
gagctcgttttcttttcctctaggcagagaagaggcgatggcggcgatggcatctctcggcgccctggcgctgctcctgctgtccagcctctcccgctgctcagccgaggcctgcctggagccccagatcaccccttcctactacaccacttctgacgctgtcatttccactgagaccgtcttcattgtggagatctccctgacatgcaagaacagggtccagaacatggctctctatgctgacgtcggtggaaaacaattccctgtcactcgaggccaggatgtggggcgttatcaggtgtcctggagcctggaccacaagagcgcccacgcaggcacctatgaggttagattcttcgacgaggagtcctacagcctcctcaggaaggctcagaggaataacgaggacatttccatcatcccgcctctggttacagtcagcgt

SEQ ID NO: 263890 - DNA, 807 bp, Zea mays
ttctcgtccaagggcggaggagccggaagcggtggcagaggcggcacgccgggttggatgacgccgcgcagggcggctggttccgcatgttctccgtggcagcgtacaagccctacttcgacgttgacacctctgacgttgtcgagagaatctgggagtccgtcttccccttccgcggcacatttaccgagaagacctccgagaaccctgacctgtatgggccattttggacatgcaccaccctgattttcgttgctgcatctattgccacttttgtcacctacctatctcacaaatggcacaagaaggaatggaactatgatatcaacttgtgttacctggtctgctggcttattctatggctacgtgacctttgttcctcttcttctatatgttattctcaagtacttctcagctcctgctggtctagtgcaattgtggtgcctatacggatactccctgttcatcttcattccagcatcgcttctgtctattgtgccaatagaaatattcagatgggtgattgctggtgttgctggtttcatgtctgctactttcgttgctgtaaatctccgcgcgcacattgtaaactctggcgagcgatggttcctgatcgttgcagggatattcctgttgcagctggggcttgctgttttgctgaaactctatttcttcacgataactgtatagggttatttacatctaatgatcgtactagtcaagaatacacaattttccatgtggaatcacttccatgttcattgaacattgatgtaatttttccatgtatacaacgtgttgagcacc

SEQ ID NO: 263891 - DNA, 1003 bp, Zea mays
cggacgcgtgggttctgttgcaactggtcccctttcaggtggttttgagtttgcgacccggctggcgagcgatctctttgctcgaggtagaaggcatttagatggatcatcagatgctatggatgaagttgagtctcactggtctaatgagatctcagaaattggtgatgacattgataagtgtaataagaatcatgtggaatcaccagagcatgctgcagtcatagaaaatgattcttctgtcgagaagtctgtagatgtggttatggctgataatcctgtacattctgaatgtttcaaacactttgatgttctgcaatgtcctccagaccaccactaccttgaaaacacagcccagggcacgggtggaagaaagtgggtcaaaaaggtacaacaggaatggagcatacttgagaagaacctaccagactatatttatgtcagggcctttgaggatcgcatggatctcttgagagccgtgattgctggagcaagtggaacaccctaccaagatggcctgttcttctttgatttctaccttccacctgagtatccggaagttcctccgtcagcatactaccattctggtggtttgcgtgtaaatccaaacctgtatgtggatggaaaggtttgcttaagtctcttaaatacttggaccggcagagggaacgaagtgtgggacccatcatcatcaagtattctacaagtactggtttcacttcagggattggttctcaatgaaaaaccctattttaatgaggctgggtacgagaagcaagttggtactgttgaaggggagaagaatgcagtgccgtataatgagaatacgtacctgctgagcgtgaaatccatgctgtatatattgagacggcctcctttgcattttgaggattttgtgaagagccatttccgcaagcgtggccactacattcttaaagcctgtgaggcatatccgggaggaaaagtagtggggactttcactgacatcgcatgctccaccaac

SEQ ID NO: 263892 - DNA, 830 bp, Zea mays
tgtaaagctggaagaggacgaagcaccactattgtattgtgctacttgattaaatacaggaacatgacccctgaagcagctttggatcatgtacgatccattaggcctcgagtgcttttggcaccctcgcagtggcatgctgttaattcatttggagctctcaccggtggacaacttccagtacggagtacaaacctggcctgtttcctagaagccattgaagctggctgtacgaacacaacaggaaatgatgattaccacgtgatggagtttgactgcgaagatagtggcttaccactttatcaaattatgctacctaggccagccagccccactgggtctgggtgcaccgatgcagtcctcgtaacagaagcagatcttgagggctatgatacttatattggtaccaggaaagatgcggtgtcgttggaagtagccactcgcagtcccatcatgaggagattgtcctgcctctttggctccctcaaacttagtaacagcaactgtgagccagcttcaagccggttcactgaggttcgcgcctgctaggtaggtagtgtcttcctccagttttccatgctgcatcaagagtgtatctctagataggcaggcaatcatccaaaaaggatttgtagaagcctgtgttcatttcatggccatggggcagtgccatcgggaagaaagttgtgtgcatagccagaggggttgtttagttttcattagagtgtagagctgtgaacgcgtcgaatatccttgttttttcttgagagcatgtgatttattgcaatttgcatcattgttcccttgaaataccataagtcttctttccc

SEQ ID NO: 263893 - DNA, 629 bp, Zea mays
ggaaccgtgcttggatattattctgtcatggttctgccgtcaaaaactgccattgcaccggtcaacgaaacattcctacccaggtctgacgatgaacgtgaaatgtgtgcaaggactatctactgcacaaacattgacaagaaggtcactcaagcagatctaaagttattctttgagtccatatgtggtgaggtctttcggctgaggttgcttggcgactaccatcattctacccgcatcgcttttgtggaattcgtgatggcagaaagtgctactgccgctctcaactgtagcggtgtggtactgggatccttgccaataagggtgagcccgtccaagacgcccgtgcgtccccgcgcccctcgccagctgatgttgtcctaggtgtacatacaggaggtgctgacgatgccactgctcatatataagtaatagagatagacatgtatgaaaagggtcttttgtttttaagttgtgggctcggccttttttttctctctccttgattcaccgttggtcgaggctgttctttttttttaccttccacatagaggagagcttcttactaagaaggaagaatgaagaaggaagcgcgtggtttttttttttttttttaccttgatgctttt

SEQ ID NO: 263894 - DNA, 1007 bp, Zea mays
  unsure (1)..(1007): unsure at all n locations
atttgaagtattaggcacatgaaaattttagaagttaactaggagttaaattaggattcttgctgttgggactgtatgaccagttttagttaggcaactagtcgatgaggtaaatcttgtacaacattgcatagatttctgtgcagtgtgctgcatgaccagtgtgcggcagtgcgtgggcgcgcaggcgagcgaatgcgtggtgctgcaggagttgaagttgcagtccttcatgcagggagacttcttgcacagtgagagatctgcagcatgctgatggtagtccatcatttctggagaaggccctgaagttcattgaagatcatggggtaaaggtagagggcatcctgcgtcagtctgctgatgttgaagaagtcaaacgcagaattcaggattatgaaaaggggaaaaacgagttctctccagaagaggatgctcatgttattggtgactgtattaaggaagtgacaaggcaagaagactttatgagataagtagggtgatatatgaagttttccctgaaccaaatcgatactatgtagcctatgatggctggggaaacagggaagagtgtgcggcagtgcgtgggcgcgcaggagagcgaatgcgtggtgctgcaggagttgaagttacagtccttcatcagatagacgtcttgcacaatgagagatctgcagcatgctggtggatttcagagagaccggagaaagcttcatgtcgcttctagacgaatgatggaatgagcagcgaaggttactgaagaaaacctcgcaacactatttataaattgcggacaggttgtggactgtcgcatgtgtggggacccaaattcagtccttaggtttgctttcatagagttcacagatgaggtctgacgatgaacgtgaaatgtgtgcaaggactatctactgcacaaacattgacaagaaggtttggtacctgcactcatgctactaccactaggtattcattctgtcatggttctgttttaatacacgcangtcact

SEQ ID NO: 263895 - DNA, 1062 bp, Zea mays
ccgggaacaagggccccgacgtgcccatcttctcggtgcagcagccgtcgttgctgcacgacttcgccgtcacggagcggtacgccatcttcccggagatacagatcgtcatgcagcccatgggcatggtgacgggcggcgcgcccgtggggtctgactccggcaaggtgccccggctcggcgtgctcccgaagtacgccacggacgagtcggagatgcggtggttcgaggtgccgggcttcaacatgatgcactcgctgaacgcgtgggaggaggccgacggcgaggagctggtgctggtggcccctaacgtcctgtccgtggagcacgcgctggagcgcatggagctcgtgcactcctgcgtcgagaaggtgcgcatgaacctgcgcacgggcgccgtgtcgcgaaccccgctctcggcgggtaacctcgacttcggcgtgatccacccgggctaccttggccggcgcaaccggtacggatacctcggcatcggcgaccccatgccgaagatctccggagtggccaagctggacttggaccgcgccggcacgggcgactgcacggtggcgcggcgcgacttcgggcccgggtgcttcgcgggggagccgttcttcgtccccgacgacgtggagggggacggcaacgaggacgacggctacttagtgtgctacgtccacaacgagcgcaccggcgagaaccagttcgtggtgatggacgccaggtcggcgcagctggacatcgtcgccgaggtgcagctgcccgcgcgcgtcccctacggcttccacggcatctttatcacgcaggccgagctccaggcgcagcagcaatgatcaaagcacaggaatccaatccaagagaaacacgccgctggatactgaatagattgtagcaagaacaactctaggccacatagcattcacgaatacgaactatcttatattgcaaatgtagcagaacccaaagaaagggttcatgagtaaaaagtatatgaaatcacaaagattttatgggtcaaaaaaaaaaaaaaaaaaaaaaaaaaaaaaaaaaaaaaaagggcgg

SEQ ID NO: 263896 - DNA, 419 bp, Zea mays
cgagcgcaccggcgagaaccagttcgtggtgatggacgcgaggtcgccgcagctggacatcgtcgccgaggtgcagctgccagcgcgcgtcccctatggcttccacggcatgtttgtcacgcaggccgagctccaggcgcagcagcaatgatcaaagcaccgaacactcgtccagtgtttacgtgctggggatctgtagcacatgattccaggagaaacacacacaaacacccatcaggtgcatactgaatagattgtagtaagaacaactctaggccacatagcattcacgaattatattgtagtgtaaatgtagcagaacccataaaagagttcatgagtagaattgatacgaaatcacaaaaaaaattattgggggcgaaaaaaaaaaggacggccgctcgcgatctagaactagt

SEQ ID NO: 263897 - DNA, 730 bp, Zea mays
cccacgcgtccggcgacggcgggggcgataatcctggcgtcccagctactgccgcccggggcgagtagcgccgccggcacgttcgacctgcagctcatgctgccggagaagtccagcgaggaggccaaggccgtggtgcggatccacgcgcgcaacctgctgggggtgaagcgctatatagacgccggggcgtggcggaagctgcacgcggctctgcgctccaatgcgtacaacctcaagcaggacctgtacgccatcatacaggcgaggcccacggggcagcgctctgagctccgcaggctctactccgacctcttcaacagcgtcaccagcctggattacgccgccagagacaaggacgcgctccaggtgcaggagcactacggcaacatcgtctccgctctcgatgagattttctccaagatcacgtaggatactcagaaatctatatttccagttcggggatacaaaggcggagcacggataagagagaactaggaacttagatcacgttcacatgaaggaagaactagcagcacatggcgacaggcaaaaaggatccttcttgctatgtagcgacattttttttcttctagagagaactatttagctagttcttgtgagcttcctccgctacatctatttaccctactgtctgaaggggaaaccagaaagaatcacagttttttacaggtgcagcaaggccacaaaaactgaagttcctaaaacc

SEQ ID NO: 263898 - DNA, 1557 bp, Zea mays
ggacaatcttccttcagctgtcggggcgcggcccacccctccgtcgtctccaccattccgccgttcccaccacgccactcgccagttcgtcactccctcctgtctccccccttgccgagacggcgcggacgccccgtcgcccaccccgatggcttccactctcctccacgccgccaccgcctcgctccagagctcctcccagcccgcacgcgcgggcgccgccaccgcctttcaccccctcgcgtccaccccatccatacgcctcgcgcgctcctcgttctcgtccaatcgccgcctcgaggtttcactccgggcggtttcggccggtcaccggttcgcggggaggggagcaccccggggccgccgcgtcgtcgccgccctagcaggggagcaaactgagggttcagaggtgggcgatgacaaggataacagcaacggggagataaagcccgaggaggctcaggaagcttggaaggtaatgctggagcagttcaaggctgaggccctgcggatgcaggccctgtcaatgcaggcgtatgatgtctactccaagagggcgagggaggtcttgctggaagcctctgagaagctgaagatacaggcagacaaagcacagaaggacctcagcgtgatcgctaccgaggttagtcaggagggacaggaatatctggtgatggcagctcggaactccccagactcgatcaaggatattacaacaacgttcagggctcttggaagattgaattggccatcagagtatgaggattatcatgtgggcattccgtttggtacctttcttacagtagggggtttcctcaacttcatgttgactggaagtacctctgctcttcgttttggtattgttcttggccttgcactgttgactctgggtatctcaagtttgagatcacatagagatggcgaccgtcggcctcgtcttctggtgaaagggcaagctgcaatagccagtgtcatcttcttcagggagttttcagttcttctccagaatggctggtttccaaaaatcttcatggttctcctcagtggagtagtggcaggcttttacttctatcgcattgcagctggtagccccaaagagctgagcagcaacagtgattcagtgaactaatgcacttggatgaatcagatgatcatgggggaacgcagacccagaaggctatggcctgtttgctttcgatttccttcatcatccttcaattcaggcaaagctcggttgtaaggtgtccgcatgatgaccacatggattcagaagaattgcttgtttactcggccctcttcccgcactcctttgttcctttgctcatgtagtatagatgatagacttgaacaacatcaataaacgacattcaaaggccatgcagttagctcttcagtttgtctgctgtttgtttttcatggggacagcccgaaaggtcggtgaagcgttcaatgtttcgtgaagtgtccgaaaacagtcagtgttattactctgtagattccagctcgctcaaaactattcaaggccgatgacaagttgataacaaaaaaaaaacaaaa

SEQ ID NO: 263899 - DNA, 606 bp, Zea mays
aaaaatcttcattgttcttctcagtggagtggtggcagcattttacttctatcgcattgcaactggtaaccccaaagatctgagcagcaagaatgattcagcgaattaatgcttaaatcgtatctcatgcagcactgggacgagtcagatggtcagtgggacgtagacccagaagattatggtctcttcctttccattttcttcatcggccttcaattgaggcaaagctcggtcctagcgtctaagatgtctgcgtgatgatacatggattcaaaagaattgtttgcttatctggcccacttcccgcactcctttgttcctttactcgtgtaatatactaagatgtcaggcccgcttaaacaacagtaataaacgaccttcgaaggtcatgtagttatcagttcagtttgtctggtgtttattgcatggggatagaagtgattaagtgaagcgttcaatgtttagtgaaatggctgaaaacaatcagggttagtattatgtaccttctcgtttgctcgtaaacaaacagatgataagttgtaaagggtacctgcagtggtacgatctagttgtttcctctaactctaagttaacctcttcgatggc

SEQ ID NO: 263900 - DNA, 1316 bp, Zea mays
tgtcctcccacgcgtccgcccacgcgtccgcccacgcgtccgcccactcccactctccctttccactctcaggctcccactccccccctaccggctaccctacccatcacacacaaacagccactcctcacctcccccgtcctccggttcatgtcctgctgctccccatgtcgcccccactcgacctcgactacataggcctctcgccggcggcggctgccgccgctgcccacgacgacctgaagggtaccgagctccgccttggtctgccggggtccggttcgccggaccgccgtgttgtggctgccaccgcaaccaccctggacctgctcccggctaagggcgccaagcgcgggttttctgacgaggcgccgacgccatcgcccggtgcagcttccgggaagggaaagaaggtagcggaagaggaggacgacaagaaggttgcagcgacgccgcagccggtcgcaaaagctcaggtggtgggatggccaccaatccgaagctaccgcaagaacacgatgtctaccacccagctgaagggcagcaaggaggatgctgaggccaagcaggaccaggggttcctgtacgtcaaggtcagcatggatggcgcgccgtacctcaggaagattgacctcaagacttacaagaactacaaggacctgtcgactgcgcttgagaagatgttcagtggcttcagtactggcaaggatggcttatctgagtaccgcaaggatggtgaatatgttctgacttacgaggacaaggatggagattggatgcttgttggcgatgtaccatgggagatgttcgctgactcttgccgcaggctcaggatcatgaaaggatcagatgcaattggacttgctccaagggcagctgataagtccaagaatcgcaactagaatggttgcttcttacagtccagagcaagagggagatatccagtgactgtagggatctttgtggaagccggaaaacgtctaacagtttcaagaagaattctgccttatggtctgtaccacatgtttttgctgctacgcaagtaaagaactccacgtctgtcaatgttagttttacaacatcgtctacggacaaaaaaaaaaccccccgctatttgattgttgctaagccttcgtacgacgtgtaaatggtttggtacaatgagtgctgcgactacgattgagcacccctctacctagtttgcaaaaaaacagtgtcccatggactgtctgttgtccctctatataaatgtccaatgaagcttgctaaaaacagaaagtagaataacacaggtcatgataaaataaagggcggcc

SEQ ID NO: 263901 - DNA, 582 bp, Zea mays
cggacgcgtgggccttcaaacaaatcactcttcgctccggctccgactcgcactctttccccttcccttcccttcccactcccaggctcccactctcaccccttccgcctacccacgcaaacggcacacgaactaacagccacctctcacgtcccccaccctctggttcatgtcctgctgctccccatgtcgcctccactcgagctcgactacataggcctctcgccgccggcggcagccgccgccgctgaaaacgacgaactgaagggtactgagctccgcctcgggctgccagggtccggttcgccggaccgccgtgttgtggctgccaccgcaaccaccctggacctgctcccggctaagggcgccaagcgcgggttttctgacgaggcgccgacgccatcgcccggtgcagcttccgggaagggaaagaaggtagcggaagaggaggacgacaagaaggttgcagcgacgccgcagccggtcgcaaaagctcaggtggtgggatggccaccaatccgaagctaccgcaagaacacgatgtctaccacccagctgaagggcagcaaggaggatgctgag

SEQ ID NO: 263902 - DNA, 881 bp, Zea mays
cccacgcgtccgcccacgcgtccgcccacgcgtccgcccacgcgtccgcccacgcgtccgccctctttacgccatcgcccggtgcagcttccgggaagggaaagaaggtagcggaagaggaggacgacaagaaggttgcagcgacgccgcatcctgtcgcataagctcaggtggtgtgatgtcccccattccttttttactttaagaactctttgtttactacccttctgttggtcttttatgtttctgttctttctcgattttaattgtaggattccctatgctttctttattttggtccttttttcttttcttctttaattttgcaccttttgtttgaacttactttccttgtttctcttttctttatctttatatttttgcttttctgtatccatttttttctaagtttcagtcttttttttttttttgttactttttccacttattctttgtttgttccttttataagttttctttttctaattttttctatttttttcccttttctcttcttctctttttcttctctcttcactcttgtttaattttcttcttttcttgattattccttttttttttttcttttcttctttttctttttttatttttttccttattttcttttttctttatttcttattttttctcctcctttttttatttttgtcttacctttttttcctcttatttccttttctcttttttcttcatttctttatttctctttttacttttctttttctcccttctctctatttcatttttttcttcttcctacttctttttcttttttcttctttctttaattttttttttttttctcttttttctttttctatcttactttatttctctctcttttttcttttctttctttt

SEQ ID NO: 263903 - DNA, 447 bp, Zea mays
  unsure (1)..(447): unsure at all n locations
accggnnccggaattccgggtcggaccaagccgtcgggcctttttgcgccggcggcagccgccgccgcctgaaaacgacgaactgaaggggactgagcgccgcctcgggctgccagggtccgggtcgccggaccgccgcgtcgtggctgccaccgcgaccaccctggacctgctcccggccaagggcgccaagcgcgggttttctgacgaggcgcccccgccatcgcctgttgccactgccggaaagggaaagaaggtggcggaagaggagtacgaccagaagaaggtcgcggcgaccccgcacccggccgccaaagcacaggtggtgggatggccaccagtctgcaactaccgcaagaacacgatgactaccacccagctggagggcagcaaggaggatggtgatgccaagcanggtcaggggttcctgtacgtcaaggtcagcat

SEQ ID NO: 263904 - DNA, 1293 bp, Zea mays
cccacgcgtccgcaacacaataatacagcaaaggaggctagcagaagtgcaggattaataagctaagctagtagaaattaagcaaagcataggcacagccatggctacctcctctggttcttgccttattattagcctgttggtggtggtggtggcggcggcgctgtcggcctcaacggcgtcggcacagctgtcgtcgacgttctacgacacgtcgtgccccagcgcgatgtccaccatcagcagcggcgtgaactccgccgtggcgcacaggctcgtgtgggggcgtcgctgctccggctccacttccacgactgcttcgtccaaggctgcgacgcgtccattctgctgaacgacacgtccggggagcagacccagccgccgaacctaactctgaacccgagggccttcgacgtcgtcaacagcatcaaggcgcaggtggaggcggcgtgcccgggcgtcgtctcctgcgccgacatcctcgccgtcgccgcccgcgacggagttgtcgcgctcggcgggccttcgtggaccgtgcttctgggcagaagggactcgaccggttcgttccctagccagacaagcgacctcccacctccgacgtcgagcctccaagcactgttagccgcgtacagcaagaagaacctcgacgcgaccgacatggtcgctctctcaggcgctcacacaatcgggcaggcccagtgctcgagcttcaacggccacatctacaacgacacgaacatcaacgcggccttcgcgacgtcgctcaaggccaactgccccatgtccggcggcagcagcctggcgccgctggacaccatgaccccgaccgtgttcgacaacgactactacaagaacctgctgtcgcagaaggggctgctgcactcggaccaggagctgttcaacaacggcagcaccgacagcacggtcagcaactttgcgtccagctcggccgccttcaccagcgccttcacggcggccatggtgaagatggggaacctcggcccgctcaccgggaccagtgggcagatcaggctcacctgctggaagctcaactcgtcctaataattaaggacggacgtccgatagacgatcctgcgcaatcgtatcgtacgtgcatgatacgcatacatctggaaactactataccaatgcaaacagagatctatacgtacgagtatgtataacgacgagtgatgtttgtatggatctacgtatgtaacaaggacctctcgtagcgcaaaggcgcgcgttgggagattaattaggtacacaagctattaccacattata

SEQ ID NO: 263905 - DNA, 931 bp, Zea mays
caactcttctcgccatttcaccaccgcctccgcccccatcctctccccctcccgtcgcgccagtcaacagcctgtctgcctcttccctcgccacccatggccaccgtagcgcgcaccctcgtcgccgcatgcccggcacgctctctcctccgcttccggtctcggcgcctcccgtcctcctcttccatccgtcccgcgcggcaacgtgccggcgtcgggtctgtccgctgcatggctcggcgaccggattcctcctattccccgctgcgttcggggcagggcggtgaccgtgcaccgactgaaatggcgccgctgttccctggttgcgattacgagcactggctcatcgtcatggacaagcccgggggggagggcgccaccaagcagcagatgatcgactgctacatccagaccctcgccaaggtcctcggaagtgaggaggaggcgaagaagaagatctacaacgtctcgtgcgagcgctatttcgggttcgggtgcgagatcgatgaggagacatctaacaagctcgaggggctccctggtgttctctttgtgctaccggattcgtatgttgaccctgagtacaaggactacggagctgaactgcttgtcaacggtgagattgttcagaggcctcctgagaggcagagaagggtcgagcccgtgccacagagggctgcagacaggcctaggtacaatgacaggacccgctacgcacgcaggagggagaaccagcgatgagatgaaaaaagtccacaataacaagttcaggtggtttgagctctgtaattcaaggatagtgtgctttggatgtattgtactctgtaactacagttactcagattgctcaaaggacctggtttggaatgcatgcactgttactaaaaaaaaaaaaaaacggacggtgggtcgacccgggaattcaagaccg

SEQ ID NO: 263906 - DNA, 986 bp, Zea mays
cgcccggccagggttttgccaccatggccgccgccgcggccgccgcccggaggctcctctcccgccgcgcctcctcgaactcgctctccgcgttcctccgccgcggcgctgccccggagcagtcgctgctgcgcccggccgtcgtcgcggcggcctcccgcctcggcttcccgcgcgggatggcgcggcgacctggcggggacggctacggcgcgggccgggaccgcgcgcccacggagatggcgccgctgttccccggctgcgactacgagcactggctcatcgtgatggacaagcccggcggggagggcgccaccaagcagcagatgatcgactgctacatccagaccctcgccaaggtcctcggaagtgaggaggaggcgaagaagaagatctacaacgtctcgtgcgagcgctatttcgggttcgggtgcgagatcgatgaggagacatctaacaagctcgaggggctccctggtgttctctttgtgctcccggattcgtatgttgaccctgagtacaaggactacggagctgaactcttcgtcaacggtgagattgttcagaggactcccgagaggcagaggagggtggagcccgtgccgcagagggcagcagacaggccgaggtacaatgacagaacccgctacgcacgcaggagggagaaccagcgatgaactgtgcgataaaatcataaaaaagaccacagcaacaagtcccaggtggtttcagctctggaattcaaggatcaccgagtatcacctgtattaaattggcaatctcactttacctgcagtctagagtatcgtttctatgtgctcagcttggacgtattgtattctgtaattacagctacttggagatttggaaggacctggcttgcaacgtagcataatctctcgtctttcccctttgtgcccccatataattgctatgaataccagattgagatggttgcaaacagaacaaaaggaaacgaggatgtg

SEQ ID NO: 263907 - DNA, 586 bp, Zea mays
cgggattcgacgccacgcgtccgacgctccccgctagggttttgccagcatggtcgccgccgccgcccggaggctcctctccggccgcgcctcctcgtcctccgtctccgcgctcctccgtcacggcgctgtcccggagcagtcgctggtgttgcgcccggctgttgtcgcggcggcctcccgcctcggctgccagcgcgggatggcgcggcggcctggcggggacggctacggctcgacgcggtctggcgcgggcggggaccgcgcgcccatggccacggagatggcgccgctgttccccgggtgcgactacgagcattggctcatcgtgatggacaagcccggcggggagggcgccagcaagcagcagatgattgactgctacatccagaccctcgccaaggtccttggaagcgaggaggaggcgaagaagaagatctacaacgtctcgtgcgagcgctacttcgggtttgggtgcgagatcgatgaggagacatctaacaagctcgaggggcttcctggcgttctcttttgtgctcccgggattcgtatggttgatgctggaatacaaaggactaccggagcc

SEQ ID NO: 263908 - DNA, 400 bp, Zea mays
acggagctgaactgcttgtcaacggtgagattgttcagaggcctcctgagaggcagagaagggtcgagcccgtgccacagagggctgcagacaggcctaggtacaatgacaggacccgctacgcacgcaggagggagaaccagcgatgagatgaaaaaagtccacaataacaagttcaggtggtttgagactctgtaattcaaggatagtgtgctttggatgtattgtactctgtaactacagttcctcagattgctcaaaggacctggtctggaatgcatgcactgttactagcgcccgtttgcacatgtaaaatctctttatccaagctgctccattgactatgaaggcctaacattaggtatttcattcattgcggacgcgtgggcggacgcatacg

SEQ ID NO: 263909 - DNA, 672 bp, Zea mays
cccacgcgtccgcccacgcgtcggccccccggagagcaaaggcagcacactcagctatccagcaaaagagatcgagaggcaggagtcatggccaccgtcagcgccgccgtggtgaccaccatcgttgcccgcgccgcgatcgccaggcccaatgctctagggctgcctgcgctgagggcgaggagcgagagggtgcggtgcagctacgccaaggacgcggccccagtcagcaccaagggcgcaggcgcgtcgctgctcgccgcagcgggcgcggtgaccgcgtcggcggggcccgcgctggcgctcgtggacgagcgcatgtccacggagggcaccgggctgagcctcgggctcagcaacaacctgctggggtggatcctcctgggggtcttcggcctcatctggtccctctacaccatctacacctctgacctcgacgaggacgaggagtccggtggcctctcgctctagatccacctcctctcctgttaatgatctgaatgtaaacatggtggtggtcatcggtgtaaatttagacatggctatttgcatctaagatccatcctctcctgttaataatgtttggagactacgtacgcctgaagcaatgcaaagcaactttgcgagaaaacttgctgcacaaaaaaaaaaaaaaaaaaaggcggccgctct

SEQ ID NO: 263910 - DNA, 512 bp, Zea mays
cccacgcgtccgcggacgcgtgggctgagggtgagagccgagaaggcgcggtgcggcgctcggcggtcgaggcggccgagccagcggcgggacggcaacaacggcgcgtcgtcgtcgcttctggccgtggccaccagcgcggtgaccacgtcgcccgcgctggcgctggtggacgagcggatgtcgacggagggcaccgggctcagcctggggctcagcaacaacctgctggggtggatcctgctgggcgtcttcggcctcatctggtccctctacaccgtctacacctccacgctcgacgaggacgacgactccggcctctcgctctgaactcatccgtcgattattcctagctacgactgtatttttgttcagcctgacccgtgagttcgatcgatctatgcatgcgttggtgcagacgaagcttaagaccgtggttgtatgcgaccgtaaaaaaaaaaaaaaaaaaaaaaaaacccacgcgtccgcccacgcgtccgcccacgcgtcct

SEQ ID NO: 263911 - DNA, 829 bp, Zea mays
ttccgggacgacccacgcgcccgatagttctagaacgcgagcggccgaattaagttcgtgcacgtacgcacgcaccgggacaccagcaacccccaacagcgccactgtccagtgcgcgcgtcaagcttgcttagctagccgccatggcctccctcgccgccgtctccgtgaagcccgtggccatcaagggtctcgccggcagctccatctccggaaggaagctcgccgtcgccaggccgtcggcccgctccatccgcaggccccgcgcagccgccgtggtggccaagtacggcgacaagagcgtctactttgacctcgacgacatcggcaacaccaccggacagtgggacctctacggctctgacgcgccctcgccctacaacccgctacagagcaagttcttcgagacgttcgcggctccgttcaccaagagaggtctgctgctcaagttcctgctgctgggcggcggctcacttctggcctacgtcagcgcgtcggcgtcaccggacctcctgccgatcaagaagggacctcaggagccgccgcagccgggcccgcgcggcaagatctaagctcagcttctccatttgcatggtctagtagcttgctttgtactgctagcgccggtcgatccgtcgcaatcgtcatggatcatctctctatcttgttgttacgctgttcataatttggtatatttgccattccgctattgtgtactctttggcatacatacaataattaaaatggcgttgcgtggctctcatataattaaccttcacataacctgaaaactcaagtacgtatagtatgggccactttattgtggatt

SEQ ID NO: 263912 - DNA, 1451 bp, Zea mays
gccacatgccttgccttgcctttgcctacctgttgatcgagccgagcgagcagggagagacacggcaccgagtgaggccgccgcatcctcctcctctccgatccgtacgtttcctcctccctagcaatcgcaacccgttcagccaatcattgccgtctccaccaactccgttcccctattacctagttagtccagtccgcctgctgcctgcctcaacggatcgacgcgacaggagggagggaggaaggagacggtcgatcagagtctgagacggaggccgatccaccaccgcagcgacgagcgggaggagatgaagatcatcattgacacggatcccggcatcgatgacagcgtggccatcctgatggcattccagatgccgggcgtccaggtcctagggctcaccaccatcttcggaaactgcaccacagagcatgccacacgcaacgccttgatcctgtgcgagaaggcaagccatctagaggtcccagtagctgagggcagccatgagcctctcaagggaggaaagccgcacgttgctgacttcgttcatggacctgatggcctcgggaacgtagatcttcctgatcccactatcaagaaagtggaggaaagtgctaccgacttcttggttgataaggtctcgcgatttcctggagaggtctctgtgctcgccttgggtcctctgacaaacatagcattggccatcaagaaggatccctcattcgtgaaaaacgttaagaagatcgttgtgctgggtggagcgttctttgcggctggaaatgccactccttccgctgaagcaaatatccacagtgatccggaggcagccgacatggttttcacttctggggcggacatctacgtcgttggcctcaacatcacaacgcaagtcagcttcacagataaggatctcctggagctaagaaactcgcaagggaagtacgcacagttcctatgtgatgtatgcaagttctacttggactggcacaccgagtcttatggtgctcctgctttgccgcgctagttcgtccggagctgttcacgttcaagaagggcgtggtgagggtggagacgcatggcatctgcgtcgggcatacttccatggacatgttgctgaagaagtggaactcagagaacccgtggactggctactcaccgatttcggtcgcatggacggtcgatgtgcccaaggtggtcgcgtttgtgaaggagctcgtcaccaagccgtgaaccaagttaactaacgtgttgtggtctcgcgcaccagatgtgcagcaaatttgagatgtcgatatatttactcacattcgaagcactgcaaacactattatctcaatagttggttcctgtggaggattgcaaatcaatttgagatgttttaaattccagcatgtgccttcggccattgaatggtcttaaaaaaaaaaaaaaaaaaaaagggcggccgc

SEQ ID NO: 263913 - DNA, 853 bp, Zea mays
  unsure (1)..(853): unsure at all n locations
cccacgcgtccgcccacgcgtccgcccacgctttcgcccacgcgtncgctcgggaacgtagagcttgctgatcccactatcaagaaagtggaggaaagtgctaccgacttcttggttgataaggtctcgcgatttcctggagaggtctctgtgctcgccttgggtcctctgacaaacatagcattggccatcaagaaggatccctcattcgtgaaaaacgttaagaagatcgttgtgctgggtggagcgttctttgcggctggaaatgccactccttccgctgaagcaaatatccacagtgatccggaggcagccgacatggttttcacttctggggcggacatctacgtcgttggcctcaacatcacaacgcaagtcagcttcacagataaggatctcctggagctaagaaactcggtccggaagtacgcacagttcctatgtgatgtatgcaagttctacttggactgggacaccgagtcttatggggctcctgtgattttcctccacgatccggtcagctttgccgcgctagttcgtccggagctgttcacgttcaagaagggcgtggtgagggtggagacgcagggcatctgcgtcgggcatacttccatggacatgttgctgaagaagtggaactcagagaacccgtggactggctactcaccgatttcggtcgcatggacggtcgatgtgcccaaggtggtcgcgtttgtgaaggagctcgtcaccaagccgtgaaccaagttaactaacgtgttgtggtctcgcgcaccagatgtgcagcaaatttgagatgtcgatatatttactcacattcgaagcactgcaaacactattatctcaatagttg

SEQ ID NO: 263914 - DNA, 2639 bp, Zea mays
tctgctttccgccgaacgaaaccatcccggcaaggcaagcttgcaaccgtggccacgccgcggcgcgaccctgacgcccgccgtctccggcacccgataggcctcctccccacacccctcgcgtggcttccgtggcccgtagcccggcgcgcttcccttcaaagccactgcttcgcctcctccttctacttaagcgcagccggccccggccggcactcgcatccggtagctcgatcacttcttcctctggattttgggaaggaggcatcggacgtcggatgcatgacacactcattgcattagcgcctacgcctaccgcaagtggaagcctatggatctcaagcaagcctcctctggtacaatcttctgccttctgcttctattctgcgtgggctgcagatgtcggccttcggaaatagaggccacccagacagcagccctcaaggttgatgcctcgccacagcttgcccggaagatccctgaaacactgtttgggatattttttgaggagatcaaccatgcaggagctggtggcatatgggcagagcttgtcagtaacagaggtttcgaagctggaggctctcatactccatcaaacatcgacccgtggtccatcattggagatgactcctccgtgtttgtggcgactgatcgtacatcatgtttcagtcgaaacattgttgctctgaggatggaggtcctctgtgatgagtgtccagctggtggtgttggtgtttataacccaggtttttggggcatgaacatagaagatgggaaggcctacaatctcgttatgtatgttcagtccccagaaacaaaggatctaacagtttcattaacaagctctgatgggttgcaaaacttggcttcagctacaataacagtttctggcacatcaaattggacaaaagtggagcagaagctggttgctaaaggaaccaatagaacatcaaggcttcaaataacaacgaacaaaaaaggagttgtttggcttgatcaagtatcactcatgcctgaagacacatacaagggacatggtttccgcacagaacttatatccatgcttttggatttgaaaccacgattcttgagatttcctggaggttgttttgtagaaggtgactggctaagaaatgcattcagatggagagagtcaattggtccatgggaagagaggcctggacacttcggggatgtttggcattactggactgatgatgggcttggatattatgagttccttcagcttgcggaggacctgggtgctgccccaatctgggtattcaacaatggaataagccacaatgatgaagttgatactgtagctattgccccttttgtaaaggatgtattggacagtctggaatttgcaagggggagtgcagattcaacatggggctctgttagggctgcaatggggcaccctgaacctttcctggtcaaacatgtcgcaattggaaatgaagattgcgggaaaaagttctaccgtggtaattacctcaaattctacaatgctataagagaggcctatccagacattcagatgatttcaaactgtgatggttcatctagaccacttgaccatcctgcggatttgtatgatttccatgtctatactgattctaagactttgtttaacatgaggagcacatttgacagaacatctcgtagtggacctaaggcttttgtgagcgagtacgctgtctggagaagtgacgcgggtagaggcagtcttcttgcttcgttggctgaagctgctttcctcactggtctggagaagaacagtgatattgttcagatggcaagttacgcaccactcttcgtgaacgacaatgaccaaacgtggaacccggacgctatcgtcttcaactcctggcagcactatggaactcctagctactggatgcagacgattttccgcgagtcaagcggcgccatgatccatccggttaatatcagttcccggtactcgagttcgctggccgcgtctgcgatcacgtggcaggatgcagagaatagcttcctgagagtgaaggtcgtgaacttcgggtcggacaccgttaacctcacggtctccacgagcggactcggggccagcgtcaacgcgctgggatcaaccgccaccgtcctcacgtctggcaacgtcatggacgagaactccttcagtaacccgaacaaggttgcgccggtgaaaagccagctgagcaacgccgcggagcagatgcaggtcacgctggctcctcactccttcaccgccttcgatctggcgctggctgagcccaagcttgtggcggagatatgatgtgtgtgctgttagcgatcttgatcgataaaaaggctttgtactggtgtactacgtactgttgcttcatgaaataaaaaccacatcaggtttttgcttggtgttggttggtttcctttctcttgtacgtgtttgctttgcatgttcatcaccatctactgtacgggatgatggtacattgatggtgagaacgatagcctcctgtggattaaacaaactgtcgatggatgccttcatggtaaagaactttatcgtgaatcacggtatgtggctgtcaatgtttaatgagtatactgaccgcaagtttcttgctgctgccggtacaatgtttccatcc

SEQ ID NO: 263915 - DNA, 463 bp, Zea mays
tgtttcggacaccgttaacctcacggtctccacgagcggactcggggccagcgtcaacgcgctgggatcaaccgccaccgtcctcacgtctggcaacgtcatggacgagaactccttcagtaacccgaacaaggttgcgccggtgaaaagccagctgagcaacgccgcggagcagatgcaggtcacgctggctcctcactccttcaccgccttcgatctggcgctggctgagcccaagcttgtggcggagatatgatgtgtgtgctgcacattacagtacacaaacagcgcgcggatggcagcaaccagagggtgtggagtgtggtgtgctgttagcgatcttgatcgataaaaaaggctttgtactggtgtaccacgatacaggataacgtactacgtactgttgcttcatgaaataaaaaccacatcaggtttttgcttggtgttggttggtttcctttcc

SEQ ID NO: 263916 - DNA, 624 bp, Zea mays
agacattcagatgatttcaaactgtgatggttcatctagaccacttgaccatcctgcgggtttgtatgatgtccatgtctatactgattctaagactttgtttaacatgaggagcacatttgacagaacatctcgtagtggacctaaggggttcctggcattcacttgggatgttctttgggtagtatataaaaaaatgggtcctttgatgctttgcaaaatccttaagagatggagggtacaattctccgaggtgttgtgattctgaataacgatgaggaatactcataaggagcttatgtgacgtgtggttctatttgcatgtttctctgaagaccctgaaactccagcttttgtgagcgagtacgctgtctggagaagtgacgcgggtagaggcagtcttcttgcttcgttggctgaagctgctttcctcactggtctggagaagaacagtgatatcgttcagatggcaagttacgctccagtaccttttatctggtttggtaagaagcgggcccctgtcaaacgtggaacccggacgctatcgtcttcaactcctggcagcactatggaactcctagctactggatgcagacgattttccgcgagtcaagcggtgacatg

SEQ ID NO: 263917 - DNA, 1152 bp, Zea mays
cccgtgcgtcgcgcagtcgcgagaggtggtggtttcaggggattatggaatgcttaacaacaagttttccaagaaatgttggaaaagagtacatctgttcaagcaagttggtgtccggaaaccaatggatccccaaaaggatttgctgctacgtctcttgttcgacaaactccagtcgatgccacaagttcactgatgtggcatgccccatgagcccagttattcgaaaaaggttacgctggagatgctttgctgcaagtttgaacttagaagatggccctgcaccctctgactcgacgtcatcttcatcagagcagactactgatgctgatggaactactaatggtgatgtatctgaaaatctgctttctcgaaagccgagctctgatgagttaaaggctcttttggctgattcggaacgaagtaagcttttgagaagactcagtgaagcaaatcaatataaccgattcctcaagagacagttgcaaataaaggatgatgcagtcgtaaaattcaaaggtgaacttgctgttttggaactagaactgcaggctctggttggcctagctgaagaggttgctaattttgatgttccgttagggtctaggaagataaacggaaaatatattcaatctcatcttctctccagattagaagctgtccatgataagattatggaacaggtaaagagtgttgacgctttaaagacccaagaaattcctgtctactggattggcatggctgagaatgtgcagatcatgggttcattcgacggatggtcacagggcgaggcgatgtccatggagtattcaggtgactacggaagattctctgcaactctgaagctaagacctggaaggtacgagatcaagtttttggttgatggggaatggagattgtcgcctgaatatcccactgctggagatggactgacgcagaacaacattcttgttgtggagtaatacaacttcctcatctaccatttcaatcatccaaacaatgccgaagtgcacctacatctacatgtcttcttccatctgtaatactatgcttactatgtggacatgtggttgcctcacagaaatcgaataaattagcctatcctggcatatgatcctttcgtatttaaatatatgacgaattaattaacct

SEQ ID NO: 263918 - DNA, 706 bp, Zea mays
tgcacatgagttcgtctcggtctcctctcctgtaccgcaagtccacgcgcttcctcccctctcctctctgcctcttttctccctcctcggtgctcctccaccagaaccctagctgccgtttcccactctcgtcgggcagctctctcagcagcacctgcggccgttgtctctccttgcgcggtctgccccagccctgacccccggagatccggggctgttctcggttctttacgcggaggcggaggttggtttctgatctggggatcggttcgtgcggggatgaatacgaggccggtggtgctcgtcttcctcctgctcgtgctcgtcatcacgtcgcagttcgagtggaagcagcagatcggggaggccgcggacgccgacccggccgctgcccgccgccggcagcagctgcacgccagggaggatgccgtcaaggaaaagatcatattatcacaggagaaaaatatccaacagctcaaccagcttatcgagagccttcagcgccagctactgcactgccgtggtagcaataacactgttcatgctgctgccgacgttgccacagaagcgagtgaagtcgagggacatgaggtcattgaagatgagaatagacgatgatccttggcgtacatgcttctacgatgccggtacagctgctaaagagcagaacagtcgtctgaatgcttgaattcactgtattggatat

SEQ ID NO: 263919 - DNA, 712 bp, Zea mays
ggccaacaggtgcaggttttcctcatttttattagatcctttcttagcgatcttggatctccactctccaggactccagggtttgccgtttgcttgacgatcacacgtatcaaaaagggttctcaagtattattggttgatgctatgctccaagaattagaaaaggagattgatgatgtggatgcacaaattggaaatcgttggcaactgcttgataaggaccatgatggcaaagtgacccctgaagaggtggcggcggcgacagcttatctcaaggacaccatagggaaagaaggcgtgcaagagctcatcagcaacctttctaaagacacagaaggaaaaaatccttgttgaagatattgtgaagctagcatcccaaatagagaacaatgaagaggaagaggaagcacggtagatgggagagtatatggaaacatcacactcgttcagcagtcaaaactcatgtattgaaaggcaatacatccatttcttgtgtctcttgactgactttgatagtgacttccaattagcaaggtagattttctgtagaaaggctcatgctgacatgcatttagttagccgtcgtgttgtgatttggtaggtaaattgcaaccaaaatttagaccggttgcatggacgtggataatacagatcaattgtatttgttatgctactatgcaatcccgaaatattggatctgtttccaattctc

SEQ ID NO: 263920 - DNA, 1274 bp, Zea mays
ggaatgcccgggtcgaccgacgcgggcggttgtagcaacactatcttctttaccagacgaagttgtggatacaattgggacagtattgccatctgaagattcagtttctgaaaggaggagaaaattagaattccttgagatgcaggaagaacttatcaaggaggaagagaaaaagaaagagaaagaagaaaaggcaaaacaaaagaaagaagaggcaaagatgaaggaaccagaaactgctgaagaagatttagctttgaaggaaatgactgatgctactgctagggaagaactgagaaaagcaaaagaacatgacaaagagaagctctgtaatatcagccgtgccttggctgtgctcgcatctgcatcttctgttagcaaggagcgtcaagagtttctgagcctcgtcaataaagagatagagctatataactccatgctcaaaaaagagggtactgaaggtgaagaagcagctaaaaaagcatatatagccgctagggaagacccagacaatgatgctgaggctgctgcagaagaaaaggtctcgtcggcgttgattgagaaggttgatgctatgcttcaagaattagaaaaggagattgatgatgtggatgcacaaattggaaaccgttggcagctgcttgatagggaccacgatggcaaggtgactcctgaagaggtggccgcagctgctgcctatctgaaggacaccatcgggaaggaaggcgtgcaagagctcatcaccaacctttcgaaggacacagaaggaaagatcctcgtggaagatatcgtgaggctagcatcgcaaacagaggaacacaacgacgacgaagagcaatcacggcagtaggtggaaacagcccgagtatctagatgggtggcctattatttcaggaagaaaactaccaacctctcagttacttgatggctgtgcctggttaatcagaaggcagtacaggcgtttttggtgcccctagtcagagaccccggtagaataactcgttgctgtaaagatggtgtgactgtgacatgcatacaagtgatagggtactctacagagttgtggttcggcaggtagttcgcaaccgaaattttgactggttgctgtgaaagtggaaatacagttcggttttgtcttaaagctaccctcaattctaaaaaaattgtcttctcttgagtctaaaagtagacgggtgactaatgtggaaatgaattaggatgtttatgtactccccctgtttaaattatagagcattttaactttttggagattc

SEQ ID NO: 263921 - DNA, 476 bp, Zea mays
cccacgcgtccggggttctgctgaagatttagctttgaaagaaatgattgaggctactgctagggaagaggaactgcgaaaggcaaaacaacacgacagggaaaaactctgtaatatcggccgagcattggcagtgctcgcatctgcatcttctgttagcaaggagcgtcaggagttcctgggcctcgtcaacaaggagatagagctatacaactccatgctcgaaaaggaggtggtgctgaaggtgcagaagcagctaagaaagcatatatagccgctagggaagacccagacaatgatgctgaggctgctgcagaagaaaaggtctcgtcggcgttgattgagaaggttgatgctatgcttcaagaattagaaaaggagattgatgatgtggatgcagcaattggaaaccgtggtccctatcaagcagctgccaaggtgactcctgaggaggtggccgcagctgctgcctatct

SEQ ID NO: 263922 - DNA, 666 bp, Zea mays
ctggcaacagttcggcaaccgctgctgcatatgttcaaggatcaaatgagccacttggtgttgaagtgactgaaacagatagtgcaccagctgtgactgaaacaggcaatgcaccaactgtgactggaacagacaacaatgcaccgaaacccacgtgtagtgtgccaagtgaacaattcggtggtgacgacggaacgcactcatcaggcaacaatggcgcagaagagtcttcagatactaagcagccaccaccgtcgaagaagcagagggtatacactgacgatgacttggttgtgataatgagtcggagcctcggcgagcttgcttcggctataaaaaggctttccgaacaacccggcccttcctgttccgaaggggttgtacgaagagctgaagagcatcccagggttcgaggaggcacatcttgagcactactatgcttacctgtgcgagaatcctccgcttgcgagggcattctatgcgctgcctcagctttctagcaaagttacgtgggttgctaggtacgtcaagagtcacagctccgaactgatgtaggtactttgatgatgtggtgctattttggtctagtcactagggatgaaaaaaaaactctttttgttgtatgacaggcagtatggaacatgattacaccagagaccttttaat

SEQ ID NO: 263923 - DNA, 2035 bp, Zea mays
gtggctcggccactgcaggcgggccccacctgagcaaagacaggcgaccatttcctttccttcacctcactggctcgctcgctcgcctttctctccgtgcggcgacgacggactgggcaaccgccaccgccctccctttccctgcgctacgacgactggccgaacgctgcctcgcttcgtcacctcttcgccggcggcgacgatcacccaccaggttgatgccgattttttggttgacaatttgaagattactaacttctatgatcctgagggcaagaagtaatgatccgcccaggctcaaaggactcgcaaaattatgataacaataatcaaagagtccatcctcaaccaatcgacgataacatgaatcagaacggggactcaatggacactgtgatcgggaggatattcaacaacatatcctctttaaaatccgcctacattcagctgcaggaagcccacaccccatatgaccctgacaagatccaggaagctgataaacttgtcatagaggagcttacgaggctttcagaactcaagcacgcttacagagaaaaacatcctaagccaatagctgcatcccctcaagattcacgcttgctttctgaaatacaagagcagcagaacttgttgaagacctacgaggtcatggtaaagaagttccagtcccagatccagaccagagacactgagataacccatctacagcagcaaattgatgaagctaaacttcggaaatcaaagctagagaagaaactgaaacagaggggcctacttaacagggagtcagaggaatctgacgaagaagagaactacttttccattgaattgacgccaagtttgtttacatctgctgtcgataatgcataccagtcgatacatgacttctcaaagcctttgatcaacatgatgaaggctgcaggttgggatcttgatggggctgctagtgcgatcgagcctggtgtggtttacacaagaagggctcacaagaagtttgcttttgaatcctatatttgccaaagaatgttcagtgggttccaagaggagagcttttctatcaaggattctaacatcagtgtttccaatgaggctttcttccaccaattccttgcagtgcgagccatggatcctctggatgtcctgagccagaaccctgattcagtattcggaaagttctgtagaagtaagtaccttttgcttgtgcatcaaaaaatggaaggttctttcttcggcaacatggatcagaggaactacgtcatgagcggtggccatccaaggacacctttctaccaggcattcctaaagctagcaaagtccatatggttgctgcacaggttggcgtactccttcgacccaaaggcaaaggtgtttcaagtgaaaaaggggagtgaattttcggatatccacatggagagcgtcgtgaagaacatcatcctagaagaaggtgcggagaggccaaaagtcggcctgatggtgatgcctggtttcctgatcgggaccagcgtcatacagtcccgtgtgtacctttcagatgccaagtgtgctgactgactgaagattgcacaaggagcttgagggggtgcctttgctccttgggagagctaccagcagcataagtttatggtggactgttgtcttgtatgtaatgcgtgagacctgttgcttcaatgccgtgctacgtgattctgtccagtgggcttgtggtttccccatgttgcatttccatgtgttatacggctatgtaattctgcccagtgttttgcacacattatcagggtgattgattgatcgtgtaggctgcacttttcatctgaaatgtgtttgcccaatcaatcagatgattctgttggtgttccatgtcaagtgttgtagcttagtttctttgaacaaggtgtgtggaggattttgatggacaatgataaaactgatgccaatttagttgcttcatatggattccggcataaacatttctcggtcagagatgctttaaccatttgccaaaaaaaaaaaaaaaaaaaaaaaaagggcggccgca

SEQ ID NO: 263924 - DNA, 337 bp, Zea mays
cgctcgagccactcgctctctcgcctctctctccgtgcggtgactgactgggcaaccgccaccgccctccccctccgtcgggtcttcgccggcgccaccagcgacgactgggcggtctgtgtccctcttcgccggagacgatcacccaccaggtggatgtcgattttttggttgacaagttgaaggttacgaactactttgatcctgaggtgaagaagtaatgatccgcccaggctcaagggactcgcaaaattatgataacaataatcaaagagttcatccgcaaccagttgatgagaacatgaatcagaacggggactcagtggacactatgatc

SEQ ID NO: 263925 - DNA, 862 bp, Zea mays
ctcacgcgttcgacaaaaccatcgctaccccctcaacctcactgtccctgctgcaacccaaccaagcccgcacgacacgacaccaagtcgaggagctcgagggcaccaatcatggccggcgtgaactccagcgtcgtcgggctcaagcccgccgcggcagtgccgcaggccgccgccgcctcatcgccggcgaagcgggtgcagctggccgcgcccgagggccgccgcgccgctctgctcggcctggcggccgtcttcgccgtcacggccaccaccgggtcggccaaggccacgatcttcgatgagtacctcgagaagagcaaggccaacaaggagctgaacgacaagaagaggctggccaccagtggagccaactttgcgcgcgcctacaccgtggagttcggcagctgccagttcccctacaacttcactgggtgccaggacctcgccaagcagaagaaagtccccttcatcagcgacgacctcgagattgagtgcgaggggaaggagaagttcaagtgcggctccaacgttttctggaagtggtgaagcagctagcagcagcgtctgatgggaatggaggagatcatcacctgtcttgtcgaccctagatatgtccaaactgcagggaaattaaatcttcatgtgtaattgtgctcattctgtttcaatcatctcaacatccgatcatgaacctcttgcattattaactggctcgatcgtcttctcagtttaagacattggaggctgctttgtttgtttcagaggtccttcttaagatgatgctatattttgtcatggttaatgtgataaacagggtcaggtctgattagaaataaaacgacatcatcgcacagatgta

SEQ ID NO: 263926 - DNA, 615 bp, Zea mays
  unsure (1)..(615): unsure at all n locations
tcgcgggtcgacgcaagcctctacagatgagtcctaatacaagtcgaggagctcgagagggcaccaataatggccggcgtgaactccagcgtcgtcgggctcaagcccgccgcggcagtgccgcatgccgccgccgcctcatcgccggcgaagcgggtgcagctggccgcgcccgagggccgccgcgccgctctgctcggcctggcggccgtcttcgccgtcacggccaccaccgggtcggccaaggccacgatcttcgatgagtacctcgagaagagcaaggccaacaaggagctgaacgacaagaagaggctggccaccagcgctgccaactttgcgcgcgcctacaccgtcgagttcggcagctgccagttcccctacaacttcactggggtgccagggacctcgccaagccagaagaaagtccccttcctcagcgacgacctcgagatcgagtgcgaggggaaggagaagttcaagtgcggctccaacgttttctggaagtggtgaagcagcgtgcgtctgatatgatggaggagacctggtgtacatgtacgtgtgtatctagatgcatgtgcccagactgcaggaaacatgatatcaaatttgnctgtc

SEQ ID NO: 263927 - DNA, 489 bp, Zea mays
gggtccacgcccgcgtccgcatacaagtccgcccacgcgtccgaggagctgaacgacaggaagaggctggccaccagtggcgccaactttgcgcgcgcctacaccgtggagttcggcagctgccagttcccctacaacttcactgggtgccaggacctcgccaaccagacgagggtccccttcatcagcgacgacctcgagattgagtgcgaggggaatgagaagttcaagtgcggctccaacgttttctggaagtggtgaagcagctagcagcagcgtctgatgggaatggacgagatcatcacctgtcttgtcgacccgtagatatgtccacactgcagggaaattaaatcgtcaggtgtaattgtgcccagtctgtttcaatcatctcaacatccgatcatgaacctcttgcattattaaaaaaaaaaaaaaaaaaaaaaaaaaaaaaaaaaaagaaaaaaaaaaaaagaagaaaaaaaaaaagaa

SEQ ID NO: 263928 - DNA, 578 bp, Zea mays
acgcgtccaacccagccaagcccgcacgacacgacaccaagtcgaggagctcgagagggcaccaataatggccggcgtgaactccagcgtcgtcgggctcaagcccgccgcggcagtgccgcaggccgccgccgcctcatcgccggcgaagcgggtgcagctggccgcgcccgatggccgccgcgccgctctgctcggcctggcggccgtcttcgccgtcacggccaccaccgggtcggccaaggccacgatcttcgatgagtacctcaagtgcggctccaacgttttctggaagtggtgaagcagctagcagcagcgtctgatgggaatggaggagatcatcacctgtcttgtcgaccctagatatgtccaaactgcagggaaattaaatcttcatgtgtaattgtgctcattctgtttcaatcatctcaacatccgatcatgaacctcttgcattattaactggctcgatcgtcttctcagtttaagacaaaaaaaaaaaaaaaaaaaaaaaaaaaaaaaaaaaaaaaaaaaaaaaaaaaaaaagaaaaaaaaaaagagaaaaaaaaacgggaagg

SEQ ID NO: 263929 - DNA, 991 bp, Zea mays
gatgcattttagcgaagtcaggtcggcgtatgccaaatgtctcgttaagacaccgctgcagtgcagactgtagagtgcagactcgccgagtacgactcctcacgaactagtccgtttccgtgcgctgctgctgacgagggagtgggagggatcatggtggcgccggacgtgaaggcggagacgatgaagctgatggatcagcggggtgccctagaggcggagatggacgccatcatcgcccgcctcactgcggcaggcggaccgggcatcaccggcggcctcgtcgacgccgagggtttcccaaggtccgacatcgacataccgaacgtcctcgcccagcgccggaggcttgctgaattgcgaaatgaccacaaggatattacaaactaaattggtaaaaatcttgaggttttacactcagcaaagttatcaaggaatgaacaatcaacctcaaggagatctgatacaacagatccttcacactttggatcatctcaaagtgaacctatggaagaggaccatgtgactggacttccttttgccatgattgatgaaatcgctgatggttctcctgcttctgtggatggtttgcaacttggagatgagattgtaaagtttgggaaatgtggaagctggtgatcagttgcaggaaaggctcatgtctgaagctctttccaatgaggacagtcaagtatctttagtcatcattcgccagggatcagtggtgaatttaacaattacaccaaggaagtggcatggaagaggacttctggggtgccatttccgaatgctatgaagagcccatcgttcttcagcaggatcgttggtctatcgatgtcatttcagcagcaaagtgaactgatttaaccgaatgtgtgacatcttccaaaatactggttgcgtgtacttaacttgagcgctggaaacatactggtgtaccaggctacctgtgttgagacattttacttgtacacatggtcagttttcgttc

SEQ ID NO: 263930 - DNA, 407 bp, Zea mays
gtctgaagctctttccaatgaggacagtcaagtatctttagtcatcattcgccagggatcagcggtgaatttaacaattacaccaaggaagtggcatggaagaggacttctggggtgccatttcagaatgctatgaagagtccgtcgttcttcagcaggatgcgttggtctatcatacttgcactcgtggagagtggagacggctctagcgatgccatttcagccgcaaagtgaactgatttaaccgaatgtgtgacatcttccaaaatactggttgcgtgtacttaacttgtggagcgcttgaaacatactagtgtaccaggctgcctgtgttgagacattttacttgtatacatggtcggttttcgttcttcctcgcttgcgtatcggtatcgcacaccaacttg

SEQ ID NO: 263931 - DNA, 1493 bp, Zea mays
tcgcgatctagaacctgtctttcatcgttacgttagtcgtccgcccgcgctagtgccatccacactcttctcttctccccggccggaccggagtcaggcagccgaagcaagaaaagcaagcggctttggaagttggaatccatggcgtccacctcgtgcttcctccaccagtccaccgcccgcgtggccgcgccgtcgccgcgcctcgccgccccgccgcgcagcgcgcaactgttcgtctgcaaggcccagaagcagcaggccgccgcggcggagagcgacgtgtcgcgccgcgccgcgctcgcgctcctcgccggcgtcgcggccgtcggcgccaaggcgagccccgccgccgccgcctacggggaagcagccaacgtgttcggcaagaccaagaagaacacggacttcatctcctacgtcggcgacggcttcaagctgctgatcccgtccaagtggaaccccagcaaggagcgggagttccccgggcaggtgctccgctacgaggacaacttcgacgccaacagcaacgtgtccgtcatcatccagcccacgtccaagaagaccatcgccgactacggctctcccgaggagttcctctcccaggtcgactacctgctcggcaggcaggcctacggcggcaagaccgactccgagggcgggttcgagaccggcgccgtggccaccgccaacgtcctggagagctccacccccgtgatcgacggcaagcagtactacgccgtgtccgtgctcaccaggacggcggacggcgacgagggcggcaagcaccagctcatcgcggccaccgtctccgacggcaagctctacatctgcaaggcgcaggccggcgacaagaggtggttcaagggcgccaggaagggagtcgagaaggccgcctcctccttcagcgtcgcatgatgatgtaattttatttcttcgatgggatgggatgcacgcactacgtagagagcttggctaggccaggcctggctgagcacgcttgtgtgttccttcgactgtacatgagaacaaagactaaggagagctccattcccgtacaaggatcgatttcttcaatcaagaaaagaaaaggggggcggccgcgtcgccgccggcgtcgactactacgcacttctcggggtgcggcgcgggtgcacgcggtcggagctggagcgcgcgcacctggtgctgacgctgaagctgaagcccgagcggtcggtgtcgttcgcggagaggatggagctcgtggacgagcaccgggacctggaggcggtgcgcgaccaggcgcgcatgtcggcgctgtttctgtaccggatgctgcagaagggctactcgttcatcatgtcggcggtgctggaggagagaggcaaggacgccgctgccacggcagggccggaggaagaagaaaaagaggtggtggcaacagtgcaagggagtgccactgcaaacggtggcaacatgcctatggcgactgcagccacaccaccattgat

SEQ ID NO: 263932 - DNA, 511 bp, Zea mays
taccgacgcgacccacgcgttcgggcctcgctaacgcgcccgcgctagcgccagcggtggcacccacgcacactcttctcccccacgagtccggaccccggaggagccaagccatggcgtccacctcctgctgcctcctccaccagtcaaccgcccgcctcggcgcgtcgccgcgcctggccgccgccccgccgcgcagcgcccagctgctcgtctgcaaggcccggaagcaggaagccgccgcggaccagagcgacgtctcgcgccgcgccgcgctcgcgctcctcgccggcgtcacggccgccgccggcgccaaggtgggtcccgccgccgcggcatacggagaagcagccaacgtgttcggcaagcccaaggcgagcacggagtacatcgcgtacagcggcgacggcttcaagctgctgatcccgtccaagtggaaccccagcaaggagcgggagtttcccgggcaggtgctccgctacgaggacaacttcgacgccaacagcaatgt

SEQ ID NO: 263933 - DNA, 605 bp, Zea mays
cccacgcgtccgccgccaccgtctccgacggcaagctctacatctgcaaggcgcaggccggcgacaagcggtggttcaagggcgccaggaagggcgtcgagaaggccgccgcctccttcagcgtcgcgtgaccgacgtaaactattgtttctttgatgcttttcatcagggatgcacatgcacgcaccgtgtgtacgtagagagctaggcatggcctggctcgccatgcttgttgtgtgtttctttgattgtacatgagaggacccgtttctgctgccatccaagttgtacccgtttctgctgccaaaaaaaaaaaaaaaaaaaaaaaaaaaaaaaaaaaaaaaaaaaaaaaaaaaaaaaaaaaaaaaaaaaaaaaaaaaaaaaaaaaaaaaaaaaaaaaaaaaaaaaaaaaaaaaaaaaaaaaaaaaaaaaaaaaaggggggccccccaaaaggataaaaattaaattacccttgaaggaaacttaaaaccccttcaaaagggcaaccaaaattaaattcacgggccgtcttttaaaaacttcttaacgggaaaaaccctggggtaaccaaattaaacccccttgaaaaaaaaccccctttccc

SEQ ID NO: 263934 - DNA, 337 bp, Zea mays
cggaattcccgggtcgacccacgcgttcgctgcaaggcgcaggccggcgacaagaggtggttcaagggcgccaggaagggagtcgagaaggccgccgcctccttcagcgtcgcatgatgcagtaatattggttcttcgatgggatgggatgcacgcactacgtagagagcttggctaggccaggcctggctgagcacgcttgtgtgttccttcgactgtacatgagaacaaagactaagaccttgttcgtttctatcggattacacctggaattgttccagctaaggccttattcggcacaatagtatttaatacacactcggatccaatacacaac

SEQ ID NO: 263935 - DNA, 403 bp, Zea mays
cccacgcgtacgaccgtgctgaccaggacttctgacggcgactagggctgcaagcaccaggtcatcaccgggaccgtctccgacggcaagctctacatctgcaatgcgcaggccggctacaagcggtggttcaagggcgccaggaacggcgtcgagaaggccgccgcctacttcagcgtcgcgtgaccgacgtaaactattgtgtctttgatgcttctcatcacggatgcacatgcacgcaccgtgtgtacgtatagagctaggcatggcctggctcgccatgcttgttgtgtgtttctttgattgtacatgagaggacccgtttctgctgccatccaagttgtttgagaaatcttggtactaatattgcttcatctgtttttaaaaaaaaactcttcctgcc

SEQ ID NO: 263936 - DNA, 904 bp, Zea mays
gggcccgagactccccggccggaccgacgagcgacgaagcgcgcagaaagagaagaacctcggagctgagatggcacaagccatggcgtcgatgaccggcctctcgcagggcgtcctgcccagcaggcgcgccgacagcagaaccaggacggccgtcgtcatcgtcagggcgtccgccgagggcgacgccgttgcgcaggcgggccgccgcgccgtgatcgggctggtggccactggcatcgtcggcggcgccttgtcgcaggcggtgcacgccgagaccgtcaagaccatcaagatcggagccccgccgccgccctccggtggactccccgggactctgaactctgaccaggcgagggacttcgacctccccttgaaggagcggttctacctgcagccgctgccgccggcggaggcggtggcgagggtgaagacgtcggcgcaggacatcatcaacctcaagccactcatcgacaagaaggcgtggccgtacgtccagaacgacctccgcctccgggcctcctacctgcgctacgacctcaagaccgtcatcgcttccaagcccaaggaggagaagcagagcctcaaggagctcaccggcaagctcttcagcaccatcgacgatcttgaccatgccgcaaagatcaagagcaccccggaggccgagaaatacttcgcagcaaccaaagatgcgctcggcgacgtcctcgccaagctagcctagatggaagctaatagatgggttaacgatggccacgtaatttcggacttgtgtttgttcatatggagccggcaaatgtaccgtttcctgttcatattatatcccaagttcttgacaagtacctttgcgggcggatggaacatcagaaacattttccagcagccttaacaagtgatccacgta

SEQ ID NO: 263937 - DNA, 691 bp, Zea mays
gatttgtaagggtttagtttagattaaaaacatcggcaaaggataggtacagatatacgaggtcagatcgaaaacccgatatgtttgcagctttgcacacacacagaaaaaaacatctgacatttgctatggcacccccgggactctcaactctgaccaggcgagggacttcgacctccccttgaaggagcggttctacctgcagccgctgccgccggcggaggcggcggcgagggtaaagacgtcggcgcaggacatcatcaacctcaagccgctcatcgacaagaaggcgtggccgtacgtccagaacgacctccgcctccgggcctcctacctgcgctacgacctcaagaccgtcatcgcttccaagcccaaggaggagaagaagagcctcaaggagctcaccggcaagctcttcagcaccatcgacgatcttgaccatgccgcgaagatcaagagcacccctgaggccgagaaatacttcgcagcaaccaaagatgctcttggcgatgttctcgccaagctaggctagacgcaagggctaataatggccatgtaatttcggacttgtgtttgttcatatggacccggcaaggcaatgtaccattttctgttgatattgtatcaggaagcacttaactacaatgctaacttgagtccttgacaaattgctgtaaaaagggcggccgct

SEQ ID NO: 263938 - DNA, 425 bp, Zea mays
gccactcgtccgcccacgcgtgcgcccacgcgtccgctcgaaataataaagcgcgcgcgcgcacgcggagaggctcggagagctgagtgagatggcacaagccatggcgtccatgaccggcctctcgcagggcgttctgcccagcaggcgcgccgccaacagggccaggacggccgccgtcgtcagggcgtccgccgaggcgcaggcgcaggcgcaggcgggccgccgcgccgtgctcgggctggtggccactggcatcgtcggcggcgccttgtcgcaggcggtgcacgccgagaccgtcaagaccatcaagatcggagccccgccgccgccctccggtggactccccgggactctgaactctgaccaggcgagggacttcgacctccccttgaaggagcggttctacctgcagccgctgccgc

SEQ ID NO: 263939 - DNA, 1582 bp, Zea mays
cccacgcgtccgcccacgcgtccgagagagctagcatacatcgctagctcactttagcatatatattacataaatattggcatatataaactaaactgaattgaggacgatatggcccgcttggtctcttccggaatcattggtaaggggcacaacatctttgacgatggcggattcggtgaagtccatgctgacccaattaaagtcgagcgtccgcacaagcgtccgccgcagaagcagaatgcggagaatggaacgacgacgaaggttgatgagccaaaggaattgcctaagcacgtgtgcttcaagggagacaacgggctatacctgagcgctcggatggtggaaggctacccctacctgcagtttgcgtcggacgacataggcgatccaagtgtgaggttcaccacgtacaactacatgatcgacggcaagcgggtgatccgcgtcaagtcggaccacttcggcaagttctggcggcgcagcccaaactggatctggtgcgacaccgacgacaccagcaccgacaaccgtgacaccctgttcgaggtcgtcagggtgggcgacgacgcggacgccgtgtacgggctccggaacctcggcaacaaccacatctgccaccggctgacctacgagggcaaggagagctgcctgaacgccagcatacccagcgtcaggaaggaggcgcagctgaagatcgaggaggccgtcctgctgcggaagatctacggcgtggactaccacctcaaggacgccaagatcctgaacaacaaggtgaggaccctggtgactcgagaggcggtgaacgccggcagcatgcccagcaagaacacgctgaccctcaagtacgtggtcagcaacggcaagatctgggacgccagcaggtccttgaggctgggcatcaaaagcagcttccaagccggagtccccgaggtcgtgaccggatcgattacgctggagagcgagttcgacaccagctacatctggggcgagaacaccgtcaacacggaggagttctccaccgactacgaggtcatcgtgcctccgcacaccgtcatcacggtgcgcatcctggccacgcagggcacctgccaggtccccttctcctacacgcaggaggatattttgactaccggggagaagaaggtcaccaagtatgacgatggcatcttccgtggagtcaacagctttggtttcaagtccgaggtcaccgagaggaagatcaatggcgaatgagacgatgcaccacatgtcatatctatggatcggagacactgtgccaaagtctgcttatctatctatatctgcatcaataattcagccacgtacgctaccatctgcatatatgtcagtataggtggcgcatgtattgcttttaataattggtgtcatctaagccatgcaagcatgtgtgctttatagctaatcatcttgcactacgctcgtctgtttatttgtatacgtaagtactgtacattgcatgcacatgcactctcatcacctgtaatgttttacttgaaatttattcaaaaataaataaaggcttgtctttgccacttgttaaaaaaaaaaaaaaaaaaga

SEQ ID NO: 263940 - DNA, 729 bp, Zea mays
aaaacccggcccgacccacgcgtccggctagcaatacatcgctagctcacttgatatacatattgcatcggcataaaaactgaatttaccatggcccacttgatctcttctgcaatcgcaggcgcgggcaacttggtcgctgatggaatcagtggtgtcactggcgtagcgtcgcaggttgtagaaggcgtagaggacactttaggcagtatcgtagaagcaatcgaccaaggagtcaaggatgaggaccaactggatttgcccaagtacgtgtgtttcaagggagataacggtctgtacctgagtgctcgaacggttgaaggccatccctacctgcagtttgcatcggaagacattggcgacccaagtgtgaggttcatcacctacaaccacaaggtgaacggcaaacgggtggtgcgcttcaagtcgaaccatctcggcaagttctggaggcggagccccaactggatctgggccgacaccgacgacaccagcactaacaactccgacaccctgttcgaggtcatcaagatcgacgaggacggcgtgtacgcgctccggaacctcggcaacaaccacttctgccacaggctgacctacgacggctaggagagctgcctgaacgccacaattccgaccatcaggaaggaggcgcacatcaagatcgaagaagccgtcctctcccgaaagatctccaacatcgagtaccacctcaagggcgccaagatc

SEQ ID NO: 263941 - DNA, 380 bp, Zea mays
gagctagcaactagctcacttgatatacatatacactaggccggcatattgcatcggcatggaaacgtgaatttaccatggcccacctgatctcttctgcaatcgcaggcgcgggcaacttggtcgctgatggaatcagtggtgtcactggcgtagcgtcgcaggttgtagaaggcgtagaggacactttaggcagtatcgtagaagcaatcgaccaaggagtcaaggatgaggaccaactggaactggcccaagtacgggtggttcaagggaggtaacgggctggaccttattgctcggaagggtgaagggcattcctacctggcatttggattgggaggtattggccacccaagtgggggggtcattaactaccacca

SEQ ID NO: 263942 - DNA, 433 bp, Zea mays
gttaaacagctcagttcagctgatacctcgccggcagatccccctcctgctcatccgccttcctttctcgaagcgcccaatttattaccttcccctaatcccgcagccttgccagaagccaaattggtgctcctcttatctcgccgcgccgccaccgctccatttccgctcccccagcccccccaaaagaacctcgtaaccctactcgcgggattccgcaggccgccgcttgcttagggttcatcactcctgttcacacccgatggccgtggacgaggcgagcagcagtggcggtggggaggagggggtgcgggtcgtggacccccgagcaggagaaggcgttcgagaacgccgtggccaccatgggcggggaggaggacggggacgcgaggtgggagaagctagcggaggccgtcgaggggaagacgccgga

SEQ ID NO: 263943 - DNA, 456 bp, Zea mays
cacgcgtccgcggacgcgtgggggagccgctgaccgaagcccgccccctcggcagccgcggaggagggggcggagcggttcaggtcgctcgccgaccccgatgatgtcgcctccatcaggcagacgctgcacctcataatggggcgattgcaagatagcaatgcagttctcacacattttaatgagtattccgaacgatgctttgtagaagtgtctggtgattttgctagtaaaactcgccttctcaagtctatgaaggctgatctcgaccatattttcacaaagctaagagagatgaaagctaggctagcagctacctatccagacgctttccctaatggtgcaatgtcaaagacgatggaccagagaccagaccttgaaagtcctttagattagtgcgtctaacatcaaaattccgcatattagtgacgacatttgttgtcataccaaagattt

SEQ ID NO: 263944 - DNA, 602 bp, Zea mays
cggacgcgtgggcggacgcgtgggcggacgcggtgacgaactcgaagcttgcgttcttgtagtagaggtcggcagcaagcggttagagcgagaggtcgagaagatgaagagcagcactctgttggcgatcctagttctccaggcccttctggtctctgcggccgtggccaaaggacctgcagggccgacgacgaagaagcagtgctggtgcggcgagtgcaccagctggtcgggcgtgtggacctgcgacgacctcctcaccaagtgcgccgccacctgcaagaactgcgtccccgtgtccacggacaagggcgccaccaagtacaggtgccgcgacttcctccccgaaaactgcggctgcaagatccactagagactcatccaattccaccatggccgcgcgccacagcggcacagccgatggatccttccatgttcctccgtccgtccgccttgctacaagcaggcagccacaccaataagctagctcttgttgttgttttgtatgtttgattgggtgtcccttcccagtcgagatggaataaaataaatctcaggctcacgtacagacgtgttattacgatattcctcccctacatata

SEQ ID NO: 263945 - DNA, 677 bp, Zea mays
  unsure (1)..(677): unsure at all n locations
ctagaactagtccggacgcgtgggcggacgcgtgggcggacgcgtgggcggacgcgtgggctcgaagcttgcgttcttgtagtagaggtcggcagcaagcggtagagcgagaggtcgagaagatgaagagcagcactctgttggcgatcctagttctccaggcccttctggtctctgcggccgtggccaaaggacctgcagggccgacgacgaagaagcagtgctggtgcggcgagtgcaccagctggtcgggcgtgtggacctgcgacgacctcctcaccaagtgcgccgccacctgcaagaactgcgtccccgtgtccacggacaagggcgccaccaagtacaggtgccgcgacttcctccccgaaaactgcggctgcaagatccactagactcatccacagcggcacagccgatggatccttccatgctcctccgtccgtccgccttgctacaagcaggcagccaccaataagctagctcttgctgttgttttgcatgtttgattgggtgtcccttcccagtcgagatggaataatgtcaggcgcacgtacagacgtgttattacccatatttctcccctacaaataaaactcgaactgtggggtaacactgtcccctagtttacanataaaaaaaaggatgtattacgcatgttaagaaacatctgatttcct

SEQ ID NO: 263946 - DNA, 626 bp, Zea mays
cccatgcgtccgctcagcagcactagcagtgacaaactcgaagcttgccttcttgtttacaccctaaaactaaaactagagtcgtcggcggcaacaagcggtacgtacgtagaggatgaagagcaggagcagcactctgttggtgatcctagttctccaggcccttctgctctctgcggctgtggccaaaggacctgcagggccgaagaagcagtgctggtgcggcgagtgcaccagctggtcgggcgtgtggacctgcgacgacctcctcaccaagtgcgccgccacctgcaagaactgcgtccccgtgtccacgggcaagggcgccaccaagtacaggtgccgcgacttcctccccgaaaactgcgggtgcaagatccactaaactcatccaattccaccatggccacagcagccgatggatccttcttccatatgcatgttctcctccgtccgtccgcctagctttgctacaagcaggcgctaataagcaagctgctgttgttgttttgcatgtttgattaggtgaccctttccactcgagatggaataaaataaacgtcaggcgcacgtactgacgtgttattaaaaaaaaaaaaaaaaaagaaaaaaaagctaaagaaaaa

SEQ ID NO: 263947 - DNA, 732 bp, Zea mays
atctcagcagcactagcagtgacaaactcgaagcttgccttcttgtttacaccctaaaactaaaactagagtcgtcggcggcaacaagcggtacgtacgtagaggatgaagagcaggagcagcactctgttggtgatcctagttctccaggcccttctgctctctgcggctgtggccaaaggacctgcaggtacgtcgtgcttgccgagatttcatctagttggctactagcttgattggacgaaataaagcgagtacgcatcatgctgctgccgcgcagggccgaagaagcagtgctggtgcggcgagtgcaccagctggtcgggcgtgtggacctgcgacgacctcctcaccaagtgcgccgccacctgcaagaactgcgtccccgtgtccacggacaagggggccatcaagtacaggtgccgcgacttcctccccgaaaactgcggctgcaagatccactagagactcatccaattccaccatggccgcgcgccacagcggcacagccgatggatccttccatgttcctccgtccgtccgccttgctacaagcaggcagccacaccaataagctagctcttgttgttgttttgtatgtttgattgggtgtcccttcccagtcgagatggaataaaataaatcatcaggcgccaataagcaaaaaaaaaaaaaacgaatggcacaatcaaagaaacaatcgaataaaataaatcatcaagccagacaaaa

SEQ ID NO: 263948 - DNA, 682 bp, Zea mays
ttgtctcagcagcactagcagtgacaaactcgaagcttgccttctagcttgtttacaccccaaaactaaaactagagtcggcggcggcaacaagcggtacgtagaggatgaagagcaggagcagcactctgttggtgatcctagttctccaggcccttctgctctctgcggctgtggccaaaggacctgcaggtacgtacgtgcttgcctctcctccggcctcctgacgctggaaaatttcatctagctgcgctcttggacccgctgctcgtgtatatatatagttcatcttcgcgcctgtacgtgcgtgtgtgtgtgacgaaataaagcatgtacgtacgcatgatgctgccgcgcagggccgaataatcagtgctggtgcggtgagtgcaccagctggtcgggcgtgtggacctgcgacgacctcctcaccaagtgcgccgccacctgcaagaactgcgtccccgtgtccacggacaagggggccatcaagtacaggtgccgcgacttcctccccgaaaactgcggctgcaagatccactagagactcatccaattccaccatggccgcgcgccacagggcacagcgatggatcctccatgttcctcgccgccgctgtacaagagagcaacataagtactctgtgtgttgagttatgggcctccacggagtaataacaca

SEQ ID NO: 263949 - DNA, 563 bp, Zea mays
cccacgcgtccgcccacgcgtccgcggacgcttgggcggcggcaacaagcggtacgtggaggatgaagagcaggagcagcactctgttggtgatcctagttctccaggcccttctgctctctgcggctgtggccaaaggacctgcagggccgaagaagcagtgctggtgcggcgagtgcaccagctggtcgggcgtgtggacctgcgacgacctcctcaccaagtgcgccgccacctgcaagaactgcgtccccgtctccacggacaagggcgccaccaagtacaggtgccgcgacttcctccccgaaaactgcggctgcaagatccactagagactcatccaatcaaccagcgccacagccgatggacccttcttccacatgctcctccgtccgtccgccttgctataagcaggcaggcagccaccaataagctagctcttgctgttgttttgcatgtttgattgggtgtcacttcccagtcgagatggaataaaataaatgtcaggcgcaaaaaaaaaaaaataaaatacggagagcatgcggatgaattcggcatgaggc

SEQ ID NO: 263950 - DNA, 429 bp, Zea mays
cagacgcgtggtgtacgaactcgaagcttgcgttcttgtagtagaggtcggcagcaagcggtagagcgagaggtcgagaagatgaagagcagcactctgttggcgatcctagttctccaggcccttctggtctctgcggccgtggccaaaggacctgcaggtacgtcgtgcttgccgagatttcatctagctggctgctagcttgattggacgctgctagctcgtttgtatacagttcatctgcgcgtatatatgtgcgggcggcgtgtgacgaaataaagcgagtacgcatgatgctgccgcgcagggccgacgacgaaaaagcagtgctggtgcggcgagtgcaccaactggtcggacgtgtggaccttcgacgaccttcttaccaagtgcgccgtcacctgcaagaactgcgtccccgtgttcacg

SEQ ID NO: 263951 - DNA, 523 bp, Zea mays
ctgggcagcaagattggatgaactaccaaggcgctcagcaagcacggaaggacatgaaagttccttgtgaaataatcagggtgccgcaggtggacattttgtgttcatagacaacccttcagggttccactcggctgtcttctatgcgtgccgtaatcttctatcagtaaatggagaggagggattcacatttcctgatggcctaatatctgcgtgaagtggcatgttcaacaagcttgctcaacaacagtttacataaagcaaagatatacgattgtggaaatcattgcccatttccaccaatttgcttgtatacggattatgctgtgtatatattacataacaaatgtattagtatcatttaatgcacgatttgtgaaagggcctgagtttgtatttagcgaattttaggttggtttttttccctttttcttctttcagtgcgcttgctagtcaatcccatactataagccgtgatcattttttgtttatgtctcataatataaggcacatctcactacac

SEQ ID NO: 263952 - DNA, 863 bp, Zea mays
cccacgcgtccggctgaggttttcaagaaagctggaacttatgatcccaagcggcttcttggagtgacaacactcgatgttgcgagggctaacacctttgtggccgaagtgcttggagttgatccaagagatgtcagtgttcctgttgttggagggcatgctgggataactatattgcccctcctctcccaggttacacctccgagctcattcactcaggatgaaaccagatatttgacagaccgcatacagaatggtggcacagaagttgtggaggcaaaggctggatcaggctccgcgactctgtcaatggcttttgctgcttctaaattcgctgacgcatgcttgcgagctatgcggggcgaactggaatcgtggaatgctcatatgttgcatccgaggtgacagaactgccgttctttgcaacgaaagtgaggcttggccgtggtggagccgaggagatcctcccgcttggccctttgaatgatttcgagagagctggtctggaagcggcaaagaaggaactgggcgagagcattcagaagggcatcgctttcatgagcaagtgaaagcggagcggtacggagggatcgtccctgagtcagatccggaccatacgtagtaacgtagatgtagggtgttgtgatatagtgctcctacctatacttgtaaggccacggtaaaaagaaggctaattaccctttagcaactgtgaccatctacttggcataatggcatggaataaatctttcgtcttcggtggcggacaagggccgtgcctgctctgtgctttgctggacggtgggtgagccacagcggggccgcaggaacaacagaatagcattggtttggagaccggtgtt

SEQ ID NO: 263953 - DNA, 1108 bp, Zea mays
ccctcgttttcgccttctgccaccgcgcggccccaaccaaccacaccggagcgcagcaatggcgggcaacggcgccatcgtggagagcgacccgatgaactggggcgcggcggccgcggatctggccgcgagccacctggaccaggtgcagcgcatggtggctcaggcccggcagcccgtggtcaagatcgagggttccaccctccgcgtaggccaggtgggcgccgtgggctccgcatggacgcctgcgagcctgccggggaacttgcaggcggaagctcgtgctctggcgaaggccaatgcttagtgcgtcggtcattgtattgccgaagtttgtgacctagatcggcgtcctcaacacgcccttctggtacaccgccggcgagcagcagtacttcaccgacaccaccaccctcttcatcatcgagctcatcctcatcggctgggccgagggccgccgttgggctgacatcatcaagcccggaagcgtcaacaccgatcccatcttccccagcaacaagctcaccggcaccgacgtcgggtaccctggtggcctgtggtttgacccgctcggctggggctccggctcgccggagaagatcaaggagctgcgcaccaaggagatcaagaacggacgcctcgccatgctcgccgtcatgggcgcctggttccaggccgagtacaccggcaccggccccatcgacaacctcttcgcccacctcgccgaccctggccacgccaccatcttccaggccttcacccccaaatgaggagttgaacttattattagcattttgaggagtgctaccacacatgcatcgtcaggttgatggccgatatatatgaaacttcacattttttttggtggggaaggactgctgagtagactgtcaatgatggaatgctcgtggtgcgagtgcgatgcatggtgtacttgtactatgttgtaaccagtgtaaaaaggggatactcgttagatgttatgccatgttctctgaatcaacggcttgatgatttgtgcaaaaaaaaaaaaaaaaaaaaaaaaaaaaagaaaaaaaaaaaaaaaaaagaaaaaacaaagcaaaaaaaaaagaacgaaaagacgggc

SEQ ID NO: 263954 - DNA, 1022 bp, Zea mays
cccacgcgtccgcccacgcgtgcgcccacgcgtccgcccacgcgtcccggcgacttcggctttgatccctggggcctcggatctgacccggagagcctgcggtggaacgtgcaggcggagctggtgcactgccggtgggcgatgctcggcgcggcgggtatcttcatcccggagttcctgaccaagatcggcgtcctcaacacgcccttctggtacaccgccggcgagcagcagtacttcaccgacaccaccaccctcttcatcatcgagctcatcctcatcggctgggccgagggccgccgttgggctgacatcatcaagcccggaagcgtcaacaccgaccccatcttccccagcaacaagctcaccggcaccgacgtcgggtaccctggtggcctgtggtttgacccgctcggctggggcgccggctcgccggagaagatcaaggagctgcgcaccaaggagatcaagaacggacgcctcgccatgctcgccgtcatgggcgcttggttccaggccgagtacaccggcaccggccccatcgacaacctcttcgcccacctcgccgaccctggccacgccaccatcttccaggccttcacccccaaatgaggagctctgatgaacttggcagttcgaggagtgctaccacacatgcatgcattgttaggtttgatggccgatatggaactttttctttttgttgggggcggactactgggtagactgtcaacgatgatgatgatgatgatgaaatgttcgtggtgcgatgcatggtgtacttgtactatgttgtaactaatgtaaaaatgcgatggtcgttagatgctatgtcctcttaattaaggcggacctacatgcaagtaaggatgcaaataagggtattcagtatttaattgaatactcattattttttgcaaaaaaatatgtatacatgtatatgttactaaaaaacaaaaaaaaagaaaaaaaaaaaagaagaagaaaaaaaaagaaaaaagaaaaaagaaatagatgccaga

SEQ ID NO: 263955 - DNA, 667 bp, Zea mays
ctcgtgggtcgacgcaagcctctacagtgacgtcgctgacctacgcgcccgccgacgcgtgggcaacgccacagcttgcgcccgcaatggcactcgtctccgcctcctcgtcctccaccaccgccgtcacggcgctccccaggaatgggcagcgggcgtcgtcctccttcctcggcggcaagacgctgctgagacaggccgaggcggcccggccgtcgttcgccgtgcgcgccgcggcggaccccaacaggccgatctggttccccggcagcacccctccgccgtggctcgacggcagccttcccggcgacttcggctttgatccctggggcctcggatctgacccggagagcctgcggtggaacgtgcaggcggagctggtgcactgccggtgggcgatgctcggcgcggcgggcatcttcatcccggagttcctgaccaagatcggcgtcctcaacacgcccttctggtacaccgccggcgagcagcagtacttcaccgacaccaccaccctcttcatcatcgagctcatcctcatcggctgggccgagggccgccgttgggctgacatcatcaagcccggaagcgtcaacaccgaccccatcttccccagcaacaagctcaccggcaccgacgtcgggtaccctggtggcctgtggtttgaccc

SEQ ID NO: 263956 - DNA, 487 bp, Zea mays
gacccacccggacccactgatcctagctcccacgctcaccgacgccacagcttgtgcgcgcgcaatggcactcgtgtccgcctcctcgtcctccaccaccgccgtcgcggcgctccccaggaatgggcagcagcgggcgtcgtcgtcgttgttctcctcctcctcctcttcctccttcctcgtcggcaagacgctgctgaggcaggccgaggcagcccggccgtcgttcgccgtgcgcgccgcggcggattccgacaggccgatctggttccccggcagcacccctccgccgtggctcgacggcagccttcccggcgacttcggctttgatccctggggcctcggatctgacccggagagcctgcggtggaacgtgcaggcggagctggtgcactgccggtgggcgatgctcggcgcggcgggtatcttcatcccggagttcctgaccaagatcggcgtcctcaacacgcccttctggtacaccgcc

SEQ ID NO: 263957 - DNA, 165 bp, Zea mays
aggtgcgagtgcgatgcatggtgtacttgtactatgttgtaaccagtgtaaaaaggggatactcgttagatgttatgccatgttctctgaatcaacggcttgatgatttgtgcaacgcttacaatcgttttgggtgataaagggcagtcctaggctcccagcctg

SEQ ID NO: 263958 - DNA, 1304 bp, Zea mays
ataggaagtcggatcgagaggataccagaggtactgcaaaagataagaaatatgttcgtgatgatgagaaggatcattctagggagaggggggctgggagggatgacaagtatggtgcttcaaaggtggcattgccggtctgggatgatgatagacatggaaggcctaatcggggtgactggaaatctgcttcttcaagggagcaaaggctggactgtggtgacagaagggattctacaagagtgaaaccaacagatcatgatgggagcaatgggggatcgggaaggtctttcaggcatggtcgttcaatgtctccagaagagcacaggcatcggggcaggcatgaatctcatccatcatcgagagtgtccagaagtgcagcacatatcgaggatattaactcgagaggaggtgaagcatcccggaatggagatcctgatgctttggcaacaatgaacgcaactgcagaagctcttgaagcaaaagaaaagcaaaagccatcgtttgaattgtctggaaagcttgctgaggagaccaacagagttgcaggtgtaaatctattatattcagaacccccagaggctcgaaagtcagagattagatggaggctctatgtatttaaagatggtgaaccactgaatgaaccactgtatgttcatcggatgacctgctacctttttggaagagaaaggaaagttgcagatgtccccacagatcatccctcctgcagcaagcaacatgcagttcttcaatacagacttgtggagaaggagcaactagatggcatgatgacaaagaaaataaggccttatctgatggatcttgatagtacaaatggaactttcatcaatggaaatcgcattgagcctcggcgatattatgagttatttgaaaaggacacaatcaagtttggcaatagtagccgggagtatgttttgctccacgaaaattcaacagaatgagttttgagaaaattcaacagaatgaggattgaaacaatcagccttttatgctgtagaagaaaaatacagcaaaaacatgaggttttgcatgttttaaaatttttagactggagattggccggcttgaacttctggtctgtgatttcttcacgtgttcaagtctataaggatattttgtgaaccaacatgtagtgctattgtaatgaaaagagctagctgcctgtagcagatagccctggggtattgtttgtattcaagcatgttttgcaccgctggcattcacatcattcggtatcggaggcagctgtttatggatcaatgccatagtaatcttaatgagtt

SEQ ID NO: 263959 - DNA, 272 bp, Zea mays
tcgcgcggagctcgccggggacgggctagtgcaggccgcggtggtcgccggcgccgaggcgctcggggtcgtcgtgggcctatccgtggtaaatggtatcctgaagcccgaggcgtagatggtgtaggctgctgggccttgtagtttcggccgaatacaagtgtttgggctttagcgcttcgttgtcggtgtcgctgtaatttgctgatgacctcttttgtgtgtaaattgttattattatagcaattattggagtgcggatatgggcagct

SEQ ID NO: 263960 - DNA, 720 bp, Zea mays
cataaactagccggacaagcgaacaaaaggtgtaagagcttacgaccgacgcggccaaatcgagataagagcaagatgacgtcgtcgacggcgttcagccaactgttcccttccgccgctgcggtatcccccgtccctcgctgcgtctccctgcagctcttctgcgccagcggtggagttgtccctggatggaggagaagatgccgccgcatggccatggtgcgcgcggccaccgcggatgctgcggcgcccgcctacacctccgattccctcatcctctacttcaaggcggagggcaccatggaggagagggccattcccaagatcacagaatctcttgagggtatggagggagtcaaggacctggaggtgctcattgaagaaggcatcggaagtgttgtgttaacaaaggagacaactgtgcaagctactggagtagcctcgaacctggtggaagctatccatggagctgggttcaagctgcaaactctaagcttggtcttcgatgatctcgacgagccagcataaggagccgtaggcattgaccaatgcagcgagtgagctaatacgtggtgccaaatgcatataattcggtctactgattatgtttactctgctacttacctttgatttcccaagcacgatcttgatcctttttttggcaaatgtgccagaaattaatcaatacatctatcgaaaaacatctacggaatttggctt

SEQ ID NO: 263961 - DNA, 1288 bp, Zea mays
cggacgcgtgggtctggaacgatttctaggccatttggagagaaccagattcagatgccaatgccacagcctgggggtatcagacctggtgatggtatgattcggccttgtttggttggcccattacctggacatcatggtgctgtgttgccttcttttgatcttgaacgtttgggtcagccacgtcctcttggaatgttgaacagcaatgactttggtggtgaggggttcaatgcttcaaggggtgctgcatatcccggaagacatgataatatcgaagacgatcggaaacattttccagcaccagcccttctggatggtcaaggcttgcaaagggaccctagacattttgagagagctttaggtagacctgatggtttccttgattcagtacctggaaggcctccttttccaaaccatagaagtgtaggtttgcatgagggttttccaagaaaacaaaacacaactgccagtcaccctgacgtcctgtcacatggagcagaatttgatcatcacagggctattggaatgcctaatttcagaaatccaggcccatttgctcaagggacaagtggtggtcctggtgcgccccctaaaaaccagcttggctctggtaaccttcctggaaacatacaacatgcttttgcaggcccagacatccctccagctccttttaaccttggtgacatgcatccaggtgaccctcatcttgttgctgactattctcagcatggatttcctaaaactgcagcacactttggtttgggtggattctcgagaaatgggaattctgggtggggccgaatatgcatgtttaactgtgggaccgcagagaatctggatctgcatgtacaaacaagggaacatcagcaatgtgcaatggacattatcctgaaaatgaagcaagatgttgcaaagaggaaaaaactgaattatggaggccccaagtcggtcaacaacaaaaaggtttctgggaagggccattttcgtgggaacaggcgctagtgttaactgattaaaattgatgtggttttgaaggttgctactggtgcttatggatgtgtcaatggcaatcgagaattgagatcttttcagacattctgttcacgcggttcagagtatttgaagtggaacttaaactggaaagtgtaagataatttccagcagagggctcctgtcatacttgcttgtttccctaacgatgatggtggatgtgcctgggtgccgactactgtttgaacgaactgatcgtgccttgctcattttctaccggcatcggatgtttttg

SEQ ID NO: 263962 - DNA, 376 bp, Zea mays
cctacgcgtccggttacaatagtaacttgcagggcagtatattcaatttggtagtaattagcaacttggtgacattgttgttcgtgcttggcataatgtagacgatctatgtttcttcgggctcttttcttttgtgtttctttgggattcttgtagatggtggatgtgcctgggtgccgactactgtttgaacgaactgatcgtgccttgctcattttctaccggcatcggatgtttttgaccgactccagggcacctcatatctaccgttgctgaggtttaaattgtaaaattcccgtcctgtagttctttaattacaactaatgcaccaggcgaacgaaaattcttgtaatgtattcaccaatatttctagaga

SEQ ID NO: 263963 - DNA, 1443 bp, Zea mays
  unsure (1)..(1443): unsure at all n locations
gacccacgcgtccgatcgaggataacctccttagcccacttatttctcgtcaggcaacaagtgtggaaggaaaggagcagtaagcagcatgggcattggcggaggatggcagttggcgtggaaatggaccgagagagagggcgaagatgggcaaaaggaaggtggcttccagcgtatttacttgcatgaggagggcgtacaaggcaacaggggttctatattgtcattaccaggcggggatgttcctcctggtggtgagttcatccaggctgcagctcttgtgagccaaccagctctttactctaaggaactgctggagcaacgtgctgctggtcctgcgatgatgcatccatctgaagcagttactaaaggtccaagatgggccgacctatttgagcctggggtgaagcatgcactgtttgttggcataggaatacagatcctgcaacagtttgctggcatcaacggcgttctctactacactcctcaaattcttgagcaagcaggcgtcggtgttcttctgtcgaacctcggccttaacgcttcttcggcatcaatcctcattagcgccctgacgaccttactgatgctcccaagcatcggcattgcgatgaggctcatggatatgtccggaaggaggtttctcctcctcgcgacgatcccagtcctaatagtcgcgctactcgtcctggtggtgtccaacatcgtggacgtgggggacgtggcgcacgcggcgctctccacggccagcgtcatagtctacttctgcttcttcgtcatggggttcgggcccgtccccaacatcctctgcgcagagatcttccccaccacggtccgcggtgtctgcatcgccatctgcgccctggccttctgggtcggtgacatcatcgtgacgtacactctccccgtgatgctgaacgtcgtcgggctcgccggcgtctttggggtgtacgccgtcgtgtgcgtcctagccctcgcgttcgtgttcgtcaaggtgcccgagacgaagggcatgcctctcgaggtcatcaccgagttcttctccgttggggcaaagcaagccaaggaagaggaggaggaggaggccagggaaggttgatcacccggacggccggacccagttaccggcaccgcctgtggggatttttgtggtctgcacacttcactgtggttggtcctgtgatgatgtatttgtgaaaaaaaaaactttgggtagggggcagagatgatttggctgtacaatgtgaggcttgattctgccaaaggctggccttcagaactaggaagggtgtctgttatcttcttttgttgcttggagaccttgtgcttgtgttggttggaattttgttgcctatgtaactagtggtgtatgacagttatgctattggtttcttttcaaaaaaaaaaaaaaaaaaaaaaaaaaaaaaaaaaaaaaaaaannaa

SEQ ID NO: 263964 - DNA, 353 bp, Zea mays
ctcgtcaggcaacaagtgtggaaggaaaggagatcgctgcacctcatggtagcatattgggtgctgtgggaaggagcagtagcttgcagggtggggaggcagtaagcagcatgggcattggcggaggatggcagttggcgtggaaatggaccgagagagagggcgaagatgggcaaaaggaaggtggcttccagcgtatttacttgcatgaggagggcgtacaaggcaacaggggttctatattgtcattaccaggcggggatgttcctcctggtggtgagttcatccaggctgcagctcttgtgagccaaccagctctttactctaaggaactgctggagcaacgtgctgct

SEQ ID NO: 263965 - DNA, 935 bp, Zea mays
  unsure (1)..(935): unsure at all n locations
accgtgtgcccatcgcaataaaataaaatctataatagagagaggaggtagcaacaccgactgcttaatctcttccttttcctcttcctatctccagcgcatcccaagaggcggaaagggaggagcgtggagcggcgaattattgtttgtttccccaagatgtcttctccaagcaagcgccgggagatggacctcatgaagctgatgatgagcgactacaaggtggagatggtgaacgatgggatgcaggagttctttgttgaatttcgtgggcctaacgaaagcatttatcaaggaggtgtatggaaggttagagtagaattgccagacgcatatccttacaaatccccatcgattggtttcatcaataagatatatcacccaaatgtcgatgaaatgtctggttcagtctgtttggatgtcatcaaccagacttggagcccaatgtttgatcttgtcaatgtgttcgaggtcttccttccacaacttctgttatatcctaatccttctgatccattaaatggagatgcagctgcgttgatgatgcgtgatcgccctgcttatgaacaaaaagtgaaagagtactgtgaaaaatacgccaaaccagaggatgctggtgtcagcccagaagacgagtccagtgacgaagagctgagtgaagaggaaaatgactcgggtgatgaggagataatgggcaaaccagacacatagtcgagttggaacctagatctgtaatctgcacacgatgtttattgcagcaagtgcaattaaatagtccatggatgttcccgtgcagtctgaatgccatgtaaataaactgcaatttcatgttcgctaatcttttttggatttcccgccgttcaatcccctaaacaccccaaaaaaaaaaaaaaaaaaaaaaaaaaaanaaaannaaaaaaaanaaagggcgaaca

SEQ ID NO: 263966 - DNA, 662 bp, Zea mays
cccaagagtccaatatatagagttcagaatcaattcacaagtgcagcatgaagaagacatggccacatatgtctatcacttgcggcccatcaacttacaaaaacttcgacaacatgagtaagtacatgaccctttttactacaaaacataacagggctcagtgccttttactgtattgtttgtccttgagagaataatgaagttgacccaagtccaaaatttcttcaatcgctcgcaacaccggctgcttaatctcttcttttccctcctctttatctccagcgcatcgtaaagggaggagcggagcggcgaattcttgtggtttcccaagatgtcttctccaagcaagcgccgggagatggacctcatgaagctgatgatgagcgactacaaggtggatatggtgaacgatgggatgcaggagttctttgttgaatttcgtgggcctaacgaaagcatttatcaaggaggtatatggagggttagagtagaactgccagatgcgtatccttacaaatccccatcgattggtttcatcaataagatatatcacccaaatgtcgatgaaatgtctggttcagtctgtttggatgtcatcaaccagacatggagcccaatgtttgatcttgtcaatgtgttcgaggtcttccttccacaacttc

SEQ ID NO: 263967 - DNA, 783 bp, Zea mays
cagaaataaaatcaataatagagagagatgaggtagcaacaccggctgcttaatctctgcttttccgtcctctttatctccagcgcatcgtaaagggaggagcggagcggcgaattcttgtggtttcccaagatgtcttctccaagcaagcgccgggagatggacctcatgaagctgatgatgagcgactacaaggtggatatggtgaacgatgggatgcaggagttctttgttgaatttcgtgggcctaacgaaagcatttatcaatgatggatttggaaggtttgaagagaactggcaaattcctgttcttaccaattcccattgattgggttcattaataagatatatcacccaaatgtcgatgaaatgtctggttcagtctgtttggatgtcatcaaccagacatggagcccaatgtttgctgcgttgatgatgcgtgatcgccctgcttacgaacaaaaagtgaaagagtactgtgaaaaatacgccaaaccaggggatgctggtgtcaccccagaagagcagtccagtgacgaagagctgagtgaagatgaagacgactcgggtgatgaggagataatgggcaaaccagacccatagtcaagttggcacctactatacctgtaatctgcactcgatgtttattgcagcaactgcaattaaacaccccatgaacgtccgcgtgcagtctgagtgccatgtaaataaactgcagtttcaccaattggatttccagcataactatgtcttcgaatcatgagtgtagtgtaggttcgtgcg

SEQ ID NO: 263968 - DNA, 593 bp, Zea mays
cccgggctgcctgagctgcagcggcgcgtcgcggcccaggggtggcccatcgtcgcgcgacgcgacctagcggcagacgtccttcgtccagccccagcccaagctccagccgccgcttggctcctgccgtcctgcgtcctggtccagcgcttcctctccagctccagcgccgcagcgcgctcgcccgtgcctcatctccagctctccagcgccgcagcgcgctcacggcccaccagcgccagccgccaggccgccaccgcggcaccgccaggcgcccaggcgcgctcgcccgccgaccgccgttgtccttgtccagccgccggagtccggagcaccgagcacgggagcagccgaggcgagcaaccgagcaccgccattgagcaacagtgaccgtgagccaagccggggaacaaaggatcagaaatggctatgcaggccgcaaggaggctagcgtctttgaaactccaacgacgcctactccttccctctcaggccgggtccccaagcataagcatcccaaccgcagcggcggcggcagccttccttcactcccatgccaccagctttcggtacaagcaggttcccaaaaaggt

SEQ ID NO: 263969 - DNA, 550 bp, Zea mays
cccacgcgtccggcttcggacagttgtgagagagaggggaagggatcgagagcgcggcggaggcgatggcgagcggagggaagggactcaacgcgactggggagttcttccggcggagggacgagtggaggaggcaccctatggcggggaaccagctgcgccacgccacacccgggctcggcatcgccatcgtcgccttcgggatctacctcgtcggcgaggccgcctacaaccgcctctaccgcccctccggcgacaaccaccactagatcgccggcaggatccgtgactcggtcaagaagctggagccaactttaccaagcactggtgctgttgatgtttttacagttttgagctcataaggtcagccatgaccatattgtaatctgtgaccaggtagacttgcccactggtccgtccaactattgtcttgggaccctgtgttaatccttgctatatggatctgacagtgctcatgtaattcaagaatcctggactatcttttatgtgcttatttgagtttgcaaaaaaaaagaaaaaggaggaaaaa

SEQ ID NO: 263970 - DNA, 305 bp, Zea mays
cccacgcgtccgctcacgcgtccgcccacgcgtccggagggatcgagagcgcggcggacgcgatggcgagcggacggatggcactcaacgcgactggggacttcttccggcggagggacgagtggaggaggcaccctatggtcggggaaccagctgcgccacgccacacccgggctcggcatcgccatcgtcgcctttcgggatctacctcgtcggctgaagcgctacaaccgctctaccgccctccgcgacaacaccatagatcccgcagatcgtgatcgtcagacctgagcaattacagcatg

SEQ ID NO: 263971 - DNA, 1950 bp, Zea mays
ctaggttctagtggtccaaacaaccaaacagcccgctcgtgccggactaggggctcgttggagagaaaacttattacaaccgaccaacgcgctttgcaacgcctccgctgcaatcagcccccgcggcgagattgccctgcccctgagtgctagttctcgccgttacgtaaggcttcttggccttgcgtcctccgtctttcgttgctgatacatcgaggtattaaagaagctgcctggttccgggcagcagaggtcgccgccgcctgcagcaatggccgacttctcctggctcacggtgcttggcttcctattcctcaccttcaactcaggcatggcgatttatcggtccaacggtgacgccggctccgtcgctttcgtcgtggtatcttatctcgacctggtggccctgttcgcctgcttgcgctactacgagcagttggatcagcagcactcccaaaagcgcgcgagggtcaaggctggggtttggagcctcacgaccctccttactatcatgttcagttacaaggtggctgagattatgcccctgccagtcaaacttgttgtctggtcgatggcagccgctaccacctgtggcggcttctacgctttcttcgtccacagcgagaagcctgtcatgccagcggtggcgccacggcccgccgcggccaaggatgcagcctccaactaggttcgtttgccaccacaaggcgcatactgccggccttggttcggcaccgcgcgttagatcccagggccaactaggttgttctctaattcctaatttcttggccttttctcttccactctccgccattttagctgtcgcctcggttgttttagcttgccggcgtggacagactggcagatctggagctcggcgcgaccagatccggtgctgctgtgcccgatggcagaggagatctctctggtttactctgctaagagtcaaagaggagctgatgacgacaactaagcttgggttaccgataattgagcctgttctctgcacgagaagaaatttccggcctcacctagtactaataagtatgctggatagtcccccagcacgggagttaattgtatcaagagaagtggagaccaagggcagagtagaactacagaggatatctttgtatatggaggctacatgtgaacaagaaaggagaggaggaagactgtatagatctgaagaacctaaggagaaacaatcagagtacttgctggaacacatatatcttccatgataaaagttagatttcttgtttggtgctcatgcatgggttccatatgttcttcccgtcttattagaacatatctattggactaccatgcataaaaagccgtcgtttcataaactattgggactatacggcaccaatgaagctattgatgctggccggcaagctgacagcgaggtgaaagcttttcaaaacgatattccgagtggaagagaaaagaaaataaaagaaatagcaggttattttagaaaaaaatagttggcccatatgtaacgcgcggtagctttaagattattatgtccagcagcttattcatatattatacatatattcaaatttcactctgtgaatagtagtctaaaatacagtagtgttttgagtaaactatggataaactgctggacaaggtctaagataagtgctgcgtggtggcaacaaacgacacttagtcttgtttggtggcaatgatattggaggggctaaagttttttcgctcctaaacaagctcctaaacaagctcctaagaatcttacgtgttatgttgcattatggaatatctatgtatctgcaaactctctgtagtctgtatgtacctcggatgtgctctatgtggctttgtaattctgaacggaggaagtaataataagataaatggatggcgtaacaagataaaaaaaaaaacaaaaaaacaaaaaaaaagggcggccgctct

SEQ ID NO: 263972 - DNA, 1157 bp, Zea mays
cccacgcgtccgccggggtggtaaaacccggcgaccacatcaaaacacgaggcgtccccgactccgcagtccgcaggaccggtcactcggcagtcggcacgcaggctagcagcacagcagcagccagagccatcccctctcctcgctacgcttcgcttcctcggcgccgattcctcctcctcctcctccaccctcgtccgtccccttccggcgcgcgagctcgcccgagatggcgaacgcgagatcgggtgtcgctgtgaacgatgagtgcatgctgaagtttggcgagctgcagtcgaagaggctgcaccgcttcataactttcaagatggacgacaagttcaaggagatagttgtggaccaggtcggggatcgcgctaccagctacgatgacttcacaaacagcctccctgagaatgactgccgatacgcgatctatgatttcgactttgttactgcagaggatgtccagaagagcaggatcttctatatcctatggtccccatcctccgccaaggtgaagagcaagatgctttatgcaagctcaaaccagaaattcaagagtggcctcaatggcattcaggttgaactccaggccacagatgcgagtgaaatcagcctcgatgagatcaaggatcgggcacgctaggcgcaccgccatcgcgagtttcatgatcacgcatcatggactcgcctactactgtggatttgtatgccattatagacttggtgctgcgaaagactgctttggtgatttgtgggtttgttgctgtgtaaaaagatcctcatggcttccagaagaccatgaaggtttggatctatcatgtaattccttgttatctgccaattatgtatggactatggacatgtgttgcgctgttcaactcactacaaataagtaatcgatatattccctacccaaaaaaaaaaaaaaaaaaaaaaaaaaaaaaaaaaaaaaaaaaaaaaaaaaaaaaaaaaaaaaaaaagaaaaaaaaaaaaaaaaaacaaaacataaaaaaaaaaaacataaaacgtcatacattttcaatagagtaacctaaattaaataaactggccactgttaaacaactttcggactcaaaaaaacttgcctttacccacctaaatttccttgcagcacattcaattttccccag

SEQ ID NO: 263973 - DNA, 908 bp, Zea mays
atcaaaacacgagggcgtctcccgcaggactggtcactcggcacgcaggcagaggcagcatagcagcagccagctccatccatcctctttcccctcctcgcttcgcttcctcggcggattcctcctccctcggccgtccccgtcccctttttcggcgcgcgagctcgcccgagatggcaaacgcgagatcgggtgtcgctgtgaatgacgagtgcatgctcaagttcggcgagctgcagtcgaagaggctgcaccgcttcctaactttcaagatggacgacaagttcaaggagatcgttgtggaccaggtcggggatcgcgctaccagctacgaggacttcacaaacagcctccccgagaatgactgccgatacgcgatctatgatttcgactttgtcactgcagaagatgtccagaagagcaggatcttctatatcctatggtccccatcctccgccaaggtgaagagcaagatgctttatgcaagctcaaaccaaaaattcaagagtgggctcaatggcattcaggtggaactgcaggctactgatgcaagtgaaatcagccttgatgagatcaaggatcgggctcgctaggcatcatgatcatgcatcatggactcggcctactactgtggatttgtatgccattatagacttggtgctgtgaaagactgcttgatgatttgcgggtttgttgctgtgtaaaaaaaggtcccatggctcccagaagaccatgaaggttcggatctatcatgtaattccttgttatctgccaattatgtatggactatggacatgtgttgcgctgttcaacttactactacaaataagtaatcgatatgttccctaaaaaaaaaagaaagaacgataaaagtgaaaggtggagagggtatgaaaaaaaaagggcgg

SEQ ID NO: 263974 - DNA, 752 bp, Zea mays
  unsure (1)..(752): unsure at all n locations
ccaacaacacccaacaccgggcgggcttattaaactacgggggggggttacaaaacngattccccccccctcggcaggcccctgccccttccggcacccgagctcccccgagaaggcaaatgcaagatccgctgtccctgggaatgacaagtgcatgctcaagttcggcgagctgcagtcaaagaggctgcaccgcttcctaactttcaagatggacgacaagttcaaggagatcgttcaggaccaggtcggggatcgcgctaccagctacgaggacttcacaaacagcctccccaagaatgactgccgatacgcgagctatgaatgctactctgacactgcagaagacgtccacaagagcaggatcttctatatcctatggtccccatactccgccaaggtgaagagcaagatgctttatgcaagctcaaaccaaaaattcaagagtgggcccaatggcattcaggtggaactgcaggctactgatgcaagtgagatcagccttgatgagatcaaggatcgggctcgctaggcatcatgatcatgcatcatggactcggcctactactgtggatttgtatgccattatagacttggtgctgtgatagactgcttgatgatttgcgggtatgttgctgtgtaaaaaaggtccatggctccagaagacatgaacgtcggatcatcatgaatcttgtatctgcattatgatgatatggcagtgtgcgcgtcactatactcaatagtatcgtagt

SEQ ID NO: 263975 - DNA, 375 bp, Zea mays
ctctcctcggaggctagctctacttccacagaccatgcgatcccgatgactcgctacgcttcgcttcctcggcgccgattcctcctactcctcctccaccctcgtccgcgtccccttccggcgcacgagctcgcccgagatggcgaacgcgagatcgggtgtcgctgcgaacgatgagtgcatgctgatgtttggcgagctgcagtcgaagaggctgcaccgcttcataactttcaagatggacgacatgttcaaggagatagttgtggaccaggtcggggatcgcgctaccagctacgatgacttcacaaaacagcccttcctgaagaattgacctgcgcgtataccgctgatactatagattttcgacttttg

SEQ ID NO: 263976 - DNA, 412 bp, Zea mays
acaagtttcaatctggtgagcttagctcagaatcggtttacttgtcttctgtttcaaaaaaaaaaaatagcagcagccagctccatccatcctctttcccctcctcgcttcgcttcctcggcggattcctcctccctcgaccgtccccgtccccgtccccttccggcgcgcaacgacgcccgagatggcaaacgcgagatcgggtgtcgctgtgaatgacgagtgcatgctcaagttcggcgagctgcggtcgatgaggctgcaccgcttcctaactttcaagatggacgacaagttcaaggagatagttgtggaccaggtttgtgatcgcgcttccagctacgatgacttctcattcatgtcttcctgtgattttattgcctatttctctttctatgattttctactattt

SEQ ID NO: 263977 - DNA, 566 bp, Zea mays
  unsure (1)..(566): unsure at all n locations
tccacgcgtccggaaaaaacagaggaggaaaaaaacacccaaaaaaccaccttcttttcctgcgttcccctgctcgatccccgacgagaattcgctcccgaacccatcgatctgctctccgcagtccgccgatccgtggatcgatccgtgcgcgggctcggtccgccccgggttccgatctggtcgccgcctcgcctgaggagatgaacggcgccgggggcagccaccaccagcagcagcagaggctccggcagcagcagcagcaggcgctcctgatgcagcaggcgctgcagcagcagcagcagcagcagcagtaccagtccggcgtcctcgccgccgcggcggcggcggccatgacccagatggaacctgtttccaatggcaaccttccacctgggtttgatccttccacttgtcgcagtgtgtatgttggaaatgtgaaccctaatgtcacggagagccttttgattgaagttttccagagtgctggccttgtggaaagatgtcagctcataccgacagagaagtcttnctttgggtttgtggactactatgatcgaagatct

SEQ ID NO: 263978 - DNA, 493 bp, Zea mays
cccacgcgtccgcccacgcgtccgcccacgcgtccgaaaaaatatcacctcctcttcctgcattcccctgctcgatccccggcgaggaattcgcccccgaacccatcgatctgctctccccagtccgccgatccgcggatcgatccgtgcgcgggctcggtccgccccggggttccgatctggtcgccgcctcgcctgaggagatgaacggcgccgggggcagccaccaccagcagcagcagaggctccggcagcagcagcagcaggcgctcctgatgcagcaggcgctgcagcagcagcagcagcagcagtaccagtccggcgtcctcgccgccgcggcggcggcggccatgacccagatggaacctgtttccaatggcaaccttccacctgggtttgatccttccacttgtcgcagtgtgtgagtgctttcggtgttcttctctgttttcactttcttatttgattgatagcttatttttcccttttctct

SEQ ID NO: 263979 - DNA, 485 bp, Zea mays
ggacgctggcgtacgcgtccgccacgcgcgcccacgcgtccgatcacctcctcttcctgcattcccctgctcgatccccggcgaggaattcgcccccgaatccatcgatttgctcagtccagtccgccgatccgcggatcgattcgtgcgcgggctctgtccgccccggggttccgatctggtcctcgcctcgccggaggaggagctggaggagatgaacggcaccgggggcagccaccaccagcagcagcacaggctccggcagcagcagcagcagcaggcgctcctgatgcagcaggcgctgcagcagcagcagcagcaacatcagtaccagtccggcgtcctcgccgccgcggcagccgcggccatgacccagatggaacctatttccaatggcaatcttccacctggctttgatccttccacttgtcgcagtgtgtatgttggaaacgtgaaccctaatgtcacggagagccttttgattg

SEQ ID NO: 263980 - DNA, 1160 bp, Zea mays
cccacgcgtccgcggacgcgtgggcggaccgtgggcgcacgcgtccgcacacactcgggtaaagctatctcgagctagctagctgctgtaagccgttgccatggccaaaatggtgttgctctgcgtgctcgtctccttcctcctgatgcccttggcctccctagccctgacgcaggacttctgcgtcgccgacctgacctgcagcgacacgccggcggggtacccgtgcaagtccagcgtcaccgccaacgacttctacttccacggcctggccggccagggcaaaataaacccactcatcaaggccgccgtgaccccggccttcgtgggccagttcccgggcgtcaacgggcttggcatctctgcggccaggctcgacatcgaggtgggcggcgtcgtgccgctgcacacccacccggcgggctcagagctcctcttcgtgacccagggcaccgtcgccgccggcttcatcagctccggctccaacaccgtctacaccaagacgctgtacgccggcgacatcatggtgttcccccagggcctgctccactaccagtacaacgccggcaccggcgctgccgtgggcctcgtcgccttcagcagccccaaccccggcctgcagatcaccgactttgcgctctttgccaacaacctcccgtccgccgtcgtggagaaggtcaccttcttggacgacgcgcaggtgaagaagctcaagagtgtgctcggcggcagcggttaacttgtttttcgagacaatacagtgcaggctgggtatgcatcgtcgccgtcgtcgtcttggtccgtcgtcatcgaatggaacgcgtgtgcttgctgttgctgctgcatgcgtgcgtgcacctgtcgtcgcgtgtcaaagtactcgtggtctatttcatcttacccttatttattcatctacttttcatatattcagggatgtattcagtttccatattgcattttgttgcaatgaaagagtaacatgtgcatctgattggttcaaattagctttgtggtcgatgtcgtttgtaaagctatatgatcgcttaaggttacatttccctgtttgttcagtgttttatatatacaccactttgtagtgccgcatgctgttaatctgtttcattacatataagtcgtactatcgaaatacttatccc

SEQ ID NO: 263981 - DNA, 978 bp, Zea mays
agcggtgcgagcggaggaggcgaccgaagcgccacttgcttgagtagcgaagcgcgagagcaatggcgtcgctgtcgtgcgcctccacgctgccctggacccccgcctcctacccgcggccctcggcggggcgctgcctcacggcctctcgccgggctccgtcgctggtcatcgtcgcccaggggaaggtcaagaagtaccgccaggtcatattgacagacgacatagaagaggtggggaagaaaggggatacactgaaggtgcgagctggattctaccgcaacttcctccttcccaagggcaaggctacacttctgaccccagaagtcctcaaggaaatgcagctggagcaggagagaatagaagctgagaagaagcgggtaaaagaagacgcgcaacaacttgctcgagtttttgaaaccattggcgctttcaaactccctcgcaaaggtggaaaaggaaaacagatctttgggagtgtcacggcacaggatgttgttgacataataaagtcacaacttaatagggatgtcgacaagaagctggtgacggttccagaaatccgtgaaatcggagagtatgttgcagagatcaagcttcacccagacgtgacagcgcgagtaaggctgaatgtctatgcgaaatgagctcagcagttacagaacctcgagtaatggactttggcgaagcctgatgtttgccagagattttgctgaaagtgccaggtgctgcggtagacatgaggcctggtctggccgtgacttgcctggttttgatacacaattcactggctcactgcgcatcctattccctatcatgtgaagtcaagttttcaacaattatatctgttgattttgaggtggacaatataaattgttgtaaagcacaatttgtttgaactgtagagcactacttggccaaaaaaaagagtcgagaatgccggcgtctacttcaacgtcgcatgatgcaataataatt

SEQ ID NO: 263982 - DNA, 1555 bp, Zea mays
ggcgacagatgcgccacttgcttgagtagcgaagcgcgagagcaatggcgtcgctgtcgtgcgcctccacgctgccctggacccccgcctcctccccgcggccctcggcggaccgccgcctcacggcctctcgccgggctccgtcgctggtcatcgtcgcccaggggaaggtgaagaaacaccctcaggtcatattgacagatgacatagaagaggtggggaagaaaggggatacaatgaaggtgcgagctggattctaccgcaactccttgcttcccaagggcaaggctgcgcttctaaccccagcagtccacaagcaaaatacaatagtggcatctgagaatgaaaatccacctttaatgccggcaatcatgactcctggtggtgcgcttgatctcgcaactgtactactgggaaatcgtataatcttcattggccaatatattaactcccaggtggcccaacgtgtgatatcacagcttgtaacacttgctgccatcgatgaagaggctgatattctgatatatcttaactgccctggtggaagtctctattcgatcttagcgatttatgattgcatgtcctggataaagcccaaagttgggacagtgtgctttggtgttgttgctagtcaagcagcaattatccttgcaggtggcgagaagggaatgcgctatgcaatgccaaatgctagagtaatgattcatcaacctcaaggtggatctgagggtaatgtggaggaggtgaggcgacaggttggagaaaccatctatgctcgtgcataaagttgataaaatgtttgccgctttcaccgggcaaccacttgacatggtgcagcagtggacagagagggatcggttcatgtctgcttagaggccatggatttcggattgcttgatgctttactggaaacaagatactagagaacgggcacaacccacattctattagcagactagaaatactgcagaactggagccaaagttagatgcttgccgtccatctcgattaaagccctggaatgacagatgtttaccgaagaacaagatttgcttccattgcatttatggttgtaccattcaccagcttatggtggcacgtaggatggcattgtcatgcactcatgctaaaacgatgaagactgtttaatgtagacctagatgatctttgcggatgggagaaaagtgccagtttgcaaacttatagcccaggaaaggagaagtggtttaagaaatcgtttggattcaacatattggatttatggtgagaccgtcacatgatttttatttgtatgtgggcaactactcgtgttagcgttcaggaaaactcatacattcggatgttgcaaatacgtcttcaaggattttcataagggccccgtttggtttggacactttgaattgaattttattctaataatcataatttggacccagatcaattaagctggtatgtttttttttataaatatatctgtatactattgttgtccgacgtatcataactctatatgttgcatcccttgataatatgatatacctataattttaagtac

SEQ ID NO: 263983 - DNA, 993 bp, Zea mays
ggtcgacacaagactctagaatgattcgtattaagcggtgctcagtgctcacacatgagacctacgtatgcctccgttccttgtgatgaggaaatatgcttgcgttcgttctccgtgggcgttgttcctacaaattcacttgctctctgtctctctctctatatacacactgtataaaacaagaacacctgtttatcatctcttcttataaaaaaaaaaaaaaaaaagcacagctatatcctgggttacgttcctcgcacggcggaggcaaacaaaccctagccgccagcgcaggcggtcagggagcgagtaccgagcgccccagttcacacgtgagatgtcagaatacaagaacgtcgttggggggaggctaaagctgaagggtaaggcactggatgtgaaggaaggtggagtcaagaagaaaaaaaagaagcatcagcttgaagagtcgtctcagattgagcacgatgagctccacaaagggggaaactctggcttaccagctgatcacaacaatgagcttattgaagctggcaaggtgggagatgaagaaaggaatctacatccagactacgaccacctcacaccggcggagcgacgctatatagatcagaagcagaagatcgacatgcaaaagctggccaaagttgctaacaagtcacacagggaccgtatccaggacttcaaccagtatctggcgaacctcagcgagcactatgacatccctaaagttggccctggctaacaaacatagccaaactgctgtgtacgcacaaacaattgtatgctcggtgggcttcaagaacattaaaaatatataaatgtatgttgggtgattgggtctatccagctttttgttagcatgttatatatatcctagtattttccacttttcttttaaaaaacataattgatactcttatgtgtattgatttgaattgaattacgtctgcatatgttcaaaaaaaaaaaagaaaaaaagaaaaaaagaaa

SEQ ID NO: 263984 - DNA, 1034 bp, Zea mays
cccacgcgtccgcggacgcgtgggccgacgcgtgcgcggacgcgtgggcgcgagtgagtgaacaccagccgtattgtcccgactcctgaccccgaccgatcctcgcctgctgcagccatggcgacctccgcggcgctctccaccgccgccaatcccacccagctctaccggtcccgcgcttcgctgggcaagccggtgaaggggcttggcctgagcatgggccgcgagcgcgcccagcggagcattgtgtgccaggcggcgagcagcatctccgccgaccgcgtccccgacatggagaagcggaagctgatgaacctcctcctcctcggcgccatctcgttgcccaccgtcggcatggtcgtcccctacggcgccttcttcgtccctgccggctccgggaacgccggcggcgggacctacgcgaaggacaagctgggcaacgacatcacggtggaggcgtggctcaacacgcacggtcccaacgaccgcacgctcgcgcaggggctcaagggtgaccccacgtacctggtggtggagcaggacaagacgctggccacctacgggatcaacgccgtgtgcactcacctcggctgcgtcgtgccgtggaacggcgccgagaacaagttcatctgcccctgccacggatcccagtacaacaaccagggcaaggtggtccgtggaccggcgcctctgtcgctggccctggttcacgccgacgtcgacgacggcaaggtcctcttcgtcccgtgggtggagaccgacttcaggaccggcgaggacccgtggtggaaggcatgaggatgatccgaaaccagcggtgctcagtgctcataggctttctccgagggcgttgttgctacaaattcacttgcctcttgcctccaaattatatatattacacacactgcatgaaacaagaacacagctgtttgtcatctcttcactataaccttttgaacactctgaaatctaatggaatcaaatatagacttgctctccctgctggtcacttgatcagcagatggcagagaaag

SEQ ID NO: 263985 - DNA, 467 bp, Zea mays
gaccaagtaactagaaattgatgtgagcctactacataaaagtcatttcggcaaaaaaaaaaggtctaaattgctctccctgctggtcacttgatcagcagatggcagagaaagtctatatttgattccattagatttcagagtgttcaaaaggttatagtgaagagatgacaaacagctgtgttcttgtttcatgcagtgtgtgtaatatatataatttggaggcaagaggcaagtgaatttgtagcaacaacgccctcggagaaagcctttgagcactgagcaccgcttgtgtcggatgatcctcctcatgcactccaccacgggtcctggccggtcctgaagtcggtctccacccacgggacgaagaggaccttgccgtcgtcgacgtcggcgttaaccagagccagcgacaaagggcccggtccgcggaccctcggagaaagcctatgagcactgagcaccgt

SEQ ID NO: 263986 - DNA, 450 bp, Zea mays
cgcgaccccgacgcctgcgttgccctacccctacctgacctccactgctccacacctgcacctgcctgcgacaaaagcaaaacctagccgccgcggcgccgcccgccgacctgccgtgccgactgctgagtgccgaccgacgtgcgcccgctgtccgctcgacgttgttggcctccctcgacgccgctggcaggtggccgctcgacggagtcgacgcctcacagcctccctcgacgcgacgccgctggccactcgacggagtccgcgcctcacagtcacagtgagatgtcagaatacaagaacgtcgttggggggaggctaaagctgaagggtagcgcactcgacgtgaaggaaggtggagtcgagaagaaaaacaagaagcatccactcgaagagtcgtctcagattgagcaagaatgactccacaaagggggggactctggcttacca

SEQ ID NO: 263987 - DNA, 1211 bp, Zea mays
atgagcaagcctgtcgacgccagtgagtgaacaccagccgtcttggcccgcttctcccctgctgcggccatggcgacctccgcggcgctctcgaccgccgccaaccccacccagctctgccggtcccgcgctgcgctgggcaagccagtgaaggggcttggcctggggatggggcgggagcgcgcaagccagcggagcatcacgtgccaggcggcgagcagcatccccgccgaccgcgtccccgacatggagaagcggaagctgatgaacctcctcctcctgggcgccatatcgctgcccaccgtcggcatggtcgtcccctacggcgccttcttcgtccccgccggctccgggaacggcggcggcgggacctacgccaaggacaagctgggcaacgacatcacggtggaggagtggctcaacacgcacggtcccaacgaccgtacgctcgcgcaggggctcaagggtgaccccacgtacctggtggtggagcaggacaagacgctggccacctacgggatcaacgccgtgtgcacccacctcggctgcgtcgtgccgtggaacggcgccgagaacaagttcatctgcccatgccacggatcccagtacaacaaccagggcaaggtggtccgtggaccggcgcctctgtcgctggccctggttcacgccgacgtcgacgacggcaaggtcctcttcgtcccgtgggtggagaccgacttcaggaccggcgaggacccgtggtggaaggcatgaggatgatccgaaaccagcggtgctcagtgctcacacatgagacctacgtatgcctccgttccttgtgatgaggaaatatgcttgcgttcgttctccgtgggcgttgttcctacaaattcacttgctttctgtctctctctctatatacacactgtataaaacaagaacagctgtttatcatctcttcttatataaccttttgaacactgtgaaaaaataatatgtgtgtgtatatagagagagagacagaaagcaagtgaatttgtaggaacaacgcccacggagaacgaacgcaagcatatttcctcatcacaaggaacggaggcatacgtaggtctcatgtgtgagcactgagcaccgctggtttcggatcatcctacaaattcacttgctttctgtctctctctctatatacacacattataaaacaagaacagctgtttatcatctcttcttat

SEQ ID NO: 263988 - DNA, 448 bp, Zea mays
tgggtcgtcgcaagcctctatagtgactcgggcggacgcgtgggcggacgcgtggggacgcgagtgagtgaacaccagccgtattgtcccgactcctgacccctaccgatcctcgcctgctgcagccatggcgacctccgcggcgctctccaccgccgccaatcccacccagctctaccggtcccgcgcttcgctgggcaagccggtgaaggggcttggcctgagcatgggccgcgagcgcgcccagcggagcattgtgtgccaggcggcgagcagcatctccgccgaccgcgtccccgacatggacaagcggaagctgatgaacctcctcctcctcggcgccatctcgttgcccaccgtcggcatggtcgtcccctacggcgccttcttcgtcactgccggttccgggaacgccggcggcgggacctacatgaaggacaagttgggc

SEQ ID NO: 263989 - DNA, 893 bp, Zea mays
ggcccgcccaaaatccaccaccccggcgctccaccacatcgcagctccccttcgatgtcgcacgcccgcgcctccccgctgtggcgctgtcccctccctggcacccaccctcacaaagcatcagcctctccaatcagacgcgagccacccaccgcgcgacctcagggtgcctgtgcctgctcccgctgttccttcctcatggccaccgcctgccacctcgccgcgccgctcggcctcgccccgttgccccgcggctgcgcctctgctggcgtcgtggccgtcgtccggtgcgctcggtcgtcaggctccaagatcccgagaggcgttgctgtcagggcgacgtccggcggcgagggcgccacggaggaggtgccggagattgtgaaggctgcgcaggacgcgtgggacaaagttgaggacaagtacgccgtggccaccatcggtgtcgctgccatcgtcgcgctctggacggtagtaggtgccatcaaggccatcgacaagcttcctcttctgcctggtgtccttgagattgttggaattgggtatacagggtggttcacataccgtaacctcgtcttccagccagacagggaggccctgatcggcaaaatcaagagcacttacaaagaaatcaccgggagcagcaactgatcgaacatcatttacaagatgggttcttaagcatatggtagaattgcatccgtaagcactgaagctgccatgcaagtgaaagtgcttctggtcccctgacctcagtcagagaaaaaaaaactctgcagttgagcaagccgttttactttgtttcagtgtaatatttatgacgtattcccagttctttttccggactactgtttactacgaaaatcccgatctgtgtaaaaatgtgctgcaac

SEQ ID NO: 263990 - DNA, 861 bp, Zea mays
gcatcacctgcgtcaccgtgggcaacgaggtcttctccggcaacgacacggccacgatggccagcctcctccccgctatgaaggccgtccacgcggcgctcgcggacctgggcctcggcggccaggccaccgtctcgtcggcgcactccgtgaacgtgctcgccgccagcttcccgccgtcgtcgggcgcgttccgggaggacctggcggagtacatgaagcccatcctggacttccacgcccagacggggtcgccgttcctcatcaacgcctaccccttcttcgcgtacaaggcgagccccggcagcgtgtcgctgccgtacgtgctgttcgagcccaacccgggggtgcgcgaccccagcaccggcctcagctgcgacaacatgctgtacgcccagatcgacgccgtgtacgccgccatgaaggccatggggcacacggacgtgggcgtccggatctcggagaccgggtggccgtccaggggcgacgaggacgagaccggggccacggtgcagaacgccgtcgcgtacaacggcaacctcatgcagagggtcgccatgagccaggggacgccgctcaagcccaacgtgcccgtcgacgtctacgtgttcgcgctcttcaacgagaacatgaagccagggcccacgtcggagcgcaactacgggctgttctaccccaacggctcgccggtgtacgcgctcagcgccggctccggcggcggttcaggtccgggcgggtcgctcaacccgtactacacatccatgttctcctcctcgtccagatccgcggtgagcgcgaccttcttgacagagagagtgatgctgttactgctgctgcaacaactgtaatactccgacacta

SEQ ID NO: 263991 - DNA, 1216 bp, Zea mays
  unsure (1)..(1216): unsure at all n locations
acgcgtncgnccacgcgtnncggcacgcgtcccgccacgcgtncgcagctacccaactgttagaatggacgacacggaagccgccaagaacacggccaccaccggccccactttcgcctcccctctcttctctttctccaacctcggcggtgcttccttcggctctggctttggcttcaaatccagcgctcctctgccgcctgccatcgaggtccagctctgcgaggaatcacccgttccggcagctaggttggagccagtcgtggtcgatgactccttgacgatctacaagggcagagtgagtacatctgacgtgtttggtgtcaaagactctgatttggtccctggaaaatatgaaggtgggttgaagctgtgggaaggttcattagacttggtgaaagccctgaattctgatatcaaagaagataaatttcatctggaaggcaaacgcgtattggagcttggatgtggacatggcctccctggcatttttgcgggtctcaagggtgctgacctgattcatttccaagatttcaatgccgaggtgcttaggtgcttgactataccaaatgtaaaagtcaatcttttcaaggattcaccagaaggaacatgtacatctccgattgttggtttctttgctggtgattggagtgaaatggataagctactactttgcggggatgctgagcaagacaaaacagccagtggtgatacagaaggtaaaatgtgtaatggttatgatatcatcctgatggctgagactgtttacgcggtatcttgtcttccaaatctctacaggctcatcaagaagtgcttgcgctaccctgggggtgtggtttacatggcagggaagaagcattactttggagtaggtggtggcacaaggcagtttctgcgcttggttgaaaaagacggcgccatgcatcctgagcggctcaatgatgttgctgatggatcatccaatgttagggaggtttggaaattctcattcaaatagattagcactgcccctgcgattgtcgcgagaactggaaacatgtactggactccatattgggtgagagggaggtcttataggacttcctggttctgttaatctacctgtgactgtttcaaaaagctgatctttctcttttggagcactgctttgctcttgtagactaaaaaaaatcgcttttacctctggtttctgtttgttaaacttgtttagcctttc

SEQ ID NO: 263992 - DNA, 1545 bp, Zea mays
cctcccgcccgagtgctgccgctgctaagctagctgattccgccggttttcgtacgctcggcggcgtccgctgacgtcacacgccttgttggtttgttcttgctggtcatcttacttctctatatgcatgattcttgttctgttattgttaaatcgtgattactatacttgtaattgtaaagaagtgtgtgggctcggaagtatacctctgtagttttaaaaatatccatcggtccgccctcgcgtccgcccacgcgtccacggcttcatcatcactccactagccagtcagctactggcctacagctagccgcctcctctcctctcatcccatcccatctcatctccgacaagcgaagcagagcactggcatgagcatggaccgcatggcgcggcgttccgtgtccttgctcctcgctctggctctcctggccgccgcggcgtcggcggactcgtggctgtacgagaagttcacgacggagggcaacgtgcgcgcggactacaacgcgcaggggcagcaggtgacgtctctgatcctgacgcagcagtccggcggcgccttcagctcgcggcagaagtacctgtacggggagttcagcatccagatgaggctgatcccgggcaactccgcgggcaccgtgacctccttctacctgtcgtcgggcgacgggcccgggcacgacgagatcgacatggagttcatgggcaacgccagcgggcagcccgtggtgctgaacaccaacgtgtgggccaacggcgacggcaagaaggagcaccagttctacctgtggttcgacccggccgccgacttccacacctacaccatcatctggaacgacaagaacgtcatcttcaaggtggacgacctcttcgtgcggtgcttcaagcggtacccggacctggcgtacccgggcgggaagcccatgtcggtgcacgccacgctgtgggacggcagctactgggccacgcagcaggggaaggtgaaggtggactggtccgccgcgcccttcgccgtctcctaccgcggctactccgccgacgcctgcgtgcccgacggcgacggccgcccgctctcctgccccgccggcaccgaccgctggatgagccgccagctcgacgccgccgagtggggcaccgtcgcctgggccaggcagaactacatgcactacaactactgcgacgacggctggcgcttcccgcagggcttccccgccgagtgctcccgcaactgattcattggtttgtttgttatccccgatccgttcgcgcggtcgccgtccgtcccacacagtgccctgccctgcccccccgacgatttcttgcttcctgttcctcatctaattaatcatcaatggtgtttgttcgtcaccgctgttcttgatggatggatgcacaggacagggcaggacagatgttgttgccttccattccatgtacattttgccgcacatttatacactactagtgcccttgaatgttttcaccccgaaaaaaaaaaaaaaaaaaaaaaaaaaaaaaaaagggcggctgctcgcgatctagaac

SEQ ID NO: 263993 - DNA, 1281 bp, Zea mays
  unsure (1)..(1281): unsure at all n locations
ntcccagaagttccctccagtttgtaagctcgtttccgaaaagagctctagagccgccacacacacacagacaccatggcaccgcgttctctgctggcagtgctcgccgtcgccgccctcgcgttcttgcacgccgcctcggccaagtcgtcgtggcttgacaggaggttcaccacggacggcaccgtccgcacgggatacgacgattcgggccagcaggtggtgatgctccgcctcgaccagcactccggcgctgccggcttcaactccaaggagcagtacctttacggcgagttcagcgtcgagatgaagctcatccgggggaactccgccggcaccgtctcgtgcttctacctctcttccggcgacggcgacgggcgcgacgagatcgacatggagttcatgggcaactcgagcgggcagccggtggtgctgaacaccaacgtgtgggccagcggcgacggcaagaaggagcaccagttcgacctctggttcgacccctccgccgactaccacacctacaccatcatctggaacccgaccaacatcctgttcaaggtggacggcgacgtgatccggtgcttcaagcgctacgccgacctgccgtacccgagcgcgaggcccatggcgctgcacgccacgctgtgggacggcagctactgggccaccgagaagggcaaggtgccggtggactggtccgccgcgcccttcgtcgtctcctaccggggctactccgccaacgcctgcgtcagcggcggggcctgcggcggcggcggcgacgacgggtggatgagcaagcagcccgacgacgccgagtggggcaccatccggtgggccgagagcaactacatgcgctacaactactgcgacgacggctggcggttcccccagggcctcccgcccgagtgcagccgcagctaagctagctgattccgccggttttcgtacgctcggcggcgtccgctgacgacacacgccttgttggtttgttcttgctggacatcatacatctctatatgcatgattcttgttctgttattgttaaatcgtgattacaatacttgtaattgtaaagaagtgtgtgggcacgggagtatatcactgtagttttaatttgcttgtaaagaaaagaagggtttttttacttgtgacgcgggagctagcgactgcgtcctgttcgcgtaaaatgtttgcaatggatgatgatgcatgtacgcagcaacagctagcagtgtactacttccacatattattgcgttcaatcaatccagatacacattt

SEQ ID NO: 263994 - DNA, 685 bp, Zea mays
atcctgctcaaggtcgacgaccttttaatacgctacttcaagcgctacgcctacgtgccggaccggagctacaggcccatgacgctggacgccacgctgtgggacggaaggtactgcgcacaccgagaagggcatggtaggcatcatactggtccgacgcgcccttcgtcgtctcctaccgcagctactacgccagcgcctgcgtcagcggcggcgcgtgccgggccgccggcagcggcgggtggatgaacaggcagcttgacagcgccgagtggggcaccgtcaggtgggcggagcgcaacttcatgcgctacaactactgccaggatgggtggaggttcccgcaaggactccccgccgagtgcgcccgccactgatatgcgtccgccggttaattctttgttttgttgggtattctttttttttctacgggtatatgattcttgctcttctttgtggatttgtgattaaaaagcagccctgcagctagcaacgtgtgggcggttgttgtacacctagcttttcctaaatcaagcatgtattttttttatcgtgcctttggatacaggcatgcagcatatatagtattgttgtgagtcgtgaaaattattttttttcctagtgatccctgagatgtataactggtgacctttaaatctttaatgctattccgaactacctacgt

SEQ ID NO: 263995 - DNA, 446 bp, Zea mays
cacgcgtccgcccacgcgtccgcccacgcgaccacactacccacccacctccactactgaccgattcccagaaagctcgatctagcgcgcgcggctgcagagtgcagacgacgacgtacaccatggcgcggcggtccctggccctgctgctcgcgtcgtcgctcgccctcatgtcggccgccgtcgcatcggcggactcgtggctctacgacaagttcaacacggacggcaccgtccgcacccagtacgacgcgtcggggcaggaggtggcgatgctcagcctggaccgcagctccggcgccggcttcaactccaaggagcagtacctgtacggcgagttcagcgtccagatgaagctcatccccggcaactccgccggcaccgtctcgtgcttctacctctcgtcgggcgacggcgacgggcacgacgagatcgacattgagttc

SEQ ID NO: 263996 - DNA, 583 bp, Zea mays
atcctgttcaaggtcgacgacctcttcatccgctccttcaagcgctacgccgacctgccggacccgagctccaggcccatgacgctgcacgccacgctgtgggacggcagctactgggccaccgagaagggcagggtcggcatcgactggtccgacgcgcccttcgtcgtctcctaccgcagctactacgccagcgcctgcgtcagcggcggcgcgtcccgggcagccggcagcggcgggtggatgaacaggcagcttgacagcgccgagtggggcaccgtcaggtgggcggagcgcaacttcatgcgctacaactactgccaggatgggtggaggttcccgcaaggcctccccgccgagtgcgcccgccactgatatgcgtccgccggttaattcttcgtcgacgatccagcttggcgtcgtttgttctttgttttgttgggtattctttttttttctacgggtatatgattcttgctcttctttgtggatttgtgattaaaaagcagccctgcagcttgcaacgtgtgggcggttgttgtacacctagcttttcctaaaccgaagcatgtattttattttt

SEQ ID NO: 263997 - DNA, 408 bp, Zea mays
ggaacgacaagaacatcatcttccaggtggacgacgtgacggtgcgcgtcttcaagcgctacgatgacctgccgtacccggacgccaagcccatggcggtgcacgccacgctgtgggacggcagctactgggccacgcgcaagggcgaggtcaagatcgactggtccagcgcgcccttcgtcgtctcctaccgagactacaccgccaacgcctgcgccgtccacggccggaacggcggcggcagctcgtcgtgccccgccggtgccaacgagtggatggacaggcagtccgacgacaccgaccgtctcaccgtggcttgggcgcgccggaactgcttgcagtacaactactgcgatgactggtggcgctttccgccagggttccccggaaagtgcgcccgcaactgat

SEQ ID NO: 263998 - DNA, 416 bp, Zea mays
cattggtttgtttgtgtccccgatctgttcgcgcggtcgtcgccgtccgtcccacacagtgccttgccctgcccccccggacgatttcttgcttcctgttcctcatctaattaatcatcaatggtgtttgttcgtcaccgctgttcttgatggatggatgcacaggacagggcaacaggacagatgttgttgccttccgttccatgtacattttgccgcacatttatacactactagtgcccttgaatgtttccttctttctctctgtgtttttctttacggtttgtgagatttgttaccgaaagggagttcataaagataataacgtgaattctactgtactacatacaccgtgaaaacaaaagggaaggcaacgttgtagtaaaatacaaaataaaaaaaagaaaaaaagaaaa

SEQ ID NO: 263999 - DNA, 459 bp, Zea mays
gctggatacggttcagggttcgtgtgcgcgcacaccctgccggtgctgtacgagaggtaccaggaccaggtggacgagttcctgtacaacatgctagggctggtgcagagccagtacagcaagctggacagcaagggcatcctcaaggggggcgtcaagttcaggaagagcgactagctgatttcctcccatctacgactacgatttgattcatcctgggagtcttgatcgatcgacacttgttctgttctgtacagcgagtaacaaccgctgctgctagctacattctttactgtactgtacttgtgtgatgacatcatatcttcgcgtcgcgtgtactgaagaactacacattgcactaaggttgctttcgtacgtgtacgtgctcatctttcttccttggaaatcactcggatgtgccgccctttgcaaaatgaagcgatcccttgtttttcttct

SEQ ID NO: 264000 - DNA, 985 bp, Zea mays
agcaatcactgctgcgcccgataggtggcagcgagccagcgacccacccgactctgttccaacgagccttccctcccaaacttgcacgctgtccccgcgctcgcctccgcccccgatccagatccagggtggaatagggaacggccatacaccatggcggatttctccaaggaatcttgcccttctgtgaagaacattttacttctggattctgaaggaaagcgtgttgctgtaaagtatttctcagatgattggccgactaatgcatcaaagttagcctacgaaaagtctgtttttactaaaactctaaagacaaatgcacggacagaagctgagataacattgtttgatggttatattgtcgtttacaagtttgtacatgaccttcacttttttgtcaccgctggagatgatgagaatgagctcatcttagcaagtgtactacatggtttttctgattctgttggtcttctactcaggggtgatgttgagaagcggactgcgcttgagaacttggatttgatacttctctgcattgatgaaattgtagatgggggaatcatcctggaaacagatgcaaacaccattgctggtaaggttgcaaccaatgctgttgatggttctgtgcccttttctgagcagacgatatctcaggcactagccacagctagggagcaccttgcaagatctctactgaaatgaacaaccagcaatatgtatgacatatatgtgtgttaaaggttgggctactgaatgttaagggtctttgtagtcgttattcatcccaaagtgctgctgtgacagagactagttgaatatccgagggattggtcacatgctcgttattttttttgaaccagtgagtttgtagctgccatatttcaggtaaaacataaaataaagagttgtaattgggtgtaatataattttcaccaaacaaaaaaaaatcatctcaactaaaaaaaaaaaaaaaaagggcggccgc

SEQ ID NO: 264001 - DNA, 358 bp, Zea mays
cccaaacttgcacgctgtccccgcgctcgcctccgcccccgatccagatccaggtactcttcctttcgccgcggctgagaagcaactctccctctctgtcctcttcctgtcgccgcactcattttctcttgccgggtggaatagggaacggccatacaccatggcggatttctccaaggaatcttgcccttctgtgaagaacattttacttctggattctgaaggaaagcgtgttgctgtaaagtatttctcagatgattggccgactaatgcatcaaagttagcctacgaaaagtctggttttactaaaactctaaagacgaatgcacggacagaagctgagataacattgtttgat

SEQ ID NO: 264002 - DNA, 1534 bp, Zea mays
cgctgtttatataaagcaaaagcggaggagagcaacgcgcccgcgtccgaaagaacttggccccgcctcccgtctcttaccgcacatgcgcgtcgggccgcgtcgacatagctgcttgccgccgacacccgcagccgcaatggccgtcgcccacgcgccgccgcgccggggcgtgctccccctcctgctcgtcgccgcgctcgtggcggcgttgccggccacctgcgccgcggccaggagcaagaagtcgtacacggccatcttcagcttcggggactcgctctccgacgccggcaacctcatcgtcaacggcacgcccaaggcgctcaccaccgcgcgccctccctacgggatgaccttcttccgcaagcccaccggccgctgctccaacggccgcctcgtcgtcgacttcctggccgagcatttcgggctgccactgccgccaccgtcgcaggccaagggcaaggacttcaagaagggcgccaacttcgccatcaccggcgcgacggccctggagtactccttcttcaaggcgcacggcatcgaccagcgcatctggaacaccggctccatcaacacccagatcggctggctccaggacatgaagccgtccctctgtaaatcggagcaagactgcaaggattacttcagcaaatccctgttcgtcgtcggggagttcgggggcaacgactacaacgcgccgctcttctccggcgtcccattttctgatgtcaagacttacgtgccccttgttgcaaaggctatcgccaatggcgttgagaaactgatcgagcttggggcaacagacctcctggtgcctggcgttctcccaattggctgcttcccgttgtacctgacgctgtacaacaccagcagcaaagcagattacaacgcccggaccgggtgccttcggaggtacaaccgcctggccttccaccacaacagggagctgaagcagcagcttgacgagcttcagaagaagtaccccaagacgaagatcatgtatggagattacttcaaggctgcactgcagtttgtcgtcaaccctggaaaatttggttttagcacggccttgcaggcgtgctgcggcgcaggagggcagggcaactacaacttcaacctgaagaagaagtgtggcgagcagggcgcgagcgtgtgctccaacccgtcgtcgtacgtgagctgggacggcatccacatgaccgaagctgcgtacagaaaggtcgccaatggctggttgaatggcccgtatgctcagcccccaattctcaagtcatgatcgagattactaggctgtgcgtaataccgccgcagctgcatgctgcggctagagatatatatgaggagtgtttcaggcaatagatatgctaagttatggtaaagctatttggtctgttcattggaagatctgtataaactgcgccggtatagatatgttcccagctgaaatggctctagcacagatgtgcatggcatgttctctgattcttttcatttgttctaaaaaaatattgcgccagtaatatgagttgat

SEQ ID NO: 264003 - DNA, 976 bp, Zea mays
gcgtccgcggacgcgtgggtgcacttgtatttcttgtgcctgcttattgctgggctagccgccggtctcttgctctgatagcttgctccaggacgtacgtacgtacgtagatcgatccatcgatcgctagctagctgacgaccatggcgtccctctcctctgccgccatcaccgccccttccttcacggccgcgcccgctcgcgcagtggtcagcaggaggtccttcaccgtgcgtgcctctctccgcaaggccactgccaccgccgccgtggccgttgccgccagcgtcctgcttgccggcggcggcgccatggcccaggaggtgctgctgggcgcaggcgacggcgggctcgtcttcgagcccagccagttcaccgtcaaggccggcgacaccatcacattcaagaacaacgccggcttcccgcacaacgtcgtcttcgacgaagacgaggtgccgagcggcgtcgacgccaccaagatctcgcaggaggagtacctcaacgcgccaggcgagacctactccgtcaccctcaccgtgccgggaacctacggcttctactgcgagccgcatcaaggagccggaatggtcggcaagatcaccgtcaactaattaagctagctatcgatcgatatccattcatgtattagctgttgcttcctgctttgtactccgccgatctgtccatctctacatgttttcgtcttcacacaacaacctctgctacgactacgtatatatgcatgctactagctgattgattttaacgcgaccaggccgaccccgaaagctagcttggaccaagttttgtacccattaattctaccgatgcatctctcagtttagactcccataatcatacaaactgctagctttcatctgcatctgcttagtacatctaactatttgtaccgcaaggtgacgtttttgcagaactcctaattatataccatgcataataaagtggtgtcaacaat

SEQ ID NO: 264004 - DNA, 652 bp, Zea mays
actctagggtccacgcacccctctaaagtcactcgtgctaacgcgtgggcgccgcaccagcgccagcccgcgccgtggtcagaaggaggtccttcaccgtgcgcgcctctctccgcaaggccactgccaccgccgccgtggccgttgccgccagcgtcctgcttgccggcggcggcgccatggcccaggaggtgctgctgggcgcaggcgacggcgggctcgtcttcgagcccagccagttcaccgtcaaggccggcgacaccatcaccttcaagaacaacgccggcttcccgcacaacgtcgtgttcgacgaagacgaggtgccgagcggcgtcgacgcctccaagatctcgcaggaggagtacctcaacgcgccaggcgagacctactccgtcaccctcaccgtgccgggcacctacggcttctactgcgagccgcaccaaggagcaggaatggtcggcaagatcacagtcaactaaagctagctatccattccatgcatctcgatctgtatgtactccgcccgtcgatggatgatgcatccatctctacttgttttcctcacatgtacaacaattaatgcaacaaattaagtacgtaattgagagaaaaaaaaaaaaaaaaaaaaaaaaaaaaaaaaaaaataataaaa

SEQ ID NO: 264005 - DNA, 687 bp, Zea mays
ttgacgcgtggggcgacccctcggctgagcggagaaaagtagatccgggttagggttttagacggcgatgggtgcggcgggcgacgagaaggctgcgatggctgcgtccgctgcagccgcgggtgccggtgccgccgagggcgagggcgcggtggactccaaggaccttcagcagcagagcaaggcgctcgacaagctcactgatcatgtcgaggaccggcagctcgattcatcccgtgtccaatccgccatggcagcacttgcttcatccaaggaggctgactggaacgcgatgaggctgagggagaaagaattggctgctgtgaagatcaaccctgccgatgtcgaaattatcgctactgagcttgagctggacaagaagatcgcggagagaacgctccgtgagcacaagggtgatgccgtggctgcggttcgattcctgctgcgctagttccgagatttcgtcgccagcatcatatgttccccttcagttccacacaagaggtgatgatgtgaagtgaagccctagtacttttgtgtgcctgttttggaagtttgctattagaactatgttgcagaaaatttaagaatgagaataccatgcaaaaggtgtaatatgatttgtattagttatttgctattgtaaaaaaaaaaaaaaaagggcggccgctcgcgatctagaactag

SEQ ID NO: 264006 - DNA, 789 bp, Zea mays
  unsure (1)..(789): unsure at all n locations
aatanngggccgacggcgcgtncggcacacactcgtctcatcggagaaaagttgtgccttgttagggttttagacggcgatgggggcggggggcgacgagaaggctgcgatggctgcgtccgctgcagccgcgggggccggtgccgccgagggcgagggcgcggtggactccaaggaccttcagcagcagagcaaggcgctcgacaagctcactgatcatgtcgaggaccggcagctcgattcatcccgtgtccaatccgccatggcggcacttgcttcatccaaggaggctgactggaacgcgatgaggctgagggagaaagaattggctgctgtcaagatcaacccctcatgaagctaagcattacacctagctagctagctgaactgaacaccaccagacactgaattccactcagcaaaggagagccggctaccaaccatgatcaatgccaagagacttacgcagatggcaaccaagtggcaaagaataatggccgctcttacgagctaggacgaggggtcaagcccatctcggcgacagctagaaagcgatggaccgtgcatcacttcgacgacgccggtggccggcaaaaaagggcactgcgttgtgtactcggccggccgacggggggcagcggttcgaggtcccgctggcgtacctcgatcggcacggcgcggtcttctgcgagctgctaacgctgtcgcaagaagagtttgggttcgcgagcggcgacggcagggatcatcctgccctgtgacgcggcggcggtggatggagtacgtgat

SEQ ID NO: 264007 - DNA, 586 bp, Zea mays
agctggatcaatcccagacagcaccttaatttaagttgacagtctaacctgggaaattttcagagtgcattcatcccgttcataactgctggtgatcctgacctggtaaccacatcgaaagcattgaagattctcaattcctgcggttcggatgttatagaggttggcgtaccatactcggatccactggctgatgggccagttattcaggcttctgcaacacgggcgcttaagaaaggcactacacttgattctgtcatagagatgctgaagggggttacacctgagctttcttgccccattgttcttttcacatactataatccaattctgaaacgtggtgtgggaaacttcatgtctactatcaaacaagctggcatacatggacttgtagtgcctgatcttcctttggaggagacagcgttgctgaggagcgaggccattatgcacaacatagagctggttcatacccactctcatctttgcatgcaccacttgcacaaagtttgttgcgtacttgtgttgctatctgggtgctaactaaattcttactctagatgggacctatcaaatcttcagcttgggc

SEQ ID NO: 264008 - DNA, 1184 bp, Zea mays
  unsure (1)..(1184): unsure at all n locations
gtcgcaagcggatcgcaaactcgcaatcaaggctgctcccctccgtctccgtgttcgccactcggttcaccgcccgccgccgccgagacctcctcctcgccggctactcctgaccccacaaaggcagcgctcggaggtggccctctgtcgggtggagtggtggacacatccgcgcccatggccaacggcggcgctgcggccggcaagctcaccgtcgccgagaccttctccaacctcagggagcaaggcaagagtgcattcatcccgttcataactgctggtgatcctgacctggtaaccacatcgaaagcattgaagattctcaattcctgcggttcggatgttatagaggttggcgtaccatactcggatccactggctgatggaccagttattcaggcttttgcaacacgggcgcttaagataggcactacactcgattctgtcatagagatgctgaanggggtacacctgagcttttttgcccattgttctttcacatactataatccaattctgaaacgcggtgtgagaaacttcatgtctattatcaaacaagctggcatacatggacttgtggtgcctgatcgtcctttggaggagacagcgttgctgaggagcgaggccattatgcacaacatacagctggtgctgcttacaacgccaaccgcgccgacagatccgatgaagggaattgcacatgcttcagaaggatttctctatcttgtgagcgctgtaggggttacaggtgcacgctcaaatgtaaacttacgtgtagaacaccttcttagggagatcaagaaggttacagacaaaccggtagctgttggtttcggtgtatcgactccagagcatgtgaaacagatcgtgggctggggagcggaccgtgtgatcgttggcagtgcgattgtgaagcagttgtgtgaggctgctactcctgaagagggtctggaaaggctcgaggagtacgccaggagtatgaacgctgctatgccgtgagctgatctcactccccgtcacaggcaaggtgattagaacatggttttagcaatattctgggcatggggttggcatccagaactcatcttagtgctgtacgggtcgttctccggtggtgagaacgaagtctggctttgcctatcatagcaacgggttataaactgagttagtgcgacattttgatg

SEQ ID NO: 264009 - DNA, 625 bp, Zea mays
tgttaacgtactcatggagaacaaccacaaagactgttccaccttgttgagaccagtggatgcagaagattcattgagactgcataatatgtttcttccttttactttctggagttcacttttcactggcatgcttcaaattggggtcaagtactcacaagagacaattcgtactgatgcattatccataatgattctcattgtaaggacaacagatcccatagaagaacgccagaaattcggatttacttcagtaatgacgagattgcatctgctattgcagaaagagaacggattgcttgttaagaagcattctgtgcgtctacttttcttgcttctgaattgcccagtgatgttgaagttgctgtgtagtggaggcaaagacggctccaaacagatgggatcggaagcttgtgaaagtgatagatcacaagaagtcataagctcagttcttgtggatttatctgattgtttgacatgtggggaaacttgttctctggtaagctacttatcttttttagttattcaggatggaaatatgcatttgtacatctagctagattctattcttcaatacctgccagacatggattgaacattgcgatggtttttcacctgtcaccgg

SEQ ID NO: 264010 - DNA, 1324 bp, Zea mays
gtcggcagtggttctgagtctgaagatgacgcctttggtaggacatatagttattcttcatatgatgatctgagtccccggctatattcaaactctgaggcatgggatcaagatgatggaactggactggaggaacatgagttatatgatgattcaagtcagataggatcctcaacagcacctttatctagctacatgggattcgagcagatgaacttatctgacatgaagtcagatatttcacttgcaaacgttggggatcagaatgtaataggcactttacaatcctgtactgttgaagaacttccaaactttgatacattgatgtccagaagtgatgatcaaaatggtgaaacccccattccacataatctggggaatatgacaccagatgaagatcagttgccaccaccacctcctctccccccaatgcagtggaggatgacaagacaaacaacttcactagaagaggaaacttgcattacaactaaagatatgcttagaaaaacttctagcctaccacatatacacacctctgcccaggaagaacactgtcctccaactgcaccattggatctacaagggcatgctggggaagtgggtgtccagaaaactggtggggtacgagaaattactaatcctcctagtatcatcgatataaaatcaagtttgcttcagcagatcagggataagtcagagcagctgaagcttaatggacatgaaaggtcaaaaaaagcagtaggcggtgacattaaaagcttagacgaaagggaggagttgcttcagcaaatcaggagcaagaccttcaatttaagacgcacaaacgcatctaaggcagatggctcatcacaatctacagccagttccaacgttgcagcaattttggagaaagccaacgctatccggcaggctgtggccagtgatgagggtggcgatgatgatacatggagtgatatatgaccacctaattgcagacgttcatggtagtcttttcctgtatattaagctattacaagatgaagtgattaaatgtgaataccatccttttcttcattgtaattagattttgcaggtcttgttttgtaccttccttagttcatattagtgaatcctaccgtaggtcgctgtggtcgtggaaatgtcagagcatttccccattatgtaaatgcatctttattatttatttatgatagtgagaacagctgaatagctgataaaaataagcatactaatctatctttttatcattgtattgattttttttgcaatgataataagatggagcatgatgttgcaaaaaagagaaaaaaaaaaaaaaaaagaa

SEQ ID NO: 264011 - DNA, 473 bp, Zea mays
aacacttcctgcacccatatcctactgatggagacaagcaaatgcttgctaaacagacgggtttaacacggaaccaggtatccaactggtttattaatgcaagggttcgtctttggaaaccaatggtggaagagatccacaaccttgagatgaggcaggtgcacaaacaccctgttctcgacaagggccagcacgtgctgcatcaccaaacccagcattcgttcgagagcagtggaaagccttctgacccttccgactctcagcttggccaaagcagcagcatcacgaggaaccacaacatccctgcgtcccagggatttgccgatgagctctccgagatgtcccattctattcagcaggggcaggtaaccttcgcatacaatgggatgtcggcgccacaccacagcctcgcttcgtcacagcaccaccaacgggccgggccgatgagcggcattggtggcgctgggaacggt

SEQ ID NO: 264012 - DNA, 471 bp, Zea mays
gactagttctagattgcgagcggccgctcgcgtctgctgaactcctgaagcaaaagcaatggccatgagagctctcccgctgaccccttccaggagctcctcgtttggagctcaccaaaccaggccgagcggcggcggccccagatcagtgagagcttatgcgaagggagacgaggagggcgacaagcagtccctcttcggaagcatcaccgaggcgctggacttctcgcaggtccggtcggagaaggacgccgagctgctgtacgaggccagggagtccaccagaggtggagggaggatgacgagggagcagtacggagcacttaggcggaagattggtggcacctaccaggatttcttcaagtcatatgttgaagtcgacgggcaatacgtggaggagggttgggtcgacaagacctgcaagatctgcaagaaggacacaaggggggagccgaggcaggttgacaagct

SEQ ID NO: 264013 - DNA, 678 bp, Zea mays
cccacgcgtccgcccacgcgcttaccagcacacagtggagctagctagctagtagagaggtcaatcaccaatggcgaggcagctcgttgtgcttgctctgcttttcgtgatcgccggtgtggcgcatggcgcgggggagtgcgggagagcctccgccgacagggtggcgctaaggatggcgccatgcatctcggctgccgacgacccgcagtccacgccgaccagcagctgctgctccgctgtgcacaccatcgggcagagccccagctgcctgtgcgccgtcatgctgtccggcaccgccagggctgccgggatcaagccggaggtcgccattaccatccccaagcgctgcaacatggccgaccgccccgtcggctacaagtgcggagattacacgctgccctagctgatgaagacgtcgtcaacgagaccgtgcgagtgaaccgtgcatgaacgaatgccattatgccatgcaactatgttgtgttgcgttgttggaataataatcgaatccgctagaataaatatgtacgtgcacgacggcctcttgcttgtatcactggactttgcttgtgtgttgtacgtcaaatatgttccgtttctctcatataagaaaaatctgtatgcctggtataggctaaaaaaaaaggacgcgtggtcgaccggattccggccggt

SEQ ID NO: 264014 - DNA, 647 bp, Zea mays
  unsure (1)..(647): unsure at all n locations
gcgcccattcgtccgcacagtggagctagctagctagcacagaggccaatcaccaatggccaggcagctcgttgtgctcgctctgctctacgacatggcccggcactacctatgcgaggccgactgccagagagcctccgcccacagggtggcactaaggatggcgacatgcattctcggatgccgacgacccgcagtccacgccgaccagcagctgctgatccgctgngcacaccatcgggcagagccccagctgcctgtgcgccgtcatgctgtgcggcaccgccagggctgccgggatcaagccggaggtcggcattaccatccccaagcgctgcaacatggtcgaccggcccgtctgatgctagtgcggagattacacgctgccctagctgatgaagacgttgccaacgagaccgtgcgagtgaaccagtgcatgaacgaatgccattatgccatgcaactatgttgcgttgcgttgttggaataataatcgaatccgctagaataaatatgtacgtgcacgacggcctcttgcttgtatcactggactttgcttgtgtgttatacgtcaaatatgttccgtttctctcaaaaaaaaaaaaaaaaaaagggcggccgctcgcgatctagaacggacgcgtggg

SEQ ID NO: 264015 - DNA, 925 bp, Zea mays
caccaggtcaccaaccacgcacccgcctccgcctgcccgctctcccgccatgaagcagctccacaagtcttcccctacccacgcgccatcgccggcgcacgcaccggctcccaaggccgccaagacggcgcgcccaggtccgcgctcctggatcggctacgtcctccgcgagcagcgcctcctcttcgtcctgctcggtgcgctcatcgcctccaccttcttcctcctccggccctacctctcgctctccccgtcttcccacctccccgacgcccgcccgctcttctccttcgccacccgctccggtgttcccgccggcttccgcccgccgcagcgccgcgtcgtcgtaacaggcggggcagggttcgtcggcagccacctcgtcgaccggctcctagagcagggggacagcgtgatcgtggtcgacaacttcttcaccggcaggaaggagaacgtcgcgcaccacctccggaacccccggttcgagctgctccgccacgatgtggtgcgaaccaatcctcctcgaggtcgaccggatctaccacctcgcatgccccgcgtcgcccgttcattacaagtataacccaatcaagacgatcaagacaaatgtcatgggaactttgaatatgttgggtctggcaaagcgaattggtgcaaggtttttgttgactagcacaagtgaagtttatggtgatccgcttgagcatccacagaaggagtcatactgggggcacgttaatcctataggtgttaggagctgttacgatgaggggaagagaacagcagagactttaactatggactatcatcgtggagttggtgttattttttatttttaatattaattttttttttcttattcttcttgtattggttccttgatcttttatatttttatattttatatatcttcattcttttattt

SEQ ID NO: 264016 - DNA, 825 bp, Zea mays
  unsure (1)..(825): unsure at all n locations
accacccctccgnccacgcgtccgcggacgcgtgggcggacgcgtgcggatgctgatctggttgctggactgatggctctaatggagagtgatcgtgttgctcctttcaacttggggaacccaggagagtttaccatgttggagctagcacaggttgtgaaggaaacaattgacccaatggcaaccattgaattcaaacccaacacagctgatgatccccatatgagaaagccagatatcaccaaggctaagcaactgctacattgggagccaaaggtctctctcaaagaaggccttccgctaatggttcaagatttccgtcaaaggatctcggatgagtaatcaaagcaattcttttttccccgaatgtgccatgcacgtgtttgtaatcagagcaatcgtatgatactggtgaccggtttgattctgaacgatgctgcaactacagtcaggagctcttcaccaactggaggcctggagccctgcagtacgatgtactgtgtacacaacagactgtagaatcacgcaggccccatttggagtgtggggattccatagtatttctacgacatagtactatttctgtgaaatagctgaaaagttcatgggttcgtgtcgatgatcttttttatatatatatcttggtggggcagaacagaagcagtcaaatattttttttgtgcatatgtgaaattccagagttgtgggtggtgagagataggatacaatgctgtatgtatttcaggaacttctgtaacacgagaacattcatcatgtgaaaaaatgtaactgaatgtgttggccaaaaaaaaaaacnaatataat

SEQ ID NO: 264017 - DNA, 1051 bp, Zea mays
agctttgaatatgttgggtctggcgaagcgaattggtgcaaggtttttgttgactagcacaagtgaagtttatggtgatccgcttgagcatccacagaaggagtcatactgggggcacgttaatcctataggtgttaggagctgttacgatgaggggaagagaacagcagagactttaactatggactatcatcgtggtggtggtgttgaggtgcgtattgcccgtattttcaatacatatggtcctcgtatgtgcctcgacgatggtcgtgtggtcagcaattttgttgcacaggcactgcgaaggcaaccgatgacggtctatggtgacggaaaacaaactcgaagtttccaatatgtttctgatctggttgctggattgatggctctaatggagagtgatcacattggtcctttcaacttgggaaacccaggagagtttaccatgttggagctagcacaggttgtgaaggaaacaattgacccaatggcaaccattgaattcaaacccaacacagctgatgatccccatatgagaaagccggatatcaccaaggctaagcaactgctacattgggagccaaacgtctctctcagagaaggccttccgctaatggtcaaagacttccgtcaaaggatctcggatgagtaatcgaggcaatcctacgatactggtgaccggttcgattctgaactatgctgcaaatacagtcagaagctctttatcgattggagccatgcagtacagtgtactgtgtacacagagactgtcgaatcacccaagccccatcttggaatgtggggatccatacgatttccactggatagttctgtttctgtgaaatagctgaaaagttcatgggaagttcgtgttaatcttttttatatatatatcttgttggcggcagaacagaagcagtcaaatattttttttgcgcatatgtgaaatttcagagatgtcggtggtgagagataggatacaatgctcgttgtatttcaggaacttctgtaacacgagaacattcatcatgtgaaaaaaatgtaactcaat

SEQ ID NO: 264018 - DNA, 1060 bp, Zea mays
  unsure (1)..(1060): unsure at all n locations
tcttccgatggctcctccagttccagggcttcagggagaagctcctcgccgacgagctcttcctcaccaagctcggcatagagtgcggcatcggtctcgtcgccaagaccgtggctgagttccagaagaggggggacaatttcttcaaagagattgaagttgtcatatctgatgtggtcatggcgattgttgcggacgtcatgcttgtctatcttcctgctccaactattggtttacagccgccactggcaagaaacgctggagctattgccaactttttctataactgccctgataatactttccaaattgctatggctggaaggtcattctcacttctgcagaggattggagcttttgtgaggaatggtataaagcttttggcagtgggaactactgcttctttgattggcactagtgtcacgaatgcagcgctcaaagcaaagagggctgttgataaggaccttgaggacgaagtcatggaaattccagtcgtctcaactagtgttgcctatggtgtatacatgtccatttctagtaacctcaggtatcagcttctggctggtgtgatcgagcagaggatgctggagccgttgctgcataaccagaagctactgctgagtgcaatgtgcttcatcgttcgtacgggcaacacattccttggctctttgctgtgggttgactatgccagatggataggcgtccagaagtctcacgaagaggcctaaagttctagcagcttgcctgcatgttccgctgtcactgcctcactaggcacgttcacaataccatcgatggcttgcctgcctctatagaatgctgatctactcttcactggaggcccccttatatataggacaaaaatcccaattttgtttggaaaaccacaagtagggatatatctgtcgaattctcgtatgcaacggcaacgccgctctacccctcaactttttttttttcctttttctactttgcaacatgcatcaagggctgtcattgatcgacattcacatatatgttacatagggaattacatgcgactgcctaaactctangaaaa

SEQ ID NO: 264019 - DNA, 726 bp, Zea mays
ggctagcttttgcctcggcagctaacgacctgcagccaaccatctaccagcgactcagcgagcgagagcagcacacactacgcagctagctaggagcagcagcagcgggcggcgatggcggcctccatgatctcctcgtcagctctggcggtggcgcctcagggcctgccgcccctcggccgccgcgcctcctccttcgccgtcgtctgctccaagaagaagatcaagaccgacaagccctacgggattgggggtggcctgaccgtcgacgtcgacgccaacgggagaaagggcaagggcaagggcgtgtaccagttcgtcgacaagtacggcgcgaacgtcgacggatacagcccaatctacaacgaggatgactggtctcccaccggcgacgtctacgtcggtggaaccactgggcttctgatctgggccgtcaccctcgctgggatcctcggcggcggcgccctcctcgtctacaacaccagcgccctctccggctaaggatatccaatgcatgcgcttcttgcgattcgtcatgtaaaatcagggtgtctgtctataatctagcctccatggatgctcaaccttcgtcatgtaacaataatcagtgctactcttcattacataattttgatgctatatatatataccccatccctccctaaaaacacccctaaaaaaaaaagaaaaaaaaaaaaaaaaaaaaaaaaaagggcggccgctcgc

SEQ ID NO: 264020 - DNA, 762 bp, Zea mays
ctcgcgggtcgacgcacgcctctacacagacgttctggtaagcgagagcagcacacacgcagctagctaggagcagcagcagagcagcggcgatggcggcctccatgatctcctcgtcagctctggcggtggcgcctcagggcctgccgcccctcggccgccgcgcctcctccttcgccgtcgtctgctccaagaagaagatcaagaccgacaagccctacgggattgggggtggcctgaccgtcgacgtcgacgccaacgggagaaagggcaagggcaagggcgtgtaccagttcgtcgacaagtacggcgcgaacgtcgacggatacagcccaatctacaacgaggatgactggtctcccaccggcgacgtctacgtcggtggaaccactggccttctgatctgggcctacaccctcgctgggatcctcggggggtgctccttcctagtttacagcgccacccccctctccggctaaggatatccaatgcatgcgcttcttgcgattcgtcatgtaaaatcagggtgtctgtctataatctagcctccatggatgctcaaccttcgtcatgtaacaataatcagtgctactcttcattaaaaaaaaaaaaaaaaaaaaaaaaaaataaaaaaaaaaaaaaaaaaaaaaaaaaaaaaaaaaaatataaaaaaaaaaaaaaaaaaaataaaaaattaaaaaaaaataaaaaaaaagggggcgcccttttaaaagaatccaatttaactaccccctccttcca

SEQ ID NO: 264021 - DNA, 470 bp, Zea mays
tgccgtaccggaactgcagggtcgacccaagcgacccggccccagttcgtcgacaagtacggcgcgaacgtcgacggatacagcccaatctacaacgaggatggctggtctcccaccggcgacggcgacgtcggtggaaccactgggcttctgatctgggccgtcaccctcgctgggatcctcggcggcggcgccctcctcgtctacaacaccagcgccctctacggctaaggatatccaatgcatgcgcttcttgcgattcgtcatgtaaaatcagggtgtctgtctataatctagcctccatggatgctcaaccttcgtcatgtaacaataatcagtgctactcttcattacataattttggtgccatatctgtttacaaaaaaaacaacaatagaaaatcagaaaagaacaaaagaaaaaaaaaaatagaaaagggaaaaaaaaaaaagggtggtcgctctaaacga

SEQ ID NO: 264022 - DNA, 517 bp, Zea mays
cccacgcgtccgcccacgcgtccgccgccccgcgccccccgcacagccacacgcgtacacccgtacaccgtacgcagccatggcatcagtaggcttcggcacggtcgcgccggccgtggcatcatcgccggcggccaggacgacgagcgtgggccgcccctccgcggtgcacgtccctgcggcgacgaccaaggtcgtcgcggcggcggcgggtaagcgggtggaggagaagggcctgttcgacaccatcttcggcgcgctgtacaaggaggagcagctgctggagacggaccccgtcctgaacaaggtggggagcaagggcaaggccgccgccgccccggcgcccaagaaagccgctgaagagggcggcaacggcgggctcagcctcggcgggttcttctccaggcccaagaaagggtgaacgtacgtacgttatgtagctccgactccgagtgaggatcgttttgcgctgctcttgctttcttgtacgtaatccttggattggattggaatggac

SEQ ID NO: 264023 - DNA, 562 bp, Zea mays
  unsure (1)..(562): unsure at all n locations
cgcgtacacccgtacaccgtacgcagccatggcatcagtaggcttcggcacggtcgcgccggccgtggcatcatcgccggcggccaggacgacgagcatgggccgcccctctgcggcgcacgtccctgcggcgacgaccaagttcgtcgcggcggcggcgggtaagcgggtggaggagaagggcctgttcgacaccatcttcggcgcgctgtacaaggaggagcagctgctggagacggaccccgtcctgaacaaggtggggagcaagggcaaggccgtcgccgncccggcgcccaagaaagccgctgaagagggcggcaacggcgggctcagcctcggcgggttcttctccaggcccaagaaaggttgatctcgccctgtgttctgcaagcacacaccccagccagcatcagtggttcactgctggctgttgatcatcatcatcatcactagtagatgtagcagttgtgtgtctatgtataaatgtactgaagctcgtgtagcaccctggctcttggatgagtgcccattattgttaccagcaataagaaaacaaaacaga

SEQ ID NO: 264024 - DNA, 390 bp, Zea mays
agtaggcttcggcacggtcgcgccggccgtggcatcatcgccggcggccaggacgacgagcgtgggccgcccctccgcggtgcacgttcctgcggcgacgaccaaggtcgtcgccgccgccgccggttaaccggttgaagaaaaaggcctgttccacaccatcctccgcgccccgttcaaaggaggaccacctgctggagacggcccccgtcctgaacaaggtggggagccagggcaaggccgccgccgccccggcgcccaagaaagccgctgaagagggcggcaacggcgggctcagcctcggcgggttcttctccaggcccaagaaagggtgaggatcgttttgcgctgctcttactttcttgtacgtaatccttggattggaatgga

SEQ ID NO: 264025 - DNA, 1289 bp, Zea mays
gccgttttgtccttcttctccccccgcccggcggcccggatccccgccccttctcctcaccctcctcccccgcccgccggccgccgtctgccgaacacggaggccggtctcgcagccgcagcccgtcggttccggtggccgtcggaggccgcgtcggcgcgggggctgtgcgcgccgccgcatttcggcggtgaggggatgggatctgacgcgggggcgggggccaggaagaggcgggtcccggccgtgaacgggctcgccaaggacgcgcctgcggtgaacgggatgcgcaaggaggagcccgtggccgcgcctcccaggttgctcacgctgcccactgtgctcaccattggccgcgtcgctgctgtgcctcttctgatcagcactttctacatggagggtccatgggcagctatggccacaacaggcatcttccttgctgccgcagtcactgattggctagatggttatattgctagaaagatgcagctaggaacaccttttggtgcatttcttgatcctgtggccgacaagcttatggtagcggcaacattagttttgctatgcaccaaacctttggaatcatcactgctcaatgatgggccatggcttctaacagtcccttccattgccatcattggaagagagattacaatgtcagctgtgagagagtgggctgcatctcagaatagcaaagttcttgaggctgttgcagttaacaacttagggaagtggaagacagcgacgcagatgacagcattgactctgcttctcgcaagcagagacccaagtctacctgcgcaaggcgctctagttgcccccggtgttgctctactttacgtctccacgggactcgccgtatggtccctagtggtgtacatgagaaagatatggcggacacttctaaaatagtattagcacaatatatatagtgtagtagaagaaacagaagcaaggcgaggttctattcgtgatcgtacgatttttggaaggctgcttagttgattggtggactgggacctatctagagctgcttgtgatcctcattcctcagtaacttgtgcgtcatctatttttgccgccaaatttgctgaagtatgccaggattctagacatgatgtgaccctgcgtgcttaaggagatataagtctgcaatgcagaagattgtaacccaatacaaacccaaaacccagaggtttgtgcatgtggagttctatcattgtaatctgcacataatatcatatccaagaacttgcattattccttttcaaaaaaaaaaaaaagggccg

SEQ ID NO: 264026 - DNA, 1201 bp, Zea mays
cggacgcgtgggcggacgcgtgggcggacgcgtggggcaaaaccctcaaagactagctagggaaatctgtggtgcactgcatgctagcattcaacctgctggtgtggctgttgctctgcagtgctggcacattcctttaccagaaaacttggaatgcaaaactttggaaggttggattagaacttcacattcatctcgctctggagtctttgaaggtgaaagcagcactttctggagtgacttcttggctcttgttaagcttaggggcatagacgtggaggctaaggaccataccgtttctattccttggtgccctttaaggtctcatgaggttccactctctaacgggctctgcaagaaaaactcaactaatggcatggtttctgctgttacctcgatgctcttatcactcggagaggaccccctcaggaaagagcttttaggcactcctcagcgttatgtgcagtggctgatgaagttcaaagcatgtaatctactagacgtgaagctgaatggttttacacttagtaatgttagcttatatgagaggacaggtggaggcacaactgatcatggagcaatcagatcggagctgcacttgccattttgtgctcaatgtgaacaccatcttctgcccttctacggagtagttcacattgggtactttggcaatggaagcggagaaggcattgatcggtcgcattttcaggcgttggttcatttctacgggtgcaagcttcaggttcaagaaaggatgacaaggcagatagctgaagcggtttattcagtttcgcacaatggggccatggtcgttgttgaggccaaccacatttgcatgatctcaagggggatagagaaaataaggagcaacacggcaacaattgcagttttgggccagtttttggccgacccttctgccaaggcgtgcttcttacagaatgttttggattctgttggttctgcggtatgaatcgtatcgcaagcagcaaagaaaaaaatgtctagttggagtactatccagcaattgaaatttttagcaatctactggtctagcatgattcttctcgggtgcaaatttgtcacctgtgggactggcccgaggctgtcccaagtaagccccaaaagggttttggttcataaaaaaaaaaaaacaacaaaaaaaaacaaaaagaaagggcggccgctcgcgcccacgcgaccg

SEQ ID NO: 264027 - DNA, 432 bp, Zea mays
cccacgcgtccgggttggtgtggataaaaggactggatctgctggtggaactggcgggcaagtagttgttcgagacattgaacttttctcctattgtgagtcatgcttgcttccattcagcatacagtgccatgtcgggtatgttccctcaggtggaagagtggttgggttaagcaagctttctagagtatctgatgtctttgccaagagattgcaaaaccctcaaagactagctaatgaaatctgtggtgcactgcatgctagcattcaacctgctggtgtggctgttgctctgcagtgctggcacattcctttaccagaaaacttggaatgcaagactttggaaggttggattagaacttcacattcatctcgctctggagtctttgaaggtgaaaagcagcactctctggagtgacttcttggctcttg

SEQ ID NO: 264028 - DNA, 400 bp, Zea mays
catttgcatgatctcaagggggatagagaaaataaggagcaacacggcaacaattgcagttttgggccagtttttggccgacccttctgccaaggcgtgcttcttacagaatgttttggattctgttggttctgcggtatgaatcgtatcgcaagcagcagagaaaaaaatgtctagttggagtactatccagcaattgaaatttttagcaatctactggtctagcatgattcttctcgggtgcaaatttgtcacctgtgggactgtaccgaggatgtcacaagaaagcaccaaaaggggtttggttctctcgtgttgtaccatgtcacttgtaaggcacttcaaataaaaaagaaatagtaatagttacaactgtgccaagaaggatatagtcattcgt

SEQ ID NO: 264029 - DNA, 1397 bp, Zea mays
cggacgcgtgggcggacgcgtgggcggacgcgtgggccgcccagcggccacttgttctccctccctctctgcctgaccagctaggatcagcggaagcagcaatggtgatggcgtcgtcgagcgggctgaggagctgcagcgccgtgggcgtgcccagcctgctggcgccgtcgtcccggtccggccgcctggcgccgttctgcgccaacgccaccacctctggccgcgtcaccatgtccgcggagtggatgcccggccagccacgccctgcccacctcgacggctcctctcccggggacttcggcttcgatccgctgggcctcgcgaccgtgccggagaacttcgagcggttcaaggagtcagaggtgtaccactgccgctgggccatgcttgccgtccccgggatcctggtgccggaagctctgggcctgggcaactgggtgaaggcgcaggagtgggcggccgtccccggcgggcaggccacgtacctgggcgccccggtgccgtggggcacgctgccgaccatcctggtgatcgagttcgtggccatcgccttcgccgagcaccagcgcaccatggagaaggaccccgagaagaagaagtaccccggcggcgccttcgacccgctcggcttctccaaggaccccgccaagttcgaggagtacaagctcaaggagatcaagaacggccgcctcgccatgctggccttcgtcggcttctgcgtccagcagtcggcgtaccccggcaccggcccgctggagaacctcgcctcccacctcgccgacccgtggcacaacaacatcggcgacatcatcatccccagatcaatctccccttgagctcagctcagctgctggttgctgtttcctgtgtacgactaggccctgcctgtacaacgagcgacgacggtgacttcccgcccggaaattaaaccctcgtaatgtaaagcttatgttattaagtagcggctactcttgtagtcttgtctgtatcaaatataaactggtttgttagctgaatcccaaggttatttctgagcctaaccaggggaaatttagctcaaaacggagaaaatacatacgagacctttgataactacaaagtattgtatttcatgagctagacacgatgttttttttttaagattcacgagggagagcctctactgagattttattagaaatgacaaaagaaaatgttacatcttaaaaaaaaaaaaaaaaaaaaaaaaaaaaaaaaaaaaaaaaaaaaaaaaaaaaaaaaaaaaaaaaaaaaaaaaaaaaaaaaaaaaaaaaataaataaaaaaaataaaaaaaaattataaaaaaggggggggcctttttaaggtccccattttatatcccgggggattggaaggttatattttttttttggg

SEQ ID NO: 264030 - DNA, 662 bp, Zea mays
ggcgaactccctgtctgcctgaccagctaggaacagctgattcagcaatggtgatggaatacacggccgcgcttatgaactcaagcgccggcaacatccccagactgatgacgcacgcgtccaggtccgaccgcctggcgccgatctgcgccaacaccaccacctctggccgcgtcaccatatccgcggagtggatgcccggccagccacgccctgcccacctggacggctactctcccggggacttcggcttctatacgctgtgcctcgcgaccgtgccggagaacttcgaacggttcaaggaatcagaggtgtaccactgccgctgggccatgctagccgtccccggcatcctggttccggaagctcatggcctgggctactggttgaaggcgcaggagtgggcggccgtccccggcgggcaggccacgtacctgggcgccccggtgccgtggggcacgctgccgaccatcctggtgatcgagttcgtggccatcgccttcgccgagcaccagcgcaccatggagaaggaccccgccaagttcgaggagtacaagctcaaggagatcaagaacggccgcctcgcaatgctggccttcgtcggcttctgcgtccagcagtcggcgtaccccggcaccggcccgctggagacctcgcctccc

SEQ ID NO: 264031 - DNA, 1072 bp, Zea mays
tgagccgtttcttttcactaggaccacggagctgccgccgaggggggacggccctgctgggaccgtcgtgctcatcgacaagcccaaaggatggacttcgtttactgtctgtggaaagttacggcgcttggtgaaagtacaaaaggttggacatgctggaactctggacccaatggcaactggattgttgattgtttgtgtaggaaaagcaaccaaaatagttgacagctaccaaggaatggttaagggctatagcggtgttttccgacttggagaagccacatcaacctgggatgcagattcaccaattatccagagggaaccatgggaacacatcaaagatgaaaatattagaaaggcagcagcatcattcatgggtgagatatggcaagttcctccaatgttttctgccattaaggttggcggtgaaaagatgtatgacaaagcaaggaagggtgaaacagtagagctttcaccaagacgtatatcgatataccaatttgatattgagcgcagtttggaagacagacagaatttgatatttcgagttacttgctcaaaaggaacatacattcggtccctatgtgcggacttgggtaaagcacttggaagctgtgctcatttaactgccttgcggagagactcgataggtgaatactcggtcaatgatgcttggaacttcgatgagcttgaagaacaaatcaccaaggggtatttatgagcatgccagtgagccgagctaggttatatgcggcttgcaaccagtggcatccatgctgccatgtcagtcccaaagctgtcaacgtgggcttcagcgaagagttgcaaatccagttcagttcatcctcaaccttttgtcatatagaggaacacgaagctccgttagttgtatgtgtgttgtgggtttcaattgatctcagtattgaatcgattttggcagtattgatgtataccattgttggtcaggtcttttgattgccttgccatgtaattttgctgggagcatattaaatttataatctaaagactgtgttaaaaaaaaaaaaaaaaaaaaaaaaaaaagggcggccgc

SEQ ID NO: 264032 - DNA, 986 bp, Zea mays
cttacgcgtcgagactgagagaggcaggtaatacatacctgcgactgcgacgagtgagtaaagcttcatcttcttcctccttcctccggcctcttcctgagtgctgcacgcagtgcgtaggaaggaactcgcgtacgtacgtgtgctagctagctagctcgaccacgcgcacacgcaggcgcgtagtagctcgatcgatcgaccgccggccggaaatgtcgaccaactcgaggtccaactccagggccaacttcaacaacgagatccatgacatcggcacggcgcagaactccagcatgccccccacgtactacgaccggtcgctggcggacatcttccctccgcacctcctcaagaaggtggtctcggaggtggtgtccacgttcctgctggtgttcgtcacgtgcggggcggcggggatctacggcagcgacaaggaccgcatctcgcagctggggcagtcggtcgccggcgggctcatcgtcaccgtcatgatctacgccgtcggacacatctcgggcgcgcacatgaaccccgccgtcacgctcgcgttcgccgtgttccgccatttcccctggatccaggtcccgttctactgggcggcgcagttcaccggcagcatctgcgcgtcgttcgtgctcaaggccgtgctgcaccccatcgccgtgctgggcaccaccacgccggcggggccgcactggcactcgctcgtcatcgagatcatcgtcaccttcaacatgatgttcgtcaccctcgccgtcgccacggacacgagagcggtgggtgagttggccgggttggcggttggttctgcggtttgcatcacgtccatcttcgcaggggcggtgtcgggcggatcgatgaacccggcgaggacgctgaggccggctctggcgagctacctctacaccggcctctggatctacttcctaggtcccgtcctcggcacgctctccggcgcctagacctacactgcatccgcttcg

SEQ ID NO: 264033 - DNA, 514 bp, Zea mays
acgctcacgcttccgattagccgacagtaacgattctttaattcagctagctagcaagcatgtactactaactaaaccctgagtgagtagctagcacgccagcactcctgagcccctgacctggctcgcaacgtgaatctgacccggtcccggacggccacgctgacatagtgacaatagatcgatgaactgagcactgagacgcgagggaaaaccgagtggtgattgcagggcagtgtcgggcggatcgatgaacccggcgaggacgctggggccggcgctggcgagcaacctctacaccggcctctggatctacttcctgggccccgtcctcggcacgctctccggcgcctggacctacaccttcatccgcttcgacgaggcgcccagccacgacgcgtcgtcgtcgcactcgcagaagctctcctccttcaagctccgccgcctgcagagccagtccgtcgccgccgacgccgacgacgtacgagactcgagcacatcaggtgtgagtgtg

SEQ ID NO: 264034 - DNA, 446 bp, Zea mays
cggacgcgtgggcgagcacgcaccagcatccttggcagcgatctgcttgcttctcccagctagcgcgcgcggccaagctaggggatccatcagatatccacgccggccatggccgccgccgcctccaccacgtcgaggaccaactcgcgggtgaactactcgaacgagatccacgacctctccaccgtgcagagcggctccgccgtccccaccttgttctacccggacaagtccatcgccgacatcttcccgccgcaccttgggaagaaggtgatctcggaggtggtggcgacgttccttctggtgttcgtcacctgcggggcggcgtccatctacggcgaagacaacaggcgcatctcgcagctggggcagtcggtggccggcgggctcatcgtcaccgtcatgatctacgccaccggccacatcttcggcgcgcacatgaaccc

SEQ ID NO: 264035 - DNA, 274 bp, Zea mays
ggcagacacagatagctgccagtagagcttcttcttcttcttcttcctccgcttcctcttgccgagcgcagtgctacgtaggaaggagctcacgccctcgcgcacgcgtcgtagctcgtcggtcgatcgccggaaatgtcgaccaactcgagggccaactccagggccaacttcaacaacgagatccacgacatcggcacggcggtgcacaactccagcagcctgccccccgcgtactacgaccggtcgctagcggacatgttccctccccacc

SEQ ID NO: 264036 - DNA, 195 bp, Zea mays
cgagcacgcaccagcatccttggcagcgatctgcttaattgcttctcccagcgcgtgcggccaagctagtaggggatccatcagatatccacgccatggccgccgcctccaccacgtcgaggaccaactcgcgggtgaactactcgaacgagatccacgacctctccaccgtgcagagcggctccgccgtcccca

SEQ ID NO: 264037 - DNA, 2257 bp, Zea mays
cacacgcgtccgcaaaagcccaaaccaaatccaagcgcaagaaggggcaaagccgcaaagggggaggcaccaggcaccggcagccattacttactggtcctcactcccacaccaaccaaccaacctcctctgcctgccgcttctcctgctgcgggcgggcactgctgcaagtactagaggaggacatccgcttccattactgcgcctgcggaggatcggaggaaccagtagcggaggcttcgattttcggcgggcgcaataaatttcccgcatggctcggagggccgcgtcctcgctcgtctcccgctgcctcctggcgagggcccctgccggcgcgccgcccgctgccccctctgcgccgcgcaggacagtgcctgcagatgggatgcacaggctgttgccaggtgtccttcagaggttcagcactgcagcagcagtagaggagcccatcacgccgtcagtccatgtgaactacacaaagctcctcattaatgggaactttgttgattccgcatccggcaagaccttcccaactctggaccctcgtacaggggaggtgattgctcatgtggctgagggtgacgcagaggacattaaccgtgcagtagctgcggctcgcaaggcttttgatgaagggccatggccgaagatgactgcctatgagaggtcccgtatcctactgcggtttgctgatttgatagagaagcacaatgacgagcttgctgctttggagacatgggacaacgggaagccatatgagcaagcagcccagattgaagtacccatggtggcccgtcttatgcgttactatgctggttgggctgataagatccatgggctcattgtgccggctgatggcccacaccatgtacagatcttgcatgagccaattggtgttgcaggtcagatcatcccatggaactttcctcttctgatgtatgcctggaaagttggccctgctttggcatgtggaaatactctcgtgctcaagactgctgaacaaacccctctatcggctttgtatatctccaaattgttgcatgaggctggactacctgagggtgttgtgaatgtcgtttctggttttggccctactgctggtgctgctcttgctagtcacatggatgttgataagatcgcatttactggatctaccgatactggaaaaattattctcgagttggctgcaaagagcaaccttaagacagtgacactggagttaggaggcaagtcccctttcatcataatggacgatgctgatgttgaccatgctgttgagcttgcgcactttgccctgttctttaaccagggacaatgctgctgcgctggatctcgcacgtttgtacatgagcgtgtttatgatgagtttgtggagaaggccaaggctcgtgcattgaagcgcgtcgttggtgatccgttcaggaaaggtgttgaacagggcccgcagattgacgacgagcaattcaacaagatcttgcgctacattaggtatggtgttgacggtggagctacccttgtgacgggtggtgataggttgggtgacaagggtttctacatccagccaacgattttctcagatgtccaggacggcatgaagattgctcaggaggagatatttgggcctgtgcagtcgatcctcaagttcaaagacctcaatgaggttatcaagagggcaaacgcgagccagtatggattggccgccggcgtgttcaccaacagcctggacacggccaacaccctgacgcgcgcgctcagggccgggaccgtctgggtgaactgcttcgacgtcttcgatgctgcgattccgtttggcgggtacaagatgagcggcatggggagggagaagggcgttgacagcctgaagaactacctgcaggtgaaggcggtcgtcaccccaatcaagaacgccgcgtggttgtagacgctgcaagtgtggccttgtgcacgagaaccacgtatattcatttcctggtcacatccccgaacaatgtgaagcgttaatcagatagatgacgatgaagaagaacaactataataagatttgccctagcctgggttctcagttatctctaataagttttatggttggtgcctatatattgtgcaatttggttgctcccttttattttgtttctttttgataagactgttctagcaacggatatgcagagttcattatgaaaatgcatttgttagtgtctttgatggttaaaaaaaaaaaaaaaaaaaaaaaaaaaaaaaaaaaaaaaaaaagaaa

SEQ ID NO: 264038 - DNA, 647 bp, Zea mays
cccacgcgtccgcccacgcgtccggacccacgcgtccgcccacgcgtccgcccacgcgttcgtgttgaccatgctgttgagcttgcgcactttgccctgttctttaaccagggacaatgctgctgcgctggatctcgcacgtttgtacatgagcgtgtttatgatgagtttgtggagaaggccaaggctcgtgcatgacacctgggcggtcgcgtggggttcatgaaaggtgttgaacaggggccgcagattgacgacgagcaattcaaaaagatcttgcgctacattaggtatggtgttgacggtggagctacccttgtgacgggtggtgataggttgggtgacaagggtttctacatccagccaacgattttctcagatgtccaggacggcatgaagattgctcaggaggagatatttgggcctgtgcagtcgatcctcaagttcaaagacctcaatgaggttatcaagagggcaaacgcgagccagtatggattggccgccggcgtgttcaccaacagcctggacacggccaacaccctgacgcgcgcgctcagggccgggaccgtctgggtgaactgcgttcgacgtcttcgatgcttcgattccgtttggtgggtacaagatgagcggcatcgggagggaga

SEQ ID NO: 264039 - DNA, 1231 bp, Zea mays
tgatacaaagattcttggtcttatagccaacccagtaaaacagagcaagagcccaattttacacaataaatgtcttcagtccattggatataatgctgtttatcttccacttcttggagataatcttgctagttttctggagacatactcatctcctgacttttcaggatttagttgctcacttcctttcaaagtagatgctgtacagtgttgtgatgaacatgatccagttgctaagtcaataggagccataaacactataattagaagaccagatggcaaattagtggggtacaatacggactacattggagctatatctgctattgaggatggcattggaggtccagggtcaaaggatgctgtcatctcaccattggctggtaggcttattgttgttgtaggagctgggggtgctggtaaggcaattgcttatggggcaaaggagaagggtgcgagggtagttatagcaaatcgcacctatgagaaggctgtacgtcttgccaatgcaattggtggtcaggccctgagattagaagacctggaaactttcagacctgaagaagggatgatccttgctaatgcaacatcattggggatgtacccaaatgttgatggtactcctattccaaagaaagccttgggtttctatgatgtggtatttgatgccgtatatgccccaaaagttactcggcttcttcgagaagcagaagaatgtggagttaaagttgttagtggtgtggaaatgtttattagacaagccatgggtcaatttgagcatttcaccggtggtatagaagctcctgaaagcctgatgcgtgagatagcagcaaaatacacctagcaggctaatggcgaaaacctatctttgatgaatatttgcccaaagattttctcgggctgagtgaataaatgttttgcagttatcatgtttgctgttatgttagatttagccgacttgtcacctgcacactgtaagattatgttgccatgctatagtgttcttgtacctgcaatagaagagttgcaagaataaagagtcagcttagaaccaacgttatgatgaccaagggggaaaatatgcatcaaacaatgattcagttggcagttggttcagtgctgatcatggcggttatactgtcctgcataatttcattgtacggttcgatggcatatttctttttttggaaaaaggaaaatttattgataactcagaataatatcgtgatta

SEQ ID NO: 264040 - DNA, 680 bp, Zea mays
ttcccggtcgaccacgcgtccggtaaacatgcagcaattaaaaggaacctgttctagcatcggtgcttgcaggatgaagaacgagtgcacctcattcagaaatagatgtggagacgagaacgctgaaggttgtatgaggtccttccagaacctgaagagggagcatggagtcctcaggcagaagctggaatcctacttccaggtattcattcacgcccagctccatccctaccattcatcgccttgctaatctcgcctgtgtgcagctgctgcgacaagccggtcctgccgtgactgcaaccaggcctagaggcatgtgaggaacggctgttggcgtgcagggagcagtgcaagggacagacagcgtcatagcgatgctccactacgccattgttgaggctagctgtaacgatgggccacgaataagaagtttgcctatggcctgtgggggagttccctgcgggttttaaagtgtaataacacccttcataatcgatgccttaagctggtgctgccgagtgccgactagctaggccggcatgtaagagcagcctagactgatgttgatgtggtctggcagacgtcctgtgctgtgcctgcctctgtatttcggtcaaataaataaactagatggagtttgcatgtttgcatcagacaaggataacgagaaagtaaaaggg

SEQ ID NO: 264041 - DNA, 441 bp, Zea mays
cgctaggtcgctggttcgaagtttctctctgcatttgcgggagaagactcggctcaatttatcccttctctatatcccactcatatgggagcccccagtactgggtctgccctttgaaacgcatagcctggcaaaatgcatcggtgcttgcaggatgaagaacgagtgcacctcattcagaaatagatgtggagacgagaacgttgaaggttgtatgaggtccttccagaacctgaagagggagcatggagtcctcaggcagaagctggaatcctacgtccagctgctgcgacaagccggtcctgccgtgactgcaaccaggcctagaggcatgtaaggaacggctgttggcgtgcagggagcagtgcaagggacagacagcgtcatagcgatgctccactacgccattgttgaagctagctgtaacgatgggccacgaat

SEQ ID NO: 264042 - DNA, 1091 bp, Zea mays
gtcacttcactggtcaagcattcctatccacctcggcccacctccacctccctgacagtcattttgttatataaaacccatcaagctcccctgcaaggagatacagaaccctgcaactgcaagctaaggagagtgtgatcaccaacagctagtgctagtcccccttccttccatccatccatggcatgcgtcagcaccttccagagctgccccattgccagaagagcaaagatcaacaccaggtccaggggcagcagcagtagcgtggcgaaggggtcaccaccaccagccttccagttccagtgcagggcgtcgactttcgcggcggacaccagcctccggctcgagctggacgagaaccccgaggcgatcatctcgggggcgtggcccgggaactgctccctcctcagctacgacgacctccgcgcctacctcgagtcgcaggagacggcggcccaggcagacggtcagcgcggcgtggcgctcctgagcgagaccatgtccacacccgtgctggtggccacagcagaccagaccctggaggacgtcgagtgccacttcgaggccgtgtcggggcttccggtcgtcgacagcggcctcagatgcgtcggggtgatcgtcaagaacgaccgggcaagagcctctcatgggtccaagacgaagatatcggaagtgatgacatctccagctatcacactatcgtctgacaaaaccgtgatggatgctgctgttctcatgctcaagaagaagatccacagattaccagttgtaaaccaggacgaaaaagtaataggtatagttacccgcgctgatgttcttcgcgtgttggaaggcatgttgaagatttaggagcgcagatacccatgctcggaagccacagcctcttgtaaatatgtagatgtgcccgggcatggtgtttctgagtagcagcaaagagatctaccatgtataggagtttttccttgtaaataaaagtagcacgccaggagactccatcccaggttccgcactgcttgcgcgaccagatgctgtaaactagccagatacttgaagaccaatataaatggatatgtctaaagtagtgtttcggc

SEQ ID NO: 264043 - DNA, 1052 bp, Zea mays
gtttcaaatcccattactttctcccttaaaacctcctctcccctcgttctcctccgcctcctcctcccacctccccacacgggcacacctgccctccccgtcgccgcggacccactcccatggcaaagctcccgcgtctaccctgctcgtttgccgttctcgcgctcatgtgcatcatcccgctcacagcgccgcggcctgcactgtcctcgcgcgcggccccaagggacggtgtctccttcgccggcgcaggcaacacgatacatcaacttcttaaagatcacggccttcccggaggactgctcccgcgcggcgtggagtcgtacaccctggacgagtcgaccggcctgctggaggcgcggctgtcggcgccgtgctacgccacgtacgacaacggcgaactggcctacttcgacaacgtggtgcgcggcaacctcagcaagggcgcgctccgaggcgtggagggcctctccaggaggagctcttcgtctggctccccgtcaagggcatcctcgtccaggaccaggaacccggggtcatcctgttcgacatcgggttagcccacaagagcctgtcgaggtcgctcttcgaggacccgccggactgcaagccgtcggcctccggcgggatgagcgccgcctccgccgccaggagggagggcacgcaaggtgttactggactacggttgaggcgagagatggcagcagcaggcagcgaccagagtcaggagcagaggtgaggaggaggaggaggagctctgagacgacaacacccgagacaatggcgagccagttttccgctttataaaatcctgcggtgagtgagtgagtgagtgagtgagagagagagagagagagagagtgccgccgccgccgcaacaagaaatacaacagctgcagcttcctgcagaggttggaatgtatctactaagatgtgggtacctttttgcagttcttttttctcgcttcttttcttctcttttagcccaagctgctcctctcttgtccatgcactgtgtgaattaagtttgtcagtcagtcaactgttgttat

SEQ ID NO: 264044 - DNA, 665 bp, Zea mays
gtcactgcaagcctaagcctgatcccaaaccgctgatatgttgtgtctgttggcactgcaagccggagaagaaggaagagaagaaggaagaaaagaaggacgaaaagaagccggcgccggccaaaacggagtacaagtttgtgccctacccgtacccgctgccgaaccccgcgatgtgcccgagctggccgtggcagtgcccgcctcagcagcagtgccagtgctgccagaagcctccgcctccgccgcccaagtcgccgccgaagccgccgccgtgcacctgttcgagccacgccgcctgtgtctgcggcaagacaccgccggcggtctggccaccgatgccgccgccggtctggccgcccccgtggggcacctgcaacgtcgtcaccgaggagagcccgtgctccgtcatgtgacgctacgcgcttgctttgtcatgtactcgtcgctgttggcctgttgctgtgctgccatcggtactggacctcggtgctacttgggccggtgccatcctgtgtagtgaaggtacagtgcatcgtctgcagatgtgcttgcctcctacagtctcttatacgaacgtgtcacgccttgttttattgcagtaattgtgtagcttccagctataatttgctactctgtatatgtggtataagatgaattttcat

SEQ ID NO: 264045 - DNA, 2193 bp, Zea mays
aagggagcgacgttttataaccacgaataaattttaatattagcaatcgaccgtgttcaggtgatgatgaataattacatctggagttggcctgatatgggattgtagccggacgccgccttcatatagcggccgtcaggaaccccagcaagcaacccagccgcccattgccggcattgctcgcagcgctagcttcttgcgctcatcagtcgtctccgaccaagatcagcaaggacggcatggctctcgaagcagcgtacgactacctgcacgtcgccgtcgtccagtgcacgcccacacaagcagcagcagtcctcggcgtcctcctcctcctcgccatccggctagccgcggcggcgaggagctcgtccgcgacgtcccccaaatggaagcagcacaggctgccgccgacgcctccggggaagctccccatcatcgggcacctccacctcatcggctcccacccgcacgtctccttccgcgacctccacgccaagtacggccacaacgggctgatgctggtgcaggtcggcgccgtgcccaccatcgtggtgtccacgccgcaggccgccgaggccgtgctccgcacgcacgaccacgtgctggcgtcccgcccgcggaaccccgtcgccgacatcatccgctacaactccacggacgtggccttcgcgccgtacggcgagtactggcgcacggcgcggaaggtggtgaacacgcacctgctcagcgccaagatggtcttctccaagcggcgggagcgggaggaggaggtgcgcctggtggtggcccggatccgcgacgccgccgaggcgtccccggggacggcgctcgacatgacggagctgctgggcggctacgccagcgacttcgtgtgccgcgccgtgctcggcgagtcccaccggaagcagggccggaacaagctgttccgggagctgacggagaccagcgccgccctcctgggcgggttcaacgtggaggactacttcccgaagctggcggacgtggacctgttcctccggatcatctgcgccaaggccaagggcgtcacaagcggtgggacagcctcttcaacgagctgctgtccgagtacgcgctctccggcggcaagcagggcgaccacaactctgaagacttcgtgcacctcttgctgtcgctgcagaaagactacggtctcaccacggataacatcaagggcatacttgtgaacatgttcgaagcagccatcgagacatcattcctggtgctggagtactccatgagcgagctgatgaacaaccgccacgtcctggccaagctccagaaggaggtgaggacggcgacgcccgacggccgcatggtgatggaggaggacctgagccggatgccatacctgaaggccaccatcaaggagtccatgcgcatccacccgccggcgccgttcctcctgccgcacttctccacccacgactgcgagatcaacggctacaccatccccgccggcacgcgcgtcatcgtcaacgcgtgggcgctcgccagggacccgacgtgctgggacaaggccgaggagttcttcccggagcgcttcctggaacaaggccgcgacgccgaggtcgacatgtacggcaaggacatccggttcgtgccgttcggggctgggcgcaggatctgcgcgggggccacgttcgccatcgccaccgtcgagatcatgctcgcgaacctcatctaccatttcgactgggagatgcccgccgagatggagcgcaccggggccaaggtggacatgtccgatcagttcgggatgacgcttcgccggacgcagaaactttaccttgttcctagaattcccaaatgagtgtcgtcgtcgtcgtacaaatggcatgcatcttattgtaagttttggagtttgttgttgcacacgcaacgatggaccgcctgtgatatctttaataaatgtaaccgcagataataatgaaataaaaagaacgcatggctattgtattattaaaaaaaaaaacatttgggaattctaggaacaaggtaaaagttctgggtccggcgaagcgtcatcccgaactgatcggacatgtccaccttggccccggtgcgctccatctcggcgggcatctcccagtcgaaatggtagatgaggttcgcgagcatgatctcgacggtggcgatggcgaacgtggcccccgcgcagatcctgcgcccagc

SEQ ID NO: 264046 - DNA, 607 bp, Zea mays
ctcgcttccacccatccgccgcggctcgtctccgtctcccggctcttcggcgtctagctcgtcaacgcgcgcgtccgccgtcggctcctccgacgggcgtcccaccgcaggggaatacagatcgtcgatccgctgggcttgcaaacatgtatatccgagtgaagcgcaacaagagtacctacttcattcaatgtgaaccaacagagacagctttgagcatcaaacagaagttgcactcgctgatagatcaacctcctagtagtcagcagttggtcttgtggcctagcagtgatgtgcttgaagactcaaagactttggcagatcaaaaggtggataacgattccattgttgcattggcactaagaaaagatgacggtgagtttgaggaagttttcatcgctaggccggaggatttcatgtcatcatcatgataaagattagtccatcatttctacaaagggaccactgcgcgttcttggagcggcccgtcgctctatgctggttcttctagaatctgggatgtggcttgcttgtccctttgggaggaaaaagaaaatcttttatgtgagatcccaaacaaccgttgtggatgatattaactttgatt

SEQ ID NO: 264047 - DNA, 823 bp, Zea mays
cggacgcgtgggcagctgttccgccgagcgaacgacccagaagcagaagccaccgatcggcgtgccgcgtgcgtgaggcgatcggagcatcccgtcccgaggaggaagacaaccggcgacgcggggggaacatggggaagacgccggtgcggatgaaggcggtcgtgtacgcgctgtcgcccttccagcagaaggtaatgccggggctgtggaaggacatcaccaccaagatccaccacaaggtcaccgagaactggatctccgccacgctcctcctcacccccgtcgtcggcacctaccaatacgccatgtggtacaaggagcaggagaagctttcccacagatattaaatgcgctgcccttgacagacagcactcggagttttcatgatgggtttcataatcctcccatgatgatttaacatttgtttgatcaatttcagttcaacgccttttcatcgttccatatgcatatatggtatccgtgtctggcaaacttattttgaggcttgctaaatatgtaccttttgtctctgaagttgttaaataaagcaaattaacttccagtttaaaaaaaaaaaaaaaaaaaaaaaaaaaaaaaaaaaaaaaaaaaaaaaaaaaaaaaaaaaaaaaaaaaaaaaaaaaaaggggggccgaaaaaaaaaaaacaaagttaaaaaaagcgggaaaaaaaaaaaaaaaaaactaataaaaaaaaacggggggggcctttaaaaaaaaccaaatttaaaaccccgggaatgggaaaacaaaatcttttttttaggggaaccaaattgaattaaatgggccgttttttaaaa

SEQ ID NO: 264048 - DNA, 627 bp, Zea mays
cggacgcgtgggcggacgcgtgggcatatttctccagctgttccccccccccaacgacccacaaccagaagccacccattggcgtacgcgaggcgatcggagcatcccgtcccaagaggagaaactccggccggcgacgcgggggaaaatggggaagacgccggtgcggatgaaggcggtggtgtacgcgctgtcgcccttccagcagaaggtgatgccggggctgtggaaggacatcaccaccaagatccaccacaaggtcaccgagaactggatctccgccacgctcctcctcacccccgtcgtcggcacctaccaatacgccatgtggtacaaagagcaggagaagctttcccacagatactaaatgggatgtcctccaagttgctgcggcttgtcgcagttgaattttccatgatgggttgtataatctgtcaatgtcatttctttgctcagttttagttcaacccattttcacctttccatatgcatatacggtatctgtgcctggcaaacatattttgaggctagctaaatatgaaccttttgtctcttaagttgttaaataaagcaaattatctgacaaaaaaaaaacaaaaggctactcatattcagcgggaaacaaaa

SEQ ID NO: 264049 - DNA, 465 bp, Zea mays
gcgagcccgaagccgaatgccgacgtgcaggatgagctgcaggagctgtccgacgcgctgtaggccggcatggcgtgcatcctgggccgactcgcacgtgaaggcgaagagcgggtccggcttcctccgccggctcgtgatcaacttctgctacgacttcctgcggaggaacagccggggtcccaactacgccgtctccatcccgcacgcctccacgctggaggtgggtatgatgtactatatctgatctgatgactgaacccctgaaactgagggggagaaatataggagcaggagaggaaatggaacaaaaagttttcagctgtatatgcatatatggtatccgcgtctggcaaacttattttgaggcttgctaaatatgtaccttttgtctctgaagttgttaaataaagcaaattaacttccagacgacctatacgtgagagtaaacttaaagcgggccat

SEQ ID NO: 264050 - DNA, 535 bp, Zea mays
gcagaagccaccgatcggcgtgccgcgtgcgtgaggcgatcggagcatcccgtcccggggaggaagacaaccggcgacgcggggggaacatggggaagacgccggtgcggatgaaggcggtcgtgtacgcgctgtcgcccttccagcagaaggtaatgccggggctgtggaaggacatcaccaccaagatccaccacaaggtcaccgagaactggatctccgccacgctcctcctcacccccgtcgtcggcacctaccaatacgccatgtggtacaaggagcaggagaagctttcccacagatattaaatgcgctgcccttcacagacagcacttggatttaacatttgtttgatcaatttcagttcaacgccttttcatcgttccatatgcatgtatggtatccgtgtctggcaaacttattttgaggcttgttaaatatgtaccttttgtctctcaagatgttaaataaagcaaattaacttccagtttctcgtgtttgtgtttaagaattggtaactgggtttatttgttag

SEQ ID NO: 264051 - DNA, 644 bp, Zea mays
ggcagaccatccgctctggtggcgaggagctcggtcgctggatgctgcgttccgaggagagtcgagttcatcgattgggttggtgcgaattcgttcaggggtgtctatagaggaaagaaggtttgggtcaacaaattgaggggctgtgacatgggaagtgcttacgaagttgagattcgtcaggacttgctgcagttgatgagctgtggccagaggaacatcctgcaattccatggcatctgtttcaatggaaaccatgggctctgcatagtaaccaggatgatggaagggggatcagttcatgatattcttacgcagagaaacaagaggctgtccctccgggacacggtcaggatcgctcttgatgtcgccgacgctctggctttcatgaacagctacggcattgcgtaccgtgatctcaatgctcggaagatcctgctggataggcaagggaatgcttgcctcggggatatgggcattgttaccccttgtagtaatgttggtgaggtcactgagtatgagacgtctgggtaccgatggctggctccagagatcatcgctggagatcctgaaaccgtctccgagacctggatgagcaacgtctacagctacggaatggtgctctgggagatgatcactggaga

SEQ ID NO: 264052 - DNA, 744 bp, Zea mays
cccacgcgtccgtgatcatgggaagacaactctgttggattatatacgcaagagcaagttggtggcatctgaagctggtggtataacacaagggaattggagcatatcaggttcttttaccagtagatggaaaccatcaagcctgtgtttttctggatactccaggacatgaggcgtttggtgcaatgagagctcgaggagctagagtaaccgatatctgtattgttgttgttgctgcggatgatggtgttcggccacaaacaagtgaggcaattgcacatgcaagggcagcaggggtgccaattataatagcaataaacaagatagacaaggagggagctaatgcagaacgagttatgcaagaactttcccaaattgggataatgccagaaatgtggggtggtgataccccaatgatcgagataagtgctcttactggggataatgttgatgaacttctggaaactgtcatgcttgttgcagagttgcaagaattaaaggcaaatccacataggaatgcgaagggcactgttattgaagcatgccttgacaaggccaaagggcctcttgctaccttagttgttcagaatggaaccctaaacaaagctgatattattgtgtgtggtgaagcttatggaaagatccgtgcattgtatgatgactgtgggaagctcgttgacaaagcaggaccatccaatgcagtgcaggttattggcctcaataacgttccccttgccggtgatg

SEQ ID NO: 264053 - DNA, 778 bp, Zea mays
ctcgagccgctccacgcgctccaccctccagcgcctccaccctcctcgccgcctcactccctctgaggtcgcagatccgtccggttagacgaagccgcccgcacccatggcctccggtgagctcgcctgcacctacgccgccctcatcctcagcgacgacggcatcgccatcaccgccgagaagatcgccaccatcgtgaaggcggccaacatcaaggtcgagtcctactggccggcgctcttcgctaagctcctggagaagcgcagcgttgaggatctaatcctctccgttggatctggtggtggcgctgctccagttgctgcttccgccccagctgggggtgctgcagctgctgctgcccctgctgcagaggagaagaaggaagagcccaaggaggagtctgatgacgacatgggcttcagcctgttcgactgaggagaccctcgctacccagccattagcaaattcgcttatgctgtccaagacttatcttacgttatgtctgtaggcttttgttattacaagtactcaagttttgagtttttgagatgtggctatgacaatgtgatgaagaaccctaaaccatcgtattagagtgaaacttgtttctatatagagttccaagtttcttgaacctcaaacttgctctggttgatgctctgatgttttcagtcggtgctttttaatcgaagtcaaccggttttcgaaaaaggaaaaataccggtaaaaaaatgcaaaaaacccccgggcggcgctcgcgatctacaaacgcgtaca

SEQ ID NO: 264054 - DNA, 535 bp, Zea mays
ctgggtattttcagaatgcaggagtatgggacctttaatttgtgccaaccttagctgcactgaagattgtaacagtgcatgtttatacttgaattggatggtggattgtgttgaatttgtcaccctttgctttgatataagaacctctagttatatgctagaaggactaatcgttttggtgtgttgaaatggttttgtatggatctggtggcggagctgctccagttgctgctgccgcacctgctggtggtgctgcggctgctgctgccccggctgtcgaggagaagaaggaagaggccaaggaggagtctgatgacgacatgggcttcagcctgttcgactgaggagaccccctcacccagccattagcaaatttcacttgtgctgtcaaagactatcttgtcttatgttatgtctctaggcttttgttacaactacccaagttttgagtttttgagatgtggctatggcatgaactcaaaccatcttatgagggtgaaacctgtttctaatttctatattggtgctgttcatt

SEQ ID NO: 264055 - DNA, 630 bp, Zea mays
cccacgcgtccgcccacgcgttcgcggacgcgtgggctgccgcctcccccccctctctcaatctgataccgcagatccgtcgtccggtgagtggaagccgcacgaacccatggcctccggcgagcttgcctgcacctacgccgctctcatcctcagcgacgatggcatcgccatcaccgccgagaagatcgccacgatcgtgaaggcggccaacatcaaggtcgagtcctactggccggccctcttcgccaagctcctggagaagcgcaacgtcgaggacctcatcctctccgttggatctggtggcggagctgctccagttgctgctgccgcacctgctggtggtgctgcggctgctgctgccccggctgtcgaggagaagaaggaagaggcccaggaggagtctgatgacgacatgggcttcagcctgttcgactgaggagaccccctcacccagccattagcaaatttcacttgtgctgtcaaagactatcttgtcttatgttatgtctctaggcttttgttacaactacccaagttttgagtttttgaaatgtggctatggcatgaactcaaaccatcttatgagggtgaaacctgtttctaatttctatattgttgctgttcctt

SEQ ID NO: 264056 - DNA, 412 bp, Zea mays
ccgaacgcgtggtgccgcctcaccgcctctctcaatctgataccgcagatccgtcgtccggtgagtggaagccgcacgaacccatggcctccggcgagcttgcctgcacctacgccgctctcatcctcagcgacgatggcatcgccatcaccgccgagaagatcgccacgatcgtgaaggcggccaacatcaaggtcgagtcctactggccggccctcttcgccaagctcctggagaagcgcaacgtcgaggacctcatcctctccgttggatctggtggcggagctgctccagttgctgctgccgcacctgctggtggtgctgcggctgctgctgccccggctgtcgaggagaagaaggaagaggccaaggaagagtctgatgacgacatgggcttcagcctgttcgactg

SEQ ID NO: 264057 - DNA, 304 bp, Zea mays
ccaccctactcgccgcctcactccctctgaggtcgcagatccgtccggttagacgaagccgcccgcacccatggcctccggtgagctcgcctgcacctacgccgccctcatcctcagcgacgacggcatcgccatcaccgtgcgttctctcacgctgcagtgttcttttaatctcagagttttcttttttttgagcggtcgcgtggttatgtggggggtgtttcttgtttgcaggccgagaagatcgccaccatcgtgaaggcggccaacatcaaggtcgagtcctactggccggcgctcttcg

SEQ ID NO: 264058 - DNA, 850 bp, Zea mays
aggacgcatgggcgcggggctgaccccgtgcaaggagtccaaggcgttcgcgaagcgcgagaagaactcgatcaagaagctcaccgcgtcgctgaagaagtacgcgcccgacagcgcccccgcgctcgccatcaacgccaccatcgagaagaccaagcgccggttcgagaactacggcaagttcggcctgctctgcggcgccgacggcctgccgcacctcatcgtcagcggcgaccagcggcactggggcgagttcgtcaccccgggcctgctcttcctctacatcgccgggtggatcgggtgggtcggcaggagctacctcatcgccatcagcggcgagaagaagcccgccatgagggagatcatcatcgacgtcgagctcgccacccgcctcctccccagggggttcatctggcccgtcgcggcctaccgcgagctcatcaacggagacctcgtcgtcgacgacaaggacatcggctactactagctgctgcacctgtgcttgcacatcgctgctggcgagttgggcagtcgtcgtacgtgggaaacatggcttttggtgtaggaggaaggaatggaagtggtctgttgtacttaaagaaactagatgaagaagtcttgtataactgaaacttcacccctctcttgtgtatgatgtattcaccttcgtcttgaaaattcttgagaacggtttcatcttgcatacattttgctagtgaagggtcgaatcagctgaccagatgagataaataagagacattaataattctttgctttcaaaaaaaaaaaaaaaggggccgctcgcgatctagaactagtcggacgcgtgggtggacgcgtggtcgacccg

SEQ ID NO: 264059 - DNA, 688 bp, Zea mays
cccacgcgtccgagcgccggttcgagaactacggcaagttcgggctgctgtgcggcgccgacggcctgccgcacctcatcgtcagcggcgaccagcggcactggggcgagttcgtcaccccgggcctgctcttcctctacatcgccggctggatcgggtgggtcggcaggagctacctcatcgccatcagcggcgagaagaagcccgccatgagggagatcatcatcgacgtcgagctcgccacccgcctcctccccagggggttcatctggcccgtcgccgcctaccgcgagctcatcaacggggacctcgtcgtcgacgacaaggacatcggctactactagctgcgcttgttcacctgcttgcactgtgcatatatattgctgctgccgagctgggcgcttggatagtacgtggggaaacatggatggcttttggtgtaggagctgcatgctttgctagggctatctggtcatgtaggaaatggaagctctgctgtactttaagaaacttgatgaaacctttgtataactcaactgtacctctatctatcccttgtgtgtatttgagaacgatttcagagcatgtctggttcgggcgtctattagggcttgttcatttagctcttaatccatgtggattgagtcggattgaatgggtttgaatcacaaacaaaaaaaaaaaaaaa

SEQ ID NO: 264060 - DNA, 572 bp, Zea mays
  unsure (1)..(572): unsure at all n locations
cggnccggaaatcccggggcgacccaagccgtccggccgggacctacctaatcgccatcagcggcgagaagaagcccgccatgagggagatcatcatcgacgtcgagctcgccacccgcctcctccccagggggttcatctggcccgtcgcggcctaccgcgagctcatcaacggagacctcgtcgtcgacgacaaggacatcggctactactagctgctgcacctgtgcttgcacatcgctgctggcgaggcaaggcccgatccatggctagcggctgttgaacaactctctcttgtttattgataacgaacagtgaaaagattaacgtgccttgtgttcctgtttcttctgcagttgggcagtcgtcgtacgtgggaaacatggcttttggtgtaggaggaaggaatggaagtggtctgttgtacttaaagaaactagatgaagaagtcttgtataactgaaacttcacccctctcttgtgtatgatgtattcaccttcggcttggaaattcttgagaacgggttcatcttgcataaaaacaaaaaaagaaaaaaagggcggccgctcgc

SEQ ID NO: 264061 - DNA, 313 bp, Zea mays
ccgcctaccgcgagctcatcaacggggacctcgtcgtcggacgacaaggacatcggctactacctagctgcgcttgttcacctgcttgcactgtgcatatatattgctgctgccgagctgggcgcttggatagtacgtggggaaacatggatggcttttggtgtaggagctgcatgctttgctagggctatctggtcatgtaggaaatggaagctctgctgtactttaagaaacttgatgaaacctttgtataactcaactgtacctctatctaaaaaacagggcggccgggcggccgctcgcgatctagaac

SEQ ID NO: 264062 - DNA, 425 bp, Zea mays
acgacaaggacatcggctactacctagtgcgcttgttcacctgcttgcactgtgcatatatattgctgctgccgagctgggcgcttggatagtacgtggggaaacatggatggcttttggtgtaggagctgcatgctttgctagggctatctggtcatgtaggaaatggaagctctgctgtactttaagaaacttgatgaaacctttgtataactcaactgtacctctatctatcccttgtgtgtatttgagaacgatttcagagcaaaaaaaaaaaaaaaagggcggctagtacatggctgcccgagtacctgtgcctactcactcgtcttccccgtttggaagagtgtaaccggcgcatcctctgaaggcgcccagaagttaccctatttgctgggcttagcaacactctgcttggattcggg

SEQ ID NO: 264063 - DNA, 314 bp, Zea mays
agtcgtcgtacgtgggaaacatggcttttggtgtaggaggaaggaatggaagtggtctgttgtacttaaagaaactagatgaagaagtcttgtataactgaaacttcacccctctcttgtgtatgatgtattcaccttcgtcttgaaaattcttgagaacggtttcatcttgcatacattttgctagtgaagggtcgaatcagctgaccagatgagataaataagagacaataataattctttgctttcaaaaaaaaaaaaaaaaaaaaaaaaaaaagggcggctgcggcggcagctcgcgatctagaactagt

SEQ ID NO: 264064 - DNA, 514 bp, Zea mays
cccacgcgtccgttttttttttgcaaaaatcatactagtctggcataatagggaaaaagagggccagcggcttacaagctcaccatccaaaggaaccaaaagcgtccaagaagagtctccacccaagagaaaaacctgttcctctagtctaatgggcttcactaagaaagatcagaacagagagtagcagtgctcctccatcacaattgacgcagcgcagctcacttggacgtcctcttcttctggtactgctccctgacccacttgatgcccgagctcgtcccggtcttgagcttgtgcgctccgaccagcgccgccgccttggccttgacgagtccctccgacgccgccgccttcacgttgccggccaccgtcctcttaccggccgccttgccgttcgcgctgctcccgtcgccctcgccggaggcccactggtccgcccaggttggcgcctcgcccggcttggaacccatgggaattggtaaagctgcagctctttttttttcctccttcc

SEQ ID NO: 264065 - DNA, 1523 bp, Zea mays
caaatcatagattcatagccacaaaagccacgcacgcggggcgcttgtcttgcgcgcacggaaacccacatccaccgcggcgccacaccgcgtgcgtcggctgcttgctgccccgtgttccttggctcccgccgacaccgagcgccgccactctcaccggccaccgccgccatggctgccccgccccgcgccaccgcggtcctcgcgtggggttccggggaggacgggcagcttggcatgggcgggaacgaggagaaggactgggcacactgcgtggaggcactcggttcctacgccgtcaccgccgtcgtagccggtagccgcaactccctcgccatctgcgaagacggccgcctcttcacttgggggtggaaccagcgcggcacgctcgggcacccgccgaagaccaagacggagagctcccctggccccgtccacgctctcgcgggtttcaagatcgtccaggcggcgattggcgggtggcattgcctcgcagttgacgacaaggggcgcgcctacgcctgggggggaaacgagtacgggcagtgtggtgaggagcctgagaggaaggaggacgggacgagggcgctcaggagggacatcccgatcccgcagcggtgcgcgctcaagctcaaagtccggcaagtagccgctggagggacacattcagtagttttgactcaagaaggtcacgtctggacatggggacagccatggcctccgggtgatatcaagcaaatatctacacctgtacgtgtgcaaggccttgagaaagtgagggtcattgctgtaggtgcattccataatttggcactaacggaggatgtaattttgtgggcatggggtaataatgagtatggtcagctggggactggagatacccaaccaagatcacacccgatacgcgtcgaagggctatctgatctctcactggttgacattgctgctggaggctggcattcaactgcactaactatacagggagaggtgtatgcttgggggagaggagaacacgggaggcttggatttggagatgataagagtagtcgcatggtccccctaaaggttgagcttctagctggagaggatattgttcaggtatcatgtggaggaacacattcagttgctctaactcgagatggccggatgttgtcttatgggaggggcgaccatggccgtctgggctacggcaggaagctgacgacaggccagcccatgggagtggacattgacctgccgccgtcccaagacccgcagcagccgggacgggcagtggcaggcgaagtacgtggcttgtggcgggcggcacaccctggctattgtggtgtgggcagagaccaccgactgatcacggagtgatcaacttcctgaatcctaatctgggtgcaaatctgagtttgacaatcctgctagataattatagtgttagtgaaataagcataagttatgcgacattaggcatcataaatttttatgtatgtgcttaatttggcaaggaacaaaaatagtcgggaagaggactt

SEQ ID NO: 264066 - DNA, 419 bp, Zea mays
gggagctctgcatcctgatccaccacccccatgcctgccttgctgcatccggcgtcctcggtccatgagagctgaggctcatgtagccgatgagtccttttttttttctttctcttcctgctgtttctccaagattcaagttggctggccgtgcttatccgtgcaggagctgaagcaggtttctgccctgttggtggtgatggtatctatcggtacccgtactttgcgtcgctttattcccatctttgctggtgaggtgctatgtcagcgttgtcacactcgtttattttgttctcatattcttcggtttcccgttcgtaccggcggcgcgtgcattttgcggtggggctcctggatctcgctctggacggaggcacagacagcttccctggcgtccccaaggtgctggtagattcacc

SEQ ID NO: 264067 - DNA, 841 bp, Zea mays
cggaatcccggtagacacgcgtcggcggacgcgtgggccagggcggcgacgagaagtggcgagccccgagagcgggtttagttagaggctacgggcggtcgggcgcggcggcggcggcggccatgagcagcgggagcgagagcactaccgccagcaggtggcccgagctggccacgctgcgcgcgctggcgcgcgacgccgcggagcagcttcggctgccgcgggccggcacgtcggcgtcggcgtcgtcgtcgtcgccgtggcgcgggcgcgaggaccacctccacggccacggcaagacggccaaggtgatgcacctgctgctctggggacccaagtgaagcggcgagaggccaccgtaccgccgggctctcccgccggcgttgctcgttttgctctgcctgcaatccgccccgcacggactgtactgtacctatacacctatatactacgacgtgcacctgtacgagtctacgacgtgctgctgtaccatactaatactagtgcgctgctgctcccttgccttcttgcttgcaagttgcaccagccactccgcttttttttgctcgaacgatcgactgctcgtcgcgtcgggccacggccggtcgtcagtttgggtgtgtccactccactgtaaagctcctcctcttgtttttttgggtactccctgcatgccaaagttagcggacgtgtactaggtgtggttcggagcagcaggttgtattacttaccaccccctctgtgatgtaagaacgcgtgctgaaattatcatgtcgataccaagttatggcatatggattggataagaatgggaaaaaatatgatagatcttgacttaaaa

SEQ ID NO: 264068 - DNA, 484 bp, Zea mays
tcggcggcgacgagaagtggcgagccccgagagcgggtttagttagaggctacgggcggtcgggcgcggcggcggcggcggccatgagcagcgggagcgagagcactaccgccagcaggtggcccgagctggccacgctgcgcgccctggcgcgcgacgccgcggagcagctgcggctgccgcgggccggcacgtcggcgtcggcgtcggcgtcgtcgtcgccgtggcgcgggcgcgaggaccacctccacggccacggcaagacggccaaggtgatgcacctgctgctctggggacccaagtgaagcggcgagaggccaccgtaccggcggcgttgctcgttttgctctgcctgcaatccgccccgcacggactggactgtactgtacctatacacctatatactacgacgtgcacatgtacgagtctacgacgtgctgctgtaccatactaatactagtgcgctgctgctcccttgccttct

SEQ ID NO: 264069 - DNA, 1173 bp, Zea mays
  unsure (1)..(1173): unsure at all n locations
accaagcgtccgcccacgcgtccggttgagcctaccctgccgcccttccagctcgccgggcccatggagctctggatccagaacggcgacgacgtcaggcttgccttgccgcatgatgtggacgctggtaccttgaagaaggttgttctttctgatggtgcagtcgtaacagtgaagggtgctagagctgtgagcctccggttgccgcttgaattaccacttcctctcaaccgtaccacttacaagggtcgcctctcaagcctgatatccatcgcacaagccctgcgtggtgcagcccggtctaatcagaaacccctgctctctcttcgcgttgagggtccagtttccttgtcctcgactccttccatgtctcccaaggacaagctcaagctcaaacggttggccccaggccaagtggagctctcctcacaggcgggggcaatccctgctatcaccgaagacgaggatgaaccacataaccctggattgtggcctcttttgtctctgaatggttcagatggcagcctgcaggggtttgaggagctattggcctcagtacttggaaagaaggcaggcgagaagggtaccttcaagctactgaaggcacgggcctcggctcaaacctatgtcaagatggcattcacggtggagaagaagcttgctgaaggggatgtgaactggtcaaatattccagaatggaagacgaagcccaagaggatgagagcgcactatgaagtccttgctcgagtggaggagggtcaggcgatccctgagaggatagcgcaggtacagcctttccaggccaacgaggccatgtcggagagtgtgctcaccggcaacgtcacgaggtcgaagatggaaatcgtccatccaccgccggtttacttcactctctgagtgagggaagaactggatgctgtttgatgttctcttcagagctactacacgttgggtggtgggtagtttaccctggctcgtaggcaacaaagttgtacaagcggcaagagtttgttgcctatacactgactgcgttgacatgaatattgacgttctatgtggactgaaaggctggcaagcctttaatattatcaattggaataatgaggaataagaaaatcctgtaaaaaaaaaaaaaaaccaaaaaaaaaaaaaaaaaaaaaaaaaaaaaaanaa

SEQ ID NO: 264070 - DNA, 819 bp, Zea mays
cccacgcggcgcgcacgccagcacaccagcacctgccctcctcgccgtcgccgcctccctccgcgcgaccgatctaccctccgccgccaccatgtcgctgatcgccggggaggacttccagcatatcctgcgtttgctgaacaccaacgtggatgggaagcagaagatcatgttcgccatgacctcaatcaagggtgtcgggcgccgcttctccaacatcgtctgcaagaaggccgacatcgacatgaacaagagggccggcgagctgacgcctgatgagctggagcgcctgatgacggtcgtggccaaccctaggcagttcaaggtgccggactggttcctcaacaggaagaaggattacaaggacggcaggttctcgcaggtcgtctccaacgcccttgatatgaagctcagggacgaccttgagaggctcaagaagatcaggaaccaccgtggtctgcgtcactactggggcctccgcgtccgtggccagcacaccaagactactggcaggcgtggaaagaccgttggtgtctccaagaagcgatgagctctatatcaccctgagaaatcttggccgcactaccgtgttggtttgtgtccaaacagtcctgatgaagggtttctgtttaggcagtttcctgaaatggtgttttgctctaggacaatctcgcggttattgaaccttaatatatcgtgtccctgggttgtgtttttttgacactttataagtaatttcatttggatgagacttaattctggtttgactcgttacattgttaactcgactccgagaggagtgccttcccagtgcagatc

SEQ ID NO: 264071 - DNA, 902 bp, Zea mays
  unsure (1)..(902): unsure at all n locations
gccggcgcgtacagtacgcccaccancagcttccctcttgctgtttccgcccctccgcgcgaccgggctaccgtgtccgcctccatggggctgatcgcccacnacgacttccaacatattctgcgtctgctgaacaccaacgtggatgggaagcagaagatcatgttcgccatgacctccataaagggtgttgggcgccgcttctccaacatcatctgcaagaaggccgacatcgacatgaacaagatggccggtgagctgactcctgaagagctggaacgcctgatgacggtcgtggcgaaccctatgcatttcaaggtgccagactggttccttaacatgaataacgattacaaggaccgaaggttctcacaggtcgtctccaacgccctcgacatgaagctcagggacgacctcgagaggctcaagaagatcaggaaccaccgtggtctgcgtcactactggggcctccgtgtccgtggccagcacaccaagaccactggcaggcgtggaaaaactgttggtgtctccaagaagcgataagctacatatctatcgacaaatctcagatgtactagtgttggttcatgttcaaactgtcttgatgaagggtttctgttgggacagtttcctgaaattatgttttgccctaggataatcttgcagttatggaaccttattatattgtatcctgcaatttgtttttttgcaacttataagagtgattttatttgatgagtcttagaaaaaaatacattaaaagaaaacacacataatatcaaaagcatataaaaataatatagactacaattactaccactataagatcattacacaacatgtctgccaaaatcatgacgtatatgacaaaaaatgtggctctcgctattgatcactaacta

SEQ ID NO: 264072 - DNA, 1062 bp, Zea mays
gcagattgccgcttgagacattgtttgatgaatttgttgttgcccatatccttgggtgggggggcaaagctgtaatgatacgaaatcaacttctactttgggtcttgtcgattggctttgagctaatggagctaacgttcagacatatgctgccaaactttaatgagtgctggtgggatagcattatcttggacatcttgatctgcaattggtttggtatttgggcaggaatgcacacagtccgttactttgatggcaaaacatatgaatgggtcggactgagccgccaacgaagcatcatgggtaaggtgaaaagatcgctgagccagttcacccctgctcaatgggacaaggatcagtggcatcctttcatggggccactgcggttcatccaagtgctgttcctctgtgacgtcttcatgaccgtggagcttaacacattcttccttaagttttgcctgcggatccctccaaggaatcccttagtcgagtacagattgatcctttggcggctgattgccatcccaaccatccgcgagtacaactactacttacaagacagcaaaccggcgaagaacgttggagccttctgttggctctctctggctatatgcatagtggagctgcttatctgcatgaagtttgggcatgggctatttcatgacccaatgcctacctggctgatcatcttttggagcttggttgggattgcacttgtggttttcttgctttcatggtcatggaggagtcacagaagattcaggagaaaacggctgtgatagatttcaataactcaccttagattctttcaattcgcttcttttcttttccctttctctttctttttcatttttatatacgatatggtatgatatgatatgtgatgtaacctacgttttagaggagccccatttttctgctgctcctggcaggggactcggtttgtcaggataggtcattgttgtcaacatgagattgatgaataatcaaggtagctgcagcatcagcaccaagtgtaattaatcagtaaagcaagatcactgtgcgtgaattccgctttcc

SEQ ID NO: 264073 - DNA, 507 bp, Zea mays
  unsure (1)..(507): unsure at all n locations
tcttccacgcgtccgcccacgcgtccgcccacgcgtccgccctcgcgtccgtttgaagtttgttgaacaacaaggacatcctcacgcacaagtttgatgaacagtcaacaaaattcttgagccagttcactccaacccaatgggacaaggatcagtggcatcctttcatggggccactgcggtccatccaagtgttgttcatttgtgttgtcttcatgatcgtggagatcaacacattcttccttaagcttgtgtcctgttgccgagttcctcaaaaggacaaagtcgttactgtggttcagtctctacttgaatgatattagtgacaaggtaaaactattcctttattggtaattattttctatatgcatgatggcagtaactaaaatattggattgtgttggacatacaacangttctagaagccattagctaaccacataatcactgaccttaacccagtgaccatttaacaacgtatataatataaatttacattagatgctt

SEQ ID NO: 264074 - DNA, 817 bp, Zea mays
cccacgcgtccgcggacgcgtccgcccacgcgtccgacattcttccttaagcttgtgtcctggtgccgagttcctcaaaaggacaaagtcgttactgtggttcagtctctacttgaatgatattagtgacaaggtaaaactattcctttattgttaattattttctatatgcatgatggcagtaactaaaatattggattgtgttggacatacaacaagttctagaagccattagctaaccacataatcactgaccttaacccagtgaccatttaacaacgtatataatataaatttacattagatgctttatttttgcactgtagacctattgcacatataagtgctccttagaacttaggttgttattttcagtctcattattccattctttactaaagaattgtacatcaaacagatttatgtagtacatatattgcagaggtcctcaaaatctacaccaagttatgtcagggactatatctccactcaactcattttaaccttgtacatttcaatcagatccaaatacatgtgaaataaatgtagtagggtactctgaccagctgttgcgctcgcgcgccagcatgctcagactaaccaacgaaaaaggtgaagtgggatggtataccatttgcaattgacatttatggtttttgctacgctggcactcagtgtttccaaatatctattagtcaatgtgcgatcgtaccaaattcaacagggctctctacatatggtatgtataactatctcaatttgaactgcattctggtgggagtcactcttattggttagtaatcatttttctcaatgt

SEQ ID NO: 264075 - DNA, 389 bp, Zea mays
gccttctgttggctctctctagctatatgcatagtggagctgcttatctgcatgaagtttgggcatgggctgtttcatgacccgatgcctacctggctgatcatcttttggagctcggtcgggactgcactcgtgattttcttgctttcgtggtcatggaggagtcaccaaaggttcaggagaaagcagctctgattgtttcagtttgctacttttctttttcgaattttatataggcgttgtacatatttgatatggtttgtgatgtaacttacgttttaggggtggccatttttctgctgcccctggcaggaacttggtttgtcacgatagatcatgcattgttgacaacatgagattgattaataaattgaaataaccgcgacatc

SEQ ID NO: 264076 - DNA, 1674 bp, Zea mays
  unsure (1)..(1674): unsure at all n locations
gccatacctgggcaattctggtgctcttaatcaaaatatctatggcaatgattctgcctttggcattggaatgacttatctaacaagcccgccatctactccatatatctcatctccccaaggccatgttgggcaaggaaaccgtctgactcgacttccagcagtggtgaggaacaccgctggaggatccatgggatcgtggaattcagagaatggtctgatggataatggttatgggtcctccttgctggaggaattcanaagtaacaaaactagatcttttgagctgttagatattgtaggccatgtggtagagttcagttcggatcagtatgggagtcgctttatacagcagaaactagaaactgcttctactgaacagaagaatatgatttttcctgagatccttccccaggcacgtactttgatgactgatgtttttggaaactatgttatacagaagttctttgaatacggaactgaaacgcaaacgaagcaactggcaaccctgcttaagggttttgtgttacagctgagtcttcaaatgtatggctgccgggtgattcagaaggctttggaagttgttgaagtggaacaacaaacacaaatggctttggagcttgatggatctatcatgagatgtgttcgtgatcagaatggcaaccatgtcatccaaaaatgtatagaatgcatccctcaggagaggatacgatttatcatttctgcattttacggacatgtcgtggagctttctatgcatccctatggttgccgtgttattcagagggtattggagcattgtgatgatgaaagcacacaaaatgccatgatggaagagatcatgcagtccgtggttactttaacagaggaccagtatggtaattatgtaatccagcatgtcctgcagcatgggaaaccagaagagcgttctacattaattacacaactcgctggacagatagtgaaaatgagccatcagaaatttgcttctaatggaatgagccgttacaggcaatgatgaaagaccagttcgcaaactatgtggtgcagaaggttctggagatatgtgatgaccagaaccgtgaattgattctttcccgtatcaaggtccacttgaatgcactgaaaagatacacctatgggaagcatatcgtggcacgtgttgagaagcttattgctgcaggagaacggcgcattggtgccccatcctcttgctgagatggcaataaagctatatacaggtcgcagaataacacctgtacagacagacagggatagcgaggcctagctttttaccattaccagtagtcggtaatattgagcgacggagaggttaaaaaaggctcccaaatcctttgatgtaaataaaggatagccgctggaaataaataaaaagaatgagaaaagatgaagagattttgcttgtccttgagggaagagttgtatatttgtgtggtttattttcccctcttgaagcagatggataaatgttttaggatcatagatgatgggaagcaagggcagctgtagattatcctttctttttttccttgggtttcattagtcaatgtataatgtattaatgttcatggtgatgctaatctctgtaaagcctgccttgagttgtctgacattttcgtgataatgataagtacatgcaagcgtcccggtgtc

SEQ ID NO: 264077 - DNA, 1031 bp, Zea mays
tgtcgtgttattcagagggtattggagcattgggatgatgaaagcacacaaaatgccatgatggaagagatcatgcagtccgtggttactttaacggaggaccagtatggtaattatgtaatccagcatgtcctgcaatatgggaaaccagaagagcgttctactataattgcacaactcgctggacagatagtgaagatgagccagcagaaatttgcatccaatgttgttgagaagtgtcttacttttggttctcctgagcaacggcagattctaatcaatgaaatgcttggcacaactgatgagaacgagccgttacaggcaatgatgaaagaccagttcgcaaactatgttgtgcagaaggctctggagacatgtgatgaccagaaccgtgaattgattctttcccgtatcaaggtccacttgaatgcactgaaaaggtacacctatgggaagcatattgtgacacgtgttgagaagcttattgccgcaggagaacggcgcattggcgcactaccctcctgctgagatggcaatggttaggtcacctgtacagcagaagatagcgaggcctagctttttaccattaccagtagtcgttaatattgagcaagtacaaccgcagaagttaaaaaagaaaggctcccaaatcctttgtaaataaaggagagcctctggaaataaataagaatgagaaaagatgagattttacttgtcctcgaggaaagacttgtatatttgtattgtttttcccccctcttgcaagcagcaggataaagaagttttaaatattttgtcgagaagcaaagcagttactagaaggataaaggttttaggatcatagatgatgggaaggactgctgtagattctccttttttccttgggtttcatcagtcagtgtataagtactaatgtccatgctgatgttaatctctgtaagactgccttcagtttactgaatctttaaaaaaaaaaaaatataaaaaaaaaaacataaatataaaaaatggatggattataaaaggtaact

SEQ ID NO: 264078 - DNA, 868 bp, Zea mays
  unsure (1)..(868): unsure at all n locations
cggacgcgtgggcaagatcaagcgcctcccgcctccagcactctaactcaggggacacgatcgccatggccgccacatcgaccgccgccgccgtgctgtccccgccgtccgtggccgggctccgcctggcgccgtctcccggccgggcgcgcgtgtcgttccgcgcggcgccggcgccggcgcggcggtccgtggcggcgcgcgcggagctgagctcggcgctggtgatcagcctgagcacgggcgtgtcgctcttcctgggccgcttcgtcttcttcaacttccagcgggagaacgtggcgaagcaggtgcccgagcagaacggcaagacgcacttcgacgccggcgacgagcgcgccaaggagttctcgggcctgctcaagtccaacgaccccgtgggcttcaacctcgtcgacgtcctcgcctggggctcgctcggccacatcgtcgcctactacatcctcgccacctcaagcaacggatacgaccccaacttcttctgagcggccggctgcgggcatgttcttgagcctgcctgtattctactccgtgtgtgttgagccatatatctgatgctcaaggattggttaatttgaacaagtggtgcaactgcgcgtgtacatggatttgctcttcctctatgtctctgtcctctgtctccggttactttccctgtttcactatgccatgcacatagacattgccatgttctgctgccagctcagggcttgtgaataacanaaataaaaaaaacaaaaaaaaaaaaaaacaaaaaaaaaaaaaaaaaaaaaaaaaaaanaaaaaaaaaaaagaaaaaataaaacaaaaaaaaaaaaaaaaatcaaaaaaaaagggggggccccccaaa

SEQ ID NO: 264079 - DNA, 744 bp, Zea mays
ccctagcgtccgcccacgcgtccgcggacgcgtgggcggccgctaccaagaacaggaaggaaacaccgccgccgccgcgccttccattccagtactcgcggaggaaaggaacaccagccagcgccatggtcacgtcgacgaccgccgccgccgtgctgtccccgccgtccgtggccgggcttcgcctggcgccgtctccccgggcgcgcgtggcgttccgcgcggcgcgggcgcggcggtccgtggcggcgcgcgcggagctgagcccgtcgctggtgatcagcctgagcacgggcgtgtcgctcttcctgggccgcttcgtcttcttcaacttccagcgggagaacgtggcgaagcaggtgcccgagcagaacggcaagacgcacttcgacgccggcgacgagcgcgccaaggagttctcgggcctgctcaagtccaacgaccccgtgggcttcaacctcgtcgacgtcctcgcctggggctcgctcggccacatcgtcgcctactacatcctcgccacctccagcaacggatacgaccccaacttcttctgagcggtcgtcgaggatgtattctacagacagccgtgtgcgtgcgtgtgtgcttgtcatgtatccgatcaaagtttggttaatttggacaagtagtgcaactgcagaataattggtatttgtatagtgcaccatgccaacatgaatttgatctgtctctgtcttcactattcagttaaaaaacaggaaggac

SEQ ID NO: 264080 - DNA, 1008 bp, Zea mays
atcaaaatccgcactccccattggccggcctcatatccccttatccgcttcgccacccgcggtcgcgcccaccacccgctccggccggctcttagctgcatgctcgcgccgccctcccccccctcatgccgtgctctctcctcttgcgattcgctcgctcgatcctagcttcccttccaagaagcgcagcgcccatggccatggccacgcaagcctccgccgccacgcgccacctgctggccgccgcctgggcgccggcggcgaagccgcggcagctgagctcgcagctcgcgctgccgtcgtcgtcctcccgcgggccggccccgctccgcgcgtccaccgaggaggcggtggaggcgcccaaggggttcgtggccccgcagctggaccccagcacgccgtccccgatcttcggcggcagcacgggcgggctgctccgcaaggcgcaggtggaggagttctacgtcatcacgtggacgtcccccaaggagcaggtgttcgagatgcccaccggcggcgccgccatcatgcgggagggccccaacctcttgaagctggcgcgcaaggagcagtgcctggcgctcggcaccaggttgcgctccaagtacaagatcacctaccagttctaccgcgtcttccccaacggcgaggtgcagtacctccaccccaaggacggcgtctacccggagaaggtcaaccccggcagggagggcgtcggccagaacttccgcagcatcggcaagaacgtcaaccccatcgacgtcaagttcaccggcaaggccaccttcgactaatcacacttcacgtacgccgcacgccccagccgggatccaaattaaagaacttcttcttctattaattacagtatattgtaatttggctgctggtacggtggtggcatgatttgagatgtgcatgatgatccttgtgtaattttattaccaagtctcttcttatatttacatgttcatttgcttgcttcttgcgaaagtgacatccagtcaagtt

SEQ ID NO: 264081 - DNA, 560 bp, Zea mays
  unsure (1)..(560): unsure at all n locations
agggaccggaccggaaancttgggncgacccacgcgccctttttgctcgcgccgcccncngccagtccagggcaggccattccaggactcgcccaccttgctccgcctccggcttccgcgcatcctccaaggatcgtgatggccatggccacgcaagcctccgcggccacgcgccacctggtggccgccgccgcttccgcctgggcgccgtcggcgaagccgcggcagctaagctcacagctcgcgctgccgccgtcgtcctcccgcgcgccggccccgctccgcgcgaccgccggggaggcggtgaccgaggaggcgcccaaggggttcgtggccccgcagctggaccccagcacgccgtccccgatcttcggcggcagcacgggcgggctgctccgcaaggcgcaggtggaggagttctacgtcatcacgtgggtgtcccccaaggagcaggtgttcgagatgcccaccggcggcgccgccatcatgcgggaggggccaaacctcctgagctgggccagggacatgctgggctcggacaggtgcgctcagtaagatac

SEQ ID NO: 264082 - DNA, 546 bp, Zea mays
gagatgcccaccggcggcgccgccatcatgcgggatgggcccaacctcctgaagctggcgcgcaacgagcagtgcctcgcgctcggcaccaggctgcgctccaagtacaagatcacctaccagttctaccgcgtcttccccaacggcgaggtgcagtacctccaccccaaggacggcgtctacccggagaaggtcaaccccggcagggagggcgtcggccagaacttccgcagcatcggcaagaacgtcaaccccatcgacgtcaagttcaccggcaagagcaccttcgactaatcacacatcacgccgcccgcccggccggtgatccaaatcaaagggcttcttcttctagttcttatattaataattaagctagctgctggatatgcatggtttgatctaaatatatgtggacatggatgtgtactttgttttagtaatttcttggtgaccgtggaggcgcacgttgggactctatgtacatgtgcatctgctcctcatgtctatgcatatgacaacgttgccataacacctgaatctttcaat

SEQ ID NO: 264083 - DNA, 643 bp, Zea mays
ggtacgcctgccggtactgttccgatgctcgtgggtgctcgagacgcgtgggccgacgcgtgcgcccacgcgtgggccgcccacgcctccctcaccaccaccccgccggccacactcgtctttctcacgagccacagcagcacaggcaggctctcgagctcagtccacccagcgcaggggatggcgtcgtcgttcgccgtggcaacggtcccgtcgctggcggccccggcggccaagaagcggtccggcggcgtcacgtacgtggagggcatgaacgcctacagcggcctcaaggggctcaacaaggtgaacatgctcggggtgcgcaagaccgccgactactccttcgccaaggtcgtggcgtcgctcagccccgcgggcaggaagcggcgcggcggcgcgttcggcgcccagatgaacgccgccgccgagatcttcaggatcgccgccaccatgaacggcctcgtgctcgtcggcgtcgccgtcgggttcgtgctgctccgggtggaggccgccgtcgaggaggccgagtagggcgctcgcgcctgcttcataagccgtgatatatatataaaaacgtgatgtatgctttcgattcaatctttggtatgtactgtatcaacgatgacaattgatgaatact

SEQ ID NO: 264084 - DNA, 594 bp, Zea mays
cacgagccacagcccacaggtaagcgtcgtcttttcacgccgcgttcccatactctgcgctacagttacagtcacggcgcgtccgtcctgacgctcgccggccttgcatttaccggttctcaccgcctgtccgcgctgcccgtcgccgcccacagcagcaggctagctctctagcggtctagccagtccacgcagcgcagggatggcgtcgttcgccgtggcaacggccccgtcgctagcggccccggcagccaagaggaggcccgccgccggcgtcacgtacgtggagggcatgaacgcctacagcggcctcaaggggctcaacaaggtgaccatgctcggggtgcgcaagaccgccgactactccttcgccaaggtcgtggcgtcgctcagcctcgcgggcaggaagcggcgcggcggagcgttcggcgcccagatgaggttttacgcttacacagtggggacggttgcaccacgtgagcgagcgcagcgaagccagcacaaccgccggcggacaagcgtccccatagacgagatccatggcggagcgccggaagagcgtctcctccatgccgtttgcttcggcgagcgccg

SEQ ID NO: 264085 - DNA, 777 bp, Zea mays
tcgcgggtccacgcaagcctctacagagactcgtgcaagagccaccccccgcaggctagctctctagcggtctagccagtccacgcagcgcagggatggcgtcgttcgccgtggcaacggccccgtcgctagcggccccggcagccaagaggaggcccgccgccggcgtcacgtacgtggagggcatgaacgcctacagcggcctcaaggggctcaacaaggtgaccatgctcggggtgcgcaagaccgccgactactccttcgccaaggtcgtggcgtcgctcagccccgcgggcaggaagcggcgcggcggcgcgttcggcgcccagatgaacgccgccgccgagatcttcaggatcgccgccaccatgaacggcctcgtgctcgtcggcgtcgccgtcgggttcgtgctgctccgggtggaggccgccgtcgaggagtccgagtagggtgcgtgggcctgccactgtcggctgtcgccccgggccgcagtctgcttcagaaaccgtgatatatatatatatataaccagatgtacgctttcgaatcaatttactttggtatgtatccatgacaattggtgaatactgtggaaatatgtttttggagtcgaggcctgcaattgatcttcaggtgatcacatcaatgaccgagtgagaggaatgcaaccaaagttttttttttgggggtgcagcttatggtcccttggatgctagttttcaaacgttagtattccctctatcgatcccgacaataaatacgataaatattctattt

SEQ ID NO: 264086 - DNA, 523 bp, Zea mays
cccccccttggcaaccatccattccgcgccccgccttatcctcccctcatctcccgtacccaaaaaaaaaaacgcgcgctcaagccatcccatccagttccacccccgccggcctctctcgtctctctcacgagccacagcccacagcgtgctagctctctagccagtccagtccacgcagcgcagggatggcgtcgttcgccgtggcaacggccccgtcgctagcggccccggcagccaagaggaggcccgccgccggcgtcacgtacgtggagggcatgaacgcctacagcggcctcaaggggctcaacaaggtgaccatgctcggggtgcgcatgaccgccgtctactccttcgccaaggtcgtggcgtcgctcagcctcgcgggcacgaagcggagcggcggagcgttcggcgcccacatgagtgacgacggttgcacgacatgagcgagcgcagcgaaaccagcacaaccgccggtggacaagcgtccccatagaacggatcccaggcggaaccccga

SEQ ID NO: 264087 - DNA, 302 bp, Zea mays
atccttccctcatcccccgtacaaaaacgcgctccctcctgctcgccccgacggtcaaggcacctacaacaccaccccgccggccacactcgtctttcccacgagccacaggcacaggcaggctctcgggctcagtccacccagcgcgggggatggcgtcgtccttcgccgtggcaacggtcccgtcgctggcggccccggcggccaagaagcggtccggcggcgtcacgtacgtggagggcatgaacgcctacagcggcctcaaggggctcaacatggtgaacatgctcggggtgcgcaag

SEQ ID NO: 264088 - DNA, 1296 bp, Zea mays
  unsure (1)..(1296): unsure at all n locations
cctatgcgtccgcccacgcgtccgcccacgcgtccgcccacgcgtccgcccacgcgtccgcccacgcgtccgcccacgcgtccgccgcggcggcgacgatgaccatggcgacgcaccacccccgcgcccgcgcacccctccgcgtctgcgccgcctgggacatgaacccgggagccgccaccgtggccacgcccaagccctccaaggccaaggccaagccgccgcccgcgaccacaaccccggcccgcccgcctcctctgacccacgccgatctcttcgcgcgctccagcgaggcgcaaggaggggtgaagaagagcacatatatgggctttgagaaatggtggttgccacctgcgccagtggtgaagccgccccgatcgctctacagtgcggtgtcactggcttacttgggagactgcatatatgaactttatgctcggaggcacttcttctttccacctctgagcatcaatgagtacaacaaacgtgtgatggatgttgtgaagtgtgagtcacaggaccttttgttgaacaagcttcttggagaagattttctaactgaagaagaaagggacatacttcgttgggggcggaatattgttagcagcaaaactcgcaccaggaagcgtgcaggaattgctgtctacaaccgggcatcttcactcgaaacactaattggatatctttacctcacaaatttcaaacggttggaacaactgatgtttcaattgggcttcacaagtggtgcctcatcacagcatattgcagacgagctgcgctcaagtttccagaaaacaacccccgcttcggccacacctccacaacctgcaacacagtgaacaggtctgaggtgtaacggtattggatcgtgctcccacaaaggttatctttagtcttcgaccctaacgacggagaaaggacgcaagagtcacggcgtattcagatgcaatagcgaggctgggagcagatggttagcgaacaccaccaccgtatattcatcagcatgtttctgcgaatggagcaacatagatacgcccgaactctggagatacgcgaaaattaagcctctgaatgtctgggctgacctggggcttgcgagtaggatagcttgatgtttgcaaagaagctctgagtgtgggaaataggcccgacttggggtgttgtaatcgacctaaattcgtgtaggtaattaaccccttcatgtcacttgttgcaaaaaaaaaactgtgatgattctgcttgtcccaaaaaaaaaaaaaaaaaaaaaaaaaaaaaaaaaaaaaaaaaaaaaanaaa

SEQ ID NO: 264089 - DNA, 602 bp, Zea mays
ggaaaaggctgattcagtcgcgaggtcgctcgttcatattttcaactgctttgccagtgccagttgttgcttctgtgcatgcggcactctatgtctcgagtaaggagacatggcggagatcagtgatctggaggcatgtgcagtatttcgcctctttgaccaagctcgagataactagtcccataatttccattgtggttggaagtgaagcaggagcgctcagggctagcaggtatttgctaagatctggatttcatgttacaccaatcagaccacccacggtgccacccaactcatgcaggctgagaatcactcttagtgcttcccattcctcggacgacatcaaaaggctggttgatgcactcacaccatggctccctgtcaaatatggtaatgggagctatgctacagcttcaaaactctaacccatcggaggagagtctggtatcctgcggaaagaggcggcatgctagtgggtggttgacgcgtacgcatttatatattctgtggcgtgacgcctacgtccttccccatttataagcaaatattactgttttgttagatatcaatgttgaaataggcttattattattattattagc

SEQ ID NO: 264090 - DNA, 1020 bp, Zea mays
cggacggtgggacggacgcgtgggcgccacgcgtccgctcggcgctctcctctcccgacgacagctacacctcacaaccgtgagctcgcgaaggaacgctgttcgcaattccggcgccggcaccatgagtaagctgcagagtgattctctgagggacgcgattgcctcaattaccaatgattcccgtgagaagcagcgcaaatttgttgaaaccattgagctacaaattggactgaagaactatgaccctcaaaaggacaagcgcttcagcggttctgttaagctgcctcacatccctcgccctaagatgaaggtttgcatgcttggtgatgctcagcatgttgaggaggcagagagaatgggtatagacaatatggatgtggaagccctcaagaagatgaacaaaaacaagaagctagtgaagaagctggcaaagaagtaccatgctttccttgcatctgaggctatcattaagcaaattcctcgtcttcttggtcctggtcttaacaaggcaggaaaattccctaccttggtgacacaccaggaatcccttgagtccaaggttaatgagacaaaggctacagttaagttccagctgaagaaggtgctttgcatgggtgttgctgttggcaactgcggcatggatgagaagcagatcttccagaatgtgcaaatgagtgtcaacttcctcgtgtcgctcttgaaaaagaattggcagaatgtgagatgcttgtacctgaagagcactatgggaaaggtgtaccggctgttctaaattttccaattaggcttagaatttccaggagactcgagtgcttggacacttgccattttccctaccatccatttttttgagcaactatggattatctagttacaaacttggtcttgtacttgatgttttgttcttgataccgaacctatgacattgttaccttatttccaaaaaaagaggagagatgggtggtgggtggaggtaggtggtgggtgtgtggtgtggggggggtggttgtgtggggt

SEQ ID NO: 264091 - DNA, 883 bp, Zea mays
cagcaagagggctccactaccttcacaccggttttgcccagtcaatcatacaccgtgacgtcaagtcagcaaacatactactcgatgaaaatctcttggccaaggtttctgattttggcctctcaaaggttgggcctgaattcgaccagacgcatgtgagcacagcagtgaaagggagcttcgggtaccttgatcctgagtacttccggagacagaagctgactgacaaatcagatgtgtactcttttggtgtggtgctgcttgaggtgatttgtgcgaggccggttatcgacccgactcttccaagggacatgatcaacctcgcggagtgggctatcaagtggcaaaagagaggagagcttgatcagattgtcgaccagcgcattgctgggacagtcaggcctgaagcactgaggaagtttggagagacggtggagaaatgccttgcagagtatggtgtcgagcgtcctactatgggggatgtgctgtggaacctggagtttgtgctgcagctgcaggaggcaggtccagacatgtccaacatcaacagtatgaatcagatctctgaactcccttcaaatccaaagagagttagctccctggatatcagcagtacagatcaaagccgcgtgcccatcgactactccgacatgtcaacgagtaacgccttctcgcagctaatcaatgcagaaggaaggtgaactggatagaattgttccagtcactgaaaaaaatgtttgttacaaaaactagagatgcctcttgtgtgactacccagcctatcccttctcacatatacaacaccaagttgtgaatcttattgaaattttgtttgccacttgtaactacttatgttctagaaaagggtgagtagctttattgc

SEQ ID NO: 264092 - DNA, 768 bp, Zea mays
attcccctctcctgccgccgcggccgctcccgctcccagctcgtgttccgcttcttgcagccgtcgccgcgaagcgctccagagaacttccgtcaacatggggaagacacgtggtatgggagccgggcgcaagctcaagacccaccgcaggaaccagcggtgggctgacaaggcatacaagaagagccatttgggcaatgagtggaagaaacccttcgctgggtcatcccatgccaagggcattgtcctggagaagattggtattgaggccaagcagcccaactccgctatccgtaagtgtgctcgtgttcagcttgttaagaatggcaagaagattgctgccttcgtgccaaatgacggttgtttgaactacattgaggaaaatgatgaggtcttgattgctggatttggtcgtaaggggcacgctgtgggagatattcctggtgtccggttcaaggtcgtcaaggtttccggtgtgtctctgcttgcccttttcaaggagaagaaagagaagccaaggtcttagattgctcttgctaccaaaatcagcaagcgtggagttgaaacgggagggcgttagatgattaagaagaatggttgcttgctatgtttgcagtgcattcgtgcaattgttaacctaagattttgttggtgaaaacgatttcttttcagacttgcttctgttgagtgctatcattccatatcaatgtacttcctcttctagaaaaaaaaaaaaaaaaagcaatctaaaaaaaaaagaaaagaaaa

SEQ ID NO: 264093 - DNA, 797 bp, Zea mays
caaaacgcttccccgacgcctgactccaaaccctttcgcctccgccgccgccgccgccgcctgatagctccagcgccctcgccgtcggcagctcggccgccgtcctcccgctaccgagctaggaggcatcaccttcgccgatccaacatgggtaagacacgtggtatgggagctgggcgcaagctcaagacccacaggaggaaccagaggtgggctgacaaagcctacaagaagagccatcttggcaacgagtggaagaaaccctttgctgggtcatctcacgcaaagggaatcgtccttgaaaagatcggcatcgaggccaagcagcctaactctgctatccgtaagtgtgctcgtgtccagctggtgaagaacggtaagaagattgccgcctttgtgccgaacgatggctgcttgaactacatcgaggagaacgatgaggtgctgatcgcggggttcggtcgtaagggccacgctgtgggagatattcccggtgtccgtttcaaggttgtgaaggtctcgggcgtttccctgctcgccctcttcaaggagaagaaggagaagccgagatcttaaaaaccctatccccctcgccacaaatgaatcatgtaatgcttttggagttctgggacctcatgttgagaacctagcgattgttttgccatagttttgtttagaagattctgaattgaattctatatccgtaaccgcttgccagtgcgtgatctgtgttaatattatctttccgtggtaaaaaaaaaaaaaaaaaaaaaaaaaaaaaaaaaaagggcggccgc

SEQ ID NO: 264094 - DNA, 773 bp, Zea mays
gtagatcaagcaaaccctaactgccaacgctactataaaatgtttttctcgcctcttctcgctcccgtagccgccgccggcctccaactctaaccccgtcgcttccggctcccgcagcgtcgccgaccttcacagccggttccttcctccgccaccatggggaagacacgtggtatgggagctgggcgcaagctcaagacccaccgcaggaaccagaggtgggctgacaaagcatacaagaagagccacttgggcaatgagtggaaaaaaccttttgctggatcatctcacgccaagggcatcgttctggagaagattggtattgaggccaagcagccaaattcggccatccgtaagtgtgcccgtgttcagctggtgaagaatggaaagaagattgctgcctttgtgccgaatgatggttgcctaaactacatcgaggagaatgatgaggtgttgattgctggatttggtcgtaagggtcatgctgtgggagacattcctggtgtcaggttcaaggttgttaaggtgtctggtgtgtcgctgcttgcactcttcaaggagaagaaggagaagccaaggtcttagatcactttcggtagtcaagaatggtgtaaactgcccaaggctctattgtcaaagttaaagttctgctagcaactcagctgttaaatctgagctgtacctttttgttaacattgttacagtattacagagttctgtttccattttgaagatattaatattgcatcggaaaaaaaaaaaaagtaagtaaa

SEQ ID NO: 264095 - DNA, 621 bp, Zea mays
  unsure (1)..(621): unsure at all n locations
tcttcagccgtcgccgcgaagcgctccagagaacttccgtaacatggggaagacacgtgttccagncctttcatgattagataacttgttttagtgcgttcctactatgggggatgtgctgtggaacctggagtttgtgctgcagctgcaggaggcaggtccagacatgtccaacatcaacagtatgaattagatctctgaaactcctttaaattaaaaaaaattattcttttttatttatatctttcactattttttttcttatatgtcaagaagattgctgcctttgtgccaaacgatggttgcttgaactacatcgaggagaacgatgaggtgctgattgctggattcggtcgtaagggccatgctgtgggagatattcccggcgtccgtttcaaggtcgtgaaggtctctggcgtttccctcctcgccctcttcaaggagaagaaagagaagccgagatcttaaaacgctgcaagggttttggagatttaggcctggtggcgcaccgcgcacctgtagcgctcacacaagccatagcagacctcatgttgagatgaaccagcaggtgtttttgccatagttttgttgagacatctgaattcgaactttatatccgat

SEQ ID NO: 264096 - DNA, 530 bp, Zea mays
gagaaagtgggatgcaggtgctatagcgaaggctattgagaataatggagggggttggcatgggtttggttggttggggagagggaaatggacagtggcacactcaaatatcaacgagaatggtgtctgccttgcttgtggagaaaagctggctattatgagatcttgacccagaagaaacagaagattttgccacatttgtggcaaaattagctattaagagagagaggaaatcgaactttgagaacttccagaaatggcttgaaaagcatgggccttttgaggcagtcgtggatgctgccaatgttggcctgattagccacaaacacctttctttgagtaaggttaattctgttgccgatgcaataaggctaaagtttacgtcaaaaaaatggcctttgatagttgtacataacaagcatctcattggagagcgcatgagaaaacttaatgatcacaagttggtacaaaagtggtagcaagaaaattcaatatatgcaacccctactggttcaaatgatgattggtac

SEQ ID NO: 264097 - DNA, 1009 bp, Zea mays
gaggatatctcttacgcttgcagctggaggagggggtaatgaagaacctacaagtgttgatggcctaaaatcacagccaaaagttccatcaaaagaggcaggagttgaacctttacttgatgctgcctgtcaaccatttccaggatcatcgaggttaacttttgaaggcaggcatcttagcttctgctctcccaagcatgaacaatgacagatgtaatggatctaatctaaacccgagaaggattgaaaatatattttctcatcctcgccaactcacggtctgttaggcctcgtttgtgtttgtcattagattctgattcagagtagttcggacatcacactgggatagctgaatttgctattaatctggcaaagttggcttccagaatcttgatttttattgtggagggctatcaagttattctggttgatacaaagagaaacaccagtgtggatgctttattgcattaacctggtaagattcaagtgttctatatgatccaagtgggatctccatagagttcatctaatggttggtacaggatattttctaactgggagtggtttaacgtggctagtggagcaggctgtacattttccctgacatttactgggtataaggaatagggggccatcacttggcacaagacaaatacatgtgaatgttttgtgtgtaccatcattgtatttagggttcgggtgttaatttagatgtttatgaccctgatgtttgatggaaaataaattattccttgatgaagcggcggtcaatgaacagagcccttcggttttcagtcggagctactgacccttcatctgttcctgtggcgaagtggtcgctcccgctttggttcagctgcagctttcatggcgggactgaccatgccaaagtcttgtgtagcagagggcaatctccatgatgtcatgcgatacaagtgatctgtattttgccctacaggatgacaagtttctttgtgcaacatgctgtattattggttcgatactcttt

SEQ ID NO: 264098 - DNA, 1267 bp, Zea mays
tcccggctcgactccacgcgtccgctccacgcgtccggactcgctgcacgcatgaggccccgaacggatcatggcaggttagcgggggaccagatgataagaaacccgtggttagaaatcacatccaaaacaacacggggtactcaataccaaacatagtacctatgatcagtagccccactgggagttgcagagatggtgaagatgtaagtgtgaaccaagaagggggtggtattcagtttgatatatcattgaaccaagagtttgacagttttgcgcataactttggtcaaacatacaatacagaggataggcaacaagagccacaacataatgctgcagatgtcattgttcttagtgattctgatgaagaaaatgacccgattgttcgcctgccagctgtctatgcaaatactcctacaaatggtgacagtttccctttcgtcactgatgctgctgtatctggatatcctgaagggtaccaggaggatgctggggttggtacaagtggccttggtttattgagcaacaatactggtgattttgaaataaataactggcaaatgcattcttatccacaaccagagcaagggttccagttttttgggactgatactgatgttggcaatccttttgttggtccgcataattcctttagtattacaccagaagactactcccttgactgtaatgttggcatagaggacccatctgcagctcacgatgtctcaatttgccgaaacagtaatgatgtgcatggaagcttggttgataacccattggctttagcaggtgacgatccatctttgcaaatttttcttccaagtcaaccttccactgttccccttcagcaagaattgagtgagcgttctgatactccaaatggagtccaccctgatgattggaggatatctcttacgcttgcggctggtggagggggtaatgaagaacctacaagtgttgacggcctaaaatcacagccaaaagttccatcgaaagaggcaggagttgaacctttacttgatgctgcttctgctctcccaagcatgaacaatgacagatgcactggatctaatctaaacccgagaaggattgaagatatattttctcatcctcgccaaccgcggtctgttaggcctcgtctgtgtttgtcattagatactgattcagagtagtttggacatcacactgggatagctgaatttgctattaatctggtaaagttggcttccagaatcttgatcgttactgtggagggctatctggt

SEQ ID NO: 264099 - DNA, 1289 bp, Zea mays
accacgcgtccgcggacgcgtggggcccacgctggagtgttctccgccgcaacttcgcggcggaggtcgtgagcccagcgcggttccggcagatggcggcctcgcgggcgctagcgcttgccgaactcatccggaagctgaagctgcaggagggcgtcgtcgtctgcagggacgcgttccagcacgccatgtccagcctcttcatagccatgtgcttcggcaaggtcctcgacgactcgtccgtggacagcatcggcgtcgcgctgcgcgacttcgtcctccacggcggcgcgtcggggatggggatggcgctattcttgttcctccctgctctcaccacgcgactcttccgtggcctcctgcggtctaaggaggccaagcgccagaagctcgaaaacgtgtactgcctgccattgatccatgagcggagagagcgcaggaagacgaagcagctgacgcaggagcacccgcactgctacgttgacacgttgctcgacctcaggctcgacgaggaacaggatggtggccgccttctcacagaccacgagatagcaagcctgtgcatcgagatcctcatcgttggctcggagctaccggcgacggcgctggagtggatcatggcggagctagtaaagaacccaggcgtgcaggacaagctctacgaggagatgatggtgaaagccaaagccaccactgacgcttctgctggcgtgctcccgttctcggaggatgacttgcccaagataccctacctgagagcggtggtgctggagggtctccggcgccatccgccggggcaccagatgccgccacgcagggtgagggaggacgtggaggtgggtgactacgtggtgcccaagggctcagcgatcaacttcatgctgtacgacctgggcatggacgacgccacgtgggaccgcccagcagtgttcatgccggagaggttcctgcccggcggggaagccgaggcgctggacatcaccggcaccaaggagatgaagatgataccgtttggggcgggcagaaggatctgcccgggcctcaggatcgctctcctgctcctcgagtacttcgtcgccaacctcgtagcggccttccactggaaagaggtggaaccgggcgacgtcgatgtcacctccgaggacgctcagctcaccgtcctcatggggaagccgctccgggcgcgcctgcttccaagactgcattcgtctgcttaattttcttcatcatcatggtgtatgtcagtgcgcccccgaatccttaattaatccccataaagatcaagcttc

SEQ ID NO: 264100 - DNA, 650 bp, Zea mays
accacgcgtccgcccacgcgtccgcccacgcgtctgctagtgttggagagaagagaatacactacactacgcatggcgaagcagcagcagggccagggcatggcggcagtggcgctggtgctgctggtgctggcggcggcggcggccgagacggcgtcggcggcttcgtgcaacgccgggcagctggcggcgtgcgcgccggcgatcactgccggcgcgacgccctccgcgtcgtgctgctccaacctcaaggcgcagcaggggtgcttctgccagttcgtgaagaaccccacctacgggcgctacatcaacagccccaacgcgcgcaaggtcgtcgcctcctgcggcgtctccgtgccgcgctgctagtactagtacgtgtgctgtgcatgcatgcatgtacgtgcgcacgtgggctgatcttcctgcttgtttcgtgccttgccgcgcgctatcaggtgtttgtgtcacttttctgtttagtctctctatatgtacgtacatgtgtgtactggtctcgtgtaccgctcctctatagtcgtgtcgtgttgtcgtgtacgggctaattaatatatatacgaggaataaaggatgagttcggccaaaaaaaaaaaaaaaaaaaaaaggggggccgccgattattgacctct

SEQ ID NO: 264101 - DNA, 1070 bp, Zea mays
atccgcttgcggcaaaaccttgcgcgcaacaatggccgcctccctcccgaccaccgccgcgcgcctcgcggccccggccttcgcctaccggtcgcccaaggctccctccgccaccgccctcccgcgtgccgccgccttccctgcaatcgccgtcgcggcggcgcccctgcgcccgcgccgcgcgccgaggccggtggcggcccgggccgggggcgaggagcgggagacgatactgctccccgggtgcgactacaaccactggctgatcgtcatggagttccccaaggaccccgcgcccacccgcgagcagatgatcgacacctacctcaacacactcgccaccgtcctcggcagcatggaggaagccaagaagaacatgtacgcattcagcacgaccacctacaccgggttccagtgcaccgtggacgaggagacgtcggagaagttcaagggtctgcctggggtgctgtgggtgctccctgattcctacatcgacgtgaagaacaaggactacggaggtgacaagtacgtgaacggcgagataatcccctgcacgtacccgacgtaccagccgaaggagcggaggacgtccaagtacgagagcaggcggtacgagaggcggagagatgggccaccggcggccagcaggaaaccgaggcagcaggcaccagctcagactcagaccgagtcggcgtcttcgtgacgagctctgcaggcattttgtccacgtacctacctacctagaagtagaacaagagaggaggacgcctaaaattctgtcgccttgggcaccgcgtactggactggacaggcgggtcgggatccatcatccatcgtcagccagaaaaattgtcgctgtccaagcagcctgggcagcttgtgtgcgtgtgtgctgataagcctgatatcttgagctagctgtggcagaaactgaaaaccctactcttcccccccgactccttagtgagctgtgtgatgccgactggtgtagagctgtatcgctgattgcgtgaaaccgaaatgctgtggctttatttagactgaagttggcccttcgagccatcggaccc

SEQ ID NO: 264102 - DNA, 383 bp, Zea mays
aacccggcgactgtgagtctaaaaaagccacagcatttcggtttcactcattttgcgatacagatcgacacctacctgaggcgtctcgttaccgtcctcggcagcatggaggaagccaagaagaacatgttcgccttcagcacgaccacctacaccgggttccagtgcaccgtggacgaggagacgtcggagaagttcaagggtaaataaagcatcctcacctgactaaagtctgcctggggtgctgtgggtgctccctgattcctacatcgacgtgaagaacaaggactacggaggtgacaagtacgtgaacggcgagataatcccctgcacgtacccgacgtaccagccgaaggagcggaggacgtccaagtacgagagca

SEQ ID NO: 264103 - DNA, 778 bp, Zea mays
accggtccggaattcccgggtcgaccgacgcggccgcccacgcgtccgcccacgcgtccgcccacgcgtccgcccccgcgtccgcccacgcgtccgcaccactccgcgctagctgaggacggtacagcggcacagaggtgcgacgtacgacgacgacgacgcaggcgccacacatggcatcccagctctccgccgccgtgccccggttccacggcctccggggctacgccgcgcccaggtccgcggtggcagcgctgccgtccgtgagggtgggcaggaagaggtcgtcgtcgcagggcatccgctgcgactacatcggctccgccaccaacctgatcatggtgacgacgacgacgctgatgctgttcgcggggcggttcgggctggcgccgtccgcgaaccgcaaggcgacggcggggctgaagctggaggcgcgcgactccggcctgcagacgggtgaccccgccgggttcaccctcgccgacacgctggcctgcggcgccgtcggccacatcctcggcgtcggcatcgtgctcgggctcaagaacaccggcgccctcgaccagatcatcggctagatccctacgtcgccgttgttaagatcagactcagcagcctcgatcgcgccgccggccggcaggtgcaggtggtgactttgtaacgtgtgtgcgtgcgtacgtgtacattgcatccatcttggttccaatggacatatagctcctgttgctcctctcaaaaaaaaaaaaaaaaaaaaaaaaaaaaaaaaaaaaaaagacaa

SEQ ID NO: 264104 - DNA, 1149 bp, Zea mays
tcgcccacgcgtccgagcaggcaggcagaggcaagaggcccctcaccctcaggtgatcaggtcgctagctcccggcttaactagtaggcagccagtgaatttcggtgggaatggcaacgcgacgatccggtgcatgaggaacctcctctgccagcgcttcggcttccccggcgagtgcatcatcatgctcactgacgaccagagggacccgttcaggctgcccacgaaggagaacatccggatggcgatgcactggctggtgcagggctgcagctacggcgactccctggtgttccacttctcgggcatcggcgcgcaggtggcggacgacgacggcgacgaggcggacgggtacgacgaggccatctgcccgctggacgcgttccagagcgggcccatcctggacgacgagatcaacgagaccatcgtgcgcccgctggtgcacggcgccaggctgcacgccgtggtggacgcctgctacagcgccacggtcctggacctcccctaccagtgccgcatgtccaggaacgggttctggcagtgggaggacgagagcccgccgtcgggcgcctggaagggcaccagcggaggccacgccgtgctcatcagcggatacagcgagggcaaaggcaacttcgccatgatgcccgacgcccacgcgtcggtcgtcggggccatgacgcacagcttcgtccggacgctggagtgccagccgcgcggggtcacctacggccacctgctcagctccatgagggccatcatgaagaaccgcggcgggggctgcgatctgcagggggccatcggcgcacccatccgcaccgtcgccaacttcagcggcgtgcaggagcctaacctgtcctcttcggagacgtttgacatttaccgcaagcagttcgtcctgtagacaccaccacaccagggtttgcccctgccggccggccgcttgtaatgaattgccgtcgtatcagaataagaaattatctatcgaccatgatatgatatgatatatcaggaaagaaggaactattacccctcaatgtaataactaagcatgttcaatgtcctctttttattagagagagagacagagagaaaacgcggaatttgagacgtgtgcatgcagtttacgtgatcaataaagttacatag

SEQ ID NO: 264105 - DNA, 564 bp, Zea mays
ttgtctcgtgggcggcgccaggctgcacgccgtggtggacgcctgctacagcgccacggtcctggacctcccctaccagtgccgcatgtccaggaacgggttctggcagtgggaggacgagagcccgccgtcgggcgcctggaagggcaccagcggaggccacgccgtgctcatcagcggatacagcgagggcaaaggcaacttcgccatggtcagggacatgatacatacatacatactgctgatcgagctctgctgccttgcatctatctatatacctaacatgcatatgctgctgcttggacgacgcgcggcgtgcagatgcccgacgcccacgcgtcggtcgtcggggccatgacgcacagcttcgtccggacgctggagtgccagccgcgcggggtcacctacggccacctgctcagctccatgagggccatcatgaagaaccgcggcgggggctgcgatctgcacggggccatcggcgcacccatccgcaccgtcgccaacttcagcggcgtgcacgtctccatgtccaatctcctcgtctctgtcaacatcaacatc

SEQ ID NO: 264106 - DNA, 398 bp, Zea mays
  unsure (1)..(398): unsure at all n locations
cgcccgggtcgacgcaagactctaaactgacgtcgctaggcaagaggcccctcaccctcaggtgatcaggtcgctagctcccggcttaactagtaggcagccatgaatttcggtgggaatggcaacgcgacgatccggtgcaagtactgcagggcgagcctgagcgtgatccccggcgagcgcgccatccagtgcgcgcaatgcaactgcgtgacccgcatccggcgggccgaccgcatcccgctgttgccggttcgncgaatatgccaacggcgatccaacggtctctatgctcgaagacttccttggtcaccggattttcaaatgccacggggagcagtggctgtggcaacgcaagggcgccagctaccagttcagcaagcgctaggtcacgagct

SEQ ID NO: 264107 - DNA, 418 bp, Zea mays
ggcagtcagaggcaagaggcccctcaccctcaggtgatcaggtcgctagctcccggcttaactagtaggcagccatgaatttcggtgggaatggcaacgcgacgatccggtgcaagtactgcagggcgagcctgagcgtgatccccggcgagcgcgccatccagtgcgcgcaatgcaactgcgtgacccgcatccggcgggccgaccgcatcccgctggcgcggccggcgcacgtgccgccggcgttccagcgcgcccggggcaagaagcgcgccgcgcctggtcggcatcacgtacgccggcgcgcgccgaggctgtggcgacctgaggggccccgtcaacgacgtcaagtgcatgaggaacctcctctgccagcgcttcggcttccccggcgaatgcatcatcatgctcactgacg

SEQ ID NO: 264108 - DNA, 323 bp, Zea mays
tccacgcgtccgcccacgcgtccgggagctagctagccagcaacgcgtagcaagcagcgcaagcaaagctccgagcgcccggccggctagcttcgccatgaacatgggtggaaggtccccggcggcgacgacgatccggtgcaagtactgcagcgcgagcctgaccgtgtgccccggcgagcgcgccatccagtgcgcgcaatgctgcggcgtgactcgcatccggcggtcgctgtcctcgcggctcccgctgccggcgctgacgaggccggcttccgtcgcgggcttcccgccgtgcggcggccgcggcaagaagcgcgccg

SEQ ID NO: 264109 - DNA, 657 bp, Zea mays
  unsure (1)..(657): unsure at all n locations
cccacgcgtccgcggacccctggacgctgttcgtgtcgcagatggcgctgatgggtgggcggaggggcggcggtgggcggactacctgaggcccgggtgcgtggacatcgagccgcgcttcccgaaccgcaagaacccggtgcccgacgtggggtaccccggcgggctgtggttcgactgggccaactggggccgcgggtccccggagcccgtgatggtgctgcgcaccaaggagatcaagaacgggcggctcgccatgctcgccttcgtcggcttctggttccaggccgtgtacacgggccagggccccatcgacaacctgctcgcgcacctcgccgaccccggccactgcaacatcttctcggcattcacgtcccactgatccgatgttgcttcggagctggcggagagaccgcgaagaattaaaaaaaagggcatcctgttgagggagaaagaacttcgcttggtcggtatcattttggccctgctggacatgtcaacattttgtttgtagtacctgcgtagaaatgtcaaaccacctgtacaaacgtacaaataccaccccagggatcgcgatgatgctagccagcagtccagcacacactagctngtcctgaagatccatgcaacaccgtatacagaggaaatttatggaca

SEQ ID NO: 264110 - DNA, 877 bp, Zea mays
aggataagccgcagccttcactgtccatcgtctccctctgtactccttcctcagcctcatcctatccaagaacgcagaaccgagacccacgaactcgcagcaggccagcagccatggccgcccccgcaacgagctccctgctgagcacgctgctgcagctaccgctcgctccgttctcggggaagagctcgccgccgtccgtggtgcacgtggcgcgccgggcgccgacggcggtggtggcggccaaggggttcaatgtgcagatcctggtggacgagaacgagggggaggagtccatctttcgcaggttccggcgggaggtgatgcgcgccggcgtgctgcaggagatcaagcgccgccggaggtacgagagcaagacggacgagaagaagcgcaaggcgcgcgaggccggacgccgcaaccgtcgcaggcgtatgatggacgagccgaggttcccagaagaagacgccgacgcgacctccaaggctcgggacgaggacaacgacaactgggaggtcgacggcatcctgtgaaacaaaaggaacgcatgcagtccacagttcaatttcacagcgtccagatgatgctgcacagcacagacccgtcaaattcgaggtctttttgagccccgcacccccgtaagacgcaatccaaaccgtatatttgcgttttggccgcgtgcgtttccacttcagtgtccaatgggtacagctgcaattgcacaactaacggtcgcaaatgtagcatacttcgaccccttctcgttccctgagctcttcttggttccatggtgtttgaaaccctactactcttgtgtgtgttccaacatgtattctttggttagctggcgctcatgaaagttcagaaattggtgaag

SEQ ID NO: 264111 - DNA, 306 bp, Zea mays
ccttccttccccagcctctcatcctatgcaagaacccataatccagacccacgaactcgcagcagccattagcgtgcgctagccggccgcagccatggccgcccccgcaacgacctctctactgagcaccctgctgaatctgccgctcgccccgttgtcggggaagagctcgccgccgtccgtggtgcatgtggcgcggcgggggccgatggtggtggtggccgccaaggggtacaatgtgcagatcctggtggacgagaacgatggggaggagtccatcttccggcggttccggcgggaggtgat

SEQ ID NO: 264112 - DNA, 483 bp, Zea mays
ggggctccgcaagggggagtgggtgatgccggagaccgaccctgtgggtgataagctggcaggggctgcccatctacgacgccgacttcggctggggacggccggcgttcatgggccgcgcgtgcctccagttcagcggcctcgtgtacctcgtcccgggcccggacggcgacggccgcctcgacgtcgtcgtggccatggagcccaagagcctggccagattcaaggagctgttgtacgagctcaaaggtgcaggtgttccgtgcacggcagactgagctgctgcattccgtgcaggttccttggcttgctaccggctggcaaaacgaaaacctgtttgccggattgttccttgcattgcctatctacttcgacctttactgcagtactcctagttttctactcgttgtttgtgatcgcaatctggtgagtactgtactctatatgcatttacatggctatctatattattcggagctaaat

SEQ ID NO: 264113 - DNA, 1077 bp, Zea mays
cccacgcgtccgcccacgagtccacgacgcccgcagccgcagcgaaccagagaggagagcgggagatgaagggcgtcgggggcggcgcggcctccccgggggactatgtctacttcaaatctgtcgtcccgctccacaagatctccattgggtcaaaactgtggaggtactatgactttggacccaaggttgtgccacctcttgtttgtatcccaggaattgcaggaacggctgatgtatactataaacagattatgtccctttgtatgaagggttatcgagtaatatctattgacgttcctcaagtttggaatcaccatgaatggattcattcatttgaaaaatttttggactccatgaatatccatcatgttcacatttatggtacatctcttggtggattcctggcacaaatatttgctgaacaccgtccaaggagagtaaagtcattggtcctatcaaatacttttcttgagacgcacaagtttgctgctgccatgccttggtctccagttgttaattggaccccttcttttttgctgaagcggtacctcttgacaggaatccgagatggtccccatgaaccattcatcgcagactcagtagattttgttgtgggtcaggtggagacattgtcaagagatgatctttcatcaaggttgatgttaaatgttaatgttgcatccgttgggtcgttaatgttgcctgattcactcatcactataatggatacaaatgactactctgcagttccccagcagttgaaggaacagttgaatgaaaggtaccctggtgcaaggcgtgctgtactgaagactggtggtgattttcccttcctgtctcgtcctgatgaggttaatctgtaccttcagctacatctgagacgagttggtgtagagccaaggtcagacctggtccaaggctttacccgaaatggcagcgctgggagttcaaaggatcaaaaagatggaggggacagctttgataatagtggtggagacaatggccaccatggttcaggtggcagtgatcatgacaggcggcattgtgcatcagaatcacaccattccgacgagc

SEQ ID NO: 264114 - DNA, 392 bp, Zea mays
tgcatttggtgtacatgagcaggtctaaggcgagattggaaattggggatgtccctggtgcacttggggatgctgaggaagcaataagaatagctcccagatttcctcaggctcacttattgcgaggcgacgcactatttgcaatgggcgaatattctgtcgcggaagatgcctatgcagatgccttggatcttgatccatctattcgccggtccaagtctttcagggctcgcgtggaaaggctacgagagaagcttgttagtgccaataatccgtagttcattttgaagctctctctccatcagaagttcgatccacaagtaatgtagatatgttcttggtgaaggtaataatgctcacacactttgcaagccactggtcaggaattgatt

SEQ ID NO: 264115 - DNA, 512 bp, Zea mays
gtacgtgagcaggtctaagagcgagattggaaattggggatatccctggtgcacttggggatgctgaggaagcaataagaatagctcccagatttcctcaagctcacttattgcgaggcgacgcactttttgcaatgggtgaatattctgtcgcggaagatgcctatgcagatgccttggatcttgatccatctattcgccggtccaagtctttcaaggctcgcgtggaaaggctacgagagaagcttgttagtgccaataatccgtagttcattttgaagctctctctccatcagaagttcgatccacaaggaatgtagatatgtgcttggtaggtctgaattgctagatgcaacatctgggaagtagtataatagatagctgcatcccttttggttagcagtggacaccttacagttctcctttttttcccgaacacagtgtcctcttttttttagcagaagacacagtgttctctttgttactgttgtcaagctgatatgtgcaataaa

SEQ ID NO: 264116 - DNA, 1615 bp, Zea mays
cacaaagtctaaacctgaaaacggaggctgtcatgacgatctttagtaaagcagtacggaagttattcttgagctacattcagagagcaaaagaagctggaaaccgcattgaaactgcaaaagaactgaagaagttaatttccttcaacatagttgttgttaccgagcttttagctgacattaaaggagaactatctccagttgctgaaactgaagcatcaagtgcagctgcagaatctgaaggagaggatggtgaacatgaatgggaatcattggatacactgaggaagactagacctgataaagagctcaaagaaaagctgagaaagtcaagccagaaagagataactctcaaggatgacattccattgagggatagggctgagctgtatgaaacgtacctgatgttctgcatcactggggagactactaatgtatcatttggaacagctatctctacaaagaaagatgattcagagtttttaatgctaaagcaattgggtgacatacttggtttaactcgcaaagaagctcaagatgttcacattaagtttgcagagaaagcttttgtgcaacaggcggaagtaattcttgctgatgggaaattaacagaggctaaggctgaccagcttgctaagattcaaaagcaggtcggtttgcctactgaacatgcacagaaaatcattaagggtattacaacgacaaagttatcttctgcaattgaagcctctgttgctcggggtcagatcggtatacagcaggtccgaggattgaaggaagcaaacttccaactagatagcttgattgcggagccgcagcgagaaagcatttataggaaaactgttgaagagctcttttcttcaggtacaggggatttcgatgaagaggaaatgtatgtgaagattccagctgatctcataataagttctgagaaggccaagtcaattgtacaggatattgcaaaggttaggttggagaactcccttgtccaggctattgcgttgcttcggcagaagaagagagatgatgtgctttcatctctgaatgacatgctcgcatgtgatgctgcggtccctgcatcacgacccttgtcatggcccacaccaggagagctagatgatctatttgccatctacctgaagagcattcctaagcctgagaagctatcaaggttgcagtacctgctcggcattagcaacgagaaggctaacgagatgcaggacgcagcctcggagggatcgctgccggttgcagctgaagagaaagaggagttggcgttctaggaaggggtacagttttgttagggtagccaccggagttgaggtcccttgccaaggaacgaacgaacttggtgcctgtggcggacagctgctattgtagctaggcgcatacatgtttttggaaaaggaaatcgagtgtaacactgacatatttattgcatgtctatctgtatagacaagtcaataacaccgacgctgttcggctgttgcattccaccaggccacactggaagcgttttgttttctggttcattgtttctcttttggtttaagaatgtattacatttacagctatgactgccacccttgcttataacctccatttgttgttaacc

SEQ ID NO: 264117 - DNA, 1221 bp, Zea mays
cagctatgtcttctcaggtcgacaggcgcagccagtccgccgggaagcgcgcgcgcaccgacggcagccggcgtgaggacgactgggtttgccccagctgcaagaacgtcaacttcgccttccgcaccacttgcaacatgcgcagctgcaaccagtccaggccagcagatcacacggccatgcagaccccgcctcgctatcccacatcaggaggttacatgagcccagggacgccaccgtcgatgtaccttggtggtggtgctcccccatatggctcttcaatgtttaacgggcctgcaatgacgcgctatggtatcacacagttccctgggggttctgcgtatccatatggatatggtggccgcatatcaatggggagcccctacgggccaatgcaaatggctgggccaaccgcatactctggtggatctatgatgggagcaggtggaatggatggaatgcccatggacaggtatgggctaatacctgctggttctggtccaatgggcacgagagctggctcatattctgatgaagattctcagaagaagtctgcaggagctggccgtgataatgattgggagtgtccaaattgccacaacatcaactttggcttccgcacagtctgtaatatgagaaagtgcaacacacctagacctgaaaaccagggatctaagcctgatggtttaagagggtcaaaaccaaagacaccagagggcagttggaagtgtgagcagtgcaataacataaactatcctttccgaacgaaatgcaatcgtccccaatgtggagcagaaaagccatcacagacaaacaatgcaaatgaaccagcggaagatcaggacaatcaggtctttgtttcagaaccttcactatggtcctcaacatttgctacacctttatttagaacattaagttgcatgccttattaatatatcactactatttttaatcatttccttgccctcatgtttgcttgacatagcttaataaattatgtccctactgttacagtgagtcctagaacagtaatgagggtcaagaaggtccagcgtcgtcgtcaaggttcagtctgaatgtggggtacatctgtgtcagtagtcgccgttacaagtttcttccccttgagaacttagttgagtcggggccttggagttggcaatggagtcttgccttccttaatcactgcggataatggtcaagaacatcaatttgttatgt

SEQ ID NO: 264118 - DNA, 443 bp, Zea mays
ccccaatgtggagcagaaaagccatcacagacgaacaatgcaaatgaatcagcggaagatcaggacaatcagtgagtcctagaacagtaatgagggtcaagaaggtccagcgtcgtcgtcaaggttcagtctgaatgtggggtacatctgtgtcagtagtcgccgttacaagtttcttccccttgagaacttagttgagtcggggccttggagttggcaatggagtcttgccttccttaatcactgcggataatggtcaagaacatcaatttgttatgtgggttgtcaagaacatccatcttgctctttcctggctgaacttggttacttgtctttgttactggtactctggataaattaccatatgttatatgaatgtcttttatatgtgacaaaaaatatcactcatctgttatgaaaaaaaaaaaaaaaaagggcggccg

SEQ ID NO: 264119 - DNA, 998 bp, Zea mays
  unsure (1)..(998): unsure at all n locations
ggaannnccgggncgacccacgcgnccgcggacgcgtggacggacgcgtggtcacacactcaacagcaacagctaagcctctcccacaagacagcaacatggctgaggaggaggccaagaaggtggaggtggaggtcaccaaggagcccgaggcggcggcgaaggaggacgtagccgatgacaaggccgtcatccccgcgaccgacccgccgccgccgccgccgccggccgacgactccaaggccctggccatcgtcgagaaagttgcagatgaacctgctcccgagaagcctgcccctgcgaagcaagggggctccaatgacagggatctcgctcttgcaagggtggaaacagagaagaggaactctttgatcaaagcttgggaagagaatgagaagacaaaagctgagaacaaggctgctaagaaagtatccgctattctttcatgggaaaacacaaagaaagcaaacatagaagctgaactgaagaagattgaggaacaactggaaaagaagaaggctgaatatgcagagaagatgaagaacaaggttgcaatgatacacaaggaagccgaagagaagcgagcgatggtggaggcaaaacgcggtgaggaggtcctgaaggccgaggagatggctgccaagtaccgggccaccggccacgctcctaagaagctcatcggttgcttcggagcctaagaaaccttccaagtcagaccgagcagaaagtgaaaaacgtcagccagtgattgcttggtcctctcgctctatcaagtgtgtagtgtgtcttcgaaagtttgtaaagcctactgctgctgctgtatatactgatatcgcttccaaggcaggcgtttggtggtgtacatgttgaatgcttgacgagaaacattcttgtgtgtagttaagaggtcacgctgttgttgttgttgttgtacattcaagcagacattttgttttcttctggtgttaaagttttaaaaataaacacaccacgtctcg

SEQ ID NO: 264120 - DNA, 625 bp, Zea mays
gaatttagaaacacatcaaaccttccgctctcttcccttcctttgcgggctgctctccagttcaggcgtccagcttcgcccagagtccagacacggccaacagttaaacgcgccaccgacaccacgctcgcacgcacgccccacaggtacagctagctcccacccctcaacagcaacagctaagcttctcctagcagacagcaacatgaccgaggaggaggccaagaaggtggaggtggaagtggaggtcaccaaggcggcgccggcgaaggagaacgccgccgaagagaaggccgtcatccccgcgaccgagccgccggccgcccaggagaagccgccagcgccggccgacgactccaaggccctggccatcgtcgagaaagttgcagataaatctgctcccgagaagcctatcgctgagaagcaagggggctccagtatcagagatctcgctcttgcaagggtggaaacggagaagaggaactctctgattaaagcatgggaagataatgagaaggcaaaagctgataacaaggctactaagaaagtatctgttattctttcatgggagaacacaaagaaagcaaacatagaagctggaatgaagaagatggaggaacaactg

SEQ ID NO: 264121 - DNA, 471 bp, Zea mays
gacccacgcgttcgctatggttgaagcaaaacacggttaggaagtccttattgcccttgagatggctgcctatttctgggggggctaccactctcctaagaagctcatcggttgctttttagcctaaaaaaccttccaagtcagaccgaacaaaaagtgaaaaacttcatccagtgattgcttggtcctttcgctctatcaagtgtgtaatgtgtcttcgaaagtttggaaagcctactgctgctgctgcatatactgatatcgcttccaaggcaggcctttcgtggtgttcatgttgaatgcttgacgagaaacattcttgtgtgttagttaagaggtcaccctgttgttgttgttgttgttgacattcaagacagacattttcttctaaaaaaaaaaaaaataaaaaaaaaaaaaaaaaaaaaaaaaaagggcggcgctcgcgatctagaactagtccggacgcgtggg

SEQ ID NO: 264122 - DNA, 349 bp, Zea mays
ctcaacagcaacagctaagcctctcccacaagacagcaacatggctgaggaggtggccaagaaggtggcggtggaggtcaccaaggagcccgccgccgccgccggccgacgactccaaggccctggccatcgtcgagaaagttgcagatgaacctgctcccgagaagcctgcccctgcgaagcaagggggctccaatgacagggatctcgctcttgcaagggtggaaacagagaagaggaactctttgatcaaagcttgggaagagaatgagaagacaaaagctgagaacaaggctgctaagaaagtatccgctattctttcatgggaaaacacaaagaaagcaaacat

SEQ ID NO: 264123 - DNA, 1017 bp, Zea mays
tcggattcggctcattcgagcgaatcggcctccccttccaaaaccggatttgcgaaccacacctagcagccgaggttagcacgcgtcctgcggccatggaggacgaggagcacgaggtgtacggccaggagattcccgttgacggcgaggacgtcgacatggctgccggcgacgatgccaccaagctgcaggaacttgacgatatgaagcgccggctcaaggaaatggaggaggaggccgccgcgctccgcgagatgcaggccaaggttgccaaggagatgcaaggtgtagatcccaatgcaaccacatctgaaaacaaagaggagatggattctcggtcagtattcattggaaatgttgactatgcgtgcactccagaagaagtgcagcagcacttcaattcttgtggaactgtcaacagagttacaatcctgactgacaagtttgggcaaccaaaaggttttgcttacgtggaatttgttgaagttgaagctgttcaggaagctatcaagttgaacgagtcagagttgcacggtcgccaactcaaggtggcaccgaagaggactaacgttcctgggatgaagcaaccccgcggtcgaggtttcaatccataccggccatatggttctagtccttatggttatggctatggctacgggagattccccagattccgccgcccgacgaagcccgtatttgtgaagctcgtatgtccatatggtttgcagaacatggacgatgagacggcttgactaaaatccccgcgtcctattacttcatagcttattcgggacgttcccatgcatgtttctgtattgacgatgcttaagctttgtactgtattgtatcagttatgcaagacgattacgatttagttacccgaaatgctctgttgtgatgctacttggggtgctgccacttttgggcctcgaatatgattgtataagcggatgcattacttattcacgtctatgaaaaaaaaagggcggagctcgcgatctagaacccacgcgtccg

SEQ ID NO: 264124 - DNA, 1007 bp, Zea mays
  unsure (1)..(1007): unsure at all n locations
gtcagtttttctctcccctcccgaaaccggattccgtaccgaatctggtctcgccttggagccgaggttgcacgcggttcgtcctgcggccatggaggacgaggagcacgaggtgtacggacaggagatccctgttgacggcgaggacgtcgacatgtccgccggcgacgacgcgaccaagcttcaggagctcgatgagatgaagcgccggctcaaggagatggaggaggaagccgccgcgctccgcgagatgcaggccaaggtcgccaaggagatgcaaggtgtagatcccaatgcaaccacatctgaaaacaaagaggagatggattctcggtcagtattcattggaaatgttgactatgcgttgcactccagaaaggaaaaagtgcaagcaagcactttccaaattcttgtgggaacctggtcaacaggagttaccaaatcnctgactggggacaagttatgggcaaccaaaaggttttgcttacgtggaatttgttgaagttgaagctgttcaggaagctatcaagttgaacgtgtcagagttgcacggtcgccaactcaaggtggcaccgaagaggactaacgttcctgggatgaagcaaccccgcggtcgaggtttcaatccgtaccatggccacccctacatgaggccgtatggttatagtccttatggttatgggagattccccagattccgccgcccgcgaagaccttatttttgaagctcggttcccatttggcagaacatgggcgataatcggccgcgttctgttatttcatagcttattcgggacgttcccatgcatgtttctgtattgacgatgcttaagctttgtactgtattgtatcagttatgcaagacgattatgatttagttacacaccatgcactgttgtgatgctacttggggtgcgccacttttgggcctcgaatatgattgtataagctgatgcattatttattcaaaaaaaaaaggacgaccgcgcccgcacctccggttcggt

SEQ ID NO: 264125 - DNA, 585 bp, Zea mays
cccacgcgtccgcggacgcgtgggtcagagactcggctacctctcctgcaaaatggctatggcagtggcttccttcgtcgccgcttcgcaccaccacggcagtcacctggccgccggcgtccccttctccgcgcgagtaggcaggagcttaggccgcagtggcgtcaccatctacatgagagcccagaagaagagcaatagtgaatctgggagcagtagcggaggtggggacgtgcgggccagcagcgggcggcgagtgtggcgtcgtcggaaactgaccaaagaggatgacatgttgcgttacaagttggatcgtatcccttttctagaggagaaggtgagaaaggtaagggagaatgggaagatcatatgcctggacattaatcagctgatgttatctcaagagaatagatttgcgttcaccatggaggtggctgaagaagctaatgcctatcttgagaagaacaggcatgaatatgggttaaagaagcctatactgcatgttctcagtgatcgcatgaatgaatctgggttttctcggcctgagggttacctttatccttatcctatcaagcctggccctta

SEQ ID NO: 264126 - DNA, 819 bp, Zea mays
accacgcgtccgcggacgcgtgggtcaacaacgtctccttcgtgctccccaccaaggcgctgctgcactcgcacttaaccggcatgtccagcggcgtctactcgccggacttccccgtcgcgcccctggcgccgttcaactacacggggacgccgcccaacaacaccaacgtggccagcgggaccaagctcatggtcgtcccgtacggcgccaacgtggagctcgtcatgcagggcaccagcatcctcggcgtcgagagcctcccgctgcacctgcacggcttcaacttcttcgtggtcggccaagggtacggcaactacgacccggtcaatgacccgcccaagttcaacctcgtcgaccccgtcgagcgcaacaccgtcggcgtgccggccggcggatgggtggccatccgcttcctcgccgacaaccccggggtctggttcatgcattgccatttggaggcgcacacaacatggggcctcaggatggcatggttggtgctcgacggcagcctcccgcaccagaagctgctcccgccgccgtccgacttacccaaatgttgattagactcttcctccatctctatcctgccggtcgcttcaaattaaagggaattgtgaattagacaaatgtttgtttgttttcttgtttactttcttcattgccaattgcaattttttcaacttgcattttaactagtccgttccgttcctagctgacctggacttttttgtaattttttttcttccatttgtttgccaccacaaatgtttttgtacactcctctgaaaataaagaatggcgtgacttgccccagat

SEQ ID NO: 264127 - DNA, 1536 bp, Zea mays
ccgtgccctacgccccagaacctcccaccgcatcggagggctccgcgcctccgccacgccgatggcgtcccagccgccgccagagcccgcaccggccgaggcgggtctggaaagcatggagggcctcgtcctcgacacggtcgtctcaagagccggcgcgcgccccgcagcggcgctcgcctgcgccagcacgcgcctccgcaccgccgttgccgacgactccctctggcgcagattctgcggtgaggacctggggctcgacgctcccgtcgatccagagggccggcctcttccctccttccaggttgcatataaagtttggtcggagtcttttggcatgtaccctctacctatggtaaagagagtgagacaattctggacttcaatgaaaacttggttgtctgaaaactttcctgaggcatacaaaacgttatgcgaaggtgtttctgaagctcaattaaagtcagcagaggatgatcttggtttcaagctccctatgcccacaaagctgttgtatcgcttttgcaatgctcaactgccttttagtgaggaccatgacacaaataaaagcatttccacttatggattgattgggggctatgcgttttatgatcattgggtgaatgtgcatttgtcaccgcttgagcaaatagttgaagagacgaaggacttctatcgggagttccctgatgtatttcatgggcgcaaattcattgtagtggcaacttcatggtttcatccgaaaacatttcttctagattgctcaaatggtgaactttatgttggtacatacaacttaccgataggaggaatgcttccctgtgtgcccaaagcattgataaagccagcaggtaatgatctagcacaagatggactactcctgtggttagaagaacaccttaggcgtttacagagtggcatgatcaagacccgtatgctgatggcatcgagatatatcagcttatatccagaagcacctccatcatgcagttcagctgttacaaatggcattaagaacatcctgggaggcctggggaaaaattatgttcacttactcaattcgcatgtcagttccagaggcatgcatgctaggtggcgtgtactattcttcctgccagctttgctcccgccactggaccatcagatcgtgtgacagggttgtttctgatgtgagcggaggaggggttattggagagtatcctctactgttacctggtgaggatgagtttgtctacgagagttgcacgccactgccccaagtaccaggatctgtggagggctctttttcgtttgtgccgggcaagttgagccgacctgaagggaagccgttcgaagtcatggtggcgcctttccctcttgatgtgccagaatacatcttctgatgatcacagcagaaataaatgtatgtatggttgttgggaaaaagttcggatgcttgtaatacccttattggagtaatgtaaaataaggaaccgtgcgctcttcgtgtaaccagcgaaaaaaaaaaaaaaaaaaaaaaaaaggggggccccccga

SEQ ID NO: 264128 - DNA, 538 bp, Zea mays
agaatgcttccctgtgtgcccaaagcattgataaagccagcaggtaatgatctagcacaagatggactacgcctgtggttagaagaacaccttaggcgtttacagagtggcatgatcaagacccgtatgctgatggcatcgagatatatcagcttatatccagaagcacctccatcatgcagttcagctgttacaaatggcattaaggtacgctcatctgctgtctttgtgccagaacatcctgggaggcctggggaaaaatttatgttcacttactcaattcgcatgtcagttccagaggcatgcatgctaggtggcgtgtactattcttcctgccagctttgctcccgccactggaccatcagatcgtgtgacagggttgtttctgatgtgagcggaggaggggttattggagagtatcctctactgttacctggcgaggatgagtttgtctactagagttgcacgccactgccccaagtacctggatctgtggagggctctttttcgtttgtgcctggcaagttgagccgacctg

SEQ ID NO: 264129 - DNA, 1291 bp, Zea mays
cccacgcgtccgcggacgcgtgggagaacaacctacccccacaagcagaaggatccgggcggccaccgagagtcactggaagtctggaagaagctcgtccggcgccccgcgacgagacgacggcctcctcctccgctccgctgaagaacgacctccccgctgacagcgttggcgggccttgtagcgaggagggggtgcggaggcgccgcgactgttcgcgggatgagcttcggcggcagcagctccctcgcatcaggtgcgaagaggccgttcgagtacgggagaacgcatgtggtgaggcccaagggcacgcacaaggccaccattgtctggctccatggacttggggacaatggagccagctggtctcaactactggaaactcttccccttcctaatataaaatggatatgccccactgcaccttcaagacccgtgtcagtgtttggcgggttcccctccacagcatggtttgatgttgctgatctttctgaggatgctcctgatgacattgagggaatcgatgcctcagcagcacatgttgcgaatttgttgtcaactgaacctgctgacatcaaacttggtgttggcggctttagtatgggtgctgctactgctctgtactctgcaacttgctttgcccatggaaaatatgggaatggcaaaccattccctgtgaacctaagtcttgccgttggtcttagtggctggcttccatgtgccaggaccttgaagaacagaattgaagcctcaccagagtgtgcacaaaaggcttcatcaatacctcttttgctctgtcatggaaaagctgatgatgtagttgcctacaagcacggggagagatctgctggtgccttgaaggcaaatggcttttccaatgtgctcttcaaggcatacaatagtcttgggcactacactgttccagaggagatggatgaagtttgcaaatggatcacagcaaatttggggcttggcactaagtcatcttgattggaatttgatgcgagaaagactcgcagggacggtgtccaaataataccggtatcttttccaggaggtatatggtttaatagcaaatttgggcttgggtatacggccatgttctagcttttcttaacgcagacgtgtctgcgaatgatgtatgcttataatatctatattttggtctacgtcgatttggttgtggcacggataatgtttgtttcaaatattctgctctgcgaattggaattgtgatgttttgctttctcaaaaaaaaaaaaaataaagggaaataacaaaaggaagggaa

SEQ ID NO: 264130 - DNA, 753 bp, Zea mays
  unsure (1)..(753): unsure at all n locations
agcagaaggatccgggcggccaccgagagtcactggaagtctggaagaagctcgtccggcgccccgcgacgagacgacggcctcctcctccgctccgctgaacaacgacctccccgctgacagaggcggagcgctccgcagaggcgcagagagaggtggcgtctgccttgctgcgctgcgggtctgcggtctcctgcagattcccgcacccacaaggccagaggcgacccaccagcgccacccaaaaaaggcgcacccctttccgccgcccaaatctccctttaccccgatccccaagccccgccgctgctccctcgtacgcacgtacgcaccgcgtcgccctttatctgctcccgagggccgctggtcggctgctgaatcgtcgccgttgttgctgggactgcagcgttggcgggccttgtagcgaggagggggtgcggaggcgccgcgactgttcgcgggatgagcttcggcggcagcagctccctcgcatcaggtgcgaagaggccgttcgagtacgggagaacgcatgtngtgaggcccaagggcacgcacaaggccaccattgtctggctccatggacttggggacaatggagccagctggtctcaactactggaaactcttccccttcctaatataaaatggatatgccccactgcaccttcaagacccgtgtcagtgtttggcgggttcccctccacagcatgggttgatgttgctgatctttctgaggatgctcctgatgacatt

SEQ ID NO: 264131 - DNA, 525 bp, Zea mays
ctcttttgctctgtcatggaaaagctgatgatgtagttgcctacaagcacggggagagatctgctggtgccttgaaggcaaatggcttttccaatgtgctcttcaaggcatacaataggttttatatctcacctatccaactacgcttcacttgagttgcacattttctatatttcgcttctcatgatgattgctctcctacttgaagtcttgggcactacactgttccagaggcgatggctgaagtttgcaaatggctcacagcaaatttggggctcggcacttcgtcatcttgatcgcgagagaaagactcgcggtgtcggtgtcttctccagggtagtaaatgggctaatagcaaatttgggcttgggtatacggcatgttctagcttttcttcacgcagacgtgtctgcgagtgctgtacgcttataatttctatattctggtctacgtcgatttggttgacacggataatgtttgtttcaaatattctgttttccggtttggaaaaaaaaaaaaaagaag

SEQ ID NO: 264132 - DNA, 1524 bp, Zea mays
cccacgcgtccgcccacgcgtccggcaggtgatccccgattcgctgccttatccgctgaccgctgctactgccgcaccaaagcgtgagcaagcttcccgcgagagcgctcaaccagccaagcgggcgtcggtcagaggtgagcagagtaatgtcgggagcgaacttcctctccaccgcggcgctcgtcgcccgcggcgtcgctgcctgctcttctatttcaactccgacacggaggcacccgcaaatccgggtgttctgccgggctgacgctgaggccttggaggcctatgcccatgaagagcgcctgcgattccgtcggagagatttcatcggcacctgcgtcggcaccgctgttgctttggaaatgatcgacggctgtacgagtttctctggagtggctactgcagctgatctcattgagcgtagacaaaggtcggagttccaatcaaaaatcaaagacaccctttacgtagccataaaggctaagccagagctcgttccatcgttgttgaccatggcactgaatgatgccatgacatacgacaagaccacaaaaactggaggcgcaaatggatctatcaggctagaaacaagcagacctgagaacagtgggctctcttccgcgttggatttgctgactgaagccaaaaaggagatcgattccttttccaagggaggtcccatttcgtttgcagatctgatccagtttgcagcacaatcagcactgaagagatcgtttcttgacgctgccattgccaaatgtggtggaaatgaagagaagggaagaacactgtactctgcatatggttcaaatgggcagtggggtctgttcgatagaacgttcgggagagcagacgcacaggaagcagatccagagggaagagtgcctgactggagcaaggcttctgtgcaggagatgaaggataggttcgtcgctgttgggttgggtcctcgccagcttgctgtcatgtcagcgttccttggacctgaccaggctgctaccgagggacgactgatagctgatccggattgccgtccatgggtggagaagtaccagcggagccgcgagaccgtctcccggactgactatgaggttgacctgataaccacactcacaaagctgagctcccttggccagaagataaactacgaagcctacacataccctaagcagaagattgacctgggaaaactgaaactgtaagagttgattgccgggcacctgcatcggccgtatccaggaatcgggagctaattgtatggtaggctctgtctgctagagtgatttgattcggcgctgacgtccacgtattggctacttactggtcagctgtcagacattcttcccacggcaattaggatggtccctgtacatggttaaatagggtctcccatttcgttttgagtgaacttgaagaggcaaacgcttgtgagaagtgaggtgttgtgtcaatccccttacgtatacgagacgactgaagaattagtagaaaagactaggtgagactgaggacgagaacaag

SEQ ID NO: 264133 - DNA, 657 bp, Zea mays
cggctcgaggcaaaaatcaaagacaccctttacgtagccataaaggtgagacaccctagttccttgtgttttcctttcacctatctatcactctctgttgcctgaaacagtgatcctgataatcttttgaaggctaagccagagctcgttccatcgttgttgaccatggcactgaatgatgccatgacatacgacaaggtctggtctctgaatggctttgtatcgttagcatttgggtccctccgttggtttagagagctggtttaattcttctgcagaccacaaaaactggaggcgcaaatggatctatcaggctagaaacaagcagacctgagaacagtgggctctcttccgcgttggatttgctgactgaagccaaaaaggagatcgattccttttccaagggaggtcccatttcgtttgcagatctgatccagtttgcagcacaatcagcactgaagagatcgtttcttgacgctgccattgccaaatgtggtggaaatgaagagaagggaagaacactgtactctgcatatggttcaaatgggcaagtggggtctggtcgatagaacgttcgggagagcagacgcacaggaagcagatccagagggaagagtgcctgactggagcaaggcttctgtgcaggagatgaaagat

SEQ ID NO: 264134 - DNA, 1709 bp, Zea mays
ttcgccctttttttttttttttttttatctgatttttattcaccgatttgcaactagtattaatactggatacaagaccacagattcatatgcacctaataaggtgacatgactgaaatcatatttatatgcaaaacatattcagatattcaacatatctcatatttcttagtttataacaagtgatactggagcactagtccaaacagcagtatctagctcagtagaatggagtatgaccaccgatgatggagagatttggcgtgtgctcactgtattcaactatcgatgtaggaggcaactgcccaatacagatctcatgcactgttgataacagaggaaacagctcctgccatcctcgataagtcaacacttcatagacttcccttgctgtggacactccctggagtttttggccacgcaacatctctgcctccagttcatcaaaagaccttttgccaccatttcgtgcaaaggcctcagccactcttctgttcctcccaccaaggcacgtggttattaggtcggcgacaccacagctctcgaagaacgtgttgtctctgactgaagggaacagaagcttagagaaagcacgcatttctcgcaaaccaatcctcattattgcagcctttgtattgtttcccatatccaagccatccacaaggcctgctgcaatagccacgatatttttcagagttccacacagctctactccttcaatatcttctgcgacagaaactaggaagtagggtgtggtaaaaagtttagcccatcgatttgccacttccttatctttcctatacccaattgttgcttcactgaactcttcgacagcaatctcgtttgcaatgttagcacccatgagcacacagcaattgattccaagtgtatccgcgattaacttggatatcatgcacggcccttccatcttgacctccatgcccttgatgagggagatagcctcagctcctggtgttagcttccctacaagcttcttacatataccctccacaaattgatggggcgtcacaaaaaccagcatattcgcgtctttgactgcgctctccaagtcagggtcggcaataacattcgttccaagctttatacctggcaagtatttgcagttctcattctgttcgttaatggactcagatagcttcctgcctgtaggcagtatttcctcaaacacccacatccttacttcatcatagaaggagggcagcttggcggtgttggaggcgatgaggcgggaggcgacgctgccccagttgccgctgccaatgacggccacccggtacttggcgtgcccgttctccatctccatctccggcaggcgggcgggaggacggcgggggaatggtccgaattaaataatgcagatcaagagcaaggacggacggcccgaacctagtagcagcaggaggagaggagagaaggaaagtgaaattgaaattgaacggaagggcaggcagaagaatataatgtcctgctgcccgtggttatggtccgcttagataggtcggaggggcggaatccccaagaaataatcgcatgtggttgctgtttcctttcctcccctcccttcaccgctgctttgtttttgtttgttggcaaaaaaacgaggcgacagtcgctgccatttcgtccctgggattgaggaagacggagacggagacgaagaggagcccacgcgtccgcccacgcgtccg

SEQ ID NO: 264135 - DNA, 736 bp, Zea mays
gtgaaagctggctcgcctgcctgcacgggccgggactgactggctggaccgacccacgcgttcggtcggccaacgcgagggtgtacaaccagtacctcatcaaccacgtcgggcgcgggacgccgcgccaccccggcgccatcgagacctacctcttctccatgttcaacgagaaccagaaggagagcggcgtggagcagaactgggggctcttctaccccaacatgcagcacgtctaccccatcagcttctgaagaaccgttaaccgtaccgatccaagctagctgctagctggccctggtggtggctccgaccgacgacggacgacgacgatcgacctgcagccgtatgtgtcgatccggccgtatacagatgatagtacgtagcatgtatgtatatatatggtatatgtgggcttgctttgcgaccgctgggagtgagtatccgatccaattggtacggtagctactcccagatgcgtacgccgtgagtgatgctgagtacgtatgtattttatatgtatatgctatacacatcgaaagggatctttcggagacgacgcgcgcgcgcggttaccgtatatattgataaatacggtaacatcgtacgtcgtcaattggtcgatgatctcccttcgtagctctagtagtatacagagagagaggttggtgatggataagatacacatgcatgtacattatcacgcgccgtataaattaatatacgggttttaatt

SEQ ID NO: 264136 - DNA, 432 bp, Zea mays
  unsure (1)..(432): unsure at all n locations
cggacggtgggctgacgcgtgggcggacgcgtccgccctcgcctcccaaccccagcgccatggacatgagctacgcgctctgcacctcctccggcaccgtcgtgcaggacggcgcctacgggtaccagaacctcttcgacaccaccgtcgacgccttctacgtcgccatgggcaagaacggcggctccggcgtgccgctcgtggtgtcggagagcgggtggccgtccggcggcggcgtccaggccacgccggccaacgcgagggtgtacaaccagtacctcatcaaccacgtcggacgcgggacgccgtgccacccgggcgccatcgagacctacctcttctncatgttcaacgagaaccagaaggagagcggcgtggagcataactgggggctcttctaccccaacatgcagcacgtctaccccatcagct

SEQ ID NO: 264137 - DNA, 369 bp, Zea mays
cccacgcgtccgtttttttttttttttttttttcttgtctgtgttcttttttttatgcaaaacatattcagatattcaacatatctcatatttcttagtttataacaagtgatactggagcactagtccaaacagcagtatctagctcagtagaatggagtatgaccaccgatgatggagagatttggcgtgtgctcactgtattcaactatcgatgtaggaggcaactgcccaatacagatctcatgcactgttgataacagaggaaacagctcctgccatcctcgataagtcaacacttcatagacttcccttgctggagtttttggccacgcaacatctctgcccacgcgtccgcccacgcgtcct

SEQ ID NO: 264138 - DNA, 1350 bp, Zea mays
cccacgcgtccgcccacgcgtccgcccacgcgtccggcccggtgtcatcttatctcttcctcctaccttcactctcaaaatcttcagggagccgtagaggagcagcaggtgcaccaaaaggatggcagcgccaggctccctgcgacttctccaggccccgtccttcgctgcggccaagtgccagccggtgggtggccgggcatccgcgcggcgagcgccacggccactgttcgccgtgcgcgcctcggctgctgacgccgccaacagggatgccgtgctcaaggccttccgcgagaacagggctctcaagataatttccggtcttcagaactttgacaggagcagtgttgcatctgttgtcacagctgcagataagggaggtgcaacacatgttgacatagcatgtgacaaggacttagtaaagcttgccatggatcttaccaaccttccgatctgtgtctcatctgtagatccttcagcgttccattctgcagtacaagcaggagctaaaatggttgagattggaaactatgattctttttatgagatgggcattgagttctcctctgagcagatactgaagctaacaagggaaacaaggaagatgcttccagacatcaccttatcagtaacagttcctcacacacttagtttgccagatcagatgagactagcagagctactcgaagaggaaggagctgatataatccaaactgagggtgggaaatgttctagcccgacaaaacctggagtgcttggattgattgaaaaggcaacaccaacactcgccgcagcatactccatctctcgggctgttagtattccagtgatgtgctcgtcagggttaagctcggtgactgcaccaatggcagtaactgcaggagctgctggagttggagtcggttctgctattaacaaactcaacgacgttgtggcaatgatcgctgaggtgagaagcattgcgcaagcaatggagcttgcgccaagaatcgtgtccgaaaacttgagaacaattagttactagtggctaggaatacccttgccatttctgagcaaacttgagcagtcaataagaaagcaaaagagagtcatcgactctcaattttattctctctacgctgtcttttgcctgtggcaatgaatagcgcattagcatcatagaagtattagcttggtcaatggaagttgttcatgcgcttcttcattgctgaaagtgttgtcatcttgtcgaactcccaataagcttagataagtgctgggtttgtgggaacatcgtttgtgcaatataaatgagatcttgcccctcccaaaaaaaaaaaaaaaataataaatttaaaaaatatatttttt

SEQ ID NO: 264139 - DNA, 400 bp, Zea mays
gaaagcatgggtgaattggagtatctacagcctgccattggtattgtgttgggcttcatggggacaaagatgatctttgacttttttggttatcatataccaacagaagcttcgcttgcaattgtaactacatgtcttagtggtggcgtcatattaagtcttaggaaagcatcaaaagagaagggggacaagtagactgatgcaacaacacatgcaggcataggaatccagcttgctccatatttttggcagatagtcaagttacaaaaataattataataaacacttaaaagccaggtaaacatagtgttttcactaaactaattacttgtataaaaaaatctaacctgacagaatatcttttgatcagtatatgtagtcttagctaatgccttgttct

SEQ ID NO: 264140 - DNA, 540 bp, Zea mays
gaattttgcgatccaaacaggtatcttgccacagcatcatctgaccgcactgtattagatttggaatgtcgatggcttcgagttgggaagaactttagtcggccatcagcgttgggtttgggactgtgtcttctccgtcgatggtgcttatctgataacagcatcttctgacactacagcgaggctatggacgatgtcgactggagaggccatcagggtgtaccagggtcatcacaaggccaccgtgtgctgtgctctccatgatggagcagaatcagcgccctcataagcatgttgtgactgcttttctgtacatacgttagattgcagaactctttcactcttgtaaacttgagacctagcaagtggttaacgcaagcctctggggttgcgtacaaataatttgcgtgctgttggtggatgtttaaacctgctatgttttatggtgtgaatgctataaaaagacaacatgttcgttcaataaaaaaaaaaaggaaaaaaaaagaggggccaccccaaatagcacacctcccaacccgg

SEQ ID NO: 264141 - DNA, 1140 bp, Zea mays
cccacgcgtccgcgcttccgagcagacgtcctccttggataaggggataggcgcgaggaagagcggcctatccgcatccgcataaatcccagtcaaattgaacgagagcgccactcccctctgctaatcccagtcaaatcgaagcaagcatggccatggcggccgtgggcgtgggcggcgcagtggcgttcctcctcccgcagcgccgccagggcgccgtcccctggagcggcgggcggcggcgggcgcccgtggcggtgcgcgcgtcgtacgaggccggggtgggcgtgatggcgaccaaggtggggatgatgacctacttcgatccggagacggggaagccggtgccggtgaccgtggtcgggttccgggagggcggcaacgtggtgacgcaggtgaagacggccgccacggacgggtacgacgccgtccaggtcgggtaccacggcgtgcgcgaggacaagctcacccgcccggagctgggccacctgggcaaggccggcgccccgccgctgcgccacctgcaggagttccggctcaccgccgtcgacgccttcgagcccggccagcccctcgacttcgccgacctcttcaaggagggcgacctcatcgacgtctccggcaactccatcggcaaggggttccaaggtggcatcaagaggcacaacttcaagcgcgggctgatgacgcacggttccaagagccaccggcagctgggttccatcggagccgggacgacgccgggccgcgtgtacaaggggaagaagatgcccgggaggatgggaggaaccaagaccaagatcaggaagctcaagatcgtcaagatcgacaacaacctccgggtgctcatgatcaagggggccgtgccagggaagcccgggaacctcctccgcataacgccggccaagatcgtcggcaagaacatccccaagaactagacttcttttttcaggggggtgaatgttgagtgtttgtgtttgttaccctgctacaaactggatgtaatcctttgccaatttccagtttttgaacacatgcaacttcagattagtaaaactataacctgtacaatttgaatgcttgggtgagagagtaataggcaggtaatgcaagatgcactcctggttcctgaattccgct

SEQ ID NO: 264142 - DNA, 425 bp, Zea mays
aggaagactaaattccctgtctcacatttggcagcagggaccccacgtggcattgttgacgacagtcaacgccaacgccccaaataaaacgctagtaaggagggcagccatccctgcccctgtccctgctggttgccaagttaggaaggatgccatgaactcaaaaggtaaccaaatgacccctggcaatgccggttctggagtaccagccagcagtcagactagcgtggctgcacaagctgccagcaaagcaaatctaccatccagcagcagccaggccaagcccaataacatggtggtgaatggtggtaacaggctagtggttaatccaccgtccagcagccaagctagtgcggccgtgaacgacgctaacagggctgcgacaccacagtccagcaaccctgtcaacggtgccaacaacagag

SEQ ID NO: 264143 - DNA, 2106 bp, Zea mays
tgcaaaaatcaatctgaccctgaactgttgcttcatatgtcaatttaaagtatgaagattatacaatcacaaagggtcaggaagaaaagtgatcgaaaacttcatcaaatttatgctgctgaacttgcaaatatagattttgcatatgatggtggctggtgacagtgttgccagagtacccagaggtttacaacatagtaaacaagctgagggtggagtcagtggttggctggttgctgttgaaggtgtgatccagccacgcccggtggatgccatcaatgcagatatgaggaccgggactatagaggttgtggcacatcatgttctagtgctgaactcagtaactcggtcactgccgtttccagttacaacttctgatactgtaaaagagaagtttccagaagaaattagattgaggtttagagtgttggacttgcgtcgtccacaaatgcagtcaaacttgcgggtgcgccataatgttgttaaactcatacgccgctacttggaggatgaacatgaatttgttgagattgagactcctgttttgtccaagtctacacctgaaggtgctcgggactatcttgtaccatcgagagttcagccaggaacattctacgctctccctcaaagccctcagctgttcaagcaaatgttgatggtttctggttttgaaaaatattatcagattgcaaggtgcttccgagatgaagatctgcgtgcggacaggcaaccagagtttacacaacttgatatggaggttgcttttacatctatggaggatatgttgaagttgaatgaagatttaatgagacatgtttttcaagcggtaggagatatcaagctgccaaacccttttccaaggttaacatatgcagaggcaatggatcgctatgggacagataggcctgatctccggttcgattgggagctgaaagatgttagtgatgtatttttggggagtagcttcaaggtttttgctgatacattggaaagtggaggcgtaataaaggcactgtgtgttcctggtggtgccactgttttttcaaacactgacctgaagaaaggaactgtttacactgaagcttccaaagctggagccaagggcttgcctttcctcaaagttatggagaatggggagcttgaaggaatcggtccactgttatcgagtctgaaacctgaaaagaaagaccagctcatggaacttctggacacaaagacgggtgaccttatcctgtttgcactgggtgaacaatcatcagctaatcagattcttggacggttaagattatttattgctcataagctagaggtgatagacacgtctgcacattcagttctttgggtgacagattttgcaatgattaaatggaacaatgatgagcaaagatacaacgtcctacattatactttcactgtaccaaatctcaaggatatgtacaatctactatcacttacggctctgacttatgacatgatgtacaatagtgtggagattgggaggggaaagttgagaatctacaaaagtgtatgtacaacaaagaatttttgagatcattggtatctcgcctgaacaggcagaggagaaatttggctaccttttagaatgcttcgacatgggtgctcctccacatggaggcattgcctatggattggatcggttggtgatgcttttggcgggtgagagctcgatccgagatgtgattgctttccccaagaccacgactgctcagtgtgcactcaccaaagcaccatcagctgtagaaccacagcaactgaaggatctcgccttccccaaacctacttcgtgagacgctgttcaagtgttcatgacaaaaattccgtgctctcaaggacagctatagtttgcttctagttttcgagtgtattggcctattctatttttgcatagtatagaatgcgcagtttttggaccgtaataaatttatagaagatgcctaacacgccaaagttctggaagagcattgttttaattgggccgcttatgtgtttgtgcttgtacttgtgcacaaacttaggccttgttcggttaatcctgttacctatggattggatgtaattggaaaaaattaagaatgagtttgcctt

SEQ ID NO: 264144 - DNA, 579 bp, Zea mays
ctatagaggttgtggcacatcatgttctagtgctgaactcagtgaaccggtcactgccgttgtcagttacaatgtctgatactgtcaaagagaagtgtccagaagaaattagatggacgttaatactgtaggtgtagaatgttgggacttgtgtcgtccacaaatgcagtcaaacgtgcggttgcgccataatgttgttaaactcatacgccgctacttggaggctggacatgaagttgtcgaggttacatgttccatggtaggtggagactcctgtttgctccaagtctacacctgaaggtgctcgggagtcgggactatcttgtaccatcgagagttcaggtgcgacttcagctatcggctcgctattcacagtttatatgatctggactgcgctcattatgatagcaatcatgctttcagttctcaactctcatagatcgtgttattaggcagaggagaaatttggctaccttttagaatgcttcgacatgggtgctcctccacatggaggcattgcttatggattggatcggttggtgatgcttttggcgggtgagagctcgatccgagatgtga

SEQ ID NO: 264145 - DNA, 525 bp, Zea mays
tcgacccacgtttttgtgtcctagcgccgccgccgccccagctcgccttgcgtgactgagagctcgtcggcctccgtccacgcgagaagcgagagcatggacacccaggtgaagcttgctgttgtggtgaaggtgatgggcaggaccggctccaggggtcaggtgacccaggtcagagtgaagttcttggatgaccagaaccggctcatcatgaggaatgtcaaggggcccgttcgcgagggtgacatcctcaccctgctcgagtccgagagggaggccaggaggctgcgctgaagccctagcgttcttggtgggctcttgtttggtctttggtgtcttcgaatttgtgctatgtttgaacttctgtgaccctgtcttgagagtagtaagcctggtgataagattgcagttttgtttatcctggttgaaagtgcaattggtgttgagacatggttatccttgctatattatctataaaacgacgcatgcattgagtaaaagagctcactagtcgccccgcgccgg

SEQ ID NO: 264146 - DNA, 590 bp, Zea mays
ctcgactcgaccgccgccgtcccagttcgcttcgcgtcacccagagctcgtcggcctccgtccccgcgagaagcgagagcatggacacccaggtgaagcttgctgttgtggtgaaggtgatgggcaggaccggctccaggggtcaggtgacccaggtcagagtgaagttcttggatgaccagaaccgtctcatcatgaggaacgtcaagggccctgttcgtgagggtgacatcctcaccctgctcgagtctgagagggaggccaggaggctgcgctgaagccctggtggccttggatgtaattctgttaattttgttctatgtttgtcgaacttgccgtgtgaccttgacaacatctgctttgagatttactgagcctggattgcagttttattttatgttcctgctggaaagtgcacttgccgagacatagttatcattggttatctataatagctcaatcgacgcgtgcaatctgaaggctttgttatatgtggtaaggtcgtcgatgtagttttgtcatacttgatgttggttaccttatatctgaagattttgtatatgtggtaaggttgtcaatgtggttttgtc

SEQ ID NO: 264147 - DNA, 513 bp, Zea mays
cccacgcgtccgagggtttccttcctcctccagtgctgtcatcgccgccgccaccccggtttccttcgtaagcccgtcgtcctccgtccgcgactctgcgcgagaagcgagagtatggacacccaagtgaagcttgctgttgtggtgaaggtgatgggaaggaccggctccaggggtcaggttacccaggtcagagtgaagttcttggatgaccagaaccgtctcatcatgaggaacgtcaagggaccggttcgcgagggagacatcctcacactgctcgagtctgagagggaggctaggaggctgcgttgaggcggaatggtgtcttggtagttttcgtatggagttggatgtcatctaattgtgctatgtttttcaaacattggaatgacctttaaaacacctgccttgtatgattatttgtgagcctggtgataagaatgcagtttggatttatgatccggttgaggttatgtttgggcactattttttataaaaatattgttttacaat

SEQ ID NO: 264148 - DNA, 280 bp, Zea mays
aatatgccaatttcctcaaaagaaaatgggctatactgtgatgtatgcatgcgaactgaaactctgctgaaccgaatatttgtctgctccagatgcaaggctgccgtgcacatagattgctacagaaatctggagaattctattgggccctggaactgcgaactttgtgaagatcaagacatttcatcagaagctacaagtacaaccgttagcgataaatcacattgtaatggcaagaaattaccctttgcacagtgtggcatgtgccatggcacatcag

SEQ ID NO: 264149 - DNA, 523 bp, Zea mays
  unsure (1)..(523): unsure at all n locations
acgcatgcgtgctctgcgtcgatattgactagtaggactgctgagcccgctagaagcgggagcatggacacccaagtgaagcttgctgttgtggtaaaggtgatgggcaggacctgctccaggggtcatgtgacccaggtcagagtgaaattcttggatgaccagaaccgtctcatcatgaggaacgtcaagggccctgttcgtgagggtgacatcctgaccctgctcgagtctgagagggaggccaggaggctgcgctgaagcccttgttgtcttggatgtaattctgttaattttgttcaatgtttgtcgaacttgccgtgtgacccatactatatctgctttgggatttagtaagcctggattgcagttttttttatgttcctggtggaaattgcaattgtttgtcggcatgttctcttgaatttaatgcgtacggtttctactactactacaatgatttttagcattctgaacagctntaatcccatgtgtccaatctgaaggtgttgttatatgtggt

SEQ ID NO: 264150 - DNA, 990 bp, Zea mays
accgtgacaggtccgcgaccgtggcgacctggcatccaaggccctcccaaagtcccaaaggccgccgccgcccgccagcccaccatggccgcgcagtccttcctcctcgccgccactgccgccgccaggtcccccgcggtcttcgccgctccctattcctccgcacgccctttccactcggtccacttcgtcgccggcccgtggggcgccgccgccgccagggcgctcgtcgtcgcggacgccactaagaaggccgtagccgtcctcaagggcgcgtctgaggtcgagggcgtggtcacgctcacgcaggacgacgatggacctacaactgtgaatgtccgtatcactggacttacccctggacttcatggcttccacctccacgagtttggtgatactaccaatgggtgcatatcgacaggaccacattttaatccaaacaatctgacacacggtgcaccagaagacgaagtccgtcatgcgggtgacctgggaaacattgttgcaaatgctgagggcatagccgaggcaaccattgttgatacccagattcctttgactggcccaaattcagttgttgggagagcatttgtggttcatgagcttgaagatgatttggggaaagggggccatgagctcagcctctctactggaaatgctggtggaagactggcatgtggtgttgttggcctgactccattgtaggttgctcgccgggtgcccgggttgcagttgcagctacgctgttacatccttgccttggtggacttttgtcttcaatcgtgttattgggacagtgacctttttgtattacttggattcattccatgcatgtggtatggtgcgtaatagcctttgcaggtcgactgtataaaaagcaatatttagttgaggaaataagtgttgccacatatccaaatcgatctatgaagcactatgaacatcaaatgttattttgattttgttttaaccttttttaaagctatttct

SEQ ID NO: 264151 - DNA, 756 bp, Zea mays
accacgcgtccgcccacgcgtccgaaacttcttcgtaatactaagaagttttattcaggtcacgagcttattgtcgtaattcgtacaggagctgagtgcgtgcacgtacgatagccaagtacgatgaccctgcacaaccagtcacccacagcaatccacacaagcacttcgacgtcacacgggcgctgcacacagacacaccaagcgtcggcaccaatggcttactaccaggaggtggactactgctcggaggaggtgaggtcggtggccccggccggcttcggccgccacggcggcggcgtccagcagcacgtcgtcaaggagaagttcgaggaggtcgacacggtctcacgcgccggcgccaaccaccaccaccaccatggtcaccacggcggccacggcttcgtggtgcgcgagaccagggtcgaggaggacatcaacacctgcaccggcgaggtccacgagcgcagggagagcttcctcgccagggctaactgagccgcccggcggccggcatccacgcccgttcgtgcctgcctgcgtgccttatgtatgtctgtggttgactggttgtgcagggtcatcgtacttggctatcgtacgtgcacgcactcagctcctgtacgaattacgacaataagctcgtgacctgaataaaacttcttcgtaatactaataagttttattcacctacatcaccacgcaaaaaaaaaaaaaaagggcggccgctcgcgatcttagcggacgcgtgggcgt

SEQ ID NO: 264152 - DNA, 279 bp, Zea mays
ccggcggccacagcttcgcagtgcgcgagaccagggtcgaggaggacatcaacacctgcaccggcgaggtccacgagcgcagggagagcttcctcgccacggctaactgagctgcccgtgcggccggcatccacgcccgttcgtgcctgcctgcgtgccttatgtatgtctgcgattgtgcacggtctgcgtacttggctagcgtacgtacgtgcacgcactcagctcctatacgaattacgacaataagctcgtgacctgcataaaacttcttcgtaa

SEQ ID NO: 264153 - DNA, 1470 bp, Zea mays
gccagcgaggagtggcacctgggcatgccacgtgtgcagtgggcatcaccatagccccgattcaccaatgggaagagaccccttatccgctgctcttatcctccgcctgtggcctgtgctcagctgcgcgtagataacgaactctcccgccctcacacaagccgcccttcacgatacgcacccaccagaggaaaagggcaaaagccaaaaggcatcaccgccgcgacgacgatggcagcctcgctccaagccgcggccaccctgatgcagccggccaagatcggcggccgggcgccctttgcctcgctgccgtcccgcccgtcgtcgcaactcgcctgcagggcgttcggcgtcgacgccggcgccgccaggatcacgtgctccctgcaggacgtcgccagcaggtgcgtcgacgccgcgaagctcgccggcttcgcgctcgccacctcggcgctcctcgtctcgggcgcgagcgcggagggcacgcccaagaggctgacctacgacgagatccagagcaaaacgtacatggaggtgaagggcacgggcacggcgaaccagtgcccgaccatcgacggcggcgtggagtcgttcccgttcaaggccggcaagtaccagatgaagaagctgtgcctggagccgacgtccttcaccgtcaaggcggagggcatcgccaagaacgccccgcccgagttccagaagaccaagctcatgacccgcctcacgtacacgctggacgagatcgagggcccgctcgaggtcggctccgacggcacgctcaagttcgaggagaaggacggcatcgactacgccgccgtcaccgtgcagctcccggggggcgagcgcgtgccgttcctcttcaccgtcaagcagctcgtcgccaccggcaagcccgagagcttcggcgggcccttcctcgtgcccagctaccgtggctcctccttcctcgaccccaagggccgcggcggctccaccggctacgacaacgccgtcgcgctccccgccgggggcagaggtgacgaggaggagctccagaaggagaacatcaagaacgccgcctcctccaccggcaacatcacgttgagcgtcaccaagagcaacccggagaccggcgaggtcatcggcgtcttcgagagcgtgcagccgtccgacaccgacctcggggccaaggcgcccaaggatgtcaagatccagggggtctggtacgctcagctcgagtgattcgagtgtctaactgctaggtgtccgaccgtcatggagaacttttgagagaggaggaggaatcgtgtatgtaactattaatgcaaattcgggctgttggtttttaatttcagtttgggtttcttctttctttcttgtggactccagtggactcccgtgtgcaaacacgaagagtggctgtttgacaccagagattaattgttacttcctccgtctcagattataatatattttgatccctttagatcc

SEQ ID NO: 264154 - DNA, 823 bp, Zea mays
gtgtgtgtgtgtgtgtgtgtgtgtgtgtgtgtgtgtgtctgcgtgcagggcgcgatcgcggtagggcacgcccaagaggctgacctacgacgagatccagagcaaaacgtacatggaggtgaagggcacgggcacggcgaaccagtgcccgaccatcgacggcggcgtggagtcgttcccgttcaaggccggcaagtaccagatgaagaagctgtgcctggagccgacgtccttcaccgtcagggcggagggcatcgccaagaacgccccgcccgagttccagaagaccaagctcatgacccttcctcgtgcccagctaccgtggctcctccttcctcgaccccaagggccgcggcggctccaccggctacgacaacgccgtcgcgctccccgccgggggcagaggtgacgaggaggagctccagaaggagaacatcaagaacgccgcctcctccaccggcaacatcacgttgagcgtcaccaagagcaacccggagaccggcgaggtcatcggcgtcttcgagagcgtgcagccgtccgacaccgacctcggggccaaggcgcccaaggatgtcaagatccagggggtctggtacgctcagctcgagtgattcgagtgtctaactgctaggtgtccgaccgccgtcatggatcttgggaaggtgtatgtataccatggaaaactttggagagcagaggaggaatcgtgtatgtaatgtacttgttaatgcaaattcgggctgtcgcttttttactcctttattttcagtgtgggtttcttctctttcttgtgttctcaagaactacatcccctgtgcaaaac

SEQ ID NO: 264155 - DNA, 604 bp, Zea mays
ctcgcgggtcgacgcaagcctctaggataaagggcaaaaggcaacaccgcccgcgacgaccacgatggcagcctcgctccaagtccaagccgcggccaccttgatgcaaccggccaagatcggcggccgggcgccgtccgcctcgctgccgtcgtcccgcccgtcgtcgcaactcgccagggcgttcggcgtcgacgccggcgccgccaggatcacgtgctccctccagtccgacgtcagggacgtcgccagcaagtgcgtcgacgccgccaagctcgccggcttcgcgctcgccacctcggcgctcctcgtctcgggcgcgagcgcggacggcacgcccaagaggctgacctacgacgagatccacagcaagacgtacctggaggtgaagggcacgggcacggcgtatcagtgcctgtccattgtatgttgattgtatgttttcccttttaggttgttttggtctaaattgaataaatatgtcttgtagctgctttatttattttttatattgtttttatcgccaagaacgccccgcccgagttccaaaagaccaagctcatgaaccggctcacgtacacgctggacgagatcgagggcccgc

SEQ ID NO: 264156 - DNA, 411 bp, Zea mays
cccacccggggccaaatttaccaagaagaacctccaaacgaaaaccgggaaaaaggccacctcttcaagcggcaccataacgttgaccgtcaccaagagcaacccggagacccgcgaggtcatcggcgtcttcgagagcgtgcagccgtccgacaccgacctcggggccaaggcgcccaaggatgtcaagatccacggggtctggtacgctcagctcgagtgattcgagtgtctaactgctacgtgtccgaccgccgtcatggatcttgggaaggtgtatgtataccatggaaaactttggagagcagaggaggaatcgtgtatgtaatgtacttgttaatgcaaattcgggctgtcgcttttttaaaaaaacgtccatcacggcaaggtcatcttcgtcccatgagaaaa

SEQ ID NO: 264157 - DNA, 352 bp, Zea mays
gcgtcaccaagagcaacccggagaccggctaggtcatcggcgtcttcgagagcgtgcaggcgtccgacaccgacctcggggccaaggcgcccaaggatgtcaagatccagggggtctggtacgctcagctcgagtgattcgagtgtctaactgctaggtgtccggcacgccgtcatggatcttgggaaggtgtatgtataccatggaaaactttggagagcagaggaggaatcgtgtatgtaatgttcttgttaatgcaaattcaggctgtcccctttttactccaaaaaaaatgctaacagatctgaaggtaaacaaattgaaggtgatatgaataatcttcaaaagagat

SEQ ID NO: 264158 - DNA, 886 bp, Zea mays
cggatcgcgtgggcggacgcgtgggcgcgcccccagcagcagcggattcccctcgagagatccggcccttggcgcggtcgccggagagagcggcatggggctctgggactcgctcctcaactggctccggagcttgtttttcaagcaagaaatggagctctccctcgttgggttgcagaatgctgggaagacgtcgctggtcaatgccgttgctacaggtggctacagtgaggacatgattccaacggtaggcttcaatatgcggaaagtcaccaagggaaatgtcacgattaagctttgggatcttggtgggcagcggagattccgcactatgtgggagcgctattgccgtggagtttctgctattctgtatgttgtggacgctgctgaccgagatagtgtcccaatcgcgaaaagtgagttgcatgatctgctgacgaaacagtctttggctgggattcccttgcttgtccttggcaacaaaattgacaagtcagaagcgctttcgaagcaggccttggttgatcaacttggactggaattgataaaggaccgggaggtttgttgctacatgatctcgtgtaaggattctgtgaacatagacgtcgtcatcgactggcttatcaagcactctagaacagcgaagtaggctttctgtgtgtttgtatcgcttgatgcacggtgttttatcttttgtgaatctgcgcttcccagaagcctggttccttggtccccatgttaaaagcggccaccttgtaatttatggtttctttggtgtcacagacgaactgcatggtatctagactagaaacatgtattccctttgtaaatcctttgaacctttgattattcttactgtgaatgccgtccagtgtttttcttctgc

SEQ ID NO: 264159 - DNA, 778 bp, Zea mays
aattcccggttcgaccgcactcgttcgcccacgcgttcggcgaggtgcgcctacagctcgatgaataacatgaaggctgatgccgggggtaggggtcttcatgtggcgatcaagtgcaagaacagcaacggcgagtacgagacaaaggccgtgagtgagatccaaagctccggagccttcagcgtcccactcgccgccgacctccacggcgccgactgccacgcgcagctccacagcgccgccaataacgcgccttgccctgggcaggagccgtccaggatcgcgcccatgtcaggcggcaccttcgtcgccgtgcctggcaagatgcactacccgtccgcggagtgcgcgtccgcgtttctctgctccccgatcaagaagcacttgttagatcacttccacaaggcacccctgccggtgccggagtaccacccggtgcctgaccacagcaagccgccggtgccggagtaccacccggtgcctgagcacagcaagccggcgccggagtaccaccctcccacgccggaataccaccctcccactccagtgtacgggcagccaaagccaactccgatctaccatcctcccgctgagcactgagttcgatcaacaacgaacgccggagctagaagaacggcaggcttctgttagttattaattcaggactgcacgtgttactagtgcgcctcatgcatggagaataaaatggtgtgaaatatagctgggagcttgtactttattagttatcgattgttgtttatctttaacttgcttaccg

SEQ ID NO: 264160 - DNA, 780 bp, Zea mays
cccacgccacaagctatagctagctatagcttgcagcaccatggcaccagaaaggatgctcctcggcgtctgtgccgtgctgatggtggtcggcgtcacgaacgcggcggagggccaggtggcgtcggtcgtcgtgggcctggcgaggtgcgccgacagcacgaggaagaacatgaaggctgaggccggtttcaagggtcttcaggtggcgatcaagtgcaagaacagcaacggcgagtacgagacaaaggccgtgagtgagatccaaagctccggagccttcagcgtcccactcgccgccgacctccacggcgccgactgccacgcgcagctccacagcgccgccaataacgcgccttgccctgggcaggagccgtccaggatcgcgcccatgtcaggcggcaccttcgtcgccgtgcctggcaagatgcactacccgtccgcggagtgcgcgttcgcgtttctctgctccccgatcaagaagcacttgttagatcacttccacaaggcaccccggctggtcctgtagtaccacccggtgcctgaccacagctacccgccggtgccggagtaccacccggtgcctgaactaagccagccggcgccggagtaccaccctcccactccagtgtgtgggcatccaaagccaactccgatctaccatccacacttatgagcactcgagcttcgtatcaacaacgaaccgccagagcttagaagaacggcaggcttctgttagttattaattcagtactgcacgtgttactagcgcgcctcatg

SEQ ID NO: 264161 - DNA, 1862 bp, Zea mays
attggccacgcctttaaagaaagacaagcaagaaagcaaaggtcctggtcacggctaaatgtttcggagttgtctggtcccattctaaatgaaaataaccctgatgctagatgcctctgctggatgttgcttgtacttgttccacccggtatggaatcccaggcgcgacagttttgtctcaaaatggttacctagaaagctcatgggttatggaaccggagatattggattggttgtttcttcagcaggcctatcaatttggacagagtggatcagttttccaaatgcatgttgtttgtctgttgttagggccagcgatcaacaagttattgataatgatattgctaacaatacaagctggatagtatttgtagtgtctgaaagcatttcatgggaaatgcagaaggaacggtttaacagtcttttagcctgcataccagatgaatccaatcttcctcttctgattttcagtggcgatacatataacgaaggatacgagtatgcgtcaaagtacatcatcaacaggcttggcctcaatggtcttaacagaggaaagatcggttcgtctttggttatttttcttgttgaaaactacacagaagaccatgccaatggtttctttgatgatgacaaactgcgtgagggcctgaagtggctggtaagtagtttgccagtgcagcctgatgtcactcttgtgaagacccatgaattgcttctggaatacttgaatccacaacttgagctgcttaacacccatgttgcacctggagctggtcctggcgattgcatttcagtattcaacaatgctgtcaatcaacttgcagaagagattttggctgcagcaaacgcaaactgtagccaatggccagctcccgagattgatcttctggagagaacaagcaatgagaggatatatgcagaaatgttcttgcctagcattggatggtcttcgccatcaaggatccagccactgcttgcagccattaatagctgcaagattccagagttcagttacgatctatcttggctaaaccatggttctcacatgggcaagcagatccaggatcagaagaagttacttgaggagtgcttggcgagatacttgaccgaatcagcccggctcttagatgaaagccaggtggtcaccgaagtgaatgttatggtgcagaattgtgttggccttgaactccaggattcgtcttactatctcgctcccagatgggtggcgatcttccgtcgtatttacaactggaggctagcaaagctctctaccggaaagttgtcagaagcttatgttctgactcagcacctgtatcaggctcctacagcagctggctcaaatggtaccacacaagggcttactgctaacaccgccagcagcgatgctgtggatcacatcatgatgcctgctgtttcaaccggcatcacactagacgaaatcattgagatcagttgtgacctcgatgctgttgatgcgcagaccgtaactctggcaccacgactgcctgtgcatgttcatgaagaacctcaggcacttgctgacaacaacggcgtgcatggagttgatgaaatgtacataccaagaagagtagagttgggagaggtgatgcccatcgagacagacgacaagctttcccggctaagagtagagttgggcgaggtgatgcccatcgagacggacgacaagctttcccggctactggagcagtgcaccaagctgcaggacaggatcgatgagacactttccatatacttttgagacccgtagtaaggctggaagggttttgttacaccatccttccacatttgttgtaacttgtaaaactagattttgtggaagtgaaaactaacactgccaagtt

SEQ ID NO: 264162 - DNA, 627 bp, Zea mays
ctgccgcctcgctcgcctagggagacaacctctactagcttcctcccctaccgcctaccgcctgccgcccaatcagccatggcggatcccactgagagggaccagttcacggacgacgaggaggaagaagactacctggaggacggcgagcaaggccttggaagcgaggacgaggaaggaggaggagcggggggcaagaggaagcggctgggaaataccctgggtgggatcggcaagcgtggggtgtgctacctcagccgcgtcccgccgcacatgaacccgtcgcacatccgccagatgctttccaagtacggcgaggtgctcaggatttacctcgtgcccgaaggtcaaggtcatcgcaagcatactagtgttaaagcgaaggcttactcggaagggtggattgaatttgcaaagaagagtgttgccaagagagtggctaatctgcttaatggtgaacaaataggcggtaagaagagatctccattttattatgacatttggaacattaaatacctcaggaagtttaaatgggatgatctggttggtgaaatggctgagaaaactcatatcagagagcagaaattaaccttggagatagcagcagcaaagaaacaacgcgatcac

SEQ ID NO: 264163 - DNA, 573 bp, Zea mays
cggacgcgtgggggcggttcctgtgccctggcccccccgggctcgacgacccctctctccaacccgttctcggaggccgccggcgggagcgcggcgcgcgtcgccgccgagcgcgtgctcgtctgcgtcgccgagaaggacgaccctcagggacaggggcgtctggtactacgagagcctcaaggccagcggctaccctggcgaggtggagctgctcgagtccatgggcgagggccacgtcttctactgcatgaacccgcgctgcgacagggcgcgggagatggaggagcgcgtcctcggcttcctgcgcaagtgagcgagcgacggagcgcgcgccttgctacgcgattgagatggaataatttcaccgtttccagatgtggaggcgtttgagcatgaggccatgagggtcttatttgtttgcttaagatcaattgattgaagtttcgaaatctaaaaaaaaaaaagggtcatgtgtctaaatttataaagacatgcgtgcgttcatacgaaaaaaaaaaaaaaaaagggcggtcgcgagcgtccgcccgcgatctagacggacgaatggga

SEQ ID NO: 264164 - DNA, 983 bp, Zea mays
ccgggcgctttcatagtcagccatggtaatggtatcgcatcgtagccactaaagtaagggagggccccaggaaagaagcgctggttcgatgaagctgcataaataaagccagcacgcaaaccagcagcgttcagaggaaacccatttacgtatatgcccttgtcccggttcctttccccatccccaactccattatttgcttgatccttgagaagagagaggaagacgagagctagaagcgaaggagaaaagcagttcttcagctaggcaggagggcacaggaaggaggagatggcgtcaaagaggattcagaaggagctcaaggatctgcagaaggaccctcccacctcgtgcagtgcaggtcctgttggtgaagacatgttccactggcaggcaacaataatgggtccatctgatagcccatattctggtggagttttcctagttacaatccattttcctcctgattatcctttcaaaccaccaaaggtggcatttcgcactaaggtgttccatccaaacatcaacagcaacgggagcatttgcctcgacatcttgaaggaccagtggagtccggcactaaccatctccaaggtgctgctgtccatctgttccctgctgactgatccgaaccccgacgaccctttggtccccgagatagctcacatgtacaagacggaccggcacaagtacgagaacaccgcgaggacctggacccagaggtatgccatgtagtattttctctacctggcctttggggtcgctgctgcgttgtgttgccgggacctggacgtgcctccatgtattcgttctatccttcctgtataatgatgaaccgaattgggtttgcagtacagtgccgcgtgtggtgctgaatgctgctgtattgtgtcacttggaagctgtaattctcagtgtcaaaaaaaactggtacttggaaccaaaaaaaatcgaaaacacggacgcgtgggcggacgcgtggg

SEQ ID NO: 264165 - DNA, 474 bp, Zea mays
  unsure (1)..(474): unsure at all n locations
aacnaacgggagcatctgccttgacatcctgaaggaccagtggagcccggcgctaaccatctccaaggtgctgctgtccatctgctccctgctgaccgatccgaaccccgacgatcctctggtccccgagatagcgcacatgtacaagacggaccggaacaagtacgagaacaccgcgaggacctggacccagaggtacgccatgtagggagggggtaccctacctggccctttgggggtccgccggaattgccgctgctgcgttgtgttcctggacctggacctggactggagactggacgtgtctccgtgtattcgatcctgtgctgtataatgatgcatcagattgggtttgcagtgcagtgcgccgtgtggtgctgaatgctgtattgtgccgcttggaggctgtaattctgaatgccaaaaaactggtgattggaaccagtttgcgttagatgctgctgcagacgaggc

SEQ ID NO: 264166 - DNA, 641 bp, Zea mays
caatatgcaggtggcattccgcaccaaggtgttccatccaaacatcaacagcaacgggagcggctgccttgacatcctgaaggaccagtggagcccggcgctaaccatctccaaggttggtgactgctctcacggatagcatcatcttctccacggttgtttgtaggtttgggagctacctacctaccagcaacctgagcctgctcggtttcaggtgctgctgtccatctgctccctgctgaccgatccgaaccccgacgatcctctggtccccgagatagcgcacatgtacaagacggaccggcacaagtacgagaacaccgcgaggacctggacccagaggtacgccatgtagggaggggtattttccctacctggcctttggggtcgctgctgccgggacctggacgtgcctccatgtattcgttctatccttcctgtataatgatgaaccgaattgggtttgcagtacagtgccgcgtgtggtgctgaatgcagaatgctgctgtattgtgtcacttggaagctgtaattctcagtgtcaaaaaaaactggtgcttggaaccattttgcgtcggatggcgctgcaggccagtcgatgcttgggtccttcttcccttcaccagtcatcatgttggaag

SEQ ID NO: 264167 - DNA, 447 bp, Zea mays
accatttacatatatgcccttgccccggttcctttccccggccccaactccattatttgcttgatccttgacgagcgggagagagagagagaggaagacgagaggcagcgaaggaaacagtagttcttcagttaggcaggagggcacaggaggaggaagatggcgtcgaagaggatccagaaggagctcaaggatcttcagaaggaccctcccacctcgtgcagtgcaggtcctgttggtgaagatatattccactggcaggcaacaataatgggtccatctgatagcccatattctggtggagttttcctagttacaatccattttcctcctgattatcctttcagacaccagagtgcatttgtactaagtgtccatcgaacatcacagcacgggacattgctcgcatcttgagacagtgagtcgcactacatctcaggtgtgtgt

SEQ ID NO: 264168 - DNA, 730 bp, Zea mays
gacagtatcatcagtggactgaacaacctttcaagcaatgtcagcgaagttctcaagctagatgctggaatgaaggagctcgcctcttcgctgatcgactcagagtcgctcctcgtgttcggaaggggttacaactacgccaccgcgctggagggcgccctgaaggtcaaggaggtggcgctgatgcacagcgagggcatgctcgctggcgagatgaagcacgggccgctggccctcgtggacgagaacctccccatcattgtcattgcgacccgcgacgcgtgcttcagcaagcagcagtcggtgatccaacagctcctctcgcgcagggggcgcctgatagtgatgtgctctaggggagatgccgcggctgtgtgccctagcggtgggtcgtgcagagtcattgaagttccacaggttgcagactgtctccagccagtgatcaacataattccattacagttgctcgcgtaccatctgactgttctccggggattcgacgtggaccaaccaaggaatctggcgaagagcgtgaccacgcagtagggagaggtagatgagatgtttgtattgtagttaattgtccttgctcttgaggtggctagtacgtagcataagtattatggtgcgttaaacttgttgttttgtgaacgaaatgcacccctcttttttttaattatggtaaattggtgtcaataacaacccggtatccctgggaattctcctgtcc

SEQ ID NO: 264169 - DNA, 608 bp, Zea mays
cggacgcgtgggccgccgcggaacacaacaccgcaccacactacccagcggaatccgcccacccgcacccggagcagaggagatatgtcgcaggggaagggaggagcgtcgaggaaggaggaggtggtcaccagggagtacaccatcaacctccacaagcgcctccacggctgcacattcaagaagaaggcacccaacgccatcaaggagatcaggaagtttgcgcagaaggccatgggcaccacggacattaggatcgatgtgaagctcaacaagcacatctggagcagcgggatcaggagcgtgccgcggagggttcgtgtgaggatcgcccgcaagaggaacgacgaggaggatgccaaggaggagctctactcccttgtcaccgtcgcggagatccccgccgagggcttgaaagggctggggaccaaggtcgttgacgaaaccgattaagctgtcgcgttatctacatctttagagagttcctagtttgtatttgcaacagcaaaaccttttgtatccaaggaagtttttgtattcacaaagttgtctatttctgccacagaattgcatggctagttttcttttcatctctgccacatcctttt

SEQ ID NO: 264170 - DNA, 635 bp, Zea mays
  unsure (1)..(635): unsure at all n locations
cggacgcgtgggcggacgcgtgggcggacgcgtgggcggacgcgtgggcggacgcgtgggcggagcagaggagatatgtcgcaggggaagggaggagcgtcgaggaaggaggaggtggtcaccagggagtacaccatcaacctccacaagcgcctccacggctgcacattcaagaagaaggcacccaacgccatcaaggagatcaggaagtttgcgcagaaggccttggccaccacggccattaggattgatgtgaagctcaacaagcacatctggagcagcgggatcaggagcgtgccgcggagggttcgtgtgaggatcgcccgcaagaggaacgacgaggaggatgccaaggaggagctctactcccttgtcaccgtcgcggagatccccgccgagggcttgaaagggctggggaccaaggtcgttgacgaaaccgattaagctgtcgcgttatctacatctttagagagttcctagtttgtatttgcaacagcaaaaccttttgtattcacaaagttgtctatttccgcaacagaattgcatggctagttttcttttcattgctgctgnccaaaaacacacatggacttttagggatatgcttgtcaccccatttggttggatgaaccgag

SEQ ID NO: 264171 - DNA, 360 bp, Zea mays
tcgaggatgccaaggaggagctctactcccttgtcaccgtcgcggagatccccgccgagggcttgaaggggctggggaccaaggtcgttgacgataccgattaagctgtcgcgttatctacctctttagagagttcctagtttgtatttgcaacagcaaaaccttttgtattcacaaagttgtctatttccgcaacagaattgcatggctagttttcttttcattgctgctgcatccttttcttcattatcgccccctgggaagtcgctgctcatgggacaagtttggaaatctccacgtgtggtgtttaagttacccagttgtgttccttggtaatggaaaaagagaaaaaataaggaa

SEQ ID NO: 264172 - DNA, 619 bp, Zea mays
cccacgcgtccggaagcattggcacgcaaaccatgtgatcctttgatagtggctacttttgcactagccttttacctgggaggtgatatgtctttggcagtggatatcggaaaatcaatcaaccgacaacatgatactggctttcgggagctcttagaacccaaagtctggactgataagcatttggcaggtgaagtacaaagctttgctgcattgatgaagcaggcattaactgaaatgactgatgagtatcatgtcgcaaatgctatggcaaaaatccctcaagcaccttcctcagatcttcgtccgataccactacaagcctacctgaaggttctcaaatttatcgagtgtgttcaatatggcaaaaaggagcgtggccatgaaccaaaacgcgatgggatgatcaattatcataacctgtctaatggtacacatgcagaaataagaaacctctttacactggtggtttttgtcacactgtaccctacagacacggaggatgaaaatgactgcagttcttagagagacatcatgattgggatgaattcaatactttgccagacatcaataaatactccatttgtcccaaaaaaaaaaaaaaaaaaagggcggccgc

SEQ ID NO: 264173 - DNA, 837 bp, Zea mays
gacacacacctccgttcctccctcacgccggcggcctgtatccctctccccatggctgctggactgggagcgcgcccctccgccaccttcgaggccggaaggttccggcctctcgctgcccctctccgccccgtccgctccggaaaattcgtagtgcctaagcgatgcttcactgtgtcaagtaggcttgcatgggtggaagatgagcttatggagataaaaaagtcacaagagcaaagttcagtaaaatcaaagaaaagaccacctttgaggcgtggaaaggtctccccacaacttcctgtaccagggcacattccaagaccatcttatgttggtgcgaaaggattgcctgaactatgcaagggccaattacatgatgctcaaggaattactggaatgagagctgcttgcaaacttgctgcccgtgttcttgacttcgctgggactttagttaagccatccattactacaaatgaaattgacgcagcagtccataatatgatcattgaggctggtgcttatccttctccacttggctatcatggatttcctaagagtatatgtacatcagtaaatgagtgtgtctgtcatggggtacctgattcaactcagctgcagaatggggatattataaatattgatgtaaatgtgttcctgaatggataccatgggggtacctccagaacatttgcatgtggacaagttgatgattctatcaaacattttctcaatgcagctgaagaatgcttggagaaaggcatttctatctgcagggatggtgtgaactacagaaagattggcaagaaaataagcaagcttgcctatttttatggctat

SEQ ID NO: 264174 - DNA, 774 bp, Zea mays
cggacgcgtgggcgaccgcatccgtgccgtcgtcgccgagattgagtccgcctcccgcgtcgccaccgccgcgctcctcctagtccaccagcccgtccccctggcagatgtgcttgtgaaagccaaggcgcaggtagaggtgatcaaggggttgtccccccccctggcggaagtcctcaaggaatgccctgggcagtactacaggtaccatgctgattggaggactgagacacatatggtagtgtcgatgcttgcattcatgcactggctggagacaggtggcctactcatgcatgctgaagcccaggagaagctagggttgtgctctggggagtttggccttgatgttgaggactacctgacaggactgggctgcatgtccaatgaatttcctagatttgtagtaaatcgcgtcactgctggcgactatgactgtcctaaaagggttttgggcttcttgcccgatcttcatgcttcgtttaggatgctgaatctgcgcaatgacttcttgcgtaagaaatttgatgggatgaagtatgatttgaggagggtggaagaggtctactatgatgtgaagatccgtggacttgtacctgcgtagttgaaacaagagacttagaacccttggtaatgttagattgttaacataccgtggtttgggctttttgtcatccataacgtgttcatctagctaaaatgtgaaaaatattctgttggagcgtatgtgttatggactgaacttgggggcactcgaatgactttgctcatttcttt

SEQ ID NO: 264175 - DNA, 392 bp, Zea mays
cccacgcgtccgcttttggaggcataaatctgaggtgcagacaattagacagtttccggggacacaagtatttgctgctaagctatccaatgaactagctcagtctcagtatatatgctttagacctgagggtaatggacaggagaacaggagtggggtaaatgcacaagcagagagacaggatctgtagaggtaggcgagagatactccggtgtactctgtacatggttctaaaaaattgggcagaaactggattgtccagaccgttcatatacgttgtactagccagttgttgtactagccagttgcgctacggttgtttgttatatattatactaggtgtgtgcccgtgcgttgcaacggaaacatataatatcataataacttatatt

SEQ ID NO: 264176 - DNA, 592 bp, Zea mays
cggatgcggaggaggagcccgcggtaccggagcccgtcgaggcgcagctcgccgccgcgggggccgggaaggacgccgacatcttcgctgttgtcatgattggttcaagacagtacatagtgatgccgggcaggtatatatacacacagagactgaaaggtgccaatgtcaatgatcagatcatattaaacaaggtgctactggtgtcaactagagaaaaagcttacattgggatgccagtggtgaccaatgctgctgttcacgcagtggttgaagaacagggacgggatgataaagttatagtgttcaagtacaagaagaagaagaagtaccagaggaaacttggtcacagacagccaaacacaaggttaagaatcacaggcataagtggatacgaagagtaccctgctgacccaatacttgaccctgctgcagctttaaattaaactgtaagttatgtagttacaaaacggctggtagtagagtagcatgctagttttcttgtttctttctttacttactgctctgtcttgaaaaaggatcacttttcatcacaattttccttgtttttgtgtgttccaaatgctgccag

SEQ ID NO: 264177 - DNA, 1235 bp, Zea mays
cgctggtgataaagcgggggctgggcctcgacgccgctgctctgctctgctctcctcgcatatagggtttatcttctcccctcctctgcccccatctcgcttctcgcacacggcagccggattccgaagcgcaccccctcggccccagccaaaagcatcgcagtttctaatcgtttggagagcacacaagaatgtcgttcgtgcagctctctggtgctggagtcgctgcagtggccttcacgaacaagagcctagtctctcggcacgcagcgctacgggtctgctcgtcgaggcgctcgatccgtagcctggtcgttaaggctgcaactgtcgtcaccccaaagtacacttcactgaagcctctgggagatagggtgcttgtgaagcttggtgccgcagaggagaagacagttggtggcattttgcttccatctactgcccagactaaaccacaaggaggtgaggttgttgctgttggagcaggaaggaccatcggggacaagaaaatagctgtggatatagagactggagcacaagtagtatactcaaagtatgctgggactgaggttgaattcaatgactcaaagcatcttattctcaaagaagacgatatcattggtattcttgagacagatgatgtgaaggacatgaagcctctcaatgaccgtgttctcatcaaggttgcagaagccgaagacaaaactcctgggggccttatcctcactgaaacaactaaagagaagccgtccataggaacggttgtagctgttggcccgggtcctctggacgaggaaggcaagagacagccactgtcagtgtcggcgggcagcacagtgctgtactccaagtatgcagggagtgagttcaagggcgcggatggcacggcctacattgtgttgagagcgtcggatgtgatggctgtcctgtcttgagcatttcgtttccggctcgttaatgtagtttgcagccaatagttgtcatgtggtatgaaacgatcgctttgtggtggtcatcacaccatgctggtgatcatcacaacatatgctgatactgttccggacaatcggctagaatttgttgtgtggcaggtataaacgtcagcatctgatagtgagagccctcggttacttctacagatggtatttaaggggtgatagtcacccctctttgctggataatttcattggattctggactcctgttttgttacatccgttgggatttgttttctcccc

SEQ ID NO: 264178 - DNA, 539 bp, Zea mays
ccgcacgcacaaaggggcaaagggggcctttaaaaaggccaaaccccgcttcccgcacacggcagacggaaaccgaagcgcacccccccggccccagccaaaagcagcgcaggacctaaacgtccggagagcacacaagaatgccgttcgtgcagctctctggtgctggagtcgctgcagtggccttcacgaacaagagcctagtctctcggcacgcagcgctacgggtctgctcgtcgaggcgctcgatccgtagcctggtcgttaaggcggcaactgtcgccaccccaaagtacacttcactgaagcccctgggagacagggtgcttgtgaagcttggtgccgcagaggagaagacagttggtggcattttgcttccatctactgcccagactaaaccacaaggaggtgaggttgttgctgttggagcaggaaggaccatcggggacaagaaaatagctgtggatatagaggttgcagaagccgaagacaaaactcctgggggccttatcctcactgaaacatctaaagagaagccg

SEQ ID NO: 264179 - DNA, 1214 bp, Zea mays
cccacgcgtccgcgtgtgcgcggcgccactatgcgtgttgcctcttcccctggtgaagcggggaattctcgctccagcgtcgagtccaacctccggagctctaacgctgctcatgcgcggcgatctagtgctggcgtcacaagcaacggtgttcacaagattctgttccctgatggtcatcaaagtgacgatgaacctccaagtggggacatgcggtatggtacaggacgtttctacaaggagaatgggagtatagaagggagattggggaactgtgactccgactccaaccatcatacctttgatgaagcgagcgtgggcaagtttgagaatggagggactcattcaggtttggatctgtatggtgagtcgatggcgttacttcagtcggcacaagaagcgcttgagaatgagatccaaaagtttgtggaaatcaggaaagaaactgacgaagattccacagctcaccaaagtgaaatcgaatggagcagctcacctgtagaagagctaaatgagaagataaagatgctcgagtggaagctggaagaggccaccatgctcatcaaggagcgagattcaaaaatacttgaactagatgcactcagccatgtacaaccacaggataccgtagcatgtaacgacgatccgctgtccctacagtctgatgtagaccggctgttcctggagaagatggaagcagagattcagtgctttatccttacaagagcttctcaggactggaaactcctgacaatggatcaatttgctcttaacgaggcacagaaatcccttctgtcggatcacaaatccctagaaactaaactgaggcacgccgagaacagggcgatgatgctggaggagatggtggataaactagagtcgcaatgcaaggcgctgtctgagatttcagaagttctgaagctgcaggccagagctagcagagcctccttgttctgctcggtccagtttatactgctatgcatagccatcgggaccatcctcgttcgcttcctgccgccttctccggagattgtacctacttgaggttagagaattaggccaatcagcccagcctttgattaggcattgttgcaatattgttcactgttacttgttaggcatcaatcgccttacaaattttcgtctttgtaccatcaactcgattttgctagtaacttcttatgaatatgaatttactgtacttctggcttttc

SEQ ID NO: 264180 - DNA, 483 bp, Zea mays
accggacttgaatacccgggccagaccgacgcgtcagatttgctcttaacgaggcacagaaatcccttctggcggatcacaaatccctagaagctaggctgaggcacgccgagaacagggcgatgatgctggaggagatggtggataaactagagtcgcaatgcaaggcgctgtctgagacttcagaagttctgaagctgcaggccggagctagcagggcctctttgttctgctcgatccagtttgtgctgctgtgcatagccattgggaccctcctcgttcgcttcctgtcctcttctccggagattgtacctacttgaggttagagaattatgccagtcagcctttatgtaggcgttgttgaacggttggttactggaacttattagggcatcaatcgccttacagattttcggtttttgtaccatcaactcgattttgctagtaatttctttatgaatacgagtttactgcacttctggg

SEQ ID NO: 264181 - DNA, 602 bp, Zea mays
gttcctcgagatacagaagctgcgggagagcaagaaggactacgacgtgcccaccgccatctcgttgatgaagcagatgtccagtgccaagtttgttgagtcagcggaggcgcacttccgcatgaacctcgaccccaagtacaatgaccagcagctccgggccacggtgaatttgcccaagggaacaggccagtcggtgaagattgcggttctcacacaaggtgagaagatagatgaagctagagctgccggagctgatatcgtaggtggagaagatttgattgaacaaataaaaggaggatttatggagtttgacaaattgattgcatcacctgatatgatgcctaaggttgcgggcttaggtaagattctaggaccaagaggactgatgcctaaccccaaagctggcactgtttcttcaaatattactcaggctatagaagagttcaagaaagggaaggttgaatacagggttgataaatcaggaattgttcatattccatttggcaaggttgactttccagaggaagatctcattgcaaacttcatgtctggtggtcgctctgttgagaggaacaagccatctggtgctaaggggatat

SEQ ID NO: 264182 - DNA, 766 bp, Zea mays
ttgcttatcgcgtccgagcagagcgaggtgggagatggcagctctgggttttgctgacagaggtccagctagcttgatgagaacctcacaggctgctatggcttcacactgctgaatcttactcggattcgagtctgtgctcctccttttgtttttcacagtatgcatgagctgttgttatcaaacaagcatgggatctggcgtggcgggcggatggatgccggtcagctgatcgagctggtgtcagtcctttggccagcctgcatccagtgcgtcaaaagcctggccgctggccggccggcggctgctgctgctcgtgcctcgtgctcatcaggcaggcagccatggtcccctgcctctcaggcaaaggctggtcgcggataggcaaatatcccccagattcttgtacctgatgcacgtggagctgggtggcatggcatcgcagagccgactccacctccatggggttgctgcttgcttgcttgcttcttcccacagcgttcttgaatactgggaagcacgataggacgctggtgctctggactcgcagaggcgcatttgctatccacggccacagagccagccccagggggggcacacagactgggcatgaagaagaggataacaacagataactgaccagcattcatctcacatttgttaccccgtgactctttatcctaaaatgtaagacctttattaaagtccattgtaaaaaggacagcagtttaaataaatgccccatgcttgacaggtcgatgccccg

SEQ ID NO: 264183 - DNA, 917 bp, Zea mays
aggaaaagccggccggctgccggaaccgggcctccattacagcgtcgacccatgcgttcgtgttgctacagaagaagcagcatatttgacagagtatgctcgacatgtgcatggactagtgagaaaggatcagctacgggcttccaaagctatgcacgacaggttgattatggcgaatgtgtcagagtactcaacaaccccaacataacagtacattgcactacagaagccatggatgttgttagcactgactaagggcagatgtctggcgttcatctgaagagaagagatacaggagaagaatcagttcttactgtgaaaggtttattttatggcataggacatactccaaacagtcagctgttgcagggccaaatcgaacttgatagtgctggctatattttagttaaagagggctcagccaaaacttcagttgatggtgtattcgctgctggtgatgttcaggatcatgaatggagacaagctattactgcagctggatctggatgcatagctgctttgtcagttgaaagatacttagttgccaatgatcttcttgtcgaatttcaccagcctgttcaagaagaaacaaagaaggatattacagataaagatgttcaaatgggctttgacatttctcacagaaaacacaagggacagtatgcactccgcaaactgtaccatgagagtccacgactcatttgtgttctatacacttctcccacatgtggtccttgcagaaccttaaaaccaattttgagcaaggccatggccgagtacggccagttttgttcatcttgttgaaattgacatcgaggaggatcctgaaatagcagaagctgcaggcatcatgggaacaccttgtgttcaattttttaagaacaaagaaatgctcaggactgtatcgggtgtgaaaa

SEQ ID NO: 264184 - DNA, 1180 bp, Zea mays
gaacatggagatcttttgctctcacgcaagacgcaacaaaaggtttggatagaacactctgcttccccgtccttcggtctagcccgagtggacgtaggaagggacgaggggtcttgacgccggcgagccatggcgggggctctcctctcctctccgcacactctcccgagccccacatctcagtccccgttccgccccaggagcaggggaccactccacgctggggcagcgcgtgttctgccaccgaggaggagggcctttgtgctcgcttcgtgctctcgcgagcctgccgctaggaaccgcgggttggaggtggagaggaggcgccttctcatgtccgggctcgtgtcttctttcgcaatcatgctccccatttcagaagcatatgctgtcatggagactgatgaagacgtgaagatgaacacacaaattgatgagatcaatgcatactcttttctttacccggtggaactgccagggaagaaatttaccttcaaatgggtagagtccagaaaaccagagcgatattcctctgcagcgccactatcgcctgatgcaaggcaacgtatcgtatcagagcgagttgacatgatacacaatgttgtcatctcggtctcgattgggccaccgaattcacgttttttgccttcaaaagacaagagctcgtgggatccaaaagatgttgctgattgcattttatctgatagatctaccatgaaggtgacaactggccagcgcatgacagagagttctgtccttgacgcacacgttgcagaggttgatggagaaccatactggtattatgagtatcttgttcggacatcaccaacatgatctgcaccaggacctgatttgtttcggcacaatgtagcctgcactgctgagcgtgatgggtacctgtactcactgaatgcttccactcttagcgaacagtgggaatctatggggccctttctgcaacagactgttgcatcatttcgccttctcccacctacagaaaactatgttcctccctacaaggatccttggagattttggtgaatggagatccttttttgtagttaccatttttttcctcttcagattcaggttttagaccatatgtttttcacaccatatgtttagtgagtgttgccctttcaacttgacagatacaattcagagacccattttggttaaa

SEQ ID NO: 264185 - DNA, 451 bp, Zea mays
cggaattcccgggtcgaccgacgcgtccgacaaaatctgcaccagaaccaaatttggttcggcacaatgtagcctgcactgctgagcgtgatgggtacctgtactcactgaatgcttccactcttagcaaacagtgggaatctatggggccctttctacaaaagaccgtggcatcctttcgccttctccccggtacagaaaactatgttcctccctacaaggatccttggagattttggtgaatggagattcttcttgtagtcatcatttctatcccttcagatgactttatagcttcaggttttagaccatatttttcacgtcagatgtttactgagtgcctgtcctttcagcttgacagataaaattcagagacccagtttggtatcagtttcgcccatcgtgttcgttctgattaataacagtcccagactaaaggtgtgtttgaaaa

SEQ ID NO: 264186 - DNA, 873 bp, Zea mays
gttttggcacaatgtagcctgcactgctgagcgtgatgggtacctgtactcactgaatgcttccactcttagcaaacagtgggaatctatggggccctttctacaaaagccagccggcgcccgccatgctatcctctgagccgccacaggcggccctcacgtccaagccggcgacgccgcccacagccgtggctatcttcaagctctcccgcgccgagctcgtccgcctccgttcgcacgtccccgcgcgccacggcgcgccgcggttcagcacgtacgctgtgctggccgcgcacgtgtggcggtgcgcgtccctgagcccgcgcactgccggccgaccagcccaccaagctgtactgcgccacggacgggcggcagcggctgcagccgccgcttccggagggctacttcggcaacgtgatcttcacggcgacgccgctggccaacgccggcacggtgacggccggggtggcagagggcgcgtccgtgatccaggccgcgttggaccggatggacgacgggtactgccggtcagcgctggactacctggagctgcagccggacctgtcggcgctggtccgcggggcgcacacgttccggtgccccaacctggggctcaccagctgggtgcgcctgcccatccacgacgcggacttcgggtgggggcggcccgtgttcatgggccccggcggcatcgcctacgaggggctcgcgttcgtgctccccagcgccaaccgcgacggcagcctgtccgtggccatctcgctgcaggcggagcacatggagaagttccggaagctcatctacgacttctgatctccaactcctccccacaagtcatcagtaccagtacgcgcaacacaaagaagcaag

SEQ ID NO: 264187 - DNA, 964 bp, Zea mays
catcaactcgtgggcggacatctgccgcggcgtcccgatcgccgtcatgcccttcattgaccgctcgctcctccgcgcgcgcgatcagccgaccccggcctacccgcacatcgagtaccagccggcgcccgccatgctatctgagccgccacaggcggccctcacgtccaagccggcgacgccgcccacagccgtggctatcttcaagctctcccgcgccgagctcgtccgcactcctgttcagcagcgtcccacgcgcgcagagggcgcccgccgcgctctcagcacgtacgctgtagctgaagagcgccgcacgtgtggcggtgcgcgttcctggtgcgcggtcttctcgtctctcagtctactttttttgtttgtgcttttgtcttgttttattttgtttttttattcctattctctttgtctttttctttttttttttttttttttttctcctttttttttttttttatttctcatttcttttatttttttttttatattattttttttttttcttctttttatttttatttttcattttttattttattatctttctttttattattttgtattttttttttttctttattttttctttttcagttattattcttgtttttttctcttcttattttttccctctttttatttttcttttttttatttctttttttttttttctttttatttttttttcttttttctttttttattacttctttttcttttttttttttttattctatttttttttttcttatttcttcttttcttttctttttttttcttttattctgtttttttcattttcttttattctcttatttttttcttttttttcactttcttttcacatttttcaatttttcttttctctttttttatttttctttctttttctttatttttttttcttttttttttatttcttttcattttttttttttatctttatttt

SEQ ID NO: 264188 - DNA, 811 bp, Zea mays
cccacgcgtccgcccacgcgtccgcccacgcgtccgcccacgcgtccgcccccatgggcctcctgtcgccctcccgctcggctcggcgaacgcgatctgttccccaacctccgcagccgctccaccgtcctccactccggctgccgaatcgacccgccccgatccagatcaggagctgagggatggacgcgaacaggcgccagagtgggatccagcagttgctggctgcggagcaggaggctcagcaaattgtgaatgccgctagagctgccaagtcagcgaggctcaggcaagcaaaagaggaggctgagcgggaaatagccgaataccgtgcccagatggaggctgagtttcagaggaaggttgcagagagcagcggcgactccggtgcaaacgtcaagcgtctcgaggaagaaacggcggcgaagatcgagcaactcacccagcaggccgcaagcatctccccggatgtcattcagatgcttctgcggcatgtcaccaccgtcaagaactgaggaatgctgttcccgaactatgctcgcagacttgtaccgtcgatctatttatttttgtcaagagtgagagtggtgaggaataatatgcccgcttgtatccataattcctgttcttaactacggaataagccgccgcagctttagcggcaaacgtgattagtactgtcagaacctaccattgttatttggtacaattggtaaataatattgttttaaactggattttcgaacaaaaaaaaaaaaataataaaaaaaaaaaaaataaaaaattataaaaataaaaaaaaattagtttt

SEQ ID NO: 264189 - DNA, 629 bp, Zea mays
cttgcctccagtctccagagaacgcgatttgttctgttgttcggtccccaatcttcgcctccgctccgcccgccccgacccagatcaggagctgagagatggacgccaacaggcgccaaggtgggattcagcagttgctggctgcggagcaggaggctcagcaaattgtgaatgcggctagagctgaggaggcagagagggaaatagccgaataccgtgcccagatggaggctgagttccagaggaaggtcgcagagagcagtggtgactctggtgcgaacgtcaagcgtctcgaggaagagacaacggcgaaaatcgaacagctcaaccagcaggctgcaagcatctccccagatgtcattcagatgcttctgaggcatgtcaccaccgtgaagaactgagaagtgctgctcccaaactatgctcatcggtctatttatttttgtcagagcaggtgaggaataataatatggcccttgtaccagtaattctttttttaactacggaataagccgcagcagctttagcggcaaccgtgactgttactaccagaacttgccattatttggtataatcggcaaattaaataatattgttttatattgggttataaaaaccaaatttttttt

SEQ ID NO: 264190 - DNA, 406 bp, Zea mays
cattgcttgcctccagtctccagagaacgcgatttgttctgttgttcggtccccaatcttcgcctccgctccgcccgccccgacccagatcaggagctgagagatggacgccaacaggcgccaaggtgggattcagcagttgctggctgcggagcaggaggctcagcaaattgtgaatgcggctagagctgctaagtcagcaaggcttaggcaagcgaaagaggaggcagagagggaaatagccgaataccgtgcccagatggaggctgagttccagaggaaggtcgcagagagcagtggtgactctggtgcgaacgtcaagcgtctcgaggaagagacaacggcgaaaatcgaacagctcaaccagcaggctgcaagcatctccccagatgtcattcagatgctt

SEQ ID NO: 264191 - DNA, 450 bp, Zea mays
ctaaaattaaaaaaatcgataggtggagccacgttgtatatgcggatctccattcaccaatcgccttcctgtcgccctcccgctcggctcggcgaacgcgatctgttccccaacctccgcagccgctccaccgtcctccactccggctgccgaatcgacccgccccgatccagatcaggagctgagggatggacgcgaacaggcgccagagtgggatccagcagttgctggctgcggacaggagcgctcagcaaattgtgaatgccgctagagctggtagtgttttctcatcttttttgttccaagccattgcagatctagcgtacgttagacagcaacaaccttgtgaatgagttcgttccattcacttagacatctttcactgatcctcaattaatgtttgtagagcgagattgaaggtaatgcactgctacgtttctgaactgtagc

SEQ ID NO: 264192 - DNA, 773 bp, Zea mays
aggagcagctactcggcggcgtggacttgaactccgtgggagagacgctggagccggacgtgaagataatgagcctgtccatcctgtcgcccgggcggcccgacatcgtgctgccgctgccggtggagcccaacggcaagggcgtgtggttcaccctcaaggaaggctccccgtaccggctcaagttcaccttctccgtcagcaacgacatcgtctccggcctccgctacaccaacaccgtctggaagacggggctcaaagttgacagagccaaggagatgctcggcacgttcagcccccagctggagccctacacgtacgtgacgccggaggacaccaccccgtcgggaatgtttgcccgggggtcctactctgccaggaccaagttcctcgacgacgaccgcaagtgctacctggagatcaactacaccttcgacatccgccgggagtggccgtcgacgagctgaccatccttccctccctccatcggtggcctgagcacaccagtcgtttcgttctgtgttcttccttttccgtgttgcctcgtcctgtcctgtccctaggtttttgtttgttcaccgtgttgctgcgtgcgtctatgtgcccttctccatgcgccagctgttttctgtgttgacacgttactagacagtgcaaatgtcagctcggtctaccggactgtgcgtgcgtcagcgtgttcaactcttgtcgatcagggtctcgtttttccgaaccgcctgttgaattcagagcaatgaagctgcgttctgcgt

SEQ ID NO: 264193 - DNA, 495 bp, Zea mays
gaattccggggccgagagagccagccgccaggccagaggatctgacgcctggcgggcggggcgggacgacagacacgccatgggtgcgcacgcacgagcacgagcgcgtcccctactagtgtgccggccatcactcggccaccagaacaccacagctcacggtctgctggttgtcatgtcatgtcacgcggtgcagttgacagagccaaggagatgctcggcacgttcagcccccagctggagccctacacgtacgtgacgccggaggacaccaccccgtcgggaatgtttgcccgggggtcctactctgccaggaccaaggtacgtacgtacgtggatgcagaaccagtcctttttcggttcagacagaatccgaatccttcaggctcgatagttcacgaggtttggtttggcatcctgttctttggcagttcctcgacgacgaccgcaagtgctacctggagatcaactacaccttcgacatccgccgggagt

SEQ ID NO: 264194 - DNA, 1368 bp, Zea mays
caatcattaacgagagtgctctggcctctgtctagctatctcgtccggtcctgcatcagggcgtagatatagtggggatagttgtgttgttggtctggtaagaagagtgggagtgagataaaaaaaagatccatggcgacggaggaggccggccgtgccctggcgacgaaggcgaagctggctggcggcggtgctggtgctggagctgctcgtcgcgggcttccacgtcgtgtcgagggcggcgctcgacatgggcgtcagcaagatggcgttcctcgtctaccggaacgccgcagccctgctcgtggtcgcccccgtcgcctacttcctcgacaagaaagataggccgcccttcacgctacgcttgctgatggacttcttcttgctggctgcagtcggggtaaccttcacacaggggctctacatactcggcctgtactacctgtcaccaacctacgtctctgtcatccagaactcagtccctgcgatcaccttcgtcatggccgctagtttgagaatcgaacagggtaatgtgaggagcagatacgggctggcaaagatgctaggcacggtggtcaccatagcgggggcaaccgtcataaccctctacaaagggacgccattattgacagaaacagctcatgcagagggcaccacccacacgctggaaggcacccacacgctcggatgggcatgggtcgcaggatgcctcatcatgttcgccaactgcatttgcttgtctgcgtggatggttctgcaggtcccggttctgaagaaatacccagctaagctgtcgtctttcgccatcactctggcgttgggtttcgtccagctcgctgtcgtcgcgccgtttttcgagagcgaccttgagaggtggaagatcagctccggaggcgagcttttcaccatcctgtatgctggcgttgtggtgcttggaatcgcctggtatctcatgatctggtgcataaacaaaggagggcctcacttcgtttccgtcttccagccactgcaaaccgtcatggtcgccatcatggccgccatcttccttggcgacacactctacattggaggagtcataggtgcggtgatcatagtcgcgggtctgtactgtgtactgtgggcgaagagcaaggagaccaaaagcagcggcgatctcctagtccttcctgaaagaagccccgcgcaccagaatctcctccagcgtgaagattgaagcgagaccactcactgtactgtacggttctcggccggctttagctgaaatatattccttgtatcatcagttggacaggccaattgatgatgtcgcctgtgcaaccttgttggcccagggccattttcgattttgtaaattggcccttttagagc

SEQ ID NO: 264195 - DNA, 534 bp, Zea mays
  unsure (1)..(534): unsure at all n locations
cctttcctcaacactaccagcaaaacgagaccttttgagtacctaaggcttactagcttgggggtcattggtgctcttgtcaaggttgatgatactgaagtcatcagttttctgctgcaaactgaaataaggcatctgtgcttgcgaaccatggagatgggtagtgagctatccaaaactgcatagaagcaggagctcgcacggcagttggatctcatcgccaggcaggtggaagtgtggttccagaacacacatgttcagataacacacatgttcatgcttatgctgaccccacacaggttcatatcgtcttctgcgtgtatgtagttgtttcttcttcaattctctttgtggggaaaacgttaatgtaagttatatttttactttttgcacctctcactattgnttctacatctttctttcttgaaaactcgtgaatctgaattggaatgggatttccttccaccaatctacccatcatgcagtgggattttcccagcaatcagcttgataggcgacatcgtcattgtgggg

SEQ ID NO: 264196 - DNA, 853 bp, Zea mays
cttttgagtacctaaggcttactagcttgggggtcattggtgctcttgtcaaggttgatgatactgaagtcatcagttttttgctgcaaactgaaataattcctctgtgcttgcgaaccatggagatgggtagtgagctatccaaaactgtggcaactttcatcgtccaaaagattcttctagatgatgttgggctgcgctacatttgcgccactgctgagcgtttctttgccgtaggcagtgttttagcaaacatggttgtttcacttgctgatcagccctccacaaggctgctgaagcacatcattcgttgttacctccggctgtcagataaccctagggcttgtgctgcattgcagagctgccttccagacatgctcaaagatgggaccttcaataactgccttagggatgatccagcgacaaggcgctggctccaacagctcctgcacaatgtgactggcggaggcatgggaggtgctcctcaaccaggaatggatcccatgaacatgggaatgtgatgtgcattctagttgttgcaattcactgcaataacacatcacctctcagtgaattacaactagagaagatctggccactgtccagatgaaacttagtatggtgtagcctgactttctgccggggtaaaaataggaatgttgtttggtattgccataagctaagctgtagaaacaagatcggcaggcttctgttattgtgttcttgcaccggagctcttgtgcgttgacccttcagaacctgagaacaaaggaggaaacccccgtcccgtgaagctttgtcgcagtgccgatcgatcaagatcttgaattcgttcagatgattccataagaaa

SEQ ID NO: 264197 - DNA, 1863 bp, Zea mays
taacttggttcccccaggagttgcagagaaaagagcttgccatatctgagaaaataactggacttgagaaaaagttgcactactcgaatgttgaacagaataaccttagagggaaactagctaaattagcatctgagaggagtaatattgaggcagagattgatcgtctgaagcctggagaggaggagctcgagacccgtattggtaaaagggaagcagaagcaagaaaacttgagaaaaaaattatatgacgattgtggacaaggtgttacagagatttgtagcatttcagttggtgtgaagaatatccgcgagtatgaagaaaagcagctaaaagatgctcaagcactacaggagaggaagctaagcctaagtaaccaaatgtcaaaattaaaataccagcttgaatatgaacaaaagcgagatatgcatgcaccaattgtgaagttaacggagacacatgagtccttagagaaagagcttaagggcttacaggagagagagtctggtgctaaggctgaagctgaacaaattttggctcagatggaagaactgaagactgaggctgatgactggaaatccaagtcggatgaatgtgagaaggttattgatgaattgaaggagcagaatggtaatgttgcatctacattggcaaagatggatcgccaagtgaaatcaaaggagggacaacttgcacaacttatatcacgccagcgagaggttcatgagaagtgtgaacttgaacagttgaagcttcctactgtaaacgacccaatggataccggaacatcctcacaagaaccaatccttgattacagccagcttagcaaaagccatctgcaggatatacgaccttctgaacgtgacaaacatgaggcagagttcaaagaaagaactggtgtgctactagctgatattgagcgcactgctcctaatctaaaagccctggatcagtatgatgcactccaacaaaaggaaaaggagattactgaaaggtttgaagcagctaggaaagaagaacgagagatatctgacaaatataactcagtcaagcaaaggaggtatgagctgtttatggaggccttcgatcacatatctaaaggcatcgacaaaatctataagcagctgacaaaaagccatacacatccactcggaggaacagcatatttaaatctagaaaatgaagacgaaccgtttctacatggaatcaagtacacagctatgccacctaccaagcggtttagagatatggaacagttatccggtggggagaagactgttgcagcactggctttgctttttgccattcacagttttaggccatcaccgttcttcatattggacgaagtagatgctgctctggacaatttaaatgtggccaaggttgccgggtttatcagatcaaaatcatgtgaacgtgttggtgatgaacaaggcagcgatggcgagagtggttttcagagcatagttatatctctgaaggacagtttctatgacaaggccgaggcacttgttggtgtttatagggactcagaacgaagttgctcgaggactctcaccttcgacctgagaaagtatagggaatcgtgaagcagcttttgttgaatgtttgtactatgtgtgtagttgcctgctccatcagcttgctagatagctgtcgtgagccttcgatgttttaactatctgtatactcctagtcctacgtaagtgctagctgaacaaggaccctgaaatattcatttggtaggtggataactgatgtttcgaacacgcataaacttttttacctgttgtatgaagccatttctccgaattactataaaaaaaaaaaaaaatgaaaaaaaaaataaaaaaagataataa

SEQ ID NO: 264198 - DNA, 542 bp, Zea mays
agacataccctgaacctaatttcctcatccattcccctcgatcggacaggcaccggctaaccctagcttctgtttggctgttgccttgcgggtggcggctgctttggtgcgctgcgcagtgcgctccgtccgtccgtcgaccggaaggccgtcccctggcccctgctcgtcgtcttcctcgggcgctcgtcttcctccgaacgcgcgcgggccgccgacctgcttgttctcctggaggagcgcgcccggcgggcaggcgacgcagtccagcggcgggttgaggaagaaggcgagcgaccggtggatccccgtccagccgtcccctgctcctcttcctcgggtcgggcgctcgtcatccactcttcctccagccctccatctgatccccgtacgaccgtcccctgctcgtcttcctggtgctcggctgctccagtgctcggcccctgctgcagtgctgctcggtcgcgtcggcacctgctgcagatctgctcgacctcggctgctcggcttcctgttccttctgctacaaattcatagtcact

SEQ ID NO: 264199 - DNA, 496 bp, Zea mays
cccacgcgtccggcgctgcgcagcgctccgtgcgtggaccggccggccgtcccctggccctgctcgtcgtcttcctccgaacgcgcgcgggccgccgacctgcttgtgctcctggaggagcgcgcccggcgggcaggcgacgcagtccagcggcgggttgaggaagaaggcgagcgaccggtggatccccgtcctgccgtcccctgctcctcttcctcgggtcgggcgctcgtcatccactcttcctccagccctccatctgatccccgtccgaccgtcccctgctcgtcttcctggtgctcggctgctcggctgctccagtgctcctggctgctccagtgctcggcccctgctgcagtgctgctctgtcgcgtcggcacctgctgcagatctgctcgacctcggctgctcggcttcctgttccttctgctacaaattcatagtcactgctggggaaagcaaagcgtgcctcgatcttcatcaggctggtttctgc

SEQ ID NO: 264200 - DNA, 460 bp, Zea mays
ggcgcacagggcgagcctcaggtaccggtccctcctccaggactaccaggagctcatcaaggaaacccaagcaaagaaggagaggctgtacatggagaggctcaggaagaagaggcttttggctgaagtcaaattcttgcgtaagagataccaatctatggctaagaacccctctcagacaattgcttgtagagtgaagaatccagcactgtcgtctgcatcctggagggctgcttcggtaagtgacgcccagcaccagttggttcgtgctgtcgggagctccagtagaaaccagctggtgcagccaaggcgcggtggttctccaagggtgtatccggcgattgacctcaatgaggcctgtgagccgggttatgagatggaaatcgtcgaagagcgccatggcaacagggcccctcttggcatcaacaagtcagagaggtatccaatggaaagtgatgct

SEQ ID NO: 264201 - DNA, 492 bp, Zea mays
cgcgttccttccttccctccatctcctctctgttcatagcctcccaagaaacaagagccaaccagcgcttgcgaagctcaagcgccgcagcaatgtctctggccccgtccatcccttccatcaaggtgaaggtggggcccgtctcggtggcgcccccgcaccgcgcatgccgatccttcgcggtggtcaggagctccaaggcggagggccccatccggagacccgcggcgcccccgctgtcgccaccgccaaagacgccggctctgtccactcctcccaccctgtcgcagcctcccaagcccgctgctccacccacgtcgtcggagtcgacaccaccgtctcctcagccgaaggcggctgtggccacagcccccgcggcagcgctgcagaggccgctggctggggctgtgacgctggagtaccagaggaaggtggccaaagacctgcaagactacttcaagaagaagaagctggacgaggccgaccagggcc

SEQ ID NO: 264202 - DNA, 436 bp, Zea mays
cgcctcacaagaaacaagagccaagcagcgcttgcgaagctcaagcgccgcgccaatgtctctgcccccgtccatcccttccatcaaggtgaaggtcggggccgtctcggtcgctcctccacaccgtgcatgcccgtccttcgcggtgaccacgagctccaaggcagagggccccatccggagacctgcggcgcctccgctgtcgccaccgccaccgatgccacccacgccgccggctctgtccactcctcccaccctgtcgcagcctccgacgcccgtgaagcccgctgcgccacccacctcgtcgcagccgagtcgaccttctcctgagccgaagccagttgacgccacagcccagatgcggaagccggtggctggggccatgacgctggagtagcagaggaacgtggccaaggacctgcacgagtacttcaag

SEQ ID NO: 264203 - DNA, 997 bp, Zea mays
gttctacggctccaatttctctgacttctccctgagcctttgcggccggctggagctggacggtccccgggcagcgcaggcagccggactgcgggagtcacctccatggcctcggctgctactgcaaccctccccaaggttcagttgaggccaagatgcaacagctactttcaggtgaccggtcaagtccatgcccacaccaaaacatgcggtgcctgcaagtgtccgacccatatccacgggttgcttgtttcagctggaggaaggaggacattcctgccggtgtctgcagttggatcaggtcagggctcatcggtcactgaggccgacaggaagagcgatttgtcgctggagaacgtcaagacgtccgttgtatcccgcgacggtgaaaagattaatgtacgagtgcagttgcctggaaaggcgacgcaaaaggtgtttgatgaggctctgacgttcttggcccgtgatgcgccaccggttcctggttttaggaagtccaaaggagggaaaacatcaaatatacccagcagcatcctgctgcagatgcttggcaagagccgggtcaccaaattcgttcttcaggaaatactgagcatcaccattgaagaatttgtcaagaaggaaaacctgaaggtgaaacctgagatccagacaacccagtccgaaggcgagatggagtccgcgttcgcgccgggatcagcatttgggttcaatgttgtccttcagctcgagacacctgactctgatgatccagaggagaaacctggctctgatgacgatttacaggaggaatctggttcctcggagtagaaagaaatgcatatcgcctgcatgcatttatcaaccttcttcatgtgccattccttatgaatgaatgtactgaatggaaagccgttgcaaccgttttgagttgagagttgcaactgaaacatttctgaccatatgagtggccgactcgcctctcttaacatgttaacaaaaaaaaaaaaagaaa

SEQ ID NO: 264204 - DNA, 518 bp, Zea mays
gaggaaattagtctgacctgtcggcactggtgtgaatggtggaaaccaaccatggcccttggctttaggatggcttgatggggtgtcgaatacatacacatggctgtcccacggttggtgtcgcttgttttgcattacggtcttgcggtggcggctgtatataatggaaaaacattcgatccattactgaggcatggcccgtgaagacaccttcaaatgcgcttctgtgttagcttgcttatttgagaagtaggaagccatgcagtagattttgtatccaaaagccgtgtacttgtttttgtctgatatgtaatctagcgcatgtcacacatatgtattcccttcctttgattgaagggctaatggtatgatgtcttttttttttgataaaaaaaaaaaaaaaaaaaaaaaaaaaaaaaaaaaaaaaaaaaaaaaaaaaaaaaaaaataaaaaaaaaaaaaaaaaaaaaaaaagaaaaaaaaattaataaaaaatttataaaaaaaaaaaaaatttaa

SEQ ID NO: 264205 - DNA, 385 bp, Zea mays
ccgagaagtacgcctacagcacgcagcaggttcaggactgcatcgccgtcgcgctcacttccaaggccgccgccgtcgcgcaggccgccatgttcaagaaggccaactacgcctgcagctactagctaggcctcgcgcatcatcagcgtataacgtacgcacgcaatgttcgttatataattccatacgtatatgggtgtgcaaggtccagaccgaccagctgtatgtcttcatcgttgccttcgtttctgcgtcgtcctcccatgcatgtttatgcatgatgccgtgccgtctcgttgtcagctggttcagtagtgatgcttactttcttgtcgttgttgctaatgtaagaaataagacgatgcgttgactgcttaatctgctt

SEQ ID NO: 264206 - DNA, 1163 bp, Zea mays
agctcttatcttgtgcaatcgcagttacaagcagctgcgaactccagtgctctcttcttgacagcagctgcacagaacctgttgtgtctgaagttagcagaggagattggtgttagtatcggaaacccatgtattacttggttcaaggtttctagcgtgccagcagttcttgggcttttagtgactccttatttgatttacaaaatattcccccctgaaataaaggacactcctgaagccccagcattagctgccgagaagctaaagaacatgggtccagtaacaaaaaatgaatgggtcatgattgggacgatgcttcttgcagtctcactatggatttttggggaaactattggcgtatccagcgttgttgctgcaatgattggactctcaatacttcttgtgcttggagtgctgaactgggaggattgtttgaatgagaagtctgcatgggacaccctagcttggtttgctattttagttggcttggctgggcagcttactaaccttgggattgtgtcctggatgtcgaattgtgttgccaaggttcttcaatctttctcactgagctggcctgcagcatttgttgtccttcaggcctcgtacttctttattcactatatatttgcaagccaaactgcacatgttggagctttatactcagcatttcttgcgatgcatttagcagctggtgtgccagctctaatgtcggcacttgctttggcatacaatgcaaacctctttggagcactaacacactatagtagcgggcaatctgcagtatactttggagcggggtatgttgaccttccggatgtattcaagctgggttttataacagccgcaatcaatgctgtaatttggggagttgctggtgcattatggtggaaatttttgggtctttattgagtgtcggggcagtgtaagtacgtgaaaatcgtaccatattatcaaacaagtaattcatgatccagcatcggaggtggccatgtgggttcgtttttcttccgagggcctaagaatgcatcataacagaggaacgctcatctttagaagtttttgagcactatcatcaacctaggacgcaggtatgttttcgtaagttcttaaatcgagcgtcgtgtaagatcctttgagttgattgttgtaccctcgtatctcct

SEQ ID NO: 264207 - DNA, 926 bp, Zea mays
ggacgtgggcgcgacgcgtgggattttcttgctgatcacagctagtagggagcgagagttaccttgaaatcaaggcagtacgtacgagtacgatcgacaatgtcgacggtcacttcttgcacctttctgagcctcgggtccccagtgcggccggcagtctcctccgcgagaccggcggcggcggcggtggcttcccgacggaggccccggtccctttctgtgtgctgcgaggccggccggaaaggggatcacaacccaaagacggatctgcatccatttaacatccctgccttcgttctggtgcacccggtggcaccacgtgaggaacggtggcagctggaggaggacgccgacaaggtgaacctgtggttcgaggtgcctgggcagtccaaggatgacctcaccgtggagatcgacgaagacgtgctcgtcatcaagaagaggaaggagctggtgggccagcggagccctgtggcggtggcgtcgcagagtacggctcccagtcccagcagcagagcaggaggggcaccgcagatggcaaggacccgctgccggcggcacagcagggccagggcggcgaggtggtctatgcccggatgctcctcccggcggggtacagcagggatggcgtgcaggccgagctcaagtccggcgtgctcagggtcactgtcgtcaaggtcacggagcgagcgcgcaggaagatcgacgtccccattcaagtcaagtagatatgcgtgtatgtgtatgcacattcgtcctgcgcacgtgtcagcaggggtgctttatttacatctgtctcatgtccaacatgcagactactgcggtcgatctcaccacgtactcgatcgcgtcgactacacatgttcatgggctttgtgttcccatgtactcatcaatcaataaaatgagcatatgtgttctccgcc

SEQ ID NO: 264208 - DNA, 1064 bp, Zea mays
ccggacgggccggtccggatttaccgattcgtcccactctttcgtctttggacccaccatccagatcgactggcagatgaaccaggaccgctcggtccggtggaacctgacggccagcgggccgcggcccaacccgcaggggtcgtaccactacggcctggtgccggtgacccggaccatccgcctggccaactcggcggcgaccatcggcgggaagcggcgctacgcggtgaacggcgcgtcgtacgtgggccccgacaccccgctcaaggtcgcagactactacaagatcggcggcgtcttctccgtgggcaccatcgccgacagcccccccgcctacggcggcgccgcctacctgcggacgtcggtcatgggcgccactacagggactacgtcgaggtcgtgttcgagaacggcgaggacgaggtgcagtcgtggcacatcgacggatacgccttctgggtcgtcgggatggatggagggaaatggtcgtcggcaagcaggcagggctacaacctgagggacggcgtttcgcggtacactgttcaggtgtaccccagatcgtggacggcgatttacatgcccctggacaacgtgggcatgtggaacgtccggtcggagaactgggccaggcagtacctggggcagcagttctacctccgcgtctggacgccgtccacgtcgttgcgcgacgagtaccccatccccaagaacgcgctcctgtgcggccgggcggccgggcgccggaccaggccgctgtgagactgagactgccgccggatcattcacagcttttgtcatgagaggatgacacagtattggtttggtctttggagaagagcaggaacatacacaagtttatataccctcaactgaagggaggttcagaggaacgaaagtgttgcttgccgattttttttcattttagtttttttttcctttaaaatttcatatttacgtctctgctgaactaaaaccgtgttggaatttatggatcaacactataacttatactccctccgttccaaaatagtatttgtttgagagtgttaacggattcatac

SEQ ID NO: 264209 - DNA, 1044 bp, Zea mays
ccgaacagctccgcgaccgtggcaagaccaaacccaccagcacagcaccaattcaaccgcgacccaacacaccgccccgcaccccattcccgcaccctcctcccccagatctccggccgcgacgacgccatgacggccaagggcggcgccacgccgtcccccggcggcgcgggccccgcggcggggaacggccgcctcttcaccgtcgggctggtcaccgcctggtactcctccaacatcggcgtgctcctgctcaacaagtacctcctcagcaactacggcttcaagtaccccatcttcctcaccatgtgccacatgtccgcctgcgccctgctctcctacgccgccatcgcctggctgcgcgtcgtgcccatgcagctcgtgcgctcccgcgtccagctcgccaagatcgccgcgctcagcctcgtcttctgcggctccgtcgtctccgggaacgtctcgctgcgctacctccccgtctccttcaaccaggccgtcggcgccaccacgcccttctttaccgccgtcttcgcgtacatcatgaccgtcaagcgcgagtcgtggatcacctacctcaccctcgtgcccgtcgttactggagtcatcatcgccagcggcggcgagcctagctttcatctgtttggattcatcatgtgcataggagcaactgcagcaagggcgttgaagacagtactgcaaggaattcttctgtcttctgatggggagaagcttaattctatgaatctgttattgtacatggctccaattgctgttattttcttgcttcctgcaactatctttatggaggataatgttgttggcatcacaattcagcttgcaaagaaggatttcacgattgtttggttgctactgttcaattcttgcttgtcatattttgtcaatttgaccaatttcttggtgaccaagcatactagcgcactgactctacaggttccaaatgctttctgactcggcaattcaactttgtgtgcatgatgtagttttacatatgcctttcttgcattatatgttacactcactata

SEQ ID NO: 264210 - DNA, 912 bp, Zea mays
cggacgcgtgggtcttctgtcttccgatggggagaagcttaattctatgaatctgttggggtacatggctccaatcgctgttatcttcttgcttcctgcaactatctttatggaggataatgttgttggcatcacaattcagcttgcaaagaaggatttcacgattgtttggttgcttttgttcaattcttgcttgtcgtattttgtcaatttgaccaatttcttggtgaccaagcatactagtgcactgactctacaggttctcggaaatgcaaagggtgcggtggcagttgtcgtctcgattatgatattcaggaatcccgtgtccataacaggaatgctcggttatactctcacagtttttggcgtcattctttacagtgaatcgaaaaagcgcagcaacaagccatgaataccctaggagacagtaaatatgggaaatcatttctttgtcctgtcagcgcctagagctaatatatgatgagaaatcacatcggtggcgaccacaacaaatcctatgccatactgcctcagcaattggacatcaaggatagaagtccaataactaccgtggcatatgggaggcattttgttttatggcgttgatggatagaatataaatattttttgtgtgtgtgtgtgttagagaactatggctcacactgccagcattggttgatacgtttagctcttgggaaattgcctcttgtattcatctgctgctgctgcagtttccattttgttttgttgtgaagaccacctataccacactttgatccaggttccgggacctaattaatatattgtgcccctgaatttatgctcaacacacaaccccaaaaaaaaaaaaaaaaaaaaaaaaaaaaaaaaaaaaaaaaaaaaaaaaaaaaaaaaaaaaaaaaagggcggccg

SEQ ID NO: 264211 - DNA, 1399 bp, Zea mays
  unsure (1)..(1399): unsure at all n locations
ccctgcggtgcgggtgctttctccagcgacagcgacagcgagaggggaggggaaccagcgggctcctcctcctctacccctcgcctcggcggtgccaacaggcagccccgcgcctcgtccgcgccagatctatctgtcccttcctcttgtagttgcaggcagacgcgccatgcggatgcgggtgcttcccgcgtcctggtcatcttcctccgccaagcatagcagcggcagctccgagtcgcaggagcacccttcttcctcctctgctacggccgcggtgtacctcaacatctacgacatctcccccctcaaccactacctctactggttcggactcggcatcttccactccgggatccaagtccatggcatggagtatggctttggagctcatgaataccccaccagcggagtcttccaagtagaacccaaaagctgccccgggtttatcttcaggcgctctgtgtgtgtgggtgtaactcacatgtcccgttcccaagtccgcacttccatagaggatctcgccgaggattatcatggggacacttatcatttgattctcaagaactgcaatcatttcacagcagatgtctgcgagcgtttgaccgggaagccagtccctggatgggtgaatcgactcgccagattaggtcccatatcatttcacgatcaatctgttgctccttgatgctgattcattctcaactccttcagccgtcatcgtgttcgaattgcaggttcgatcttcaattgtgtattgcctgacagtatcaaggtttcagcagtcagagatgtaaatgcacatccagatttttctgatgatggcttggggtccaatgcctcgatccttgagggaagtgatgacgatgatttagaccaactcctaagaacacctaacagcgacactgtgtcttcaagggacaagacattaactcctggcagggatagtctctaattgttctcctttgatagcaaaatagaggcaagtgctttgatgttcacgtctcatggtggtatggggttggcctgatcatatcatcatctgctgtcaaaatttggtggcgcgctagtctggggtgatgaaggattgtttgatattgttgctattatcagttgttgaggttgatatagctgcctatagtgttaatgtgatcatactttgttgtggtattatcatgtggcgaaggccaagttaaccagcatgtcatggttgtttgtgtgcgccggtgtttgtagtgtggcatattgtctgagtaagtagagggtttggctagtcatctcacgtgacctttcctttgaaacgatgatggtgtgtataagtgatttcttctgtacaaaaattacccccagagtttcaaaaggtacaacagataaaaaaannnaaaaaaaaaaaaggnaa

SEQ ID NO: 264212 - DNA, 465 bp, Zea mays
ttcaagtccgcacttccatagaggctcgcgcccaggattatcatggggacacttatcatttgattctcaagaactgcaatcatttcacagcagatgtctgcgagcgtttgaccgggaagccagtacctggatgggtgaatcgactcgccagattaggttccttcttcaattgtgtattgcctgacagcatcaaggtttcagcagtcagagatgtaaatgcacatccagatttttctgatgatggcttggggtccaatgcctcgatccttgagggaagtgatgacgatgatttagaccaactcctaagaacacctaacagcgacactgtgtcttcaagggacaagacattaactcctggcagggatagtctctaattgttctcctttgatagcaaattagaggcaggtgctttgatgttcacgtctcatggtggtattgggttggcctgatcatatcatcatctgc

SEQ ID NO: 264213 - DNA, 1092 bp, Zea mays
ccaaccccggaaaggcggaaacccatcgcaactaatccccaaccccaaacctccaatccacccatcccctcctcatccactccgggcggccatggcctgctccttcgccgccgcgaccgtcgtctcttccgcccccaccccggccgccaggcccctcgccgctgccccgcagtccgtctctgtttcccgctccgcggtcgccaccgccgccaggccgctccgcctcgtcgcctccagatccgcgcgggccaccagactcgtcgcccgcgccagcgtagtcgatgacttgccgctggtcgggaacaaggcgccagacttcgaagccgaggctgtgttcgaccaggagttcatcaacgtgaagctctctgattacattgggaagaagtacgtcattctgttcttctaccccttggatttcaccttcgtctgcccgaccgagattactgcgtttagtgacagatacgaggaatttgagaagttgaacactgaggttcttggtgtttccattgacagtgtgttctcccaccttgcatgggtgcagacagacaggaagtcgggtgggctcggcgatcttaaatacccacttgtttctgatgtgaccaaatcaatttcaaaggcctttggtgttctgatccctgaccagggtattgctttgagaggactgttcatcattgacaaggagggagtgattcagcactctaccattaacaaccttgccattggtcgcagtgtggacgagaccatgaggacccttcaggcattgcagtacgtccaggagaacccagacgaggtctgcccggccggttggaagccaggggagaggtccatgaagcccgaccccaagggaagcaaagagtacttcgcggccgtctagactcgccgtctttgacaagctttgctacgtttttgtcatggtgcccgctaagccccccggcagtaggttggagttttgcggagctcgcgtttttacaaatctcggtgctctgaaccgagcgtagtagcccccctttgctggtgtgcatcccgattgagtgctgttctttgccaccttgtttaatttcgtcacctgacgacataaggttcattttgcat

SEQ ID NO: 264214 - DNA, 1214 bp, Zea mays
caagaacacgcgtcccggccgggggcgacccgcagcgtaacaagtgtccttcctccgtcttcctcctctgccgatcttcctcctccactccactcccaagtccccaccacccccaaccccgtctctccactgcggcgcaggcttcgcttcggctccgctcggctcgagcagaagaaaatgcaacgggcagtgcaggccgtcaggtcacacggcaatgttcttaaatatgctgttctacaacacatcagcgctcccaagccagcaatgcttcctgctgccttttctcgtttcatgtcagtttcatctgctcgcctagaggatcgtggatttgaaactgccactgtagcagatgtcttgaagtctaaagggaagagtgctgatggatcttggctctggtgcaccacagaggatagcgtctatgacgctgtcaaatctatgactcagcacaacgtgggagctttggtggttgtcaaacctggacagaataaatcaatcgctggcattgtcactgagagagattatctccggaaaatcatagtgcagggaaggtcttccaagtcaactaaggttggcgacatcatgactgaagagaacaaactgatcacagtgaatcccgacaccaaggtcctgcaggcaatgcagctcatgacagaaaaccgcgtcagacacatcccggtgatcgacggcacggggatgctggggatggtctccatcggcgacgtcgtgcgcgcggtggtggccgagcacagggaggagctgaaccggctcaatgactacatccagggaggctactaggacggcgtgtgcagcgacgaccccctccgatcccgccagtcagtgaagtccgcctttgaaatccaataactcggaacaatgatgatgacgaaataggccgtgttttcttggacaatgatgttaagttcggcaatgttttcctttctcttttttcctactgcgtggtctatgtgtatattgccaaaggcatgcgtgagccatgcgccggccggtgctgtgctggggcgcagagaccatctgatggtggaaacaccggaaataagagcgtgccgctgtgtgtttcctttgaaggaatgaaaatggtgttcgtgttgtgcattgcttattgttgatgttcgtgtcggattaaggctaaaccgaattaaggccttgtttaggaacaatacggattcagtgcagaactgggaaggcttcacttc

SEQ ID NO: 264215 - DNA, 671 bp, Zea mays
gctggtgccgctccggcggtcctgggtggtcccacgcgtcttatctccggaaaatcatagtgcagggaaggtcttccaagtcaactaaggttggcgacatcatgactgaagagaacaaactgatcacagtgaatcccgacaccaaggtcctgcaggcaatgcaactcatgacagaaaaccgcgtcagacacatcccggtgatcgacggcacggggatgctggggatggtctccatcggcgacgtcgtgcgcgcggtggtggccgaccacagggaggagctgaaccggctcaatgactacatccagggaggctgctaggacggggtgtgcagcgacgaccaccctccgatcccgccagtcagtgaagtccgcctttgaaatccaataactcggaacaatgatgatatgaccaaataggccgtgttttcttggacaatgatgttaagttcggcaacgtttgcctttctattatttttttcctactgcgtggtctatgtgtatattgccaaaggcatgcgtgagccatgcgcccggtcggctgtgctagggcgcacagactatcggatggtggaaacaccggaaataagagcgtgccgctgtgtgtctcctttgacgaacaagcctggcggtcgagagagctacaaggtgaccaaacatttcagggagctgctt

SEQ ID NO: 264216 - DNA, 538 bp, Zea mays
ccctccgatcccgccagtcagtgaagtccgcctttgaaatccaataactcggaacaatgatgatatgacgaaataggccgtgttttcttggacaatgatgttaagttcggcaaggttttcctttctctttttttattctactgcgtggtctatgtgtatattgccaaaggcatgcgtgagccatgcgccgcggtgctggggcgcagagaccatctgatggtggaaacaccggaaataagagcgtgccgctgtgtgtttcctttgaaggaatgaaaatggtgttcgtgttgtgctaaaaaaaaaaaaaaaaagtcaaaaaaaaaaaaaaaaaaaaaaaaaaagagaaaaaaaaaaaaaaaaaaaaaaaaaaaaaaaaaaaaaaaaaaaaaaaaaaaaaaaaaaaaaaaaaaaaggggggccgcccaaaaggatcaaagctaacttacccttgaatgcaatttaaaagccctccaaaattttcaccaaaattcaattaaatggccttcgtttaaaaacttcttaacgggaaaaaccctgg

SEQ ID NO: 264217 - DNA, 488 bp, Zea mays
tttgacgcgtgggcggacgcgtgggcggacgcgtgggcggacgcgtgggcagtgaagtccgcctttgaaatccaataactcggaacaatgatgatgacgaaataggccgtgttttcttggacaatgatgttaagttccgcaatgttttcccttcccctttttcctactgcgtggtccatgtgtatattgccaaaaggcatccgtgagccatgccccggccggtgctgtgctggggcccaaagaccatccgaatggtggaaacaccggaaataagagcgtgccgctgtgtgtttcctttgaaggaatgaaaatggtgttcgtgttgtgcattgcttattaaaaaaaaaaaaaaaaataaataaaacatataataaaaaaaaaaaaaaaaattcaaaaaaaaaaaaaaaataaaattaataaaaattaaaaaaaaattaaaataatataaaaataatttaaaaaaattaaaaaaaaaaaaggggggcccc

SEQ ID NO: 264218 - DNA, 494 bp, Zea mays
agctgggctccggcggggccggaccggtcctgccgggccgggccaccccaccttttctttcttgctgctcctgttccgactggccgggggcactctaatcccaagggcggaccacccccaaccccggctctccactgcggcgcaggcttcgcttcggctccgctcggctcgagcagaagaaaatgcaacgggcagtgcaggccgtcaggtcacacggcaatgctcttaaatatgctgttctacaacacatcagcgctcccaagccagcaatgcttcctgctgccttttctcgtttcatgtcagtttcatctgcccgcctagaggatcgtggattggaaactgccactgtcgcagatgtcttgaagtctaaagggaagagtgctgatggatcttggctctggtgcaccacagaggatagcgtctatgacgctgtcaaatctgctacctttcgggtacctaaaactttttgccagataaactcagcacaacgtggg

SEQ ID NO: 264219 - DNA, 941 bp, Zea mays
gttgactgacaccgacattgcagaactcatctgggattcttcctctaaggtggcatcaacgatgtagtgccgacccaccttggttaatgtaataataacaggcacaccgaatgtgtcaaactgcagaaattcctcatcacttacatcaacttcaggttcctcatcagatgcagcactaacagaaacattaacttttggtatacctgtatcactcaaagcaacctttatcgcaacagctagcgcatctagcaaattaccatcagaactgaccacaagcccatcaatgtacagatcccagcagacctttccatcaacaacaattagggatgacagatcaattgcagcaccagcaccacttttaccacccaacaagcatctttgcagggaaacagagagctcagcagacaattcttcagagcctctaccctcaaacagaggctcagcggttggactacagtcgacaaaaatggcaacttttcctttgtcagggtgaagaatgcttggttttcctagttcagccttgacactagcgattatatcagtggcccccaacctaacacgcgctgagccattcgcctgtggaatgactccggtttggacggagagggaccggaactgcagccgcctacgtccatcagtgcgaaggtcttgtgcaatgccgccgcggatgaagtgtttctccccttcagagaggcccaccatcgtccctgacgcggttgccggcacccaatttctcgagtttgcgcacgaactgttcgaaggagtagtaggggatcaggcgggagtgccagtccgcgtagagcttgatgaggttggcgaggtcgtccacctcgtggcctgggcgggggcggggcttgaacgccttgggaaagtagcggagcacgaagccgatgccgccgtcggagaggagcaggtccggcgtgagctttcccacgcgtcaa

SEQ ID NO: 264220 - DNA, 486 bp, Zea mays
cccacgcgtccgcccacgcgtccggagggtcttgaatttgacgctgtctatattggaaaccgaactggtctaagtggtggatggaggggctttgcaatgcaccacaacctggaggaaggggattcattggtctttgaattggctgagcatgacaaatttaagatttatataataaaagctattgatgatgatgtcaaagaggctgagcctgatgacaagaatgacaatggtgttaccaaggaagagcctgaccaggaagaatcacctgttgctgagcctccaaaaggtgccaaaaggagaaaactccgaggacggcggtagtttttctattagtttacatcgaacttttaatattagccactctttgggtaagcgaatgccgctatgctagtgatgcgctctcctgccaggtcatccatttgctcctttttgttgacctgttctttctgaaattaggtgtccaattgcaacccatatatagcggtg

SEQ ID NO: 264221 - DNA, 465 bp, Zea mays
ctgggtcttcagtaccatgttcacttccgcttggcaatggcatgtcttcgtggactggcggttcgtgcagaagcgtaggatcacccttctggcgaccctatccctgagttcggaaacacatctcctgacgcggttgccggcacccaatttctcgagtttgcgcacgaactgttcgaaggagtagtaggggatcaggcgggagtgccagtccgcgtagagcttgatgaggttggcgaggtcgtccacctcgtggcctggacgggggcggggcttgaacgccttgggaaagtagcggagcacgaagccgatgcccccgtcgcagatttgacgctgtcaatattggaaaccgacctggtctaagtggtggatgaaggggctttgcaatgcaccacaacctgaaggaaggggattcattggtctttgaattggctgagcatgacaaatttaagaccctcttggtcctcc

SEQ ID NO: 264222 - DNA, 363 bp, Zea mays
cggacgcgtgggcaaatccagacaccaacgctcgtgcgggagagagagagagagccgaggtcagagtgcatctaccaacgccggccccgtccgcgcctggagctcgggagttcacgacgggttagcgtacttcgtgaggttgctggtgaagcgcttgtggccgattggggaggaataaaccactgtgtcgaccagaattcgtcgtcggtcgccggattccgccacgcactgtgggtgggtctgggcgcccttcggatctcggtgagcatctcccgtagtgataccccacaattaccgctgtttggtactgctttcggataagagtttaggcatgaggatcggagattcgggagttccggccat

SEQ ID NO: 264223 - DNA, 1227 bp, Zea mays
cgagctgtcttgtccccctcttggcctcttctttccggcgatgggcgccggcgtcctcctcggcgacgccgccggcctgggggcccacctcgccgtacgccgccggaggacgcgcctctaccttcgcaactgggcctccaagcccctgcgcccctcggtctggctcggcgtggccgcctgtgtttcacagaatcgcgaccgccgtggccacgtgaccaggttctccgcctccgcctcgagcggcagtgacgagcccggggagctgtccgaggatgaggcgcagagggagtgggaagcggagctgaatcgccgactgaaggaggccgaggagatggaggagttggagcgcaccgccgagcagctgcaaagccaggccgccgccgaggcccccgaggagtcggaggaggagaagcgcgagcgtgtccgccgcgagctccagaaggtagcgaaggagcaagcggagaggagggagacggcgaagcaaatgtttgagttgggtcaaaaggcgtacgggaaaggaatgtatggacgatcaattgaattcttggaggctgcgctcactatcatacgtccctcctctctactcggtggcgagatccaaatttggcttgcaatggcatatgaagccaataggaggcacaaggattgcattgcattgtacaaagagttggagagtagccaccccatgatcaacatcaggcgccaggcagctgagcttagatacattttagaggcacccaagttgaagatatcaaatgacgaggtggtcacaataccacaaattgggagcagctgggattggtatgctggaacatggagtgacaaaatcaaggaacaagaggacaagaaaaggaagatgagtgctgctagcaaccaagttcaaccttctccaaacatctttggagacctctctttcttgcgaccgccaaatgaatggaagaagagtgcatgggtggttgttaccttgtggatccttttgataggaacagcaatctatctgcaatcatgaatggctcctgcagctctgaaacaagccattcacatctctgcgaggcactggtccatggttcaacagaacccagagatgtcgctaatatggccgtgtctcagactgttgcatttgttgtttttttttgctgcagtgtaaatactaactactgtaactagcaatacaagcagatgccatctagttcaattgattagaaatcaatctgtctgctcatatac

SEQ ID NO: 264224 - DNA, 520 bp, Zea mays
  unsure (1)..(520): unsure at all n locations
gggacctacgaatcaaagctgccctgtgagcagccaagggccttgcgttctggcacggcgacaaggccagagttatctaccgagatttcaagacatccaacgtgctcctggattcgaactacaacgccaagctgtctgacttcggtttggcaaaggacgggccaaccggcgaccagagccacgtgtccaccagagtcatgggcacctacggatatgctgctccggaatatctcgcaacaggtcatctcacgccgaagagcgacgtctacagcttcggcgtcgtgctgctggagatgctgtcgggccgccgcgccatggacaagaaccgcccggccaccgagcacaacctcgtcgactgggcgcgcccctacctcagcagcaagcgccgcgtctcccgcatcctggacgaccgcctggccggccactacccgctgccggccgtccaaagggcggcagcgctggcgctgcagtgcctcttcgaggacttcaggaagaggccaaccatggaccangtcgtcgc

SEQ ID NO: 264225 - DNA, 1114 bp, Zea mays
cccacgcgtccggggagacgtacgctctctgctagcacccatcttgcagcaggcggagccgcccgacccgatccgtgcgtgtgtgttggtagagatggctacagcagcttacgctcccatggcgagccaggtgatgaagagcagcccggtgcactcgaggccgaggggcctgtcaggcgctgcgctcacgcggccccggccccggttcagcgtcgtcaaggccgccatccagcccgagaaggcaacgtaccaggtggtgcagcccatcaacggcgacccgttcatcggcagcctggagacgcccgtcacctccagcccgctcatcgcgtggtacctctccaacctgccggcctaccgcaccgccgtgagcccgctgctgcggggcgtcgaggtcggcctcgcccacggctacctcctcgtcgggcccttcgcgctcaccggcccgctccgcagcacgcccgtgcacggccaggccggcgcgctcggcgccgccggcctcgtcgccatcctcagcgtctgcctcaccatgtacggcgtcgcctccttcaacgagggggacccgtccacggcgcccacgctcacgctcaccggcaggaagaaggaggccgacaagctgcagaccgccgacggctgggccaagttcaccgggggattcttcttcggcggtatctccggcgtgctctgggcctactttctcctctacgtgctcgacctcccctactacttcaagtagaatacaaattcataaagatgcatatatataatatagctccgcctccgatcctcctctctgcgtgcaaaggtatgccatttcagcagtgacgagcatcgtggatacatgcaattcctctgcacatggatggattgggatgtaacttggaactgttaatttttttttactttgatttggatgcatcatgacccccccttcaaaccagctagtgaaatgccattttaggtaaaagtcgacctcctagtatcatattgtcgttgtcttgatccgagtatctcaccaaccagtgaaatgatgttgcgtgccttggcccagatgagtgatgtaaggtcacacaagtcatttatcctagtttgggcgagagaaagccctacttccagc

SEQ ID NO: 264226 - DNA, 517 bp, Zea mays
gcagactttacttaggccgtccacaaggagaccctcctcagctagtacctaccggccagtagtcgtcgcgtttgcaggcagatctgagttagccggcggatccgatccgtgcgcgtgctgctgtgtgtgtgtcggtggagatggccacagcttacgctcccatggcgagccaggtgatgaagagcagcctcgtcgtgcactcgaggccgaggggcctgtcaggcgctgctgcgctcacgaggcggccccggttcaccgtcaaggccatccagcccgagaaggcaacgtaccaggtggtgcagcccatcaacggcgaccccttcatcggcagcctggagacgccggtcacctcgagcccgctcgtggcgtggtacctctccaacctcccggcctaccgcaccgtcgtgagcccgctgctgcggggcgtcgaggtcggcctcgcgcacggctacctactcgtggggcccttcgcgctcacgggcccgctccgtagtacgcccgtgcacggccaggccgg

SEQ ID NO: 264227 - DNA, 508 bp, Zea mays
gccacacatgcctgagccatatcacgcctgcaggccccatgcatccatgcgtgcacgggatttcctcctaaagatcgatcgcagactttacttaggccgtctcaaggtgaccctcctcagccgctagtaccagtagtcgtcgcgtttgcagctaggcagatctgagttagccggcggatccgatccgtgcgcgtgcgcagtgtgtgtgtgtgtgtgtgtgtgtgtgtgtgtcggtggagagatggccacagcttacgctcccatggcgagccaggtgatgaagagcagcctcgtcgtgcactcgaggccgaggggcctgtcaggcgctgctgcgctcacgaggcggcccggccggttcaccgtcaaggccatccagcccgagaaggcaacgtaccaggtggtgcagcccatcaacggcgaccccttaatcggaagcttgaaaacgccggtaacttgaagccggttggtggcttggtacttttcaaactttcgggcttacggaacggcc

SEQ ID NO: 264228 - DNA, 436 bp, Zea mays
ctcgtcgccatcctcagcgtctgcctcaccatgtacggcgtcgcctccttcaacgagggggacccgtccacggcgccctcgctcacgctcaccggcatgaagaaggaggccgacaagctgcagacctccgacggctgggccaagttcaccgggggattcttcttcggcggcatctccggcgtgctctgggcctactttctcctctacgtgctcgacctcccctacttcttcaagtagaaatcatcaaagatgcgtatatatatagctccggccgatcctcctctctagctgcatggtatgtaggtggtgtggtccttgtttcatttcactccagcggtgatcagcgccgtgtataaatgtaattcctctgctttgcacatggatggattgggatgtaacctgttcaacttttttttaccttattggatgcatcatt

SEQ ID NO: 264229 - DNA, 860 bp, Zea mays
atccaagtcttctgcatatctgaagaggataccgacgcagaggagctgaaagctgatggcaaaaagttcttgtatgatcttaggatgcaagctgaggtcattgttgtcactatgaaatcatgggagtcacacatggagagcagcagtagcggtgttcagcaggataactcccatgaggcttacacaagtgcacagcaaaggatcgaaacataccttgacgagatgaaggaaactgctcaaagagaaaggcagccactaatggagaatgggaggcaagttgttgtgaacgaacagaaggttgataaattcctttacacaatgttgaagttgaactccacgatactcaggtactccagaatggcagctgtagttcttgtgagccttcctccaccgccactataccatcctgcatatttctacatggagtacatggatttgcttgtagagaatgtcccacgcatgttaatagttaggggatatacgagagatgttgtcacatttttcacatgattatacatacgaacttctcacctggagactctagtgccgtcaggctgttgtactatctcagcagagactggatacacaagagcgtggaatctaccactgaaatgacaagccctcaccttgaaggcaaccacgatgagatgtcagatgtgcagagctgttgttcgcatattggattcgtgatctattgaactgcagtgtcttcattctttttctggatttaaaagatccacatagcgagctttgattcttacagattttgtagctatcatatgtaaacacttaccatcttgtaattgtaagcatacttacatgctggcccaaagacaaatgcaatccttaccttctcactg

SEQ ID NO: 264230 - DNA, 674 bp, Zea mays
cggacgcgtggcggacgcgtgggtacaccttccttaggttaactagctacctaattaccagctgccagccatcttctgtcagcacactgcagtgttcgtttctgtcgggaagagagagaagaggcagcgacgatggatgagcctccgccacagagcgacgacgaccggaagctgtcggccatggagcacgtcaagaagcgccacgaggagaagggattcctctatgcctgcgccttcatgttctgctgctgcttctgctgctacgaggcctgcgagcactgcctggagtgcttctgctgctgcggcaagaaggacgagtgattaaggccggtccaaccagttccgcccgcccaccaatgatgaatgatcggtttgtaattcgtcgtggatttgatttgtttcggttgtgatgtgaagaactgcgatcaatctggaactgttcgtcgtgatagaacatgcatgttgatgctgtaaataaatgcgattggtttggagcgttaactctacgttaaccgtacctagtgagctagcttagctaccccagtacgtatctgtgactcgtgagcgagttcagtgagacgctgtgcttgtaactgtaaatctgtgatggcatgccaacgcactggtactacatgtattactgcccttaattgtgtatatataaatttcttgtg

SEQ ID NO: 264231 - DNA, 871 bp, Zea mays
tcttgtggttcttctggctgctcggcaagagcgggggcgtggaggccaagatcctggaggaggtggaggggatcgtcgcggcgcggaagggggctggggaggtcgtcgaggaggaggaggagctcgtgttcaggcccgaggaggtgaagcggatggagtacctccacgccgcgctctccgaggcgctccgcctctacccgtccgtccccgtcgaccacaaggaggtcgtggaggacgaggtgttcccggacgggacggtgctgaagaagggcaccaaggtgatctacgccatgtactccatggggcggatggagagcatctggggcgacgactgccgcgagtacaagccggagcggtggctccgggacggacgcttcgtgggcgagtccgcctacaagttcacggccttcaacggcggcccgcgcctgtgcctcggcaaggacttcgcctactaccagatgaagttcaccgccgcctccatcctccgccgctaccgcgtccgcgtcgtcgagggccaccccgtcgcgcccaagatggcgctcaccatgtacatgaagcacgggctcaaggtgacgctcaccaagagaggcaaggccaattaattaagctctgaaccgtgtggtgtgccgagatcgagcttgccaattgtaaggcgcagagacgactcgagaaacacatgaaacaagcactactttcgtcgtgccactttgtgactgggatggaagtgttgatgctgctgcggaacaagatctctgtgttttcatgcgttttatttctcactttctttgtactagtctatatatatatatatatatacatacaccggtgttttggacttcgtttgtttcaaaaaaaaaaaaaaaaggggggg

SEQ ID NO: 264232 - DNA, 457 bp, Zea mays
tattagtgcgctacctagctagtggagccgtggcaacgagcagaggtgtgcctagctagctcatcgatcaacgagtgagtagtagcaccatcaccatggcagacaagaagaaggtggaggtcaaagagacgaaggtggaggtgaagacggccgtctacaaggtgtacgtccactgcggccagtgcgcgcgcgacatccagacgcagttcaccgagttccaaggggttgaagaggtgaaagtggacgccggggccgggaaggtgacagtgaagggcttcggcttcgacgtcgagaagctgaggaagaaagtcgagaagggttgccggaagaaggtcgagctgattccgcccgcgcctcccaaggacgacatggtcgttgatgtcaagaccaaaaaggaggagctcaaggtcataactgtaaagctgccgttgcattgccccgattgtgcagtcagggt

SEQ ID NO: 264233 - DNA, 573 bp, Zea mays
gcaattttgtgtttcccgttctggaacctggtcgcgttcttcgcaactccgtctaccacacccgcactgttcggaggcggtctgttgggatatgtgatgtatgattgcactcactactacctgcaccatgggcaaccatccaaagacccagcaaaacatctcaagaggtatcacctcaaccatcacttcagaatccaggacaagggcttcggcatcacctcatcgctttgggacgctgtctttgggacattgcctccatccatgacgtctgggaagaagaactgacgcacgtaactcaattcttggcatgagagattctaggggacctgtaatatatattcaagctagggataatcctggatctgtcttcgtgcgatgggttgacatgttcattcagttctcaaagttcttgtagtgtactgattgtctgttgatctattctgaatgtgatgatagtacttcgctgcctcagccttctgtgcagtgccagctgtcccgaaaacggcatgttttacttaactctttttgtctagttcttaaaatcagagcatcagactcttgcaaatgcaagat

SEQ ID NO: 264234 - DNA, 486 bp, Zea mays
cgggtcgagcacgcgtccggccatcgccccgatggacaccgccgcctcatgccgcctcctctcgccggcctcctcctctccgcccccctgtccgaagcagctacccaagcggcgaccgaccttcgcggcctcgcagcagcagtcgcccagctccagcgccaagttcaggctcctctgcctcctccatgacaagtccgcgtcgccaacgacgtcggtgcagatgcagagctcacagtcacagttgcagaggctggcgacggtgttgcagtgcggagccgtctgggcagctgttgaggcgccggcggcgctggcggtgaccggcgaggaggacatcgacctgctagggatcctgccgccgctcgcggtgttcgccttcttctacttcctcgtcgctcctccggtgatcatgaactggatgaggctgaggtggtacaagcgcgaattcgtggagacgtacctgcacttcatgttcacctacctcttcta

SEQ ID NO: 264235 - DNA, 563 bp, Zea mays
cggacgcgtgggcgctgccgtccacgtcctcggcctcgtcgacgacaaccgtgagctccacggcgtcctccggcgcgccgccgaccaaccgcctggactggatgctgttctgacgggcgggcgagtgcagggcagcccggcgccggccggccaccggcgcgaaagcagtcaagccggatgtgggggaaagcggaaggcggagtgcagaactgcagatgcgatgcttgtgtgccaagaattgcaccccctgcagaaatctggtggcctccatgattgggcacgggctacctagcttggccacaaactgcattgctctgcatggtaccgtaccagccaactcgattcatcaaccatgtcttcttctttcattccttttgagattctttcctttttcctcatcttcttgttcatgaaacgtttgaggttctttttgtgtgcatcctattcagatagacagagagaaagagagagagggttggttacttggtttagggcaaatcacatgtattcagattgggaataaaccccccactggagtcaaaaaaaccgcattgtcgtcgtcc

SEQ ID NO: 264236 - DNA, 1215 bp, Zea mays
gggcaagacatgacaggatattatccacgtgaaactgacaggtcaggataccattccctcagagagaacgacacacttggggcatcttaggaccgttacttgcgcaatgggatgtgcctccgtcggtgcaaatgacacttctagggctgccgggatgggtgctggattggctgcagggatgactgcagggatgggtgctggaatggctgcagggatggctggctatggtgttgatggtcagcgtatgatgggtgttgttggtatggacagcagagggatgggatatggtggcagacctgagccacctcttccgcatgatgcatcaagcactctatatattgagggcttacctgcaaactgcacacgacgggatatggtggcagacctgagccacctcttccgcctgatgcatcaagcactctatatattgagggcttacctgcaaactgcacacgacgggaggtttcacatatatttcgcccatttgttggttttcgtgaagttcgtcttgtcaacaaggagtccagacatcctggtggagatccacatgtgttgtgtttcgtcgattttgacaaccctgctcaggctacaattgctctggaagcattacaaggttataagtttgacgaacacgagcgtgattcagcccatttgcgtctgcaattctcacgctttcccggtccaaggtcagctggtgggcctcgcggtaggcgttaagacgtgcggacctcgtggttgccgaacctatcgtttatacgagcgatccaactacggtgggctaacgcttcgatatgcgctgaatttcggggcggtggctttttagggttcgtcagctcatttcgtgaatgcgtgaaagggacaatgcaataagtgatattctgccatatgttattagatgccgtataatgtgttaggcatggaaagttattcgacatactgtatctgctgccttagctattgtggtctactgtaacttcattaccttgcttcacatccgagacaatttgagtttgttatcatgtggattatctgttttgaaaatgaaaactagatgatgttagcctattttagtaatgcatattgccccattggtgtttcttgcccatataccaaaatcgtgtactttaatctaggattagtaaaactgtggttgcctaggaactatgttgtaacccactgacacccttagttaagcaccaaaggatgtcaggggct

SEQ ID NO: 264237 - DNA, 760 bp, Zea mays
accacgcgtccgcccacgcgtccgcccacgcgtccgccactcatcgatctacacacatacatagtttcttctactacacgacgacaaacatggggaagcctgcgaagatcggagagtggggtggatacgccggcgatcgtcgggatctgagggctactccggaccggctgatcgaggtgaaggtcacggcggacaacagcagctgcatccgctccatctccttcatctacatcggagccgatggcaaaccgtacgaggaggggccatggggtttcggccatgctggcacggagtacaagattgatctgtgcaggttcgacgagagcttgacggagatctccgggaccacgggcccagcctacaacattgacaatctggtcaagtctctcaaattcgtcaccaacaaacgcgcttacggaccgtacggcagggacgagggcaccccgttccgtgtcaaggtgatgaacaacggccacgtcgctggcttctttggccgctctggagattgcctggacgcgatcgggctctacgtgaaccccaactaataactaaaacgatggatcggatcatctgcatgcatgcatatgcagtatgctgcttgcctgcctgtaacgaatatgaatgcataaaataacgcccctgctgctcccatatgcatcagcagtgtgtaccactatatatgttatatactgtatttcgctaccgaataaaaacataaataaaagatccagtgtcgtctgcacctttgttatataaaaag

SEQ ID NO: 264238 - DNA, 442 bp, Zea mays
cggacgcgtgggaggatattatccacgtgaaactgacaggtcaggataccattccctcagagagaacgacacacttggggcatcttatgaccgttacttgcgcaatgggatggcctccgtcggtgcaaatgacacttctagggctgccgggatgggtgctggattggctgcagggatgactgcagggatgggtgctggaatggctgcagggatggctggctatggtgttgatggtcagcgtatgatgggtgttgttggtatggacagcagagggatgggatatggtggcagacctgagccacctcttccgcctgatgcatcaagcactctatatattgagggcttacctgcaaactgcacacgacgggaggtttcacatatatttcgcccatttgttggttttcgtgaagttcgtcttgtcaacaaggagtccagacatcct

SEQ ID NO: 264239 - DNA, 546 bp, Zea mays
taccggtccggaattcccgggcaaccccgtctgcctctgcgagctcctctccggcgccgccgactcctacggcatcgccgtcgactacggccgcgcgctcgcgctccccggggtctgccgcgtcgccacaccgcccgtctccacctgcacagccctcggatatcacgtccgcgtgggcccagctgcggcgcccatgtcagggtctccctcgcccatgtcaggcatctctccctccggggagggcccacagttcccaggaacatcgccgaccgcctcgccgccgtcctcgaccagcaccgcggcgcgccgctcctccgccggcgcgggcagccacctcgtggccctcgccatgctgccgttggccgccgccgtcagcgggatgctctaaggtcgacgactccttcgtctccgcatgcattgcgcagctggacattgttgcgtagtataagctttcactgtgttttctattctatgctgcctctgttgtactatacacataccgcggactcgatcgattatcataaggcgttagccttgcttcttgcc

SEQ ID NO: 264240 - DNA, 274 bp, Zea mays
ctcgtcgatctacacacatacatagtgtcttctactacacgacgacaaacatggttcgtgatattttcccagctgatctctagttactttcttctcatcatcttcttcctcttaaattcgcattattgttgtggtgaacgcatgtatatatatatgtgcatgatatatgctgtaggggaagcctgcgcagctcggagagtggggtggatacgccggcgatcgtcgggatctgagggctactccggaccggctgaccgaggtgaaggtcacggcg

SEQ ID NO: 264241 - DNA, 1082 bp, Zea mays
cgcgcatcagcggctccgacttccgagcgggttcgcgcctggaaacgaagctatacgtcgcgaggaggggagggcccaccgccccgcgtgggcgtcgcagcttccactcttcccccgtgaaacttttctcacgcgcacccattccacccaccacccaccttcctttcctctctctctgtctgactgtctccctccgtccctcgaagcttctctggtttcagacgcaaccccgcgggtcgcgggatcaaggagccagagagcgggacgcagcgagcgttccgccggagatcgagaccgtagctagggtttgaggcgccgggctgcggtggacgagatgtcgacgccggcgaggaagcggctgatgcgggacttcaggcgcctgcagcaggacccgcccgccgggatcagcggcgcgccgcacgacaacaacatcatgctctggaacgccgtcatattcgggccggatgatacgccgtgggacggtggcacgttcaagcttaccttgcagtttacagaagattacccaaacaagccaccaactgttcgatttgtctctaggatgtttcatccaaatatatatgctgatggaagcatctgtttggatatcctacagaaccagtggagtcctatatatgatgttgctgcaattttaacttctatccagtccctgctgtgtgatccaaacccaaactcccctgcaaactcagaagcagcaagactgttcagcgagaacaagcgggagtacaaccgcaaagtccgtgagatcgtggagcagagctggacagccgactagtgcataaggatgctcgtcgtgcccgataggggcacaataagaaagcgtgaaaaaaaaacacacccactccttgtgtttctggttcgccaggcttgtcgaaacattgaagaaccccagtgattggtttgtagtctgtcgtcgtcgttctgccccgatcaagagccccggttgctcatggtggtggctgtcgtaatgtagcggttgttgacctatcttctcatgaattgaaaggatcctgcctatgtacaaaaattatagcgtgggaatggttgtttgatggaaaaaatat

SEQ ID NO: 264242 - DNA, 997 bp, Zea mays
cacccggctggccggctccccacctgctcgcctctcgctccgaagcttctcctctcgcgtatcctaccaggagggtgggagacccaggcagcggaggtgtgcgaagctcgcttcgcaccacgcgctgcggcctgcggggcgagagatcgaggcctgagctagggtctggtggcggagatgtcgacgccggcgaggaagcgcctgatgcgggacttcaagcgccttcagcaggacccgcccgccggcatcagcggcgcgccgtacgacaacaatatcatgctctggaacgccgtcatattcgggccggatgacacgccgtgggatggaggcacgttcaagctgactctgcaatttacagaagattaccccaacaaacctccaactgttcggtttgtttcgaggatgtttcatccaaacatctatgcggatggaagcatctgtttggacatcctacaaaaccagtggagccctatatatgatgttgcggcaatattgacctctattcagtccctgctgtgtgacccaaacccaaattctcctgctaactctgaagcagccagaatgttcagcgagaacaagcgtgagtacaaccgcaaagttcgtgaggttgtggagcagagctggacagccgactaaaactttatccgcttcgccaggcggtgtaaataaagcatctgtctttcctacttggccggtctgttttaccgttagaaatcctcagctatcgttgtgttcttgtggttcagtcccctgttgtagtgatgcctgcgggttttcctaatgtagtgctgaacggtttcataaactcggatattggtgcatatgtaacagatatagctaagtcaagttgttgcttggtttgcagaaaccgcatcctcctttctcgctgcacgaacggcctctcacgaggtgctctcctgtggaggctgttcatcctgtttctgtgcttctggtaactggtaagtcatgaatgaaagctttagcagttgtacgtgaa

SEQ ID NO: 264243 - DNA, 1493 bp, Zea mays
tgcctttcccgtctcgactcctcgcattcgccgcgtcgtcaacgtgtcttccttcccgcggtctctccgccgcctcccagatccggcggccatggcgaggaaccccggctgcaccgtcttcataggtaacttggatgacaaggttcctgagagggttctgtatgaaattcttattcaggtaggtcgtgttgtagacctacacatacctcgtgacaaggaaactagccgaccaaaaggttatgcttttgctgagtatgaaacagaggagattgcccagtatgccattaagctattttctggccttgttcgacttcataataaaacacttagatttgcgatctctgggcaagacaaaccctcattaaatggcaatattcctgtaactcctagtttgaactctgtaccacagccaaagcctcctcatcaacatatgaggtctagtgatactcctttgccacagcatacagcagtgaatggcaggagtgccgggtatggtatcccaccaaatcattcatacgacacgcacactcaagcactgtcaagtgggttaccgagtagaggactaagcaacggtacatatgaatatagtagacgtgtatttggttctgttctgaatgatgttagccgtcgagctaccagggaaccaatcccgtacccgtcctgctagcatgttgagccctggtggctgtgactctatatgctgacagaaaaggtctctgaagatgttgtctgttgtctcagccatcagtaaggctatctctgtactcaccatttcatgcctgtaaatatgggttatggtggtaggacatatgcttgtttttttggttctgttttttgtattgtagtgatacttttccctgctggttaggtccctctcattccctagtgtgaatgtcattcctccactaatatggctgcactaggaattaccaggcttagttgcatgaatgggtggcaatatgctcgcaatggtgttttaacattaagtgccattagctatttcaatgttatagcagggcgcgtttgtgtttgacatattagtatttggtggagtttgtgcttttcatcctgcatatgggacatctgaaggagagacatcgttttaaaagaaaattgtaaaataagtctcacaatttatgatgtttgatcatatgaatatttagttatatatgacttgtttgcttgagctatgtgtctgtcgcagcacaagcattcattatcgctcaactggctctcatggtgatcaagttatagattttctgtgtcctggctactgtgacctggctactgtctggtctttgtgagttgatctgttgtcatttccatgttcattagtttggaaaagttggtgctgctggattttcgcctaactgctgaattatctagactagtcggttgcccgtgcgttgtgacggcccgcaacaacacccacgtaaactatccccccgaaagatctcaatattttttattaaaaaaaaaaaaaaaaaggacga

SEQ ID NO: 264244 - DNA, 525 bp, Zea mays
cggacggtggggcggacgcgtgggcggacgcgtgggcggacgcgtgggtgcggatggaagcatctgtttggacatcctacaaaaccaggggagtcctatatacgatgttgcggcaatattgacctctattcagtccctgctgtgtgacccaaacccaaattctcctgccaactctgaagcagccagaatgttcagcgagaacaagcgtgagtacaaccgcaaagttcgtgaggttgtggagcagagctggacagctgattaaaactttagagctggacagccgattaaaactttattggcttcaccagatggtgcagataagcatccacctttcctaggttcctaggtctgttttattgacttaaccgttaaaaatccccaggtatcgttgtgttcttgtggttcagtcccctgttgtattgctgcctgccggttttcctaatatagtggtgaacggtttcatgaacttggatattggtgtgtatgcaaaagatatagcaagtcaagttgttgctaggtttgcag

SEQ ID NO: 264245 - DNA, 781 bp, Zea mays
gactcctcgcattcgccgctgcgtcaacgtgtcttcctttccgcggtctctccgtcgcctaccagatacggcggccatggcaaggaacccgggctggaccgtctttataggcacgttcaagcttaccttgcagtttacagaagattacccaaacaagccaccaactgttcggtttgtctctaggatgtttcatccaaacatatatgctgatggaagcatctgcttggatatcctacagaaccagtggagtcctatatatgatgttgctgcaatcttgacttctattcagtccctgctgtgtgatccaaacccgaactcccctgcaaactcagaagccgcaagactgttcagcgagaacaagcgggagtacaaccgcaaagtccgcgagattgtggagcagagctggacagccgactagtgcaggaggatgctcatcgtgcccgaaagggcacaataaggaaccatgaaaaaacatccttgtgtttgtggttcgccagacctgtcgaaacattgaagaactctagttctagtctgtcgttgtcatggttttggtctgatccagagcaccggttgctcatggtggtggctgtcgtaatgtagcggctgttgttgacctatatcttctcaagatttaaaatgatcctgcttgtgtacaaaaactatagcgtgggaatggttgttcgatggaccaaaaaaaaaaaaaaaaaaaaaaaaaaaaaaaaaaaaaaaaaaaaaaaaaaaaaaaaaaaagggcgccgcttgcgatttgagtatttgttgg

SEQ ID NO: 264246 - DNA, 705 bp, Zea mays
tcatgggggaaaagcgcacatttcaacatggatgtccataatacagagtagcatgtgactaatgagacaatatccacctgacaaatacaatgcacaattattgaactgtttttattcgaaccattaccataagacaggctccaaaggcaagcctctaagaatagttactactctgatttggtgtactgccgtataccaaatgcaaggcccaggatcataatgggcacaaggaactgtaggatcttgatggggaggtcattatccttgtctgcatggctgggtgcttgctggggctgcacatgagcacgctttgctgggattgttgaagcatctatctgcccgatgtggtacttctccatcatgtcccttgcggaatcactgtggccaatatcttcgaaatcagctgtagcatctttcccagttacagctagcaaaacctcgtctccaccaggatgctcatccataaacggagtgacgtcatacaccttgccggcgatgatgatccagcagtccttggtgacgttgtgcttggcgacttcctcgaacccaaagaccttattctcgctggccatggcagactcttacgcaccggggcttcgcctcaagaatcaagatggagctggaggccgtcgggaaggtcagccgtgagctgtcagcgtgtgtcgcgctcgcgaacgggatgcggaatcacgcgatctggacacc

SEQ ID NO: 264247 - DNA, 484 bp, Zea mays
tttttcgtcgttttcgcacccggggaccaggctcgggcgctcggctccgtcctcccccacatccacctgcccgtttctcgctccgaagcttctcctctcgcgtctcgtaccaggtcaggagggagggagggagacgggagaaccagggagcggaggcgtgcgtgctgcggcctgcggcctgcaggaccagagatcggggactgagctagggtctgggactgggaggcggagatgtcgacgccggcgaggaagcgcctgatgcgggacttcaagcggttgcagcaggacccgcccgccggcatcagcggcgcgccgcacgacaacaacatcatgctctggaacgccgtcatattcgggccggatgacacgccgtgggacggaggcacgttcaagctgactctgcaatttacagaagattaccccaacaaaccttcgactgttcggtttgttttgagggtggtttaccccaaacatttatgcggat

SEQ ID NO: 264248 - DNA, 784 bp, Zea mays
cccacgcgtccgcccacgcgtccgcgcgtgattccgcatcccgttcgcgagcgcgacacacgctgacagctcacggctgaccttcccgagtcccgacggcctccagctccatcttgattcttgaggcgaagccccggtgcgtaagagtctgccatggccagcgagaataaggtctttgggttcgaggaagtcgccaagcacaacgtcaccaaggactgctggatcatcatcgccggcaaggtgtatgacgtcactccgtttatggatgagcatcctggtggagacgaggttttgctagctgtaactgggaaagatgctacagctgattttgaagatattggccacagtgattccgcaagggacatgatggagaagtaccacatcgggcagatagatgcttcaacaatcccagcaaagcgaacttatgtgcacccccagcaagcgcccagccactcagacaagaataatgatctcctcatcaagatcctgcagctccttgtgcccattatgatcctgggccttgcatttggtatacggcagtacaccaaatcagagtagtaactattcttagatgcttgccttttgagcctgtcttattgaactgtttttattcgaaccattaccataagacaggctccaaaggcaagcggtcgcgggatcaaggagccagagagcgggacgcagcgagcgttccgccagagatcgagaccgtagctagggtttgaggcgccgggctgcggtggacgagatgtcgacgccggcgaggaagcggctgatgcgggac

SEQ ID NO: 264249 - DNA, 325 bp, Zea mays
gggagacgggagaaccagggagcggaggcgtgcgtgctgcggcctgcggcctgcaggaccagagctcggggactgagctagggtctgggactgggaggcggagatgtcgacgccggcgaggaagcgcctgatgcgggacttcaagcggttgcagcaggacccgcccgccggcatcagcggcgcgccgcacgacaacaacatcatgctctggaacgccgtcatattcgggccggatgacacgccgtgggacggaggcacgttcaagctgactctgcaatttacagaagattaccccaacaaacctccgactgttcggtttgtttcg

SEQ ID NO: 264250 - DNA, 484 bp, Zea mays
gcgacctcggccgctcggggaagggtcggtccacgcacgccgctcgcgcttcgcgtcggttttatgcacgactccttttcgcacccggctggccggctccccacctgctcgcctctcgcgcatcctaccaggagggtgggagacccaggcagcggaggtgtgcgaactcgcttcgcaccacgcgctgcggcctgcgggggagagatgcgaggcctgatgctcagcgtgcccgttagggctgataaggaaccatgaaaaaacatccttgtgcatgtggttcgagagatctgtcgaaacattgaagaactctagttctagtctgtcgttgtcaggttttggtctgatccatagcaccggttgctcatggtggtggctgtcgtaatgtagcggttgttgttgacatatatcttcttaaaatgatcctgcttgtgtacaacttgctctatacactgctcttggaggagttcgtccatcagcttgtttg

SEQ ID NO: 264251 - DNA, 355 bp, Zea mays
gtcttccttcccgcggtctctccgccgcctcccagatccggcggccatggcaaggaacccgggctgcaccgtcttcataggtaacttggatgacaaggttcctgagagggttctgtatgaaattcttattcagatctctgggcaagacaaaccctcattaaatggcaatatccctgtaactcctaggttaaactctgtaccacagccaaagcctcatcaacctatgaggtctagtgatactcctttgccacagcatgcagcagtgaatggcaggaatgccgggtatggtatcccaccaaatcattcatacgacacgcacactcaagcactgtcgagtgggttaccgaatagagga

SEQ ID NO: 264252 - DNA, 465 bp, Zea mays
cttatgcgtgggctcgccgctgcgtcaacgagtctgggttccttcggtctctccgccgcctcccagatccggcggccatggcaaggaacccgggctgcaccgtcttcataggtaggtcgtgttgtagacctacacatacctcgtgacaaggaaactagccgaccaaaaggctatgcttttgctgagtatgaaacagaggagattgcccaatatgctgttaagctattttctggtcttgttcgacttcataataaaacgcttagatttgcgatctctgggcaagacaaacccttattaaatggcaatatccctgtaactcctaggttaaactctgtaccacagccaaagccttatcaacctatgaggtctagtgatactcctttgccacagcatgcagcagtgaatggcaggaatgcctggtatggttttccaccaaattattcattcgacacgcacactcaagca

SEQ ID NO: 264253 - DNA, 456 bp, Zea mays
  unsure (1)..(456): unsure at all n locations
cgcttgccttgctcgctttgcctttcctttctcgactcctcgcattcgctgcgtcgncgacgcttcttcctcgccgcggggtccccttcacctctcggatccggcggccatggcgaggaaccccggctgcaccgtcttcataggtaggtcgtgttgtagacctacacatacctcgtgacaaggaaactagccgaccaaaaggttatgcttttgctgagtatgaaacagaggagattgcccagtatgccattaagctattttctggccttgttcgacttcgtaataaaacacttagatttgcgatctctgggcaagacaaaccctcattaaatggcaatattcctgtaattcctagtttaaactctgtaccacagccaaagcctcctcatcaacatatgaggtctagtgatacccctttgccacaacatacagcaatgagtggcaagaatgctgggt

SEQ ID NO: 264254 - DNA, 351 bp, Zea mays
cagatcgtgtgattttgcatcccatccgccagcccgacacgcgctgacctactcgacggcctccacctccgtcctgaggcgaacgtagtgcgaacgaccaactctttcgaagggaaattatatctcaggtgcttaggagtctgccatggccagccagaataaggtatttaggttcgacgaagtacgccaagcacaacgtcaccaaggactgctggatcatcatcgcccgcaaggtgtatgacgtcaccccttttatggatgagcatcctggtggagatgaggttttgctagctgtaactgggaaagatgctacagctgattttgaagatattggccacagtgattccgcaa

SEQ ID NO: 264255 - DNA, 973 bp, Zea mays
  unsure (1)..(973): unsure at all n locations
gccgttcgcagttcacctacgcggaaaatcactagtgattcactgaacaaaaaaaaattacaagaaggaatcgagagcaaatgctatcttcaaccacactccgaccgccggcgccggcgccggcgccggcacacctcaccatctgctcctcgcccgcagcgtggcggcgtgcgccggcggtgcgcgcggtgcggaactacgactccatcccgaagcgggagcccttcagctccagccgcagcatcctccacgagttcctcaggcaggacaagcccctcatccagcgcaccaaggaccagatcacagattattgcacggccatcgaaggcgatgagtgctgcagctgttgggacgcttactttgaactgaataaacttgagcaagagctgcccaaagacgaaatcgcaaggatggtgaaggactcggagggtgacgtgaggtacctgatagagagcatccaccatcgctcggatctgcggaagaaggtggcagagaagtctcgcaattcagtaccgtcaagctcccagggtagtagagccgcaaagccaaggccgttccccgtgcctgatgggataccgaaaacgcaagaagagctcgctgaagaagaagaggcgttgatgccggagtctccatacacgaggctgctgagaaggatgggaaggtaccctgattggtacaccccacgccctgatcatgagaccgactgaatcgagttgcccaccatcctagtagtgtcccttgtgggagtttttggagcatatggtaatctgaggctccttttatggcctgtgttatgtggtaagattagctttgtatctatgcagtatgcagattagggtgttcttactcttttccaattgtactaatgaaaaccggtgtgtgctttatgctgtaaatatgtgataaatagctgaacgttttattcgcggttcaaaaacaaacaaaaaaaaaaaaaaaaaaaaaaatnngagtt

SEQ ID NO: 264256 - DNA, 1345 bp, Zea mays
cgcctccactgctatcgctctcttcctctctgctttccccttccaatggaatcctgtagcttccgtgccgcaaccgcgccttctccctttccctccgctccttcttcatcttcatccccgcgcgccccatgccccatactccgatttcccaggccaagaaaagggaggcagattggggtgcggaggagggcgtccggatttgatgccttcgcgtctttcgccggcaaggtcttcgtggatgaggcgattggagcggaatatggggagggcttcgaaacatttcgaatggatggaccactcaaggttgatgtggattatctgaatgaaaaattgcaagagtgcttccttcaaaggataaggcatgctatgaagccggatgaggcgtttggtctaattttttcgtgggacaatgttattgctgatacagactcgctaaagttgaatgcttggagacaacttgctttggaggaaggtaaggatatcccaagtggtgctcatgtccggaagagcattattcatggtgctgctgaccatgttcttagaaaggttttgtactgggcaaaagaggaagataaaatggaaaaattgaaggcacgccttatagagttgtactacgagaacctgttcaaactcgatacacctgtagaaggattgagagaatggctggatgctgttcagacagcagggataccttgtgctgtcgcatcaccccttgacaggagatgcatgatcgaagctttggatcggatggcgctaacaaatatttcaaggcgatcgtgactgacgaagatgatatggagtcgatagcaaatcgatttctgtcagctgctatgaagttggatcgtaaaccctcgaagtgtgtggtgttcgaggatgacccaaggggcgtcacagccgcccacaactgtactatgatggcagtcgcattgattggtgctcatccagcgtatgagttggtacaggcagaccttgccattgcaaagtacagcgagctctcagtgatcaacctcagaaggctgtttgcgaacaagggaatcagcttcatggacttgcagaagcagataatcgagaagtcacctcccaagaggaggctgacagtagacaccattttctgatagatacacttttatttggtgtctgcctgttgttcttgagtagccaacaaccttcggcattatggcggtggcgttgtatataagatagtgctgatgttaggtgatccgctgtgtacctccttgtgaatgcaatgcggtagttccatcaaggtaccatgaggaagactgctgcaacaatgttgttgctgatgtaagctgatattattcaaatttattcatatttcatggtc

SEQ ID NO: 264257 - DNA, 1155 bp, Zea mays
tttttcttgcggagtaagaagagtggcggcggcggcccggcggcgtgtataggcgtgttcccgagtccgccgaggttccccaaacacgcacagcacacgaacacacaccgcgcccagctccgaggtgatcttccggcggccggcgagatgagccgtggcacaggcgcgggctatgaccgccacatcaccatcttctccccggagggacgcctgtaccaagtcgagtacgcgttcaaggcggtgaagtcggcgggtgtcacgtcgatcggcgtccgcggcgcggactccgtctgcgttgttacgcagaagaaagtcccggataagttgctggatcagacgagcgtgacacacctgttcccgatcaccaagtacgtcggattgcttgccactggccttacagctgatgctaggtcattggtttcccaagcaaggaacgaagcagctgagtttcgtttcaaatggggctacgagatgccagttgatgtgttagcaaaatggattgctgacaaagctcaagtttacacgcagcatgcatacatgagaccccttggagtagttgctatggtcttgggctacgatgaagagaaaaatgcccaactattcaaatgcgaccctgctggtcacttctttggacataaggcaactagtgccgggctcaaggagcaggaagcaataaattttctggagaagaaaatgaaggatgacccgaaattcacctatgacgaaactgtgcagattgcaatatctgcgttgcaatcagttctccaggaagatttcaaggccactgagatcgaagttggtgttgtgagaaaagatgaccgcgttttcagagctctcacgacagaggagatcgatcagcacctgacggcaattagtgaacgtgactgagatgtcatatgctgcacatttcagcgctgcacacactgcgccgtgccattgtgcttcggcagtcattaagtttcatagtcatcaaaggaactgagtgtaccatttcacgtttaagaccgaaaacaagccccctctcgatgtactcgtttcatatcgttctgtggttgattgaaattggcccggtttggttttgggttgctaaaatgctaactatatttgcatgtggccaatattttaaccgtttatatcagtgttcgttttgagtcc

SEQ ID NO: 264258 - DNA, 388 bp, Zea mays
tcgtccgcccacgcgtccgagaaaatgaaggatgacccgaaattcacctatgatgaaactgttcagattgcaatatctgcattgcaatcagttctccaggaagatttcaaggccactgagatcgaagttggtgttgtgagaaaagaagaacgtcttttcagagttctcacaacagaggagattgaccagcacctgacggcaattagtgaacgggactgagctgccatatgttggacatttgatccctccatcactgcgccgtgccattgtgcttcagcactgccatttagtttgacatcaaatgaactgaatgtaccatttcatgtctaacactgaaaacaagctcgttgattgaatttggcacagtttggttttgcattgctaacta

SEQ ID NO: 264259 - DNA, 1780 bp, Zea mays
ccgagccgtttcgagttctgctgagcattttttttccagccctgtgctgcccccttcctccccccaagtaaaccccgtttccacaacgtcaccgcaccgccgtcatgccgaccgtaagcgtgaaatggcagaaggagctctttccaggcatagagattgacactagccagcctccgattgttttcaagactcagttgtacacactaactggtgtgccacctgaacgccaaaaaattatggtgaagggaggaatattgaaggacgatgcagattggtctactttgggagtgaaagatggccaaaagttgatgatgataggcacggctgatgagattgtgaaagctccggagaaaggtccagtgtttgttgaggatctaccagaagaagagcaagtgattgcactgggtcacagtgctggtctttataaccttgggaatacatgctatatgaattccacattgcaatgtctgcattctgttccagagctgaagtcagcgctgctaagctattcagatactgtaagaggtaatggcattgaccaagcttctcataatttgactgttgctactcgtaatacctttggtgatcttgatcaaagtgttcgccctgttgcacctctacaattcttgcagacactgcgtaaaaaatacccgcaatttgcgcagcagcataataatgtctacatgcaacaggatgcagaagaatgctggacacagttggtgtatacgctttctcaaactcttacctcagattcaagtgaatctgcagctcttccgatgaagcaactatttgggatagatctcgtgagcagggtccactgtgcagaaagtggtgaggagagcatggagacagaatcagtatattcccttaagtgtcatatatctcaagatgtgaaccatcttcatgagggaattaagcatggcttgaagacagaacttgagaaagcttcacctacactgggtcgaactgcagtttatactagagaatcaagaataaatgagctgcctaggtacttgactgtgcagttcgttcgcttcttttggaaaagggaatcaaaccaaaaggcaaagattttacgaaaagttgattacccactggaattggatgtttatgaattttgctctgatgaactgaaacagaaactccaagcacctcggcagatgctgagagatgcagaaaatgcaaagtttggattgaaagcacaagggaaagctagtggctttaaagaaaatgagggatcatccagtagcgctggggaatcatccagtatggacattgacaaagctgagtcttctctaccaaagaaacaattaactggcgtctatgatttggttgctgtcttgacacacaagggaagaagtgcagactctggccactatgttggctgggtaaagcaagatgacggaaaatggatcgagtttgatgatgacaacccaaacatccgcaaggaggaagacattttgaaactatctggtggaggtgactggcacatggcttatatctgcctatacaaagcccgcatggcggagttgaagagttaggccggagtggttctacatttctgtgccgcgaacgcaacactagtttttctgcccatgagtgatcatggtaattattttttccagttcgtaaagtggttactgtcgaatttgcttcaatgcggttggccattattcacccggatatgtatctttaggatttcaaatctagtacattttgtgttgtcaaaatatagcccaaagaaattcagaggcaagcttttgccttcagtgaatctgat

SEQ ID NO: 264260 - DNA, 391 bp, Zea mays
gctgagtcttctctaccaaagaaacaattaactggcgtctatgatttggttgctgtcttgacacacaagggaagaagtgcagactctggccactatgttggctgggttaagcaagatgatggtcagtcaactagtattacagctcatttactataacaactgtttcattttatacaggttagttactgaaattccatattaaccatcaggaaaatggatcgagtttgatgatgacaatccgaacattcgcaaggatgaagacattttgaaactttctggtggaggtgattggcacatggcttatatctgcttgtacaaagcccgcatggcagaatcaaagagttaggtcgaattggttctacatttctgtattgcgaatgcaacactagtt

SEQ ID NO: 264261 - DNA, 1033 bp, Zea mays
cttctatccacaatcgcaattcgcaagcccttccaacggcagtcatggcttccatcaccctcctctccctcgctcccaccgccatcttcctccacatcccggctttcacctcctcctccgtcgttggtcccggaatcctagccggccgctgggccgcgccccgcgccctcccgctccgcgcgctcccgccccgtcgcgtcaccgtcgtctgcagcagcgccgcggcggcagccgaggcctcggacgccgcagcgccagtggagaagttccggctcgacaatttggggccccagaaggggtcccgccggcggcccaagcgtaagggacgcggtattgctgcaggccagggcgcgagctgcgggttcggtatgcgcgggcagaaatcgcgctcggggcccggcgtccggcgcgggttcgagggagggcagatgccgctctaccgccgtctccccaagctacggggcattgccggcgggatgcacattggcctgccgaagtatgtgccattcaatttaaaagacatagtgcgcggcggattcaaagatggtgacgaaatatcactggaaaccctgaaatcacggggtctgatcaatccatcaggcagggaaaggaagctgccgctgaagatcttaggagatggggatgtatcagttaagttgaatatcaaggctggagcgttttcagcttcagctaaagagaagcttgaggcagctggttgttccctaactctgttacctaaacgaaagaaatggcttccacaaaattatctaaagaaccaagcccgagcagaagagtactttgccaagaaaaaagctggtgctggtgaatctgatagcggctctgcatagaatttctttgcgatgtactcttctcttgcttttagcatatgcttattactgagcaagacacaccggctcaactaaaaatgttcataacttcttcatccaaactctgacttcgatgatattagacatttcggaaattttatttaaagggctacgatagccactttaataaataaaaaacaagtgac

SEQ ID NO: 264262 - DNA, 751 bp, Zea mays
  unsure (1)..(751): unsure at all n locations
ctggatttagtagagttttatctggcataattgcaaatcaatggaaaagaaggcaaggattggaagcgggggaaggattggtacaggcttgatgggagcactccatcttctgatcgtcagaatcttgtggagatgtttaatgaccttgaaaacacaagagtgaaatgcacattgatatcaactcgtgctggatccctgggtatcaaccttcatgctgcaaatcgcgtggttcttcttgatggatcatggaatccaacacatgatctgcaagccatttatcgagtttggaggtatggccagaccaaacctgtatatgcctaccgnctaatggcacatcaaacaatggaagagaaaatatagtagcgccaggtgacaaaggaaggccttgcagcaagggtggtggatagacagcaagtttcaagaaccatctccaaagaagagatgctgcatctttttgaatttggtgaagaggaattaatggaacagaacgagaatggttctactatgattgagaagccatccacttctaacactattaaaacctctgtgcctgttcctgtcgacagtctcatgctgagcctgctcagtgagcaaactcggtggatttcaggttaccatgaacatgaagctctcctccaagaaaatgaagaagaaaagcttacaaaggaggagcaggacctggctttgtccgaatgggagtcattgaggaaagctgcatctgatcctgagagaaaatcaagcatgagcgcag

SEQ ID NO: 264263 - DNA, 1013 bp, Zea mays
agctgtcgactacatcatcgatcatgccgagatcgatgttgtcgtcatacaggacaagcaaataaaagagatactgtccccaaactgcaagtctgccaagagactgaaagcattggtggcgttcacttcggcgacaactgaacagaacaaagaagcggatcaaattgggatcaaaatgtatgcctgggacgatttcttgaaagtggggaaggataatcctcgtcaaccttgccctccgcaagcaagtgacatctgcactgtcatgtacacgagtgggacaagcggacagcccaaaggtgtgatgctgacccatgaaagccacgccatgtatgtgaaaggggtggacctcttcatggaccagtttgatgataagatgacaacagatgatgtcttcctgtcgtttctcccgcttgctcacatccttgaccgcatgatcgaagagtatttctttcacaaaggggcctcaattggctactaccacggagatctgaatgccttgagggacgacattgtggagctgaagccgactctactggttggggtgccccgagtgtacgaaaggatttatgaaggtatcttgaaggccattgcggaactcagacctctaagaagggtcatctttaatgctttgtacaaccgcaaactggcaagcatgaaagcaggctactcgcacaaaaccgcttcacctttcgcggacatgctggcttttcgcaaggtcaaggcaaggcttggaggtcgtcttcgcttactgatttcaggaggggctccgttgagtaatgagatcgaggagttcatgagagtgaccacctgtgcatacttcatccaaggctatggtttaacagaaacactgggacctagcactgtctgctacatcgacgacatggccctggtcggaagcgcttggtgtgcctgccacctacaccgaaattcggctggaagaagtgcccgaggggatatcatcgcgtcttggtgggattgatcgagaatcctttgtggctcaagtcaactacaac

SEQ ID NO: 264264 - DNA, 1189 bp, Zea mays
  unsure (1)..(1189): unsure at all n locations
acgcctgccgngtacgttccgaagcctccgggtcgacaacgcgtccgcacacgcgtccggcggaactcagacctctaagaagggtcatctttaatgctttgtacaaccgcaaactggcaagcatgaaagcaggctactcgcacaaaaccgcttcacctttcgcggacatgctggcttttcgcaaggtcaaggcaaggcttggaggtcgtcttcgcttactgatttcaggaggggctccgttgagtaatgagatcgaggagttcatgagagtgaccacctgtgcatacttcatccaaggctatggtttaacagaaacactgggacctagcactgtctgctacatcgacgacatggccctggtcggaagcgctggtgtgcctgccacctacaccgaaattcggctggaagaagtgcccgagatgggctatgatccactcggcgttccttcgcgtggtgaaatctgcatccgggggaaatccctcttcgctgggtactacaaaagtccagaactcacaaacgaagccatcgttgatgggtggtttcatacaggtgacattggagagatgaccccagacgggatcttgaaggtgattgacagaaaaaagaacatatttaagctgtcacaaggggagtatgttgcggttgagtacctggagaaagtgtatggcttccctccactcgttgaagatatctgggtatacggggacagtttcagatcaagtttagttgcagtagtcaatccacaccaagaaaacacaatgaagtgggcagagtccaatggctacaagggttcttttgatgaaatctgcaaacttgaaggactcaaagagtacatcctgaaagagctggcagccgttgcgcagaagaacaagctacgaggcttcgagtacatcaaaggcgtagtgttggatcctgtgccttttgacatcgagagggatttggtgactgcaacaatgaagaagaagagaaagaatatgctgaactattaccagtctgagattgacacaatatacaaaaagctggaggcgcagaagagtgctgccagagctaagtgaagagatgtgccctattcgaccatcagctgaaaacaagggaaacgacaccgttgtaaatttcacattaatattgcgaagtaacaactcagggctatgagtaaggaataaaatgtatattgtgcctttgtctatag

SEQ ID NO: 264265 - DNA, 434 bp, Zea mays
catcacgtccgccctccccctctctctccctctccctctctcgacgacacaccaggccaccacgcacatgctttgtcccatggatgccgaccacctcatggtgttcaagaccatgctcgccgtcaggtggtagtcccggcgagcgagatctccccactccaggctctctcccatcgctcgctgccgcctcatgttgtttgcggccgtgctcgccaaccgcggcacggaggcgtcgatccgaccgggagcccctcgcaatggacaaagccttcctcctctccggcaatgagggcatcgtcggctcgtcgctaacatggggaagaggtaggagtagctcagcagtaggatggagtggccaggacagctcggtgcccacccgtcttcatcgatcgggaccctcttcccctctagcgagctattcccagtttcgagaa

SEQ ID NO: 264266 - DNA, 474 bp, Zea mays
tacctcactctctctcaccctctctcgacgacacaccaggccaccacgcacatgctttgtcccatggatgccgaccacctcatggtgttcaagaccatgctcgccgtcaggtggtagtcccggcgagcgagatctccccactccaggctctctcccatcgctcgctgccgcctcatgttgtttgcggccgtgctcgccaaccgcggcacggaggcgtcgatccgaccgggagcccttcgcaatggacaaagccttcctcctctccggcaatgagggcatcgtcggctcgtcgctaacgtgagcacgtggcagaccctgctgcccccatccttcttcatcttcactaagtgaggaactctctcgacccccttccccacccttcttgtcttcggagtccggatggctggagaacacggtgtttggtcatggcttctagaaggtggtgttttgcatttaaaaaggaaaaaattggag

SEQ ID NO: 264267 - DNA, 291 bp, Zea mays
cagctgacccagagcaacggggccgacctgtgggcgccggcgaacacgaccaggcgcaggtgaggaggagcctgctgccggcctgtgcctggtggtggtctgcccggaggaaaccgcgcaagtactactgctgtgtctgcatggtgcgcgtgtagtacagtttccaagcgcctgacccaattcgatctcctaacaagaagctaagcattaagcaagcgtgtccgtatcagccgccttgtattataccagtgacctgtcggcgccgtatatgtgtgatctgcttgctagctg

SEQ ID NO: 264268 - DNA, 452 bp, Zea mays
tgcattcaggcgccacgcacattcgtcgtcagtcccagaggatcttgtgctcagggaacagatctggcgcaacaagcctccgtggcgcattggcagagcatcatcaagatcttgacaaattctctcgatgttctgaaatcaaattacgtgcctccgttcctgatctgcaagatgttcacgcaagtcttctcgtttatcaatgtgcagctttttaacagccttctgctgcggcgtgagtgctgctcgttcagtaacggagagtacgtgaaggctgggctggatgagctagagcattggtgcttttggctgactgaagagtacgcaggatctgcatgggacgagctgaagcatatcaggcaggcagttaccctcttgatacttgacgacaagcatagccggagtctcgcggagatcacagacgacttctgcccagtgctgagcatgcagcaact

SEQ ID NO: 264269 - DNA, 1142 bp, Zea mays
cgccgagctgcaagtaactgcaccgactttcaaccggaagagccgagccgaaccaaagtcgcctcgtcgtctccaacctcccctcgcctcttgactaggccagggttccatcccacccccgccgccatccgatccgatggagggcggcgactcgtccggcgccggcgccggctccggtggcgccgtggcggcggcggccaagtggcggagcgacgcgtcgcgggcgttccagtactacctggaccgctcgacgcctcacgccacggggcggtggctcggcacgctcgccgccgcggccatctacgcgctgcgggtctacatggtgcagggcttctacatcgtcacctacgggctcgggatctaccttctcaacctcctcatcggtttcctctcccccatggtcgaccccgagctcgacccctccgccgcctccgaggggccggcgctgcccacccgggggtccgacgagttcaagccattcatcaggcgcctccccgagttcaagttctggtatgccatcacaaaagcttttgttatagcttttgtgatgactttcttctcagtgtttgacgttcctgtcttctggcctatactcctctgctactgggttgttctctttgtccttacaatgaagcgccagattgtgcatatgatcaaatacaaatatgtgcctttcagtatcgggaagcagaaatatggtgggaagaagagtgccgtgagccccagttcctcgaaagactgattccgaacctgccccagtaggaacttgccaggggaacaagatacgttggatgatgatatttgatgtgctcaataccaagtgtaatacttcattcatatctaggaggtagacggattttcgctcctgtttctgactctgggctcactgtttaattccatgttgtgcttaggttgcttcctcctatgcttgtatagcgagtttcgcgtctcagataaattatttcgttttagttactacatatctgggccctaaaacaataagctctatgctctcaccaagtttggttgggtgttgagctgggtgaggtaggcggttggttatttttgtatcgaactggaacaggatgctaaactttaaacgcagaatattttgccccaaaaaaaaaaaaaaaaaaaagaaa

SEQ ID NO: 264270 - DNA, 791 bp, Zea mays
cccacgcgtccgagaagcactacactacactacaccacacccacccgacgacgatcacacacgcagaagatcgagttcgttcgatcgtgaccgtgacgcaggaagctataagctagccaagacaggaataataatggcggcgtcgacggtggcgagcctctctgtcccggtgacgacgacgaccttcgcggcggcgggcggcgccgacgtgctgatcgtcgtcccgaggagggcgggcgccgggcgcgtcgtctggttccccgcggcggcgcgccgcggcggcgggcggttggtcgccgtgcggtccagcgggccggccacgccgccggagatctccgacaaggtgtcggagagcatcaagcaggcggaggagacgtgcgcggacgaccagaagggcgacgccgagtgcgcggcggcgtgggacgaggtggaggagctcagcgccacggccagccacgcccgcgacagcctcaaggagaccaacgccaacgacccgctcgagaagtactgcaaggagaacccggactccgaggagtgccgcatctacgacaactagctatagtcgtagctatatagggcgtggaatgatactctcgatcggcgcgtcatacgtggaatgaacttgtatgaagctatacctcaatgcttctctacccctgccgccgccgccgcagcagcaccccgtatgatatgatacacagctgggatggtatactgatattttgggttaaaattaaattatactttttttatttataacttaaatattataaagggcggccttcttttaa

SEQ ID NO: 264271 - DNA, 532 bp, Zea mays
cggacgcgtggggcggcgcgccgcggcggcggtcggttggtcgccgtgcggtccagcgggccggccacgccgtcggagatctccgacaaggtgtcggagagcatcaagcaggcggaggagacgtgcgcggacgaccagaagggcgacgccgagtgcgcggcggcgtgggacgaggtggaggagctcagcgccacggccagccacgcccgcgacagcctcaaggagaccaacgccaacgacccgctcgagaagtactgcaaggacaacccggactccgaggagtgccgcatctacgacaactagctagtcgtatagctatataggccatcgacatgaaggacgaaggttgtagcacactacgaaagaatgatactctcgatcggcgcgtcatacgtggaatgaacttgtttgtatcaagctatctatacctcaatgcttctctacctgccgccgccgcaccccgtatgatatgtgatacacagctgggatggtatactgatattttgggttaaaaaaaaaaaaaaaagggcgg

SEQ ID NO: 264272 - DNA, 784 bp, Zea mays
caaagtcttccggctcctcaagtgggtcaatgatctgcatgctcttatcagcccggcggccaaagggactccgctcaccctcgttctgcttggcaaatccaaaaacgcgctgctttcgacgttcttgttcttggatcagtttgtgtggctcggacgaacggggatcgtcaagaacaaggaggcgacggaccgcgttgccaggttatccctgtactgctggatggcttcttcggcctgtgcaggtctagttgagcttggagagcttaaaaggctatcgagatcgatgaggaagcttgcaagagagctgagggacacagataaatatgagaacgagcagtaccaggacaaaatgaggcagtcagatgaacggctcctggccctggtcaaggcggccatggacgtggtcgtggccgtcgggcttcttcagctggcgcccaagaaggtcactccgagagtgacaggagcctttgggttcgtcacctcgcttatctcctgctatcagcaacttccttcccgcgctcctgttgccaaagtcaaagtttgagaggtgtcgccgtcctagtaaaaaaaaaagaggcgacgctggaaatcgatctctgcttcaacaatggatcgtaatataattttattatgcgaatataaggcaggctagctatgtattttttttattaaaaaaatagtacaacaaaatagaacaccagtgattgcacgtatgggcttatcactatcttctctttttgcctagcagtggacaagtaatgttcacgtgattatgtctttggat

SEQ ID NO: 264273 - DNA, 700 bp, Zea mays
cggacgcgtgggcggacgcgtgggcgcggcggggcacggtgttgccggtgcttaagggatgctccctccttgtcccgcccgggcagctctggatgctcctcggccccaacggctgcggcaagtccacgctgctcaaggttttagcaggttttcagaatccaacggccggtacagtgtatataaacagaccatgcagctatgtcttccaaaatcctgatcaccaggttgtgatgcctacagcgggatctgatgtagcatttggtctcggtaagctcaaacttccgttagatgaggtcaggttaagggtatcaaaatctttggatgccgttgggatgttgagctactctcagaggccaatccaaactctgagtggtgggcagaaacagagagttgcaattgctggtgcgttagctgaagcatccaaagtattactgctggacgaactgaccacattcttagatgaacatgaccagataggcgtgataaatgcagtgagggactctgtggctgccgatggggaggtcgccgcattatgggtgactcatcggttggaagagctgaaatatgcagatggtgccatctatatggaagatggccagataatcgttcaaggcgacgtctctaccatatcaaaatttataaagaaaaaacaggcacgctactttggtcattttgaactctaaatccccaaagctttttg

SEQ ID NO: 264274 - DNA, 985 bp, Zea mays
aatgccggcactttttttggccgaagcaggacgccacgaggcgaacaaccaactgcttccttccccgccgccgcctacaaccaacacttcacgtgcccccatccttttccgcctcaagtcaagtgttcacggtccatcctctcgagagtctaggcccttctcccgaagccgcagacgcagaaaacggctctacatatggaggcgaagaagaagccgtcggcccccgccgccgtcggagccgcgccgccgccgccgggtaacgggtacttcagcaccgtcttctccgcgccgactgcgggaagcgcaagtgacgcaaagcatgcggacttgtacacgatgctgaacaagcagagctccagagggcagaatggcagagatggcaaatcccacagccgccctacttacaaggatggcaaacatgctcatccaaatgagccatcagaatctccttactttggctcatccgtgcattacggtggtcgggaattctacagcagcacgttacagaagcaaccagccaatgaaccccagacgaaatacaaggaggacaacccggatggctctgctaccagaggtgattggtggcaaggttcactttattactgaataatctgctgggacctctcccttttgtgaacaaggaataaaaggggtagagctgagaatggtttgttgtagtgttggaagtgttgacgcgagccgtcaagcatcgatcgatagtaatagttgtaatagttgaaagctgcgtcgtgactacaagcatcctgttggtggaggcagtattttagatccatcatcacgcctggacagatgtgggtgtccttttgtattcctgtttcccctgtgtgttcttgtggtttaggtgcaggtgctgtactaaaatgttgaaactcgcagttcgataaaatcagttgccaaagtgtttgggccccccaaattttaaaaaaaacacccaaaaaaaaaaaaaaaaaaaaaaaatgaatta

SEQ ID NO: 264275 - DNA, 466 bp, Zea mays
ggcgaacaaccaactgcttccttccgcgccgccgccgcctacaacgaccacttcacgtgacttacctcttctccgcctcaagtgttcacggctccatcctctctagagtctaagcccatctcgcgaagccgctaacgccgaaaacgaccctacatatggaggcgaagaagtcgggtcccgccgctgccggagccgcggcgccgccgccggcttaacgggtacttcagcaccgtcttctccgcgtcgcctgcggggagcgcaaatgacgcaaagcaggccgacctgtacacgatgctgaacaagcagagctccagagggcagaatggcagtggcattacagatggcaaatcacacggccgccctacttacaaggatggaaaacatgcttatccaaatgactcgtcagaatccccttacttcggttcgtccgtgcattacggtggtcgggaattctacagcagcacgt

SEQ ID NO: 264276 - DNA, 521 bp, Zea mays
catggatgtaggctgcgcccttttgtgttcctgttttcgctaagtgtgttcttgtggttttagatgtgcagccgtgcagtgctgaacttactaatgatgaactggtaggtcagcctgaagtagttttgataaaagcagttgccaaagaggacaagccggatggctctgctactagaggtgattggtggcaaggttcactttattactgaataatctgctgggacctctcccttttgtgaacaaggaataaacggggtagagctgagaatggtttgttgtagtgttggaagtgttgacgcgagccgtcaagcagctttcaactattacgatcgatcgatgcttgaaagctgcgtcgtgactacaagcatcctgttggtggaggcagtattttagatccatcatcacgcctggacagatgtgggtgtccttttgtattcctgtttcccctgtgtgttcttgtggtttaggtgcaggtgctgtactaaaatgttgaaactcgcagttcgataaaagcagttgcc

SEQ ID NO: 264277 - DNA, 424 bp, Zea mays
ttgtcataatagtgttggaactgttgatgcgagccgttaggcatggatcgaaagtaatagctgtaatccggtcggtggaggcagtatttagatgcatcatcacacctggacagacatggatgtaggctgcgcccttttgtgttcctgttttcgctaagtgtgttcttgtggttttaaatgtgcacccgtccagtgctgaacttactaatgatgacctggtaggtcagcctgaagtagttttgataaaagcagttgccaaagagtctgcagctcgcagggtcccctgctatatgtgcgtgttcctgctatctttcggaaagatttcggttgtacataatctgtccttacccttcttttttaaaaaaaaattatgttcctactattcttaaaaaaaaaaaagctaaaaactataaataaaaacaaa

SEQ ID NO: 264278 - DNA, 1428 bp, Zea mays
gccgtcgtccgcagccggcgcctgctggccacacccgccggaccggcccggcaggtggcagtttaatagtacaaaccaggctgatcctggcggcacgcgccgacgtgctcgatctccatctcgaccgtcgctcaccgggaagctacgctacgacgaagcatggcgtccgtcaccgcccgcgccccggtcgcagccctgcgcccgtcgtcgtcgtcggccttccttggccactctagccgcctcggccgcactgctaccgcgtcgccgacgaggcggagcctcaaggcggaggccaagggcgagtggctcccgggccttccctcccccgcctacctcgacggcagcctgccgggtgacaatggcttcgacccgttgggcctggcggaggacccggagaacctgaggtggtacgtgcaggcggagctggtgaacgggcggtgggcgatgctgggcgtggccgggatgctgatcccggaggtgctgaccaaggccgggctgatcaacgcgccgcagtggtacgacgccggcaagtcggagtacttcgcgtcgtcgtcgacgctgttcgtgatcgagttcatcctgtttcactacgtggagatccggcggtggcaggacatcaagaaccccggcagcgtcaaccaggaccccatcttcaagagctacagcctgccgccgcacgagtgcggctacccgggcagcgtcttcaacccgctcaacttcgcgcccacgctcgaggccaaggagaaggagctcgccaacgggaggctggcgatgctggcgttcctgggcttcctgatccagcacaacgtcaccggcaaggggcccttcgacaacctgctgcagcacctgtctgacccatggcacaacaccatcatccagaccttctccggttgagtcgaggtcgaggagggatacgatccatcgctggtgagctgatatggactggaaggcaaacattgaaaccttaagttcctttctggatcagtttgtgtgtgttgttaatctatctggagggtacagattcgggccgtgttgcaatgcatgcatggtctgaagggagcgagggctgaggagtgactggtatgtacattagctgaaggggatattaagggtagagatcgtttgatcagtatcatctgtatatccccatgcatggggtttcgttttgtgcgcttacttctggcttgccagcgtatggttcaatgtggaaacacatgtattagtacgagaactaatagacttataattaatataaaacaaagagtgagaaagggagggcggccgccagtcgggcccttcgtcggcgacgagtatccacctgcgccggcgccccatcttctgctccttccgttactcgcgctcggcacacaggcgacggcggcggcggcgctcaggatcgggctatcaccgacggggtccggcttctcc

SEQ ID NO: 264279 - DNA, 695 bp, Zea mays
ttcgcgggtcgacgcacgcgtccggcgtcgcgtgagagtggggggctgcacattaagaacccctgtagcgtcaaccagccaccccatcttcaagagctacagcctgccgccgcacgagtgcggctaccccggcagcgtcttcaacccgctcaacttcgcgcccacgctcgaggccaaggagaaggagctcgccaacgggaggctggccatgctggcgttcctggccttcctgatccagcacaacgtcaccggcaaggggcccttcgacaacctgctgcagcacctgtccgacccatggcacaacaccatcatccagaccctgtcgggttgagtcgacggtccatcaggtcatgtggtccgagctgaaaggccgagactcgaagacagttcgtgtgatgcgttcttaatcgactgagggctaaggaatgtgacgtactggtatatgtacattagttgaagcggaggctataaagggtgtagagattgtttcatcagtgtatatcatctgtcccgatgggttttgttttgtgcttttcacgattcattgtggaagcacatgtattattagtacaagaactgctagtagatatataggcttataattaagcacgacttctaaaacctcaacgtacgtatgtgaaagccccatatgatggtaaacaaaaggaaaatacaacattacatttgtatatggt

SEQ ID NO: 264280 - DNA, 447 bp, Zea mays
gtgctcgatctccctccgccactcccatccatctcctcgctcccagtcccccggaagctacgaagcatggcgtccgtcaccgcccgcgccccggtcgcggcccttcgcccgtcgtcggccttccttggccactctagccgcctcggccgcaccgcgtcgcccacgaggcgcagcctcaaggcggaggccaagggcgagtggctccccggccttccctccccctcctacctcgacggcagcctggcgggtgacaatggcttcgacccgttgggcctggcggaggaccccgagaacctgcggtggttcgtgcaggcggagctggtgaacggccggtgggccatgcttggcgtggccgggatgctcatcccggaggtgctgaccaaagccgggctgatcaacgcgccgcagtggtacgacgcccgcaagtccgagtacttcgcgtcgtcg

SEQ ID NO: 264281 - DNA, 604 bp, Zea mays
cccacaatttgcatttttattaaaaaaaaaaaaaaaagggcggccgctcgccctcgcgtcctgcttgatctccctccgccactccatccatctcctcgctcccagtccccgggaagcatggcgtccgtcaccgcccgcgccccggtagcggcccttcgcccgtcgtcggcatcgctcaagtcgtcgtcggccttccttggccactctagccgcctcggccgcaccgcgtctcccacgaggcgcagcctcaaggcggaggccaagggcgagtggctccccggccttccctccccctcctacctcgacggcagcctggcgggtgacaatggcttcgacccgttgggcctggcggaggaccccgagaacctgcggtggttcgtgcaggcggagctggtgaacggccggtgggccatgcttggcgtggccgggatgctcatcccggaggtgctgaccaaagccgggctgatcaacgcgccgcagtggtacgacgccggcaagtcggagtacttcgcgtcgtcgtccacgctgttcgtggtcgagttcatcctgttccactacgtggagatccggcggtggcaggacatcaagaaccccggcagcgtca

SEQ ID NO: 264282 - DNA, 466 bp, Zea mays
cccacgcacccgttcgtgctcgatctccatctcgaccgtcgctcaccgggaagctacgctacgacgaagcatggcgtccgtcaccgcccgcgccccggtcgcggccctgcgcccgtcggcgtctctcaagtcgtcgtcgtcgtcggcggcggccttccttggccactctagccgcctcggccgcactgctaccgcgtcgccgacgaggcgcagctataaggcggaggccaagggcgagtggctcccgggccttccctcccccgcctacctcgacggcagcctgccgggtgacaatggcttcgacccgttgggcctggcggaggacccggagaacctgaggtggtacgtgcaggcggagctggtgaacgggcggtgggcgatgctgggcgtggccgggatgctgatcccggaggtgctgaccaaggccgggctgatcaacgcgccgcagtggtacgacgccggcaag

SEQ ID NO: 264283 - DNA, 678 bp, Zea mays
  unsure (1)..(678): unsure at all n locations
cggaannnccgggnggacgcacgcgttcgcggggccgcacctcctccggatgcttctttgttcatatcaacatgaagcccacactcgggcggaaggataaagagcgtgcggactggaggctgtccatgctggcgttcctggacttcctgatccagcacaacgtcaccggcaaggggcccttcgacaacctgctgcagcacctgtccgacccatggcacaacaccatcatccagaccctgtctggttgagtcgacggtccatcaggtcatgtggtccgagctgaaaggcctagactcgaagacagttcgtgtgatgcgttcttaatcgactgagggctaaggaatgtgacgtactggtatatgtacattagttgaagcggaggctataaagggtgtagagattgtttcatcagtgtatatcatctgtcccgatgggttttgttttgtgcttttcacgattcattgtggaagcacatgtattattagtacaagaactgctagtagatatataggcttataattaagcacgacttctaaaaaaaaaaaggcacaaaaaaggaaaaagaaaagaaaaacaaccgacagaaagagacaatgtaagggaaaaaaacgccggagaaagggtgcagcggggggaaaaaaaagggggggcccccccaaaggtttcaagcttaagtac

SEQ ID NO: 264284 - DNA, 642 bp, Zea mays
ggactggaagacaaacattgaaaccttaagttcctttctggatcagtttgtgtgtgttaatctatctggagggtacagattccggccgtgttgcaatgcttggcgtggccgggatgctcatcccggaggtgctgaccaaagccgggctgatcaacgcgccgcagtggtacgacgccggcaagtcggagtacttcgcgtcgtcgtccacgctgttcgtggtcgagttcatcctgttccactacgtggagatccggcggtggcaggacatccaagaacccggcaacgtcaaccaggaccccatcttcaagagctacagcctgccgccgcacgagtgcggctaccccggcagcgtcttcaacccgctcaacttcgcgcccacgctcgaggccaaggagaaggagctcgccaacggtgagttgcattgcattgcaccatctcatctcaccgccgcccgccggtcgtcgtcggccacttccgatccttctctgacgttatattctgcagggaggctggccatgctggcgttcctggccttcctgatccagcacaacgtcaccggcaaggggcccttcgacaacctgctgcagcacctgtccgacccatggcacaacaccatcatccagaccctgtcgggttgagtcg

SEQ ID NO: 264285 - DNA, 935 bp, Zea mays
cgcgggtccacgcaagcgtctagactcagttccaaccaaagccatcggaggagcagctggacgaccatggcctcgccgctgctcaagtcgcactctcagctcgccgccgccgccgccctgcactccgtgaggagagccgaccgctgccctgcgacaatacacctgggcaagttccatgaccacgggctcaggtccggccgttctaagagatccggttcagcgaaggtgggcgccttcccgtcgctggacgtggtgccgctgatggtgacgatggtggagcacgtggacatgtcgcgggactacgtcgtgaccaagtccatctggcatctcagcgacgcagccctcaagagcgtctataccttctacgccatgttcaccgtctggggagtctgcttcttcgcgtccatgaaggatcccttctacgacagcgagacgtacaggagccagggtggcgacgggaccgtgcactggtactacgacaggcaagaggacctggaggcgtctgcgagggaggagctgctgcgggaggagctgctcgaggagattgagcagagggttgggggcctcagggagctggaggaagcgagcaaggaggagcagctcacaaagtgatcacgcgggcgaatgggctactcatcagctctctatctgagcttcgttagcaaataagttcagacttctctttactgccatgctcaagtctgtatatggccaaaacccaaaacgattgatcaactgcgctactgcagtgcaatagcaggatacgtatagttttcttttcaagggaaacaggaggggagtgcagtgcacccccgcccatactgcatgttattaataaaagagagttatttacagaatcaaaaagtaaacaaaacggaatgagccccctgaaacaaaaccatgttaaaacccgtgctggtggccacatcaaaaca

SEQ ID NO: 264286 - DNA, 825 bp, Zea mays
taacttgaaacagaaggctatgaccagatagactctgtcactactggagcatctgtactaggggagggagttgttgcaagcagccaaggcggtaagcaaaaagtggagttgaaggtttcaaagatcactgtgattggtaagagtgaccccacatcttttcctatacagaagaaacgggcatcaagagagttccttagaactgtagcccatctccgtcctcggacaaacacttttggtgcagtggcaagagtgagaaatgctctggcatacgcaactcataaattctttcaagacaatggatttgtttgggtttcgagcccaattattactgcctcagattgtgaaggagctggggagcagttttacgtgactactttgctttcaaacagcgctgaaggtggttctctactcaaagatattcctgctaccaaggatggaagggttgattggtcacaggatttcttctgcaaaccagcatttctgacagtgtctggacagcttaatggtgaaacatatgcttcagctctatctgatatttacacatttggtccaacgtttagggctgaaaattcaaacacttcaaggcatctggctgaattttggatgattgaacctgagcttgcctttgcggatctgaacgatgacatggcttgtgcaactgcatatctccagtatgtagtaaagtatattctggagaactgcaaagaggatatggatttcttcaatacttggattgaaaaaggcatcatagatcggttaaatgatgtagtagagaagaacttcgttcacctgtcttacactgatgctgttagctactactgggtc

SEQ ID NO: 264287 - DNA, 1431 bp, Zea mays
ctgtttgttcatactcctccgggcctacacaaaaaccaggggtgatttgacgctggcagagacgccggagtgccagaaagggatgaggctcatactcagcctgtgcttatccgaggggttcgataccttcccgacattgttatgtgctgatggttgctgtatgatagatcgcagaatgggtgtatatggctaccctattgagattcaagcccttttctttatggcactaaggtgtgctcttcaaatgcttaagcatgataatgaagggaaggagtttgtagagaagattgctactcgccttcacgctttaagttatcacatgcggagttatttttggctcgatttccaacagctaaatgacatctatcgttacaagacagaagaatattcccacacagctgtcaacaaattcaatgttattcccgattcaattccggactggttatttgactttatgccttgtcagggtggttttttcgttggtaatgttagtcctgccaggatggacttccgatggtttgcacttggaaacatgatcgctatactttcttctctcgcaacacctgagcaatctaacgctataatggatcttattgaggagcgctgggaagagctcattggtgaaatgcctctgaagatatgttatcctgctattgagaaccatgaatggcgaattgtgacgggctgtgatccaaaaaacactagatggagttatcataatggaggatcgtggccagtacttctgtggctgctgactgcagcctgcatcaaaactggacggccgcagattgcaagaagagcaatcgacctagcagagaggaggctgttgaaggatggctggccggagtactatgatgggaagcttggtcggtatgttggcaagcaggcgaggaaattccagacctggtccatcgcggggtatttggtcgccaagatgatgttggaagatccttcacatctcggcatgatctccctggaagaggatagggcaatgttgaagcctgttttgaagcggtctgcgtcatggacaaactgagatggccacgaaaatttttagggaagcaaagtctgctgaaaacacgagttcttgggggtagcatctccttgtctgctgatccgtttcctttgacttccaaacatggatggtttgtgtcttctggattttccttggttgtacaatatctcagctcgttttctgagttgaaagaaaaagaagcaactgcagaaatgggcattttgttttcttctttcgcaatctctgtaagaagatactctgattcttgcttgggtcatcctataagttgtggatccttttggttagagtcaacttcgttgtgccagtggattatacccatgagttagctgattccaggttccctgtgaagcataagtgctctttctaacgaatgaataaagctcctttctctgtgt

SEQ ID NO: 264288 - DNA, 2139 bp, Zea mays
tgttccacgcgtccgcactgacaccgcaaacacgccaaccggcctaccgccttcttctcttgtctcgtcctcctcgcgactatggccgccgccgccgaggtagaccccagccccaacccgccgccaactacagcctccggcctctccaagaccaagacgcgggaggccgaccgccgccgacgccgccgcagcaaggccaagaagaacaagtccgtcactgaggctgatgcccaggacgctgacgggggagcttccagctccgacgccaaggagaacgccgatcccaaccccgagccacaggttgaggtggagatagagtacgtgccggagaaggccgagcttgacgaccctctcctggatgatttcaaggccatcttcgagaagttcaccttcaaggacgctgctgcagcggcggccgaggatgataataaagacgagggtgccgctgatgccacaaagaaggggtcactggatgatgatgacgacgacgaagatgatgagcaggaggcaaacaagaagaaggacggaggcctatccaataagaagaagaagctggaacgcaggatgaagattgcagacctcaaacagatatgcaacagacctgacgtcgtggaggtctgggatgcaactgctgcagatccaaaattgctcgtatatctcaaggcgtaccgaaatacagtacctgtccctaggcactggtctcagaagcgcaagttcttgcaggggaagagaggtattgagaaacagcctttccagcttcctgacttcattgctgcaactggaatagaaaagataagacaggcttatattgagaaagaggatagcaagaagttgaaacagaaacagcgtgagcgtatgcagcccaagatgggcaaaatggatatagattatcaggttttgcatgacgcgttcttcaaatatcagacaaaacccaagctgtctagtcatggtgatctgtattatgaaggcaaagaatttgaggttaaactgagggaaatgaagccaggcatgctgtctcgtgagcttaaagatgctcttggtatgcctgatggcgcccctcccccatggcttataaacatgcagcgctatggtccacctccatcttatccccaactgaagatcccaggtctaaatgccccaatcccccctggtgccagttttggttatagaccaggggagtggggaaagccaccagttgatgagcatggacgtccactctatggagacgtttttggtgttctgcagcaggacgaacctaactacgatgatgaacctgttgatcgcagcaaacactggggagatttggaggaagaggaggaggaagaagaggaagaggaggaagaggaagaaccaatggaagacgaggaaatggaagacggaattcagtctgtcgataccatctcaagtactccaactggtgttgaaacacctgatgttatcgaccttcggaagctgcagaggaaggagactgacaagcaggcagaacggccgctgtaccaggttcttgaacaaaaggaagaaaggatcgcccctgggactctatatgggtcaagccatacgtatgtgttgggaacacaagataaatcatcagctccgaaaagggtggatctgcttaagaatcaaaagtcagacaaggtggacgtcaccatccaacccgaggaactggaagccatggatgatgttctggcagccaagtatgaagaagctcgagaggaagagaagcttcggaaccaaaaggaggacttcagtgacatggtggcagagaatgctcacaagaggaagaggaagcaagagaaggaaggcaagtcgaagaagaaggaattcaagttttaagggcaggcgggcgggcgggcgatgtaggtcatgaggcaccgttgtagctgttccaaatatgactggctgtatggtttagttgctgcgatctgacagttccgttccgttccgtgttccaagttccaaccgagaggtcgggctcattcgcttggttaacacaaatgtcgctttggattttcactggaatatgcttaattactcagtaagaaatcgttgcgctgttgaaatatcacgtgctggaaaggcggtctttgctaaaaaaaaaaaagaaaaaaaaaaagaggaagggaaaggaagaaacagata

SEQ ID NO: 264289 - DNA, 763 bp, Zea mays
gttgatgcaattattgcgaacccaaccgcgtatggacatacacatgtggcagaagcactaaaagtaccaattcatatattctttaccatgccatggacgcctactaatgaatttcctcaccctctttctcgcgtgaagcagcctgctggatatcgactttcttatcaaattgtggactccatgatttggcttggaataagggatatgataaatgagttcagaaagaaaaagctgaagctgcgtccagtaacatatctaagtggttctcagggttctggcaatgacatccctcatggatacatttggagtcctcatctagtcccgaaaccaaaagattggggtccaaagatcgatgttgttggattttgcttccttgatcttgcttccaattacgtgcctcctgaaccacttgtgaaatggcttcaagctggtgacaagcccatatatgttggttttggtagccttccagttcaagacccacaaaagatgactgaaattattgtcaaagcgctggaaattactggacagagaggtatcattaacaaaggctggggtggccttggaaccttggcagaaccaaaagattttgtgtatctactagacaactgccctcatgactggctttttctgcactgcaaagcagtggtgcatcatggtggtgctggaacgacagccgcaggtcttaaagcagcgtgtcccacgactattgtacccttctttggtgaccaacctttctggggtgaccgggtgcatgcaagagggc

SEQ ID NO: 264290 - DNA, 1781 bp, Zea mays
cccacgcgtccgatgcattaaggattgtgatgatcagcgtaaccaatcatttcccttcatttgaagcccttgctttggttcagatagaacggacactagaggatatatcacagaaactgcaactggttcaacgtctccatactcgctttctcttacttcccaatctccaagatgttacaagaaccatccagcatccttctattcatgaatggtcaagcaatggaacgcaccgaagcatttgtttcgtcaacaaagctacgggttatattctaatcgcagagcccccaagttttttgacgatatatgatgttatcgcaattattgttagtcacaggttaggggcaccaatgatcttgccgattgcctcagtgtttgcatgcccagatggttcagagaaagaagtccttcaaattcttcacctgggttcagactttggagtttcaaaacgtgaagggagatacgacgcttcccttggagcagaattgttatctcaggatgctcggcaggtgcaattccttccattaagaccgttctatagtggtgaaattgtggcatggaagacaggcaaagagggggaaaagctcaggtatggtagggtccctgaagatgtaagaccctcagctggccaagcactttacagatttccagtagagacagctcctggcgaaactcgcatgatgctttccagtcatgtttactcatttaaaagtgtttcaatggctgatcttctgtctgcaccttcccaagtgaatggtgatgtggcattaggtggccaagagaaccttttggccaccaacactggcactgaagtcaccaaggatgcggatgctggacttgaatatggaaaagtatcttccactgaactggtacaagcggtccatgatatgctttcagctgcaggagtaaggatggatgctgagaaggaaacactctttgaggctactctttccttgcaagatcagcttaaagaatctcaagttgctctcttggtggagcaggagaaggcggaggcggctgtaaaagaggctgacgtcgccaaagcagcatgggcatgccgtatctgcctgaatgctgaggtcaacatgaccatcataccatgcggtcatgtcctatgtaaccgatgctcaagttcggtttcgcggtgcccattttgccggacgcaggtggccagaatgatgaaaatattcaggccataaaaaacattgaaggacgtttggtctgactaaccgcttcagcctgtgaatgtgttacgatatcggggctcggctcccttctggttgtgcgttgcattcctttctggtctgatgcatctcattattctccatcggtgatgattggtaatccgatatggggggtgcaagtatagttacgttgtacaggaacgatgcattgcagtgtacatattccaaaatgaaatcattttacacacttcgaagggcatcgatatctgaagctggttttctcgtgcagtactttcagagtcaacactacactgcccggttatccattcagtatgtatggtggtgtccaacaaagacccattccttgtggaaaaaaacttagcactcctggctccttcaatacggaaaaaaaacgacatactgaaatcagctacgatgataggctgctagcctacgggctaaacgtggtttcgttactgagcagcgggtaaaattgtcaattcgtacaataaactggggcacctcggccctcagtcataggctcatagcatttgatgtaaccaggctactgttccatttgcatgtttctttttccagcct

SEQ ID NO: 264291 - DNA, 551 bp, Zea mays
cccacgcgtccgcggcgccagcggtggcgaaggcggaggagacgaaggtgacgaggaggacggtgacgatcaaggaggaccgtcctgcgcaggagggcagcggcggcgcctcgttggagaggaagaagtcgctgttccggaagcggcaggcgtcgtcggtcgccggagcggaggagcagagcggcgcccgggtgccgaggcggagcgggctccggccgcggatgccgcaggcgccaagggtgccgtccaacatcaacgagcgctcctccagcttcatcgaggagcgcaagaagggattcggcggcaagccggcgccggggaactgaacggacgacggcgtaggtaggggcccgagcaccgtgcagccgttgccgcgacggtgcaatatgctgccgcgccatgtctctctgactcccagggacagggagtgtgtagtgtacttacggttcgtgtgtatgggtttgatgaagtgtgtgattatattgctcgctaatcgtgtactggtccatggatggcggtctcgatcttataaccaacctgtgtatgggttt

SEQ ID NO: 264292 - DNA, 439 bp, Zea mays
atttaaagagtgaacccgatggaggtgaagagaagtgattctgtggactggatgtggattgaacatcgaagggtcatttttcatggcagtctcctgtttggaggtttggctctgtacaattcgggcaccgcaagaacgagccggtgacctgggtactgcttacatgattgttaaccatttcaacagccatacgcatctagctgagcttgacttggtagtgaatgtagtctagtcgcttgtcatgtaatagctttgcgattgatagtttgctagcttaggtagctagcctgactgtaatatgcagaataattcttgtcttgtttccgtccattttatccatgtaaaactatgagttctgaatctttctgaaccttgcttttcttgttctccttgtcatcttaatgtctgatcatttttgttgaattttttggttgaagct

SEQ ID NO: 264293 - DNA, 729 bp, Zea mays
  unsure (1)..(729): unsure at all n locations
tcgcccacgcgtccgcccacgcgtccgcccacgcgtgcgccaagagttaagccagccatgtggaggagggctttagcgatggtcctgttcatggctggcgccgcgctgctcgccggggctgccggcgccggcgcgcagcagggcgtgtggagcatcatcacccggcccatgttccagagcatgctgagccaccgcggcgacagcgggtgccagggcgccttctacacctacgacgccttcatcgaggccgccagcaagttccccggcttcggcaccaccggcgacgagcagacgcgcaggcgggagctcgccgccttcttcggccagacgtcccacgaaaccaccggtggatgggcgactgctccggatggaccgtttgcctggggatactgccgggtgaaggaacagaaacagacggacccaccctactatggacgaggacccatacagctaactcataagtacaactacaggctcgccgggcaagcgctgaacctgaacctggtgggcgacccggacctggtggcgagagaccccgtggtagccttcaagacggccatctggttctggatgacgccgcagtcgcccaagccctcgtgccacgccgtgatgaccggcgcctggacgccgtccgncaccgaaccgggccgtccccggggggtnngagaggggggggggccccccctttttttttttccccccccccccccccccccgccgggggggggg

SEQ ID NO: 264294 - DNA, 1046 bp, Zea mays
tttattcgtccgcccacgcgtccgaaagcaagggatgcagttttagggctttagcgggggttttgaacatggctggcgccgggctgctcgccggggctgccggcgccggcgcacagaagggcgtgaggagcatcatcacccggcccatgttccagagcatgctgagccaccgcggggacagcgggaagccagggcgccttctacacctacgacgcctttatcgagggcgacagcaaggtccccggtttcggcaccaccggcgaccagcagacccccaggcgggagctcgccgccttcttcggccaaggcgtgccacgaaaccaccggtggatgggcgactgctccggatggaccgtttgcctggggatactgccgggggaaggaacagaaaccagccggaccccaccctactatggacgaggacccatacagctaactcataagtacaactacaggctcgccgggcaagcgctgaacctgaacctggtgggcgacccggacctggtggcgagagaccccgtggtagccttcaagacggccatctggttctggatgacgccgcagtcgcccaagccctcgtgccacgccgtgatgaccggcgactggaggccctccgccaccgaccgcgccgcggggaggctccccggatacggcctgaccacgaacatcatcaacggtggtctagagtgcggcgaggaccgctccaccgacggcgccaaagccgccaaggaccgggtcggctactacaagaggtactgcggtatgctcggagtggggtacggggacaacatggcatgcgggagccagaagccttacggaggatgatgacactagtagctgatctatggttgctgcaatgcaagccttcacgtgtgtttgcctctctacctaaagaataaatcaagctagcagcaaacctaccttcggcgtgtgtctacttgcttatcatagtgtgtgtccgtgtatgagagatgatgtactgtcacgaactcacgtgtgtatgagagaggatacatggtaagactatccctactagaatccgccac

SEQ ID NO: 264295 - DNA, 1137 bp, Zea mays
agttaagccaccatgtggacgagggctttagcgacggtgctgctgttcgtggcaggcgccgcgctgctcggcgtcggcggcgccagcgcgcagcagggcgtgtggagcatcatcactcgtcccatgttccagagcatgctgagccaccgcggcgacagcgggtgccagggcgccttctacacctacgacgcgttcatcgaggccgccagcaagttccccggcttcggcaccaccggcgacgagcagacgcgcaggcgggagctcgccgccttcttcggccagacgtcccacgaaaccaccggtggatgggcgactgctcctggtggaccgtttgcctggggatactgccgggtgaaggaacagaacccgacggacccaccctactatggacgaggacccatacagctaactcaagaagatgatcagcagcagcacagccactctgcatgcgctatgtataggagtatatgcctggggatcatactggcatcgcatcgcatcgcatgcagggagtacaactacaggctcgccgggcaagcgctgaacctgaacctggggggcaacccggacctgggggcgagcgaccccggggtagccttcaagacggccatctggttctggatgacgccgcagtcgcccaagccgtcgtgccacgccgtgatgaccggcgcctggacgccgtccgccaccgaccgcgccgccgggaggctccccggatatggcctcacctcgaacatcatcaacggcgggctagagtgcggcaagggccagtccaccgacggcgccaaggaccgggtcggctactacaagaggtactgcgatatgctccgggtggggtacggggacaacgtgccctgcaaggaccagaagccttacggaggatgaggacgtggacaacaataattatatggttgctgcaagccttcacgtgtttttgttgcctctctaccaactaagaataaatcaagctagcagcaaacaggggcaacctgctaccttcggcatgtgtctacttatcatatagtgtgtctatgtatggcacagtatctcatctctggatgcatgataacgaactaatcaacggttagcagcattcacctttacgtttccggtggttcaaaaaaaaaaaaaaaagga

SEQ ID NO: 264296 - DNA, 920 bp, Zea mays
cagctagcccacatagcccttccagcaacgcgcgatcgaagggttgagagctattggaagcaagtacgtgcatggcgaggtttgcgctcgtggcgtgcgccgctgccacggcggcgctgctgctcggcgtggcggcagcggacgtggcgtcgatcatcacgcaggacgtgtacaaccagatgctgcccaaccgcgacaacacgcagtgccccgccaacggcttctacacctacgacgccttcatccaggccgtcaacttcttcccggggttcggcaccggctccagcaccgacgaactcaacaagcgcgagctcgccgccttcttcggccagacctcccacgagactaccggtggcacgacaggtgccgccgaccagttccagtggggttactgcttcaaggaggagatcaacaaggccacaagtcctccctactatggacgcggaccaattcaattgacagggcaggccaactaccagcaagccggggacgcgataggcgaggacctggtgaacaacccggacctggtgtcctcggacgcggtggtctccttcaagacggccatctggttctggatgacggcgcagtcgcccaagccgtcgtgccacgacgtgatcctcggcaactggacgccgtcgagcgccgacgcggcggcggggcgggttcccggctacggcgccatcaccaacatcatcaacggcgccaaagactgcggcgtggggcaaaacgccgccaacgtcgaccgcatcggctactacaagcgctactgcgacatgctcggcgtcggctacggcgacaacctcgactgctactcccagcagcacttctgatgaactgctgttcgacttgactgctagcactgttgctacagtataagatctgtgtccggacgtgttccatacatattttattattttaat

SEQ ID NO: 264297 - DNA, 1394 bp, Zea mays
cccacgcgtccgcccacgcgtccgagacctttcaaacttggtaaacgaagctgctctgttggcgtgggcgattaaataaagaaatagtggaaaaggttgacttcatccgtgcggttgagcgatctatagcagggatagagaaaaagcatgcaaaattgaagggtaatgaaaaagctgttgttgcgcggcatgaagtaggtcatgcactcgtgggaactgctgtagcaaacctccttcctggacagccacgtgtggagaaattgagtatattgccaagatctggaggtgcattaggcttcacgtacacccctcccgtcacagaggatagatatttactctttgttgatgaactacgtggccgtttagtaacacttctgggtgggagggcagcagaggaagttgttttagcaggacgggtttccactggtgcacttgatgacataagacgtgctactgacatggcctacaaagctgtagcagaatacggtcttaatcagcgcatcgggccaatatcacttgctacactgtcaaatggtgggttagatgactctggtggttctccatggggaagagatcagggccatctagttgatctcgttcagagggaagtaaaagcgcttttacagacggcactggaagtagctctttcagttattcgtgctaatcctgcagttttggaaggcctcggagcatacttagaagagaaagaaaaggttgaaggcgaggaacttgaagagtggctaaagtcagttgttgcatcaaaagagttgacctcttttatcagaggacagcaagagcaagttcttcagctggaagcaggctcctagcgtcaggactcttaaaattaattacttacagaagtcttccagcaattagaacatacaatgcgagttccaaggtatgcaatggaaaccttgatactggggacagatctgtggccatgtggtggattgtatgacctctcccacccactcatgctaagacaaacttgggttgggcgcccacccttcgttcgttgaatcatgagctcgagccttagaggagaattttcagaaaaggaaatctacatgcccgagtgaccatgtaaatatttaccattgcagttcgcggacccatgagtaccaaaaaaaagagatgattcatattgacctgtaacattgtaagatcaacctcaggaatatttgaagcggttagttttcacatgttgttcatagatcgggtcggtgttacacatgtaaaagattcttttttggccctaggttcttgtcctcaccctgttagaaattattttcctctttacaagatgatcctagagatgatcaataggataattaatgcttatacgggctatggttcctgtattgatatactctttccaatatacttcgggcttc

SEQ ID NO: 264298 - DNA, 512 bp, Zea mays
cttacacacagggttctcatcttctaggtagtcttggtattgatgttttctaaagaagctatgtgatgttctaggagaacccctttcagcacactaccagaatattctcaaatcacttctgaaagaattgccaggtcgattttgggagggaaaagatgctattctggatgcattggcttcattgtgtgcttgctgtcatgttgctataactgcagaagactcctgcttgccaagtgttatactaaattctgtttgtgctgcatgcagtaggaaatcaaaattgtaccgtgaagcagctttcttgtgtttacacaaagtgattacggcattcagagatccaggatttttcaatagtgtgtttccaatgctgttcgaggtttctaaccaatctgccatctcgaagacaaagggctctgctgaactagatgaaagtgaaggtgcttctgtttctctggataaagtgctcaattgtgcaacatcttgcatcagtgttgcttttccacaggatatta

SEQ ID NO: 264299 - DNA, 1159 bp, Zea mays
ggctggaccgacccacgcgtccgcgcatccgtgccctggacgaaagacgatggccgtccctgttggtcgcctcgccgactccacgctcctccagctcctcggctggctcccgctccccgcgtccgcctgcgaccgctgcgtgcgccactccaaggccgcatactacacctcctcgctcaccctcgccggcggctcctgcgggtacggcaccgaggccgcctccttcagcgccgggctcctcgccgccgccggccccgcgctgtaccgcgccggcgccggctgcggcgcctgcttccaggtgcggtgcaaggacaggaagctgtgcgccgcggcgggcgccagggtggtggtcacggaccgcgccaggaccaaccgcaccgacctcgtgctcagcagcaccgcgttcgcggccatggcgcgccccggcatggcccggcgcctcgccggcctccgcgccgtcgacgtcgagtacaagagggtgccgtgcgagtacaagcacaggaacctgtcggtgagggtggaggacaggagccagctgcggccccgggccccggcgacctcgccatcaggttcctctaccagggcgggcagaccgacatcgatcgccgtagacgtcgcgcaggtgggttcgtccaactggaggttcatgacgcgcgacgacgggccggcgtggagcacgaggcaggcgccgccgggcccgctccagctcagggtggtggtgacgggcgggtacgacggcaagtgggtgtgggccgaccgcgaggtgctgccgcggtggcggcgcgccggcgaggtctacgacacgggcgtccagatcacggacgtcgcccaggagggctgcttcccgtgtgacacgcacgagtgggaggaggagtgacggcaccagcagagcagaggctgcaacggaactcgctgaggactggagcctgcgggctgcggagttgagttgctctgtctgcctcccccgtgtcagtgtcactcgctgcctttctttgtctgagttttgccggagtggcacttgtaacgacgagaggagagagccccgaaacccctctccctcccctgtacatgaattagctgcatgcgtcgtcgtcgttgccatgggccgttgtttcaaccgcatcacatgcctcgttcgcgttgctttctgccaacactc

SEQ ID NO: 264300 - DNA, 523 bp, Zea mays
  unsure (1)..(523): unsure at all n locations
ctctctgagcagagccaagcccatccatcgttccacacctgcgggatacgatgtccgcgcctcctgcccgcctcgccgcgtcctcgctcccgctgctcctcgtctggctccagctccagctcctcctcgcgtccgcctgcgaccgctgcgtgcgccactccaaggccgcctactacacctccgcgctcaccctcgccggcggctcctgtgggtacggcaccgacgccgcctccttcagcgccgggctcctcgccgccgccagccccgcgctgtaccgcgccggcgtcggctgcggcgcctgcttccaggtgcggtgcaaggacaagaagctgtgcgccgcggcgggcgccagggtggttgggtcacggaccgcgccaggaccaaccgcaccgacctcgtgctcagcagacccgcgttcgcggccatggcgcgccccggcatgccccacgtctcgcagcacgcgtgcagcngacgncgagtacaaaaggtgccgtgcgagtacaagcacaggaacctgtcggtg

SEQ ID NO: 264301 - DNA, 445 bp, Zea mays
ctggaggttcatgacgcgcgacgacgggccggcgtggagcacgaggcaggcgccgccgggcccgctccagctcagggtggtggtgacgggcgggtacgacggcaagtgggtgtgggccgaccgcgaggtgctgccgcggcggcggcgcgccggcgaggtctacgacacgggcgtccagatcacggacgtcgcccaggagggctgcttcccgtgtgacacccaccgagtgggaggagtgacggctgcaacggaactcgctgagggctggagcctgcggagttgagttgctctgtctgcctcctccgtgtcactcgctgcctcttttttttatgagttttgccggagtggcccttttaacgacgagaggagagccgcgaaacccctctccctcccctgtacattaattagctgctgattatatatatatgggtggtcgtcgttgccc

SEQ ID NO: 264302 - DNA, 724 bp, Zea mays
cgacgagctcggaatcgggccacctctcctccggcatcgacgaggcgaaaccctagcgcccgagtccctctccctgctcccacgacccatggcggcggatatggcgtacgcgccgccgatgaaggcgggcaaggccgggttcgaggctggcatgatggatccgcagcacaggatccgcatcacgctctcctccaagagcgtcaagaacctcgagaaagtctgcggggatctggtgaagggcgccaagggtaaggagctcaaggtcaagggccccgtgcggatgcctaccaaggtgctccacatcaccaccaggaagtctccctgtggagaaggtaccaacacctgggatcgctttgagatgaggattcacaagagggtgatcgatctcgtcagtacaccagacgttgtcaagcagatcacctcaatcaccattgaaccaggtgtcgaggttgaggtgactatcagtgacgcttaatatggtagccttatcatttcaaaaggcttctagtgaacaggatattttcaattcctagtgagaacttgtgtaacagaggaatccaagtatttcatatcaaagtttaaaagtcttatcgagggttcgcggtatggatgtatcctgtttcaaatgatttctcctaatgtatgaatgaaaacggttaatggatgccccagtatgcattgcttttcatgacgtgagacatatagatctgtttcagatgttatc

SEQ ID NO: 264303 - DNA, 111 bp, Zea mays
ggtagccttatcatttcaaaaggcttctagtgcggatgcctaccaaggtgctccacatcaccaccaggacgtctccctgtggagacggtaccaacacctgggatcgctttg

SEQ ID NO: 264304 - DNA, 678 bp, Zea mays
cggacgcgtgggcggacgcgtgggctgactcgtgggcggacgcgtgggcggacgcgtgggcggacgcgatatttgagaggtttgatcgtgatcgaagtggcaggatcgacatgtcagaactgcgcgatgctcttctcagtctcggatattctgtgtctccaactgtccttgatctgcttgtgtctaaatttgacaagactgggggcaagagcaaagcaatcgaatatgacaacttcattgaatgctgcctcactgttaaggggctgacagagaagttcaaggagaaggacaccgcctactctgggtcggcgactttcacctacgaggccttcatgctgaccgtgctgcctttcctcattgcgtagtggcagtccactccgccgctcaaaacaagctttataagcttttccaatagtactgtaatattatgcctgctgtaaagagatttatgttcgcagagttgtttttagacgagttgttttgattctggatttaacttgtgttgtgaatcataaagttactctgaaatggagaatgtacctgttggttgaacagatgctttgtggctgtggtatgtggttggtgtgggtggctctagggatggcatgggtaagctatctactggacactcaacaccatattcatatctagagatataatgcctcatatccatgtgcc

SEQ ID NO: 264305 - DNA, 871 bp, Zea mays
cgccgcactacgctcccaccgtgtgatagctgctgctcctggcctgctacgacctcacggccacctctgtcctgtcccactagactagctgcagctagcgcctctttccctcgccgccgccccctatccgagagcgacgagcatggcgcactccctcgccgcctccttctcgccggccgccgcgcggcgccaggtgacaaatgtgatttcaagccggagctcggtttccttccagagccacaggatgacttctgtatccatccgttcaagaccaagttctcttcggttcaagatttgctgttcggctaagaaggagacagtcgacaaggtctgtagtatagtgaaggagcagctggctcttcccgatgggactgctatcactggtgaatcaaaattcgccgaacttggtgctgattcactggatacggttgagattgtgatgggcctcgaggaggcgttcaacataaccgtcgacgaaacaagcgcacaggacatcgcgacggtgcaggacgctgcagacctcatcgagaagctcatgctggaggcgcctccaaaggtcgtctagatcgatccatcagccttgcgatcggcgacttggcgttttatgttaaattgttcatgttacccaatttgttctttattgatggttcaagatgagatttttgtatggatgttgctgaggtataaattagatgctccaaaggctgcatggagcagatgaagacgatgtattccacttcccatttgcatgttgtactaccatagagagatcaatgaactgttatgaagagtcactgcaactatggcttttgatctttgtgaagtcacatacagtaattgttgttagatttgcaaatacaaggctgtctgt

SEQ ID NO: 264306 - DNA, 555 bp, Zea mays
cccacgcgtccggcatttctggcgctgcggctgaattgctggcgccggctggttcctgcaacctgcagcccgagccggagtttcggccgccgatgtgggaagtcttgcagtcgctggtgcgccagcgcttggtgcaaagggcgaacatggcgaggacgcagtcgcactcgcggcgccacggcgaacccgttactgcttcaagagatgttctcgtggtatgctcatctactggatggacagatgaaaagcacatgctttatcttcgattattggaagaaacatttgtgcaccaattacatggaagtggttgcatttttaagggactgtttaattgctctccaagatattgtaggcaaatgaaatcatctaagcaaattgttaaatacactacgcctggtcaggggtgtgccatagttgagggtggcaaagtcaagtcctgcataaaggctgagcatgttgagtcaccttcctgttgtggaaatcagcaagatgaaaaagttcgttccctggaagataatgcatcaaccactaagcccatggaaaaagccacttccc

SEQ ID NO: 264307 - DNA, 305 bp, Zea mays
cccacgcgtccgtggtgttgttatgcttgcagccgtggaggcgctggtgtgatgcggtggtggtgcatttgcaggtggcagttttctgtttcggtgggcggggacgtcgtcgaccgaccgaccggagcggaaggccggagatgatggaggagggggcgcccgatctgcgagagctcgtgcgcctgccggatgttctcgtggtatgctcatctactggatggacagatgaaaagcacatgctttatcttcgattattggaagaaacatttgtgcaccaattacatggaagtggttgcatttttaag

SEQ ID NO: 264308 - DNA, 1348 bp, Zea mays
gggttgaacaatatctggacgcaatggaaaaggttaaactgaaacaaggacgtgaagagtgcaatggtcatttctagtgatggaaatgcttatctgcaggtaaatctcgatgtttctgtttagtttttccatgtagactataatgacttttagttatctcttgttatcaaatcatggaaatgcatatttgcaagagagccagttttggaaactttacaaggaagatcctgcagcatgtgcaatcgtgatgaaaacttcagttggccttgtttacctgcttgcctgtctgctggagcctttcatgccctctttttctgatgaagtgttacgtcaactaaatttatctccagaagaaaatctgtcattaagtgaagaaaagggagaaattgcaaaggcaaaatctccttgggattttgtaccagcagggcacagaatagggaagcctgcacctctgttcaaggaattgaaagatgaagacgtagctctccatagagaaaaatatgcagggagtcaagctgagagaagctcaaaagcagcagctgatgctgaagccaacaaagttgctaagcagctcaagggcacaaaattatctgatggaggaacaaaaaaggaaccaaagaaacaatctggtggttcaaaatcgaagacagctgaggctgatattacggttgcaaaattggatattagagtgggccttatcagaaaagcagagaagcatccagatgctgattccctttacgtggaggagattgatgttggagaggacacaccaagaacagtggtcagtggcctcgtcaaattcatacctctcgaagaaatgcagaaccggaaagtttgcgtactctgcaatctgaaacctgtggcaatgcgtggtataaaatcacatgcaatggttttggctgcatcgaatgaggaccacacgaaggttgagttggtggagccacccgaatctgctgccgtgggcgagcgtgttacctttgctgggtactcgggggagcctgaggcttccctcagtggcaagagcaagacgtgggagaagctggccgccgagctgcacagtaacggtgagctcgtggcgtgctacaaagatgtgcccttcacaacctcggctggaatctgcaaggtcaagacaatagcaaacggagagattcgctaggcacatctccgaactgcagccagctgacccaatctgggaagtgctaaactttagcatcatgaacctaaacaagcctaaagccttttatgtttgaaaagtcgtgtacaagacaaactctccgtgaagagatgcttttttttacttactctactagagactcctaaaaaataccgatattaattggggttatac

SEQ ID NO: 264309 - DNA, 718 bp, Zea mays
gcatcgaatgaggaccacacgaaggttgagttggtggaacctccagagtctgctgctgtgggggagcgtgttacctttgctgggtacgcgggtgagcccgaggcttccctcagtggcaagagcaagacgtgggagaagctggccgccgagttgcacagcaacggtgagctggtggcgtgctacagagatgtgcccttcactacctcggctggagtctgcagggtgaagacaatagcgaacggagagattcgctagtaccaccacatcaccgaactgcagccagcggagccagtctgtctggtttcgctgaaagcgattgttcctgattttcatcttcgaaaattttggtatttccatttgttcaaataccgcaaagcaaccatgatttagaaaaatacagagagtgccctttccgcatcctcttttttatcagttagtacttggctcctgttgtctcactcggaggctccatgcttcttgctctatctgtatttccttagaagtgattctttacctgctcttatttatagttccatatgaaaggaacgaagtgtatcagaacatcactttatatataggagggcctgtctgtcactgccccctgtcaatgcatggaaaggagccaccaaccaagcttgaaggaaaaaaaaaaaaaaaaaaaaaaacggacgcgtgggcgaacgcgtggccgtacgcgtgggtcgaccggaattccggt

SEQ ID NO: 264310 - DNA, 293 bp, Zea mays
cgaaatactgttggagcggtatttcccccagccgagtttttttttgtttagtttttttctcgggtccctttcagatggaggaacaaaaaccgaaccaaagaaacaatctggtggttcaaaagcgaagacagctgaggctattacggttgcaaaattggatattagagtgggacttatcagaaaagcagagaagcatccagatgctgattccctttacgtggaggagattgatgttggagaggacacaccaagaacagtggtcagtggcctcgtcaagttcatacctctcgaag

SEQ ID NO: 264311 - DNA, 367 bp, Zea mays
ttttgtattacgtcagaaaaggagggcatgaaaggtgatagcagacaggcaagccgcctgtcatgccctccttttctgatgaagtattacgtcaattaaatttatctccagaagaaaatttgtcattaagtgaagaaaagggagaaattgcaaaggcaaaatctccttgggattttgtaccagcagggcacagaatagggaagcctgcacctctgttcaaggaattgaaagatgaagacgtagctctccatagagaaaaatatgcagggagtcaagctgagagaagctcaaaagcagcagctgatgctgaagccaacaaagttgctaatcagctcaagggcacaaaattatccgatggaggaacaaa

SEQ ID NO: 264312 - DNA, 320 bp, Zea mays
agctggacctgattctgttgtacctgatgctcctaatgcgggtgaacacacattgtcaaagatacttgcagaaaaaacaagtaaatgggttgaacaatatctcgacgcaatggaaaaggttaaactgaaacaaggactgaagagtgccatgggcatttcttctgatggaaatgcgtatctgcaggagagccagttttggaaactttacaaggaagatcctgcagcatgtgcgatcgtgatgaaaacttcagttggccttgtctacctgcttgcctgtctgctatcacctttcatgccctccttttctgatgaagtattac

SEQ ID NO: 264313 - DNA, 1306 bp, Zea mays
agctcgttcgcaccctctcttctctccgtccaacgacggcgcgattcagatccaggcatacaggccatccttccgccgccgcggactgcgcctaatcttccttctccagcagccgggcgttcccgtcgtcctcgatcgtcccctggactggatcgcaacggagatccagccggacctgcggtggtcccttccttttctcgatagcataatgagctcgccaatggagaggtgattcgtcaggctggtatcaagttcctagtccatggtgcctggatgagcagtagagatgctactggccgtggaaggaggagggttcttctcgtcttcagcttcggggtacagccatggccttgctctcttgctactcggacggaaagctgaggagaagcccgtcaaggcttcgccgtggaaccagtaccggctagtcgaccgggaggccgagcaggtgtaccacctgccctccgccaaggatcaggcgcctgggaaatgtgctccctttgtctgtttcggatgcacggctaatggcctcgtccgcccgcccccccccaaagcggtctccagcaatgcgctcggtaggggtacctcacaggaagaagcatcttgttcagcacacaaggcgttgacaactagtgcttccatcagtggcagtgagagacgtggctgtcttaagagcaactccaaaagggattctttggagcaccgtatagtggtgagcgagggggaagaaccacgtgagtctttggaagaggtgcaaaccttgagatctagcatggaacggaggaaagttcagtggacagatacatgtggaaaggatctttttgagataagggagtttgaaacaagcgacgagagtctgtcagatgatgacccagaaaatgaaggtttccggaaatgtgagtgtgtgattcagtagatttcttgtgtgcacaacaagcctgacaggaacatctcctcatgggaagcccatgtcctgctgagaaggacatgccgtatgttcttctgggaaggatatgccacacccagtgatttcattgcaactgggacgatcgatgacagtcaaaacatagcaaacggtgatggggcgatattgtgctagattatttgttggttctacgcttaactagtctgctcggcagggttatagtttcgatgcccacctgtacaataccaagatcccattcctttctttttgttgtcatgttttgtttctctgactttccatcacctttttcacgcccgctgtaccatatgaggctgccctgttacttctgccatggatggtggattcccgacttcatgctgttcc

SEQ ID NO: 264314 - DNA, 2966 bp, Zea mays
gcagaaaaatgcatgttgggtctttgaaacagttcgaatcatttcgataatgatctgtttgatctgttttaccgagaaggtctacggttcgaatccgtatagccctaatatatacgtcttttttccattttaggatggatatcttatgtttcctttagtatagttttcttttccttatttagtacttgtttatagactcgacggtcgattgcgccatagaatagagataaaagcattaccataggctcattcatcgaaacgcaaatcagagagacaggaaaagaaaaaagaattttgatcaaatcaatagaaggaaggatcccttacctgatttgaatttcatcctcctttaaataggatatgctctaagtcttcccatactttcctataatgactgcaacgattttctccattttgcgaattcctattttatttgaagtatattactatcatatacattatctaaatcgatccactttaaataaaatagaaaaaatcgaaagaaaaaaaaaaagaaagagtaaataataaaacaggatattctgtttcataattctgaaatagagttcttttttttagtattactcctcattaggatgtatatattaatcatcctattttaatatatattaatcatcctattttaattaggttctaatccaattagtagtaagtattttcttttttatttaatagtctctgactatcattaaataaagggtagagcaattcttttttctagagattctagagaaagtgagacaaagtgaagcgaaagagttttctttgtataagaattaggtctatatcatatctaaatagaagggaaatcaaaaagaagggaagtggggattacattggatgaatccttaaggaagacatatcacaaaagaaataaaggctaaagtaagcgctccttgcctttggtttgagcaaaacagattcttgtttcaccgaggaaaagagagaagttctggataaattgacaatgtcaacttgaattgactaattcagttccgcctattccacattaatgggagtacatttatgtttctgctttacgaatatgatattttttggacatttctaataatagcaagccttattcctattttggtattttggatttcaggacttttagccccggttagtgaaggaccagagaagctttctagttatgaatcgggtatagaacccatggggggggcttggttacaattccgaatacgctattacatgtttgcgctagtttttgttgtttttgatgtggaaacagtctttctctacccttgggcaatgagtttcgacgtattgggtgtatccgtttttatcgaagctttcatttttgtgcttatcctagttgttggtttagtttatgcatggcgaaaaggagccttggaatggtcttaactgaatattcagaaaaaaaaaaaaaaagaaggaaaagattccattgagacaattatgagtttgattgagtttccgttactcgaccaaacaagttccaattccgttatttcaactacactaaacgatctttcaaattggtcaagactctcaagtttatggccccttctatatggtaccagttgttgtttcattgaatttgcttcattaataggctcacgattcgactttgatcgttatggattggtaccaagatcaagtcctagacaagcggacctaattttaacagctggtacggtaacaatgaaaatggctccatctttagtgcgattatatgagcaaatgcctgaaccgaaatacgtcattgctatgggagcctgtactattacagggggcatgttcagtacagattcctatagtactgttcgaggagttgataagttaattcctgtggacgtctacctgccgggttgcccgcctaaaccagaggctgttatagatgccctaacaaaacttcgtaagaagatagcgcgagaaataattgaggatcgaactctatgtcaaagtcaaaagaaaaatagatcttttactacccgtcacaaactttatgttcggcgcagtactcacactggaacttacgaacatgaagtgcgctatcaatcaccatctactttagatatatcttctgaaacttttttcaaatccaaaagttcagtatcttcctacaaattagtgaattaggaggggttcttttgtgcagaaaaagaaagaaaagagcagtacaatctttcaaacttgcatttgaaatgtgaaatatttatacaaagggggagagatcaagacaatgcagcagggttggttatctaattggctagttaaacatgacgtggttcataggtctttgggcttcgatcatcgaggagtagagactttacaaataaaagcgggggattgggattccattgctgtcattttatatgtatatggttacaattatttacgttcccaatgtgcttatgacgtagcacccggtggatctttagctagcgtgtatcatcttacgagaatacagtatggtatagataacccagaagaggtatgcataaaagtctttgcccaaaaggataatcctagaatcccgtctgttttctgggtttggagaagtgccgattttcaagaacgcgaatcttatgatatggtgggaatttcttatgataatcatccacgtcttaaacgtatcttaatgcctgaaagttggataggctggcccttacgtaaggacccgataacccccaatttctatgaaatacaagatgctcattgagtgataataaattcatgttcacttatacaacacaattccagattttattcaagtcaaggaatattttgacgttctgttcctagacgaaacgaaatacttagaatataatattctaattaattcctattatacaaaaaggtccagatagactgaacaaaaagggcttcatttctattttccaatttggaaaatcacatatttgtttccttcgtatgaatcagaaaatacaatgact

SEQ ID NO: 264315 - DNA, 718 bp, Zea mays
gtctatcagaacctacctctgggtctatttgcattcagaagtatgatgatactgggaagcctattggcttgcctgaactgctatacttctcaacgtgttggaattgtatttcagtttcctgagagggatttcttagcggatactgtgcttgaagaagttacttttggatggcctaggcaaaaggcagacctcctattaaaagaacagctcgctttaaatcttcaaaatgcttttaactcggttggtctgacaaccatctcattagatgaaaatccgcaagctctaagtggtggatttaagaggcgacttgctttggcaattcaactggttcaaattcctgatctgttgctgcttgatgagccacttgctggtctagattggaaggctcgagctgatgttgtgaatctcctaaaggacctgaagaaacatcatactatactggttgtaagtcacgatctaagggaactatatccactagtggatcgctcatggcgaatggaaatggggggaagtttgaaggaggaagctttgcctgtctaaacatgtgcttgtcagtatagctgtcagacagcatgtacatattggtcatccaaatctagtcacatcaactacttttacaaacttagattatgtcggctgggaaatttcttcaagatacaatggagtcagagatggttgtgaacagtcatttggtaatgtgtggtaacttccgagcacg

SEQ ID NO: 264316 - DNA, 1116 bp, Zea mays
  unsure (1)..(1116): unsure at all n locations
ctttacgcgtcgtttcctaccttcttccctccgtctcccagctcgcgcaggcaggcgacacagcgacgctaaaaaccctagagcgaggaggcgtgccaggccagcggtttgcgatgacggcaccggcggacaaggggaagaaggccaagaccgatgccgacggcggcgaggagaacgagcaaatcgacggcgcccttgtcttctccatcgagaagctccaggagattcaggacgagctcgagaaggttaatgaggaagcaagtgacaaggttatggaggtggagcagaaatacagtgagattcgcagacctgtctatctcaagaggggtgacattatcaagaccatcccggacttttggctcacagcgtttttgagccatcctctactaagtgagcttctgactgaagaggatcagaagatattcaagtacttggactccattgatgtcgatgattctgatgttaaggcaggatattccatttaccttaacttctctgagaacccgtactttgaagacacaaagcttacaaagacctattcctttgttgatgatggaacaaccacaataaaagcttctcaaattaagtggaaggaaggaatgggacctgcaaatggaaatggtattaacaagaaggggagtaagcggccattagtagaggaaagtttttttagctggtttggtgatacagagctcaagagtcttgctgatggtgtgcaagatgaggtggcggagatcataaaggaagatttgtggcctaatcctttgaagtacttcaacaatgaggttgacgatgaatttgaaggagatgaagatgatgatgatttggatggtgatgatgacgatgaaggcgatgatttggagaactgagcccttgcgcttggttcagaatgttgtccgtggatgatgtggctgggcggaactgtgacccttttgggagattttttgttgttgttgtttgacttagctggaactcaacgtagggaactgtttaatgccttatgaagtcaaccaacttgaaaggagactgcttatatcataatctcggtatatctagcaacgcaatttgacccccaaaaaaaaagaccgcatggggaaataataaaataannanaaa

SEQ ID NO: 264317 - DNA, 584 bp, Zea mays
ccctcgcgtccgccaccttttcctgccttcctcctcactagtcgctcccccgcggctcgcgcaggcgggcgacacaacgaggctaaatccctatcgcgaggaggcgtgtgaggccagcggctttgcgatgacagcaccagcggacaaggggaagaaggccaagactgatgccgacggcggcgaggagaacgaacagatcgacggcgtcctcgtcctctccatcgagaagctccaggagatacaggacgagctcgagaaggtaaatgaggaagcaagtgacaaggttatggaggtggagcagaaatacagtgagatccgcagacctgtctatctcaagaggggtgacattatcaagaccatcccggacttttggctcacagcgtttatgagccatcctctattaagtgagcttctgactgaagaggaccagaagaattcaagtacttagactcattgatgtggatgattctgatgttaaggcaggatacctcattcatcttaacttctctgagaacccgtactttgaggacacaaagcttgcaaagacctatattcttgctgatgatggaacaaccacaataaaa

SEQ ID NO: 264318 - DNA, 524 bp, Zea mays
atgggacctgcaaatggaaatggtattaacaagaagggaaacaagcggccattagtagtggaaagttttttctcctggtttagtgatacagagctcaagagtcttgctgatggtgtgcaagatgaggtggcggagatcatcaaggaagacttgtggcctaatcctttgaagtacttcaacaatgaggttgaagatgaatttgaaggagatgaagaagatgatgacgacgacgacgacgatgataatttggatggtgatgacaatgacgatgatggggaccaggagaactgagccctcgcgtttaggcggggaattatgtgacccgtttgggggattttttttggttgtttgacttagctggaactcaacttagggaactgtttagtgccttatgaagtcaaccaacttgaaaggagactgctatatcataatctcggtatatctatcaacgcagtttgacctgtgattcagtttgtttgtgcttcggtcggtcgccttcagatgcatgatgcatggacatgttg

SEQ ID NO: 264319 - DNA, 784 bp, Zea mays
cgtccgcccacgccttcgcccacacgtacgcgtgtgatttaagccccacggaacaccacatattttggagtctaccgcggggaggtgggccaactcatcgcctaaatcttcttatggatggtcaagttctgtaacgacaatgtggcataggagatgccctgatcttcgtacgtcactttgcctactaagcatccacaaaatctcattataagttctgagaacgccaagtcaattgttcagtatattacaaaagtcaggttggagaactcccttgttcaggcttttgtctttcttctgcagaaggagagatgacgtgctgcatgacatgatggcatgtgaggcagcaacctcttctccgcaacccttgtcatggcctggagttggtgttctaggaaggagcacaattttattagggtagccaccagagttgaggtcccttttcaatggacgaacttggtgctgtggacgacatctgctattgtagctaggcgcatacatgttttcctataaatgctagctctgcaatcaccaaaggaaaacacaagagtactcttggaggaaagtttagcattcagtttaacaaaccttaccaactcatgccttgtttgaatgcaataatgcatgttatgttgccctgttgttgcttggacacatgcttggcatggctattttctggttatgtcacaactcacatctcccatgtaaatttatggctatgatatgcatcaaacaagcttatattttgctcttaaaaaaataaaaaaaaagaaaaaaaaaaagataa

SEQ ID NO: 264320 - DNA, 1537 bp, Zea mays
ccggcccacgcgtccgcgcacgcgcatgcacaagcacaagcgcactctagcaatggcttctgaggttgtccgccctagcgacgccgagctactaaaggcacaagccgacatatggcggctcagcctctcctacctcacgcccctgtcactgaggtgcgccgtggagcttggcatccctacggcgatctaccgccatggcggggctgcctcagccgctgagctggtcacggcgctgtctctcccctccactaagctgccgttcctccgccgcctgctgcggctcctcgccgcgtcgggcgtgttcaccgtcgacaagcagagctcggaggaggagcggtaccgcatcagccccgtgtcctacctcctggtggacggcatccctcacgaggaccacatgaaccacaccgctctggtgctcacctgcacctcgacgcgctacatcgaggcggggatagggctggcggagtggttcaagagggacgtggtcacgtcaccgttcgaggagctgcacggggcgactctgttccacgagagcatggggagcctcgacgcagatttccacgacatggcgagcgaggccttggacgcccacgacaacttcggcatcgagatagctatgcgggagttcagggacttgttcgaggggatccagtccatgacctactgctgcggtaacttcggtgatgacaagggtgccagggccattgtcaaagccttcccacacataaaatgcactgtgctggcccctcccaagatcattgccaccaaaccggccgatggagcgatgataaactatgtcgaaggtgacatgttcagtttcattccacctgctcaaactgtcgtgctaaagcttgtgctgcaccacctgaccgatgaggagtgcgtcaagctcctggctcaatgccggaaggcgattccttcacggaaggatggcgggaaagttataatcggtgatattatgattgaccactctgggcctatgctggaaactcacctcctgatggacatcggcatgatgaccatgacaaaaggacggcagagagatgaaaaagaatggagcgagctcttcaccaaagcagggttcagcgaatacaagatcctgaaggaatttggagctcgtgttgccttcgaagtctatccgtgagattgcacctggactatacatatatatttacatacatatatgtatgtgtgtgggtgccttgcgtggcttggcgtgatgatgtcataaataaagagggtgggtgtgcttgcggtattcatggatggccatggatctgagcacatgacgttggatgctttcttaaggctctcgtggatcttctatatttggaagaagctgtaaaataatatatcgccatctagtgttggcgttggcttgtatgtactttgtacctgctttgttattttgtgtaatatcgagtaacctaatgtatacttgcttactactatcactaccgaaatctatctctttgccgggtaacaaaaaaaaaaaaacaacaaaaaaaaaaaaaaaaaaaaaaaaaaaaaaaaaaga

SEQ ID NO: 264321 - DNA, 1381 bp, Zea mays
acaaaataacaaagcaagtacaaagtacatacaagccaacgccaacactagatggcgatatattattgtacagattctcccaaacatagaagacccacgagagccctaagaaagcatccaacgtcatgtgctcagatccatggccatccatgaataccgcaagcacacccaccctctttatttatgacatcatcacgccaagccacgcaaggcacccacacacatacatatatatatgtatgtaaatatatatgtatagtccaggtgcaatctcacggatacacttcgaaggcaacacgagctccaaattccttcaggatcttgtattcgctgaaccctgctttggtgaagagctcgctccattctttttcatctctctgccgtccttttgtcatggtcatcatgccgatgtccatcaggaggtgagtttccagcataagcccagagtggtcaatcataatatcaccgattataactttcccgccgtccttccgtggaggaatcgccttccggcattgagccaggagcttgacgcactcctcatcggtcaggtggtgcagcacaagctttagcacgacagtttgagcaggtggaatgaaactgaacatgtcaccttcgacatagtttatcttcgctccatcggccggtttggtggcaatgatcttgggaggggccagcacagtgcattttatgtgtgggaaggctttgacaatggccctggcacccttgtcatcaccgaagttaccgcagcagtaggtcatggactggatcccctcgaacaagtccctgaactcccgcatagctatctcgatgccgaagttgtcgtgggcgtccaaggcctcgctcgccatgtcgtggaaatctgcgtcgaggctccccatgctctcgtggaacagagtcgccccgtgcagctcctcgaacggtgacgtgaccgcgtccctcttgaaccagtccgccagccctatccccgcctcgatgtagcgcgtctaggtgcaggtcagcaccagatcggtgtggttcatgtggtcctcgtcagggatgccgtccatctccaggtaggacacggggcttatcgggttccgctcctccacctagctctgcttgtggtcggtggacacgcccgccgcggcgaggagccgcagcagtcggcggaggatcgtcagcttagtggaggggagagacagcgccgtgaccagctcagcggctgaggcagccccgccatgccggtagatccctgtagggatgccaagctccatggcgcacctcagtgacaggggcgtaaggtaggagagcctgagccgccatatgtcggcttgtgcctttagtagcccggcgtcgctaggccggtcaccctcagcacccattgctagagtgcgcttgt

SEQ ID NO: 264322 - DNA, 613 bp, Zea mays
acgcgtccgaggtaactttgctggggaggggtttatcaaggcctttgtggaggcctacccacacataaaatgcactgtgctggcccctcccaagaacattgtcgacagggcggccgatggagcgatgataaactatgtcgaaggtgacatgttcagtttcattccacctgctcaaactgtcgtgctaaagcttgtgctgcaccacctgaccgatgaggagtgcgtcaagctcctggctcaatgccggaaggcgattccttcacggaaggatggcgggaaagttataatcggtgatattatgattgaccactctgggcctatgctggaaactcacctcctcatggtcatcatgccgatgtccacaaattccgaaacgagctagatatattttgacccgaatgaattatgagcaaagcctaattgaagcttatgctagcgaaggctggacaaatcaaagccgggataagataagacctgtgacggagcttggaccaccccaatctggaaatcttccgatgcaaattgagaataccagaagccttccggaatatcgactctctcctctccaaggggaaaattgacgaaactttatttgattctgaaggagaaatat

SEQ ID NO: 264323 - DNA, 492 bp, Zea mays
atgcgatcacgtcgtgtattttttttttttatacattaggttactcgatattgcacaaaataataaagcaggtacaaagtacatacaagccaacgccaacactagatggcgatatattattttacagcttcttccaaatatagaagatccacgagagccttaagaaagcatccaacgtcatgtgctcagatccatggccatccatgaataccgcaagcacacccaccctctttatttatgacatcatcacgccaagccacgcaaggcacccacacacatacatatatgtatgtaaatatatatatatatctcacggatagacttcgaaggcaacacgagctccaaattccttcaggatcttgtattcgctgaaccctgctttggtgaagagctcgctccattctttttcatctctctgccgtccttttgtcatggtcatcatgccgatgtccatcaggaggtgagtttccagcataggcccagagtggtaca

SEQ ID NO: 264324 - DNA, 376 bp, Zea mays
aaaagaatggagcgagctcttcaccaaagcagggttcagcgaatacaagatcctaaaggaatttggagctcgtgttgccttcgaagtctatccgtgagattgcccctggactatacatatatatttacatacatatatgtatgtgtgtgggtcccttgcgtggcttggcgtgatgatgtcataaataaaaagggtgggtgtgcttgcggtattcatggatggccatggatctgagcccatgacgttggatgctttcttaaggctctcgtggatcttctatatttggaagaagctgtaaaataatatatcgccatctagtgttggcgttggcttgtcccaaaaataaaaaaaaaaaaggagggcggccgcatcatag

SEQ ID NO: 264325 - DNA, 715 bp, Zea mays
  unsure (1)..(715): unsure at all n locations
agagatgataaagaatggagcgagctcttcaccaaagcagggttcagcgaatacaagatcctgaaggaatttggagctcgtgttgccttcgaagtctatccgtgagattgcacctggactatacatatatatttacattcatatatgtatgtgtgtgggtgccctgcgtggcttggcgtgatcatgctcatcaatcaaccgggtggctgtccttgcggtattcatgtatgtccttggctctgagcacaggcccttgcttacattcgcaaggctcgcctggctagcctagatttcaaaccagctgttttgttttatctcgccatctagtgtcggcgttggcgtgtgtgtactttgttccggctcggttagtttctgttatatcgagtatcctaatgtatacttgcttactactatcaaaaaaacagagcaggtacaaagtacatacaagccaacgccaacactagatggcgatatattattttacagcttcttccaaatatagaagatccacgagagccttaagaaagcatccaacgtcatgtgctcagatccatggccatccatgaataccgcaagcacacccaccctctttatttatgacatcatcccacgcgtncggccctctccttcgcgagctcctcccgccgccgatcgccgtcagcgtcgtcgtcgtcgccggcgaagtacctgtctggccaggggcactgcacggagt

SEQ ID NO: 264326 - DNA, 298 bp, Zea mays
ggaaggatggcgggaaagttataatcggtgacattatgattgaccactctgggcctatgctggaaactcagctcctgatggacatcggcatgatgaccatgacaccaggacgacagcacggacgaaaaagaatggcgtcagctcttcaccaaagccgggttcagcgaatacaagatcctgaagggatttggacctcgtgttgccttcgaagtctatccgtgagatatatatttacatacatatgtaatgcatatgggttgcgggccttggcaatgacatgtcataaataatgaggagg

SEQ ID NO: 264327 - DNA, 938 bp, Zea mays
ccggttcggaattcccgggtggacccacgcgtccgcccacgcgtccgcccacgcgtccggcaagatattcttggtattaccttgatcgttacagtcatccaaattgttagaatacctaaccttaaggtgggttcagccctcctgggttgtgccttcttatatgacatcttctgggtttttatctccaagatgttgttccatgaaagtgtgatgattgtggttgcacgtggtgacaagactgatgaggatggtgtacccatgctgttaaagattcctcggatgtttgatccatggggtggatacagcatcataggctttggtgatatccttcttcctgggctgttggttgcttttgcattaaggtatgattgggctgccaagaagaccttgcaatctggctactttttgtggtcaatggtggcatatggttccggtctcctaattacatacgttgccttgaaccttatggatggccatggccagccggctctcctttacatcgtgcctttcacaatcggcaccttcttagcactgggcatgaagagaggcgagctcagaaacctgtggacaaaaggacagcccgagagagtgtgcacgcacatgcacccatcccccaaggattcgcctgttgcggtcagctcgctgtcgtagacaaggctaacgaccttacctgatgttgcctggccccggagaatgttgctgatgaccaaaaaaagtttccagggttaatgaaggagtctactgatttgtaatgaaccttacatagggataagccaagatcccctgatcgtgatcctcgttgtacagtaggtggtgtatttgtatagtgagtgatgactattgaaatgtgcggctgaccctggataaaaaaggcgcaggagcttgatgtgggagcagccctgcatctgcatctaaaaaaaaaaaaaaaaaaaagagaa

SEQ ID NO: 264328 - DNA, 1347 bp, Zea mays
tggtctcgtgggtgaagtcttagtggagctgtactctccagatcgtcctctggttgacactgcagaggtgtttctgtggcttatggctgttggcaccgttcttggtgcttcctactggtcagcatggagtgcccgagaagcagttattgaacaagagaagctcctcaaggatggccatgaagacctactgaatgttgaggccagaggttctagtggcatggtagatatcaacgtggcatccgcgatactgtttgtggtggttgcgtcatgcttcttgataacgctttacaaactgatgtcttactggtttgtggagctactggtggtaatcttctgcattggcggtgtagagggtctacaaacatgcttggtggctctgttatcaagatggtttaaacctgctgcagaatcttttgtgaaagtaccgttccttggagccgtttcgcatcttactctggcagtttgcccattttgcgttgcatttgctgttgtgtgggctgtttttcgccagctcccctttgcttggattgggcaagacattctgggtattgcattgatagttacagtcatccaaattgtgagagtacctaacctcaaggtgggttcggttcttctcggctgtgccttcctgtatgatatcttctgggtgtttatctccaagagatggtttcatgagagcgtgatgattgtggttgcgcgtggcgacaagaccgacgaggatggtgtgcccatgctgctaaaaatcccgcgcatgtttgatccatggggtggatacagcatcattggctttggtgatatccttcttcctggtcttttagttgctttctcgctaagatacgatttttctgcaaagaagggcttacggtctggttactttttgtgggcaatggtggcctatggctctggacttctaatcacatatgttgcgctgaacctgatggatgggcatggacaacctgcccttttgtacatcgtgcccttcactcttggcaccttgatcgcgcttggatggaagagaggggagctgcagaacctgtgggcgaggggagagccagagagagtgtgcacgcatatgcatatgccgctgctgccgacgaccccaaactaaccacagggtcagtagaaaatcagcaagggttcctagcttctgcaaaatattgtatttgcctgctggtaatatgcaaaccaaatcatgccagtttaaaaggaggcactgcttcttggagacagcaaagtctgattgtgagctaactgctgcccaatgtgcagccatgcatgtatgtaacagcacaacaataaattgagcctgtcgaacagaaatgtatgacccgtgcatagcagcagcat

SEQ ID NO: 264329 - DNA, 1160 bp, Zea mays
tttttcgagtgaacaaagagacgggggcacagtagtagaccgcggaatccgatctaaccctaaacccgaatcccaaacggaggagggcactcggcgaggcaggtggcgattctgcgattctcctgtcaccttccgtcgtctccatccccttccatttccggcgagggtcaaagcaggcctcttgctcttgggggtggtttgagagagggagagaacatggccgcggcggcggtgttggtggtgctcacggtgtcagcgctggcgggggcagcggccggcggtgatatcgtccaccacgatgacgaggcacccaagatccctggatgctccaacgattttatcctggtaaaagtgcaaagctgggtcaatggcaaagagggtggcgagtttgttggcgtcggtgctcggtttggtccaaaaatcgtctccaaggagaagcacgcaaaccgaactaaactcacgctggcagaccctatggactgctgctcttctccggaacattaaggttcctggagatgttcttttagttcaaaggggaaagtgcaaattcacaaagaaagcaaagtttgctgaagctgctggtgcttctgctatagtaatcataaaccatgtccacgaattgtacaagatggtctgcgaaaagaatgaaaccgaccttgacataaatatacctgcagttctcctaccaaaagatgcaggttctgctttacatacacttcttacaaatggtaacacagtttctgtgcagctttactctccagatcgacctgtagttgaccctgcagaggtgtttctatggcttatggctgttggcacagtacttggtgcttcctactggtcagcatggagtgctagagaagcagttattgaacaagagaagctcctcaaggatggccatgaagacctactgaatgttgaggccagaggttctagtggcatggtagatatcaatgtggcatcagcgataatgtttgtggtggttgcgtcatgcttcttaataatgctttacaaactgatgtcttactggtttgtggactactggtggtaatcttctgcattggcggtgtagagtaccttgaaatggcataacgggatggtctgcagctggtccactgaacaaaactgcattgctaattgattgctaagggaactgttcttgg

SEQ ID NO: 264330 - DNA, 499 bp, Zea mays
  unsure (1)..(499): unsure at all n locations
tgctcgtactcggtctcggaanttnncccgggtcgactccacgtcgcctccgcagcagtgcaacaagcaagatttacctgcccatcgatcatatcgtcaactggtccggcagttcgcgacaccatgagctccacggagtgcggcggcggcggcggcggcgccaagacgtcgtggcctgaggtggtcgggctgagcgtggaggacgccaagaaggtgatcctcaaggacaagccggacgccgacatcgtggtgctgcccgtcggctccgtggtgaccgcggattatcgccctaaccgtgtccgcatcttcgtcgacatcgtcgcccagacgccccacatcggctgataatatataagctagccgctatttcctttccttgccccagaacttgaaataaatatatatacgatgaaataacgcgggcatgccgaataatggatgtgtgaattctcactaattaagtaatgcataaataaacgtattcaaatgtcgccccttc

SEQ ID NO: 264331 - DNA, 278 bp, Zea mays
agtgcaacaagcaagatttacctgcctttgagtgtgcctttcaataatataatgtcttattttattattatgtttttgcagtgatagtagtctgtaataaatctctcctttcaatatatataattcacatgccagatcgatcatatcgtcaactggtccggcagttcgcgacaccatgagctccacggagtgcggcggcggcggcggcggcgccaagacgtcgtggcctgaggtggtcgggctgagcgtggaggacgccaagaaggtgatcctcaagg

SEQ ID NO: 264332 - DNA, 1194 bp, Zea mays
gaccaattaactagcttcttctagctctagctaggctcgtctgctgcaagaaggtaacagcgcaggcatggaggggaaggaggaggacgtccgcctgggcgccaacaagttctcggagcgccagcccatcggcacggcggcgcagggcacggacgacaaggactacaaggagcccccgccggcgccgctcttcgagcccggggagctcaagtcctggtccttctaccgcgccggcatcgccgagttcgtcgccaccttcctcttcctctacatctccatcctcaccgtcatgggcgtctccaagtccacctccaagtgcgccaccgtcggcatccagggcatcgcctggtccttcggcggcatgatcttcgccctcgtctactgcaccgccggcatctccggcgggcacatcaacccggcggtgaccttcgggctgttcctggcgaggaagttgtccctcaccagggcggtgttttacatcatcatgcagtgcctgggcgccatctgcggcgcgggcgtcgtcaaggggttccagcaggggctgtacatgggcaacggcggcggcgccaacgtcgtcgcgcccggctacaccaagggcgacggcctcggcgccgagatcgtcggcaccttcatcctcgtctacaccgtcttctccgccaccgacgccaagaggaacgccagggactcccatgtgccgatcctcgcccctcttccaatcgggtttgccgtgttcctcgtccacctggccaccatccctatcaccggcaccggcatcaaccccgcgcggagccttggcgccgccgtaatttacaaccagcaccatgcgtgggctgaccactggatcttctgggtcggccccttcatcggcgctgcgctggctgccatctaccaccaggtgatcatcagggcgatcccgttcaagagtaggtcttaaaggagccgatgctgctgcttcgagatgctgccggtcttgaaaggatggattcgtggctgtttcaaatgatcccctactatgttacgtggagttccattcctctttcaaagttcggagctgcttttatccgaacccagacttgtaattcatctgtaccaattgtgtaatatgccgcgcctctgttatgtgcaattcaaaattatgagacagcgagtcaagctttaagagttcatacaaattacattaattaacactagtag

SEQ ID NO: 264333 - DNA, 929 bp, Zea mays
cttggccgcaacgtgaagtgcagcagcagccagcagcgggggctggagcactcaccagtcagcactcagcagcgatcgcagcaccgcggcgagataatgagcagcctgtcctccggcatctctgcctcgccatctgcagcgcccagcaccgctcggcgccgccatgacgcagcgccgcagcagctgagggtgaaggcggcggcgcggccacagctgctgcacgccggccgccggcgttcgagtgtcgggaggaggccgggcggcggcgcggtggtggtgagggccgggcctgggccgctgtcggagatcgagccggacctggaggaggacgccatcgacgtgtaccgcaccaacggcatcagcccggaggacttcgagtacgggaagtatgacggacaccacacctatttcgaaggccaagacaagaagggcttctgggaggatgtctccgagtggtaccaagaagctgagcctcctcagggctttcaagcactcatctcctgggcatttcctcctgcgatcatcctcggcatggctttcaatgtgccgggggagtacctgtacatcggggcggccgtcttcatcgtggtgttctgcgtcatcgagatgggcaagcccgacaagccgcacaacttcgagccggagatctacatgatggagaggtcggcccgcgacaagctcatcgccgactacaactccatggacatctgggacttcaacgagaagtacggcgagctctgggacttcaccgtcaacaccagggacgacatcgtcaagtcgacctagatgcattgcgtacaccgctcgctgcccttcagattgttgcctcacagcaaaaaaaaccctgtgaaaggcaagctgtagctgctaggaaaatctcttgaataaaaaggaaagccatcctttcctgtaagactggagagcctgaa

SEQ ID NO: 264334 - DNA, 1252 bp, Zea mays
  unsure (1)..(1252): unsure at all n locations
gatggtcgcgaacgcgccgaccgngcggcctgcctgcgagcggaacgaggccacggccggctgctccaccaggagccaccgtgaccggctcagcagcgacacggccgccatcggtcacgcctcgccgttcgagagaaggaaagagggggggaaaggagcaggccaaattcatcggtggcggtgtccgaacccacctcatgccgtccctcgcaagtctgggcgccgtcgggaggagaaaatggcctccaggacgtcgccactggtgttcaagagggtggccgggatccgaaccatcgctgagtccgttcacttcaaggcaagctccttccacttcccagcaatcaagctattacctgctttaatcacaatcgctctgcccctcctggtgctttgctagccttcgcgggtcactgtccacagtagtagctgcaaatgcttgggattcgccttgcgactagccgcgaaacgcacgattccgatcaccagaacgcaaattccgatcaccagaggctactccgttcgaagcaaggaaaggaattgtgagccttgtgttggagaagtcggagactgagagtatatggccactccattggtgtccatgtcaatggctggagtgttttggagcaactcggggttgtcgcagagctcagggagacttgccaaccttgtcaccacgctttattcatagctctaaagacaagcattctacacccaagtatgggctcttctaccttgcatccttaattggcaaggcttctcaaaagcacaaggggaaaatctctctgtctctagctacaaaaactgctcttgctatctattatgatggcgaggacaactccattgccactgagagtcaaatcaaggtagagaacttgggaaatcaattggttcaacaaaaaggaagcccaagatagaagtgtatgaaaaggacaggaagaagggtgatggggctttaacaactcatgctagggttgagtaatgttcttccaatactactagcatatgttcaaagtcaccaagctcctgacaagccagttctgtggattacccataatgcaaaaagttttgatgtccctttccttaaccaagagtttgactgaagttcagcccaggttcctgaagatgaataggctatttgtcgatagtctttgttcagtgaaaaagttgaagaaaacaaatgatttcatcatgatcatatggaaaaatgttatgaagattactgagcagctcggcaaaacaggtgactaaacat

SEQ ID NO: 264335 - DNA, 1849 bp, Zea mays
tttttccccagctccctctcgtctcgcggccggcgcaggcgaaaccccctcatcgcttcgcgctgtccaccgacgaatcttccccagctgagttaatcggggactggtcgtgtgcggagatgttggtgctcttcgagacccccgcggggttcgccctattcaaggtgctcgacgaggggaagctcgacaaggtcgaggatctatggaaggagttcacgacgtcggactcagcgagaaaggtggtcgagctgaaggctttcaacaagtttgagaacacatctgatgccctatccgcggcaaccctgattattgatagcaagcctagcaagggtctgcgcaagttcttgcagaaacattgtgagggtgaaacattagcagtagctgattctaagcttggaaatgctataaaagaaaagctgaaaattgactgccttcacaatagtgctgtgatggagctgatgagaggactgagaaatcagcttaccgagcttataactgggttgggtgcacaagaccttggtccaatgagcttgggattgtcccacagcttgtctaggtataagctgaagttcagccctgagaaggttgatacaatgatcattcaagccattggattattggatgatcttgacaaggagcttaacacttatgccatgagagttcgtgaatggtatggctggcactttccagagctcaccaaaatagttacagataatatacagtatgccaaagttgtgaagatgatgggcaacagagttaatgcagtcaaccttgacttctctgagatattgtcagatgaagagctagaaacacagctaaaggaggcagcagtaatatccatgggaacagaagttagtgaccttgacttatcgaatatcagagagctatgtgatcaagtgctggcactttctgagtacagagcccagctgtatgactatttaagaagcaggatgaacactattgcaccaaatctgacagccctagtgggtgaattagttggtgctcgccttattgcacatggtggaagtttgttaaatttggccaagcagcctggtagcacaattcagatacttggtgcagagaaggctttattcagagctctaaagacaaagcattctacacctaagtatggcctcatctaccatgcatccttaattggcaaggcttctcaaaagcacaagggaaaaatctctcgttctcttgctgcaaaaacagctcttgctatccggtatgatgcccttggtgatggtgaggacaactccattggcactgagagtcgacttaagcttgagacacggcttcaagttcttgagggtagagaacttgggaaatctgctggttccacaaaggggaagcccaagatagaagtgtatgaaaaggaccggaagaagggtactggggctttaacaactcctgctaagacatataaccctgcagctgatctggtactcacggaagaaacaccaaagaagtcagaattggcttcaaagaagaggaaacataatgaggtggaaactgaaccattagcagagcctgcagaggaagcaatccaggaggatggtgaccaggaggatcggaagaagaagaagaaaaagaacaaggaaagcaaggaggctcctgctggtgaaggtgatggtgagaagaaaaagaaaaagaagtctaaggaggtcgaggaagagcctgttgtggctgctgcttcagaagttaagaagaagaaaaagaagtctgacgctgatggtgaggatgtcgccatgcaaaccgaagaatcaggtaagaaagagaagaaaaaaaaaaaaaaagggcggcctcgcgatctagaactagtcggacgcgtgggcggacgcgtaga

SEQ ID NO: 264336 - DNA, 469 bp, Zea mays
agacttaagcttgagacacggcttcaagttcttgagggtagagaacttgggaaatctgctggttccacaaaggggaagcccaagatagaagtgtatgaaaaggaccggaagcagggtgctggggctttaacaactcctgctaagacatacaaccctgcagctgatctggtacttactgaagaaacaccaaagaagtcagaattggcttcaaagaagaggaaacatcatgaggttcaaactgaaccatcggcagagcttgcagagggagcagtccaggaggataggaagaagaagaaaaagacacaaaggaaagcgaggaggctcctgctgctgaaggtgatggtgagaagaaaaagaaaaagaagtccaaggatgtcggggaagagcctgctgtggctgctgctgctgccacagaaggtgagaaaaagaagaagaaaaagaagtctgacgcggacggtgagggtgttac

SEQ ID NO: 264337 - DNA, 663 bp, Zea mays
  unsure (1)..(663): unsure at all n locations
accggtcttcggaattcccggggtcgtacccacgtcgtctcgtcggatctntngtgggtcgactccaaacgcgtccgttctcacgnnngtccgcccacgtcgtctcgtcggaccgcggtgggtgtggctttggcaagagccatggctctggatctgcnatgagaactggctcaaggctcaactcataccttataaaggatnactggagcttggtcttgtaaaactacctggagcatgctgctttgcaccacgtaacatgatatcgcatgtcgctggtgtaactaggtgagatatgggtgtggatgggagagagagagaaaaaacaaggtatgtagtccacgtctctgatcttggatggagaggcatgagatcttgggatgctcatgcatgggtcatgggtgtggctgagatctggaacttttgtagccatcaacttgtttcccagaaaccatgtaataagggtgacctgtgtatagctatgagacatcaacatatcttgctgctttgtgtgtccacctttgctttcatcttagctggtgtggttcataagaatctacttttagtgctgagccttttatcatctatgtgttcttggctggaactttttgtaactttaaaatataaggaagaatgggctgtgaaaaattcttttttttttttttt

SEQ ID NO: 264338 - DNA, 801 bp, Zea mays
  unsure (1)..(801): unsure at all n locations
gaannaccgggtcggccgacgcgtacgctgcacgcagctcagtctcgtccatccagtgctgtagaattttctttggtctgttggcaaggcagccatgaaaccccctcagctgccggcaggggagggggcctcctgggctcacgaggtcaagcaggccctccgtgagaaactccggcgctcctacggcgccggagctgcctccgccacaccggaggccaggccggccggcgaaccaagccgtggcgctgagtgccgcggctcggcggccgaggaccccataaggagagtcatgttcttggctccctggggtcacacataagaacacaaaccggccggccgagatctgggcatgcaagcttgcatggccatgtcttggtcagtcagatctgcaaacaaccaaactgtaaaaaagaactggagcctgtcttgtaaatcatggagcttgctgctgcttgcacccatgaaaaacatgaacgcatggagagctggttaactagctaggtagatagatatatcatatatgggtatgatggtgtggatgagaataaaaaaacaaggtacgtagtccatgtctctggtcttggggagtggctgtgagcctgtgagatcctgggaagttcatgcatggcatggctcaagagggagatctgaaacttgtgtagccactacgaacttgttttccagaaatcttgtaagtaggggagcctgtgaataatctagaaaacaaatcttcctgctctgcgtgtccacctttgcttccaggttcagaagattcttcgtctagtggtgatgctttatctc

SEQ ID NO: 264339 - DNA, 658 bp, Zea mays
cccacgcgtccgcccacgcgtccgctaccaccgtttcagtgctataggataggattttcttttgacggccatgaaaccccctcagctgccggccggggagcgctcctgggctcacgaggtcaagcaggccctccgtgagaaactccggcgctcctacggcgccgcctccgccacaccggcggccggtgaaccgagccgtggcgccgactgccgtggctcggccgccgaggaccccataaggagagtcatgttcttggctccctggggccacacataaaacacagacccagatctgggcttgcaagagcatggccggatctgcagagaactgctcaaccatacttaaaaggaactggagcttgtcttgtaaactatggagcatgctgcttgcaccacgaacatgaacgcatggctggttaactaggtagatatatgggtgtggatgggggagagagagaaaaaacaaggtatgtagtccaccgacgtctctgatcttggatggagaggcatgagatcttgggatgctcatgcatgggccatgggtgtggctgagatctggaacttttgtagccatcaacttgtttcccagaaaccatgtaataagggggacctgtgtatagctatgagacatcaacaaatctttctgctttgtgtgtcc

SEQ ID NO: 264340 - DNA, 417 bp, Zea mays
accgtggcgccgactgccgcggctcggccgccgaggaccccataaggagagtcatgttcttggctccctggggccacacataacacacagacccagatctgggcttgcagagaactgctcaaccatacataaaaggaactggagcttgtcttgtaaactatggagcatgctgcttgcaccacgaacatgaacgcatggctggttaactaggtagatatgggtgtggatgggggagagagagaaaaacccaggtttgtagtccccgtctctgatcttggatggaaaggcataagatcttgggatgtggctaaaatctggaacttttgtagccatcaacttgttttccaaaaaccatgtaataagggggccctgtgtatagctatgagacatcaccaaatcttgctgctttgtgtgtcc

SEQ ID NO: 264341 - DNA, 237 bp, Zea mays
ctcgagccgagatatatcatatatgggtatgatggtgtggatgagcataaaaaaacaaggtacgtagtccatgtctctggtcttgggaagtggctgtgagcctgtgagatcctgggaagttcatgcatggcatgagtcatgggtgtggtgggctcaagagggagatctgaaacttgtgtagccactacgaacttgttttccagaaatcttgtaagtaggggagcctgtgaataatct

SEQ ID NO: 264342 - DNA, 858 bp, Zea mays
ccacgcgtccgcccacgcgtccggacccacgcgtccgtgttattcttgctgctttttttaacggcatacgtggctgtgatgtgtggtcatgatcatttttttctcctgttattttagttgtcgtatcataaatgccatgtttgcattggtgttccaacatgtcaatattattgaataaatgtttgcattggcggcagcggggacgacgctaagtcgggcaatggcggaacggcccgtggtggcagtaacggtggagagaagcagggggatgaatccaacggtggcgggatacttagcgctgtggcttccaggattggcgtggccgtgtccggcgccaacggggaccgcagcggcagcgctgaggatggtgccgagacgagcgctggcgaccctggtcacggtagcaagggcgaggagaaggggcgtggtgtgaacggtggtagaatagtcgagcagatcatttccaatctgccctcagatgatcaggcgcctgatgccgatgaagcttccttgctcatcgccattatcgaagattagctccatgttccgaaggctctctaggtcgtcctcaacgccaggatcaaatcatcagctgagccggagactgaaaacaataaagaaaagcaagcagctggtcatagtaaacatcatgtagcgaggcttagcagattgcttttttttcccgttagaatcagtccacatgtcctcgacacgggctagatttgttctaggattatttttccagtagtaagccatgtatccatggacagtccacagcgcgacgtctaatgtaacatcatcaaggttcttttgactatcccctcagaaaccattccttaagacaaaaaaaaggtaaaa

SEQ ID NO: 264343 - DNA, 468 bp, Zea mays
cggacgcgtgggtgctcagtgactgcaatgcaaaggatccttctgttttgtatattgaatgagattacatcactgtttttttcttagcgatatgttgagctcatgtgctcgtttatgttagtcgatctctggctcttgtagtaacttggaaagcttgctgctttttttaagggcatacatgcctgtgatgtgtggtcatgatcatttttttctcctgttattttagttgtcgtatcataaatgccatgtttgcattggtgttccaacatgtcaatattattgaataaatgtttgcattggcggcagcggggacgacgctaagtcgagcaatggcgaagcggcccgtggtggcagtaacggtggagagaagcagggggatgaatccaacggtggcgggatacttagcgctgtggcttccaggattggcgtggtcgtgtccagcgccaacggggaccgcagcggcagcgc

SEQ ID NO: 264344 - DNA, 978 bp, Zea mays
aagaagcgcaaggacgccgaggagactggagacgacgagtctcatgacagggcctatgacactgtcatgatgcagcagctgcagtatcggaagaagggagtcacatacgggtctgttcaggtgtccaaggatatcaagtatgctgacaatcaaccagtggtgccttggggaccaagattctcccgatcaacagtgaaggacatgcgcataaatatggcagtatcagcagcatttgttgtttggatagctattatgggcaatgcagactggaagcctttgcagttcctatgttttgctttcttctacagaatactacagaagctaagagctactgaaccaccaattactccaatatacaatgaatatggcgaggttgaaggacgaggaataagaatggcaaaaagagtagtccgtgctctgggtttgatttttggatgtgtgttcactgcatccctggcttatacagcagctagtaacatggttgagctttcattgcagtatactccccgtatgttttactactatcaggagctgattgttactgtggctgcctccgttcttctgtgcatcacagcctcatactaccgatgaacacgacgagcagtgacggcctggctgaggcgattgtgagatagccgagaatccacaaattttgtagcatacttccaccagcacctgtcagctttgaggcagagagttcttagtgcaggatcatacatgaccacttgtggcacaatgcagatgaccaatggatgaaaaacatttggcgtgaatacttcaacagcagtgttgtgtgtgcgcaatttttaattaggtcttggacatgttagacaacagggttagctgcaatgtgcatgtgctttgttttgcctcgatcaacgaatgaatgaaagtactagctgctgcttctttgttaaaaaaaaaaaaaaaaaaaaaaaaaaaaaaaaaaaaaaagaaaaaaaaaaaaaaaactcgggc

SEQ ID NO: 264345 - DNA, 839 bp, Zea mays
cccacgcgtctgaagcgataaagagatcgatcgtattcgtatccgcggaacaagcagcgaaggatcggagcctatccaatggccgagggcaagagcagctccggcggcgacctgttctccagcggcaagctggtggcgggggccgccgtgtcggtgttccagcagaagagcgtggagaacgtcgacaagcaggaggtcgccggcgcggcggccgagctcctgcacgcggcgtccgcgtacggtaagctcgacgacaagccggccgggcagtacgtcgagaaggccgaggggtacctgaaggagttcagcgcgggacacgccaccgagcaggagcagcctgcggcggcagcaggcgacgacgcggcgcccaagccaccggcgccggaggcgcccaaggagccggcggcggtgcctgcgccggccgcggaggaaggcagcaagtcgtcggagggcttcggcctcggcgacgtcatgaagggcgccgagcagctggtgggagggaagcagcagggcggcggggaggagagcgccggcggcggtgggctgtttaagatggcccagggcttcctcaagtagatattgtctggccaacgtatatacgagtacgtaattagcttcaaaataatgttcccctcgcctttatttgctgttcaagtccctgtaataaccgagaacgttaattgtagcagtgtgttttttatatgattaaataagtactatgttgtacagggaaataaagaggaagaactggaagagaagagaaggtagagggccggaaacaagtgagaggaagagaaacaggaaggagacaaaaaagaaggggggggcgccctaagggt

SEQ ID NO: 264346 - DNA, 379 bp, Zea mays
cccacgcgtccgaatggccgagggcttcggcctcggcgacgtcatgaagggcgccgagcagctggtgggagggaagcagcagggcggcggggaggagagcgccggcggcgtgggctgtttaagatggcccagggcttcctcaagtagatatattgtctggccaacgtacgtgtactcttgtagtatctgttacgtaattagcttcaaaataatgttcccctcgcctttatttgctgttcaagtccctgtaataaccgagaacgttaattgtagcagtgtgttttttatatgattaaataagtactatgttgtataaggctactgcagctgtgcaggttactaaaaaggggggcccccgattagtgacctcgtcaacccg

SEQ ID NO: 264347 - DNA, 535 bp, Zea mays
ggagaagaaatctgggaagtgcatctaatgtagtctgattccacagagacctactgttggggatgtcaatggagatggccacactgatgttgtggtcccaactgtgtcaggaaacatctatgttcttagtggaaaggatgggtcaaaaatccaacctttcccatatagaacacatggaagaatcatgagtcctgttctacttctcgacatgagcaaacatggagacaatgcaaaagggctaactcttgcaacaacgtcctttgatggttatttatatttgattgagggatcgagtggctgtgcagatgttgttgacattggagagacctcgtacactatggttttggctgataacgtggatggtggagatgaccttgatcttattgttaccactatgaatggcaacgtcttctgcttctccactcaatcaccacaccatccgcttaaggaatggaggtcatcaaaccaaggaaggaataatgctgcatatcaatacaaccgcgcatgattttatgacaagcatggttccaggacc

SEQ ID NO: 264348 - DNA, 391 bp, Zea mays
aatccggggggcgacacacgcgcgcgagcggactctcgtcggtggtcgcgcgtccgagatggcatggacgaaggtgggaggcgcccaatgcatacccgccgaccgcaacgccgacggtcctttcctaacccgcagcccccggccacagtctctctcttccggtccagtgggggctgctagcttccaggaatattggagatgtgccttcaacactctagggctcgattgtctccagataagcaatttgctgcagaaaaaagtgttgccgtgtattgcgagccagttgaattatacactattatccagaagcgagctactaaaaatgtgaattttatcttacagttgcactcctatcataacattgtgcatatattgggtcttatcagtaaaa

SEQ ID NO: 264349 - DNA, 559 bp, Zea mays
  unsure (1)..(559): unsure at all n locations
attcccgggtgcgacgccagcgccgtccgcgccgaaataaccttnntaggttttgttgatttattgtcgcgatgattttatatgaaaaagatcgggggtcgcggtatctttttcactcaggactgggtatccatgccaggtgttataccggtggcttctgggggtattcatgtttggcatatgccagctctgaccgaaatctttggagatgattccgtattacaatttggtggaggaactttaggacatccttggggaaatgcacctggtgcagcagctaatcgtgtggctttagaagcctgtgtacaagctcgtaacgaagggcgcgatcttgctcgtgaaggtaatgaaattatcaaagcagcttgcaaatggagtgctgaactagccgcagcttgtgaaatatggaaggagatcaaatttgatggtttcaaagcgatggataccatataaaataaaaaaaaaagcgaaatagaaagagaaaaaataagttaagaaatgcagtaattcttctttattcctctaattgattgcaattcaattcggctcaatcttttct

SEQ ID NO: 264350 - DNA, 455 bp, Zea mays
ccggacgcgtgggcggacgcgtgggcggacgcgtgggcggacgcgtgggcgaacgcgtgggttggtggaggaactttaggacatccttggggaaatgcccctggggcaccagctaatcgtgtggctttataagcctgtgtacaagctcgtaacgaagggcgcgatcttgctcgtgaaggtaatgaaattatcaaaccagcttgcaaatggagtgctgaactacccccagcttgtgaaatatggaaggagatcaaatttgatggtttcaaagcgatggataccatattaaaaaaaaaaaaaacatttttatttcattttgttattatatctttaatatttgtttcttttttctttttaataattctttatattcctgtatgtgtatgggatacttttctctgttattaatctttgtatcagcgttttctttttgtttgtttttctctataatttat

SEQ ID NO: 264351 - DNA, 390 bp, Zea mays
accgaaatctttggagatgattccgtattacaatttggtggcggaactttcggacatccttggggaaatgcacctggtgcagcagctaatcgtgtggcgttcgacgcctgtgggcaagctcgtaacgaagggcgcgatcttgctcgtgaaggtactgaaattatcaaagcagcttgcaaatggcgtgctgaactagccgcagcttctgaattctggaaggcgatcaaatattgttggtctcaaagcgactggatgccttttacaatcaggatacccatagaaaaaaaacaaaaaacaaaaacaacccacaaaaacaacacaaacacaagaaaaagaaaaccaaaacaaaaaaaaaaaagggggggccccccaaagggttcaaacctaagt

SEQ ID NO: 264352 - DNA, 892 bp, Zea mays
gaccaacccagtgcaccacacaaggcattgtcagcggcggcggcggcggcgggccggcggagactcccaggccaggagcagtctgccgattggaaggggagatgaaggccacgctcaagggccgctacgagggcgacaaggccacggccgccaccaccctcgccgcccccgccggcgacctccgcctcaaggcctccgccaccgaggccgccttcaccaacggtccttccctgcgaggcctcaccctcaccctcgagaagcccggcgccttcctcgttgacctcaagccccacaaccaggatgtgcgctttcagttcatgaactccgcgctcgtgctcgacaagcgcgtcagcctcacctacactcactccactagcctcgccgcggcccccgccgccgcgccgccctcccgcaccgcgctcgactgcaccgtcactttcgaccccgccaacaaggtcagcctctcccactcgctaggctccggcggctgccgcctcaagtacacctacgcgcacggggtcgaccgcctcaccaccatcgagcccctcttcgacaccaacaagaacgcatgggagttcgccatcaccaggaagttcgccggaggggacgccgtcaagggcacctaccaggcctccaccaagctgctcggcctcgagtggagcagggactctctcgccggcggctccttcaaggttgcgacgacattcgatttgtcggaccaaagcaaagcaccaaagctaatagcagagagcacgtggaactacgaaatatgaaaaatggaagtgtccttctcatatcatacatactgcttgattgctgtatcctcctgaactatggagctattgtttttttggaacccctggtggtggttaaaatcccacccttttggtcc

SEQ ID NO: 264353 - DNA, 790 bp, Zea mays
tgccattctctcaagctcaagtagtgatgaagatggtcgtgggaggcggaggagatcttatggttctactatcatcattccgacggatatgttttggtacttggatgcagattattatagaagacgtcgagtagaaaacgaaaatgggatgaactttattgaatctgtattttcatttgtgtccgcccacgcggccccaaacgatgggcttgaagaaaagcggtggaagatgattggacagtatatttcatcaaatggtggagttgttacagctgaagaactggcaccatttcttgatgtgccacctccatcagaagagtccaaggacgatgaatcatttgttcttccagttcttttacgctttcagggacatccagaaattgatgagcagggaaatatcctgtatcgattcccatcgctgcaacgtactgcttcatcaaaaagtggtaggagcagggaatatgtgggtaccaaatggtctgcaatgtttagcggagttgaaaagtacttagaggagaaaccgtggaaattcagtaaagcgaatgcaacagagaaggcgatggttgctggtttgggaggactcaatctctttggtgtcatcattcttggaaacttgttgaagcatatgacagtgacacctggtggactaatctcatttgccgcacagttatatcctttgcttcagatatacgctggctccttttttgcaatacctttgtttagatggtttctgctacgcaagaccatcaatggcattaaaaagaggaataaggccagagaacagagagct

SEQ ID NO: 264354 - DNA, 551 bp, Zea mays
  unsure (1)..(551): unsure at all n locations
aagaaatagaggaactgtgtanggattatcctgcaactaccgttattcttgaccatatggctttctgcaagccaccaacgaacgatgaagaagagaaggcattctcttcatttctaagcttatccagattcccacaggtttatgtcaaatacagtgctcttttccgcataacaagagaagcatatccatatgaagacactgctcagcttctttccagtgtgatatctcattatggagccagtcgagtaatgtggggaagtgacttcccctatgttgttcctgaatgtggttacaaaggaggaagggaggcgatttctcatgtcgccagcaagataccagtttcccagtcagatttggaatggatcttgggaaaaacagtgagccaattattccaaggtgcatgggttactccatgatcactgtagctcgcaggacaatgtattccagagcaactatatcaacgggaatatatgtccttttttccagtgtttacatgtattctctctgtttcaaataatgtctttatctagatacatatatctaggtgtgta

SEQ ID NO: 264355 - DNA, 457 bp, Zea mays
cccacgcgtccgcccacgcgtccgcgccgggcactcgtcgagggcgtcatcagaggctcctcctaggcacgagcccgaccaggagaatcaggtggcgtctgggtcatcggtggacgcgggtcctaacagtaacggcatgccgctgtctgaagttaaccccactccacctgaaagcaacagccagacagtgaggaagcagcagccagggccctgcaaatagcagctgcctggagtcggcgaggcgagatagctgttctgcagcggtctgctgcagggcgagcaaacacctgtacagtggcagatggctgtctggctgctgtaggttgggatttgatgagggtatggtgtaaatatgagaaatcattcagatttgttgttggaaaccatacacacttcatctggtcagtattgatgctgaaaacagcaacccgtggtacgcggatatcacagagagatt

SEQ ID NO: 264356 - DNA, 738 bp, Zea mays
cctcttctctgccccaggccagaatcaagggagggtgaagcaccgccgccgtctccgctgccgcacaaagacgagaggaagaggttcccggcgcctccaccaccatgtcgtcgatgatgaacgcgctggcaaactggctggcgaacccgcgccgcaacccgctggcgcgcctccacatgcacgccgtctcctcgcgcctcaggaaatacggactgaggtacgacgacctctacgacccctacttcgatctggacatcaaggaggcgctcggtaggctgcctagggaggtggtcgacgcccgcatccagcgcctcaagcgtgccatggacctctccatgaagcaccagtacctcccggaggacctccaggcacagcaggttccattcagaggatatttgagtgacatgttggctttggtgaaaaaggaaagcgccgagcgtgaagcactgggagcccttccactataccagagaacgcttccctaaattgctggctaaacatggtcgcaagtcttctacctctttaccgcaaatcagaacgcatcaaataaaatgcagtggatgaaactgttttttttttgttccaaccaaagtctaattttacttgttcatgccatggtgcattaaccatgggctgtagctgttgttttcagcaaatttgtcttcaaccattattaacctgtgaaatcttcgatcgtgagtgccgttatgacaccgggtgaccgaaaatgtcttgact

SEQ ID NO: 264357 - DNA, 547 bp, Zea mays
ccacgcgtccgctctgccccaggccagaatcaagggagggtgaagcaccgccgctgaccgctgtccccggctccccgccgccgcacaaagacgagaggaagaggttcccggcggcgccacgactatgtcgtcgatgatgaacgcgctggcgaactggctggcgaacccgcgccgcaacccgctggcgcgcctccacatgcacgccgtctcctcgcgcctcaggaaatacggactgaggtacgacgacctctacgacccctacttcgatctggacatcaaggaggcgctcggtaggctgcctagggaggtggtcgacgcccgcatccagcgcctcaagcgtgccatggacctctccatgaagcaccagtacctcccggaggacctccaggcacagcaggttccattcagaggatatttgagtgacatgttggcgttggtgaaaaaggaaaaatctttttacttcattccattggcatttcatatgcctttgaattagagtcactccattcccctttttttaatgcgtgcaagggacctaatctacatg

SEQ ID NO: 264358 - DNA, 449 bp, Zea mays
tgcaaagttctttcccatttttattttgcctgaattcatatgagaagtggcttttgtttgacacctggcatttcttgcaggtgaaaaaggaaaacgctgagcgtgaagcactgggagcccttccactctaccagagaacgcttccctaaatcgctggctaaacatggttgcaagtcttctctttacggcaaatcagaatgcatgcaataaaatgcagtgggtgttttttttggttccaaccaaagttacattttacttgtccacgcagtggcgcattgaccatgcgctctacctgtttttttttcttccgattaatgggagcaaattattgtaaccctataattaacttgtgaatcttcagctgcgggtggctgacgtagtgttctttgatcgtgattttttgtatccattgagctttttttcgaaaaaaaaaaaaaaaaaaaaaaaga

SEQ ID NO: 264359 - DNA, 296 bp, Zea mays
gtgaagcaccgccgctgaccgctgtccccggctccccgccgccgcacaaagacgagaggaagaggttcccggcggcgccacgactatgtcgtcgatgatgaacgcgctggcgaactggctggcgaacccgcgccgcaacccgctggcgcgcctccacatgcacgccgtactcctcgcgcctcaggaaatacggactgaggtacgacgacctctacgacccctacttcgatctggacatcaaggaggcgctcggtaggctgcctagggaggtggtcgacgcccgcatccagcgcctc

SEQ ID NO: 264360 - DNA, 892 bp, Zea mays
accgagaggggtgcatacactcctagcagcgggaagggactgcaactcaacccaggaacagagcgaggcgacgccgaggcacctcatctccggcgaagggaaatggcgaccgttccaggggatctgatctggcagattgtgaggaagaacaactccttcctggtgaagcagtttggcaacggcaatgccaaggtgcagttcaccaaggagcccaacaacctctacaatatacactcctacaagtactctggcttagcaaacaagaaaactgtaacgatccagccagctgctggaaaggactcggctgtggtcctctctactaccaagaccaagaagcagaacgcacctgcgaagctcagccacaagtctgtgatgcgcaaggagttccgcaagatggccaaggctgtgaaaaaccaggttagtgacaactactacaggcctgatctgaccaagccagctcttgctaggctaagctcggtgtaccgcagcctccaggttgccaagtccggtgtcaagaagaagaacaggcagtcctaagcgctaagtttgtgttctgtcagggggcatgttggtgctcgtagtcccagcttatatttatctatgttccaacagttgagacttgttagaactgagcaaaccatgttaagatgctgctgtgtgtcattccttaaaaaaattgccttgcactttgtgattactgtctcgttgctgtgtgtcattctatgacaaatcgtttgtcgcttgattgtgctttgtttgtaaacttgcttgtcgtgactagcacttgttatcgcatttttgattggttctgtaaacaatatccgataaacaagattagtatcctgcacgagtgcatgtttaaactatttataaaaaaaaaaagggcgaccgc

SEQ ID NO: 264361 - DNA, 742 bp, Zea mays
  unsure (1)..(742): unsure at all n locations
cccgcgcgtccgcccacgcgtcctcccactcgtccgcccacgcgtccgattttcgactagttacgcgaagggaaatggcgaccgttccaggggatctgatctggcagattgtgaggaagaacatctccttcctggtgaagcagtttggcaacggcaatgccaaggtgcagttcaccaaggagcccaacaacctctacaatttacactcctacaagtactctggcttagcaaacaagaaaactgtaacgatccagccagctgctggaaaggactcggctgtggtcctctctactaccaagaccaagaagcagaacacacccgcgaagctcagccacaagtctgtgatgcgcaaggagttccgcaagatggccaaggctgtgaaaaaccaggttggcgacaactattacaggcctgatctgaccaagtcggcccttggtaggctgagctctgtgtaccgcagcctccaggttgccaagtctggtgtcaagaagaagaacaggcagcctacgcactaagcctgtgttctgtcgttggtgcccatagtctcagcttatatttatccaatgtctccaacagttttgagacttgttagaactagagcaaatcgtgttaagatgttgccgtttgtcattctatagcaagaattccatgacaaagattgcttggcacttaaaaaaaaaaaaaaaaaaagcaaaaaaaaaaaagggcgcgcgcacggggaatcnggacggtacgtgcaggc

SEQ ID NO: 264362 - DNA, 356 bp, Zea mays
cccacgcgtccggccgccacctcaacccaggaacagagcgaggcgacgccgcggcacctcttctccgttgatattgattatttaggcgaagggaaatggcaaccgttccaggggatctgatctggcaggttgtgaggaagaacaactccttccttgtgaagcagttcggcaacggcaatgccaaggtgcagttcaccaaggagccgaacaacctctacaacatccactccttcaaacactcgggtttggcgaacaagaagactgtgacgatccagccagctgcaaaggactcggctgtggtcctctctactaccaagaccaagaagcagaacgcacctgcgaagtcagccacaagt

SEQ ID NO: 264363 - DNA, 773 bp, Zea mays
gtgtcagaacagatgaaactgcaatgcacgaagagctatctaacagatttgattacgatggggtctttgggaccgcactaaataggttctgtgttcaggctgctgttgggcatccacttacagtttatggaaaaggtggtcagacccggggatatctggacatcagagacactgtacagtgcgtggagctagcaatagccaacccagccaaacctggcgagttcagagtcttcaaccagttcaccgagcagttctctgtcaatgagctagccaaactggtgactgcggcaggagcgaaacttgggcttgaagtggagaccaaatcgatacccaacccacgagtcgaggctgaggagcactactacaacgccaagcacacgaagcttattgagctcggcctggtgccccacctgctctcggactccctgctcgactcgcttctcaattttgccattcaatacaaggatcgggtcgacacggcacagatcatgcccagtgtgtcgtggaagaagatgggtgccaagccacggacagtctctgtttagagggtgattcaacttcccctgggttataatatcaaccatggcattgacattattgacatatgtaatgtaataattatgcacgttagtatgatttgctaggtagtgaggtgtttattacgatattaaattatattgttgcccgtgcaactcaagagttcatgtcagttgattctgctgctcactcgagccgccttgaggtcttacaatgctcctgagggttaagctgtc

SEQ ID NO: 264364 - DNA, 542 bp, Zea mays
  unsure (1)..(542): unsure at all n locations
ccggnccggaattcccgggtcgagccacgcgtccaccaagctgagtcgaaaacgagcacctctgcacaaaaatccgattgacagggagtatagagcgtgtagcgtgttcttcatttttctcggggaggggctgtgcctgaagacctgaccagcctccacctctgattagcgtgagtgggtacgtcgactgaagaacgtaagctggcgaagtagtaccatgtatgtatggagagggttaaatgtaattctttccaatggtccaaggcggatgctgcttccaatgtagcagcatgcgattctttggacaagatgtatactattacagtgaagagtgaaaaaaagagagagttagctacatagaaagctttctgagctctatacgtactacctccgttctcagatatttttgtcgtcagctcggtcatttttgaactaaacggcgataaataaataaaatgaacggaggagtatatcttatttaacaaccactgatattttatacaaatncaaccaaataactatttcatgcatatgctacgctc

SEQ ID NO: 264365 - DNA, 742 bp, Zea mays
acattccgcagaccctagaaacttgcagccgcgtccctgaccgtccccgaagaaccaaagctagagacaaccgctgcgtaaacgaatccatcgccatggcgtctcgtctcgttgcggcggcggcctcctcctcctccctctcctcagcgtcccccctcgctcgcctaatctctcgccgcggccttgccggtgccgcagacggccatgggtctgcgaaggtgcccttgtggaaagatccgttgagcccgagcaagtggaaggaagagcactttgttctagcaagcctctcaatgtggggggttattttttatggtggttacaagctttttagtggaaagaaggaagccaagactgaggcggcatcaccacaggcataggtggcggagatggagttatacccgtatctgtggcctggcaacaatgttaaataaaaggaatgctttatgttgtgctttcaagttgataaattgtggcaacaggagattttgctttacctaggcaatatattgagaagctactcttactcatccaccatgaataatctttgctgcagtggagcttcatgtcggcgaacaatgcaaacgttgtacttctttcatgcgattgagtagttgatgttttacttctgttgccaccaacagttgaacgctgtacttgcagattgataagatctccgtgcttcctttctagtttgcgttgttactgatgaatttagcaaacgttttattggtggttttatttg

SEQ ID NO: 264366 - DNA, 654 bp, Zea mays
acgatttcttcgccatgaccatgacgtctcgtttcgttgcggcggcctcttcctcctcgtcctcgtgccccctcgcctgcctaatctctcgccgcggccttgccggtgccgcagacggccatggacctgcgaaggtgcccttgtggaaagatccgttgagcccgagcaagtggaaggaagagcactttgttctagcaagcctctctatgtggggggctcttttttatggtggtttcaagttttttggtggaaagaaggaagacaagattgaggtggcatcaggacagacataggtggctgggatgggagttcttgcctatttctgtggccaggcaacaatgttaaataaaaggaatgtgttatattgtgctttcaagatgataaattgtggcaaccaggttttgattatgtaggcaatattttgacaagctactcttatccagcatgaatgacttcatgttagtgcgattgagtagatgttttacttctgttgccatcaccagttcaacgctgtactttcaattgattcggtcccgtgttttctagtttgcgttgttacagatgaatttgacttaagttttattgataattctatttgtattgcttgcaattagaaattgcaatgtgggtttttggatgtatctacgtgccacc

SEQ ID NO: 264367 - DNA, 590 bp, Zea mays
ttgtctttacaaccgatgggtaaacgaaacgatcggcatggcgtctccgccggtaggaggcggggccagctgctgctcggtatggtcagtgctcctccacaggcggctaattgatcgccgcgacattggcggggcatcagaccgcctatggtctgtgaagagtggccttgcggaaagaccgcccgatgccggagcaagtggaaggaagagcactttgttgtagcaagcctctcaatgtggggggttatttgttatggtggttacaagctttttagtggaaagaaggaagccacgactgatgcggcatcaccacaggcataggtggcggaaatggagttatacaccggatctgtggcctggcaacaatgctaaataaaaggaatgctttatgttgtgctttcaagctgataaattgtggcaacaggagattttgctttacgtaggcaatatattgagaagctactcttactcatccaccatgaataatctttgctgcagtggagcttctcaatattttgctttacgtaggcaatatattgagaagctactcttactcatccaccatgaataatctttgctttcccacgtcc

SEQ ID NO: 264368 - DNA, 662 bp, Zea mays
gcgctccccgacctcccagctctagagtctagacagccacaggcaggagctccacggagtccacgtgacctcagacctcacacattcacagtgtcacgctgcctcaacgtcatgtctctcctcgcctcccccacgccgttcggcgctgaccgccatccgccgccgcgtcgccccgcttcctctcctccctgctggcggtcgcgccgccctgcacgtggccctcgcgcgccgcggcggggtctcgtcccgcacgcagcggcgcctcgaggagcgcggaggcaagaagcgccgcggcggggtcgcggcgcccgacgtggacgaggacgcggcggaggcggggacggcggcggagtgggaaggggagccgctggggttcgaggtgtcgacggagcccatgccggagctgccgaacccggagaagcccgacttctgggaggggcctcagtgggaggccctcggcttcttcgtgcagtacatgtgggcgttcggcgtcgtcttcggcgtgagtacatgcatcttcccctcccttatttctcgcttgtgcgcagttgctgtgtgtcctcgacgcagtgctatccctgcaccagagtccgggtgttcagaagtcgaagcattatctctatgtagagctgcccgacacagctcctcgactactattcaat

SEQ ID NO: 264369 - DNA, 596 bp, Zea mays
cccacgcgtccgcccacgcgtccgcccacgcgtccggggaaggggagccgctggggttcgaggtgtcgacggagcccatgccgcggctgccagacccggagacgcccgacttctgggagggacctcagtgggaggccctacggcttcttcgtgcagtacatgtgggcgctcggcgtcgtcttcggcctcattgcttgcggtgtcgctgtggccacttacaacgatggtgcaacagatttcaaagacacgcctgcttacaaggagtcccaatcacaggagttccctgaggagtcagaatcatcaagcgctgatgtgtttgaaggcaatccgactgaggtagcaccagctctcgagtaggactatcaagggaggcacgggagaaaagttgtctctcgattcaagctatagcctatagggcttcgccttcgcaatatagatgcaaaggtttggttgatgatgctaagaaaattggctggtaattattttgtactgaattttcccttagaattaaatatagatggctagtgtctagtggtgatatgatgggattcgtctgtattattcttccaaacagtggggggcaaaagaaagagagc

SEQ ID NO: 264370 - DNA, 411 bp, Zea mays
cccaatcgcttttggtgattagtgcttgataaaataccggaacagaagtaaatggggagcgtgttatcataatggttggaaagagctaacgtcacactcttgataacagaaaatcagtaaataaaattgctaggtgtgacaacagaaaagtaatgataatcttcagaattgtagcgctgtgtttgatagtactctcgtgtgatgccatctaagacccgaccactatgctgaaaacttcttcaaacatttttctttctttcggatctacttaggtttcaaggtctataggtgatgcatactttaagaatcgagaattctctgatgatccatgcacagctcgtctccacctctaggaacctctccgccatgctgttctgacgtcagaaccatctatatcttgaagaattcttg

SEQ ID NO: 264371 - DNA, 811 bp, Zea mays
gcgaggactgcttcgtgctcaaggtggaggcggaggcgtccagcctgcgcgcgcgcaacagcagcagcgtcgagatcatccggcacacggtgtggggctacttcagccagcgcacgggcctgctggtgcagctggaggactcgcacctgctgcagatcaggtccagcggcggcgccggagggagcgtcttctgggagaccaccatggagtcccgcctcggcgactaccgcgccgtcgacggcgtcaacatcgcccacgccggccgcaccgccgtctcgctcgtcaggttcggcgactgccaggacggcaacaccaggacgcgcatggaggaggagtggaacatcgaggaggtggacttcaacatctggggcctctccatggactgcttcctgccgcccagcgacctcagggagggcaaggagagccaggacgtcgccgtcgtcaaggccgacgcgcgcccgccgccgctgaggataccggccgtcaccgtgcgcgtctggccctcgcaggtggctgccgtcaacatggacgactcggactcgctcgtcgcgaggtcatgactactcgtcacgtaccgtacgtacgtacgtacgtacttgcagtgctgagtgaagagcatgtatttgtacgtgacacttgtgttactataagatcatacatgtcgcaagatctgtaaatatattggaggttgagatctttttttccccgcttcgagaggtgtgtgtttacctcagctagaattgaggccagaaatagtgcgatcgataatccgagctacatattccgcgtagctgtgttgcaaattctaatg

SEQ ID NO: 264372 - DNA, 875 bp, Zea mays
ttttctcgtccgcccacgcgtccgcccacgcgtccgccgaaaatgtctccgctagtcagagtcctcgcaccgcacgcaacaagtacgcaggcagcgcagcctcgagccgtcgccatggcgagcaagcacctcgtcctcgccgcatgcctcctcctcctgcccaccgcctcggtcgccaccgacgtcgactactgcagtaagaaggactacccggtgaaggtgagcggggtgcagatcgtgcccgatccggtcgaacccggcaagcccgccactttcaagatctccgcttctactgataaaaccatcgagaaggggaagctggtcatcgacgtaaagtatttcttcttctacgtgcactcggagacccgcgacatctgcggagagacttcctgcccagcgaccggcgacttcgtgctgtcccaccagcagacgctgccaggcttcactccgccgggctcctacacgatctacatgaagattgtcggggacgacaacgaggagctgagctgcatctcgttcgggttcagcatcggcttcgtcgcgtccagctgaacgcgtccgagcccgggcacgagaggcagccagcccatggatgtaattacgtgaagcacactctgtatcctatgacttccaagtgtctaggtccatgtaagctttttgtgggtgtctgtgttcaactgagacgtttttatccggagttgaacatcacagtaaagcaaagtcactgttaccatgtaatggaactctgagcgcttgatgggccccgtgtttttttagactcacaataaagccggtttgtgtttgtgcctaaaaaaaaaaaaaaaaaaaaaaaaaaaaaaagggcggcagatagcgatctagaacggacgcgtggg

SEQ ID NO: 264373 - DNA, 715 bp, Zea mays
atcagagagcggggatcgaagaaaaagcgatcgatggcgtccaactacgtggacaccatcggcgaggagggacggttccacggcactcacatcgacaacagcagcacgacccggaagggcggcgcaggtgccgcggctgcatctcctggcagattcgggcgaagcttctaagccgggtactttgaagatcacagcttctgctgatgcagccatcgagaaagggaagctggttatcgacgtcaagtatttcttcttctacgtgcactcggagacccgcgacatctgcggagagacttcctgcccagcgaccggcgacttcgtgctgtcccaccagcagacgctgccaggcttcactccgccgggctcctacacgatctacatgaagattgtcggggacgacaacgaggagctgagctgcatctcgttcgggttcagcatcggcttcgtcgcgtccagctgaacacgtccgagcccgggcacgagaggcatccagctcatggatgtaattacgtgaagcacactctgtatcctatgactttttgtgggtgtctgtgttcaactgagacgtttttatccggagttgaacatcacagtaaagcaaagtcactgataccatgtaatggaactctgagcgcttgatggggcccgtgttttttagactcacaataaagccggtttgtgtttgagcctaaaaaaaaaaaaaaaaaaaaacaaa

SEQ ID NO: 264374 - DNA, 650 bp, Zea mays
cccacgcgtccgccccgaaaaatctccccgctcagaaagcagtcctcccaccgcacgcaacgcagcgcaactcgacctcgacctcgccgtcgccatggcgagcaagcagacccgccgcctcctcgtccttgccgccgtcgccgtatgcctcctcctccccgccgcctctgtcgccaccgacgtcgattactgcagtaaaaaggagtacccggtgaaggtgagcggggtgcagatcgtgcccgatccggtcgagcccggcaagcccgccactttcaagatctccgcttctactgataaaaccatcgagaaggggaagctggtgatcgacgtcaagtacttcttcttctacgtgcactcggagacgcgcgacatctgcggagagatctcctgtccggcgacctgcgacttcgtgctgtcccacgagcagacgttgccagggttcactccaccggggtcgtacacgatctacatgcagatggtcggggacgacgacgaggagctcaactgcatctcgttcggcttcagcattgggttcgtcgcctccagctgaaacccgcctgagctgcgcgccagaagtcgcccaacatggatgtaattatgtaaaccagtgcattacggagacgctcagatttcttcaagctagagcacag

SEQ ID NO: 264375 - DNA, 1418 bp, Zea mays
ccccaaacgaacaaaggcacagcgcacctcacttattacgaaccccctctgtgccactgcccactgccacctcaaatccccgcgaacctatctttcccttcccccgatccaggcggttctcttcccagaagccagcccagaatggtgggatccgacgcgctgcagtccatcgtttacagccgtgggtcactccgcctcctcgatcagaggaagctgccgctcgagatggagtacatcgacgtcaagagttccgccgatggctggaatgcaataagagacatggttgtccgtggtgctccagcaatagccatagcagcggcactagcattagccgttgaagtttctgatttagattttattggtacgcctgaagaagcagcttcttttgtttcaaagaaattggaataccttgtatccagccgaccaactgcagtgaacctatctgatgctgcaacaaagctccaaactttggtatcaaaggcagctgaaactgcaaaagattccaagtctatctttcaggtctacattgaggccgcagagacgatgcttgttgatgatgtggcagataataaagctattggctcacatggagctgtatttcttcaaaggcagcttgcaaattcaaaaaagatatctgttctaacccattgtaatactggcagtcttgcaactgctggttatggaactgcccttggggttatacgcgctcttcattcggggggagttttagagaaggccttttgcaccgaaactcgtccatttaaccagggatccagacttacagctttcgagttagttcatgaaaaaatacctgcaacactgatagcagattctgctgctgctgcgttgatgaaacaagggcatgttcaggctgtcattgttggtgctgatcgaatagcagcaaatggtgacacagccaacatgattggcacatacaacctcgccatcttcgcgaagcatcatagcgtgcagttctatgtggcagcgccggtaacttccattgatctcttccttccatctggggatgagatagtcatagaagaaagatcaccaaaggagttgctgaactctgaaggtggtctgggaaagcaagttgctgcatccggtatatcagtctggaacccagctttcgatgttactccagcaaatctgatcactgcaatcataacagaaaagggtgtgatcacaaaaactgatgctgatggatctttcgacatcaaaggattccttctgcccgcaaaataatactctctagcgtggcttccattctgaatgacataaatgtctggatcaacgctgttgtattctgttttctctattatacacaataataaagtcatgtcctctcataggattttggggtaaagtttatggataggagaacgacgctagggtgtgtacccatagcggcgcgttta

SEQ ID NO: 264376 - DNA, 1299 bp, Zea mays
cgaaatggctggcaagggaaaggcaaaggccaacccatcccctgcctcctccgttgctctgctgctccccctccttatctaatcctctggttcctggacaccggcctgcaagctccagcagcagcggcgccggcgacgaaaggaggaggattgctaccatcctatatcatatcatacatatacacaaggaggaggagaaggtgtgtagcgaggttgaggtccggaggatgccttccagtgccatgagttccgggctggagccggtgctctgcgcgcctcggccgcgcagggtccagcagctgcacccctgcagcgccgacctcatccttggcgcaccgcccttcccgcgcaacgccaacagcaaggccagcggcagcagcagcagggaaggaggcaggaagacgaccaggccggcggcggaggacgaggacgaggacgaggactgccgctgggcggcgttcggcgggtcgccgccagcgcgcgcggacaacccgatggtgcacgacccccggttcctgcggaaccagcgccacccggcgccgctggagctcgggtcgccgaaccaccggcggccgacctacagcagcggtggcgacggcagcgggtttgcctcgtcgtcgttcgcgccggccgtgaggatccagggcttcgacgtcgccgcgtgccgcgcgtgagagcgagctccggccgggcggggctttggcttttcgatctattaaattaaattaacagcaggtggggtcaggtcagatcagatcatagtagggaggaaggcgaggagggcgggagggatgggatgagatctcctcttcctcctcctcgcgagggaggcgatccagtcgtatgagtgaagtaaagaagagtactccagtcgtactataggttgatgttcgccgataccacaccacacagcagccggtcaaagggagtgaaaactgattttttgtttacggcgttttgtcagcaaggttattaggttttgtgtttgtgctgtagcctgtaagatgtaagctactactagcacgggtctcttgttcgttgctgctgctctgctctggcctctgggtgcccctgtattgtagatataaatcagcacccagttcgggcggtcggccagcgttcgtttttcttctagttgccgaggaggaagacgatgtcccctcctcgccatgtaatgtaaccatggctgtactcctacatacatgcaatcatgtataaagatgaaaacgtgtacatacacaagatgaaagtggcatgcagtgatgatctatcagaaaatgagaaaaaaaaaaaaaaaaa

SEQ ID NO: 264377 - DNA, 1074 bp, Zea mays
  unsure (1)..(1074): unsure at all n locations
cattnttgaggacgttggtgaggttgttgatgttcgttttcctacacatgatgatggcaatcgtaaaggattttgctatgttgaatttgtttcagctgaagctgctgcaaaggcatataaagagaagcaatcaaaggagctgcatggtcgtgaagtaagacttgacttcgctaaaggaagaagtacacaaactcctcgcagcggcaatgatggatctttccagaaggctgctcggggtaacagcagctcaatatttatccggggctttgataaaaatctttcagaggatgagatccggagctctctcgaacaacattttagtgattgtggtgagatgacaagggtctctatcccgactgatcatgaatctggtgcaataaaaggaatggcttacatagacttcaaggatcaggactctgtgtctaaagcccttgagctcagtggctctgacattggtggtggctatgagctttatgttgatgaagccaaaccaagaggcgatggccagcgtggtggtggtagatctggtggccgttctggtgggagatttggtgaccgttctggtggccggcgtggtggtggtagatttggtgaaagatctgggggcagggatggtggcggcagattcggtggccgacgtggtggtagggatggcggccgaggacgtggtggccgtggctttggtaacaagcacagcgctggcactcccagtgcaggaaagaagactacttttggtgatgattgatgatgaacgcggaggatgcggcaaaaggatccaatgaaattgtgtttttttggtcttgttgtggtaccgtaactggaatttggtattttttgtctactatttactgtagtggtttctggattttccttgtgttgcctatgctgcaatacaccgttttgttgttgcgatacatctgtagtttggttttgttatccacctgtcgtttataagaagcggctgtactcaggctactatgccgaactgaaatgggaatggagcaaaacgaaatcttagttctgaaacgaaaacaaagaaaaaacccccaagggcggccgctcgcgatctagaac

SEQ ID NO: 264378 - DNA, 627 bp, Zea mays
atcctgtaattgtgaagttcactgcattttggtttgagcaaaaaaattgccgccctgtggtttctggcttcaaaaagcttgaggtcactgctgtactacctcttatttgcacaggaaagaagactacttttggtgatgattgatgatgaacgcggaggatgcggcaaaaggatccaatgaaattgtgtttttttggtcttgttgtggtaccgtaactggaatttggtattttttgtctactatttactgtagtggtttctggattttccctgtgttgcctatgctgcaatacaccgttttgttgttgcgatacatctgtagtttggttttgttatccacctgtcgtttataagaagcggctgtactcaggctactatgccgaactgaaatgggaatggagcaaaacgaaatcttaaaaaaaaaaaaaaaaaaaaaaaaaaaaaaaaaaaaaaaaaaaaaaaaaaaaaaaaaaaaaaaaaaaaaaaaaaaaaaaaaaaaaaaaaaaaaaaaaaaaaaaaaaaaaaaaaaaaaaaaaaaaaaaaaaaaaaaaaaaaaaggggcggcccttttaaaggaccaaattttacttccccgttctgggggaatattagttttttttatggggcc

SEQ ID NO: 264379 - DNA, 823 bp, Zea mays
atcaagctcaccgtcgacacgccgcgccttggccgcagggaagctgacatcaagaacagatttgtcctgccaccacacctgacgctcaagaacttcgaaggtctggacctcggcaaaatggaccaggctgctgattcagggctggcttcctatgtcgccggccaagtcgaccgcaccctgagctggaaagacgtcaagtggttgcagaccatcaccacgctgccgatcctcgtcaagggagtgctcaccgctgaagacacgaggcttgcggtggcgaacggcgcggcggggatcatcgtgtcgaaccacggcgcgcggcagctggactacgtgccggcgaccatcagcgcgctggaggaggtcgtgaaggccgcccggggccagctccccgtgttcgtcgacggtggcgtccgccgcggcaccgacgtcttcaaggcgctcgcgctcggcgccgccggcgtattcgtcgggaggccggtggtgttctccctggcggcggcgggcgaggccggcgtgtccaacgtcctgcgcatgctgcgggacgagttcgagctcaccatggcgctcagcggctgcacctccctcgccgaaatcacccgcaagcacatcatcaccgagtccgacaagctcagcgccatcccgtcgcgttgtagatgaggcaaaatcaatcgcctgctacgcctacgctacgccgccggtcgatcggggatactcagctcgtgcataggatgcatgcatgcgtgctcgatgtcgatgacgatgatgataccatatataatctaggactgcgcatatatatattttgttccagaaatgatcgatc

SEQ ID NO: 264380 - DNA, 725 bp, Zea mays
atctagccgtccgctccctgttgccccccaagccaaccatatccactctcggcggcgcgcgcatctctcctctcttcttgcccttccttcccccaacccacgcagcctcactaggggtctaccggcggcggcaacgagatggtgcagcgcctcacgtaccggaagcgtcacagctacgctacgaagtccaaccagacccgagtcgtcaagaccccaggcgggaagcttgtgtaccagtacaccaagaagagggcgagcgggcccaagtgccccgtcaccgggaagaaaatccaggggatccctcacttgaggcctgctgagtacaaaaggtccaggttgcctaggagccgcaggactgtgaaccgtccttatggtggagtactctctggaattgctgttagggagagaattatccgtgctttcttggttgaggagcagaagattgtcaagaaggtcctgaaaatacaaaaaaccaaggacaagacagctgcaaagtaaatctccaggaatggggaagcctagccctgttttgtacactgcgaaaattaattttggtggatggaaaatctaggtgccttgttgagcatttagcatgtgagtttagagattctggacactgaatccctttcacctttgaattgttggaatatcgggaatctgttcccctagttgattttattatgaattaagatcctatctatgcaaagatcaaccttctggtttgt

SEQ ID NO: 264381 - DNA, 342 bp, Zea mays
cggacgcgtgggcggacgcgtgggcggacgcgtgggcggacgcgtgggcggacgcgtgggcggacgcgtgggcagaaaaccaaggacaagacagctgcaaagtagagctccaggaatggaatggaagcctagaccactgcgagaagtaattttggtggatggaaaatctgtttgccttgtgtcgagcatttagcctgtgagacatgcctgttgaagtgtttgagtttagagacctggacggaatccctttctcctttgaattgttgctatgtcgggacatctgctcccccagttgctttgttatgaattgagatcatatctgggtaaagataatcttgtcta

SEQ ID NO: 264382 - DNA, 547 bp, Zea mays
accgttcggattcccgggtcgacctacgcgtccgtcgtacccttcctctcccaacccacgcagcctcactagggtttagcggcggcggcgagatggtgcagcgcctcacgtaccggaagcgtcacagctacgctacgaagtccaaccagacccgagtcgtcaagaccccaggcgggaagcttgtgtaccagtacaccaagaagagggcgagcgggcccaagtgccccgtcaccgggaagaaaatccaggggatccctcacttgaggcctgctgagtacaaaaggtccaggttgcctaggagccgcaggactgtgaaccgtccttatggtggagtactctctggaattgctgttagggagagaatcatccgtgccttcttggtcgaggagcagaagattgtcaagaaggtcctgaaaatacagaaaaccaaggacaagacagctgcaaagtagagctccaggaatggaatggaagcctagacactgcgagaagtaattttggtggatggaaaatctgtttgccttgtgtcgagcatttagcctgtgag

SEQ ID NO: 264383 - DNA, 1467 bp, Zea mays
cggacgcgtgggctgatatcaaagctgatgcatctatctctgctggcaatgatgaatttatcggatccatgattgctgaagcaattgacaaagtggggcctgatggtgttctatcaattgaatcctcctcgtcttttgagaccactgttgaagttgaagaaggaatggagattgaccgcggttatatttccccacaatttgtgacaaaccttgagaaatcaattgtggagtttgagaattgtaaggttcttattactgatcagaagatcacaagcataaaggaaatccttccgattttggagaagaccacacagctgagagcccctctgttcattattgctgaggacattactggtgaagctttggcaactcttgttgttaacaagcttcgaggaattctcaatgttgcagcgattaaggctccaagttttggtgagcggcggaaggctgtacttcaggacattgccatcgtcacaggtgctgagttcctagcaaaagatcttggtttgttggttgaaaatgctacagaggaacaacttggcacagcaaggaaagtcacgatacatcagactacaacaaccctcatagcagatgcagccagtaaagatgagatccaggcgagaattgcacaactgaagaaggagcttgctgagactgattcagtttatgatactgagaaattggccgagagaattgctaagcttgccggtggtgttgctgttatcaaggttggagctgcaactgagactgagcttgaggaccgccagctaagaattgaggatgcaaaaaatgccacttttgcagctatagaggagggcattgttccaggaggtggtgcggcatatgtgcacctatctacggttgtccctaagatcaaagaagcaattgaggaccctgatgagcgtcttggcgctgatattattcaaaaggcattggtagcacctgcttcattgattgcacacaatgctggagtagagggtgaagtggttgtcgagaagatcaaggagagcgattgggaggtgggctacaatgcaatgactgacaagtacgagaacctgatggaggctggtgtgatcgaccctgccaaggtgaccaggtgtgcgctccagaatgcggcctcagtagctggaatggtcctaaccacacaggccattgttgttgagaagccaaagccgaagcctcaagtggcagagccaccggagggagcccttaccgtttaaaacttaacgttcttgaggctgctgtccagacggttcagatcagttgagagggtagaactttggtttgagaattttggttcagatccactgggagttgtagagtaggattgctattttgcagacgaagagtaattttactctggtctgaacttatccgaatcgaagacatttgcatcaccattttttaaaaataagctcatggcgatgctggattgtacgagcaagtacagtatgtttttagcctctc

SEQ ID NO: 264384 - DNA, 165 bp, Zea mays
tcgagggacgacccacgcgttcgcccccgccaggtcaccgtgcacgaccgcgcctccgtctggaccggcgccgtcctgcggggggacctcaacaagatcacgctcggcttctgcgccaacgtccaggagcgatgcgtcctacatgccgtatgggcggggcccaca

SEQ ID NO: 264385 - DNA, 1137 bp, Zea mays
  unsure (1)..(1137): unsure at all n locations
ggggggggggggtaggggaanggggtaggggtccggaattcgaggcacgcgtcacgccgtccgaggcgtccgctccgcgcggaccgatcatcggggtgctcgagaacaaaatgttcgtgtgcaactttggggaccttaagctcgtgcaccagatcgagacggcgcccaaccccaaagggccttgcgctgggtcgcaacagcccgggtcaatcgtgcttggttgccccggggcccaaaaagggcaggttaaggtggaacactatggggcaaggaagaccaagtttatcaatgcacacactttccgcgtctcgtgcttcgcgctgtcgcaggacgggaggctcattgcaactgctagcaccaagggaacacttgttagaatctacaatgcagctgaaggcaatctcttgcaggaagtaaggagaggtgctgatagagcagaaatatatagcttggctttctcgaatgatttgcagtatttggctgtctccagtgataaaggaacaatacatgtcttcaatctaaagataaatgtgggatcgactgcaaatgataaacctatacctgctccagatcctgaagtttcgcatataagcccccctctttcgttcattaagggtgtgttgccgaaatatttccactctgagtggtcagtagctcagttcaggctccatgagggggagcagtacattgttgcatttggacatgagaagaataccgtgtcagttgttggtatggatggaagcttctacagatgtcaatttgacccagttaatggaggagaaatgctgcagctggagtgctacagttttctaaaaccgtcagatcaaccgtagcgacacacaattatcatctatcaattgatgccctcctccccgtaccaagaactgtacagtatctttgtgcgccctcgttggccggaggtctaagctaaatatgataatattttctttgtgtatatatatttcttgttggctctgggtgatgtatgttctgtctgtggaagggctaaaacacccatctgcagatggacgttatagaacgtgtcgttattattctatggatggattgaataaaatagcctaacaatgtttctcccgaacaattaacttccaaaaaaaaaaaaaaagagaaggccgc

SEQ ID NO: 264386 - DNA, 551 bp, Zea mays
cggacgcgtgggcggacgcgtgggcggacgcgtgggcgggcgcggcggaaagagctgttctacagagagttgccagtaatggatgactcacttgctgtaaagcttcttccaggatgcactacaatagacgaggttcgagagcgtattttgaacagatgtaaagaagtggagaagacggccatagaacaagcaacagacaacgcgatccttgaccagctcgggaagttggtcgaggtcgacgtccctcgtgccttgtttcaagagcaaggccagcagctttatggagccaagcttctgcagcttcaggcggaaaggaagctggataaagaccagctagcttcgttatcaaccaagaggtcagtgcaggcgtacctagaagatgagaagggggacattacaagagtcagtaaacagatgctggccgtcggcgagattttcaaatccgagaacttacagtactcgactgatcagctcgtcaaggaagttgagaactccatagccgagttcaaacacgacaaccaagactatgatgaggacagcatcaggcagca

SEQ ID NO: 264387 - DNA, 437 bp, Zea mays
cttcagcatcgtcataaagctctaggcttacttagaattgtggctgacagaggcctccagattggtgatctggtggtactggatatatttgcggaaagcattaacaatgatggctctagaggtgaaaaaatttcatcggctgagagtacaggtttccacttggacactgaggaaaatagtaaccttgttcctggatttcttggttcgttgattgggattcgtgctggtgagactagatcatttcctatccagttccccgagtcatttgagcgagaaagtctacgaggtgtccgtgcacagtttactgttgtgtgtaaagagctgttctacagagagttgccagtaatggatgactcacttgctgtaaagcttcttccaggatgcactacaatagacgaggttcgagagcgtattttgaaaagatgtaaagaagtgga

SEQ ID NO: 264388 - DNA, 807 bp, Zea mays
cgggtcgggcacgcgtccgaccaaacgtccgcccacgcgtccgcccacgcgtccgccaagaaccaaaggtagctagctagccgcgactcgttggctagacgattcaagcagcagcgcaggatggtggcgccggtggtgattgcgtcggccgggctgggcatgctggccggcgtggcgatggccaaccggtccctcgggaacgggctcccggcggcctccaggtgggacgcgcgcccgcgctgcgccacgtgcggcggctccggccgcgtggagtgcatctgcaaccgctggtccgacggcgactccggctgccggacctgcgctgggtcggggaggatgccctgccgcagctgcggcggctccggcacgggccgaccgctccctgcgcggctcaccgtccagcaccagaagccgccgccgccgccgccgcccggctacaactgatcgatggtggatgattaggtatccggatccgtggattatatacttctcgcgggcgaggtgcgatgcgacccatacaagaaagaaatcagttaaactgcgatatgatgcgctctagctagttaatcatatatacatatatacacgtccgatccattcctgtggatgacatccatgttgcatatgtacaagtacatgtctcttcttcaagagtcaagactagctgtaattgagctgagcatacttggcgttgctgttgttcagttaatttgcaaaaacgcacaacacaagaaagaaggagaaaaaaacagagtgaaaatgtttttttttgagatctggagaacacatgactgaaaaaggggaggg

SEQ ID NO: 264389 - DNA, 527 bp, Zea mays
cctgctcctacacagaaaagccgtcacctactcgcctccggccaaaaaaaaaccgactccacacacgacccaaatcttttcctctccacaggcgactcccaacgcaacagcagctcgtcgagcgagtcgtcgccggccggccggtatatacgcaagaaagccaagaaaaacacttctgcctcttcctccatatccaagaaccaaaggtagctagctagccgcgactcgttggctagacgattcaagcagcagcgcaggatggtggcgccggtggtgattgcgtcggccgggctgggcatgctggccggcgtggcgatggccaaccggtccctcgggaacgggctcccggcggcctccaggtgggacgcgcgcccgcgctgcgccacgtgcggcggctccggccgcgtggagtgcatctgcaaccgctggtccgacggcgactccggctgccggacctgcgctgggtcggggaggatgccctgccgcagctgcggcggctccggcacgggccgaccgctccctgcacg

SEQ ID NO: 264390 - DNA, 1062 bp, Zea mays
gcgtacggcgatggcgacggcgacagcacggagcggaaggccatgaaggagctgggcctccggcgggcgcggcacttacgggtggtccaacacgtacgtgttcaccaaggccatgggggaggccgtgctgggccagcagctccggggcggcgacgtccccgtggcggtgatgcggcccagcatcatcaccagcgtccggcgcgacccgctgcccgggtggatgcagggcacccgcaccatcgacagcatcatcatcggctacgccaagcagaacctgtcctgcttcctcgccgacctccgcctcgtcatggacgtcatccccggggacatggtggtcaacgccatgatggcggccgtggtggcgcactcggaggcgttcgcgccgccgctgacgcaggtagtggtgtaccacgccacctcgtcgctgcgcaacccggccacctacgacgtgctctaccagtccggacgccgccatttctacgagaacccgcgcgtcggcaaggacggcagggtcatccccaccagggagatgtacttcttcaccagcatcgccaggttccacctctacatgactctcatctacaaggtgccattagagattctgcaccttgcgaatctgctgctctgcggcctcctctcccggctgtacaacgaccccaaccgcaagtacaagtttgtgatgcatctggttgacgtctacggcccattcgccttcttcaaaggatgcttcgatgacataaacctggagcggctgaggctggcaatggcgatgaagacccctgaggatcaaatgttcaatttcgaccctaagaccatcgactgggacgattacttcaccagaatccacatccctggtattctcaagtatgtgtgcaagcccaagccttctttcttcagtctatttgcagcatgcacatgcttcttcttcgccttcttactatcgaaagttaatggctcatattctttatgaaagaaatttataccactctgtttggttgtacctggttcaatggatcgaccgggtgttaccacgtaacacaaataattcgatctccgcgaaaa

SEQ ID NO: 264391 - DNA, 506 bp, Zea mays
cgaatctgctgctctgcggactcttctccaagttgtacaaggactccaaccgcaagtacaagtttgtgatgcatctcgttgacgtctacgggcccttcgccttcttcaaaggatgtcatgcatatatatggcgatgaagctttgacgacacgaacatggagcgcctgcggtcgacgatggccatgcgcagcctgaagatgacatgttcaactacgatcccaagaccatcgactgggacgattatttttacagaatccacatacctggtgttctcaagtacgtctgcaagtgaagctggggaaaactctgttctgtatcaggcacaccttgctccttcacctaatcaccttgttcatatatgcgtgggggaaaactcttttcttttttttcattattttttcttttttgcctctcctggctgtaatcaatcacaaagacatgtcatccattggcagaacttgttaaacgtatcggtcaactcaagccccatatatggaatgttaccc

SEQ ID NO: 264392 - DNA, 1141 bp, Zea mays
cccacgcgtccgtgggccaaagggcgacggcgtcgctgttgaggctggcatgccgaccagtggtgctgccatggatacgattcgtactgctttggaggggcgcggggcaagcgaggatgactcagcagttgatgtgagtggtggcttggatgaggcggcgacttccggtttggaggactccgaagccgcatcggaaggctccactgcacaggatttctacaccgacgttgaaacggagtccagcggctccagcagcgacgagcagagagctgagttcggcttttccttaccaccaccggaacaagttagcaacaaagcggattggaaaaatgacacttcagaggtgaagagttctgataggatgattccagtagctcaaccgacacgtgtgttatcgtcaggtgctgcaatattgcctcatccgtcaaaggtagcaacaggtggagaagatgcatatttcattgcagctaatggctggtttggtgtagcagatggagttggccagtggtcatttgaaggaatcaacgcagggctttatgcaagagaactaatggatggctgtaaaaagttcgttaccgagaatcaaggggctccagatcttagaccagagcagattctttccaaagcagtagatgaagcatgttcacctggttcttgcactgtattagttgctcattttgatggccaggcccttcaagcatcaaatattggggactctgggtttatagtgattagaaatggagaagtgttcaaaaagtctaaacctacgctttatggtttcaatttcccactacaaattcagaagggagatgacccctcaaagtttgtacagaattatgctattgatctagaggacggcgatgcaattgtgacagcaaccgatggcctttttgataatgtatacgagcatgaaatagctggaattgtctccaaatcgttacaggcagatctagaaccagcggagattgcggaacacttggctgtgaaggcccaggaagtagggaggtctggggctgggagaagcccattttcagatgctgctctctcggctgggtaccttggctacagtgggggcaaactggatgacatagccgtcgttgtatcaattgtccggactgaaattcaagaggataggctaaga

SEQ ID NO: 264393 - DNA, 455 bp, Zea mays
  unsure (1)..(455): unsure at all n locations
accggnccggaattcccgggcgacatgaagggccacgttggtgtcggcgtgggaaaggccaaggaggtcacggaggccatcaccaaggccgccatgaacggccggcgcaaccttgtcacagtgccgctaactaagtactccacattcccgcacagagctgatgcggactatggagcagccaaggtgatgctgaggcctgcttgccctggatctggtgtcattgctggtggagccgtgagggttgtgctggagatggctggtgttgaaaatgctctgggcaagcagctgcgcagcaagaaccccctgaacaacgctcgagccactatcaaggcgacgcagatgatgaagcagttcaaggatgtcgctgaggagcgtggtattccaatggaggagctgtggaaatgataaaaacaattcgaaaccaagggccccccttttgtagcattaattctcct

SEQ ID NO: 264394 - DNA, 966 bp, Zea mays
gttctagatcgcgagcggccgatcgccagccacaccaaacacttgcgccgccgctgcctcacaggtaaggccgccatggtctccggttcgggcgtgtgcgcgaagccatcgtggtggacgcgcgccaccacatgctgggccgtctctcctcgatcatagccaaggagctgctcaatgggcagaaggtggtcgtcgtccgctgcgaggagatctgcatgtcgggcggcctcgtccgtcagaagatgaagtacctccgcttcctccgcaagcggatgaacaccaagccgtcccacgggcccatccacttccgcgcccccgccaagatcctgtggcgcaccatccgcgggatgattccgcacaagaccaagaggggggaggcggctctggcgaggctcaagacgtacgagggcgtcccgccgccgtacgacaagaccaagcgtatggtcatccctgacgctcttaaggttctgaggctacagcctggacacaagtactgcctcctcggcgagctctctaaggaggtcgggtggaactaccatgacaccatcagggaacttgaggagaagaggaaggagaaggccaaggttgcctacgagaggaagaagcaattggccaagctgcgtgtcaaggccgagaaggcagccgaggagaagttggggtctcagttggagattcttgcccctatcaagtactgaggagctgtgctttgtcatcagttttggggaacatctagtctttgttttaagtgttcggtaacagtttgtgacagtataatctggtaaaccgtgttatttttctgccactcctatttgaacacattttctagctggtgaatgaactgtttggtcgatcttgttcagatgtatggttcgcattcgcattctgagagatttcatgtctcgtgctgactcaagctgtcacgcccatgtgcttcttgcacacgattatcaattcagtagttgtgat

SEQ ID NO: 264395 - DNA, 757 bp, Zea mays
aagctactactcctgcagcgcaccgcgcacagtgaattgccgggacgaaccacgccgactgcgggtatggccactactgtattactcgcgatcgaagtgaggtgcgcacagacgtcagccctcgatgattctcatactgtagaaggaggaccttgtccacttccaggagattagaccgtttgcgggcctgttccgtcagatgatgaagaagctattcttgatggttaagcggatgaacaccaaagtcgttcaacggacccatacattttcgtgctctcgacaagaaacctgtggggaatcatccgcgggatgattcctgacaagaccaatagggggtgaggcggttctggcgaggctcaagacgtacgagggcgtaccgccgccgtacgacaagactaagcgcctggtcatccctgacgctcttaaggttctgaggctgcaacctggacacaagtactgcctccttggggagctttctaaggaggtcggatggaactaccatgacaccatcagggagcttgaggagaagaggaaggagaaggccaaggtggcctatgagaggaggaagcagctggccaagctgcgcctaaaggctgaggctacagccgaggagaagttagggtcccagctggacattcttactccgatcaagtactgaatttgtggaacatctgatccatcgttttaaaagttgtgacagtataatcttgagtgctattccgaacacattttttagccggtgaatgtattgtttgtt

SEQ ID NO: 264396 - DNA, 490 bp, Zea mays
cggaattccggtcgacccagcgttcgccagcgtccgcccacgcgtccgcggcgagctctctaagaggtcgggtggaactaccatggggccatcagggaacttgaggagaagaggaacgagaaggtcaaggttgcctacgagaggaagaagcaattggccaagctgcgtgtcaaggccgagaaggcagccgaggagaagttggggtctcagttggagattcttgcccctatcaagtactgaggagctgtgctttgtcatcagttttggggaacatctagtctttggtttaagtgttcggtaacagtttgtgacagtataatctggtaaaccgtgttatttttctgccactcctatttgaacacattttctagctggtgaatgaactgtttggtcgatcttgttcagaaaaaaaaaaaaaaaaaaaaaaaaaaaaaaaaaaaaaaaaaaaaaaaaaaaaaaaaaaaaaaaaaaaaaaaaaggggcggccgcc

SEQ ID NO: 264397 - DNA, 824 bp, Zea mays
  unsure (1)..(824): unsure at all n locations
cggacgcgtggtctagccggcgccggcgccaccgctgccgccgtccccgcacaacccggttgccggtccgtacccgtcgctggatcgggcggtgagctactgctactgatccggccctggctccgggtacggccaggagctgtacccgcccaagccggcgggcgggtggtccgacgacggagcgtacgcttacaacggcggcgacgcgccggagccgtacgggtccaggggcaccgcaccgaggccgggctcgggatccgcgctgtttgatgactacgggaggtccattggctcagctgccgataggggtggccgtgggggtagcgcggccagccccaaggtggtgagggccgtgcccaaggcagagacatcagaggacgtcaggggtggggtgcagaagttcagggtcaagctgctgccggagggcgctgggagccccatggatgtgctctgtcaggttggtctggatggaattcggatgcttgatcccaacactggtaggacactaagaatatatccccttgaaactgtaactagatgcgatgtattagattcctctatttttgccttttggtccaagagttcggtggatgttgaaggaaaaagaataaggctgaaatcaaacagctatacatccagcaccattcttgacactgtcacagctgcgactgtgcagttcaaggagatgggtgaaagcagcatttcaagaagtagagcaattgctgatgcatccaagcccgctgagcagccaaatgagaggaagaaaaatgtccttgattggaggaatttaatgaagcctatgaatgangaagaagatcactggg

SEQ ID NO: 264398 - DNA, 913 bp, Zea mays
cccacgcgtccgcccacgcgtcccccacctgcagtcaccactcccaagccagtacccagtcctacgagcagtcgcacgcaagtgtcaagagacgaaacggtcgacatggctcgcacgcaatctgccgtagcggtcgccgtggtggccgcggtgctgctgctggcagcggcggcgacgacctcggaggccgccatcacctgcgggcaggtgagctccgccatcgcgccctgcctctcctacgcccgcggcacggggtccggcccctccgcgtcctgctgtagcggcgtcaggaacctcaagagcgccgccagcaccgccgccgacaggcgcgccgcctgcaactgcctcaagaacgccgccaggggcgtcagcggcctcaacgccggcaacgccgccagcatcccctccaagtgcggcgtcagcatcccctacaccatcagcacctccaccgactgctccagggtgaactaaaacctagaccacgcgcgacgacggccgcctgatcgatcgaccaaccattccgccgtcgccgccggccggatcatcgatcgtcgtcatgatgatatctatcaatctacgcgtgatgatcgatggctacttgtctactgctatgtactactaaataaaatctctccgtgtgtgcacgtacgcttgcatgtgcatggtagcatgtatgtacgacgtcgtccatgtatgtgtgtgtgacgtgtgagacagagagagagagagagagagacaggatcgatcgagagacggtcatgtccttttggctgtttggtttattcatatcacaacttttgagtgtatacaagattatttctgtggcagcttatttatccctagggtgatatggaccaaaggtgtagacgtcgatttggcaccaaacactataaagaactacctagcaatactc

SEQ ID NO: 264399 - DNA, 916 bp, Zea mays
gcgtccgcacacgcgtccgccgacgcgtccgccaccagctgccattgccatctactgacctgtgacctccgcatttccaaacagcccgagcgagctagagctagcagagcggcaggcacctccctcctcaaggaacatggcccgcacgcagcagttggcagtagtggcgaccgccgtggtggccttggtgctgctggcggcggcggcgacctcggaggcggccatcagctgcgggcaggtggcgtcggccatcgcgccctgcatctcctacgcgcgcggccagggctcggggccctccgccggctgctgcagcggcgtcaggagcctcaacaacgccgcccgcaccaccgccgaccgccgcgccgcctgcaactgcctcaagaacgccgccgccggcgtcagcggcctcaacgccggcaacgccgccagcatcccctccaagtgcggcgtcagcatcccctacaccatcagcacctccaccgactgctccagggtgaactgaaccctaaacgacgacgacgggcgacggcggccacctgaagacgatccatatctatcccgccgtacgtcggcgcccgcggatcggaccgtcatgaccatatctacctacgcatgatcgtcacgacttgcatgtctactactgctacgtgtactactactgaataaaaaacctctccgcgcacgtcgtccttgtgtttgtgtgtgtgagagagagaggagacggagagccggccatgtccttttggctgtttggtttatttttgagttcatgcggtctttatttatttccatgtacgctgcttcctcgtatacccactttaaatttgtaccatgcatgcatgttccttatgatacactcacctctttttgttaaaaaaaaaacccgacgttagggcggccgctcgcgatctggagc

SEQ ID NO: 264400 - DNA, 330 bp, Zea mays
tcggccggatcatctgttcgtcgtcatgatgatatctatcaatctacgcgtgatgatcgatggctactttctactgctatgtactactaaataaaatccccccgtgtgtgcacgtacgcttgcatgtgcatggtagcatgtatgtacgacgtcgtccatgtatgtgtgtgtgacgtgtgacccacagacagagagagagagagtagtcaggatcgttcgagagatccggtcatgtccttttggctgtttggtttattcatatcacaacttttgagtgtaaaaaaaaaaaaaaaaaaaaaaaaaaaaagaaaaaaaaaacaaaaaaaaaga

SEQ ID NO: 264401 - DNA, 766 bp, Zea mays
cccacgcgttttgccagtacccacagtcctacgagcagtcgcacgcaagtgtcaagagacgaaacggtcgacatggctcgcacgcaatctgccgtagcggtcgccgtggtggccgcggtgctgctgctggcagcggcggcgacgacctcggaggccgccatcacctgcgggcaggtgagctccgccatcgcgccctgcctctcctacgcccgcggcacggggtccggcccctccgcgtcctgctgtagcggcgtcaggaacctcaagagcgccgccagcaccgccgccaagtgcggcgtcagcatcccctacaccatcagcacctccaccgactgctccagggtgaactaaaacctagaccacgcgcgacgacggacgcctgatcgatcgatcgaccattcccccgtcgccgccggccggatcatcgatggtcgtcatgatgatatctatcaatctacgcgtgatgatcgattgctacttgtctactgctatgtactactaaataaaatctccccgtgtgtacacgtacgcttgcatgtgcatggtagcatgtacgtacgacgtcgtccatgtataagtgtgtgacgtgtgagccagagagagagagagacaggttcgttcgagagacggtcatgtccttttggctgtttggtttattcatatcacaacttttgagtgtatacaagattatttctgtggcaaaaaaaaaaaaaaatcattcttaaaattaatataactaatacttttactaaacctttcttctttt

SEQ ID NO: 264402 - DNA, 534 bp, Zea mays
  unsure (1)..(534): unsure at all n locations
gtgtcaccactcccaagccagtacccacagnggggacttttttgacgcacgcgggggttaacagacgaaacggtcgacatggctcgcacgcaatctgccgtagcggtcgccgtggtggccgcggtgctgctgctggcagcggcggcgacgacctcggaggccgccatcacctgcgggcaggtgagctccgccatcgcgccctgcctctcctacgcccgcggcacggggtccggcccctccgcgtcctgctgtagcggcgtcaggaacctcaagagcgccgccagcaccgccgccgacaggcgcgccgcctgcaactgcctcaagaacgccgccgccggcgtcaccggcctcaacgccggcaacgccgccagcatcccctccaagtgcggcgtcagcatcccctacaccatcagcacctccaccgactgctccagggggaactgaaccctaaacgacgaccacgcgcgacggcggccacctgaagacgatccatatctatcccgccgtacgtcggcgcccgcggatcggaccgtc

SEQ ID NO: 264403 - DNA, 328 bp, Zea mays
  unsure (1)..(328): unsure at all n locations
agctctagcaaagcacttgccatctactgaccgccgcattccaaacagcccgacganctagcatagcggcaggcacgtcctccagggaacatggcccgcacgcagcaggcatggcagtagtggcgaccgccgtggtggccttggtgctgctggcggcggcggcggcctcggcggccgccacctgaagacgatccatatctatcccgccgtacgtcggcgcccgcggatcggcgtgtcatgaccatatctagctacctacgcatgatcgtcacgacttgcatgtctactactgctacgtgtaccactactgaatcgaaaactctccgcg

SEQ ID NO: 264404 - DNA, 1239 bp, Zea mays
ggctcctcctcctccacaacttcacggcctcgtcccccgtcgtcaaggagttcatcctccccgtggactccgacgtcctcgtgctcaccttcgtccccgactccggctccactgccttcgtcaacgccatcgagctcgtctctgcgcccgaagagctcgttggcgacatcggcaccctagtcacgtccggcggcgccgctcagatacacgagctgtcgtctcaggtgtttgagactctctacaggatcaacgtcgcggggcgcaaggtcacgccattcaacgacacactgtggcggacatgggttaacgatgagaaattcctcatcgacaccgactcctccaactacatggtgtggtcgtccagtggccggattgcttatcccaagggtagcaagcagatgacaagagaagtggctcctgacaatgtctacaactctgcaagatccgtgaggccaggggtgaatgtgacttggggtttccctgtgcctgctagcagccggtaccttgtgcgtatgcacttctgtgacattgctagcaaggctctgtatgagctctacttcaatatctacgtcaatggtgatcttgcagtcaaggatttcgatctctccagtgcaactggattcttggcctatccttattacattgactttatcgtcgatgtgaaggatgaggggatactgaaattggcgattggtggcttaaagaagagtcgatctgatgaagtaagtggtatccttaatgcactggagataatgaggatgaacaagaccagtggaggtatggatggagacttcccaattgatctacacatggaatatgtggtgagtaaggggattggagaaatttgcccgctcccttgctctgtggtttcatctttgttgggttgtttgtggctttggtcacgctgatggtgaggttgaggaccgagttgaggaataacggcacagcttggtcctggagacagatgaactccgatgaagggaaactggccagaacatatcagcttgtgcccagtaagacggactattgaatattgcaggctgggcatctttgaggagtgacaacctgcggctgttgtgtgcatctaatcacatcatactttttattaagttgtaagtactgtagttttatcacctctctaaaagtattgtagttttgtatcatcactcctttcatgcttggactttgcattctccatgctttgtcaatggtcaatggaggacatgctcatgatgctgt

SEQ ID NO: 264405 - DNA, 1457 bp, Zea mays
atatcccctgttcctcgtcctcgtccaccacagccgctccgcgccccgcctcccccgccgaaccgcccgcgcccggccgctgcgcttcctctcctgctcgacctcagcgccgccgctgttcgcagccgtcgcatccatggactcgccgccccagggttaccgcaccaacgtcggcatctgcctcgccgacccatccctcaccaagattttctcggcttctaggatcgacattcctagcgcgtggcagatgcctcagggtggtatagatgcaggggaagaaccaagggcggctgccttcagggaattgagagaagagactggtgtcacatccgcagagatcgtggctgaggctcccgtctggttaacatatgatttcccgccagatgtcagaaccaaactgaatgccaggtggggaaccgattggaaaggccaagctcaaaaatggtttttatttaggcttactggaaatgacgatgagattaaccttaatggtgatggatctgagaagccagagtttggtgaatggacatggatgacacccaaggaagttatcgaaaaggcagttgatttcaagaaacctgtatatgaggaagcattgaaacactttgccccctacctgcagtcagatccagccgcttcatcatagaagatttggccaatttgcttgcatccctgctgtatctggacccccaataatttgacacgacgcaatgtagccatgaggtgtgctatacaatttgatagtgtgtggcctgtttgagtcaattatatatgccagcattggatcctcgccctctacttagtcacataagtatacaataagtggtggaaacagtttactgtaatgaccgctacagatgcaccgtcgcatgattgggcctgtggctctagtttcagccaatctggaacatggtggccagtgtatcttgtctgccaatgactgaatgctttaggttgaagcaataccataattccagagagactgcggtacagcaacctcaggttatgtggggggtcgtcggcaaaacgacgctcgtttggcattggctacggcagaaactagtgtctggctgccattggttgtgggaggagcagaggaaaacaaattgttggttacactctgtactactgcgtcatgatattgtcggctttcgctttgtggcttttggaggaaaactggagatgtggcagctttggctttacgcatcttggaggaacaggagatataaacacacgcatttcgttttttttttttgttgagttgctgtgctccgtcttcgctgcagaatccagatcaaatgtggtggtggtggtgctgctgctgctggctacacgaatgtggatagcagcatttgtcgtccttgaatgcctgccgagaaaggttggtggtggtagagagagagagagaggagttcttctctcctctcgtctcgtctacctctgtgttctcttctctc

SEQ ID NO: 264406 - DNA, 856 bp, Zea mays
ccgggccgacccaaacgtccacggacgcgtgggcggacgcgtgggcggacgcgtggggaatgccaggtggggaaccgattggaaaggccaagctcaaaaatggtttttatttaggcttactggaaatgatgatgagattaaccttaatggtgatggatctgagaagccagagtttggtgaatggacatggatgactccccaggaagttattgaaaaggcagttgatttcaagaaacctgtatatgaggaagcattgaaacactttgccccctacctacagtcagatcccgccgcttcatcatagaagattcgaccaatttgcatacattatcttttttttttagttggaaactaccctgctgtatctggacccccaataatttgacacgacgcattggagccatggaggtgtgctagacaatttgatagtgtgtggcctgtttgagtgaattatatatgccagcattggatcctcgccctctacttagtcacataagtatacaataagtggtggaaacagtttcagccaatctggaacatggtggccagtgtatcttgtctgccaatgactgaatgctttaggttgaagcaataccataattccagagagactgcggtacagcaacctcaggttatgtggggggtcgtcggcaaaaccacgctcgtttggcattggctacggcagaaactagtgtctggccgccattggttgtgggaggaccacaggaaaacaaattgttggttacactctgtactactgcgtcatgatattgtcggctttcgctttgtggcttttggaggaaaactggagatgtggcagctttggctttacgcatcttggaggaacaggagatat

SEQ ID NO: 264407 - DNA, 448 bp, Zea mays
  unsure (1)..(448): unsure at all n locations
cggacgcgtgggcggaccaagagatagagattgctggtcgagaagaagagatgttacatatataataactactgtaggcagcggcatctcctgctgggacgaaggttcaagaagctagctaagagagaagggcataacgagataataagcagcgcgcgaagatgcaagactgggcgccggtgttcgtctcgctggtgctcttcatcctgctgtcgccgggcctgctgttccagatgccgggcaagtgccggatcatcgagttcggcaacttccagaccagcgccatctccatcctcgtccacgccatcctcttcttcgccctcgccgncatcttcctcgtcgccgtcggggtgcacatgtacctcggctcctaggcggcggcgcggtgcgccgtaccttctctctctcgccgngcgcgccattcgtctcttcttttatggtctctctc

SEQ ID NO: 264408 - DNA, 454 bp, Zea mays
cgcaacgcacgttctctccactggtcctacaacactctccctaccacaccgaaccaacaagaggagcaagaggtagctatagcagcctagcacacaccacctcccaccaccgccaccgcgccacatacttgctgagagtgtgctgtgctttgctcatcgaccgaccgatcgatctcggcatggcggactgggggccagtgctgatcgggctggtgctcttcatcctgctctccccgggcctgctcttccagatccccggcaagggccggatcatcgagttcggcaacttccagaccagcggcctctccatcctcatccacgccgtcatctacttcgccctcctcgccatcttcctcctcgccgtcggcgtccacatttacctcggctagctagtcgccggcgggcggccggctgagcgaggctagctgctggcgcgcggcggcccggcccggct

SEQ ID NO: 264409 - DNA, 1234 bp, Zea mays
ccatcgctcgctcatcagaaggagggcctagccttccgcagcagcgctcgtcagactccgccgcccgcaattccccccttgccccggcttttaatgggctttccctcccaccgaaatggccggcgatccctgcacccgcgccgccggtgaccgccccacctcctccgtcgccttcttctccgccgggggcgggctcggcctcggcccctccagcctgctgctccacctgctcctcctccactccctcttatagcctccagcctcccctcgcctcccgccaccccctatggccgccgttttcttccaccacgtcgtcggcgacctcaccgtcggcaagcccgaggtcgccgagctgcacgacaccgacacgctcgacgacgccgcgcgcgccatcgccgccagccccgagggcgccgtgcccgtctggcgccccagggccgcgccggacgacgcgccctcgggggccaggttcatcggcatgatctccgcgctcgacatcgccgccttcgtcgccgccgcgggggtcggggatcgctccatgcgcgccgtcgtcggcgaggtcgtgcagcccaatcctgcgctgctcagggagatcgatccgggtaccaggttgatcgatgctctggaactgatgaggcatggagtgaagcgctttcttgttcgcaagagtgggagctggaaaggcattaccaagagattttcagtgctttataatggtaagtggctgaagaacatggaatcaacatctccaagtgcagccagcagcagcagcacgcagctatccccacgttctggttctgcagaaaagttctgctgcctatcaagggaagatgttctccggtttctcattggatgccttggtgctcttgctcccatcccgctgactcagatgtcttcccttggagccatcaatccgcagtacagctacgtggaagcatctgcgcctgcgatggaagcaattcagaagatccctcaagacccatgcgccgttgctgtagtggagacgatgccagatggaactcgtagcatactaggagacatctctacttacaagctgtggaaatgtgactatgtttcagctgcatgggcactggcaaacctgtcagctgggcagtttgtcatcagtgccgacgagaatgggttcacacccatctgagtctttccagagcctcccatcagcccatcgtcaccggtggaggagatcagtcctgggcgctcgccagggcgaagaagt

SEQ ID NO: 264410 - DNA, 427 bp, Zea mays
tctatcctcttcaccagtgtgctgcttgcttatctcgttctgtcgttcactcgacgcgttctccgctactcctcgtcctcctgccgaggaaaattttgcagcgggagctactactagctagagctagcatgggaggtacaagcgccgcagtcccgagccacggcctcgcctgcgcgcccccggcagccgtcactctgaatccgcgggcgcggcggcggcgcgcttcctcgggcagcggcggccacaggagcagcccccagcagccactgaggagcgacctgctacccccggctaccgtcgcctgccgagctcgctctcagtctgcttcctcgtctaatgtgaactctgggagaggggatgacgcggacaagttgctcgaggatttgctcaaacagcatggcgaggcggtgtacagctccggtggacc

SEQ ID NO: 264411 - DNA, 834 bp, Zea mays
ggacagagaagcccagcccagaatcggagtacatagctatcagggctccgctgtctccagttattcttccggaggctgagagatctgatgacctggggagctcatatgaggtggtgactgagtgtctaaaggatgaacctgaggagccaaccttgggcgccgtggagaaaccttaccaggccccctttgctagggtgacatcgctggagaatgcatcagacaacagtccattacctgaatcacttgcgcatgcaaatagcattaaggctcgagtgcctgagcctgtgtacacagtttcagttgagggccatgtggtaagtgaaaagcctcgaagcaaagagccaaaaggcttgaggaaacttttgaaatttggcaggaaaagccatgctgagggcgcaatggattcatcagttgacgaagcctcagcaggagatggttcgatgctgaagaatctcatttctcaagatgactctggtgcgtcttcttcaaaagcttctcggtccttctccctactgtcaccgttccgcagcaagcacaaggtgattgttctgtgagcacaaggtaatcaatttgggaggagaggaatataatggcgcagcacagtacatacttttggtttttcccttctagtatatatttacacacacgtatacataaatacatacatactatatgatggacttgtcattagacagcctatgtgaaggctgtgtgtggcgatggatggttgtttgcccttgtggttttgtaccctaactatttgtgttgatatatatggtgatcctttttgttccagattaaaaaaaaaaaaaaaggggggccgccgactattga

SEQ ID NO: 264412 - DNA, 1214 bp, Zea mays
cccacgcgtccgttgactcgtgggtttccgcgcctcttcttctgcgcccctctcctcccaaactgcggatagagcagcgaggcagcgacacgatcgcgagcgcacgcacgtaagcacgttgtcggaagctcaagttagaagaagcaccagtgcctgatcgatggcggcccaggctctcctctccggccggcagctgctgggccgccccgtgcagtcggccgtctctaggtcgtcggcgaggaaggcgcccttcgtcgtcagggccagctccagccctccagccaagcaaggtgccgacaggcagctgtggttcgcgtccaagcagtccctctcctacctcgatggcacgctgcccggcgactatggcttcgacccgctgggcctctcggacccggagggcaccgggggcttcatcgagcccaagtggctggcctacggcgaggtgatcaacggccgctacgccatgctgggcgcggtgggcgccatcgccccggagatcttcggcaagatgggcatcatccccccggagaccgcgctgccgtggttcaagacgggcgtcatcccgcccgcgggcacctacaactactgggccgactcctacacgctcttcgtcttcaacatggcgctcatgggcttcgccgagcaccgccgcctccaggactggtacaacccgggctccatgggcaagcagtacttcctcggcctcgagaagttcctcgccggctccggcgacccgtcctaccccggcgggcccctcttcaacccgctcggcttcggcaagaccgagaaggagatgaatgagctcaagctcaaggagatcaagaacggcaggctcgccatgctcgccatcctcggttacttcatccaggggctcgtcaccggcgttggcccgttccagaacctgctcgaccacctcgccgaccccgtcaacaacaacgtgctcaccagcctcaagttccactagaacgttggtgcatcagcatacctgctgccgccgccgccagttgtttgctgtggaaagctagatgcatgcgtgttgtaaaggaacctgaagcgttgcatcggtcatgattcatgcatggccagcctgctgcctgtaacaacaaactagtattgatcttattgagaccggaaactgtattgcacatggtaaatcaatgtacaattcctccctagatgcggacaaatttctcctaaggccacgaccatggtgg

SEQ ID NO: 264413 - DNA, 795 bp, Zea mays
gtcgcttcgttgcagctcggggcgctcggcctgtggggggggtctgattggggccttgcgggggacacggtcgtccacaacatcgatggggccgtcgtcgccgcccctgggagagccaaagccaagcagaggaggtcgcggtcgaccggatttgggaatcctgctcctgccaaacgggatgaacggaaggaagcagaatctttctggggttgatttggcttgaaggaagcgggatctttctggacaatggctggctagcttcatccattctggtaacaaagaaaaaaacaagaaacatctggtatctgagtccagtagaaaggtgtgcaaagagaagagcaaaatatctacaccagacgtctcttttaggtacagagggatggagtcttgtaagaaggtagctgcaagcttgaagtcgtctgagccatgggggaacagggcattctggacaaacgccgctgggccaggttggaagttgagctttgctgttgagccatggactaagggctttagcacgtcgtgtgcggcgccatattcggctggagccacagagcatcaattatcgctcgatgagaaggtggataactccaccgttgcatctgattctgatgggaagtcaccagtttctgaaaaattgaagtttctctctggttcatgttacttgcctcaccctgataaggaggctactggtggtgaggatgcacatttcattagcattgatgagcatgtgattggtgtagcagatggtgttggtggttgggcaaatgttggtatcgaagctggactatattccaa

SEQ ID NO: 264414 - DNA, 445 bp, Zea mays
cgcgctcctcgaatgttgcagccactggatcactgggcaatgcagcgcggccagacgtctcttttaggtacagaggggcggagtcttgtaagaaggtagctgcaagcttgaagtcgtgtgagccatgggggaacagggcattctggacaaacgccgctgggccaggttggaagttgagctttgctgttgagccatggactaagggctttagcacgtcgtgtgcggcgccgtattctgctggagccacagagcatcaattgccgctcgatgagaaggtggatagctccaccgttgcatctgaatgtccccagtttctgaaaaattgaagttgctctctggttcatgttacttgcctcaccctgctaaggaggcaactggtggtgaggatgcacatttcattagcattgatgagcatgtgataggcgtacagatggtgttggtggtt

SEQ ID NO: 264415 - DNA, 1314 bp, Zea mays
gacgcacatgcgacggtctcctgtcctgctctgtccccgctggcctccctaggagcttatactttcttattatactttactataatgctccacggccgcagttagccacatctcgccgtcggcacgagggacagggaggcaggatactcctgtcaggccgcgacgtagccctcctcctcttgctctccccgccatcctctgcttctcgtccacctgggattagatctatttcttggtacctgagcgatcgagtgaaatcgatctagccaaggtgcggcggacgcggcttattcacgaattttctgtgttctttggaaagccgccatggacgagtggattcgccaagccgaggtgtgggtgcgccaatccgagagctggatccgccagcagcccccggagcagatctatgtcgcggccacggtggtcgccgtcacaatcctgctgcttatcgtagcatcttatctgaaatcctctaaaccaagcaccatagtgctatccgggctcagtggcagtggcaaaaccactattttctaccagcttcgggacggatcatcacatcaaggaactgtgacttcaatggaagaaaacagtgatacttttgtgctgcattcggagcaagaaaggaaaggcaaagtaaaacctgtgcatattgttgatgttcctggtcatgctaggctcaagcccaagcttgatgaagtcctgcctaaagctgctggggttgtctttattgttgatgctcaggatttcttgtctagcatgcaagctgctgcagagtacctttatgacattctgacaaaagcaactgtagtgaagaaaaaggtccctgtgcttatattctgcaacaagacggataaagttaccgcccactcgaaggaattcatcaagaaacagttggagaaagaattgaacaagcttcgggaatcaaggaacgccatatcttcagctgacatctctgatgaagtccagctcggggtccctggagaggcattcaacttcagccagtgccagaacaaggtggctgttgcggagggtgccggttcgactggtgatgtttcggccgtggagcaattcatccgtgaacatgtgagggcgtaggtcgttcttattgttctcggggctccaaatggctatcctgatgagataagatgtcacattgcgtcaatggggttgcctttcaatgtgactcttcatccggtcctctgaagttgcttaagaagcagtgaggcgcaatcatattatacaggcattacatgttgcaatgtgtatacctgacagtcatcggatatgaatagagcatggtataactgtctggct

SEQ ID NO: 264416 - DNA, 880 bp, Zea mays
tcgttttaagttaacagtgtaattaggagcccttttcatattccgagattgcagaaacaattctgtttgaataatttcctatattatcatttgtgtgaataggaaccttctccactattcccaacattgtagagcattactctgttttatcatttcttacgttgttaacatttcataacaatattatcatctttttgcagggagcaagaaagggtacctttatgacattctgacaaaggcatctgtagtgaagataagggtccctgtgcttatattctgcaacaagacggataaagttaccgcccactcgaaggaattcatcaagaagcagttggagaaagaattgaacaagcttcgggaatcgaggaacgccgtatcgtcagccgacatctccgatgaagtccagctcggggtccctggagaggcattcaacttcagccagtgccagaacaaggtggctgttgcggagggtgccggttcaactggtaatgttttggccgtggagcaattcatccgtgaacatgtgagggcgtaggtcgttcttattgttctcagggctccaaatggctctcttgatctaatgaggcaagatgtacattgcgtcaatggggttgcctttcaatgggactcttcatccggtcctttgaagttgcttaaggatgcgtttggttgcgggacaaatgaggacggaatagaatgatccctgggttgggggatggaatgattcctggtattgtttggtcggagggatgagatgatccttgttttttgtttggttagaggtataaccggggatggattggtcctgtcctttgtttggtttgagagataactgttacacttgtccttcacaaaaaatggaattcagtcaaaatgcttg

SEQ ID NO: 264417 - DNA, 888 bp, Zea mays
cccacgcgtccgcaacaatccgcggcgtctctctgcgcgcctccgctccacagaaccagctggggctagcccgccgcgcagcgcagccacaaattaaacggagcccggcctgggcatccattattcgttgcagtagtcgcagctgacggacgactgaaccaccgacagacaacatggccgcctccgcctccaccgtctccggcctcgccggcgcctccctggccagccgcccggcgttctccaccagcttcacgcggggcagccgggtgtcggcgaggaaccccctgatgagcaggaacctggagaggaatggcaggatcacctgcatgacgtttccccgggactggctgcggagggacctgagcgtcatcggcttcgggctcatcggctggatggggccgtccagcgtcccggccatcaacggcaacagcctcacggggctcttcttctccagcatcggccaggagctggcccacttccccacgcccccgcccgtcacctcccagttctggctgtggctagtgacgtggcacctgggcctgttcatcgtgctcaccttcggccagatcggattcaagggcaggaccgaggactacttcgagaagtgaagcggttaagatcctatccatcatccctggtgctgcgctgcgttgcgttgcgtgcgtgctcgccgctatcgaacctttgctgtatagggttccgatttcgtcgaatgtaatgtatgatgctacttttgagcttcaatgtaaaatctatgccgtccggccccaacacaaaaaaagtaaagaaaagaaagaaacaaaacttcatcatgatcaagcccaaaaagagtcaaacagcgcctgaataagagacatcatcaatcgcttcaaaaaagggggggctcca

SEQ ID NO: 264418 - DNA, 824 bp, Zea mays
ctggctcggctccgcctgtcacggaccggtccgtactggctgtggcggcacgcgtggtcgagtacagtcggctaggtaatctggtggtacgacgacatggcggccaccagcagcaagtcgtcgtcgtcctcgagctcggcgcagcgggcagctgccgcactgctcgtggccgccgccgtggcggtgtccgtcctggtggtgggcgcggcggcggtgtgcgacatgagcaacgagcagttcatgtcgtgccagcccgcggcggccaagacgacggacccgccggccgcgccgtcgcaggcgtgctgcgacgcgctggcgggggcggacctcaagtgcctgtgcggctacaagaactcgccgtggatgggcgtctacaacatcgaccccaagcgcgccatggagcttccggccaagtgcggcctcgccacgccgcccgactgctagcagtgtgctagccaagccaagccaagcaggaaggcccccggcattgctagctgtacgtgtctgtgtgtgcatctgcagcagggtgcaggcaggggcccgtacgtacgtgtctctttctctctctcatcttgtcaccgtacctatctagagtgtgtgtgttcgtactaattaaaatgttcttgtcgtcgtcgtctgtgcatgcatgtaccatgtcgtcgtgcatgtctattatgtgtgtgtcgtcgtgtcgatcggtacgtatagatgcctgttgttagcatgtgtgtcattacctagtcgtgtgtagtgtatgtatgtgcttgccgggcaaaagttgcatctagctaaacagtagtattacttttgttagtcaacaaaaa

SEQ ID NO: 264419 - DNA, 532 bp, Zea mays
cccacgcgtccgcccacgcgtccgcccacgcgtccgcccacgcgtccgcccacgcgtccgggcgacgcgtccgacagtcggctaggtaatctggtggtacgacgacatggcggccaccagcagcaagtcgtcgtcgtcctcgagctcggcgcagcgggcagctgccgcactgctcgtggccgccgccgtggcggtgtccgtcctggtggtgggcgcggcggcggtgtgcgacatgagcaacgagcagttcatgtcgtgccagcccgcggcggccaagacgacggacccgccggccgcgccgtcgcaggcgtgctgcgacgcgctggcgggggcggacctcaagggcctgggcggctacaagaacttcgccgtggatggggcgtctacaacatcgaccccaaagcgcgccatggagcttccggccaagtgcggtctcgccacgccgcccgactgctagcagtgtgctagccaagccaagccaagcaggaaggcccccggcattgctagctgtacgtgtctgtgtgtgcatctg

SEQ ID NO: 264420 - DNA, 418 bp, Zea mays
tgcctcggacgcgtgggatcgagtacagtcggctaggtaatctggtggtacgacgactgacgacgacatggcggccaccagcagcaagtcgtcgtcgtcctcgagctcggcgcagcgggcagcagctgccgccctgctcgtggcggtgtccgtcctggtggtgggcgcggcggcggtgtgcgacatgagcaacgagcagttcatgtcgtgccagcccgcggcggccaagacgacggacccgccggccgcgccgtcgcaggcgtgctgcgacgcgctggcgggggcggacctcaagtgcctgtgcggctacaagaactcgccgtggatgggcgtctacaacatcgaccccaagcgcgccatggagcttccggccaagtgcggcctcgccacgccggccgactgctagcagtgtgctagc

SEQ ID NO: 264421 - DNA, 435 bp, Zea mays
cccacgcgtccgcgagtacagccggctaggtaatctggtacgacgacccacgacgacatggcggcggccaccaccaccagcagcagcaagaagtcgtcgtcgccgtcgtcctcgagctcggcgcagcgggcagcagctgccgccctgctcgtggcggtgtccgtcctggtggtgggcgcggcggcggtgtgcgacatgagcaacgagcagttcatgtcgtgccagcccgcggcggccaagacgacggacccgccggccgcgccgtcgcaggcgtgctgcgacgcgctggcggtggcggacctcaagtgcctgtgcggctacaagaactcgccgtggatgggcgtctacaacatcgaccccaagcgcgccatggagctgccggccaagtgcggcctcgccacgccgcccgactgctagccaagccaagcaggaagg

SEQ ID NO: 264422 - DNA, 957 bp, Zea mays
cccacgcgtccgactgtgcccccgactgctctcactcagtctcagagacgttctcctccgtccgtccgcccccgtgacgcgagcgtcgccagggagccgaaagtaagcctcagttccgccggcgtgcgaggggttcgatctgggttagcctctcacgatgccgccagcccccaagtccggcgacgccctcttcgccagcgtggatcgcgtcaatgcggagctgttcacgctcacgtacggcgccatagtgcggcagctgctcacggatctggaggaggtcgaggaggtcaacaagcagctcgatcaaatgggttacaacattggaacacgattggtcgatgagttcttagcaaagtcaaatgtatcaaggtgtgttgacttcaaggagactgccgatgttattgcgaagcttggcttcaaaatgttcttgggtgtgactgcaaccgtgaccaattgggatgctgagggtacaagttgcagccttgtcctggaagacaaccctcttgttgatttcgttgagctccctgacacttgccaaggccttcagtattgcaatttgttaagtggagttattaggggggcattggaaatggtgtctatgaaggcggaggtgacatgggtgcgtgacatgcttcgcggggacgatgcctatgagatgcgggtgaagcttatcaagcaagtcccggaggaatacccctacaaggatgatgactagttctattttagtgcaagattgcttgtttggattttgacatcgttttcgtcgatggtccgtagttctgctataacctgatatcatacgaggaaagctgcgtctgttttgcttgtgtattgtagaaatcatacataatctttcctgagttgcggctttgaattagcctgctggattcagggcgttcgctatgccaattggtgttatctagaaaaaaaaaaaaaaaaaaaaaaaaagggcggccg

SEQ ID NO: 264423 - DNA, 476 bp, Zea mays
ctcatctccgtccatttactcacacggtcacaccgcctcaactcgcgctgcccgtcgcccccaagcctcggttccgccggcgcgcgaggggattcgagctgggtcttgggtagcctctcaccgtctcacgatgccgccagcacccaagtccggcgacgccctcttcgccagcgtggatcgcgtcaatgcggagctgttcacgctcacgtacggcgccatcgtgcggcagttgctcacggatctggaggaggtcgaggaggtcaacaagcagctcgatcagatgggttacaacattggaacacgattggttgatgagttcttagcaaagtcaaatgtatcaaggtgtgttgacttcaaggagactgccgatgttattgcgaagcttggcttcaaaatgttcttgggcgtgactgcaaccgtgaccaattgggatgctgagggtacaagttgcagccttgtcctggaagacaaccctc

SEQ ID NO: 264424 - DNA, 1115 bp, Zea mays
aattactcgcctctcttgctcgccaacgccagtgccagaggcccagagcttcgtcaaagacacgccgaaaagagggggaggcgactcggccgaggtccggttccgaactccggtcctccgatttgcgcgtccggatctaccagccatggcatcatcttcggacccgtggatgaaggagtacaatgaagcatccagacttgctgatgacatcagttccatgattgctgatagagggtcccttccacaatcaggcccagaaattatgcggcatacttcagccatccggagaaaaataactattcttgggactagactggatagcttggagtcgttgcttggcagaattcctccaaagtcaatcactgacaaggagatgcataaacgccaagacatgctttccagtttgaagtctaaagccaagcagatggcgacaagtttcaacatgtcaaacttcgctaacagggaggatctgcttggtcaaagtaaaaagccagatgacatgagcagagttgctgggttagataaccaaggaattgttggccttcagaggcaaattatgaaagagcaagatgagggtctcgagaagctggaagagacagtgctgagcacgaagcatattgcattagcagtcaatgaagaacttaccctgcacacaagattgatagatgaccttgaagatcatgttgatgttacaaattcacgtcttcagcgtgtgcaaaagaggcttgcaattctgaacaagcgcaccaaaggtggctgctcatgcacgtgcctgctcctatctgtcgttgccattgtgattcttgcagtcattgtttggcttctcgtcaagtatctataaagaaaagaaagaagcagccggctaccctgcggacctctctcgaaatgctcacctgcagccttcgcttgaaaagttccttctgtgttactccataaaatgtgcagccctttaaaattaatatgtatacacggtggtttcatcttcccttccatgagtggaatggttatggctatgtacattacatagaatttggtacgtacatgatcatcatctgcatgactgcattttgtgtatggcgtttgtcagtttgcaatgacagggtgttgatttttcc

SEQ ID NO: 264425 - DNA, 809 bp, Zea mays
  unsure (1)..(809): unsure at all n locations
ctttcttgctcgccacagcttcgtcaaagacacgcggaaaagaagaggaagggggaggcgactcgaccgaggccggcgactcgaccgaggcccggtttcaatctccggtcctccgattgcgtccagatctaccagcaatggcatcatcttcggacccatggatgaaggaatacaatgaagcatccagacttgctgatgacatcagttccatgattgccgacagagggtctcttccacagtcaggcccagaaattatgcggcatacttcagccattcggagaaaaataactattcttgggactagactggatagcttggagtcattgcttggcagaattcctccaaagtcaatcactgacaaggagatgcataaacgccaagacatgctttccagtttgaagtctaaagccaagcagatggcgaccaagtttcaacatgtcaaacttcgctaacagggaggatctgcttggtcaaagttaatagccagatgacatgagcagagttgctgggttagataaccaagggattggtggccttcagaggcaaattatgaaagagcaagatgagggtcttgagaaactggaagagacagtgctgagcacaaagcatattgcattagcagtcaatgaagaacttaccctgcacacaagattgatagatgaccttgatgtatgtgcctgcttctatctgttgtcgccatcgtgattcttgcagtcatagtttggcttctcgtcaagtatctgtanaggaaagaaagaagcagccggcctaccctgcagacctcactcgannatgaccttatgtgtgtg

SEQ ID NO: 264426 - DNA, 443 bp, Zea mays
gaagatcatgttgatgttacaaattcacgtcttcagcgcgtgcaaaagaggcttgcaattctgagcaagcgcaccaaaggtggctgctcatgtatgtgcctgcttctatctgttgtcgccatcgtgattcttgcagtcatagtttggcttctcgtcaagtatctgtaaaggaaagaaagaagcagccggcctaccctgcagacctcactcgaaatgacccttatgtgtgtgcagccttcgcttaaaaagtcccttctgtgttactaccattgaaatgtgcatccctttgaaaataatatatatacggtggtttcatcttccctttcgtgagtggaatggttatggagtaatgtacattacatcgaatttgacacatacatgatcatcatctgcatcttgtgtatggtgtttgtcagtttgcagtgacaagtgtggatttattc

SEQ ID NO: 264427 - DNA, 663 bp, Zea mays
cccacgcgtccgcccacgcgtccgcccacgcgtccgcggacgcgtgggctgatgaagatatagaaaatctgcagcttgctgaagatcttgccaaaacatgtgttgagatgtacttcgtgacctctaccggccttgctcctgaaatagcttatttccacattgagggtgatacagaaggggggcctgatggtgggaataaaagctccaaatatatcaatgatatcgtaataaaaccacttgaccgtcacaatcttctacgcccagagactgtggaatcactatttgttttgtatagaatcacagaggattccaagtatagggagtggggttggcagatctttcaggcttttgagaagtacacaaaagttgattctggtggttacacatcattggatgatgtcacaagcctacctccttccacgagagataaaatggaaactttctttcttggagaaacattgaagtatttgtatttactgtttgatgaaaacaatacccttcccctagataagtatgtgttccatacagaggcccatcctcttccagttatgcggtctgcagaacaggcttcacattctgtgtagtttcccaagtttatagctgttgtaccatggtgagaagtacagatctgtgacaaatatacttgacaacatagttggagga

SEQ ID NO: 264428 - DNA, 2047 bp, Zea mays
ttgtagttcggaaagagacggcgtccatcttcttttttttgttcttgtaatctccaaccaaggactcaaacacgtcaagcaagtaaacggagggcctaaccataaaatggctttgcctttattccaaagtccaatacaagtcttccttggggaattagctcattgaagagagagagggagagagagagagaggggagacccattaccaatgccaagaacaagaaaccagagaggacagccgcgaatacaatccgaatcccctccaaaaacccaccataccgtctcccccatctgcaagaacaagatcaggagagcatcctagggggaagaaacaggagggggaaaaagaagcccagaaagaccaactgaccaaacaaaaaggtggcatctttgtgtcaccgaggcaccgccgatcacagaccaaagcccgctcctctggtccatcccaagcgtacagcagccgagatttcttcgatctgcgcttgcgtttttttttcttgtaaagattttagttttccccccttcaactgttgctagccttgagtcgctgagaagtttcgagaagggtggtgtgagtgtcggatagctcaagatggatccggcgttgctggacgacgtcatacgccggcttctggaggtgaagaatctcaagcctgggaagaacgcgcagctgtcagagtcggagattaagcagctctgcgctgccgccaaggagatcttcctgcagcagcccaacctgctggagctcgaggcccccatcaaaatctgcggtgatgtccatggccagtactctgatctcctgaggctattcgattatggtggctatccgcctcaggccaactaccttttcttgggtgattatgtggatcgtggaaagcaaagcctagaaacaatatgtcttcttttggcttacaaggtcaagtacccggagaacttctttcttctaaggggcaaccatgaatgcgcatcagtaaatcgcatctatggtttttatgacgagtgcaaacgcagattcagtgtaaagctgtggaaaacattcacagactgttttaactgcttgccagtgtcagcattgatagatgaaaagattctctgtatgcatggtggtctatctccggagttgaacaagcttgagcaaatactcaacctgaatcgccccacagacgtgcctgatactggattgctctgtgatcttctttggtctgatccttccaatgaagcaacaggctgggccatcaatgatcgtggtgtttcattcacatttggtcctgataaagtttctgaattccttgagaagcatgatttggacctcatctgccgagcccatcaggttgtcgaagatggatatgagtttttcgctagccgccaactcgtaacaatgttttcagcccctaactactgtggagaatttgataacgctggtgccatgatgagtgtagatgagacattgatgtgctccttccaaatactgaaacctgcgaggaaggtgttgggtggttcaactaataacaaatcaggcttcaagtcatcgagaggatggtgacaatggcaagcctgatatcaggttggttggtgagcagcacgccagtggtcgacggggggttgttccatcataatcatattacagcggctgcaactgacaggcccaatgcatcttctcttccatgttggatcaacactcttgtaatgtattatttactgtgcggatctgagaggatgtgaatgatttcatttgcgtcctcaagttcaaaagattcaggaaggcatgcttgaaataaaaatagccagaaacatgcaaggtgctccacgacgcagcacggcatttccagtgttttctttttgctgtctagttctgaatatattttaccgccagaccagcacgtaagcttgcctggcaatggtttttatttgttgctatgccatctcaaaagtcaaaaccatggatttatatcaaaagtcaaaagactttgagaagtatttatttggtagcctagctacaatgttcctcctctttgatgcatagcataggggatggggatgggtgatt

SEQ ID NO: 264429 - DNA, 839 bp, Zea mays
tcggaggtttacactggatctgccggaaacattcaccggccggtttaaccggttggcaggggcaggcttggttggttgaaaggatcctctgaatccatgggggcctatctccggagttgaacaagcttgagcaaatactcaacctgaatcgccccacagacgtgcctgatactggattgctctgtgatcttctttggtctgatccttccaatgaagcaacaggctgggccatcaatgatcgtggggtttcattcacatttggtcctgataaagtttctgaatttcttgagaagcatgatttggaccttatctgccgagcacatcaggttgtcgaagatggatacgagtttttcgctagccgtcaactcgtaacaatattttcagcccctaactactgtggagaattcgacaacgctggtgccatgatgagtgtagatgatacattgatgtgctcgttccaaatattgaagcctgcaaggaagatgatgggtggttcaactaataacaaatctggcttcaagtcattcaggggatggtgacaacggcctgatggtgggcacgctgcgttcgacagggggtacatcttacagcggctgcaactaacaggcatatgcattttcgcggaaacctgcttgggccttggaagggcaaagcagatgtagaactgtgcatcttccatgttggattaacacttgatgtaatgtattgttatcggtttttactgtgcggatctccttatgatatgggaggatgtgaatgagtactgccctcccctttgcgtcctaagattcggaaagaatccattcgccaataaaaatagccagacgattatggatccc

SEQ ID NO: 264430 - DNA, 955 bp, Zea mays
  unsure (1)..(955): unsure at all n locations
gaggtagagcatcttcctccaccaggtgtgtgtcagtgtgtcagnacatggctggtgtacgggatgaagggattcgttcaccaacgacggtgcgtaggagtggtgagcgcaagtgacggtgctagccggacgcgtgggcagtaaatcgcatctatggtttttatgacgagggcttacgcagattcagtgtaaagctgtggaaaacattcactgactgctttaactgcttgccggtgtcagcattgatagacgaaaagatcctctgtatgcatggcggtctatctccagagttgaacaagctcgaacaaatacttaatctgagtcgccccacagacgtgcctgatactggactgctctgtgaccttctttggcctgccccttctaatgaagcaacaggatgggccatatatgatccacgtggttcatctacgtttggtcctgatagtttctgaattccttgagaagcatgatttggacctcatctgccgagcccatcaggttgtcgaagatggatatgacgttttcgctacccgtcaactcgtaacaatattttcagcccctaactactgtgaaaaattcgacaacgctggtgccatgatgagtgtaaatgatacattgatgtgcccgttccaaatattgaagcctgcaagaaaaatgatgggtggttcaactaataacaaatctggcttcaagtcattcaggggatggtgacaacggcctgatggtgggcacgctgcgttcgacagggggtacatcttacagcggctgcaactaacaggcatatgcattttcgcggaaacctgcttgggccttggaagggcaaagcaaatgtagaactgtgcatcttccatgttggaaaaacacttgatgtaatgtattgttatcggttttttaaaaaaaaaaaaaaaaaaaaaaaaaaaaaaaaaaaaaaaaaaaaaaaaaaaaagggcggccg

SEQ ID NO: 264431 - DNA, 476 bp, Zea mays
gtggagacggagaggggagacccggtcactaccaatgccaagaacaagaaaccagagaggacagtcgtcaatccaatccgagtctcctccaaaaacccatcaatctgcaggaacgagagcagcaggagagcatcctaggaaaaaagttaggaccaactgaccgagcaaaaaaggtagcatctctgtatcaccaaggcaccgccgatcacagaccaaatccctcccccctctggtccatcccacacgtagagcagccggtatttcttcaatccgtgcttgcgcttttttttttctttgtaaagatttcgtttccctcccttttaactgttgccgagaagtttcgacaagagtggtgtgagtggtgaagagctcctcaacatgatggatccggccttgcttgacgacgtcatacgccggctgctggaggtgaagaatctcaagcctgggaagaacgcgcagttgtcggagtcggagat

SEQ ID NO: 264432 - DNA, 327 bp, Zea mays
agcatccaaaacaactccactcctgccaccccaagtccgaagcttcctcctcctccaacgcctccgcctccccgtcccgcagtcgcactcgcaccgcacggcagcaggtagctagctagctagctgcgggcttctgtagccaagcagggccggagcacgcacgcacgcgcgagcgcgagcgcatggcggcgtccgcgagccgggcccgcgccggcgccggcggcgctggcgaggagtacgaggacctgctgccggcgatgggcgagcggctgggcgtggcggggctgctggcggagctgcgcgcggagcccaggctgctggcggacc

SEQ ID NO: 264433 - DNA, 1346 bp, Zea mays
gcgcgttcgacccggtagcccgaaaccgcccatatatcttgccaactttctgcgacacggtggaggcgtggagctaactacccccgcgctggctcgccaccgccgccgcagcaggcgtgggaatctgggcagcgccccgcggagaagaggaggcagcgcgctctccgtccgccatggcgggctcttccgaccccgacaagctcatgagcaaagccgacaaactaacaaaattgagttttacaagatggaatgctgattggaaaagcgctacctccttgtatgagcaagctgcaattgcgtataggttcagaaaggacaatgagaaagcaaaagatgcttttgagaaggcctcaaaaggacaggaaatgatctcctcaccatgggacgctgctaagcatatggaatctgctgctgctttagcaaaggagcttgggcgctggaatgaagtatctgatttctatcacagagcttcagaattataccgtgaatgtggaaggccacaacctgcatctgatgctctagcaaagggtgccagtgcattggaggagaaatctccagaagaagctatcaaaatgtatgatgaggcttgttcagttctagaagaagatgggaaggaacagatggcttttgacttgtaccgtgccgcagcagctttgtatatcaagatggagaaatattcagatgccgctgctttgtttttaagacttggttcagctgctgataagtgcaatgccatcaatagccaatgcaaggcctatctgagtgcgatcatcatctatctttacgcacatgattttcagcaagctcaaaaatgctacaatgactgctcagaggttcaagccttcctcaatagcgaccagaatcgatgcgcaacgaagctattgtctgcttatgaggaaggtgatgctgaagaaatcaaacgcattgctcaatcaagtgccttcaatcaccttgaccatgtggtaattaggcttgcacggaagctaccaacaggtgatctgcaggccatcaagaaagctgacgatggcgaggaatccttggacgaggatgacctgacttaaaacgatctcccgagccaaaaggtgaacgtcatagtttgccatcggtgggggaacagctgtaaaaagaggttatgcgagttacatactaaaaacttgtgggcagcattcccagatctataaacatgaaatttgtagggcccaattatgttgtatccgtactggtggtttggtgttacctaaactttagtggtatgtttatggtgccctgtgctacatgattcttgcaaatccagcatggtgtatatttgttggaaaaaaaaaaaaaaaaaaaaaaaagggcggccg

SEQ ID NO: 264434 - DNA, 502 bp, Zea mays
ccgcaggcgtgggaatctcggcagggcgccgcagggaagaggaggccgagcgctctacgtctgccatggcgagctcttccgaccccgacaagctcatgagcaaagccgacaaactgtaattaggcttgcacggaagctaccaacaggtgatctgcaggccatcaagaaagctgacgatggcgaggaatccttggacgaggatgacctgacttaaaacgatctcccgagccaaaaggtgcagagaacaaacgtcatagtttgccatcggtgggggaacaactgtaaaaagaagttatgcgagttacgtactaaaaacttgtgggcaacattcccatatctataaacatgaaatttgtagggcccaattatgttgtatccgtactggtggtttggtcatttggtgttaccgaaacagcgaaactttagtggtatgtttatggtgtcctgtgctacatgattcttgcaaatcgagcatggtgtaaaaataatatgttggccaatc

SEQ ID NO: 264435 - DNA, 314 bp, Zea mays
caggccatcaagaaagctgacgatggcgaggaatccttggacgaggatgacctgacttaaaacgatctcccgagccaaaaggtgcatagagcaaacgtcatagtttgccataggtgggggaaccgctgtaaaaagaagttatgcgagttacatactaaaaacttgggcagcattcccagatctataaacatgaaatttgtagggcccaattatgttgtatccgtactggtggtttggtgttaccgaaacagcgaaactttagtggtaaaaaaagaaaacaaaagagggagaaagaaaaaaaagggcggccgccg

SEQ ID NO: 264436 - DNA, 677 bp, Zea mays
gtccgcagcctatccaatccctggccaaatccgcagtccgcagacgagagtggaagcggggcacagacagagaagccaatggcgctgtccctctccctcgcgcgccccgcgcccctcgccgtttccgccggcgcaggagccaggaagctacccgcagccagcctcgcattcccggcgaaatccttcttcggcgcgccgctggccgccaccgcggcctccgtcgcgtcgccgctcccgcgcaagccggccacctccaccacctcgctcgaggtcgtcgcggcggggaagaagggctacaagatgaagacgcacaaggcgtcggcgaagcggttccgggtgacggggaggggcaagatcgtgcggcggtgcgccgggaagcagcacttgctcgccaagaagaacaccaagcgcaagaagaggctctcgaagatggtgcaagtcaacaagagtgactacgacaatgttacgggtgcactgccctacctcaaagtgaataggaaagcaaactgagagctacgtggtcttcaaaaaatcattaagtttcgttccaccaaattgtaattttgtgtatcttccactgtatttccttctcaaaaatactgaggcatcatttcaaagcaagcaaaaaacaactcctggtatcaacagtctagcgatatttcagaatgaggtgcact

SEQ ID NO: 264437 - DNA, 373 bp, Zea mays
gccagggccagccggccaaaacacagaaaagctaaacccgacctccgctcgccggcgcccggcaggatggcttcgtcggcggcgtaccctgatgcggacgagaacctggaggccatcatcacccgcatagagcagaagtcccgaaagatcgagacccttctcaagcagtcgaagccggtggaggccctaaagacggcgctcgaggggtcaccgctcaagacccgcgacgagcgatgcaagtcggcgaactggatcgtggtgcaccgcgcgttgatggcgattagggacgtagacggcatgttcaactccctggatcccgagtactacgacatcctcatgaagtacctttatagagggttacctacagggggat

SEQ ID NO: 264438 - DNA, 1310 bp, Zea mays
aagagattgaacggctgaaaagggacaagaatgttcttatgcaagagcttgtcaggctgagacagcaacagcaaacaactgaccatcagctgcagactttgggcaagcgtcttcaagggatggagtcacggcagcaacagatgatgtctttcctggctaaagcaatgcaaagtcctggtttcctagcacagtttgtacagcaaaatgagaagagcagaagaagaatagtagcggcgaacaagaaaaggcggctgcccaggcaagatggtggcctagactccgaaagtgctgctgcttcgttggacggtcaaatcatcaagtatcagcctctgatcaacgaagcagccaaagcaatgctaaggaagatactaaagctagattcttcgcataggttggaatctatgggcaattcagagaatggcaattttctgctggagaattatatgccaggcgctcaagcctttgagagctcttcgtcaacaagaaactctggggtcaccctttcagaggtttcagctaacccaggtttgccgtatggcggcggcggcggcacgagctctgggctgtcagccatctgccctcctgaaatccagtgcccagttgtgatggacaacatgtcgtctaaccaagtgcccagcatgagtgctgtgcctcctgtttcgaaggctacaattgacatgggtattcctgaattctcagctctggcagacttggtgaatgaaggctccgtcgatatccctggaggggcctttgagatgcctggtcctgagtttcctctgccagaaggcgatgacagtgtccccatcgagaccgatgagaccatgtacaacaacaacgacgagactcagagccttccaggcatcatcgactccttctgggagcagttcctggtaggcagccctctctcggccgataacgatgaagttgattcggggtcgccacaggagaacggatggagcaaactggggaacattggtgatcttacagaacagatgggccttctgtcatcaacaaatcaccgcgactcagggaatgggctgtagtgtatcttaattaatatacggtagactgggattatcggtaataagcgtcgcctgcagtttttgttatttttccttttggccaaaaaatgatatgccggtatatcaaccactcgctcgaccttatatgcgcgggaggggcagtcttccagctctgaatgccacattcacctgcttgtatcaatgatgttggcagtcttgagaacaaaaaaaaaaaaaaaaagggcggcgctcgcgatctagaaccggacgcgtgggcggacgcgtggg

SEQ ID NO: 264439 - DNA, 484 bp, Zea mays
acgagactcagagcctgccaggcatcatcgactccttctgggagcagttcctggtaggcagccctctctcggccgataacgatgaagttgattcggggtcgccacaggagaacggatggagcaaagtggggaacatcggtgatcttacagaacagatgggccttctgtcatcaacaaatcaccgcgactcagggaatgggctgtagtgtatcttaattaatatacggtagactgggattatcggtaataagcgtcgcctgcagtttttgttatttttccttttggccaaaaaatgatatgccggtatatcaaccactcgctcgaccttatatgcgcgggaggggcagtcttccagctgagctctgaatgccacagccacctgcttgtatcaatctatgatgttggcagtcttgagaacaccactgtgacttgttaaatctgtatgcttattcccactctagttgctgatatttgttagtttgtt

SEQ ID NO: 264440 - DNA, 327 bp, Zea mays
gccttccaggcatcatcaactccatctgggagcagttcctggtaggcagccctctatctaccgataatgaggaagttgattcagcaggcggactatatgcgcaggaggatggatggagcaaagtggggaacatcgctaatcttacagaacagatgggacttgtatcatcaacaaatccccgggactcagggaatgggctgtactagtatcttaattaatacagtagtctcaggattctggtaataagtgttgcatgctcttttcttatttaattattttcccccttttcgccaaaaaaaaactcaatatgggaggtgggggtgaggt

SEQ ID NO: 264441 - DNA, 858 bp, Zea mays
atacgctccattttataaccaaccggcggtccatcttgagaggaccaagaaacatcgagagagcggttctacgtccgagtcgtcgcatcaggtcccctcgattcgccggcggcggccaccaaccaagctcatacatctgaattgactagtcaaactcagtgatctctttggggactaatcaaactcaagaactaagtttcatgtctgatctcgacgtccagcttccatctgcttttgatccgtttgcagaggcaaatgctgaggactccagtgctggtgctggatcaaaggactatgtgcacgtgcgtattcagcagcgcaacggaaggaagagtctgacaactgttcagggcttgaagaaagagtacagctacaacaagatcctcaaggatctcaaaaaagagttctgctgcaatggtactgtagtccaggatccagagctaggccaggtcattcaactgcaaggtgatcagcgtaaaaatgtcgctacttttctagtccaggccggaatcgtgaaaaaagatagcatcaagattcacggattttagactgcaaatttgaagtgcttgtgtgtgcctatcatatgataccatatgataccaggtattgaagcttcggaagcttgttggccttcgtaacatcagtagtcgttattcatctgaatatgtgtcattatttcatttgataagactggtattgatgcaagttgtccttgcagtatgttttgtaagtgttacctgcatgaaagtatcgtttgtctgcggagctgtctgctactgatattgaataacaagagagattgctgtttgtaattcgtctatgaattattatgatctttccccagacttgagctttaca

SEQ ID NO: 264442 - DNA, 443 bp, Zea mays
gtccaaccgcgtcgccggaggccggaaccatgaagcctgtcagtgtcgccgaacacaacaaccaccagcctcgcctgcactcccccacgccggcgtcggcgaccaagatctcgatccccatctcttcgagcgaggcggcgctgttcgggaagggtaggtacaaggtgtgggccctcgcggccatcgcgctcctagcgctctggtccatgttcgccgcctccgtcacgctgcgcttgtcctccgtcgatctcgccaccacgttcggggacgcgagcgatccgctcatcgacaaacttgatcccctgtacgactcatcaatccctctctactttctctcctagatctagccgcttacttacgatgtgtaaatgcgtgctaagagctttctggtattgcaaaagggaaaggcaagtagacggtgtgtttacttatatagttctaga

SEQ ID NO: 264443 - DNA, 332 bp, Zea mays
aaaatatattctgctcttgctgaagtggcaacggatagagaggacatggacaactcactcagtgactgggtgaaagctttatccatgttggagcatttggttgagcctgaccatcgtcgagttgtggaattaaacttccgcatttgtttggtttatgaactagtttccaagatcggagaagcaatttcatactgggcaaaagcaatttcgctatgcaaagtcacgcatacagagcccgaaaaggtccaaggatgctttgctggctggtatagatggtgatgcatctgctgctgaagctgaaagaagctcagaaaaatctgccattgaaaaag

SEQ ID NO: 264444 - DNA, 991 bp, Zea mays
  unsure (1)..(991): unsure at all n locations
ggaanttcccgggtgcggacccaaccgcgtccgcgagacgtcgtgtggcgagaccgctgtggcgcgagactgctttggttatatagtgtcacattatgtgcacaatattaaatgtgagggggggatacattctaattgtatgcagacctgatgtttgataactattagtgtatctgtttacattgtatactaatgaacaatatttgttccatgtttgactcttatctcattacccccttacgtttggcaggacaaaagctgaaccacctatttactacatgccaactaaaccaattattgacgatccagccattgttgaacagaacaaggaaaaggtattcgaagaatggaaatctatgcgcagggatgagctgactcggttccaaaagcaagttgaggagcaatatctctcaaatgtggagaggcagctggagaggatccagaatgcccggaacgctcgaaaggcgaacgggcatgctaacatgcaagaaatggacaaggagctggacacacacagggcggagcatggtccgaagactcggcgagttcctgaggagggcggtaatgatgacgacgaagacgcagaggacatggctgcggaagacgaggtgatggatgaagttctgggcatcaacgatgggatcaacgaggacccatccaagccgtccgaagaagctactactgaaggtggtgagcctgcacccgaggaagcacaataggattctttgttcacacaagctaggcacatagccgtacgtaccattccgtatgcttagttgccgtattgttgggaactgtttgtgcgtgtatttctgttagacgttccccgctggtttaggctgtgttttatattgctgttttgtctttttgaatgttgagaccatacaactgtcgatcattatctcataattgttgtaaaaatactataattgataccttgatttggacgtcggtggcgttagacgtttattgccagcaggttatgttcttc

SEQ ID NO: 264445 - DNA, 1578 bp, Zea mays
cccacgcgtccgagggcaccgaaacccccaaccatcgttcccaggttgccaatcggcgcgcagccaaacccaaacccttcctccctcccgacgggcgacggcgatggccgccgcgacagagaagacggctgaggacatccgccgcgagctccaggagctccagcgccagcaccgcgagatcaccgagcgcctgcgcgacccccgtggccttcgccgcggcgcccccggccctggtcctggacctgggcccccccgcccgctccgcggcttcgtgagaccccatgtgggtgcggaagtggcggatcaggctccgcagaagcgtcggctgctatcagccgtagttaaggtggatggcgctgaaaataacgaggaaggcacaaaggatgccgatgcggaggggcaagaggcgggttcaggtgccactgaaggcagtgacaggaggactttcaacactggcgggttcagaagggacgggagcctgcggatgcagaggagagtggactataattcgctgccagagccagctccaagggagcttcccaggaatgaggacccgaatttggtgagaagaaataagaggatgctggggcagcttcttgtcggtacattagagaaatttcaacaagaggataaaaagctatccaactctgaggcttttctgcgcagatcagagactcagcgaaaggctgagcaaaaggtccgcgaagaaagtgtaaggctgcgacgagtaggcacgtgagcaaattgcagagaagcgtaagcttggatatgacgctccgcgctcgtgtagctgctaaggcggaagaaaagaggttggagctgttgtacattcagtggactgagcaccataaaaggctgtccaatttcttaaggacaaaagctgaaccacctatttactacatgccaactaaaccaattattgacgatccagccattgttgaacagaacaaggaaaaggtattcgaagaatggaaatctatgcgcagggatgagctgactcggttccaaaagcaagttgaggagcaatatctctcaaatgtggagaggcaattggagaggatccagaatgcccggaacgctcggaaggcgaacgggcctggtaacatgcaagaaatggacaaggagctggacacccacagggcggagcatggtccaaagcctcggcgagttcccgaggagggcggcaatgatgacgacgaagatgcagatgacatggctgtggaagacgagctgatggatgaagttttgggcatcaacgatgcaatcaatgaggacccatccaagccgtccgaagaagctactactgaaggtcagccagcacccgaggaagcacaataggattctttgttcacacaaggtaggcgtaccattccggcattccgtatgcttagttgccgtcttgttgggtgctgcttgtgcgtgtatttttgttagacgtcccccaatggttagactgtgttttaatattgttgttttggccctttgatgttgaggccatacaactgtccattattatcttataattgttgtaagcatactataattgtttccatgatttggtcgtttttttgtcgtccc

SEQ ID NO: 264446 - DNA, 1883 bp, Zea mays
aatcgagcgaatcggctcgaggctttatagctgatgaggaatggcaacaatttgaggagcctgtccaacatgactttgttactgggtttgggaagaagctcagcagccttctggatagatgtttatcagagtatgacatggaggctatttattttgatgaaggtgtcagaagctcgaaaagacaacaacttgagtctaaactgttacagcttgtcaatcctgcctatcaatctcttctaggtcacttacacactagaactttagaagcatttaaggagtactttggcaaggccctagaaaaggagggatttgctgttgcagctcgcaattgtactcaaactttcttggagaagtttgataaaggatctgaagatgctgctattcaacaagtgaattgggacacctcaaaagtgaaggataagcttagacgtgacattgaggctcatgtagcttcagttcgagctgctaaattatctgaactttgtgccaaatatgaggcacaacttaccaaagctctggcggaaccagttgaatctcttctagattcagccagtgaagatacgtggccagctattagaaagcttcttcaacgcgagacaaaaactgccgtttcaggtcttcaatctgctgtgtcagcttttgaacttgatgaagcaactgagaaagaactgcttgtgaagctggagaagcatggaaggagtgttgttgagtcaaaggcaaaagaagaagctggaagggttttgattcgcatgaaggacaggttttcaatgctgttcagccgagatgctgactctatgcccagggtgtggacaggaaaggaggacataaaagctataactaaaaccgctcgctcagcttccatgaagttgctttctacaatggctgcaattcggttggaggaggatggtgataacattgagaacactctttcccttgctcttgttgacacctcaagacctgggactactgataggagtatccaattgtccgatccacttgcctccagttcatgggaaagggttgccgaggagaagactttaattacccctgtgcagtgcaaaaatttgtggaggcaattcaaggctgaaactgaatatacagtgactcaagccatagctgctcaggaagcaaataagaggaacaacaactggctaccacctccatgggcacttgctgcaatggctatccttggattcaacgagtttatgacattactgaggaatccgctttacctgtttgccatatttgtgatttatcttgttggaaaagccctttgggtgcaatcagaaattggcagggaattccaacatggatttcttcctgccatcctttcactgtcgacgaaatttgttcccactgtaatgaacatcctgaagagattagctgacgcgggtcaagaacctgcagcagcccccgagaggcaaagagagatggagctccaaccaaaacccaccaggaacggttcctcatacaccaatgcgacgtcggcggggtcatccagcgtaaccacttcggagatcggacctgagtattcgagcccggtggcgcaatgatttagctgacctttagcctttggctggaagcccactctagcgcagttgagggaaacagggtgcctctcgagaacataggaacttaggaagattttaaggacagtcaggtgccttgcagttttttctaagcctgcccttcccccaaactgatgcaaggtggtgatggggtggcactgcccatcactattatttaaggatttttgggggctgggggggttgtttgtaagagcattgtagaatgatttcgtttaatttttttggtttctgtaacatgaatacatgatatgtgatggttgtatagaagatctggggggcgtagtgtgcccattc

SEQ ID NO: 264447 - DNA, 966 bp, Zea mays
  unsure (1)..(966): unsure at all n locations
tccctcgcgtgcgcccacgcgtccgcccacgcgtccgcggacgcgtgggccgagcgcagccaaacccaaaccctcctccctcccggctctcgacgggcgacggcgatggccgccgcgacagacaagacggccgaggacatccgccgcgagctccaggagctccagcgtcagcaccgcgagatcaccgagcgcctgcgcgacccccgtggccttcgccgcggcgcccccgggcctggtcctggacccggggccccccgcccgctccgcggcttcgcgagacccgctgtgggtccggaatcggcggatcaacctccgcagaagcgttggctgctatcggccggagttaaggtggatggcgctgaaaataatgaatatgacacaaaggatgccgatggggaggggcaagaggcgggttcaggtgccactgaaggcagtgataggaggaattttactaaatcgtgttagtagtggcatatagagtaggatcgcaacgtcaacgccgacgtcgacaacaacaagtcagtgggggtagtcactagattgctccgccacatcaagacctaggactatatatcagagtattcaattatccgatccacttacctccagctcatgggaaaggtgcaaaaatttgtggaggcaattcaaagctaaaactgaatatacagttgctcaagcgataactgctcaggaagcagataagaggaacaacaactggctgccaccttcatgggcacttattgcaatgtctatccttggattcaacgagtttatgacactattgaggaatccactntacgtgtttgccatattttgtgatttatcttgttggaaaagccctttgggtgcaatcaaaaattggcagggaattccaacatggatttcttcctaccattctttcactggtcatgaaatttggtccctctataatgaacattctgaagagattaactgacctgggtcaag

SEQ ID NO: 264448 - DNA, 549 bp, Zea mays
gagaaaggggaacaagaagagaaaaaactaccgaactccgaggcttttctgcgtagatcagagactcagcgaaaggctgagcaaaaggtccgcgaagaaagtgaaaggctgcgacagcaggaacgtgagcaaattgcagagaagcgtaagcgtgatatgacgctccgcgctcgtgtagctgctaaggcggaagaaaagaggttggagctgttgtacattcagtggactgagcaccataaaaggctgtccaatttcttaaggttatttttatttctggtccaaaagtgtccatattgacaattaaattgagggaagatacattctaattgtatgcagacctgatgtttgataactattagtgtatctgtttacgttgtatactaatgaacaatatttgttccatgtttgactcttatctcattacccccttacgtttggcaggacaaaagctgagccacctatttattacatgccaactaaaccaattattgatgatccagccattgttgagcagaacaaggaaaaggtattcgaagaatggaaatctat

SEQ ID NO: 264449 - DNA, 435 bp, Zea mays
aaactgactaactgctgcccactcgccggagaaccatggccacggcggcggcgtgtgtgcgggtggcgtctccgttcacgggcccacctatctggcatcccagacacgtcatctcaacgaggcggggacccaggagggccgggctggccgtcacggcggcggctgccgccggtggatcgccgcgcactgtgctcgtcaccggcgcgggcggccgaacaggccaaattgtgtacaagaagttgaaggagagggaaggacagtttgtgggacgtggcctagtcaggacgggagagagcaaaggcaaaattggaggcggtgacgacgtgtttgtcggcgacatcagagaccccgagagcattgctcctgcgatcgagggcattgacgcgctcatcattctcaccaacgcgggcccaaagatgaaaaccgggtttgatc

SEQ ID NO: 264450 - DNA, 1282 bp, Zea mays
ccttcgtggagacaccgccaggcgctatcttccggccgctgcccgcctgctcccccacgccgggaggcgaatgtgcaggtagcttgacgtctgatgaacgctcagccatgctgctgatgctacacgaaactcttcctttcgtgaggccgagttcttgccgggacccaaaactctccgagaagagtgcctctgctctccacggtaaattgggatgcagtgcggtctgcagttcagcggaaggccatcgtgtacagaagccacacatcgttcacagctacaaagttagcttcactaggaccagccatcatctgtgtaaaagcttaaacgagagaactacaaggcactgcctgcatcggttccatgttaatgcttcgcccgatgacgacgacttccgctcgtcgcgtaacatagcgatcagtttgttcaagcggtacaagaatgtcattgaccgaggaggtggagaaaacctaaatgagtttgtcagtgctggagtgaccgcttacgcactagggtgtacagatgaggggccgcccacgcgtccgatggatattgaagattctggtctggagattgaaggcttacggtccttggggggcaccagcctgaagttcaaagtccactcctttgagattcgtgagtgcattctgtggctcagtatagtgttcgtcacaatactgtgcacaccacaactaacggttatcaggtggtctccgaacccaccggtgtcagccgacgtcttgcatcagtggaaaggattctgtgctctaatcgcgaacgcttactatgtcaaaggaatggcatggttgccagtgaaaaccttgcagctggaacagatggctgtcacaggaagttcagagaaaccatcagtagttgctagccgcatgcagttagttttcagcacattagaggtagtcagcccacagtggccaagagtgtgattagatgaaagcaataccatcaaacaaaggtctgcagttttattctgaccaaaagatatgcatgtccaagttggcaagttcaaacctctgtcatggcgcaaacagatgatactatgtccatttgaactcaaatgtcaaataaaaatgctaatgtacttgttgtgaattatttgatttgatgtacatatactgcttctatcttgcatcaggagttctggcaagtgaacaagtatcccctactgctccaatagagataaaatggaaattgtgggtcactaattcgccccaacaaaaaaaaaaaaaaaaaaaaaaaaaaaaaaaaaaaaaaagggcggccctgcgac

SEQ ID NO: 264451 - DNA, 419 bp, Zea mays
cccactcccaccttcttggagacaccgccaggcgccatcttccggccgctgcccgcctgccccccccgggaggtcgaactgccttctagagccctctcctgttttcaggcgaatgtgcaggtagcttgacgtctgatgaacgctcagccatgctgctgatgctacacgaaactcttcctttcgtgaggccgacgagttcttgccgggacccaaaactctccgagaagagtgcctctgctttccacggtaaattgggatgcagtgcggtctgcagttcatcggaaggccatcgtgtacagaagccacacattgttcacagcttcaaagttagcttcactaggaccagccatcatctgtgtaaaagcttaaacgagagaactacaaggcactgcctgcatcggttccatgttaatgcttcg

SEQ ID NO: 264452 - DNA, 376 bp, Zea mays
  unsure (1)..(376): unsure at all n locations
cgccgcctcagcccttgcacgtcccagccacgctcgcccactgtgtgccgtcgtggtgagaaagaaagcaacgccgccgccctgtacctgtgcgctggcgggcagggaaattatcgcctgcacgttgagcggacctgggcaccgtcgttcagccggatcgtgcagactcagacggtctttatgcggtgggcgccatggtgcgctgtgcatgctcgatgcgtaatcgctcgctcgggtagcgactggagctcgggtgctcgacgtcatggttccccgccgccggggaccagcaggtattcagtcgccggggcccaatccggtgtcctaggagtggtgcctncactcgatggtgtatttcggagtctcgggtcgggcg

SEQ ID NO: 264453 - DNA, 352 bp, Zea mays
cccacgcgtccggatggtgtcacgttgcgtcgggctagccatttcccttcgctgtttcatccgtccaggatgggtcttggggctgccggcgccgccgacagctctccggcaagcgggggccggcgcctggccgccgagggctgcacgagcacgggggcgaccatgtccgtcgccgcgcacagcgcgccggcggtgtcgtcgggctgccgatgcagcagcagctgcggcggcggtgggcaccgtcactgctgctgcgtcaacgtctacgtgaacaacaacgtgcaaggtgtcaccaacttcgtgctggtcggcagcaaggtcgtcgtgaggatgaaggacgccgggacgcgcg

SEQ ID NO: 264454 - DNA, 1060 bp, Zea mays
tgctgcaataccagttattccaggtagaaaatcaagagtagaaacatttgcgggtgccaatcggacctacactatagaagctatgatgggtgacaagaaggccttacaagctggaactagtcacaaccttggccaaaacttttcacgagcttttggaacacagtttatggatgaaaatggtcaaatcgaacacgtctggcagacctcttgggctattagtactcggtttgttggtgggattatcatgacccatggcgatgatgccggtctaatgcttcctccaaggattgcacccattcaggtcataatagtaccaatatggaaaaagggtgatgagaaggctgtggtggtggaacctgtagattcagttcggaaaatcctccaagaagcaggaattagagttaaagtggacgactcagagctgcgaactcctggatggaaattcaatcactatgagatgaaaggggttcctgtaagaatagagataggtccacgtgatgtcacaaataagagtgttgtggtttctaggcgtgatgtccctggaaagcaaggaaaggagtttggagtgtctatggagccttcgatattggtgaaccatataaagggtcgtctagatgacatacaagcatcccttttacagaaggccataacattccgtgatagtaacattgtcgacgtaagctcatatggcgagctgaaggaagctatttctgaaggaaagtgggctagaggtccttggtcagctagcgatgctgatgagctgaaagtgaaagaagagaccagcgccaccatcagatgctacccattcgagcagcctgagggcaccaagaaatgcttcatgactggcaaccccgcagaggaagtcgcaattttcgcaaagtcatactaggcccactgtgtgtccactgtcagagataagaacagcatttccttttcaattttataggattgtaccctgtctacctaaggtccagattgatgacggttcatggaacagcattgtgtgctgctgatatttaaaatgtaaatttgataatcaataggtcaattttgttccact

SEQ ID NO: 264455 - DNA, 1345 bp, Zea mays
cctaatctgtcacctcccccaccgcacctccgtagcctcttcaatctcgccggccacctcacgtcctcacctcgcgtggcctcccgttctgacttcggagtccctcggtctcaacgactagttgagagctcgcggctccgttcgggcgaggggaggaggttcatgaggctgctgtaggctccgttgcagccgccgcgggcgggagtccgtgattttggacgccccaccgcggcaagatccggaagcgcgttggctgttgtgccgtgagtttcagtttcggtggtcgattgcttcagcctgctgagaagtaggaggggcggccatggcggggtcgaggttcgggtcgttcaagtcggagaagggcgactccgcctccgcagcggcggcagcgggtggagcggcgcagaggagggacccgtacgaggtgctcggggtgggccgcaccgccaccgaccaggagatcaagagtgcgttccgacgcatggcgctcaagtaccatccggacaagaatggcgatgaccctgttgcatcagacaggttccaggaagtcacattctcctataacatcctgtcagatcccgataagaggcggcagtacgatacatcaggatttgatgcaatcgaatctgatagtcaggaactggagctggacttgtcgagtctcaacactgtaaacacggtgtttgcagctctttttagtaagcttggtgtgccaattaaaacaactgtttcagctacagttttagaggaggcattgaatggttcggttatggtttctcaactccagctaggaaactcagtgcagagaaaggtggaaaagcaatcggcccatttctattctgtggatataactgaaaaacaagctaaaatggggctagtttgtcgtgttcactcaaacgataaaagcaaattcaagttgctatattttgagcttgaagaaaatggcgggcttagtcttgcactacaggaagacagtgtgaaggttgggaaagttactgctgcagggatgtatttccttggttttcctgtgtaccgttttgaacaaaataacctggcagctgctgcaaaagattctgatggtgcattctttaaaagattggatagctttcagccatgtgacatacatgaactgaaacctggaacacacttctttgctgtctacggtgacaacttcttcaagagcgctagttatactatagaggttgtatgtggtgaatcttttcctgccgaaaaggagatgctacgaaatgtggaggccaagatacttgccatgtaatgtctgtaccaaagccagtatttgcaaggatagaaaccgaggtggaagaggaagcccaagcaagttcaa

SEQ ID NO: 264456 - DNA, 820 bp, Zea mays
  unsure (1)..(820): unsure at all n locations
ggaattcccgggtcgaccgcacgcgtacgttttgctgtcatcagcatgtgaaactggtttagagattggtgatcttggaaacttgtacagcnatggtcaaacaccatggtcctgttttaagcaagggggtgagagtgctgaaaaggctgcaaaggatctcgtacttattttagagacaatgaggataattgcaatcacactatctcctatcactccaagcctttctctgaggatttacacacagcttggtttcacagaagaccagtttagggtgttgagatgggaggatacgaaatggggaggccttaaagcaggccaggtaatgtcggagccaaagccagtatttgcaaggatagaaaccgaggtggaagaggaagcccaagcaagttcaaaagcagcaaaaggtgggaagaaagcacgcaggaaaggacttgtggaggcatagtttctgttggaacagtgtatcagcatcgttaaaaggagaatatttcatcttctcttttttttggaaaaaaatctttagcctatctgttcctgaaatttgttctttgctaacgtgtcacattgtatcatgtagatagccacaaaaagaccactattgattctgatgctctgtcagagagagagctaggataattgcgagtagagctagcagcggatttggatcatccaaaatctaattggatatttgttgttttggataaggtggagagcaacttaaaaaaacccaatgtccattagatatctttggacttgacttgtttctaatgtttggagacatgctgatttttatgaactaataacacagtagctggttgtt

SEQ ID NO: 264457 - DNA, 1393 bp, Zea mays
  unsure (1)..(1393): unsure at all n locations
aaagccggcacccctgcccgtactcggaccggaatgtcccgtggctgtcccacgctgtacgctgctacagttntagaggaggcattgaatggttcggttatggtttctcaactccagctaggaaactcagtgcagagaaaggtggaaaagcaatcggcccatttctattctgtggatataactgaaaaacaagctaaaatggggctagtttgacgtgttcactcaaacgataaaagcaaattcaagttgctatatttagagcttgaagaaaatggcgggcttagtcttgcactacaggaagacagtgtgaaggttgggaaagttactgctgcagggatgtatttccttggttgtcctgtgtaccgttttgaacaaaataacctggcagctgctgcaaaagattctgatggtgcattctttaaaagattggatagctttcagccatgtgacatacatgaactgaaacctggaacacacttctttgctgtctacggtgacaacttcttcaagagcgctagttatactatagaggttgtatgtggtgaatcttttcctgccgaaaaggagatgctacgaaatgtggaggccaagatactcacaaaacgagctgaactttccaaatttgagtcagagtatagggaggttttggcgaagttcactgaaatgaccagcaaatacacacaagaaatgcaagcgattgatggccttctgaaggaaaggaatgagatccatgcttcctataccaacaatccacctctaaaacggagttccagcaggaataaagccaagtcgccttcgaaagtggccaaaactggtacagaaaaacatcatcagaaggaaaagaaggtgaaggatcactgcatggagggatgtggaagtgacagcgataactcaagtgaaaagaaatcaaaagagcggttcccaaggaagaaatggctgaaccttccattcaaacttgacaggagaaagacgtgctgagcaatgaagtccctctcggcccaacactagattgatatacagagaatttccactgtggcctcccgaaccaagccctctcccactgctaccaccttccttcgttgtacccggattatttcgtgtaaagatcacatgtgatcctaagaattaaaacgtgagtcgttttagcatatattgtgaagcacgtgctggcaagtttccgttcttggcattgggtcaaattgaggtgccctgcttccgattccctgctgcaccgtgcctatgtagcatgtaaagttgtatatgctgcgaatcgtagtacagctatatatttgtgtgtcctaaatcttgagtgtctttttactggcttctgtaaatgctccccaactgatgtaaatacaaaattccatgttcctcgcactaggatccgtgtgcc

SEQ ID NO: 264458 - DNA, 601 bp, Zea mays
caacgttctaactccttatggccctttttagatagatggtcttttgaaggaaaggaatgagatccatgcttcctataccaacaatccacctctaaaacggagttccagcaggaataaagccaagtcgccttcgaaagtggccaaaactggtacagaaaaacatcatcagaaggaaaagaaggtgaaggatcactgcatggagggatgtggaagtgacagcgataactcaagtgaaaagaaatcaaaagagcggttcccaaggaagaaatggctgaaccttccattcaaacttgacaggagaaagacgtgctgagcaatgtattatatgttccgttgctattctatcctgttatgcataatcctgagctgaactcacatttcttctctttctcatgcttttataggaagtccctctcggcccaacactagattgatatacagagaatttccactgtggcctcccgaaccaagccctctcccactgctaccaccttccttctttgtacccggattatttcgtgtaaagatcacatgtgatcctaagaattaaaacgtgagtcgttttagcgtaaaataaaaaaaaataattataaattaataa

SEQ ID NO: 264459 - DNA, 318 bp, Zea mays
gcggaggacttcgacaagcgcgggtccggccggcaggataccatcgccgacgtggtgctgtcgccggaggagatggagatgtacgtcgacctgcaccccttcaccaacacgtcgccgtacacggtggtcgagaccatgtcgctggccaaggcgctcgtgctcttccgggaggtcggcctgcgccacctcctcgtcgtgcccaaggcctgcgataggtcgccggtggtcggcatcttgacgaggcatgacttcatgccagagcacattctggagctgcaccctgtccttctgaggagcacgtggcacatgctccggtgg

SEQ ID NO: 264460 - DNA, 1087 bp, Zea mays
cgcgcgttcattgtctaagctgagatcgcaagaagctcagaagtcagatcagaagccgccgaggggaggcgccgacgccgagtttttgctccatcccgcatccaccgccagaatgtttctcacgaggacggagtacgaccgcggggtgaacaccttctcgccggaggggcggctgttccaggtcgagtacgccatcgaggccatcaagttgggatccactgcgatcgggttgaaaacaaaggatggtgttgtccttgctgttgagaaacgtgtgacctcgccactgctggaaccaagcagtgtggaaaaaatcatggaaattgatgagcacataggctgtgccatgagtgggcttattgctgatgctagaacactagtcgagcatgctcgtgttgaaactcagaatcataggttctcatacggggagccaatgaccgtagaatcttcaacacaagctatttgtgacttagctctgcgctttggcgaaggtgacgaagagtcaatgtcacggccatttggagtctctctcctaattgctggacatgatgagaatggacctagcctgtactacaccgacccatctggtactttttggcaatgcaacgcgaaggcaattggatctggctctgaaggagctgatagctccttgcaggagcagtacaacaaggagctgacccttgaggaggcggagaccatagccctttctatcctgaagcaggttatggaagagaaggtgaccccaaacaacgtcgatattgccaaggttgcccccaagtaccacctctacacccctgccgaggtggaagccgtcatcgcgaggctgtgaaacgcttccgagctcttgctatccacgtcatcaatcggtaatagacgacccttgtacgaagcgtgggcaccatggtccttgattatggcttgattatggcaaggacagtcgatgttagtttgattcacagctcagccgggctcacttgtctttttaaatttttatgaattagcgttgagaactttgtactgccaagaaagttcattttttttacccaaaaaaaaaaaaaaaaagggcggcggctcgcgatctagaactagt

SEQ ID NO: 264461 - DNA, 1037 bp, Zea mays
cccaaacagaagccatcaaaagcgaggctgcgagagcggagagagagagtgagggaggcgccgacgccgagtcctttcttcatcctgcatctgccgctgtttccgacaggatgtttctcacgaggacggagtacgaccgtggggtgaacaccttctctccggaggggcggctgttccaggtcgagtacgccatcgaggccatcaagttgggatccactgcgatcggtttgaagacaaaggatggtgttgtcctcgccgttgagaaacgtgtgacctcaccactgctggaaccaagcagtgtggaaaaaataatggaaattgatgagcacataggctgtgccatgagtggacttattgctgatgctagaacactagtggaacatgctcgtgttgaaactcagaatcataggttctcatacggagagccaatgactgtagaatcttcgacacaagctatctgtgacttagctctgcgttttggcgaaggtgacgaagagtcaatgtcacggccatttggagtctctctcctaattgctggacatgatgagaatggacctagcctttccttgcaggaacagtacaacaaggaattgaccctccaggaggcggagaccatagccctttctatcctgaagcaggttatggaggagaaggtgaccccaaacaacgtcgatattgccaaggttgctcccaagtaccacctctacacccctgccgaggtcgaaaccgtgatcgcgaggctgtgaaacgctttcggagctcgtgttattcatgtcatcaatcggtaataaacgatccttgtacgaagcgtggacatcttttgttcttgattatggctgtcatcgtactctgttgttaactccccaaggacagtcgatggtactttgattcacatctcagcccggttccgttgtcggattgcctagtgcctacacttgtttttttttaccgtttcggcttccgttatgtgggcaattaagctgatactcgtgtggattttccaatccttcgtgaagtggcagcggtggtgctggctt

SEQ ID NO: 264462 - DNA, 472 bp, Zea mays
caccgacccatctggtactttttggcaatgcaacgcgaaggcaattggatctggctctgaaggagctgatagctccttgcaggagcagtacaacaaggagctggcccttgaggaggcggagaccatagccctttctattctgaagcaggttatggaggagaaggtgaccccaaacaacgtcgatattgccaaggttgctcccaagtaccacctctacacccctgccgaggtcgaagccgtgatcgcgaggctgtgaaacgctttcggagctcgtgttattcatgtcatcaatcggtaatagacgatccttgtacgaagcgtggacatcttttgttcttgattatggctgtcatcgtactctgttgttaactccacaaggacagtcgatggtactatgattcacacctcagcccgattccgttgtctgattgcctagtgcctacacttgtttttttattttaccgtttcggct

SEQ ID NO: 264463 - DNA, 432 bp, Zea mays
acagaagccatcaaaagcggggcgacgggggcggagagagagagagagagagagagagagagagagagagagagtgagggaggcgccgacgccgagtcctttctccatcctgcatctgccgctgtttccgacaggatgtttctcacgaggacggagtacgaccgtggggtgaacaccttctctccggaggggcggctgttccaggtcgagtacgccatcgaggccatcaagttgggatccactgcgatcggtttgaagacaaaggatggtgttgtcctcgccgttgagaaacgtgtgacctcaccactgctggaaccaagcagtgtggaaaaaataatggaaattgatgagcacataggctgtgccatgagtggacttattgctgatgctagaacactagtggaacatgctcgtgttgaaactcagaatcat

SEQ ID NO: 264464 - DNA, 1865 bp, Zea mays
atctgctactggttttggaacttcagggactacagcatttggtgtgagtagtactactccgggttttggatcatcaagcacaccttcatttggcacatcagctagtgcgttcagttttggttcgtcaccatcttttggacaaacagcagtttcctctggtagcactccctttggaacaactccctcaccttttggtgcaccagctcctgcgtttggctcacagacagcagcaccaacttttggacaaccacaatttgctaatcaagctggaggaaccagaataaaaccttattctcaaacaccagatgttgacagtgctactagtggtactcagcctgctgcaaaacttgattccatatcagcaatgcctgagtacaaagagaagagtcatgaagaattgaggggggaagactaccagcgtggagacaaggggggaccgaacacttctggaactccaacattggcacctagctttccatcaccaatacaacataacacttttgcttcgacaagtaatccattctcaagcaatccattttcaacaaacaatccatttgctcctaagcctgctccaactattacttcaccattcaacacctcatttaacaatgcatcagttacaagttcgagcccattcacatcatcccctagtaccacaatgtttgggcaaacaggtgtttctacactttcagcaagtaattcgccatcattgtttggaaataccaatccagctcctgttacatcatcattatttgccacatcagtgacaaataatccaagtccattcggcactggctcattattcgctaacactcaatcagccccattatttccctcagcatttgctcaaccgacatcaagtacaccggctttctcctctggcagcctatttggctcaactaatccgggcagtctggttaccagcagcggtccttcacttttttcaacaccaacatttaccatctgcccctgctcagagttcgaacatgttctccttccaacccccaattcaaccagcagcttctaccggtggactcccttttttccccaacacaaatcaggccttgacgggacagccaacttctagcctgtccagtatggtcatgcagcctgctcttgtttcaaatccatttgggatgcttccagcaatgcctcagatgtccatcgggaatggtggatcttcaccttcagttcaatatggaatatcaagtttgccggttgcggagaagcctcttccaagtagatcattgtccatggcggttcctaggcatttgtcacagagaaggataaaactgctgccgagaaaatataatccaatatctgatggcaaggttccattctttgctgatgatgaagaatctccagcaacaccaaaggcagatgctttttttgtccctagagagaacccaaggaacctggtaattcgtccaattgagcagtggtcttcacggagagaaactggccggcaatatactgcaaagaatgttactgattcgaacaaatatgaagatgcttccattgaaagtgagcgtggtaagtctgccatgtcaccaagcagcaggccacctgcagtggaaaatgacaaacagcatgaggccagggccatggctcaacatgcgaatggaaatgctacttcagttgagaggctgttgcctaagcttccacgtgcagattacttcacagagcctagtatagaggagcttgcggccaaagaacgtgcggagccaggctactgcggtcgagtgagggacttcgttgtggggcgacatggctacggcagcatcaaatttctcggggagacggacgtgaggtgcctggatctggagtcaattgtggagtttaaccgaccggaggttattgtgtac

SEQ ID NO: 264465 - DNA, 1175 bp, Zea mays
  unsure (1)..(1175): unsure at all n locations
caatcctgctcctgctacatcatcaatatttgccacgtcagtgacgaataatccaagtccattcggcactggcacatcattggctaacactcaatcagccccactattttcctcagcatttgctcaaccgacatcaagtacaccggctntctcctctgggagcctatttggctcaactaatcctggcagtctgtttaccagcagcggtccttcacttttttcaacaccaacatttcaacaatctgcccctgctcagagttcgaacatgttctccttccaacccccaattcaaccagcagcttctaccgctggactccctttttttcccaacacaaatcaggccttgccgggacagccaacttctagcctgtccagtatggtcatgcagcctgctcttgtttcaaatccatttgggatgcttccagcaatgcctaagcttccacgtgcagattacttcacagagcctagtatagaggagcttgcggccaaagaacgtgcggagccaggctactgcggtcgagtgagggacttcgttgtgggtcgacatgactacggcagcatcaaatttttcggggagacggacgtgaggtgcctcgatctggagtcaattgtggagtttaacgaccgggaggttattgtgtacaaggacgatagcaagatgccccctgtgggcgaggggctgaacaaggctgcagaggtgactctactgaacatcaagtgcgtaaacaagaagacaggggagccgtgccagggggcaagggtggagaagtacagggagatgctggtgaagaaggcggaggagcagggcgcagagtttgtgtccttcgacgctgtcaagggagagtggaagttcagggtgaagcacttcagcgcctacgggctttggtgaaatcctggggagttaagtagtttgtttgttctgatggagcaacgctttacgctcttgtcaaataccatgcttggatctgttgtgctgcttctgtacaatgttgctgctgttaaaatgcttgcaaattgcactgctctgctgctgaaaacaggagcagcagtagaaactaccgcaacaggagggcgtgctacctgctactgttatgtattattataaactatattctaagtataataagccttagttttttcaatacaaaaaaaaaaaaaaaaaaaaaaaaaaaaga

SEQ ID NO: 264466 - DNA, 298 bp, Zea mays
ataattcagaaatgagtttttggcaatgattcctgttttggggtcttttaacatggtctatcctgctgcatttttacccagaactcctaccctgtccagtatggtcatgcagcctgctcctgtttcaaatccatttgggatgcttccagcaatgcctcacatgtccattggaaatggtggatcttcaccttcagttcaatatggaatatcaagtttgccggttgtggagaagcttcttccaagtagatcattgtccatggcgtttcctaggcatttggcacagagaaggataaaactg

SEQ ID NO: 264467 - DNA, 710 bp, Zea mays
gaagaaggggcctgtttttactgatcctaagttggaccggtatgagccccaatccttcttactcggatcagaatactttcttcatgcatatgggccaatttatgctttatcagctgacgtggtggctagcttggttgctttgaggaacaacagtttccgtatgtttagcaacgaggacgttacaattggatcgtggatgcttgctatgaacgtcaaccatgagaacacacatgcactttgtgaacctgactgcacggagtcttcaattgctgtttgggacatcccaaaatgctcaggtctatgccacccagaggtaaaaatgctagagctccatgaaagaaaagaatgcacaggtggtccaactgtggcagctgaggtgtccgagtctgaggattgatgattcttggttgggggacaaactacggatctgatagttgacctgtgtcctcacccaatagatgtgtttggagtattcatttgattcatcaggcgcaatcattgcgggagcactgctcaaggaacctatagttggctggcgtcgtaacctagcgctgtagcaaaggcattctcattcagcattcttgtcacagcagccttcattgcttctcttgcaattggaccgtggtcgacgtctggaacgttcattcctgtatcgtagcagaaattaaaggagtttgttgtatagaaattagaggaaagaatgcattggc

SEQ ID NO: 264468 - DNA, 1606 bp, Zea mays
gccagccgccagcacaaggcgatcgagagtggtgaccaccagtaaactgcaaagtgcaaacgaaacaccgtcccgaccacgactccacgagagagcggaggaggagggggagcaatggcagagccgggccagcagttgctgcggtcgttcgtggaggtggcagcgggctcgcacttccctatccagaacctgcccttcggggtcttccgccggcgggggtcgccaccgcaggctccgcgccccgcggtggccatcggggacttcgcgctcgacctcgccaccgtcgccgacgcgggtctcttcgacgggcccgcgctctccggctccccgtgcttccaccaggagacgctcaacatgttcttggggatgggccgaccggcgtggagggaggcgcgcgccacgctacaaaaaatcctctcagccgacgagccagtcttgcgtgacaacgaagccctgaggaataaatgtcttattccaatgagtgatatcgagatggttctaccaatcacggttggaggttacacagatttcttttgttctgtgcaccatgcaaggaactgcggattcatcttccgagggccgcagactccagttaatccaaattggttttatcttccaataggatacaatggacgagcatcatctatagttgtgtctggaaccgatgtcattaggcccaggggacaaggacatccaacaggaaactccgctccttattttggtccctcgcagaagcttgattttgagcttgagatggctgccattgttggtccagggaatgaattaggcaaacctattgatattaatgacgccgaagaacatatttttggcctaactttgatgaatgattggagtgccagagatatccaggcttgggagactatacctcttggacctttccttgggaaaagcttcagtaccaccgtatcaccatggattgttaccctagatgctttgaagcctttcatgtgtgatgctcctaagcaggaacccgagcctttaccgtacttagccgaaaagaatcacataaattatgacattcctcttgaagtctggattaagccgaaagatcaaaatgacgcatcaattgtcacaaaaactaatttcaagcatctgtattggacgctgacacagcagctagcacaccacactatcaatggatgcaacatgaggccgggggatatatttgcaactggcacactcagtggacctgaaccggactccctcggatgtctattggagctaacatggaacgggcagaaggagataccagtgggcaatttgacccgcaagtttctagaagatggagatgaggtcatcttgacaggatgctgcaagggtgaaggctacaacattggttttggaacttgcactgggaaggtcctgccggcacttccctgagccaacacgtctttacatcagttctcgagtccaaacactcaacaatctagcaagatgctatgtaactgaacaacgggggttgttttcgcataggaaactgatactctgttgtggaataaaatcggttcaccattttatacacattttctaaaaaaaaaaaaaaaaaaaaaaaaaaaagggcggccgcccgggaatacggacggta

SEQ ID NO: 264469 - DNA, 656 bp, Zea mays
aggattaagccgaaagatcaaaatgacgcatcaattgtcacaaaaactaatttcaagcatctgtattggacgctgacacagcagctagcacaccacaccatcaacggatgcaacatgaggccgggggatatatttgcgactggcacactgagtggacctgaacgggactccctcgggtgtctgctggagctgacatggaacgggcagaaggagataccggtggggaatttgacccgcaagttcctagaagatggagatgaagtcatcttgacaggatgttgcaagggtgaaggctacaacattggttttggaacctgcaccgggaaggttctgccggcacttccctgagccaacacgtcttggcatcagttctccggagtctcaacgatctcagctatcagagagttgtctcaacggtctcaactatcaaagagttcatgccgctatctagcaaggctgctatgtaactgaacaatatgaatatgggttgttttcctgggctgttgaagatgaggagactgatgctctgttgtgcaataaaaccgcttcaccattttatacgatgtctccctctatttaagagttgggttgtgttcttaaacttgtacattgcaatgtcctctgtggcatgaaatttagatcatgtatatattttg

SEQ ID NO: 264470 - DNA, 574 bp, Zea mays
cccacgcgtccgcccacgcgtccgtccacgcgtccgcccacgcgtccgcccacgcgtccgggggaacacaagctactacagatccagactctttttctcaggcgatgagcaagctccgtcagcggtatgatgaactgaaagagcgctatggggtttctgatattactgtttcagtacaaaatgtggcttctcagcgggggtacagtagcattgacttggtgacgcttgaggacatggtccttgaaatcgtgaggcaaatcgagaagctgatccgtgcaaaggagatgatggaagctgcagggaagccattctaaacaagatacacatacacaatagttctgctccggcatacctattttctggccagttaccagacctccgatgcttcgctgttcaagaaaccgattgcagttgcctacggctcaaagcacaagcgcgtgaaatctaaggaactgaatctggttgttccactcgaatatgcttatattgtattgcaagatcacttgccaattgatagtgcaaaaaatgcattttgtaagttggattctctagtattgactttaatccatatgta

SEQ ID NO: 264471 - DNA, 741 bp, Zea mays
cccacgcgtccggcggataacggggaggaggcggacgaccaacggcacaggcaccatggcgatgcgagcagctacagcggcggcgacaggcttcttctctccatccaccgtccctccgaggcgcttctcgtccgttacaccgccggcgtcactctgcaccgcgcgctgcatccagcgtcaccgtctccgcgccttcccaagcttggaaatacctctagaggaactcaacccatccgtcgatctacttaggagaactgcggaggccgttggcgatttcaggaaaacgccaatctatattgttggtacggattgcacagccaagcgcaacatcgccaagctgcttgcgaattccataatataccgctacctcagcagtgaggaactgcttgaggatgttcttggtggcaaggacgccctcagagccttcaaggaatctgatgagaagggttatcttgaagtcgagaccgaagggttaaagcagctcacgtccatgggtagccttgtactgtgctgtggagatggcgccgttatgaactcaaccaatctagggctgctgaggcatggtgtctccatttggattgatgttcctcttgaaatggcagcaaatgacatgttgaagagcacgggaacacaagctactacagatccagactctttttctcaggcgatgagcaagctccgtcagcggtatgatgaactgaaagagcgctatggggtttctgatattactgtttcagtaca

SEQ ID NO: 264472 - DNA, 582 bp, Zea mays
gaccaggacgacgaggacggcgctggtggtgctagtagccgcggcgacaagagacggggccagaaagacgacggcgtcggccagcagggccacggcggcggacgtggtgaggcagttctacgacggggtgaaccggcgggacctgccggcggtggagccgctcatcgcggagggctgcgtgtacgaggacctggtgttcccgcgccccttcgttgggcgggagcgtgtggtcggcttcttcggcgagttcatggggaccatcagccccgacctgcagttcgtcatcgacgacatctccgccgaggactccgccgccgtcggggtcacctggcacctggagtggagggggaggccgcttcccttcagcaggggatgcagcttctaccgcttgctcggctcttcggactcggagcagcagcagcggctgcagattgtgtatggtcgagactgcgtggagccggccgccaagcccggggatttggcactggtaatcatcaggggagtgacatggatcctcgaacgatttccgagccttgcaagcaggctctgatgaccccaaccgaggcaatagctacaggatac

SEQ ID NO: 264473 - DNA, 981 bp, Zea mays
tccacgcgtccgtctgataaagccctgttgattcatcattggtaatatatcagtgtactattacactttatagctttatgtaattttataagaaccgtgatgtccatcacattccattgtctggcaggtggcaagtgcaacagcaacattcgtgatgatgttctcctcctccctctctgtggtggagttctacttcctgcacagattccccctgccttttgctggctacctcatcttcatttccatattggctggattctggggccagtgtttggttaggaagatcgtgcatgtgctcaagagagcatcgcttattgtcttcatcctctcctctgttatcttcgtcagtgctcttacgatgggtgtcgttggaacccagaagagcatttcgatgatcaacaatcacgaatatatggggttcctcaacttctgcgagtaactcaaacaccatcagactgtcgatccgtccgggagaatccaggccaatgcctaattgacctcatctccctcaaaatctagaagaataaagtcgccgagtatgtgcacaagttagctcctcgccaacatgtgcgcatttagaccgacagagtcgctgtagtgaattcagctcgtgttagctcctggctaacgagctgaccatacggctttagttttgtgaagtgggcgcgatttcgtcatgtcatgcatgtgttagctcctggctaacctgcaaatgcgtgtgttggtgcaggtttttgtcacgtctgcgtcagctcctggctgaccagcagttgtttgtcgttcattctctgcgtcagctcctggctgaccagcagttatttgttgttcattcttgcgctagcaccaggctaggctgcaaaactgcaaatatttgttgcatggaacattgtaaatatcagtcaattcccattctgtttgtgcaaaccaagtgcgtttcaagcagtattcccgtgaaaatcagaaaaaaaaagaaaaaataaa

SEQ ID NO: 264474 - DNA, 1711 bp, Zea mays
ttgatctatatctttttttaaacacgcctccccctcctcgtctggctccccgtgaccgatctcgaaatctcatccgcacccgcctggccgccttgcctagccttgcctgctctcctcatgccctggccgccgcctataaaagagcgaggcggaggggcaggcgccggccgatcttctctctccttcttcctcggtcctctcctctccgcatttcgggcggccacttgtggcggcgtagctagcgtactacagctccctgcatggtgatggaggggcgcacgggctcactctacggccgcctcaacaagagcagcacgcgggggttcctcgcctacaccgccgccggggctgcctgcgcggctgtcctcgcctgcttcgtgctctccgccgcggactcgccggcatctgcggcgcgcaacgatggcgcgcgcctccgcctgtcctcgcgctcaccgcgcgtctggcccgacctcgcgttcaactggcgggtggtggtcgccaccgtcgtcgggttcctcggttccgcgtttggcaccgtcggcggcgtcggcggaggcgggatcttcgtgcccatgctcaacctcgtcgtcggcttcgacaccaaatccgccgccgcgctctccaaatgcatgatcatgggggcctcggcgtcatcggtttggtacaacctccaggtgtcgcacccgaccaaggaggcgcccgtcatcgactacaagctcgcgttgctcttccagcccatgcttatgctcggcataaccatcggcgtagagctcagcgtcatcttcccatactggctaatcactgtcctcattataatcctcttcgtaggcacctcgtcgagatccttctacaagggaattctgatgtggagggaggagaccaggattctgacggagacacgcgggcgagaagagcaatccaagtctacctgcgctgcaagtgatgtggtcattgatcccagttatggggagcccctcctgactcaacctcagcccaagaagtctgcatgggagactttcatgttcaatctgaggtggaagaatatccttgtgttaatatctgtatggtcattgttcttggtgctgcaagttctcaagaataattcaaaatcatgcagctctttctactgggtgataaacgttctgcaggttccagttgcggtaagtgtgttcttgtgggaggccatgcagttatgtagggagagtcatgcacgacgtatgaatgggaacctggaatgtgtgtgtgaggcctctattgagtggtcaccagcacaactgatcttttgtgccttttgtggccttctcggtgggactgttggtggccttcttggatctggtggtgggttcatccttggcccacttcttcttgagcttgggtgcataccgcaggtggcaagtgcaacagcaacattcgtgatgatgttctcctcctccctctctgtggtggagttttacttcctgcacagattccccctgccttttgctggctacctcatcttcatttccatattggctggattctggggccagtgtttggttaggaagatcgtgcatgtgctcaagagagcatcgcttattgtcttcatcctctcctctgttatcttcgtcagtgctcttacgatgggtgtcgttggaacccagaagagcatttcgatgatcaacaatcacgaatatatggggttcctcaacttctgcgagtaactcaaacacca

SEQ ID NO: 264475 - DNA, 487 bp, Zea mays
gcggcggctgcggcggcacgtggggcgcggcagggcgcggggcatcgtctccgacgcgctgtacgtggtgagcatcggcaccaacgacttcctggagaactacttcctgctggtgacggggcggttcgcggagctcacggtgggcgagtacgaggacttcctggtggcgcaggcggagcggttcctgggcgagatccaccggctgggcgcgcgccgggtcaccttcgccgggctcagccccatgggctgcctgccgctggagcgcacgctcaacgcgctccgcggcggctgcgtcgacgagtacaaccaggtggcccgcgactacaacgccaagctgctcgccatgctccgccgcctccaggcggcgcgcccggggctcagggtagcttacgtcgacgtgtaccagaacatgctcgacctcatcaccaacccttccacgctggggcgggagagcgtgagagagagagagagagagagagagagagat

SEQ ID NO: 264476 - DNA, 1512 bp, Zea mays
tttcccggcctcactcaccagcatcggctgttcagtcttcaccatggccgccgcccacctcctcgccgctttgtcctcctccaccgccttgcgccctcctctccgcctccgttctccacagcatccaccacatatccgcttcaactgtactgggaggcggccgttcccggtggtacgcgcggctgagaccgacgccaaaaacgcgaaggcgaacgccaaggccccgaataaggcacccgcggcggatggctccagtttcaaccagctgctcggtatcaagggtgctaagcaagagagcgacatgtggaagatccgtcttcaacttactaagccggtgacatggcctccgcttgtttggggagttctctgtggagcagctgcctctggaaatttccactggacagttgaagatgtcgcaaaatctattgtatgcatgataatgtctggtccatgccttacaggatacacacagacacttaatgactggtatgatcgagacattgatgcaattaatgagccttatcggcctattccatcaggtgctatatcagaaaacgaggtaataacccagatctgggtgctattgctaggagggcttggattgggtgctttgttagatgtgtgggcaggacatgattttcctattgtgttttatcttgctgtgggtggctccttactttcttacatatattcagcaccacctctcaagctcaagcagaatggatggattgggaacttcgctctgggtgcgagttacatcagcttgccctggtgggctggccaggcgttatttggaactcttacaccagatatcattgtcttgactactttgtacagcatagctgggctagggattgctattgtaaatgatttcaagagtattgaaggggataggactctggggcttcagtcacttcctgttgcttttgggatggaaactgcaaaatggatttgtgttggagcaattgatatcactcaattatctgttgcaggttacctattgagcaccggtaagctgtattatgccctggtgttgcttgggctaacaattcctcaggtgttctttcagttccagtacttcctgaaggaccctgtgaagtatgatgtcaaatatcaggcaagcgcacaaccattcttcgtactgggcctactggtgacagcactggcaaccagccattaatgaaggcaaacttaaacagaacgagcaaccgttctgataccgaagaggcacgtctggtgaccattaataagctagctgcttgtgtgcagggtaggaagagaacgtctttttacttgtagaacacagatcgattttgtaagggttatgtggtgggaggaaaagttagcaatagcactggatgttgttgtagtaggatctgtagttgcacggtaagatcgttacttcgccattgttagcggttgaactggcaatgctttgaacaaacagttttgtgtatcggccgtattgttgtatgatcaaccctggaagattgtacaacctccgttctgagt

SEQ ID NO: 264477 - DNA, 879 bp, Zea mays
cccacgcgtccgcaacaacctgacaagttagctacccgcgcagcgccgcgcgccatggccacgatgaaccaccgcattgtgcccctcctgctggtcgcagccacactgctcgcgcaggccgcggcctgcccctactgcccgacgccgaagccgccgccgcctccgccgccgtcgtcgtcgtccacgccgtgccctcccccgccctactcgccgtcgccgtccacgccgacgggtaagtgccccgtgaacacgctcaagctgctcgcgtgcgtggacgcgctcaacggcctcgtgcacgccgtcatcgggaccaaggccagcgacacctgctgcccgctgctctccggcgtggccgacctcgacgccgcgctctgcctctgcaccaccatcaaggccaaggcgctcagcgtcagcctcgtgctccccgtcgccatctcggtgctcgttaacgagtgcggcaagcatgtgccctccagcttccagtgcccgtaatcacatcagctgcatatatgtgctactatgatgtatcaccaccactaatctatatccgcatgcatgcatcaatgcatgggtgattaagggtttatacgcggtcaaagttatacacgcatatatatgtagcttcatacatggagctgtgggttgtgcattcattttcaaatcatgtaccagtattatattgtagtatcataaaccagtgtgagagttgtggccttggtgggggtgcttgtaagtcatcattaagtaaacccatgaataaaacgtgtgtaacataaaaataaaaaaaaaaaaaaaaaaaaaaaaaaaaaaaaagggcgtcagctcgcgatctagaacaccaggtcccggacgcgtggacggacctggaacgcgactggc

SEQ ID NO: 264478 - DNA, 836 bp, Zea mays
cggacgcgtgggcggacgcgtgggcggacgcgtgggcggacgcgtgggaccgcattgtgcccctcctgctggtcgcagccacactgctcgcgcaggccgcggcctgcccctactgcccgacgccgaagccgccgccgcctccgccgccgtcgtcgtcgtccacgccgtgccctcccccgccctactcgccgtcgccgtccacgccgacgggcaagtgccccgtggacacgctcaagctgctcgcgtgcgtggacgcgctcaacggcctcgcgcacgccgtcgtcgggaccaacgccagcgacacctgctgcccgctgctctccggcgtggccgacctcgacgccgcgctctgcctctgcaccaccatcaaggccaaggcgctcagcgtcagcctcgtgctccccgtcgccatctccgtgctcgtcaacgagtgcggcaagcacgtgccctccagcttccagtgcccgtaataactatattagggcgcgtacttactgatcgatcatcatctgcatatgtactgctactctactgtatatatatgatgtatcgtcactaaactatatacatcatatatgtacacgtacggtcaagttatatatacatccatatataacacaaacatatacataagcatgcatgtgcagcttcatatgcataagctctgccggcttgtgatatacatggagctgcgggggttgtgcatttttttgtaaccatgtaccagtattattgtatcataaaccagtgtgagagttgtggccttggtggggtcgatcgcttgtagtagtcattaaggaaacttatgaataaagtgcgtctgtaatatatatgat

SEQ ID NO: 264479 - DNA, 764 bp, Zea mays
ccactcgctttcacctttcaacgtctcaacctgagaagctagctagagctagctagctccgggcgcccgcagcatggccacgaacagccaccgcattattgcgcccggcctcctgctggtcgcggccacgacgctagtcgtcgtcgtcgtcgcgcagctcgcggcgccggctgccgcctgcccctactagcccgacgccgacgccgccccctccgccaccgcccccgcccccggtggtgaacccgccgccgtcgtccacgccgtgccctccgcctccctactcgccgtccacgccgacgggcaagtgccccgtggacacgctgaagctgctggcgtgcgtggacgcgctcaacggcctcgtgcacgccgtcgtcgggaccaacgccagctacacctgctgcccgctgctctccggcgtggccgacctcgacgccgcgctctgcctatgcaccaccatcaaggccaaggcgctcagcgtcagcctcgtgctccccgtcgccatctcggtgctcgttaacgagtgcggcaagcacgtgcccttcagcttccagtgcccgtaatctatagtacaacaattaagcccatactgatcatcggctgcatatatgtgctagctactatgaagtatcaccaccactaatctatatccgcatgcatgcatcagtgcatgggtgattaagggtttatacgctgtcaaagttatacacgcatacttatatcacacatatatatagcttatattaagcatatataaggtagcttta

SEQ ID NO: 264480 - DNA, 579 bp, Zea mays
ttccttgcgtccgctcgacggcaacaaggagatgcgggccattgggttctccaacgttgctgggtctctgtcctcgtgctatgtggcaacaggttcgttctcccgaacggcagtgaacttcagcgcgggggccaggtcgaccgtttcaaacatcgtcatgtccatcaccgtgttcgtcaccctggagctgttcatgaagctcctctactacacgcccatggcggtgctcgcctccatcatcctgtcggctcttccgggactgatcgacatcaaggaggcctgcagcatatggaagatcgacaagatggatttcctcacctgcctcggtgcgtttgttggcgtcctgtttgggtcggtggagattgggcttgcagttgcacttggcatttccttcgcaaagatcatcatacagtcgcttcggcctcaggtggagatccttggcaggctacaagggacagatatcttctgcagcgtcaggcagtaccctgtagcctgcctaactccgactgtactgcctatacgcgtcgacacatccttcctctgtgatcctttctttgacggaagtggcgttgatgaagc

SEQ ID NO: 264481 - DNA, 655 bp, Zea mays
gggctcaaggcgctgctctccgtcgctacctaccggaagctctggttccccgaccgccggcacagggactacctcgaggtgatgttcaccaaccgcaaggagagaggcgagctgctggaaggtttggtggtcagcaacaaagacgccaccgtgcccgtcctgccccagaaaatactcctgttgtggggagagaacgacaacatcttcaacatcgagctcgccaagacaatgatagagcagctcggcgagaagacgacgctgcagagcataagcaaggccggccacctggtgcacctggagaggccctgcgtctacaaccggctcctcaaggagttcctggcgtgcgtcacggctaccgaaaccaccaacaaggagtgacaagggcagctggaaggagttggccgcctacatttgccacgagttctgtctgtttcgaaataacgagagagaacggacgacacttccaccacccaatatgtctattgtattgttgttgtctgagaaagattttctgccacgtgcctaaagtgcaagaatcaacgtttagcccatataaatatgtactaatagttttaaaagcaggtattcaatgagctatatattattatttacaaacaaaaaaaaaaaaaaagggcggtcgctcgcgatctagaac

SEQ ID NO: 264482 - DNA, 342 bp, Zea mays
agcgcgcgccaccgctgctctcgtctgtcgggaacttgatttcccagaggagcagatccaactatcagatgcgtcggccgcgtggggtcaaggtcagtgggagggctgcccaaaatccgaaatttataccccagaaatggtcaatctgatggaaagcacccaacctgatttctctgcaccatccggggagtcactcagacaggtacagtttcggatgatggaattcctcaaccggacagtcctaagactaccagaaaaggtggcaatgggggacacactgtcacaacataatgagttgaaggggttctctcggcagagctccagcaattctgtccaagatgg

SEQ ID NO: 264483 - DNA, 343 bp, Zea mays
gccttccacccggccagctagcgcatccagagcaagcgatcgagcgagctctctcggcttgctggctagctccattatatataacatcgatcgcttgatagtttttggtagctaggaagaagagagcgagcgagcagctagctagcacgagggatggagaagatgaacgtggttgcgagcaggaagcagcagggcggcgactggatctgccggtcgtgccagtacgtgaacttctgcaagcgcgacgcgtgccagcgctgcggcgaggcgaagctgggcgtggagcggacggactacggcgcgctgggcggcgactgggacgtgaagccccgcgactggtact

SEQ ID NO: 264484 - DNA, 504 bp, Zea mays
  unsure (1)..(504): unsure at all n locations
ataatagtagataagaatgataaattctcttctctgtatatcattcaaagaggtcgtgtgagacttatattggctactgatcaaatgacttcagatacttgggatctcattagtgctgaaacaaagcaggcacaaagtagtcgggaaaatggtaattatgtgcttgatatagatgacggagggcacttcggagagtggtctctcattggtgagactattgctttcactgctattgctgttggtgatgttacttgttctactatcacaaaggagaaatttgactcaattgttgggccttttcctaaactttcgcaagctgattccaagattaaagaatctctggtaactctggagaatgttgcagatggtgatttcccttttaggagggtgaagctctcagatttggaatggaaaatgtgcatatatgctgctgattgcagtgaaattggtcttgtccaagtcaggggctatgagcagatgagaacnttaaaaggttttacatca

SEQ ID NO: 264485 - DNA, 1148 bp, Zea mays
aacgtaaagcacaccaggtattcgtactcgactatggccttgcgaagaagtatcgagatctccaaactcataagccaataccatacagggaacacaacaatctcacaggaacagcacgatatgccagtgtaaatacccatcttggagttgagcaaagcagaagagatgatctggaatctcttggttatgtgctcatgtatttcttaagaggaagtctcccttggcaaggcctgaaagctggcacaaagaagcagaagtatgataggatcagtgaaaagaaaatgctgacgccagttgaggtcctctgtaaatcatatccatcagagtttactgcatactttcattactgtagatcactacgattcgaagataaaccagattactcctatttgaagagactcttccgtgacttatttatccgcgaggggtaccaactagattatgtatttgactggaccattatgaaatatcctcagtttagagataaaagcaaaattcagtctagcggcaagattagtgggttggcaggcccttctgcagaaaggactgatagaactgcagctgaagctttgtttagaaggactggatctggttctggtcacaatcgagagcacaccaagcacagaagtcttctggagtcactgatgccatccaaggctgttgattcggataaagcaaggccacaatcatcgtcgcgcaacgggagcacatcaagaagagctgtcatttcatcaagcaaaccaagctcttctggggatctaagcgacccgaaccgcttggggggccgcctggcccctagtagcagcagccgcccaccgactgcccaaagggagatcagatcctcggctttgtcaaaaatcggaaggtcttcacatgacgacgctatcaggaacctcgagctgctctcacttggtgctgacaagagaaaataagggaaccgacgaaatgggctagggtctggactctggatgatgacgatgcagggctgagcaggcagctccattatctgtatgttgaaaatattcttttcggaataaaagagattatataacttatgggattgtgtcccggagctgtgctgctccaatccaataacccgcaagagttacgtagcaaagctacattagaagaagaagaaacaagaaaga

SEQ ID NO: 264486 - DNA, 1425 bp, Zea mays
cacaaacccacgccccccaccccctattattctatatatataatacacacacaagtgtagtagtgtggagtacttcaattacgcctccggggcgttggccgaagaagaggagaagcgaagcaagcaggcttcgagaacaagactgcagggggagggggaggaccaagcgaaaggggaactagagcaagatgggcggcgcactgctgcttgcgctcctcctcgtctctgctgctgccgcccctcaggtacttggagttggcaatggagacaatcacatgagaatcatccaggaggacatcatcgagacagtcaacaaccatcccagtgctgggtggacagcctcacgtaatccttacttttcaaactataccattgcgcaatttaagcacatacttggagtgaaaccagcaccacagaatgcactaagcaatgttcctgtcaaaacttattcaagatcactggaacttccaaaagagtttgacgctagatctgcatggtcccgttgcagcacaattgggaacatacttgatcaaggtcactgtggctcttgttgggcttttggtgctgtggagtgcctccaggaccgtttttgcattcacctcaacatgagcattttactttcagtcaatgacctactggcatgctgcggttttatgtgcggcgatgggtgtgatggaggctatcctatagaggcatggcgctactttgttcaaaatggtgttgttacggatgagtgtgatccatacttcgacccggtcggttgcaagcatcctggatgcgaacctgcttatcctacaccaaagtgtgaaaagaaatgcaaggagcagaaccaagtttggcaggaaaagaagcatttcagcattgatgcgtacagaataaattcagatccacatgacataatggcagaggtctacaaaaatggtcctgtagaagttgctttcacagtttacgaggatttcgcacactacaaatctggagtgtacaagcacatcaccggtggcattatgggtggccatgccgtcaagttgattggatggggaaccagtgatgctggagaagattactggcttctggcaaatcagtggaatagaggctggggcgatgatggatacttcaagatcataaggggcaaaaatgaatgtggcatcgaggagggcgttgttgctggaatgccatccacaaagaatatggttccaaacttcggcggtgccgttggaagagctatagtttaatggttacgtttgcatggcctcaaatgctgttggaattagctaaagtaattttaaaatgcaattgttaaagggccacgatggtgtatgtattttgtacactagctcatttcaaaggtcgttatgttgctggtgccacatcactttggtcaagtggaataatattaataagaactagaatttcgattcgaatgtt

SEQ ID NO: 264487 - DNA, 760 bp, Zea mays
tctcgcttccgcggacgcgtgggcgggcctggggctggttctgatccgatcctcccttcctgctcggcgcccgcccgccccattcgattccatctcgtgttcctctgtgctgctgcagaccgcagggggagggggaggaccaagcgaaaggggaactagagcaagatgggcggcgcactgctgcttgcgctcctcctcgtctctgctgctgccgcccctcaggtacttggagttggcaatggagacaatcacatgagaatcatccaggaggacatcatcgagacagtcaacaaccatcccagtgctgggtggacagcctcacgtaatccttacttttcaaactataccattgcgcaatttaagcacatacttggagtgaaaccagcaccacagaatgcactaagcaatgttcctgtcaaaacttattcaagatcactggaacttccaaaagagtttgacgctagatctgcatggtcccgttgcagcacaattgggaacatacttgatcaagtaagttcaacagtctagcatatattattagtgcctaaaagagcgatgcaacatgcttgtagtataatgtcttgtctgatgacaacagggtcactgtggctcttggtgggcttttggtgctgtggagtgcctccaggaccgtttttgcattcacctcaacatgagcattttactttcagtcaatgacctactggcatgtgcgggtttatgtgcggcgatgggtgtattggaggctatcctatagaggcat

SEQ ID NO: 264488 - DNA, 315 bp, Zea mays
aaaatctgtcaaggatttcgcacactacaaatctggagtgtacaagcacatcaccggtggcattatgggtggccatgccgtcaagttgattggatggggaaccagtgatgctggagaagattactgggtatgttgttctatctccatattttgttctgtacattgtcaaacggtgaggccctaagttgttttgtatgatcttttcgtctttgcagcttctggcaaatcagtggaatagaggctggggcgatgatggatacttcaagatcataaggggcaaaaatgaatgtggcatcaggagggcgttgttgctgg

SEQ ID NO: 264489 - DNA, 795 bp, Zea mays
gtaccggtcctgatcactctctctccccatccgcgccagtccaaccaagtcagcacccgcgcgcggcaaggagttcacgcccatggcgagcaccaacatggcgtcggccacctcgcggttcatgctggccgcgggcgtgcccactgccagtagcggcagcggccgtgtcagcttcgcctcggcgcccaaccggcttggcaggaggcttgtggtccgggccgatgaggagtccccggcagagccggcgcccacggcggaaggggagggcgccgtggccaccaagcccaaggccgagaagccgccgccgatcgggcccaagaggggcgccaaggtgaagatcctgaggcgggagtcctactggtacaacgggatcggcaacgtcgtcaccgtcgatcaggatcccaacacccgctacccggtggttgtgcggttcaacaaggtgaactacgccggcgtgtccaccaacaactacgccttggacgaggtctcagaggtgaaatgagtggggccggccggctcaagggctccgcgctagctaccgtgtgattgatttgtagtagttgtgaaatgaggctgtgaagctgcatgctgtgctggctagcgtcacaacatcgatcctatgtgtaatagcataatccacataatcatatcatgtaattgcttgctttattcaccgtgtactcaataatctctcttgctctctaaaattgttgtattgttatatgtggttttgtacatgcacataaatcggtctctgccaaaaaaaaaaaaaaaagggcgctgctcgcgatctag

SEQ ID NO: 264490 - DNA, 844 bp, Zea mays
gtgagcacccgctgcaaggagtccgcgcgcatggcgagcaccaacatggcgtcggccacctcgcggttcatgctggccgcgggcgtgcccaccggcagcagcggcggccgcgtcaacttcgcctcggcgcccaaccggcttggcaggaggctcgtggcccgggccgacaacgaggccgccgcagctgatgcggcggaaggtgagggtgccgtggccaccaagcccaaggccgagaagccgccgccgatcgggcccaagaggggcgccaaggtgaagatcctgaggcgggagtcctactggtacaacgggatcggcaacgtcgtcaccgtcgatcaggatcctaacacccgttacccggtggtggtgcggttcaacaaggtgaactacgccggcgtgtctaccaacaactacgccttggacgagatcctcgaggtgaaatgagtgaggccagtctgctcaaggaccccatgctcctgtgtgatttgtagttgtgaagtgaggctgctgcctagctgctacgttagctgctagcgtcacaacatcaatcttgtaatagcttaatctccacaatcatcatgtaatttattgcatgcttcattcaccgtggactcaataatctctcttgctctaaaatcgatgtattcgtttttcttgtgattttgtacatgcacataaatttctctctggaaacattgtttgtgcttacaacacatagtgtaaagaaaaatctaaaaaaatcaacaacatattctaaacataaaaaatgaactataaaaaaaaattttaaaatgaaagaccaaaaatattaaacaaaaaattatggggggccgttttatagaaacca

SEQ ID NO: 264491 - DNA, 837 bp, Zea mays
tcgcgggtcgacgcaagcgtccacgcacggagagaagagaagctagcgttcaacagaggaagaagcgagagagctgacaagaatcgactgccatcaatggctctggcgccggcgcctctccagtgcttcctcacgagcagcagaccggccgtatgcacggcgacgccgcccaataagcgcgcgaggaggccgtcgaggatctcgtgcagggcgtccggcgatgacaaggacaaggtcccgtcgtcgggagggagcgatcttggggtcaagcagctcgggaagctggccatggtcgcgctggccgccggcgtgctggtgctcggccccgtcgacggtgccgtggcggccaagtccggcggcagggtcggcgggcaggcgttccggtccgcgccccggtcgtccggccctcggatcaacaactccaggaccaacatctacatcaacccgccggtggcgccgccgctgggcggatacgggtacgggagcccgttcttcggcggctacggctacggctggtcgccgttcagcttcttcgcccccgggccgagcgtcgccgtcggggtcggcggcggcttcgacacgctcgtcctcttcttggtgctgggcgccgtcgtcggagctgtcaggcggttcctcaacaggaacaacgacgattacgacgactactgattatcagtgccaggctcctgctacgtacttcaccttcgtgtgtaatatatatatgacgaaatttttcccgtgcggaattctaggaacggagtgtactgacgatgcatcaggagatgtatgtaataattttgtccacagtgaaatgtaatgagcatagcgtctatagtt

SEQ ID NO: 264492 - DNA, 1404 bp, Zea mays
  unsure (1)..(1404): unsure at all n locations
gtaagttgatggaagctgctaaatccaatgaagatgcactaaggaagacttctaacgaactagaactttaagcttcagttctagttcattagaaacaacaaatgctggaagaaatatctggcctgaaactgcaggtccagaaaataatgaatcttcaagatgaggttttcaaacttcagagttctcttgatgaggccaagttcggaaaagggaaactggaggagattctacgctcggtgaccgaggaatgtgaagaactaaaagcacagaaggctatgctaacagataaagtttctgatatgcaggagactttgagaaatggtgaagaagaaaaacgaaacagaatagctatgcaggcaaagctcgtgaggctggagagtgatctgtcagcatcagaagcatcacatgtacatgaagcagaattaaagaacgaactcagcaggatcaagagatcaaacagtgagtaccagaggaagatacaatctcttgagcaggaaaatgaggatctcactagaagagttcaaactatggaaaagggatttgagcaaatgtcccacgttaaagagaaccttggaaagcaggagattggaggagataaccaggcagccattcagtcaaaaattgagttactggaaacgaagctcgcagaggcattggaggaaaacaagatgtacagagctcaacagaagagtccgatgcctgaggggcaacctgctgggggagacggcaaggagggcaatactgataggattttgcaattggaaggagagctaagagatatgaaggaacggttactgaacatgagcttgcagtatgcagaggtggaggctcagagggagcggttagtgatggagctcaaagccatgaagaaaggcaggtggttttagcaatgatggagaactgttgcctgacataaaacagacacaggctgactgacagcacagatgggcatgtcatgtgagagcaagcaaagcaaagcaaatgcaagtgatgcagagcctggacctgctaactggtgctggaagatgtgtatcccaagacgacactgaaggtccctgtgaccacccagcgcccctacatgacatgatgatcccattgttattggtatttatttttaacggcgtgccttttcatcttgtatataatatacgccggtttgtgaggagcttgactggtcagttgttgatatgattactcagatcgatgactccgatctctctattttacacccttaattgtcgataaatgtagttactctattcttttttcttctttgagacagcagtggagtggctgggttagtgggtagcagtcattatgttgcactcatacaatattgttttagtttgggtgtagaataatgtgacgaagggagacccatttgttcatgtaaaaaagaaanaa

SEQ ID NO: 264493 - DNA, 637 bp, Zea mays
attgataaataggatttttgttaatgatgggagaaaataaattgatgggcaaaagatgggaggacatggacactgatgtccttgtgaagatattcaaggaactaaatttggttgagttgtcaccggtatctcaagtttgtcgtttgtggcgcttggcctgttcagatccacttatttggggcactcttgactttggattgttaaaatccaattttattcagacaagagcatcaccatatatttgggttgatgataggtctgacaggagacttgcaagaatactacgggtggctatggcaattagctgtgggaacgtcaactgcatgatatttcattacaatttgttcatgaaagatgagcaccttcatttcatctcagaaagatctcctcatttaaaacggttggttatgccagcatggaaccgcatcaccaaagtgggaatatgtaatgctatccaaaggtggcaggcgctggagtccttgacaatgcctaccatcggacatcctccatatattatggaagagatagcaaggagctgcaagaatttcacagaacttaagatcatgggctcatttgatcaacaatttgcctcggcaattttgcagttccttccaaagctgaaagtgctgagccctcg

SEQ ID NO: 264494 - DNA, 739 bp, Zea mays
cccacgcgtccgcccacgcgtccgcccacgcgtccgcccgtgtcgtgtagtgtgtagtcgcagcagctagcgcccggccggccagtcgagtgagtccatcctccatcgccatccaatggccgccaccgccctgagcatgagcatcctccgcgcgccgccgccctgcttctcgtccccactcaggctcagggtcgcggttgccaagccgctggcggcccccatgcggcgccagctgctgcgcgcgcaggccacctacaacgtgaagctgatcacgccggagggggaggtggagctgcaggtgcccgacgacgtctacatcctggacttcgccgaggaggaaggcatcgacctgcccttctcctgccgtgcggggtcctgctcctcctgcgccggcaaggtcgtctctggctccgtcgaccagtccgaccagagcttcctcaacgacaaccaggtcgccgacggttgggtgctcacctgcgctgcgtaccccacctccgacgtcgtcatcgagacgcacaaggaggatgacctcctataattctagctagctatacaccgccagggcccgtcgtcttgtgccaccacatgcagtaccgcccgcgcaggagatgagacgtgtcgtctcaataattctagctatatatatatatatgcatgcatgcatgtacttttccctgttccaaactgagtatattctaaattacaagatttaatcacaaggtttagagcaaaaaataaa

SEQ ID NO: 264495 - DNA, 851 bp, Zea mays
agcctatccatcccttgcattggtattgtcatctggggcagggcaggggagggcaggagaagctatctattggccatcactccagcagccgctctccccagccccactctctccatctagagctccctaactgcaccggccgccacaccaccgtaccccgacccctcgacaacaatggccaccgtcctaggcagcccccgcgcgccggccttcttcttctcgccgtcctccctccgtgccgcgccggcgcccaccgccgtggcgctgcctgcggccaaggtgggcatcatgggccgtagcgccagcagcaggggcaggctgcgcgcgcaggccacctacaacgtgaagctgatcacgccggagggggaggtggagctgcaggtgcccgacgacgtgtacatcctggaccaggccgaggaggacggcatcgacctgccctactcctgccgcgcggggtcctgctcctcctgcgccggcaaggtcgtctccggctccgtggaccagtccgaccagagctacctcgacgacggccagatcgccgccggctgggtgctcacctgccacgcctaccccacctctgacgtcgtcatcgagacgcacaaggaggaggagctcaccggcgcataatcattcatgcccatccatctctatctctgtgggtcgtcgttgtgtgtaatttgagtacgcgcgtacacgtactgcttttgtttcatttgagcactgttcgtgtaagcgtcgagttgccctgccatcgtctctctctctctcgatctctactatttctgtgtgtgcgcgcttctatttttccaatgttaagttacgcatacttccccagtaaccttgttttgctt

SEQ ID NO: 264496 - DNA, 789 bp, Zea mays
cggacgcgtgggcggacgcgtgggctagcagccgctcactccagccattacccgcagctagcaaacaaatggccaccgtcctgagcagcccccgcgcgccggccttctccttctccctccgcgccgcgccagcgcccactaccgtggccatgacccgtggcggtggcgccagcagcaggctgcgcgcgcaggccacctacaacgtgaagctcatcacgccggagggggaggtggagctgcaggtgcccgacgacgtctacatcctggactacgccgaggaggaaggcatcgacctgccctactcctgccgcgcggggtcctgctcctcctgcgccggcaaggtcgtctccggctccctcgaccagtccgaccagagcttcctcgacgacagccaggtcgccgacggctgggtgctcacctgcgttgcgtaccccacctccgacgtcgtcatcgagacgcacaaggaggaggagctcaccggcgcataatcatgcccatccatctctctctctatatatctctgtgtgtcgttgtgtgtaatttgagtacgcgcgtacgtactgcttgggtttcatttgagcgcagttcatgtaagcgtggagttttcagacaccgccctgccatcgtctctctctctctctgtgcgcgcttctatttccaatgttgagttacgcatatttgtccagtaaccttgttttgcttaatcacacacagctcccaaaaaaaaaaaaaaaaaaagggcggccgctcgtaatatgactctctttagaggcttgcgtcgacccgcga

SEQ ID NO: 264497 - DNA, 439 bp, Zea mays
aacctcggaagcagcaacggagcctgatcttatgcggaggaaattttgtacataatacacggacctgcaatggacagaaacaaaagggctatttactaacgtctgctgcctgacagaattgaactagatcgcttggtacttgtacatggcccgatggccgccctttgcgattatctttctcactattctcagtctactatacagatgagtgccatggcatggtagcctcaataacaacagatatagtttacttgggataaactgaagagatagtcatgaacagcgtcctggaaaatcaccagataccgcccaatctgaatctatagagctaagggaattctgtctgtgttatgctcctctaagtgctgagccttctgatctgatgtatgtatctcaatgctccgtgcgttgtcttttccttctttattcagaacattta

SEQ ID NO: 264498 - DNA, 680 bp, Zea mays
ttgctgcggcagccggagatgggggagcgggcgaaggaatggctcctcgcagcaggcgccggcgccgccgtcggcgcgctctctgccgccgctgtcatcgatcttctctcgagatccaagcggagagagaggtacgcgcgggacctgctggagtccaatggaatgacgactgggaacactcggtccagcaagcacctgggctctcttggtagctcggctcttctctctgatgaagtggtctctgaacagcttacaaggaatatacaattttttggcatggactctcagaagaaagtgactgaatcctatgctgtggttattggtcttggaggggttggcagtcatgcagcatcaatgctcctgagatctggtgttggcaggttgcttcttgtggattttgatcaggtatcactctcatcactaaatcggcatgctgtggcaaccagagatgacgttggaacttcaaaagcgttgtgcctcaagaagcatttttcaatgatatacccagagtgccaaatagatgcaaaagtgcaattgtatgatgcatcgtctgaggaggaaattctttctggacagcctgactttgttcttgattgcatagataacattgataccaaggtgtcactccttgcagcttgcgtgcgcaaaagtttgaaagtactttctgcaatgggggcttg

SEQ ID NO: 264499 - DNA, 711 bp, Zea mays
atttgcttcagcggcgaccatgacatgtgtgtaccttacaccgggactgaagcatggagtgcgtctttaggctacgccgtcgttgatccgtggcgacagtggattgtcgacgaacaagttgccgggtatgtatctggattctgaacacaagcatatatgcattgaccctttatttcctcctaagatctttgaaccgtttagtcgatcctagatcgatgttgagtaattgctagctcttggacgatatgaattcactactataatcaacaaaaactttggcattatttatatatttcacgaaatattcagctcgatgatttgttatcatgttccatttgttccagtcaaatgtttgtatttttgctcccaggtacacccaaggatatgaaaagggccttacttttgccactattaagggtgctgggcacacagttcctgagtacaaaccacaggaagcactagctttctacagccgttggcttgccggtgctaaactgtgaggaggcctattttgtgtgcaaaggtcatgcagtactgaatcaaacagaagttggataaagcatgcagcaataaggcagtcgaaggatcaaagtatccaacgcgccaactacaatgttgcattcattttcacatgttataccaatgcagttgctaattacctgcattgttcatgagttcacagtccatctaattggttgaccacaccgtcta

SEQ ID NO: 264500 - DNA, 882 bp, Zea mays
tccgcccacgcgtccggctcacttctgagtcccgacgcacgagctcccaagagctagccatggcgtccaccaccctctcctccgccttcaccctcctatcccgcccctccacctccccgtgccccgccgcctcgctcccgaggtcctcccacgccgcgccccacatccgccggggccgccgcgccgtcgccgtcgcgtgcaccgccaccgagtcccccaagatcctggagctcggggacgccatcgccgggctcacgctcgaggaggcccgcagcctcgtcgaccacctccaggagcggctcggcgtcacagctgcggccttcgcgccggccgccgtcgtcgcggcgcccggggcgggcggcggggccgcggccgaggaggaggcccccgtcgagaagacggagttcgacgtgatgatcgaagaggtgcccagcagcgcgcgtatcgccactatcaaggtggtgcgcgcgctcaccagcctcgcgctcaaggaggccaaggaccttatcgagggtctccccaagaaggtcaaggaggccgtcagcaaggacgaggccgaggacgccaagaagcagctcgaggaggtcggcgccaaggtgtctatcgcgtgacactaggtatacgaggactccttttttttttctttagtttcttttgtttgcatccccaatctcttgtatccccactatcgttcgtaaggaattgctgtttcatgatatgagatctgtgtatgtgtcgattcactagcttatatgtgtgtgatatatctctgccttgaattggcagtgaatgtgatctgctcgaaagtggtaatgtgtgtatttgccttcttggcactatcattccattcatgatggtggacaaatgcccattttgctttct

SEQ ID NO: 264501 - DNA, 573 bp, Zea mays
gaagaaggtgcctcctacccgtgccaaatcgccaaagtttacaagttcaaggagggggagctgcagtgatacaccattgacacctggcgtggaaaataccaacgcaacatctacccggccacatcgtcacagcatcgggagtcctagagacgctaacagagtacaacaatgctcgccaaagagcggtgtggcaaccaaaacaagatctgtcaaggctgagctgaaggccctctgaagagcatggagcagccgagtgatgtgtttctctgtacaaaccgaattgtctaaccgtttccatttccatgcatttttgcttctattttatacccaacatctccagcaaaagaaggctgtagggccaatgacgttgttcagcgccgctggaccttatccattttcttacattcgccttgtactcgtaagaactcttggtggcaccatgtgacattccatgtaaattacttgaggatccttgtagggagttcgtccggtgttttgctcctgttaagcccttggccttaactaatctgtgagctgaacagcccatcggaatggcactgctccgtttgatgc

SEQ ID NO: 264502 - DNA, 566 bp, Zea mays
tcttcgcgtccgtgcagacctagcaggctagcaaccattctagctccgaattcggagcaggcgagggcgaactgaccgaggcgaggacgatcactgtccatgtccatggaggcggcggttggggcggagttcggacctcagctgcatcccgctctcgggttcaggcacagccagcgccgtgtctttctttgctgttggcgcctgcatccgccccggccggcctcgcttggcctctgcggcggcgggggagcccgtccccgcggcgctatccccgtcgcggatggcgaccagcggcggcggctgcgagagctcgaggcggaggcggaggcggaagctggatcgatcttgggtcctccgaggagcagcccccgcgaggtgagggaggagatggcccggtgcttcgacctcgtccgccgcctcggtaggggcgccgtctacctcggctcctccagggtcccccccacgcacccgcactttctccaaaccaccgagctcgccagagaggcaatcagtactactatagcgatgtactagcattgacatggtgctagtttcagcagcagatt

SEQ ID NO: 264503 - DNA, 563 bp, Zea mays
tctttcctgcatccgccccggccggcctcgcttggcctctgcggtggcgggggagcccgtccccgcggcgctatccccgtcgcggatggcgaccagcggcggcggctgcgagagctcgaggcggaggcggaggcggaggcggaagctggatcgatcttgggtcctccgaggagcagcccccgcgaggtgagggaggagatggcccggtgcttcgacctcgtccgccgcctcggtaggggcgccgtctacctcggctcctccagggtcccgcccacgcacccgcacttcctccaaaccaccgagctcgccagagagatagctcggctgctcgactgcaccacatggacgggagccggccctgggctcatggatgctgccatccaaggcgcctttgaggcagacaagcctgtcggtggcttgaggattgcaaaggaagcgggtgaatggacaagctcaggcttccatccttacttgccaccggagacctacctcacatgcaggttcttctctgcgaggaagcatggcctggtggatgctgcggtgcggagcaactctactgacag

SEQ ID NO: 264504 - DNA, 561 bp, Zea mays
ctttatgcaaggttgcattttcctgtcagcaaggttgttagaggcaaaaagcctggagcagcaagagcagaagaataatagtacattgaagaaatataggggtgctaaccagacgaggatggatagcccgaaatgagatgctgacccaataggtcgccaaatcacctccaaattctaacccaatgacttccatctgtaatgaatggcaataccttgaaaacctgtgatggagatgttttgtggcgacatgatctcttaaattagattccgtctttggtaacagcctagctgttcttgttgagtcgcatattctttattctgaagatcaatatagcaaatgggagaaaaaacatagtgcacagtcgagctgttctaattgtacctcttgtgagtggaatcagttgttgtacaacaggaagatggacctatctgtacaatggtcgtacatgttctttgatcatagtataaacaatgtaagcctcatcagccgttatttgattgtttcaaaacaaaggaaaagcattttcaaaaaaaaaaaaaaaaaaaaaaaaaaaaaaagaa

SEQ ID NO: 264505 - DNA, 2570 bp, Zea mays
gtttgaaccatattggtaaatcattccacacaggccctgataaagtgaatctttccagtgttacacagtctgaggctagtctttaccctattgatcctttagaacaaggcgacttttcaccactaattaaacaaaacttccaaccattacatagttcagacgaagtgccatttttcaaggagcactcttcatgtaatgatttttcgaggaacaaaactgaagctcattttctggaaccacttgtctgttcaaatcctcaagaggtgtacacaacctcaacagatcaaatgggtgctgaacaatctcaatcaggatgtggccaaaagtacaatgatgccagagttcagacagcatcacatgaaaggcatcagtcttcaaccttgtgtgataaccagaactcttgttcggtggtgttgcaaggagttgcttcagactcaacacagaagttcgttgatactcaaaaggggccgtcaaaagctcgacaaaatggatcaaaagctaaggtacggggccgacctaaaaagaaaactgatgactgggacagtttacggaaaaaagtgctttctaatggtggggacaaacaaagaagtcatgatgcaagggatactgttgattgggaggcagttaggcaagcagaagtacgggaaatatctgaaaccatcagagagagaggaatgaataatatgctagcagaacgaataaaggaattcctgaaccgattggtgacagaccatggaggtattgatcttgaatggctaagagatgttccaccggacaaagcaaaggacttccttctaagcattagagggcttggactcaaaagtgttgagtgcgttcgtctcttgacgctacatcatatggcttttccagtggacacaaatgttggtcggatatgtgtgaggcttggatgggtgccgcttcaaccattgccagagtctcttcagttgcacctattggaaatgtatcccatgctggagcacatacagaagtacctttggcctcgactatgcaagctagatcaacgtacattgtatgagcttcactaccaaatgattacttttggaaaggttttctgcacaaaaagtaagcctaattgcaattcatgtccaatgagagctgaatgtaagcactttgctagtgcatttgcaagtgctaggcttgctcttcctgcacctgaagaaaaatgtttggctacattggaagatccaaatgttgtagagttttctcaccaaacatacataaactcagggagtgttggccaacttgagtggagtgcaaattatcctaaacatgctgtttctggtaatcatcagccaatcatcgaggaaccactgagcccagaatgtgaaactgaaaatatagaggcacatgagggtgcaattgaggatttcttttgtgaagaatctgatgaaattcctaccattaatcttaatatcgaggagttcacacaaaacttgaaggactatatgcaagcaaacaatgttgagattgagtatgctgacatgtcaaaggcattggttgccatcacgcctgatgctgcttccattccaactccaaagctcaagaatgtcaatcgtctgaggacagaacaccaagtttatgaactgccagattcacaccctcttctggaaggattcgaacagagagaaccagatgatccctgtccatatcttctttccatatggaccccaggtgaaactgcacaatcgatcgatgcccccaagacattctgtgattcaggggagacgggtagactatgtggaagttcaacatgctttagttgcaacaatatacgagaaatgcaggctcagaaagtcagaggaacacttttgataccatgccgaacagcaatgagaggaagcttcccacttaatgggacgtattttcaagttaatgaggtatttgctgaccattgctcaagtcaaaatccaattgatgtcccacgaagttggatttgggacctcccaagacgaactgtttactttggaacctcagttcctacaatattcagaggtttaacgactgaagagatacaacgatgcttttggagaggatttgtttgcgtgaggggctttgataggacagtgagggcaccaaggcccctttatgcaaggttgcattttcctgccagcaaggttgttagaggcaaaaagcctggagcggcaagcgtcgaagaataataggtacatcgaagaaatatagaggagctaacaaaacggatggatagccctaaatgagatgctgacccaataagtcgccgaatcacctccaagttctaacccaatttttgaggcgacatgacctgttaaattatgttccatctatggtaacagcttagatgttcttgtgagtcgcatattctttactctgaaattcaatatagcaaatgaaaaaaaacccagtgcatagtctagttctaattgtacctgtgagtggaatcagttgttgtacaacatgaagatgggcctatttgtacaatggtcatacatgttctttgatcatatactataaacaatgtaacctcatcggccgttatttgattgtttcaaaacaaaggaaaagccttttcc

SEQ ID NO: 264506 - DNA, 911 bp, Zea mays
tctatttttcaaataaagttgcttctacccaaaaggcatctgctggtcctatccataaacgttcatcaagaaccgcaagctctggttatgctaatcgcaggaatccaccacaaaatcctctcgcacagtctgtccccagtttctcggacttgagaaaagaaaatacaaagccttcacctggagtcagtagagcgagtgcaagagttcagcaaaagtcttttgcccgtagcaagagtattattgaagagtctaacagcatattgaaagaagatcaatcgaggaggtcacaatctatgaggaagcaccaaattcctgatgagcttaaggacatttcctcagggaatgatgatatttacaattgggctccctcaagaatttccaagaatcaatcagagggaccttttgcttacagtacccgtagatcgggtccaccaaagccttttcttaggaaaggcaatgggactcaccctgttattggtatagctggatttcaggctgcagcggccatgatggcgaatgccctccagcatggtgacagtggtgattttgaagatcaccaagaggattcccctgatgatgccaaagaagaggaagaatatgaaagcatggaagaaaatcttagagaaagtgactttcctgctgattctgacagtgagaacccaagagtgagtcatgaatttggaaattcagatgacccagggtcagaaaacggtgatgctgattttccaagcaaagcacctgccattggcggtactaagttcactgcttttacaggaaatgttcacaatccagctggtgatgttccagcaccctggagttctcgtcttccacagctgttcccttacacgaatgataattcagatggtgacgcctttgctgattcaccatcgggaagtccatcaccatggaat

SEQ ID NO: 264507 - DNA, 458 bp, Zea mays
caaaaaaccactcatcaggcgagacgcgagaagatcaatgcgaggatggtgcggctcaaggagctggtccccggctgcagtaaggtatcgggaacagcgttggtgctagatgagatcatcaatcatgttcagtctctccaaaggcaagttgagtacttgtcaatgaggctcgcagctgtaaacccaagggtcgattttggtgggctagacagctttctgaccacagagtgtggaaggatagcaggcttcaactgcaagaacggaatcgacttggagcaggtaacctggccagaaatgggtgttcatggagcaaggcagctgatgcaacttcaacagcagttctggcatggccatttaacacatccacaccaagtggcttcacagtgggaaaagcttggcgatggccattctcccgtctttagcaactgcagtccctctatcttccgctatgatctaac

SEQ ID NO: 264508 - DNA, 818 bp, Zea mays
cttaccttgccttgccttcccctccatcccacctccacctcgccgcccgaatcccccccaacccaacaatcccccatggggtcgcaggccatcgaggcgcaccgcgcgggcgcggaggtgtaccgcggcgcggcgctgtgcgcggagaagtcgacggagctgctggcagaggcgcacctcccgctgggcctgctgccgctggccgacatggaggaggtcggctacaaccgcgccacgggcttcgtgtggctgcgccagaggaagtcgctcacgcacacgttccgcccgatcgcgcgccaggtctcgtacgccgccgaggtcaccgccttcgtggaggaccggcggatgaggcgcatgaccggggtcaagaccaaggagctcctcatctgggtcaccctctccgacatgttcgtcgacagggacgacccctccaagatcaccttcaagacgcccaccgggctcggcaggacctaccccgtctccgccttcgccaaggaaggcgccggtgacgacggcgcggcggccaagcacaaggatgatgcccccgccccgaccgccgccggtaaggctgctgccagcaagtgaggtgcgcggcgtccggagctttttaccttgccgtagtcgccatacttgcctccccaataatggcgtttgtaccccctctacctgcttcaaattagtgtgttttatgaatggaaaattggaaacgaccatccaactttccatccgtccttgcaatgtgtcacggcggggtgtttttactacacatcagctttaccagtttcaagattgtattttcccctaatcttgagctaaaa

SEQ ID NO: 264509 - DNA, 1024 bp, Zea mays
caaagagtgtgtgctgtgtgttatccatttcttctcctctctgctctgttcacttcgttctagtggggagcgccgccgctgcagttgccgccgccaccagagcagtccacctcggtctgatatggcgaccgggagtgcaagtgccatcgcgtccttctccgtggcggcggcagcggctgctgctctgcgcgtcaggcggccatgcgctcgcgcttgcgcttgggccccctcgcagcgaccgcagcaaggggcactcgtcagcctcaagccttgcgcctcactggcaccacaagctcctctgtggcgcgcggagtcggatgccgcggggggtggtgccggcgccggcgatgtcatgggcctcctcctccgggagcgcatagtcttcctcggcaacgagatcgaggacttcctcgcggacgccgtcgtcagccagctcctcctccttgacgccatcgacccggactctgacatccgcctcttcgtcaactcaccagggggatcccttagcgcaacaatggccatctatgatgtaatgcagcttgtgagggcagacgtgtccactattggaatgggcatagctggatcaacagcttctataatccttggtggtggcacgaagggcaagcgatttgccatgcccaacaccaggattatgatccatcagcctgtcggaggtgcaagcgggcaggccctagatgtagaggtccaagcgaaggagatattgaccaacaagaggaatgtcattcggatcgtatcaggcttcacaggccgcactcctgagcaggtagagaaagacattgacagagatcgttacatgggccctctcgaggctgtcgattatggactcattgatggcgtgatcgatggagacagtattatcccacttgagcctgtcccgagtggctgcagccttagttcaactacccagagctgatcatgggagttgagacaatctgtctgtcatcatctgccttgccgattatttttctgtagaatctgctctacctaccgagttgtggacaga

SEQ ID NO: 264510 - DNA, 627 bp, Zea mays
ttccaacaccaggattatgatccatcagccgggcggaggtgcaagcgggcaggcccctagatgtagaggtccaagcgaaggagatattgaccaacaagaggaatgtcattcggatcgtatcaggcttcacaggccgcactcctgagcaggtagagaaagacattgacagagatcgttacatgggccctctcgaggctgtcgattatggactcattgatggcgtgatcgatggagacagtattatcccacttgagcctgtcccggagagggtgaagcctaagtacaactacgaagagctgtacaaggatccacagaagtttcttacaccagatgtcccagatgatgagatatactagtcgaaaagttgtattttgtgcgaatgttaagtctgttcttcagcaagcagatgtttttcgtcgcttgtagctgtcaaaccaaccatagcactagtagcttattgatcttgtttactgactggatggtgattcgagcaggcaactagaacctgttggttgtgtttctggtgttacattgtggtgttagaatggtccggctgtttcgttttgagtcctgaccatttcaggtgtggtacgttgagatcagttaactgttcgtttttttttttta

SEQ ID NO: 264511 - DNA, 655 bp, Zea mays
cggacggcaacgccttttatggccgccgttgcctcctccttctcgcggttctccttccgctgcgccgtctgcccctccccgctccgcgtccgcttttcgcagccccatccgcccgcgcggctccgcgtctcctccaccgtcgttgctctccacaagcgcaaccccaagcggctcaagtacgccgccgagcgccagttcacgagaggggatgccgggttgctgcgggtggaggtggagccctccggcggggacttctggaagcttgaccccattatcgacctcatcaatcgcggcgccgtcggggtgatccctactgacaccgtctactccgtcgtctgtgacctgagtaacaatgaatcgattgagcgccttcgcagactgaaaggcattggagactccaagcctctcagcatcctgtgtcgctcattacgtgacatcgatacctacacaacaggatttcctcaaggcactaaccaagggcaagctaacatttttcgtgttgtcaagcgtgcaatacctgggccttacacatttattttacctgcaagcaagcagtttcctaaacaatgtataaagcatggttcttccacaaggtatgcaaaaaggaggcaggttggcgtccgaattccagatgatcccatctgccaggcaatat

SEQ ID NO: 264512 - DNA, 545 bp, Zea mays
gttcaatgatgttgtaggagtcactggattcatcctgacaaagctcgatggcactgcgcgcggtggctgtgtggttagcgttgtggatgagcttggcatcccggtgaagttcattggggttggtgaagggatggaagacctgcaaccttttgacgccgaggcatttgttgaagccatcttcccatgattttgggttttggagagataattcatgcttctactgtaaagctttggactctgccgttgctttggctcgttgtgcgagtttttttcttgttgggaactacgatagtggtaggaagcacatggcccgtgtcaagatgaactggaactggagttgaggcaaacaaagtggagcgtccagctttggagccctaagggatggtttggtaatcagagaattagatagggtctatagcggagaaatctccttgttgaggactagtttggtgactagagaaatgcaggggatgagaaatagaggggattcttcatctatgggtcctctacatttccctggtcaataaattagccctgaatggatt

SEQ ID NO: 264513 - DNA, 1177 bp, Zea mays
  unsure (1)..(1177): unsure at all n locations
ntccgcgtgctnaatcgtcccaagtcgncgtcgncgtctcttgccgtggggctgctctcggggcttgcgcagaggacgggaccgacgcctggaaccaccggatcggcggcatctctctcagtctcgtcgccgatttccctcggtttcaaccccacctccttcctcccgttcctgcagacagcgaggtggctcccgtgcagcgaccttgccacctcgtcgtcttcggcaccctcttcccctccccgctcgctggcgccttcggctccccccaagaaggcgttgattggtgcttctactggttctaccggaattgcgacgagcagtggtgctggtgcagcgatgagcaggagcaactggctgtcgaggtgggtcagctcctgctccgatgacgccaagacggcgtttgcggctgtgaccgtgccacttctctacgggtcgtccctggccgagccgaagtccatcccgtccaagtccatgtacccgaccttcgatgtcggtgatcggatacttgctgagaaggtctcatacatattccgggatccagaaatttcggacatcgtgatcttccgggctcccccaggacttcaggtttatggctacagctcaggtgatgtgttcatctagagagttgtggccaagggaggagactatgtcgaagtgcgtgatggcaagctgtttgttaatggagtagttcaggatgaggattttgtgctggagccacacaactacgagatggaaccagtgcttgtgccggaaggttatgtgttcgtgttgggagacaaccgcaacaacagctttgattcccacaactggggtccacttccagtgaggaacattgtcgggagatctatcctccggtattggccaccatcgaagatcaatgatacaatttatgagcctgatgtgtcccgcctcacggtgccgtcctcgtagtagtcgctgcagtgatgctggatatccagtgtgtgtacaatgaccttatacttcgtggagcctcatttgatgagttgagctccagttccaattctctcagaatattgtctcctgagtgttccctgtaaattctctttgcctgactgatttgttttcgctgccggttggcagatgcttgttcaaagcacgggaaagtgcagtaccttgcatcttgcaatacaaactaattaaaccggttaccctt

SEQ ID NO: 264514 - DNA, 1153 bp, Zea mays
atggtcatcaccgaccgtttccacttgggtactaccaaggatttccggttccgcagtgcagtggcccttcatatgggaccgaatacatctctccacagggtacattaaactcatattccggtcagcaatatcttcctatttatggagtctcagctgcagcaaacacatccaaccaagcatttagccagctgagtccatccgtttctggtggtggcaatggttatttgtcggttcatagttacaacgtgcctggaaatcaatatgtgcagctcactggatcaaacttcagcagtgcgtcaccaacagctcaaccttcctgtcagactccttttttagtagcgacacccgttcctgcacatccacacctaataattccagccccctcaccccagtttacacaagctagtggttcagaccaaagagcaagctgaactgtgcatccaagcatttgtaccttgaggtacccttagattgcagcaggactaaaaagagcagtgttgctgtatccacagcttttgttcttgcctggcaagagatcatccttgcattcataaggttgtcgttatcatggtcaacagatgtacctggaaatcgtgaagttgtccctatggatggggcaagtgatccaagagcaagggttgctcttgcctttccactcggtttaaatcgtatacgtgtgatggagccagatgcagccttaatgatcctgtatctgacaagctcgtggaaatgtagcctatgctggaacggagtccagcatatgtaagatggattgatccaacgggggattagccatcatggccttcaggtgattgttcatctgaaaattcatgttgtgtgcggtcctagtcccagtcactgcgcacagggtctggtgaccaaaagtgtatccagttctgtacaagcctgcagtcatcgtgttgtctgcgtgactgcatccatcagcctttggacctaatatgcagtcatcattgtgttgtttacactactggttgtagccagtgatggtcattggtttgccccagtctcccaatttaaggtgtgatttatgtgtgtattgctctgtgtttggtggttccaagcatagagcggttctcttgtacttcaaaatacagccatttaatgggaatcccatgacgctggtgccagtgat

SEQ ID NO: 264515 - DNA, 794 bp, Zea mays
cctggattcctttaaagtcgaccaaccggtcagccgcccggtgctccctctctgcagatctcccttcgcagccgccgaggaaccccttcacagcgcggaagatggctgaacaggaggccccagtcgcggttgaggcaccaaccccagttcttggggagcctatggacttgatgactgctctgcagctcgtgatgaagaagtcaagtgctcatgatggacttgtgaagggtcttcgtgaggctgccaaggccattgagaagcatgctgctcagctttgcgtgcttgctgaggactgtgaccagccagattatgtcaagctggtgaaggcactctgcgctgagcacaatgttcacctggtcactgttcctgccgctaagactcttggcgagtgggctgggctttgcaagattgactctgagggcaaggcaaggaaggttgtaggctgctcctgtgtcgttgtcaaggactacggtgaagaatctgagggccttaacatagtgcaggagtatgtcaagtcgcactagatgtgtgacatgtttcagtgatactcttgatttggacctgggcttaaaattatgcttttgcatctggggcttgcctaggagattagaacattttactagaagagccgaagaggatatgtatgaacaatttggacatctgaattttttttgtttatggtgctgtcgtctggttttaatgcaaatcatgaagagccgagtttattcttaatttgtgtttaagaaaaaaaaaaaaaaaaaaaaaaaaaaaaaaaaaaaaaaaagggcggccgc

SEQ ID NO: 264516 - DNA, 765 bp, Zea mays
ctcggcgctccctcttctcggtgcgcgtcaacaccctcgaggtacctccattcgcagtcggccgtgtcctcggagccgcgggagatggcggatcaggagaccgtagctgtggttgaggcacctaccccggttcttggggaaccgatggacctgatgactgccctgcagctcgtcatgaagaagtcaggtgctcacgatggccttgtgaagggtcttcgtgaggctgccaaagccatcgagaagcatgccgctcagctctgcgtgcttgccgaggactgcgaccagcctgattatgtcaagctggtgaaggctctctgcgctgagcacaatgtccacctggttactgtgcctagcgccaaaactcttggagagtgggctgggctttgcaagatcgactctgagggcaaggcgaggaaggttgtgggttgctcctgtgttgtcgtcaaggactatggcgaagaatctgagggccttaacatagttcaggagtacgtcaagtcacactagatacagtgcatcggtatctggaacttgtgctctacactagctttaagacctgaatttaaatttgtgctggttcttgggctttgctaggagattagaacagttttcaagtgagcctaggatccatgtgaacgatttgaatatctcgcctcttgtcttgcaagtgttctcatctgctgttaatacaaaatcagcaagagctagtattttgttcacatgaaatgattggaagcattgttggggtctacaacggcaagacat

SEQ ID NO: 264517 - DNA, 730 bp, Zea mays
acgcacgggtccatactgacgtctacctagcagctcggcgctccctcttctgactccttcgaggtactcccatcgctatcgaccgggtcctcgagcgcgggagatggcggatcaggagaccccagttgcagttgaggcccctaccccggtccttggggagccgatggacttgatgactgctctgcagcttgtcatgaagaagtcgggtgctcatgatggccttgttaagggtcttcgtgaggctgccaaagcaattgagaagcatgctgctcagctttgcgtgcttgcggaggactgtgaccagcctgattatgtcaagctggtgaaggctctttgctctgagcacaacgttcacctggttactgtgcctagcgctaaaactcttggcgaatggtctgggctttgcaagattgattctgagggcaaggcgaggaaggttgtgggttgctcctgtgttgtcgtcaaggactatggcgaagaatctgagggccttaacatagttcaggagtacgtcaagtcacactagatacagtgcatcggtatctggaacttgtgctctacactagctttaagacctgaatttaaatttgtgctggttcttgggcttttctaggagattatctcaattcttgttttaagtgatgtcatctggtgttaatacaaaatattaagcggtggtattctgcttcaaaacaaaatattactaatagcagcccctattaaactgggc

SEQ ID NO: 264518 - DNA, 621 bp, Zea mays
gcccggtgctccctctctgcaggttgcggctcgctcccctcgcctcccgccgagggaccggttcacagcgcgggagatggctgaacaggaggccccagtcgtggttgaggcaccaaccccagttcttggggagcctatggacttgatgactgctctgcagctcgtgatgaagaagtcaagtgctcatgacggacttgtgaagggtctccgtgaggctgccaaggccatcgagaagcacgccgctcagctttgcgtgcttgctgaggactgtgaccagccagattacgtcaagctggtgaaggcgctctgcgctgagcacaatgttcacctggtcactgttcctgccgcgaagactcttggcgagtgggccgggctttgcaagattgactcctaggtcaaggcaaggaaggttgtatgctgcttctgtgttcgtttcaatgtctactgttaattattttatggtcttaacattgtgcttgagtttttttattctttattttattttatattttttatttttatcttttatttttgtattaggtctaaatatttttttttattttttttatttttctttattttttttttcttattttttttttattatttcctttttttttt

SEQ ID NO: 264519 - DNA, 409 bp, Zea mays
gcgcgctcctcttcttctccctgctactagtccccccccgtctcaattcgccactgacgtccattccgcttgcttgattgctccaggtacatccattcgcagtcggccgtgtcctcggagccgcgggagatggcggatcaggagaccgtagctgtggttgaggcacctaccccggttcttggggaaccgatggacctgatgactgccctgcagctcgtcatgaagaagtcaggtgctcatgatggccttgtgaagggtcttcgtgaggctgccaaagccatcgagaagcatgccgctcagctctgcgtgcttgccgaggactgcgaccagcctgattatgtcaagctggtgaaggctctctgcgctgagcacaatgtccacctggttactgtgcctagcgccaaaactc

SEQ ID NO: 264520 - DNA, 780 bp, Zea mays
tcgacccactttttctttcacccggttctccctctctccagatctggcgcttctttatccggccaggggccccttcacatctcgttaaattgctgatcatgaagccccagttgcagttgaggcaccaaccccagttctttgtgagccaatggacttgatgactgctctgcagctggtgatgaagaagtcaagtgctcatgatggacttgtgaagggtcttctctaggcttccatagccattgagaagcatgctgctcatctttgcgttcttgctgaggactgttaccagccagattatgtcaagctgttgaatgccctctttgctgaacacaatgttcaaccggtcactgttcctgccgcttagacccttggcgaagtgggctgggctttgcatgattgactccgtgggcatggcaaggtaacgttgtacgctgctcctgacgtcgtcgtcaaggactaccgtgaagaatctgagggccttaacatagagcaggagtatgtcaagtcgcactacatgtgtgacatgtatcagtgatactcttgatttgtacctgggcttaaaattatgcttttgcatctggggcttgcctaggagattataacattctactagaggacccgaagaggatatgtatgaacaatttggacatctgaagtctgcctgtctatggtgctgtcgtctggtactaatgcatatcatgaagagccgagtctattcttgatctgagtttaccttactactcatgtgtctatacccatatgccattggcttatggaaat

SEQ ID NO: 264521 - DNA, 272 bp, Zea mays
cagccacccggttctccctcgctccaggtggcggcgcgctcccctcgttttgttcttactcctcccgtttccctcactagtcgttactgacttctcgcttgcctgctccagatctcccttcgcagccggccagggaccccttcacagcgcgggagatggctgatcaggaggccccagttgcagttgaggcaccaaccccagttcttggagagccaatggacctgatgactgcgctgcagctggtgatgaagaagtcaagtgctcatgatgga

SEQ ID NO: 264522 - DNA, 759 bp, Zea mays
cccacgcgtccttccacgcgtccgggacacatcacccaaaggcacagggaatcgcaccatcgtgggacccgtacagcgcaccgcccagccgccggatctgcgccggcgacgcgcccggacgtcggatctacgccgccgcaggaggggggaggcggcgctgtggccgttctctgcccgtgagcgcccggatccgtcccgccgcaaggattatggatccgaaagagaagccaaatgtatcgagcagtccaccaacaccacggctggactgcataaaatgctttgatatgctctggttctgttactcaccattccaccagatgcagaattattaccggtatggggagttcgacacctgcttcggcaagtggggcgatcttatgggctgcctcgctctcaagacaaagcggaaggcagaggtggaggagatcctcatcgcgcgggagaaggccaaaccacatatctggacctaccggacggtcgatgaggcatcggagaattggtggcggatgtacaagcatgctgtgatgatgtcccccctgccaggttctgctcagcttcctcccaggtccgatgaatcttgatagtcgaggggatttgtgcaagtgttttgtttgcgcttatgtcccattatggcattagcgatcatttctgttcaaaatcttactgtaaactccaataccaagagatggaaccattgaggtaggcagaacatgtactgctgaagattgagaatttgaaatcgccttggtttcacccccc

SEQ ID NO: 264523 - DNA, 658 bp, Zea mays
acccaacgctcccgggacgcgtgggcggctccccaacgaagtgcgagcgacccacgtccacacgacacgaaccaccaccaccaaccagcagccgcaccacgcacccagcgcaaagcgatggcgtcgctcaccatgatggcgtccttcgccgccgtggcggtggccgcgccctcgcgccgcggcaccttcgccgtggtcaggtccgccaaggtcgaccgctgccaggagcccgccacgctagcagcaaccgaggccaggcccgccgccgacggacgccgcgccgtcatgctcgcggctgctgcggcggccgtggcagccatcggcggcgccggcgccgccatggcgggccccaagaacgggacccccgaggcgaagaagaagtacgcggccatctgcgtcaccatgcccaccgccaaggtctgccacaactgagcacgcccgcgttgcatagctgcagggccggggggtggtatataattaatgtacgtgccacggtgttgttgtccctattgttggttcgagctttagatgcatgcctgacgtgaggccgcttaattgctttctgacggcctcggagctgtaagaatatcaagtgcactgcaaaactgaattcgggttgcccccgttaaaaaaaaaaaaaaaaaaaaaattataaaaa

SEQ ID NO: 264524 - DNA, 416 bp, Zea mays
  unsure (1)..(416): unsure at all n locations
accgnctcggaaacccggggcggcccacgcgtccggcgacccacgtccacacgacacgaaccacctccaccaaccagcagccgcaccacgcacccagcgcatagcgatggcgtcgctcaccatgatggcgtccttcgccgccgtggcggtggccgcgccctcgcgccgcggcgccggcgccgtggtcaggtccgccaaggtcgtccgctgccagcagcccgccacgctagcagcaaccgaggccaggcccgccgccgacggacgccgcgccgtcatgctcgcggctgctgcggcggtccgtggcagccatcggcggcgccggcgccgccatggcgggtttttttttttggaccccccatgcgatgaacaagtacgcggacatctgcgtcaccatgcccaccgccaacgtctgccac

SEQ ID NO: 264525 - DNA, 1418 bp, Zea mays
tcgccctttcgttcgcggacgcgtggggacgactccccggcttcctcatcatcatcgccgcctccaccaccgcaaactgccgcagcaggggcatcggaggcagctgaggctgatgggctgagagagaggaagcacaagggcaagaagagggaggaggaggaggcgactcctgctgccagggagtacaccgcggagcagctcgaggttgtgcgccaggtcaagaagcacaccagggactactaccagatcctcggcctggaaaaggactgcagtgtcgaggacgtgcgcaaggcctaccggaagctctcgctcaaggtgcaccccgacaagaacaaggcccctggcgcagaggacgccttcaaggccgtctccaaggccttccagtgcctgagtgatgcggagagccgcaagcgctacgaccttgttggctcggatgagccagtagcacaccacaggagggcctccactgcccgcgcatacaatgggttctatgaggatgactttgacccagatgagatattcagaaacttcttctttggcggtatggcgcctgcaaccaccaggcagtttggacagtttggaactttccattttaggactggtgggatgcatgcccatgcccatgcccaacaaaactctggtggctcaactgtcaggatgcttattcagctgttgcctgtcctactgctgctgttgctcaacttcctgccatcctctgagcctgtctactcgctgtcccgttcatacccttatgagcataagttccaaaccccacgtggagttgcatactatgtcaagatgtctaatttcgaggagcagtatccacaccaaagcactgagcgagcgacgctggagcggcatgttgagagggattattactccataatcacacagaattgcagggctgagctgcagcgtcgccaatgggggctgtcataccagacaccacattgtgatatgcttaaaaattttgaggctgcagcaaagtaataactcatccaattctgtaaggttgacatggggagagagactgctggccactcatgtaaaggcgctgccttagccgccagcttcaagtttgaggggacattttagtttggcttagtagtaaattttgtggaataagtgcctttgataactatacaccactgtccagatgctccctcttagtagtggcaaggagtgcgttaagtagttacttcaaaaagatatgcaagcttcataggggttgatcacatgcaaaccagtgtatgtatatgaagtatatctatctcattcttttaactgttttgaagtgaagactgttgttaaaacagaaatgcaactataacacaaatgtgatattcattttatattagcttgtgtgttgagatgtccaaagatgctaaaataggatcatcggacatcattccgttggt

SEQ ID NO: 264526 - DNA, 635 bp, Zea mays
cccacgcgtccgcccacgcgtccggcttattcagctgttgcctgtcctactgctgctggtgctcaactttctgccatcctcggagcctgtctactcgctctctcgttcctacccttatgagcataagttccaaaccccccgtggagttccatactatgtcaagatgtctaattttgaggagcagtatccacaccaaagcactgagcgagcaacagtggagcggcatgttgagagggattattattccataatcacacagaattgtagggtcgagctgcagcgtcgccaatggggcttgtcataccagacaccacattgtgatatgcttcaaaagtttgaggcaacaacacagtaataattcatccaatggtggaaggttgacagggagaagagaatgctggcctcatgaaaaaggtgctgccttagctgccagcctcatgaaaaggtgcaataagtaacttggatgatcatacacccctgcccagatgatctcttagtagtgttaaggggcgcatcacgtagctacttcaaaaggaggaggatatgtgagcttcataggagatgatcgcatgcaaaccagtgtatgtatatggagtatatcgatctaatgctttcgttcgttggcggttccagct

SEQ ID NO: 264527 - DNA, 781 bp, Zea mays
tcgacttacgcgtccgtttaagcagaagctcgggcagccatgggcgctctttatggattctacatggatgggcatgaggttttcgtgaagctagcgtccgacgtcatttccaacaggaaaaacgtgaacctggcccacataacgcccacgaaggaccacatcttcgagaccccgcacaaggtctacgtcggcaacctcgcgtggtctgttcagccgcaagacctgagagagctctttacccagtgcggaaccgttgttagcacgaggctgctcgcccgcccccgcggccgcaggaaccgagtctatgggttcctctcgttttcttccgcccaagagctcgaggaagcgttaaagctcgacagaacggtcttcttcggacgggatatcgtagtgaaggaagcccatgtagagcgccagacgcgctgagccgctgagtgttacccttgagaactgcactttttttggctgcctcgttgactgactaagctcatgctccaggcacaagctacacagctgacgaagaagcaattgagcggttcatcgcgaaagagttaaaaaaaaaaacggtagtgtaaattagtaccattgctgcaactttgtcagcgccgccgtggatgctggtgtgagaaattctaggacgaactgagaactggtattgtagtggtaatacatgttgttttagcttcttataataccctccatacagtaatagggctccttcaacacacgtttctaatgtctcgaatttttggttgtgaaagggattctaaatgagttggtc

SEQ ID NO: 264528 - DNA, 555 bp, Zea mays
cccacgcgtccgcccacgcgtccgcctaagaacaggtcttcgtctcaataatggaaggcaaaacagggcagctcaggtgctgtttcgtcgccatcgtgctcgtcctgggtcttgtccttgagcagtcccaccaggctgaagctggaggcaaatggtgctgcgaaaccgccaccggaaaataccattttaatcgctgcgttgactcgggtttggtcgacaatattgggttctgtgcgggtaatgccggttgcatcattatggaagacagatgtggaggccgttggccggtgcctgctcgtgatgcgctttccctggatgtcatttgattaattataagcaagtacgtgaagttaagaaacgagggccagacgactgtcgtccagcgattggttatttgtgaacttgtcgtttgtcttcttatttcaactttccaataagccccttcgtgtaatcgtgtcctccccttcaaagtttgtcgactgttgcgtaatcaaatctatatagcaaataaagacggcgagaatagaagaagatggagcgagaagaaaagggggg

SEQ ID NO: 264529 - DNA, 453 bp, Zea mays
gaatgccacacccacccatggcgctcctcctctccccgaccgtttccttcctggtctccccgtgtgctccacgccctcgagctctctccgctgccgccaatgtatcctaccccgcctcaaggctgcaatgcaagaacctgtcatccctacagagccctctgaacgtgactgctacctgcgcttctttcgccgagaagaggtcggctcctgtccatgccacggctgaggggtctgaggctggtgcggcggacagccagaagaaccgaaacctgcgaccaagatcgaggaaatgccgctcgagtcgaagcagaagatgatcatggagcagagggcgcggatgaagcttgccaagaaactgagacagcggcgcaagcggcttgtccgcaagaggaagcttaggaagaagggcaggtggccaccgtccaagatgaagaagctcaagaatgtatgaac

SEQ ID NO: 264530 - DNA, 459 bp, Zea mays
aacgcgtggcccggccttaaccaagggtttattttttcctctcgtccgcgcttgtttgttcgcgtcttctccctgtagggaactccgttacccggccccggctgtgcgtggcgtcagcacgccccgcgggcaggagggtgaggctgctgagcgtgaggtgcgagcagggagccaagggcggtggcgggctggacgtgtggctgagccgcggggcgatgctgggcttcgtcggagcggtggccgtggagctgaccaccgggaaaggcgtgcttcagaatgtgggattgaccgcgccggtgccgacgctggcgctggcgctcaccggcgcggtcggcgtcctcacggccttcctcatcttccagtccgggacgcgggactgatgggtgaattgtcaaagctcccaaaaggacatgcataaagtctgtcagagtcttgtgctgtgtatgtctatgctgttgt

SEQ ID NO: 264531 - DNA, 1234 bp, Zea mays
ttcttctgaatccctcctagagcaaaagtcctaaaggcctcaattagattagacaaaaaagacgcgattggatcactggcgagggaggcgtgtttaggggggtggcgaccgaagctagccgccgagctcggcagcgttttgcgtgattgattgcgtccctaatcctcactctttatgcttcgttcgctttgtccctttcatcatcccctgtgcttgtctcgcccgctctctctcgccttccacaaccctctccctcttccatctcatttccgcggcggctgcaacaataaaataataagtctcgtgcaggcgggagggcgtacgacgacgcggacgcaccgtcaaaggcaccaggctgagcaacccctccctctctctccctcttatccccaaggcgaggagcggagcggagaggagggcccttctgcttgtttctccgctttgcaagatgtcgtccccgagcaagcgccgcgagatggaccttatgaagctgatgatgagcgactacaaggtggagatggtgaacgacgggatgcaggaattcttcgtcgaattcaagggcccggccgaaagtatctaccaaggtggtgtctggaaggttcgggtagaactgcctgatgcatacccttacaaatccccgtccatcggcttcatcaacaagatttatcacccgaatgtcgatgagatgtctggctctgtctgtttggatgtcataaaccagacatggagcccaatgtttgatctagtaaatgtttttgaagtattccttccacagctgttgctgtacccaaatccttctgatccattaaatggggaggctgcagcactgatgatgcgtgatcggcctgtttatgaacagaaagtgaaagaatattgtgaaaagtatgctaaaccagaggacgctggcatcaccccggaagacaagtccagtgatgaagagcttagcgaggaggaagacgacaacgactccggggatgaagctatacttggcaatcctgatccttagtctgagtaggaaacagcgcagtcagctcatcaatacattgtccaattgcagaaactgcaagtaaacaaaaactgaaaaactaaaaaaaaaacctctggatgtcatgtaaataagtgtactttgtatgttctccaatgttgtttccttcatttgtctgattgaatttctagttgctgttgcatgagtgtgccgcggtttcaactaaaaacaacaacaaggttgtggctt

SEQ ID NO: 264532 - DNA, 701 bp, Zea mays
cttttatcatcccctgtgcttggctcgcccgctgtctctcgccttccacaaccctgtccctcttccatctcatttccgctgcggctgcaacaataaaataataagtctcgtgcaggcgaaggacgtacgacgacgcggacgcaccgtcgaagtctacaggctgcgcaatccctttctccctcttatccccaaggcgaggagctgagggggggcccttctgctgctgttcttgtttccccgctctccaagatgtcgtccccgagcaagcgccgcgagatggaccttatgaagctgatgatgagcgactacaaggtggagatggtgaacgatgggatgcaggaattcttcgtcgaattcaaggggccggccgaaagtatctaccaaggcggtgtctggaaggttagggtagaactgcctgatgcatatccttacaaatccccgtccatcggcttcatcaacaagatttatcaccctaatgtcgatgagatgtctggctctgtctgtttagatgtcataaaccaaacatggagcccaatgtttgatctttttccacattcctcttttgcagatctagtaaatgtttttgaagtattccttccacagctgttactatatccaaatccttctgatccattaaatggggaggctgcagcactgatgatgcgtgatcgtcctgtttatgaacagaaagtgaaaagata

SEQ ID NO: 264533 - DNA, 501 bp, Zea mays
cgctcattggtggccttcctcacctgcgtcagacagagaaagccgagattagcggcggcggcgatggcactcccggcgtcaagctccggcctcttccgcttcgtctccccccgcagccgtccccagtccactgacatcgtggccgctgcctcctggggagtcttcgccggcaccgccggcctttacctcgtccagccatttgactggattaagaagactttcttccagaaacctgaaccagaggcatgagtctccaggcagaaaaatgctgcaaatctgcaactttggtacaccacttttgtccgggatgattcctgatgataactcagcaaataatatgagaccccctcgtctttccttgtttgattttattcagatgtaggcattcctcttgcatgtaatcttcacgaggggagtgtgatcatttgacttgtttttcatcacacagagaaactgcttggttcaaccgtgttatatggtcttgatggcatctctaaaata

SEQ ID NO: 264534 - DNA, 983 bp, Zea mays
agatgagaggcgtaaaacatgggatagctggtcaacgaaacggaaactgatgcacatgtgtagctcggaggtttccatcactactaccattcttttatcgccaaaccttcctttctggaaagcaaggacagctggagagttggttgtcactgtcattagggaagaaggacaaaactttactggaaggtcctgtgttcaatgcattctgggaaaggaatgttgcagaggctgtgcgccagggagatgcaaggccatttgtagaggaagctgtgctgcaagtatctgactggggtttcagcttatctgacatccaaatgcagaagaaagaggctgggggattttttgagctcatcaagtctctgttcaatcaggctgaaagagagtgggtgggatttctgggcccaatacatatatggcaggggatggacgaccgagtggtctcgccggcagtggccgaatttgtgcggcgggtggttccaggagccacggtccacaagcttcttgacgaaggtcacttctcatacttctgcttctgcgacgagtgccacaggcagatattctccaccctcttcggcattccccagggccctatcaaccctgcaccgtcgcagccaggcgaggtggtttcagagctcaccgaggaaacaacagtgccagacaatgccacagatgaggaacatggaaaatcaggcctgccctgattcaagatcggtttcaggacccacaagtatagatacgagaccttactgcttctaaaacacaacacctcatatagacgggcttttcttcgctgcccatgggagcagcctgtgaatccagctgctcctcctgcggaagtcgtgaaggcaaagcattggatggaagaggttgtgccgtcccagttccatgtacaaaaatgctcatcacaaattcgcccggcacctgcccggtgcgcttttagcatagtcggtattacaattccattaacctgttatgactcagct

SEQ ID NO: 264535 - DNA, 421 bp, Zea mays
gggtccaggcacgcgtccgaattgaggttagcttaacaattcttagtagtcaccccttcgattaaatgtcaacatttgccttttcgcgtgccaattactaatgttacggcattattcaggacagaactttactggaacgtcctgtgttcaatgcattctgggaaaggaatgttgcagagtctgtgcagccaaggagatgcaaggccatttgtggacgaagctgtgctgcaagtatctgactggggtttcagcctatctgacatccaactgcagaagaaagaggctcgaggcttttttgaactcatcacgtctctgttcaatcatgctgaaagacagtgggtgggatttctgggcccaatacatatatcgcaggggatggatgaccgagtgatctcgccctcagtggcagaatttgtgccgc

SEQ ID NO: 264536 - DNA, 393 bp, Zea mays
cccacgcgtccgaccagacaatgtcacagatcaggaacaaggaaaatcaggcctgccctgatcaagatcagttttcaggatcaacagtatagatacaagacattactactaaacacaacacctcatatcgacgggacaggcttttcgtcgctgcttgtggactgagctgctcctcttgcggagtcttgaaggatgaaggcaaagtattggatagaggctgtgccgtttcacttggatgtacaaaaatgctcattacagattcgcacggcacctgctcggtgtgcttttagtatagtcggcattaacattcgattaacctgctatgactgcattataggcttcttttagcacatttgttttggcatgcgaacccaatggttcaattgcgtcctc

SEQ ID NO: 264537 - DNA, 1775 bp, Zea mays
atggtgggtcacttccaagtactgcatctctatcagctgctggtaattacaacactgatgagtggcttcccaggtcgtgtgttggttggactgattgggctgtcaatggtgagcaaagtgttactcctagcattgctccaagatttgaactcatgcagcctgttgaggagcctgtttccagctggacaagcagtggtgcacagcatgttggtcctcagcacaagcacacaggtttaactttcccagatgttgtctctgaaccatgtgtatctgcatcaatggttcaatgttttagtagctccgattattcgaaatttctcagagaacaagaaatattcttaatgaatggactgaagactgtcaacataactggaaatggctatctagagcagagattgcagcctggattgagtggtttacagtctatgggttattcatctcagatacctattcaacctggtggtaccactgcaaacctgatgcataatcatgtcaaaattactggagagaatgtgccctctacacttgattcagttgtaccttcaatagctccattaggtggcatgccaatgaaattcacagaagcgccactaactgcttcaaagaagaaccctgttagtcgtccatcaaagcctgttgggccacctccaggatttgatcatgtagccccaaagcgccaagatgattctattccagttgaaaaactgcagatcccacaggttgatgattacagctggctagatggttatcagcaatcgattgatcatgttcacaacttaagaactgtttattctggtgtcagtgacagcactgcatttgccactccattccccttccctgggaaacaacagttatctgggatgcatgcacaaggggctaccaatgaaaagacatggcaagatttccgtctttttgagccttcaaaacagaacatgctccaaaattaccaccaaagaaatctgcaaagtggtcaaatggatgaacaagagccagcaaattctatctggtctagcagttaccatgtgtgattcggtaacttgtaccaggatgattgctggagtttctggggacagactattggattaagtggcacgacctgatctattgagcttagcccatacctgcagcacttagtgttaaatttcttttgagaatggtagtctttgaagcatgacaatggctgctcttaggtttgggattgccaccatcttctgggacaaagagggagtggaggatgattgatctgtcggcagtctgatggggatgaattatacgaggtcttcaacgctgacacaaagggttaatgaaacaaactcgaatccagtgattataggcgctccgcacggaccatatgattcatctctcgttggacatgtagctacaagaatggtgtcagtgggcggttgctgccgcaactaaaagtccattcagtgtggatgtcagttgggctacgctatctaagaataaaaagtttgaggaacaacgagcatgttgccaagtagtttcttaagtataagttactgcgtctagttatattgttcctttcctttcggaaacaatgtgtcatgttgctgtcgcgctagttgcaagttgcaattaaacgtttggaacagtttgtcatgttatttgtgtggcttctatatggctatatgtttgctggaactgtatggaccaaccctcagtgctacctacaaaagtctatgattcgactgaatatcttgtatgattctattatacaaccaatataggacacacggcgggtgatgacctcacga

SEQ ID NO: 264538 - DNA, 1146 bp, Zea mays
actaactgcttcgaagaataaccctgttagtcgtccatcaaagcctgttggaccacctccaggattggatcatgtaaccccaaagcgtcaagatgattctattgccggtggaatatctgcagaacccacaggtcgatgattacagctggctagatagctatcagcaatcgattgatcatgttcacagcttaagagctatttatccgggggtcagtgatactagcactgcattggccactccattctctttccctgggaggatacacacacaagggaccaatgaaaagacttggcaagatttccacctttttgagccttcaaaacagaacatgttccaaacttaccaccaaagaaatctgcaaagtggtcaaatggatgaacaagagccagcaaattctatctggtctagcagttaccatgtgtgatttggtaacttttaccaggatgattgctggagtttctggggacagactattggattaagtggcacgacctgatctattgagcttagcccatacctgcagcacttagtgttaaatttcttttgagaatggtagtctttcaagcatgacaatggctgctgttaagtttgggagtgccgccatcttttgggccaaagatggggtagaggatgattgatctgtcggcagtctgatggcgatgaattaatacgaggtcttcaatgctgacagaaagggttaatgaaacaaacttgaatccagtgattataggcactccgcacggaccacatgattcatctctcactggacatattgctaccacaagaagcggacggttgctgccgcaactaaaacatgccgtgtggatgtcagttttcagttggcctatgccatccagagagtaaaaagtgaggatcaacgagcatgttgccgagtagtttctcaagtataaattactgcgtctacttgctccttcgctttgggaacaatgtatcaggttgtaagttgcaattaaatgtttggaacagtttgtcatggtaattgtgtggctcctatatggctatattgttctctgtaattgtatggcccaaccctaagtgttacatacaaacatctttgttttgacccaatatcttgttcttcacccgtttttaaattataagaaattataagttctgtttaaccc

SEQ ID NO: 264539 - DNA, 1322 bp, Zea mays
gcagaaaatgcattagctgctgttaggcttactatcatccttatattcacagtgcacagtgtaaataaagaacctgatagccagtcatattctgaacttgtgtaacgcaaagtactgctccaaagtgcgtttacggctgcttttgattttggtggaagaattcttaaaaaggtgttcaaaacttggtgatatcacatcaagcttctatctgccagccattctggtctacatcgaatggctggcgtcccatccagagttggctattgactcagagatggaggaacagcatgcaaatgccagatctttctttctggaaccaatgtatctcatttatgaataagttgatccttaccaaccttgcttctatggaggacaatgacgatgaggcttgcttttctaatatgagcatttatgaggagggtgaaactgggaacaggcttgccctttgggaagatcttgaattgagaggttttctgcccttgcttcctgcacataccattttggatttctcaagcaaacacacatttggaagcaccaaggagaagaaagcacgggttcagcgaatttttgctgcaggaaagtcactgcttaactttgttcagattgatcagttgagaatttattttgattcatcatcgaagaagtttgttatggccaagaaccctcctgtttctaaaactaacacccctcttcacgaatctcctgatgcacttaaaacaagtggcactgaaatggattatgaggctgctagaagatttgattcagtttcttctaatatgggcacactgcagtctaaagtgcagttttgtcctgatggtgacgatgatgaagaaattgttttcaagccaacagcttccgaaaagtttccgaaagctccttcagatctgttggttaatggatacactcatcctgtacctatgtctactgctggctggccaaccaatgctagtttagtgcctgttcagagcactggatcaatgactgcaactggttggccacccaatggtgggtcaaatgcttttccaagtactgcatctctatcagctgctggtaattacaacattaaccagtcgcttcccaggtcttccgttggttgggctgtcaatggtgagcaaagtgttattcctagcattgctccaagatttgaactcgtgcagcctgttgaagagcctgtttccagctggacaagcagtggtgcacagcatgttggtactcagcgcaagcacacaggtttaactttcccagatgttgtgtctgaaccactgtatctgcatcaatggttcaacgtttcagtagcactgttattcgaaattctcagtgaa

SEQ ID NO: 264540 - DNA, 995 bp, Zea mays
ggaatcctcgggtccgtccggccacgcaagcagcggcaccaccattcatctacgaatccatgggaggagattggagtggggccagctaacggatcggagtcggagtccttcttgtgcttctcctgctctgctggtgccgctgccatgggtttccccagcacccccaacctgaagctggagcctcgccctcgcacgcggaggctcctgcgctgcgccctcagctctgagcctgtgcctcccatgactgtttccatcactggagccacaggtttcattggacgcagattggttcacaagcttctatcggatgatcacaaggtttgcatcttaacaaggtctgcctccaaggctgcgtcagtttttcctgcttccacctatcctggactcacaatagcccagcaaggggattgggaggcatgcgtcagacgctccactgctgttgtcaacctggcaggcatgcccataagcactagatggtcacccgagattaagcaggaaatcaaacagagccgggtcaatgttacatcaaaggtggtgaagtacatcaaccatgctggaaacgctgatactcgaccctcagtgtttgtgagcgcaacagccattggctattatggtaccagcgaaatccatagctttgatgaatcaagtccctcgggcaatgactacctagctgaggtgtgcagagaatgggaggccacggcatgccaagtaaaccaggaggatgttaggcttgtacttctccggattggggttgttcttggcaaggacggcggtgctctagcaaagatgatacccctttttatgatgtttgctggtggtcctctggggacgggacgccaatggttgcttctctctcttgtgctacagacttatagtatacgctgggatcctagtcattctgttttcagacagatgggatttgatcgttagtacattcaacttcagcatattgtaccaattaattgattatctgattgctaggttttcttggattc

SEQ ID NO: 264541 - DNA, 774 bp, Zea mays
accacgcgaccgcccacgcgtccggaagtcgtggatcccggccatcaagagcgacgccgagatcgtcaacccgccctggctcgacggctcgctccccggcgacttcgggttcgacccgctggggctgggcaaggacccggcgttcctcaagtggtaccgggaggcggagctgatccacgggcggtgggcgatggcggccgtgctgggcatcttcgtggggcaggcgtggagcggcatcccgtggttcgaggccggcgcggacccgagcgccatcgcgcccttctccttcgggtcgctgctgggcacgcagctgctgctgatggggtgggtggagtcgaagcggtgggtggacttcttcaacccggactcccaggccgtggagtgggccacgccgtggtcgcgcaccgccgagaacttcgccaacttcaccggcgagcagggctacccgggcggcaagttcttcgacccgctcggcctcgccggcaccgtcaaggacggcgtctacatccccgacgtcgacaagctcgagcggctcaagctggccgagatcaagcacgcccgcatcgccatgcttgccatgctcgccttctacttcgaggccgggcagggcaagacgccgctcggcgcgctcggcctatgatttgcatgctgccagcgtgtgaaccagatggggtggttcctctctgtttttctttctttcttttctgtgtatgtatgtaccatgtaatgtatagtatagatcgatttcattgcattaaggcatgtttggttccc

SEQ ID NO: 264542 - DNA, 594 bp, Zea mays
cggacgcgtggagtgggccacgccctggtcccgcactgccgagaacttcgctaacttcaccggcgagcagggctacccgggcggcaagttcttcgacccgctcggcctcgccggcaccgtcaaggacggcgtctacatccccgacgtcgacaagctcgagcggctcaagctggccgagatcaagcacgcccgcatcgccatgcttgccatgctcgccttctacttcgaggccgggcagggcaagacgccgctcggcgcgctcggcctatgatttgcatgctgccggcgaccgagtcagttctcgattgcgcggggtgggtgagctcctagggacgtacggctgcagcggatcagacgccttgcctcgcagattggaggcgaaagaagagcgtagcagcaatctactgtctgtgttggtggtttagcgtgcgtgaaccagatggggtgttcctctctgttttttctttctttcttttctgtgtatgtatgtaccatgtaatgtatagtatggatcgatttcattgcattaaaaaaaaaaaaaaaaaaaaaaagggcggcccgcgatctagacccacgcgtccgcggaaacgtaag

SEQ ID NO: 264543 - DNA, 582 bp, Zea mays
acgtcgcatagcacgcgatacgctacagctcgcgaatctcgcgctccgagcgtcgcgagcaggcgctacccgggcggcaagttcttcgacccgctcggcctcgcggcaccgtcaggacgcgtctactccccgacgtcgacaagctcgagcggctcaagctggccgagatcaagcacgcacgcatcgccatgcttgccatgctcgccttctacttcgaggccgggcagggcaagacgccgctcggcgcgctcggcctatgatttgcatgctgccggcgaccgagtcagttctcgattgcgcggggtgggtgagctcctagggacgtacggctgcagcggatcagacgccttgcctcgcagattggaggcgaaagaagagcgtagcagcaatctactgtctgtgttggtggtttagcgtgcgtgaaccagatggggtgttcctctctgttttttctttctttcttttctgtgtatgtatgtaccatgtaatgtatagtatggatcgattttcattgcattaaaaaaaaaaaaaaaaaaaaaaaaaaaaaaaaaaaaagggcggccgctcgcgatctagaactat

SEQ ID NO: 264544 - DNA, 1325 bp, Zea mays
gtttgctagtgagtcgagaagagagagagaggcgtccggaattcatcgccagcgatgtcgccgtgcgccgacgcccccggcccggcctcctccgcctcggcgcccccgctcgcgcccctcatcgccgcgcagctcaactacctcctctcgcactccaagctgcccattagggtggggcagatctggtccggctgccgcaacggtcgccctgccgatcggttcaggctcgccatccccttctgcctcgactacgtccactgggatttcgtgtacaatgcgctgtctcccaaggtggcaccagacgtggtgttcggtccggaggatgagaggttccagccgctggtcgattacgctgctgctggaaatggcgataagagctgcttggcgcgttgggattgccgcgcccccgagggactccatgcgctcgtacaggagcttcgagaattgtacattgaataccaaaaggagcgggttcacatggtggatgacgcgagactagcgtttgaactaagcacagttctctctaaggaggggattgaagtctgcatggtaccttctgctgataggccagatgaggccaaatttgctgtaccacttctggagtctgactttgactttgccaaactggtgccaggatgtccttggagattacctcaaaagatccatctccaggtcatttttcctatcagcaggagttcaagctactcttctatgccttctgctccacgactcaaactaatctcaacaccagatttgaggtcacttctctcagttgaggatgtgaaactccctccatggtcaaatgggatgtgtttggcggagtatcttcctgctttagaagacagtcttaacggtctgcttgtagatgcgtcggcttcaattggttccagaagacgctttattgaggcactagctcccatctttgggagaccattagaggctgatccgattttttgcaggagggctacagttctttccatttctggaatgttcacatttctggttcactttgccatcccccttcaattcccaaagcaacaacctgtcgtcacactgcagagttctcagcactgtaatgccgatgggatgcctatcacgtcgcctccgataaatgactatccctggagtcctagatgggaccaggcagagatggttgaacggatctagtaagtacatggtctatctatcccttttccaatctatgctgcctgtcaatggtacagctttgagatcctgtccaattttgcagcgacttcctgaccgacgagtgccaaaatttcaagaagttctgcagcgatgctatcactcagcaaaagtagctgaca

SEQ ID NO: 264545 - DNA, 718 bp, Zea mays
  unsure (1)..(718): unsure at all n locations
agggctcatgggcgtacgcatttgcggtacgcgtgggcggactcgaacctccctcgagcccgagcaaacaagggcggacgcggagccggcggcggagcggagatggcggagaagaagcgaggcgccggcactcgcaaggatgaggtggtgacacgcgagtacactatcaacctccacaaacgcctccacggatgcacctttaagaagaaggcaccaaatgccatcaaggagatcaggaagttcgctcagaaggccatgggtactactgatgtccggattgacgtgaagctcaacaagcacatctggagcagtggtatccgcagtgtgccgaggcgtgtccgtgtcagaattgcccgcaaccggaacgatgaggaagacgccaaggaggaactctactctctggtcacagttgctgagatcccaccggagggtctcaaaggtttgggaactaaggttgttgaggatgaggattaagccctgtataccatgagataaatttgagaatgttgcttgagcttattgttatctactgccaatgactcatgtaatagaagcttcgagacttgtctcctttcaagtaagtccaaatatccacatggtatttcatggtcctacgcattttctgacaacgttgttattatgtcgtgccaaaaaaaaaaaaaaaaaaaaaaaaaaaaaaaaaaaaaaaaaaaaaaaaaaaaaaaaaaannnncccccc

SEQ ID NO: 264546 - DNA, 667 bp, Zea mays
gaattatccgggctcgacccacgtcgtccgcaggggctcagtcatcagccgccgtagggagcaggagtgagggagcgcgatggcggagaagaagcagcgcccaggagggtccaggaaggacgaggtggttacccgcgagtacaccatcaacctccacaagcgcctccacggatgcaccttcaagaagaaagcccccaatgctatcaaggaaatcaggaagtttgcacagaaggcaatgggcaccactgacatcaggattgatgtgaaactcaacaagcacatctggagcagtggtatccggagtgtgccgaggcgtgtccgtgtcaggatcgcacgcaagaggaacgatgaggaagacgccaaggaagagctttactctcttgttaccgttgctgagatccccccagaaggcctgaagggtctgggtaccaaggttgtggaggacgacgagtagatctgcctgggtactgatctgtgtcaactgtcaaatcatttttttggtgtttttgagtttgttagcactaagtcgatagccttgtgagaaaaattgagttttctgatggcgcgcttgttctcggctggttttaaacttttgaagataaaaaaaaaaaaaaaaaaaaaaaaaaaaaaaatagagaaaaagaaaaaaggttaagaaaagaatgga

SEQ ID NO: 264547 - DNA, 710 bp, Zea mays
accacgcgtccgcccacgcgtccgcgagcgaagaagaaaggagggtgctctgccggcggcggagcggagatgtccgagaggaggcgcggcgccggcgccggcaccggcacccgcaaggatgaggtggtgacccgcgagtacaccatcaacctccacaagcgcctccacggatgcaccttcaagaagaaggcaccgaatgccatcaaggagatcaggaagttcgcccagaagaccatgggtaccaccgatgtccggatcgatgtgaagctcaacaagcacgtctggagcagcggtatccggagtgtgccgaggcgagtccgtgtcaggattgcccgcaagaggaacgacgaggaagacgccaaggaggggcagtactctctggtcacagtagctgagatccctccggagggtctcaaaggtttgggaactaaggttgttgaggatgaggattaagtcgaagggttcaatcatctagcacttaaatgcataccatgagagcaagtttgataatgctgcttcagcttgttatctatgccggatgacgtgtgatagaagtttcgagacgttgctcctttcaagttttgaaattttgactatatgccatgccaagtctgtgttatctttacacattccgagcatctgtatttattatgctgagacagactcatcaatttttgattgtacaaaaaaaaaaaaaaggggggcccgcc

SEQ ID NO: 264548 - DNA, 633 bp, Zea mays
ttcggagccggcggcggagcggagatggcggagaagaagcgaggcgccggcactcgcaaggatgaggtggtgacacgcgagtacactatcaacctccacaaacgcctccacggatggtattgccccaaaccgccccaacctccttccattcccaagcttcgcgtggcagcagagtagatccgcttgttggagagcatatcgttgttctatatctgcgttgggcttgcatgtgcgatgctggtgcggagggttgcggcctgtgagcactctgtgggcttgcgattggttgatatacctgattggatccagtattctttaccagctagattacagtcggggatcacctgaccgagcgggaatagcttctagttgatcttgctcttgtatctgatccaacttttatctcccgttcagcgttgtttaaactacgtttaaacgtcaaaactctaattagaggttgaaaccaccgttttggcgttttggcgttctaaaccgtaaaacacagtgttttatgtattttagaccattagctacttttaggcccagtctattagttacttttgaggttcaatccagctcatgggtgaagttttagtaagccactagcctctctattttggtatttaacttcat

SEQ ID NO: 264549 - DNA, 927 bp, Zea mays
ggaaatgggtaaattcgctttcagaggcaagcgctgcgttgccacacagcgggaatcctgcccagagctgccgaatcgggtccaatcccgtcgacctttctggccgccgccgccactggactccatccagaaattaccttcgattcggccggggccgtgggagcggggatggggctcggggaggcggcggggcggctcctggcggccgtggactgggagcgagaggcctacccggcgtacgacgacttcctcgcgctccccgtcttcgtccttttcttccccaccgtccgctacctcctcgaccgcttcgtcttcgagtgggttgcaaggaggcttataaatagaaatggacatcagagcgctaataatgaaacagaagaaggaaggaagaagataagaaaattcaaggaatcagcttggaaatgtgtttatttcctgtctggagagcttttagctttgtcggttacatataacgagccttggttcaccaataccagatatttttgggtaggaccaggagaacaggtctggcctgatcaaaagataagattcgaacttaaggctgtatggatggatgctgctggattctacacatattccatatttgcacttatgttttgggaaacaaggcgttcagactttggagtgtcaatgtcacatcatgttgctactgtcgtcctgattgttctatcttacgtgttcagatttgctagagttggctctatagtattggcaattcatgatgcaagtgatgttttcctggaagtagggaagatgtccaagtacagtcattgtgattggcttgccaatgtttcgtttctgtgttctgttatttcatgggttcttctccggctcacttatgttccggtctggattctgagaagtacaagctatgaggtcttgttgactttggacaaacagagcaca

SEQ ID NO: 264550 - DNA, 732 bp, Zea mays
ggatgatatcattaagctcaaggattattttgatcgaaggaacgaggcaaagagtcaagtaccattgacaaaggctactgtaacaaaggtcgaggttgttggtatgggtgatcgcgtttgtgtggatctttgcagtatcatgcgacctggtgaaggccttctggttggatcctatgcgagaggaatgtttcttgtgcattctgaatgcttggagactaattacattgcaagcaggcctttcagagtcaatgcggggcctgtacatgcatatgtcaccgttcctggtggcaagacaagctacctctcagagttggggtcaggaaaggaagtcatcgtgatcaatcagagtgggctatggcgtactgcaattgtcggtcgtgtgaagatcgaatcaaggcctctgatccttgtagaagcgaaggataactctggagacgagacgtatagcatttttctacaaaacgcagaaacagttgcacttattacccctaacacaggatcaagtggaaggaccgccattcccgtgacttcgctgaaagtcggtgatgaagttctggtgaggaaacagggcgccgcccgtcacactgggatagagattcaggagtttattgttgagagatgaaaatggaaacgctgaatgcaccagtttcacgtcgttttgaacaaaaaaatgatgtatgattgcaacattcatctgttctgttggttaagattgtgagattccattgcagc

SEQ ID NO: 264551 - DNA, 584 bp, Zea mays
ctctacactaaatccgttgcagagaataacgatcagggagatcaggaaccacccctggttcctgaagaacctgcccagagagctcacggaggctgcgcaggccatgtactacaagaaagacaacagcgccccgacctactccgtccagcccgtccgggagatcatgaagatcgtggagaaggcgcggacgccgcctccttcctccacccccgtggctggcttcgggggggcggaggaggacgagcaggaggacagcaaggaaccagacgaggaacacgaggacggcgaggacgagtacgagaagcaggtgaagcaagtccacgccagcggggagtttcatctcagctgctgagggttttcgccggcctgctagtctgtggtaccagccgatgatggacctgctagtctgtggtcttgttttcaagttttctttcatttttttctttcttttgctgtggtgccgcatgactgcaacagttgtaaattattgaagggggttccagcgttgcccttgtattgactcattcaagctagcatggggaacataatgatggaatattacaggtcggtgtgcacaaaacaaa

SEQ ID NO: 264552 - DNA, 1097 bp, Zea mays
tccgaattcccgggcacccagcgtgccttcccagatccatcccacccgcaggccgcgccgccccagcaaatctcacgcacagaaacaccaaagccccaaaggcccaaactcaccacctcccaatggagaacggcgacgaaaccctcgcctcccccacggccgccgccgagacggacgcgctcaacggcggcgtcgcggaggaggagcaggtccccatcacccaccccgcaaagtcctacgtcacgctcgccgacgacaaccccgctcctaacggcggcgtcgtgaaagaggaggagggcggtgcccacaccaccgcgaagtcctacgcagctgtcgccgcccaagccgagatcgaggacctccgcgccgccaagctcgacctggaggagaagctcgctgaggcccgccgtgagaacaagtccctcgccgaggagacgcaccgcagcgaggggatcttcacgcaggcccgggaggaggtcaccatcgccgagttcgccgccacctctgccgagaaggaggtcgcctcgctccgcgcggaggtcgaacgcctcgatgctgttctcaggatcgagaagggcgagcacgagctggacaagcagagacacgagaaggtcgccaaggaggtggatgccgtgcgccaggagaagctcaagctagaggaggagatcagagccctgaaggcttccgccaccgccgccgccaccaccaaggagagggaagctgcgccggcttctgaggccccgaaggaaggggaagtcgcgtggctggggatggcggtggctgcggctgccggcgccgccggcacggctgccatcatgctagtttatctccgccttaagaggtaggtgttctggtgctcggttgcgtagcagtaaagggagttttcgtcgtgatgctgctattactgaactgggaggtatgcgacttctatgagtagttgcttattagcctacagaaaatatagggatctggagactggttatgtttcatggctgttcttctttcaccggtaccattttatgacgaacgttgtatgactgattatcttcttgtttacgttactgctacggcatggcctcatgacccttttttgatct

SEQ ID NO: 264553 - DNA, 2193 bp, Zea mays
gaaagatgatgaaatcacaaatgagagtggtgatgaaaaaactgatggtgagagtaaggacggtcaagaagagaagcctgatggcgatgccacccaggaggagcaccctaaaatagacgagaacgtgcaagaaaatggagagaaggatcagagctcaaactccaacgaggtatttcctgatggggcccaatcagagcttctgaaggagtcaaatacccagaacggttcattccccacacaggctgcagagtcaaagaatgaaaaggaagtccaagcgttaccgaagtcttcaggcgatgcaaccagctatacctggaaattatgtaatagtagtgcctcaacagattacataccttgccttgacaacgagaaggctatcaagaagcttcgaactaccaaacattatgaacatcgtgagaggcattgccctgaggagcctcctacctgccttgttccactcccagaaggatataaacggccaattgagtggccaaagagcagggacaaggtatggtacagcaatgttcctcacactaggcttgcagagtacaaggggcatcaaaattgggttaaggtctcaggtgactatctcttgttccctgggggtgggactcagttcaagaatggtgccctccactatattgatactattcagcaggcactacctgatattgcatggggcaaacgaagccgtgtcatattggatgttggttgtggagttgccagctttggaggctacatgtttgatagagatgcgcttaccatgtcttttgctccaaaagatgagcatgaagctcaagtacaatttgcattagaaaggggaattccagcaatatcagctgtgatgggcaccaagagacttccgtaccccagcagagtctttgatgtcattcattgcgctcgctgcagggtcccttggcacattgaaggtggcatgcttttgctggaattgaaccgcttgttacgccctggtggttactttgtctggtctgccactcctgtttaccaaaagctcccagaggatgttgagatttggaatgccatgtctactttgacaaagtccatgtgctggaagatggtcaacaagactaaggataagttaaaccaagttggtatggtcatatatcagaaaccaatggacaatatttgctatgagaaaagatctgaaaacagcccgccattgtgcaaggaatctgatgatgcagatgctgcttggaatgtaccgttggaagcatgcatgcacaaactgcctggtggctcaaaagtccgaggatcaaaatggccagagttatggccgcaaaggcttgagaagacccctttctggattgatggttccaaggttggtgtctatggaaagcctgcaaatgaagattttgaggcagataatgcccactggaaacgggttgtaagtaaatcgtatgtgaatggcatgggaattgactggtccaaagtgagaaatgtcatggacatgagagctgtctatggaggttttgctgcagctctgagggaccaaaaggtctgggtcatgaatatcgtgccgatcgattcaccagacacgctgcccatcatctacgagcgcggtttgtttggcatgtaccatgactggtgcgagtctttcagcacttacccaagaacgtatgaccttctgcacgcggaccatctgttctcaaagctcagaaagagatgcaaactggctgcagttttcgccgaggtcgaccgtgtactgaggccacagggcaagctgatcgtgagggacaccgcggacacgataaatgagctggagagcatggccaagtccgtgcagtgggaggtgcggatgacctacaccaagggcagcgagggcctgctctgcgtcgagaagtcgatgtggcggcccaaagaactcgacgctagcacgtgaactgtgttgaggaggaactgctaccacgtaggggtgaaattagaggaattttgtcttctagatatgcgtatggctcttgttggtgctgaaaggaccagaaaatatttggtgtaactgtagaacaatacatctgttttttctgccgtttgttttcgtttttgttttttcacaacgttgctgtaagttagtgctggaaatcacaggtacattcagttctactgggcacgttgttggcttgtcggatagcagtcgaacgatcttgtgccgcatatgttatatttgaactggtgggc

SEQ ID NO: 264554 - DNA, 709 bp, Zea mays
cggacgcgtgggcggacgcgtgggcggacgcgtgggcggacgcgtgggctctccgacggcggcgcggcggcggcggcggcgggcctggaggagtggtgcgtgtcggcgatgtacgcgatgagccgcggcagcctccggttccgcggcctggcgcgcgcggccggcgcggaccgggcgctccggcgcgtggtggccgacgagggcggcggcgtccggcgcgagatggctcggaagaccctccgcgccatgcggggcgacctcgacaacgacgacggcggcaccgagtataacaacgaccgcaccgccggctgcgccgacggcgaggactgcggcgggagcatcgtgtcggacgggctcatgtcgttccggcgccggcagcgcgagctcggcgtctcgtcgtgcggcaacaccgccgagttctgaacccgttctccggcgaccggtgcccgtccacgtccattgcgactgatgttttgcgcatgtataaattgcttggttttaggttcacgaggttagacatttgtgccgtgtgtgaagcagatgatgaaaaacttccatggtttttggaacctgtgtgtgtgactgtcagtgaagctccctgctcgtacctcacgttggcctgtttggtgctcagctgttgggagtaacgggatgtgtaaagcgaccggctcgtgtgccggacaaccaggttgggttgggtgttgcttgc

SEQ ID NO: 264555 - DNA, 443 bp, Zea mays
ggcgcagacatcgccgtcaatatggacccaatcacaccgaccgccttcgataacgcctactacgccaacctcgccggcggcctgggattgttcacctcggaccaggcgctgtacagcgacggcgcgtcgcaaccggcggtgagggacttcgctaagaaccagacccgcttcttcgaggcgttcaaggacgccatggtcaagctgggcagtgttggggtgaagaccggccggcacggggagatcaggagtgactgcaccgcattcaactagtagatcgaccacccattcttttgaagaaaaaaataacagccgcgtacctgagcgaactcaaccacgtccacgtgacagcacagaactcaatccttagagctaggatgaaaactgacgaaatcgggctaaaaaaccgctcttccggtttatctttatatggtatctcacgatag

SEQ ID NO: 264556 - DNA, 1577 bp, Zea mays
gagaaacccaggttgcaataccgcaggtgctatcctccagaaagcttcgctgtgtcaaatggacgtgttggtggtacaccaaacaagaacacaggtccaaagcaagtatgggagccaatggatgcaagatagaagatagggaatgggagaggatcagaaataacaccagaaactactggtgctgctgatggttcagatcaagtggaatgctcaaaggacattagtgaatgtgagaagcttgaggtagtgtgtgaaacacttgctgaaacttgttgtgagatatctgcagaagcctgtaagtcagatcaaccatgtagacaaggtgagaaaaatcagtctgcttgcagcgatggatctaaatgcgtagataagccaaattgctgcttgacaaaggacactgttaggacaacaaatttaaccagttcagacagcttttcgtgtctaagtgagggagatagagacagcagcatgagtagcatgacctcactgagtgctcagaatgtagaatcttcatctacatctgattcagatgagtattcagacaggaacgatagcagcccaggcgatccaccagtgaagaatgtttctcgttcattacttgagatgtgtgcaggaaatggtttcagagagtaccaaccgaaaggcttgaaccctcctaatggcaaccaatttggatttatggtggcacctttacaggaccagatgttgcaccaacagaagatccatgcaccgccgtactcgtcaccatttgtggggttccacaatcaccccttggcagttccaacaaatgggtacttgccatatcctcagccaggtcacttctaccctggccttatgacccctgttggatgtggagtcgctggcagccaatgcgttgactttccaatgcagtacagcaataacattcatccttactcgggccccgaatttggttttctgccttcacagccagttcacaagacctcagtgaacttccatgcggtgccagtgccaccactggccccgctgtgtagaagcgaggtgccagtggtgataaatcaagagaggcagcagggctctgcaccccctaaattcaaacaggcagtgctggtccctgagaccggctgtgcaggagacaacaccttcaaacagaaaggcgatgacgtagacagcacacccttctccttgttccagttcaacctgccgattgcccctcccaccctggcaacatccaaagagcgaagtggggaactggcaccagctcagatagctcgagtccagccgtgctcgagggaggagaccaacgtcaaggaatacaacattttctctgggtgtgacggggtgatgtttcagctcaactagagacgaagaaaattgagcagctattcaatatacagcgttacatggtgagtgatttgtattctcgtaaaacagaataaggtagatcgaggtttttactgtgttgccctcgactattgattctcttttttctcattttgttttgctttgcttcccctcccagttttgtttttgtgtgtatggaaaactgaaaagatagtgagtggtatagattctgcagttttgtcaaaaaagaaaaa

SEQ ID NO: 264557 - DNA, 783 bp, Zea mays
agcatctggtgcggacaccaagagaaaggggaaaggattgcttcctcgtccggttcgagctggaatagttggatatccaaatgttggcaaatctttcttgattaatcgcttgctaaaacgaagaatgtgcccagcagcacctaggccaggtgtcacaagagagctgaagtgggttcgttttggaacagacctagagttgttagattcacctggaattttacctatgcgaattagtgaccagacatctgcaatcaagcttgctatatgtgatgatattggagaaaggtcatacgattttgctgatgtggcggcgattcttgtgcagatgttgataagacatcctgcagtaggttctgaagcatttcgaagacgatataagattgatgtagatagtgagtgcggtaaaacgtttgtcacaaagctctctgttcacttgttcaatggagacacaagccaggcagctttccgcatattgtctgactacaggaaaggcaaatttggatgggtagcgctggagagacctccaacatgaacaagcgggatatcatagatccttagataaaagacatgtgcttgttcatgtagtatcacacaatttagtgtcgttcattggaccactctcgacagttttcactggacctgcacatatacgaggaattaattcagaatagctgtccatctgatgatctaaagacaaaacttaagaaatgctcctgctgttatcagacagtccagagcaaacgagctgatttgtatgatctattgaatgagctcaactatgtt

SEQ ID NO: 264558 - DNA, 421 bp, Zea mays
gtcccgagtggtcaatgtcggttctactccagggattactagatcaatgcatgaagtggggttagacaagaaggtaaagttgttggattgtcctggtgttgttatgctcaaatcttccaacagtggtgtgtctgtagcccttcgaaactgcaaaagggttgagaaaatagaagatccagtcgctcctgttaaggagatcctaagtatttgcccacatgagaagttgctgtctctgtacaaggttccaaactttggttcagttgatgatttccttcagaaagtagcaactgtacgtgggaaattgaaaaagggtggtgtagtggatgttgaagctgcagcgagaattgtgcttcatgactggaatgaaggtaaaataccatattttacactgccgcctaaaagagatgctggggaggactca

SEQ ID NO: 264559 - DNA, 450 bp, Zea mays
agcaactgccacccttgcaagagaaggaccagtcgagaggcaactctgggggaggaagatttggccatggaggtggccggagattttctggtggtggtggcggcggcagagggttttctggccggggaggtggcggcagagggttttctggcagaggaggcggcggcagtagatttaacaggaggaattagaagctgcttcaatctttatggacatttcagaattcagagaactatgtttgtgttcgacgtagttttgatgaagagggagggaatcgtctcagttttggctgcaactgtatcgtgcttttgtttatttgttagccttcgtcaacgaaggcttattttgttagtgatataattgaggcatggggaagagggggaggtaacagtctcagttttggctgcaaattgtatcgtgctattgtttatttgttagtgttcgtcaacg

SEQ ID NO: 264560 - DNA, 1894 bp, Zea mays
accacgcgtccgcgcaagcactccacactgctgtgcagaacgagagccacaccatcagtagttagagcgaccaatagatgagttcctccccgtcctttggtctcctggctgtagcagcattactcctagcactgagcttagcacaacatggctccctcgccgcaaccgtcggccccagggtcatcgtcgtcggcgccggcatgtctgggatctcggcggcgaagaggctgtcggaggccgggataaccgacctgctgattctggaagcgacggaccacatcggcgggcggatgcacaagacgaacttcgccggcatcaacgtcgagttaggcgccaactgggtggagggcgtgaacggcggcaagatgaaccccatctggcccatcgtcaactccaccctcaagctccgcaacttccgctccgacttcgactacctcgctcagaacgtctacaaggaggacggtggcgtgtacgatgaagattacgtccagaagagaattgaactggcggacagcgtggaagagatgggggagaagctctctgccactttgcacgccagtggcagagacgacatgtctatccttgccatgcagcgcctcaacgaacaccagccgaacgggccggcgacgccggtggacatggtggtggactactacaagttcgactacgagttcgcggagccgccgcgcgtgaccagcctgcagaacaccgtgcctctcgcgaccttcagcgacttcggcgacgacgtctacttcgtcgccgaccagcggggctacgaggccgtcgtctactacctcgccggccagtacctcaagaccgacgacaggtctggaaagatcgtcgacccgcgcctgcagctcaacaaggtggtgcgagagatcaagtattccccgggtggcgtcaccgtcaagacagaggacaactcggtgtacagcgcagactacgtcatggtttctgcgagcctgggtgtcctgcaatccgatctcattcagttcaagcccaagctacctacatggaaggttagggcgatctaccaattcgacatggccgtgtacaccaagatcttcctcaagttccccaggaagttctggcctgaagggaaaggaagggagttcttcctctacgccagcagcaggagaggttactacggagtgtggcaggagttcgagaagcagtaccctgacgccaatgtcctcctggtcaccgtgaccgacgaggagtcgaggcgcatcgagcagcagtcggacgagcagaccaaggcggagatcatgcaggtgctgcggaagatgttccccggcaaggacgtcccggacgccaccgacatccttgtcccgagatggtggtccgacaggttctacaagggcaccttctccaactggccagttggcgtcaaccgctacgaatacgaccagcttagggcaccggttgggagggtatacttcaccggtgagcacaccagcgagcactacaatggctatgtccatggagcctatctttcaggtatcgactccgctgaaattctcatcaactgcgcccagaaaaagatgtgcaagtaccatgtccagggaaagtatgactaggaagctacagcaaattgatttaaagctccagcaaattgagcagtgtggatgttgcatttctcagttcattttttccctgttttcaacaaagtatagatgacagccatgttccctcgcggcatatgccttttcattattccaataaagctagcggctggttcgatgagcacgatttgtgatcgagtatcccgtttaataagtacggtgtttgctttttttcatgatgaggggggtgcatggcttatgacagtatatctatttgctcatcaaaactttgtaccatggtattctctagtacccccaccattattact

SEQ ID NO: 264561 - DNA, 466 bp, Zea mays
accacgcgtccgcccaggctccgcgctcggtgtcacaaaacctgaccgatggcggcccggtgctccacagctgcctccgtgtccgtggtcagaacagggtcgcgagacctctccccctccttttccttcacagccgcggcgctcccctcggcgcgtctgaggccggtaggagcgtgggtccgcggtggagggtacacctgcaggctccgcgccgtccgcgccatgggctccgcgccgtcgtcgtcccaatccccgtcgctgcacacgccttcaggacaaacccaagggaaagcagattataaatcactgagtgaagaggagtggaagaagcgcctgactgaagagcagtattatgttactcggcagaagggcactgaaagagcattcactggggaatactggaatactaaaaccccaggcatttatcagtgtgtctgctgcgacacccctctgtttcagtcatcaa

SEQ ID NO: 264562 - DNA, 431 bp, Zea mays
ggcagggtgcaaagatagacctggagtctccaaccttcacgctgacgtttacagggagtgatagtggaacgctgccaacccccaggaccaatagactagacgtatcagaaagcaactgtgcagtgtggcatcagaggagtgatgagttggaggatgaagaaaacgattggcagatcttcagcaagcaccaattgctggaactcgacagcaaggagagggaagagaacttcattggttgtgaggagccgtggttctcagagatggctggggttggagctggcttcactggcatgctgcttggggtatccaatgagcatgatgcatcagaatgctggggtgagtccaataatggccaaactgagcgcagcaaccaagcatcagatgcggaggacaagaattattggaatggtgtccttgacatggtaaactca

SEQ ID NO: 264563 - DNA, 1002 bp, Zea mays
  unsure (1)..(1002): unsure at all n locations
gtcaggtcgacggcgaaagacgcggaggttggtgaaggagtgaaggaagaaagagaacgaaaggcggcctctcactcgcagtcgcagtagcaggttctagaccaccaaacccagcggctcccgctcatctcagttcggcttcggccttcgcattcctctacagatttcgcagttttgctgggggtaactacggaatggggggcggatccggatctttcctcaaggtcttggtcaacaacatggatgtcctcgcggggcctttggtttcacttgcgtatcctctgtatgcctctgttagagcaattgaaacaaaatctgctgtggatgatcagcaatggctcacgtactgggtgctgtactcatttatcactctattcgagctcacctttgctccggtactcgaatggcttcctttctggtcttatgcaaagctgttcttcaattgctgctgcacagaggtacattgagcaaaatggatcaaaagcgtttgagaatcttgttaacaagtttaagagttcgaacccaaggcgctcaattctggaggaggtagaggttgaaaggagggccaggattcaactagaatctgaagcgagggaagtgaaccctttcttcaatccagaatatcagtactaggcaaccattttcccttcacttgccaggaatgtgctaggatcggtttggaggaagatgtctggatattaggattgcgttttgcacctactgaatcgatgatattgtgtagatggacaaccataattgttgtagatatgttgtggcgatggaactcatgtaatggtcatgtcgcgaatgtttcatgctgctggaaattatgtattcacactggactctagttatgtgcctcactagtttcttgaaggtagttgttgaactaggtactagtaacgggtgcgcgctttgcgccgcatgggaaacaatatgcaatatttgttttaagttaattattaatgcttgttgtcnaaaaaacaacactattctctaatc

SEQ ID NO: 264564 - DNA, 577 bp, Zea mays
gatgtcctcgcggggcctttggtttcacttgcgtatcctgtgtgtgcctctgttagagcaattgaaacaaaatctgctgtggatgatcagcaatggctcacgtactgggtgctgtactcatttatcactctattcgagctcacctttgctccggtactcgaatggcttcctttctggtcttatgcaaagctgttcttcaattgctggttagtattgccacagttcaatggagctgcacatgtatatgagcattttgtgaggccaatgattgtaaatcagcaagttgtaaacatctggtatattccaaagaaggatgaatcaagtagacctgatgatgtaatttcagctgcacagaggtacattgagcaaaatggatcaaaagcgtttgagaatcttgttaacaagtttaagagttcgaacccaaggcgctcaattctggaggaggtagaggttgaaaggagggccaggattcaactagaatctgaagcgagggaagtgaaccctttcttcaatccagaatatcagtactaggcaaccattttcccttcactggccaggaatgtgctaggatcggttt

SEQ ID NO: 264565 - DNA, 836 bp, Zea mays
aggctcgagaaaagggtcttcagagcacaatacagagtccttaaagggtctctctttgagtgaagttggtaacaaccgtacaagtaacaacaaagttgtttgctgtcacttctcttcagatgggaagttactcgctagtgccggccatgagaagaaggtcttcctctggaatatggacaattttaagatggataccaaaatagaagaccatacaaactttatcacagacataagattcagaactaattcaactcagttggctacatcatcttctgacggaactgttcgactttggaatgctgctgatgaaagtggcgctttacaaacttttcatgggcataggtctcatgtaacatcagtagattttcacccaagattgacagaggttctttgctcttgcgacgacaatggagaaattctcttctggacagttggtcagactacatctactcatgttttgcgggtgaagcagggtggaactggaagagtcaggtttgaacctcgaagtgggcagctcctcgctgtggcagctggaagcatggtgaacatttttgatgttgaaaagcaatccagcttaccctgccctccaaagggtcacaatagtgaggtaaactttgtgtcctgggatgaaaatggtgaatatctggcatctgtaagtcaggacactgtgaaagtgtggtcggtatcgtctggtgtgtgcattcatgagttacgatccaatggaaaccaatatcagtcatgcacattccatcctagatacccgaaagtgttgattgttggtggttatcagactctggagctgtggagcttatcagataaccagagaatcccaatcc

SEQ ID NO: 264566 - DNA, 691 bp, Zea mays
tcgagacgaccaaacttcctacgaaggcagaaccgcattctcgcgtcggcttgcttttaactgaatccagcccaccgcttctcgcacgtcgccatggacgcggtcgattctgtggtggatcccctccgcgacttcgccaaggacagcgtccgcctcgtcaagcgctgccacaagcctgaccgcaaggagttcaccaaggtggcagcgcggacggcgatagggttcgtcgtcatgggcttcgtcggcttcttcgtcaagctcatcttcattcccatcaacaacattatcgtcggttccggctaggctcagggcgcgactagcatgggagtagtgcgatacttttgagagcaagggatagcgaggatcttggtctttggaatagtattgttaatgacattttttttccggttgtgtttctggagtaaatcgttgaacgacaaggcttcaggatgtctggatgtggattctgagtagaccttgaagccttgatgaagcagccagtcttggaaagaaagttccattttgttgttccattaagctatttttggtgctgtctacagctctctcggtgaccgtaagcgcgatttggtggtttaatgttttagtatatctgagccgaactgtagactgttgcttctgggagaaacgaaaaaaataaatagacgttgggcgcatgccctttattttaaaa

SEQ ID NO: 264567 - DNA, 550 bp, Zea mays
cccacgcgtccgcaaacgcaaaaccgcatcctctcatcagcttccttccacattcgtctcgagatctcgccccgtcgccatggacgcgatcgacagcgtggtggatcccctccgcgacttcgccaaggacagcgtccgcctcgtcaagcgctgccacaagcccgaccgcaaggagttcaccaaggtggcggcgcggacggcgatcgggttcgtcgtcatgggcttcgtcggcttcttcgttaagctcatcttcatccccatcaacaacatcatcgtcggttccggctaggcttacaggagtacagggcgactagcatgggagtagtgcaatacttttgggagcaatagataacgaggatcctggtctttcgaatagtattgttaatgaaatttttcgttcggttgtgtttctgatgtaatcgttgtactgagtagaccttctggataccggattctgagtagacctttgaatccttgatggatcagccaatctcggaaaggaagtttcgtattttgttgttcacaaaccaatcccaacctataaaaatat

SEQ ID NO: 264568 - DNA, 572 bp, Zea mays
tacagccctccgcctcgtgaaggccgtgcacccgcaaagccaccacagcgtcgtcgtcttcgtctccagtccaagcaagcgaagagcacccctcgagatctctccctccccgcgccgccatggacgcagttgactcggtagtcgacccgctccgggagttcgccaaggacagcatccgcctcgtcaagcgctgccacaagccggaccgcaaggagttcaccaaggtcgccgcgcggactgcgatcggcttcgtcgtcatgggattcgtcggcttctttgtcaagctcatcttcatccctatcaacaacatcatcgtcggctccggctgatccgttcacctcaggctagtggctgccggagtggacaatggcgtcactaccttggaggcagcaccgttttcagctctgatttccgcaaagcaattcctttaggacttgtgttgttaaagggcaactcccttatcttttcctctcttgaggtcgtgtggtagatctggaactcttttgtacctggtgtcgaatagtcttttgtggatcagcgggtgacaaaattaaatggttaccgttgtcttg

SEQ ID NO: 264569 - DNA, 492 bp, Zea mays
ggcaaagcacgcgcaaaagccaccaccgcgtcgtcgtctccaagcaagcgaagagcgcctccctactccccctcgagatcttctctccctccccgcgccgctatggacgctgttgactcggtggtcgacccgctccgcgagttcgccaaggacagcatccgcctcgtcaagcgctgccacaagcccgaccgcaaggagttcaccaaggtcgccgcgcgcactgcgatcggcttcatcgtcatgggattcgtcggcttctttgtcaagctcatcttcatccccatcaacaacatcatcgtcggctccggctgatccatgcccctcaccaggagtggacaatggcgtctccgccttggaggcgcagctctggcatccggaaagcagtttgtttaggtgaaggacgagtcccgtggtagacctgtaactcttttgtgcctgatgccgaatagtcgtatgtgaagaagaaaaaattaaaaggttgggtctttctcg

SEQ ID NO: 264570 - DNA, 1180 bp, Zea mays
gttcctccttcctgtcctgctaggctgctgctacttactacttgtacccgcgccgccacgcccacggccacggcccatccattccttcgcgcacgcaacgcaaaaacaagcacaaacacgcgcgatccgatctgggccggccaagcagccacccatccatggcgactagggtttggctcaccgccctcctgcttggtttcctcgtcgccgcctcccccttcaccggccgagttgctagagctgaatccgaggaagatgctgctgcagctgaggttgttgaaggggctgatctaggtattgtgggtgatgatacacaggtttccagtgatggacctttaagtcctgctcctggtgtagagacagtagttgtcttcccaaaaaatgctggcaaaattgtactagcaggtgaagaaactgaattactagttggtctgcaaaatgacggtgaatcaattttgaatgttgttgctgttcattcaactctccatcttccttttgaccacaatatgtatggccagaaccttactgttcagaatttcttcaattcatcagttcctgtttctgtgcaagcaaccttcccctacaagttcgttgtgagcaagttcttgcagcctggagcatatgatctggttggttacatagtgtatgagatcgaccagcacccttaccagaatgtattctacaatggcactatcgaggttgttgaggctggaggcttactcagtgttgagtctgtgttcctcatcacccttggatttgcacttcttggtctgtttggattgtgggcatatggccaggttcagcagctctcgaagaaaacaaagaaggcacccaaggtggagctcggaactggaacaactgatgccaacatcgatgagtggctggagggcacttcgtttgtgcagagaagcaaatccaagaagaagcagacctgaggctctccaggctagttaaatccttttgaggatctagaatgagacatttgagggtagcccttcacaagtgacttttgcagaaagatagatgcgtaaggaggtgctgaaaaccgtaaacatcttcgttgacattttcgaccttgtgtactttacatggaacaaaattttgttaaaagaaagtatatgctgttgccgctgtggtttctgatcttaaaaaaaaaaaaaacaaaaaaaaagggggggcc

SEQ ID NO: 264571 - DNA, 681 bp, Zea mays
ttttatcgaggggaaggaaaacccaaagccagcaggtgtctgcgtcgccgtcggcttcctatcctactgcgtgcgtggacctcgctgtgctcacgcggcgaccggtggctcctcctattgctacaactacttgtactcgcgcccgtcccttgcgcacgcaacgcaagcgcagacacgagcgatccgatccgatccggaactgtgccggccagccatggcgactagggttttgctcaccgccctcctcctcgccttcctcctcgtcgccacccctttcaccgcccgagttgctagagctgattcggaggaagatgctgctgcagctgaggttgttgaaggggctgatctaggtattgtgggtgatgatacacaggtttccagtgatggacctttaagccctgctcctggtgtagagacagtagttgtattccccaaaaatgctggcaaaattgtactagcaggtgaagaaactgaattactagttggtctgcaaaatgagggtgaatcgactttgaatgggtgttgctgttcattcaactctccatcttccttttgaccataatatgtatggccagaaccttactgttcagaatttcttcaacgcatcagttcctgtttctgtgcaagcaaccttcccttataaattcgttgtgagcaagttcttgcagcctggagcttatg

SEQ ID NO: 264572 - DNA, 469 bp, Zea mays
tactcaggttgagtctgtgttcctcatcacccttggaatcgctcttcttggtctctttggattatgggcatatggccaggttcagcagctctcgaagaaaacgaagaaggcccccaaggtggagctcggaactggaacaactgatgccaacatcgatgagtggctggagggcacttcgtttgtgcagagaagcaaatccaagaagaagcagacctgaagctagctctccagagtagttaatccttggaggatctagaatgaggcatttgagggtagcccttcacaagtgacttctgcagaaagatagatgcctaaggaggtgctgaaaaatgtagtttcgtggtcgaacatctttgttgacaccattttcgaccttgtgtacttcacatggaacttttcttcaaacaaagttttgttaaaaaaaaggtatatgctgttgtctctgtgatttctgatcttttattcgctg

SEQ ID NO: 264573 - DNA, 411 bp, Zea mays
attgttctcaagctcagagcttcgccgaggaggcgacgacgatggcaatcgccgggcagtgctcctcctgctattatacgtcacccaccctgcagctccagctccaacgacggcacagccacctgccgcggcagccccaagccgcacgaagagcgcggcggccgaggttgcaggtggccgcagctgccggcagcgggcccatcagggcggccacggacgccgagttcttccagccttccgacaccaggccaatcatgctcttcgacggcgtctgcaacctctgcaacggcggcgtccgcttcgtgcgggagcacgaccccaacaggagcatcaggtacgtgccgctgcagagcgagtccgggaggaagctcctgcagaggtcagggaggtcccctgacgacatcttcagcg

SEQ ID NO: 264574 - DNA, 1801 bp, Zea mays
ggactgggaagcagcggcggtacaaagtgtgggagagaaaggagaagagacttgatgtcctcgcagtttgtccatccggccaaacagatctcctcgtcgtcgcctcgctgtctcctccgccgttgcctgcgatcccgatcatggagggcgacagtaccaacctcgacgcggctatagagtcgctcctgaacgtggagaagcagatgaggctggccggcgatgtcgccggcacgcggaaggccgtcatcgacatcgtcgagctctgctacaaggccggcgcgtggaagacgctaaacgaccagatcgttctcctctccaagaggagaggccagcttaagcaggccattactgctatggttcagaaagcaatggactacattgatttgacaccagacattgacacacgcgtcgagctaatcaaaacactgagcagcgtctctgctggcaaaatttatgttgagatagagagagcaagattgatcaaaaggcttgcaaatatcaaagaggagcagggaaagattgacgaggctgctgatttgatgcaagaagttgctgtcgaaacatttggctccatggcaaagacggagaaaattgctttcattcttgagcaggtccggctatgcctagatcgtcaagattatgtccgagcacaaattttatcaaggaaaatcagtactagagtatttgacgcagatccatcaaaggaaaaaaagaaaccaaaggagggtgacaacattgttcaggatgctcctgcagatattccttccctcctagaattgaagcgcgtctactacgaactgatgattcgatattactctcacaacaatgattacctggaaatctgtcgttgttacaaggctatttatgatatcccagcaataaaggaagatccaaccaagtggataccgattcttaggaagatctgttggtacttggtgctagcacctcatgatcctatgcaatcgagccttctcaatgctacactagaggataaaaacctttcagaaatcccaaatttcaggttattgctgaagcagctggttaccatggaggtcatccagtggacagcattgtgggaattctctaagcacgaatttgaaaacgagaagaatctgctaggaggagctttgggtgccaaagctgcagaagatttgaagctgagaataattgaacataatatcttggttgtgtctaagtactattcgagggttaccataaagaggcttgctgatctgctctgcctgagtttgcaggaggcagagaagcatctttcagacatggtgaactcaaaatctctgactgcgaagatcgacaggccgatgggagttgtgagcttccgggtagttcaggactgcaacggcacacttaactcgtgggctacaaacctcgagcagcttcttgaccttgtcgagaagagctgtcaccagatacacaaggagactatgatccacaaggcggtattgaaagcttgactgattggcgctggctgtttttgcttcgtaagtaagatactgtaccagcagaaggacggggatgctatttgttgctgaactcttgctgcacattatttgaattcttagatctgcaatcagatacctactcctgaaaagctgatccggctcctcattcaaactcagttctccagtcttcattctgggatagcaagaacgtcaattatttaaatattaattggtgctgccaagaaatctctgcatgtcagtcgccgtataaccacatcctcaacattcaagttgggtctatgtgtctctaatctaatctattctacgagatctgtttccac

SEQ ID NO: 264575 - DNA, 847 bp, Zea mays
ttaggaagatctgttggtacttggtgctagcacctcatgatcctatcaatcaagccttctcaatgctacactagaggataaaaacctttcagaaatcccaaatttcaggttattactgaagcagctggtcaccatggaggtgatacagtggacaagtctgtgggaattcttcaaggaggaatatgagaaggagaaggatcttcttgggggagctttgggtgccaaagcttcagaagatttgaggctgaggattatcgaacatgtattggttactttgtgtttggtctagttattttgctctatgcttgtccattgaatctgatctcttgctctcttcagaatatcttggttgtatccaagtactatgcaagggttaccctcaagaggcttgccgatcttctttgcctgactttgcaggaggcagagaagcatctctcagacatggttaactcgaaatctctagtggcaaagatcgacaggccgatgggagttgtcagcttccggacgacccaagacagcaatggcacactgaactcatgggccacgagccttgagaagcttctggacctcgttgagaagagctgccacgagatacataaagagaccatgatccacaagacggcgttaaaagtttaactcttttggtttaggttttgaaacccgtgctgttcatgagttaccgtaacaggagggggggttttttgttgttgttgggcacggccagtgtccccgcaaatttgctttgactcgctgaatatttttcggattcctagatctgcaatcagatacctagtcctgaaaaaaaaaaagtagatgcacctttttttttattaaaattcagttcaac

SEQ ID NO: 264576 - DNA, 437 bp, Zea mays
cagacgcgtgggcgccaacaaagccctaacctgctcaacctttcccccctcgcaagcaaagccgaacagatctcctcgtcgtcgcctcgctgtctcctccgccgttgcctgcgatcccgatcatggagggcgacagtaccaacctcgacgcggctatagagtcgctcctgaacgtggagaagcagatgaggctggcaggcgatgtcgccggcacgcggaaggccgtcatcgacatcgtcgagctctgctacaagaccggcgcgtggaagacgctaaacgaccagatcgttctcctctccaagaggagaggccagcttaagcaggccattactgctatggttcagaaagcaatggactacattgatttgacaccagacattgacacacgagtcgagctaatcaaaacactgagcagcgtctctgcttgcaaaatttat

SEQ ID NO: 264577 - DNA, 338 bp, Zea mays
atttgttatcggactgggaagcagcggcggtacaaagtgtgggagagaaaggagaagagacttgatgtcctcgcagtttgtccaatagatctcctcgccgcctcacccgtctcctcctccgcagcttccccgcgatcccgaccatggagggcgacggtaccaaccttgatgcggcgatagagtcgctcctgaatgtcgagaagcagatgaggctggccggagatgtcgccggcactcggaaggccgtcatcgacatcgtcgagctctgctacaaggccggcgcgtggaagacgctaaacgaccagatcgttctcctatctaagaggagaggccagctt

SEQ ID NO: 264578 - DNA, 871 bp, Zea mays
ggcaataaacaacactgatcacatccagtgtcagatattaggcacacaaagcacgcatttggctacgctgcaactgcatgtctgaaactgaaacaaacaaaaacaagcatagcgcaaccaacaaccatgctagcattacggttccagagttcaaggcaaccacagacgttaagttaacatagcatcatttcgtcttggttcattcgctacagtatccactcatagtggcaacgaagacttgtaactacaggaaagacccactgcaccacataccctttccatgccaagtagatccgcgtcttcagtctccaccaacctggcgtttccaggagtcctccacaatgagctcgtctactccccagtcttcatagcttccatcaggtaagtaccgtctgatcgtgaagggtatcttgcgcgctctcagctccttcattgcaatctcaagagggtcagtttctccctcaagctcaaccatgactggagcattcatgcttatctgcaaggctcgtgtacccagaatgcgcgcacgttcgtacttcgtcatgtattttgttgttttgcgttcacgcttggtcttttcctgttccttatcttcaccctcaccacctatgacgtcatcaggggcatcttcgttgttctcaggctcttcttcagctccttcctcaatctccggttctgggggctcatcctcataccccatgtcaatttcgttgtaatcgtcgtccgccatggctccgcccgcgcaagcgccgctgctccggtggtttgcttactagggttttcgccgggctgctgtggggaggagacgaaaataggaaactggaggaaacggtgtcacggggaagtgccctcgagccgaatcggctcgagg

SEQ ID NO: 264579 - DNA, 1789 bp, Zea mays
cccacgcgtccgctcgcaccgcccgtccgcccagaactatctcgctcgtccgcgttcagctcagctactccaatttcgcaacaagttgcaagcaataaccgaccaaggacgacgaacgggtcgatggccacgctctcctcctgcagccgcctgagtagcggcaccggcgccgcggccatccaccggcagccggcccgtgctggagccgtcctcgtcgtcacctgcaggcggagctcctccgcgaccgtccgcgccgcagccgctgccacggcggcggcgccggctgccgtagagctgcagaacaagggggtgtcgctgccgacgtgggcggagttcgagctcgggcgggcgccggtctactggaagaccagcagcggcctcccgccctcgccgggcgaggggctgaccctgttctacaacccggcggcgacgaagatggccccgaacgaggtgttcggcgtggcgttcaacggcggcttcaaccagcccatcatgtgcggcggggagccgaggcagatgacgctgcaggagcggggcaaagccgacccgcccatctacaccatcaggatacgcgtgccgcagcacgccgtaagcttgatcttctccttcaccaacggggccgagtgggacgggccgtacacgctcaagttcagggtccccaagccatggcagaacaagccgctgagcttcttcaacgagggcctggcggacgagctcaacagggagggcgcctgcgacctggccatctacccggacgagaacatcgccatcaccagctgcgccatggacggctacctcgaggaggggggggatcggtgcaagctggacatcgtgagcggatgcacggaccccagctccgacatgttcgacccgctggccaccgtcgacgacggctcctgccccctcgagtctgattccgaggaatgatgatggagctccatctcaatccgagggagggaggcagcagcagcaaacgtgatccacacatacatcatatacaaatgtctgtcaagtttgtcataatgtgatacatgaagcatacctgtatttagccagaataccacagtaaaaacgcattaatgagcaagatggtctggatacttggtatccatctttgcaaactctgatacaaaacagtcttaaacagagcagtagcatggaacacgccaaatacgccatgctctggtctgcatactttccgctcagctatgctgtgaactacccatctggatttgctcctctcctgtggaaaccgttggagttgaatgaaacaagcaacagcaacacggtcgcatgccggatgtagcatacaactcattacaaaagatagcaagatacgataaacccttccaaatgaatgaaagacgagtcagtttacgaatcatctgcacagcatgtctgaaactgaaacgaacaagcataactcaaccaccgtccaccagccatcacggttccagagttccaaggcaaccacagacgtcaaggtaacatctagcatagcatcgtttcgtcttggttcattcactgttcagcatccactcagaggcaacgaagacctgtaactacacatcctttccatgccaagtagatcagcatcttcagtctccaccaacctggcgtttccaggagtcctccacaatgagctcgtctactccccagtcttcataacttccatcaggtaggtaccgtctgatcgtgaagggtatcttgcgcgctctaagctccttcatcgcaatctcaagagggtcagtttctccctcaagctcaccatgactggagcattcatgct

SEQ ID NO: 264580 - DNA, 820 bp, Zea mays
gtccgcccagaactatctcgctcgtccgcgttcagctcagctactccaatttcgcaacaagttgcaagcaataaccgaccaaggacgacgaacgggtcgatggccacgctctcctcctgcagccgcctgagtagcggcaccggcgccgcggccatccaccggcagccggcccgtgctggagccgtcctcgtcgtcacctgcaggcggagctcctccgcgaccgtccgcgccgcagccgctgccacggcggcggcgccggctgccgtagagctgcagaacaaggggtaagtgtatatatagtggtgtaacaaataagctggctgctgctcttgtagctaattgatcgatgctgctgctgctgctgctggacgcgcgtgcgtgacctccgaccgacttgcaactgcaaagggtgtcgctgccgacgtgggcggagttcgagctcgggcgggcgccggtctactggaagaccagcagcggcctcccgccctcgccgggcgaggggctgaccctgttctacaacccggcggcgacgaagatggccccgaacgaggtgttcggcgtggcgttcaacggcggcttcaaccagcccatcatgtgcggcggagagccgaggcagatgacgctgcaggagcggggcaaagccgacccgcccatctacaccatcaggatacgcgtgccgcagcacgccgtaagcttgatcttctccttcaccaacggggccgagtgggacgggccgtacacgctcaagttcatggtccccaagccatggcagaacaagccgctgagcttcttcaacgagggcctggcggacgaactcaac

SEQ ID NO: 264581 - DNA, 295 bp, Zea mays
cggatgtagcatacaactcattacaaaagatagcaggatacgataaacccttccaaatgaatgaaagacgaatcagtttacgaatcatctgcacagcatgtctgaaacagagttccaaggcaaccacagacgtcaaggtaacatctagcatagcatcgtttcgtcttggttcattcactgttcagcatccactcagaggcaacgaagacctgtaactacagggaagtcctgatgcacaccacacatcctttccatgccaagtagatcagcatcttcagtctccaccaacctggcg

SEQ ID NO: 264582 - DNA, 995 bp, Zea mays
cccacgcgtccgagcggtcctatgtccgtgtggtcgtgcggactgcggacttctcttcctcattccatccccgctgccccatccggccatcccacagcgaatctcccaaaccccggctccctcgattcccaatcccacccctgccacgaagagatcagatgacggcgagctgctgctgatcgagtgcagtggaatcggaggcgatgcgggctagccggccggcggtgcaccctgtggagcggcccctccgccgccggccgcggcggcggaggggccggaggcccaggtccggggtgccgcgcacccgcgcggggtgcggatgaaggagccgcctggggcaccagggacacctgcggggcttggtctacgccttgcgcaggccttcttcgcagccgctgcgctcgccgtcatggcgtccaccaacgacttcccgtccgtctctgccttcagctaccttgtcgcagcagccattttgcagtgcttgtggagccttttgctagcctttgtcgacatttatgcacttcttgtcaagcgatcgttgagaaatgcccgagctgtatgtatatttactatcggagatgggatcacaggtacaataaccttgggcgcggcatgtgcttcagcaggaatcactgttctcatcggtaatgatctcaacatatgtgcagagaatcactgtgcaagtttcgagaccgccacagcattggcttttataagctggtttgcgctggcgccatcctgtatcttgaatttctggtcgatggcctccagatgataaatataggatgttataaaacatagtatttttgaatggtttctggacaaggtcgctgcttatggtagcagcaaagcaacgcggtgccgtaaagctaattgtaatacccagaaattgttgaatggctgtggaatgtagcacgtggtcgaattgtctgtacaaaatacggagaggccttctttggatctgaacccggcttctgaaaaaagccaccccttcg

SEQ ID NO: 264583 - DNA, 1015 bp, Zea mays
cggacgcgtgggcggttccgcacgacggcacgagtcatcgtcgccttcccctccctcgacaagccaaacgcgaataccacccccgtgacttcccgatctccggcgatggccgcgcggcgcctcggatcccccgcatctaggtggctgcgcccgtccgcgctgctcctcctggtcgcctctgctctcctctcggccccgtcgccggcccgggccctccggttcgacctcgagtccggccacaccaagtgcgtctccgacgagatcaaggtcaacgccatggccgtcggaaagtaccacatcgtcgggcccgaccccaacttccccgatgcccagctccccgaatcgcaccgcatctccctcagggtgacgtcgccgtacgggaacagcatgcactacgcggagaacgtgcagtcgggccacttcgccttcacggcggcggaggccggcgactacctggcctgcttctgggcgcccgaccataagccaccggtcaccatcgggttcgagttcgactggaggagcggcgtctccgccaaggactatcccagcgtcgccaagaagggcaaggtcgatatgatggaattggagctgaagaagctagaggaaactataaaaaatatacatgaagagatgttttatctgcgtgaaagggaagaggaaatgcaggacctgaacaggcgaacaaactcaaggatggcttggttagggttcctctcccttggcgtctgcttatcggtggcaggtttgcagctgtggcacctgaagaccttcttggagaggaagtagttgtctgtagttgccccaacggtatatttgtgggtgaactgtcagatgtgttacagagcttggaatcccatgtagcaaacgctatgccagatactagagaaatatgcttcacaatgcttggaatcccatgtagcaaacgctatgccagatactagagaaatatacttcactatgcttggaatcccatgtagcaaacgctatgccagatactagagaaatatgcttcact

SEQ ID NO: 264584 - DNA, 401 bp, Zea mays
gctgaagaagctagaggaaactataaaaaatatacatgaagagatgctttatctgcgtgaaagggaagaggaaatgcaggacgtgaacaggcgaacgaactcaaggatggcttggctagggttcctctcccttggcgtctgcttatcagtggcaggtttgcagctgtggcacctgaagaccttctttgaaaggaagaagttgttgtagactgtagttggcccatggttcacggtagacctcagcgcaggtgtaacctatttttgggtgaactgccgatctgttacggagcttgaaatcccatgtaacaaacggtatgtcgtacttgagaaaatatgctttagcctgtccagttgaaattctaagaaacttgaaatagatactaaattgtcttccattcaat

SEQ ID NO: 264585 - DNA, 937 bp, Zea mays
  unsure (1)..(937): unsure at all n locations
gatgtgcagaagttatctgcagatgaactgctcgagcggcgtcaggagattaaggagttgatggagaagttaaagatgccatcagacgctgacttaatgaaaatcgcaattgatgacttaaataattcttccatttcactggaggatcgccaacgcgcactgcaggaacttttagttcttgttgagcccattgacaatgctaatgatcttgaaaaacttggagggctccttcctgtgattcaagagcttaataatgcaaatgaagaaatacggaccacctctgcatgggtccttggtacagccagtcagaataatgaacttgtacaaaaccagatccttggttatggagctttggcgaggttggtgaagatgggttattccacatctacagaagaagctgcaaaagcattgtatgctatatcatctttgatcagaaataatgtaaatggtcaagaagcattccattcagaaaatgggagtgcaatgttgcagcacatattggtcagcaacaatattgatgttaggctacagaagaaggcagtgtttttagtaacagatttggcagactttcagctaaattccggaatcgcgcaacttcctttcttgagtgaccgtctttttctgaagtcaatagtcgatatgttatcaaggtttgacctagaccttcatgaaaaagtaagattgaaattgcttccagttcctattattctgaacatgattgttaccattatttatctgcactcacatattttttatgagagtcattacttttgcacaatagtattgtcattttacctaaaaacgtctgtcaagctggtaattttggcagtgcatgcttaaataggcatttttggcgacacaacaaaatngttgtcattggttgaagtcttgaagatatgactagtttggagttattgcatatatgctatgtactact

SEQ ID NO: 264586 - DNA, 802 bp, Zea mays
ttgcgacgccaaccccgacccgcggccccacgacccagggcccccctgcgctcctctccatccaggtctcctcttgcccacacctcgacgctctctctctttcgccgagctcctcgaaaccctaggagcgtgcttgaccggcggcggcgaggtgatggcgatggaccctgacgcggtagcgaaggccttcgtggagcattactaccgaacgttcgacaccaaccgcgcggcgctggtggggctgtatcaggagacctccatgctcaccttcgagggccagaagttccagggcccatccgccattgccggcaagctcggatctcttcccttccaggcctgcgagcaccagatcgtcaccgtcgactgccagccgtcggggccccagggaggcatgctcgtcttcgtctccggttccatccgcaccggccccgaggagcaccccatcaagttctctcaggcattccatttgctgccggcagctgggtccttcttcgtgcagaatgacatgttccgcctgaactatggctaaaagacagccgaaaactcttgtgatgaacgaatttgttaagggcttcatgttgagacgatgaataccgactgtcgccgctactctcatctcctttgtatctcctctgttggctgattaactgttattacaagaaattgctggacttgttttttccagttgttttgaatcatgtattatggttgcatgggcaccatttcttcgtgggatgtgaattgaaacagtccaaatcaattggtgtggctattctattaattatttttttttccatttttt

SEQ ID NO: 264587 - DNA, 729 bp, Zea mays
  unsure (1)..(729): unsure at all n locations
ctcgacgtcctctctctctttcctccgagtcttctcgaaactcctaggtgtcgtgtccgactcggtcggcggcggctgagggtgatggtcgatggactccggtacgtctgtggtcgaaagtctcttcgtggagcatctactactcggactgttcgacaccataccgcgcggcgtctggtggggtctgtatcagngagactctccatgtctcactcttcgagggctcagaagttccagggtcccatccgccattgctcggcaagtctcggatctcnttcccttccaggtcctgcgagcacctagatcgtcactcgtcgacttgccagccgtcggggccccagggacggcatggctcgtcttcgtctctcggttccattccgcactcggcccccgtaggagcatccccatcaaggttctctcagggcatttccatttgctgccggcaagctgggtcccttcttcgtgcagaatgacatgttccgcctgaactatggctaaaagacagccgaaaactcttgtgatgaacgaatttgttaagggcttcatgttgagacgatgaataccgactgtcgccgctactctcatctcctttgtatctcctctgttggctgattaactgttattacaagaaattgctggacttgttttttccagttgttttgaatcatgtattatggttgcaaaaaaaaaaaaaaaaaaaaaaaaaaaaaaaaaaaaaaagggcggccg

SEQ ID NO: 264588 - DNA, 990 bp, Zea mays
ggcccccccgggttcgcccacgcgtccgtgattttgcaaataaatctttctgatagtataagttctggtgagcaaaaggatattgatagggtcatgtctacaaggttagctaatgagaatgacgctagcaggcgtctgaaatctgaatttcttatccagtttgatggggtgtcctcaaacccagatgatctagtaattgttataggggctactaataaacctcaagaattggatgatgctgttcttcgaaggctggtaaaaagaatatatgtgccactacctgatccaaatgtacgaaggttacttctgaaaaatcagctcaaaggacaatcattcaaactgtcgaaccatgattttgaaagacttgctgtggagaccgaagggtattctggaagtgacctgagagccttgtgtgaagaagctgcaatgatgccaataagagagctcggtccacaaaatattcttactatcaaagcaaatcagctgcgacctttgaagtacgaggatttcaagaacgcgatggcggtgatcaggccaagcttgcagaagagcaaatgggacgagcttgagaaatggaacgaggaatttggttcgagctgacggcggctcgcactgcctgtgcctgatgatgatcaagcggtcctatttccatctgtatatatgatttatgtctcccacgctgtggctcacaacacaaggggtcacaccatgcgcccattgatgcgtcctcgttgggctaggcagcacaacatcgacagaagcagaatgtaaaggtatacttctggcaacggcctatacagccattgagggctagtttgaaacaccgttcaagggattttcattttttcaaagggaaattagctcattttcccttgtaaaaatgaaatttttttaggaaaatggtgttcccaaactagccctaagtattgctgttgcccaagttaaacaaaaaaacgtgtctattattgggctctgtttgtttcccccctc

SEQ ID NO: 264589 - DNA, 420 bp, Zea mays
cccacgcgtccgtgggaatggaaaaacaatgcttgccaaagctgttgcatcagagggtgaagcaacattttttaatgtttcggcttcttcattgacatcaaagtgggtaggagaagctgaaaaacttgtcaggacacttttcatggttgcaattgatagacaaccatctgttatttttatggacgagattgatagtgtcatgtctacaaggttagctaatgagaatgactctagcaggcgtctgaaatctgaatttcttatccagtttgatggggtgtcctcaaacccagatgatctagtaattgttataggggctactaataaacctcaagaattggatgatgctgttcttcgaaggctggtaaaaagaatatatgtgccactacctgatccaaatgtacgaaggttacttctgaaaaa

SEQ ID NO: 264590 - DNA, 495 bp, Zea mays
caacaagcctctgccctgagctgaggatggggcacattgctgagcctaccggcactgttgtgattggctgcaaagtgctgccgatcttcaccgagcatggcggtgttgacagtgcaatgaagaagatgatggcgcataggagtgacggcaagaaggcagttgctcgggttaaggagcttctgaagcgggctgcccaggccaagcctcacagcgtcactgtcagtggaaagaaatggaagaaggttctgagcttccacgcaagggatagcgctgcggccacaaagggagggcggcaacagaagcagcacgaagaggcgataagctgcagctcgggcaagctgagcttcaagtgggacgtgggcagctgctcctcggcatcgtcggttgcgtattctccgctgtcgttgatgtctgcaccggcaaagtcctcggagcacacgctgctgacgccactgaggaaagactattgcatgtcaaggctgtcgtccataatcc

SEQ ID NO: 264591 - DNA, 455 bp, Zea mays
ctacgaacgggggccgggaaaagatcggctacagacagatgaggctctgtctccggcaagcggcggccaccaggtcacccctcgcagctaccctccgcggcaagacttctacgagcaccctcgccccccatggccggctcagcttcagccacaccacgtcgctgcagacggcgcccgggcaccgcgggctccgagcagggtgggcggtgcgcgtgctcccgctgacggaggagaacgtggagaaggtgctggacgaggtgcggccgagcctgatggcggacggcggcaacgtggcgctgcacgagatcgacggcctcgtcgtcgtgctcaagctgcagggcgcgtgcggctcctgccccagctccaccatgacgctcaagatgggcatcgagacgcgccttcgcgacaagatccccgacatcctcgaggtcgagcagatcgtcgacaccgagacc

SEQ ID NO: 264592 - DNA, 613 bp, Zea mays
atcggacagttccaccacattctggcgccgccttcgtctgatcctggaggcaattggagcggctgcaagtcggatcctggtggatgcagcgcaacacagatcgcaaccctccaaggactgagaagtggaatgttgacatctctgagacagtctgaaagcaaaccgaaggcaggggtgttcatcaactcctgcttcgcgcattgctagagtgagctacaggacacatggttcgcaccaaattctccatccatatataacaagaaaattgcagaggtggtaggtgattggtactttgaaagaggagctgacgtggagattgactgcgcctatccctgtgattcacagtcttgtcgcacccttataccaattgataaggaactgaggatgtattaggagttcggcagacgattatacccaattatcatcataataaaaaccactcttctaaattgttgatgatgttatgttacttgcatcagatagcaaacccccctattgtacaatctgttggtggaaacatgtttgtgttgtgtgttccaggttgtctgtttcttggtagccttttttggctgaattggtgatatacacaaactctatttacttgttagcctat

SEQ ID NO: 264593 - DNA, 922 bp, Zea mays
atcgtatcaaaggaaaactgaatttttatttagcctcaggattgctagaacaagttccggacctggaaggtcagtcagaaattccgaaggacagtcagggttcagctgacaggagtggaccgccaccagttttacgagcacagcccaaatctaaaccggaactcccagaaaacgctggtacatcaggagaaggaacttctgattccattcgtactaaagggcccaacgcccatccaaccgaagtttctgaaaaggtattggctaaatcaaagcagcgtgccagagccagaaggagattggattttctgtcaaccccagtggagctcaaattgtgcactgctgcggcaagttgtcaaaggcctccccagaaaatggatcaaccgggtccagtggccgagaacatctctccgtcagatgcatgtcaagacatttcacagaatgttccaccagagcgtgcggatgccatcacaccgctggctgctagtaaccaccattcaccagcgacaccagttgatccattctctctcgaaatgcatgaggcgaacgcatcagatcttctggacatgtcctactgtgatggcttgataatcgattctcctcgtgatccacatgacggtagcctcatgtagaagaaaaagttaccaacgcaaaatgacacttttaatagcaagagacgatggactgtcttcctgaaatccagcaactccctgtataaaaatcgtgttgcatgttggatggaacttgtatcttgtcttggcaaaaataattgcattgctgttctgttaatgcccctaactggtttggagagcatttttcttttgcaggtttgaagagcattttgaggggtgttgtaggtcaaattgaacaccatactcgaatgactcgtgttgttggtaactgaatcaataaaatatatgcaagt

SEQ ID NO: 264594 - DNA, 719 bp, Zea mays
agggatcccaccatcgcagcatgtactccagttgccacactgccatttctcgctccacactctgctgtggtacctttctgtgaaggggtctacaaatacgccacagcttgggacgctttgagaaaagatgctgcagtattaactcaagatgtaacacttttggcagaagatgctgcacagaaaagcgggatcaccatcgaacaagtcagggataggttacggtcagtgttgtctttgactgatgtcactcgatttccagtcccaaagaacccacaggcggtcatctttgttggtgcaacggacgatggttatattcccagacattcagtgatggagctccagaaggcatggccaggctcagaggtccggtgggtaacaggtggccatgtctcctctttcttcctccacaacgatgcattccgcaaggccatcgtcgacgcccttgatagattgtaacaccagaaggtgagagagaggccatccttgtgatggcactttatgttgtgtgacatttctgaacttggggttgcggcatgagctgaaccctctgtaactgccaacctaactgctcttagtgacgctgagattggaggtagggtggctgtacatgacaattgtagaatgtagcaccccattatttggcaattgttctgcaaaatatttgtttgtcaccatgtatcaatttgaatgctacatcttctgattgtctgacatgcatg

SEQ ID NO: 264595 - DNA, 630 bp, Zea mays
ccagcacccgaacggccagctccagccccaccagagaaatacggcgtaaacgccgccggggacaaacccaggcgaccggggtgcctagctcgccgtttcttttcgccttctcctcgcaatttcttaggatcaacgccctactacacgacgggggttttccccttcggccgccactccgtcctttcgcagcctgccgccggcgccatgctgtacatcgtgggcctcggcctgggcgacgagcgcgacatcactgtgcgggggctcgatgccgtacgcagctgctccaaggtatacatggaggcatacacatccctcctctccctcggcctcgacccggccgcgctcgccaacctggagaagctgtacgggaaggagataacggtcgccgatcgggagatggtggaggagcgtgtcgaccaggtgctaagcgaggctgccgacactgacgtcgccttccttgttgttggcgacccgttcggggcaactacacatactgatctggttgttcgtgccaagaaaatgggagtagaagtgaaggtgatccacaatgcatctgtcatgaatgcaattggagtttgtgggctacaactttaccgctatggagaaactatctcaataccattcttcaca

SEQ ID NO: 264596 - DNA, 364 bp, Zea mays
ctgggcgtaccagcgccaggaggcggagcgcgcgtccgcgtcggacttcaagaacgaccagctgcctctggcccggatcaagaagatcatgaaggccgacgaggacgtgcgcatgatctccgccgaggcgcccgtgctgttcgccaaggcctgcgagctcttcatcctcgagctcactatacgctcctggctccacgccgaggagaacaagcgccgcaccctgcagcgcaacgacgtcgccgcggccatcgcgcgcaccgacgtcttcgatttcctcgtcgacatcgtgccccgcgaggaggccaaggaggagcccggcagcgccctcggcttcgcggcgcccgggaccggcgtcgtcggggct

SEQ ID NO: 264597 - DNA, 1033 bp, Zea mays
ggaaaaaatccatttccctttcttctgaagtcgtcctcttcttcccgtcgcttcgccgtgccgcacctgcgaggagaggagacttcgccgcgaagctcaccatgatctcgccggagaggagctcgtcacagagccagcggtcggcggcggcgggggcgccgttcctgtcgatctccgtcacggatcccgtaaagatgggtaccggcgtgcagtcctacatctcctaccgcgtcatcaccaagaccaacctccctgaatttgagggaccagagaaaattgttattcggcgctatagtgattttgaatggttgcatgatcggcttgctgagaggtacaaaggcatttttataccccctcttccggagaagaatgctgttgagaaattccggtttagcaaggagttcattgaattgcggcgtcaagctctggatttattcgttaacaggatagcttcacaccctgaactcaagcaaagtgatgtcttgaggacatttttgcaagcagatgaagagataatggatagggcaagatcttatgagactggtatttttaagaaaccggcagatttcatacagatgtttaaggatgtgcagtcaaaagtcagtgatgttgttctgggaaaagaaaagcctgtggaggaatctactcctgaatatgagaagcttaaaaattacatatttgagctagaaaatcatttagcagaggcccaaaaacaagcataccgtcttgtgaaaagacacagagaacttggtcaatctttggcggactttggaaaggcgattaagcatttaggtgcttgtgaaggagatttgatggaaaaggtgttttctgaagttggttcaaagtcagagatgttgtcaataaagctacaaagagaggcagacaaccttctctttaactttgaagaacccttgaaagattatgtgcgtgctctacaatctataaaagccactatgctggatcgagctaatgctttcaagcagcactttgatttggatcaagagaagaagtattaaaagcttaatcttgaaaa

SEQ ID NO: 264598 - DNA, 2330 bp, Zea mays
ccaaggagtttcccgaatacgaggaggacctcgccgagcctcttgcggaagctgcgacgacctttacattggcagcaactaaataatggactgagttagctgacaataggccatttgattctatcccatgtttggtgcatgtagtgtatcatgtttcgtttaccatctctattgtcatgatcagagctctggctatcttttcaagaccatgctgagtgtacagaactcggacaatctttggcggacttcggaaaggcgattaagcttttgggctcttgtgaaggagatttgatggaaaaggtgttttctgaagttggttcaaagtcagagatgttgtcaataaagctgcaaagagaggcactcagagcagatgggcagacacaattgagccatgaaatagctctggagctaagtcagaggagtgctgctgctggactaaggccgattggagcagtggtcttcatgcaacggggtgtcctgaaggtttgcttgaggactactgacagtacagttaatacatcagagattgcaaaggcatatggcggaggtggaaaacgaagttcgagttcattcactctaagaatggatgagttcaacatctggacttcagtgaactcatgaattgaactggagaggtcacatagtgttcatactgtgggaactcgcaaccagctcatctgggcatggattccctcagtggtgaacatgtgaagatggggtggtctttttgtgctccggtatgagaggaaggaaaacaaaatcttagtctaacctaccatgttgatatgagcttacaggagaataatctcttcgatatgaatgactggagagcaatttggaggcataatgcttaagccgttcgagagaagatttgatgcctttaaatgaaaggtttgctggtacatcaaaagacgtattttatgctctttctaatctttctccagtagacctatgtgcttaattttagagatgataagggtggtgcgggccgaagatctgtcatactcctaggggccaattatagcttacacttatgttgttattagttttgaatgctgaacatacatggagatgggtagctcagctcagcttggatataacttggtttctatccaaactaatactttgctccatagggaatgcatctggcaacggaaattgttgtcaagctccagtagcagaaaggatcatcttcaattattgtaatcctgctccttaataatacattcttggatcttgctctgggcttaaaaaatctgcatcaccaaattgttcctcgttgcgaacatttatgtaatacagagccttagaaactggaaatgtgtattccattccggtaatttgggaatgatctgtgttaaaatcctttttaagtgtcataccacgcactatttttctgttcctcaactctatcgatcccataacctatttctgttaactggttactaaggacatgtacaatcccataaccaaattggtgggtatgcaatgcgtcaatgaaaaaaccatttcttcagtcctgtaatgttgttccgattgcgtcaatgaaaaaactgttatttttgaccggggagatggtagcactagcatgtggggattaaagttcctaaatgttcagtactgtcctaaacacttgttttatcttttttgagtggaagtccgacgtccgagaggggctcgccattgggcttggcatgggcacagtcatgctgctcctcttctgcggctactcgctggtgatttgatatggctctaagctgatcctggagatggtgtacaccggagccaaggtcacaacatgatctttgtagtcctcactggttctcttttctcaaattgaccatggtgttgtaaatttgatcaatgaagaagattcaagaattaccgttttactggattgccatgggatttcgccattcagatttccaatgcaaatgatgaggtcgtttatcactgtggttcaagaaaactacccgaatcgtcttggggtattgtttgtcatccgccttcctccagttgtcagagttattgcacagacatttcttcaaattgcaatatcacatggtatccgtggagatgaggacgacattgcctccaagtctgctccaccggcatccatcgacggtgcaagatccagcagatagattgatggcaaagaggacgactccatgtccaggcgtactccccgccttgcatcgagattgctaggacataatcgaagggtatacagggaggagaactgaccatcgctcttcaataccaaagagaacatcgttgaccaccatagacattactgcatgcaagcgcttttagaatatcactgctgcgag

SEQ ID NO: 264599 - DNA, 840 bp, Zea mays
ttgattagttacgcagattttatgttgctgcaaatggcgactttcaaagtttactcgcttcggttaagaagacaattcattggagggaaacatttcacatacttacattgcaagaacttgatagatggtctcacttagtcttttggcatgggtttgacacgatgcttcggccttgtttagtagttcgtcttggacttgcatgctctagcatacctcctcatgatagaccccgtttcgggcaagcagtagtttctcaaattgaccatggtgttgtaaatttgaccaatgaagaagattcaagaattaccgttttactggattgccatgggatttcgccattcagatttccaatgcaaatgatgaggtcgtttatcactgtggttcaagaaaactacccgaatcgtcttggggtattgtttgtcatccgccttcctccagttgtcagagttattgcacagacatttcttcaagatacaaaccaaccaaggctgactacaagttaaagatgctctgtaaaaaggaaggatcagtttgactatatctttttgctggtagattgcaatatcacatggtatccgtggagatgaggacgacattgcctccaagtctgctccaccggcatccatcgacggtgcaagatccagcagatagattgatggcaaagaggacgactccatgtccaggcgtactccccgccttgcatcgagattgctaggtcataatcgaagggtttacagggaggagatctgaacatagctcttcaatcccaaagttaacatcgttggttaccataattcttactgcttgcaagcccttttagaatattactgctgcgaggtt

SEQ ID NO: 264600 - DNA, 523 bp, Zea mays
tcgcccacgcgtccgcttttttgagtggaagtccgacgtccgagaggggctcgccattgggcttggcatgggcacagtcatgctgctcctcttctgcggctactcgctggtgatttgatatggctctaagctgatcctggagatggtgtacaccggagccaaggtcacaacatgatctttgtagtcctcactggttctcttttctcaaattgaccatggtgttgtaaatttgatcaatgaagaagattcaagaattaccgttttactggattgccatgggatttcgccattcagatttccaatgcaaatgatgaggtcgtttatcactgcggttcaagaaaactacccgaatcgtcttggggtattgtttgtcatccgccttcctacagttgtcagaggtattgcacagacatttcttgaagatacataccaaccaaggctgactacaagtgaaagatgctctgtaaaaaggaaggatcagtttgactatatctttttgctggtagattgcaatatcacatgg

SEQ ID NO: 264601 - DNA, 781 bp, Zea mays
cggctcgagcagatgatgaggtcatttgtcactgtagctcaagaaaactacccagatcgtcttggagtattgtttgttgtccgccttcctccagttgtcagagttattgcacagacatttcttcaagttttgaaaccatctacgaagcagaagttacgttttgagggagattcggacaagaagacgttggcggagttcttgcaggccgtgccagcgtttctgggcggtaaatgcagctgcccacgatgtgagaagcctcgtaatagttcagtggtgcaggcaggggaagggagcaagaaccagcctcgcttggtcagcgttgatgccggatcacctgtcgtggacttcgacttcgatgaagaagagatcccatcaccttatagctgcgagaacgccatcagggctgcgataatcggcctgctgatggtgtgcatcttcatcgcgtttttggctgggatgaacgaccctgcatccgttccgcccagtgcctgagagctatggaatcgcctaatctcccatagtagagcttagattgtcagttgagtatatacacatatgtgttgctatttaggatgctactagggtgttgtaatccctggcagcttctttctcggttgtcgtcagatcgccatacagtgttctctcctaatgtgagcggagcagatgaataaatatcctgcgtgtggcaaatgttggttagcagttcaattagcccttcgatagtgtcaaaaaaaaaaaaaagaaaaaaaaaatattataacccaaaagtaaaatagccaac

SEQ ID NO: 264602 - DNA, 394 bp, Zea mays
gagtggtggccgtgcgtcgagcctgtctgccctgagggctggctgatttgctcggatctgcggtctgcctgcctgtgcgtacaacagacagggccagtgccgccggcagagtggtagacaacagactgccatgcgtgcctcacgttgtatccatggagatgaggacgacattgcctccaagtctgctccaccggcatccatcgacggtgcaagaagcaactggtgagctcactgagccctcaatggtaggtggccggacctggtggaccgaagatcctgagccgttctgcataccagcacatggtaaatgaagtgatttctagattgctctcatttcaggctttgctgaatatttcgttctccatggagttatggaggcatatcccgtcttgct

SEQ ID NO: 264603 - DNA, 579 bp, Zea mays
cggcggctgaggaggacgagcaggaggtgaagagggaggagctcaagcggtgcctggtggagacggtgtacggctccgacctcggcttccgggcgtccacggaggtcagaggtgaggtcgtcgagctagtcacccagctcgaggcggttaaccctactactgctcccgtcgagtcgccggatctcctcgacggcaactggatcctcatatatacagcatattctgagcttctgcctattctagctgctggggcaacacctttggtcaaagtaaagcagatatcccaagaaattgactccaaaatcatgacgatagtcaatgcttcgacccttacgactccattcgcttcattttcattcagcgcaaccgcctctttcgaggttcaaagcccatcaaggatagaggtccaatttaaggaggggagctttcagcctccgacaatatcatcatccgtggatctacctcaacaagttgatatatttgggcagaagatcagcctggggccagtccagcaggcactgaatccattgcagcaagcatttgctagcattgctgggtccattttctggcagccacccc

SEQ ID NO: 264604 - DNA, 674 bp, Zea mays
  unsure (1)..(674): unsure at all n locations
attcccgnntcggccggcgcggacagatcttttcaaggacatgcattgcagcaagaagaaaggtttttctgaaaatgtaaagaaagcaattgttgacatggaagcaagggtgacaacaccagttgaggatggacaacaacaaaagtctcctatagaagttgtttctgaagtgctatggggctccagtttatttctacagaatgttggtctgcaagataactccaagaaaagctccacaacaactgtttttgctaaggttcaagaacttcataatcaattggagtctgagaggctagaaaaagatgggcttcaagaagaagtagaaaccttaaaggctcaggcacaggcctcaaaggagaccatggacaatatgaagagatcgatggaagaaaataacagtctcctccgtcaactgttgagcttcaatcgaagccaaacgtccccatcttaagtctgctatagtatcatgttatattagttctggattcaggttttataaatttggaatatgtttaaaactttcatactttgagttgaagttataggatttcctttgtattttaagttacatgatctacaatcatatgatttgaagttataaaagtatctcttgtatgaattgtgtgaatgttgaactaaataattcaatgttttggttattagcatgtgatttc

SEQ ID NO: 264605 - DNA, 1135 bp, Zea mays
cggacgcgtcatctcgtcacttcgcttccccacttctccattccattgcggttctgcgagcccctacctccctgtggtgcttggccatggcggactaccacttcgtgtataaggacgtggagggggcgagcacagagtgggacgacatccagcgccgcctcgggaacttgcccccgaagccggagcccttcaagccgccgcccttcgccccgaaggttgacgccgacgagcagcccaagtccaaggaatggcttgacgtgcgcgagcccgaagagctcgaggaactagaggacgatctggatgacgaccgcttcctcgagaagtacaggaagatgaggctcgcagagctgagggaagccgcaaaagccgcgcgatttggtactatacttcccatcactggctccgacttcgtgcgggaggtgtcgcaggcacaatcagatgtttgggttgtggtcttcctctacaaggatgggatacctgaatgtggattgcttcagaattgtttggaggaattggctacaagatacccagcgacaaagtttgttaaaattatctccacggactgcatccccaactacccagataggaatgttcctacaatactggtgtataacaacagtgctgtcaaagggacttatgttggtttgcagaagtttggtggaaagagatgcacacctgaatctgttgcattagccctttgccagtcagacccggtactgaatgatgggcatggtggcagcgattcatctcgggacaatgtcatagaaggtgttcgcaggaagttcatcgagaaggttgtggcccagcatgaagagcgggaagaagaggacagtgactaagcttatacttgtgtttgttttccgcagctggcggatccaatttggttccaatgtttactgatcttatgtgatttttgtgggtgaaatttgccagagttttctgatacctggctgtgcggctgaagtttttgaaagttcacgggtcttattgcctacctttcagctgtaagatagctccattattatattgttaagagatcagagatgattagtgcacttgtataattgcatgagaaaaaatccagccaaactttgaatccccagcgtttcactatcttgaacatttatcacccccc

SEQ ID NO: 264606 - DNA, 1011 bp, Zea mays
tcgtgttgttccaacattaacccccagcggccaggggtcgggcactccctgaggccctgcccgcatcaccaccagtcaccaacgcccaccgggcctcgtccctcgtggcggcgactgggcggccgtcgctgccgccctacgccaggtgccgaggcgaccttcaggcccttggctggcgacgagcaccagtgcagcaccaccaatactctgagcctggctgccgaaagtgccttttggggttcttgtaatcttgttacattaggattcatttttgatgacttcatcaagaagcaagagcaagagcagaagtaggagccgcagtcgcagcaggagcaggagccgcagtcctcggcgaagagatagattgcgcagtgaacgtgcaccccaccgcagtcgcagccggagccgcagcccataccgtcgcagagaacggcgtggtcacagggattttgcatgcaagaactgccggagacctgggcacttcgctaaggagtgtccatctgcgcctatgtgcaataactgtaaccttccaggccactttgcagcagaatgcaccttacaaactgtttgctggaactgcaaagagtctgggcacattgccagtgagtgcaagaacgaggccctatgccacgcctgcaacaagacaggtcacttggcacgtgactgccctacttcaggtgctaacgtcaagctatgcaacaaatgctttaaatcaggccacatcgccgttgactgcaccaacgaacgggcctgcaacaactgccgtcagccagggcacatagctcgggagtgcaagaacgacccggtctgcaacctgtgcaatgtctccggccacgtcgcacgcgtctgcccaaagacgactctggcttcagtgatacagggcggcccgttccgagatatcctgtgccgcatctgcggtcagccggggcacatcagccgcaactgcatggcgaccatcatctgcgacacatgccgtgggagggggcacatgtcttatgagtgcccttcggc

SEQ ID NO: 264607 - DNA, 333 bp, Zea mays
cgcgcctcgcggcggcaactgggcggccgtcgctgccgccctacgccatgtgccgaccaggagccacagtcgcagcaggagcaggagcaggagccgcactcctcaccgaagagataggttgcgcacgtacgtgcaccccgccgcagtcgcagtcacagcgggcgccgcagcccataccgtcgcagagaacggcgtggatacacggatctcgtatgcaagaactgccggcgacctgggcactttgctaaggagtgcccatctgcgcctacgtgcaataactgcacccttccaggccacttcgcagcagaatgcacctcaaaactgtttgctgga

SEQ ID NO: 264608 - DNA, 445 bp, Zea mays
cgctgttggccggtagccgctccttctcttccggcaccgagagggacttgtgacccaagggtctgttcccgggggatgtggtgtttgcgctcgtcgatgatctcaggctcaaccactccaaggacccataggccatggggttatgcaatccaaagaaggaaattcctgcttgagccaattacagaaggccctgatatttgtcaaattgatggttgtagtgttaaattggaatacaagaggaggcaagtcaaatatggtttgtgtgacagcacgttactaacttactctactatatctgcatgagaaaggatgaaccctgtttgcatgtatactaattaatctacggattcattaatgggtgaataagattttatttaattatgacagcaaacgtgacatgccattacaatattcgttatgccaaaaaagtagttgcttatagtta

SEQ ID NO: 264609 - DNA, 858 bp, Zea mays
gtgagttagaggaggtgctggaagctacacagccagcagagtttcagaggtgtatggtgccacttttccgtcagattgcccgctgtttaagcagttctcactttcaggtggcagagagggctctctttctatggaacaacgaccatatcgagggtttgatcaaacagaacaacaaggttatactgcccataatcttcccagcgttagaacgaaacacgaaaggccactggaaccaggccgttcaccccgtcggcccacccgtccgggaaaatattcatggaccatgaccccgcgctgtttgaggagtgtcacaagaagtttgaggaagaggaagcccaagaagctggcgttaggtcaagacgggaggctagatggaggcgcctagaagaaatcgcctcgtcaaagtctcctcagtgaagtagcgcgtcctcctgaggctgtagttcttcatcagtagagttcccctagctatcttgtcttggggactttgcatattagcagctcttttggacaggatcaagtaaatgctgatgatgtagttgctggatgtcttcttgccgcctgttacttgtgaccgaacgttctacaggccgacatgtaaatacgaggcacatgatgggctgtgaagcttcaacagagcctcggcgggttctctttgccgtgtgatccactgatgacagtgtcggtttcatcatcataggacaaaggaaaggaggtaaaatggtctttttccgggtcaatgtcttgatccaaggactgttaggagcacttgaaagacgaggaaggaggcaggtagcacttgctcttgctgatggtgattatgctgaaatgtaatacgtatgcatcatacataagcat

SEQ ID NO: 264610 - DNA, 1144 bp, Zea mays
cggacgcgtggccgcacgcgtggccagtcttatggtgtcataccagggctcatcaagctgagcggctaaggcatggacatacacactttcttgtaactggagatgtttaccgtagggattccattgattcaactcactatcctgtcttccatcagatggaagggttccgtgtcttctctcctgatgaatggtcagggtctcgcatgggtgggacagcctcgcctccggcagaactcaagaaaacactggaaggcttggcaagacatctatttggtgctgtagagatgcgatgggttgacacttacttcccatttaccaacccatcctttgagctcgaaatatactttcaggatgattggttggaggttttggggtgtggagtcaccgagcaggaaattttgaaaagaaatggcaggagggaccatgtggcttgggcctttggattgggattggagcgccttgcgatggtccttttcgacattccagatattcgactattctggtcgaatgataaacggttcacgtcccagttctcagaaggcaagcttggtgtcaagttcaagccattttcaaagtttcctccttgttacaaagatatgagtttctggatcaatgatgcatttacagaaaacaacttatgtgaggttgtcagaggaatagccggggatcttgttgaggaggtaaaacttattgataatttcacccaacaagaaaggcatgacaagtcattgctacagaatagcatataggtcaatggaacgttcgctcacagacgaggagattaacaatcttcagttgaatgtcagggaagctgtgaaagataaattgaaagtagagttgagatagcagcagctaattatgctgtcatagcatggactaaattttgcctgtctttatatgtaaatccatttaaaaggatttttttgtatctatcaagaaaatgcaccatttgtttctgtatagatcacgttttccgttatgtttaggggagagtaaatagttcccaatccaattggcactcatcaaatcgtgtaactcataaagatgacgtgctgtacgctgctcgctaggtttttttttgtgctgttagtgtaggataagatgactctatgtttgcagtagtcagagctgtgccattgtcctc

SEQ ID NO: 264611 - DNA, 2122 bp, Zea mays
  unsure (1)..(2122): unsure at all n locations
tccacgcgtccggtgctctctctcgaaccttcttccaaagcacccgaaccctagtgatctcggaaccctagccgcgcgcggatctcggcttttccccttcctccacgccagccatggacgaggacttcgagatgcctcccgccggcgccgatgagatgatgggcgacgacgagatgggcgacttcggcggcgacgagggcccggtgatgaaggtgggcgaggagaaggaggtcggcaaggaggggctcaagaagaagctgctcaaggagggcgagggctgggagactcccgaggtcggcgacgaggttgaagtgcattacacgggcacgctccttgatgggacaaaattcgactcaagccgtgatcgtggagaacccttcaagttcaagcttggacaaggtcaagtgataaagggttgggatcaaggaatcaagaccatgaagaaaggagaaaatgctatttttaccattcctccagagctggcttatggagcatctggttcacctccaactatcccacccaatgcaaccctgcagtttgatgttgagctgctttcatggaccagtgtcaaagacatttgcaaagatggcggcatattcaagaagatccttaaagagggagagaaatgggagaacccaaaggatcctgatgaagtacttgtgaaatatgaggcccgtctggaagatggtactgttgtatccaagtctgagggggttgagtttactgtgaaagatggctacttttgtcctgccctggccaaagctgtcaaaaccatgaaaaaggcagagaaggtgctccttacagtaaagccacaatatggatttggtgagaagggtagaccagcagctggagaggaaggtgctgtgccgccaaatgcttcgctgctcattgaccttgagttgatttcatggaagactgtcacagaaattggggatgataagaaaatccttaagaaggttctcaaggagggagaaggttatgagcgtcccaacgagggtgctgttgttgaagtcaaaattatcggaaagcttcaggatggcgcggtgtttacaaagaaggggcatgacgaagagccatttaaattcaagaccgatgaagaggaagttattgccggtcttgatcgtgctgtgttgaacatgaagaagggcgaggttgctcttgtcacaattcctcctgaatatgcatttggttcaactgagtcaaagcaggatcttgctgttgttccacctaacagcacagtaatatatgaagttgagcttatttcatttgtgaaggacaaggagtcgtgggacttgaacaatgaagagaagattgaggctgctggtaagaagaaagaggaagggaatgcattgttcaaatcgggcaaatatgctagagcttccaagcgatatgagaaggctgccaagtacattgagtacgacacttcgttcagtgaagatgagaagaagcaatccaagcaactgaagatcagctgcaacctaaacaatgctgcctgcaaactgaagttgaaggattacaaggaagctgcgaagctttgcaccaaggttctggaactagacagccaaaatgtcaaggctctctacaggagggtgcaagcttacattcaacttgctgacctagagctagcagaggccgatatcaaaaaggcactggaaatcgatcctgacaacagggatgtcaagttggaatataagatcctgaaggagaagatcaaggagtacaacaagaaggacgccaaattctacagcaacatgttcgccaggatgacaaagtaactgtcactgccctaagtcagcgtaactttttgtggtggagggatgttgtggtgaaccgaagggattaaaaaccccgatttctcctcccaaaggacttcgcccgttgcttaacttctcccttttcgcatactttgtagtcaattagtgggcccggatgcttggatatgtgaaactgaggaacatgtccttcgaggattattattggttctgaatttttatgttttcgggttcttgttaggcccattgaatgttccccctatataattttcggacccatgtttttgataaacccgggtatccccttaatatgtcaagaaaaaanntttttttaaaaaaaactagcanna

SEQ ID NO: 264612 - DNA, 700 bp, Zea mays
  unsure (1)..(700): unsure at all n locations
cccacgcgtacggtacgacacttcgttcagtgaagatgagaagaagcaatccaagcagctgaagagcagctgctacctaaacaatgctgcctgcaaactgaagttgaaggattacaaggaagctgcgaagctttgcaccaaggttctggaactagacagccaaaatgtcaaggctctctacaggagggtgcaagcttacattcaacttgctgacctagagctagcagaggccgatatcaaaaaggcactggaaatcgatcctgacaacagggatgtcaagttggaatataagatcctgaaggagaagatcaaggagtacaacaagaaggacgccaaattctacagcaacatgttcgccaagatgacaaagtagcttttggggtggaggatgttgtggtgaagcgaagggattaaaaacaccgatttctgctgccgaaggacttcgcccgttgcttaacttctcgcttttcgcatactttgtagtcaattagtgtgcacggatgcttggatatgtgaaactgaggaacatgtacttcgaggattattattggttctgaatttttatgttttctggttcttgttaggaccattgaatgttctctctatataattttcggacacatgttcttaataaaccccgggagcaaaagtttttgcttaaaacaaaaaaatatcaanaaaaaaaaaaaaaaaaaaaaga

SEQ ID NO: 264613 - DNA, 415 bp, Zea mays
ctgagtacggtcggaatccgggcgaccacgcgccgtaacgcgccgggaccgtggttgctgaaatatgaggcccgtctggaagatggtactgttgtatccaagagctgagggggttgagtttactgtgaaagatggctacttttgtcctgccctggccaaagctgtcaaaaccatgaaaaaggcagagaaggtgctccttacagtaaagccacaatgtgagattccatttcaagatggatttggtgagaagggtagaccagcagctggagaggaaggtgctgtgccgccaaatgcttcgctgctcattgaccttgagttgatttcatggaagactgtcacagaaattggggatgataagaaaatccttaagaaggttctcaaggagggagaaggttatgagcgtcccaacgagggt

SEQ ID NO: 264614 - DNA, 788 bp, Zea mays
cgccgcctgcgctctccccctcgcgagatagacaaccctagctcccgtctccttgcttaccctcctctccaacccctctccgatctctataaaagacccgaatttcgaattccccctcgaacccgcgacccgcgcgctcctttcccgcccatttcggcctctgattcggcgcggattcgcggcgcgggagccgccgaggttgcgtgcgtgattcggatggcggagccggggctcgaggacagccagccggtggatctgtccaagcacccctccggcatcgtccccacgctccagaatattgtatcaacagttaatttggattgtaaacttgacctcaaagcaatagctttgcaagcaagaaatgcggagtataacccaaagcgttttgctgcagtaatcatgagaataagagaacccaaaaccacggcactgatatttgcatcgggtaaaatggtatgtactggagctaagagcgagcagcaatctaagcttgcagcaagaaagtatgctcgtattattcagaaacttggttttccagctaaattcaaggactttaagattcagaatattggtggctcttgtgatgtaaagtttccaattaggcttgagggccttgcctattctcatggtgccttctcaagttacgaaccagaactctttcctggccttatctatcggatgaaacaaccaaagattggtcttttaatttttggttcaggcaagattggtttgactggagcaaaggtgagagaggagacctacactgccttcgaaaacatctatcctgt

SEQ ID NO: 264615 - DNA, 380 bp, Zea mays
gaggagttgtcgatgaaagtttctgaaatggaggtggagatgctggatttatcagctgataaaagagaactgtcaaatgcatatgacagcatgatgacagaactagaatgcacaaaattaaacttagattgctgcaatgaagaaaaacagaagattgaagtctctctggaagagtgcagtgaggaacgcaacagaataagggtggaacttgacctgattaagaagttattggagaatatggcattaactgacaataacacatcacatgatagttctgaatcatgcacccttggaacaacgtgaattaggcattgtcttgaaaatggtaaggcggaccctgaataaaaggttccaccaattccaccaaaattggattaagg

SEQ ID NO: 264616 - DNA, 853 bp, Zea mays
ggcgaaaccacgcactaaaacaccataccgcgcgtgagagctcgtcgtcgtttccgacggtgaagccacgcggaggatagccatggccgccttactccaccaagcggctaccccgaccgcaaaaccaccccaccgcccatgggctctcaactccacacacagccgcctctcaccgctctctaaacgacggcgcgccccagccatccgctcggcggccacggacagcagcttcagctccggcgagacgccgtccaagaagaccacccggaaggagaagcaacaggagcggcggcggcagcaggacgtgcaggaacggcagcagcagctcctggggatggaagaagcgtccctggcgaagcaagacggcggcggcagcggcagcaccagcaacggcgaggttgacgacgacgacgagcttccgcagcccgtgttcgaccgcatcctgcgccggatcgcgttcacggtgggccttcccatggcgtcgggcgtcgcgctgctcaacgtgtacgacgcgctcaagcgcggccagggggtggtggtgccatcgtgggtgccattgctgaccatcctcgtcgccttcggcacgtcggcgctgggtatcgcctacggcacgctgtcggctagctgggaccccgacaaggaagggtcgctgctcggcatcgacgaggcccgggccaactggcccgtgctgtggcaggaagagattgagaagcagaaggcaaagcagaagaagaaatgaccggctggacatgagactgaaaatcttgcgcaccttgctactgatcatgtaatattcgttgggggtatcgatcctccctttcagtaaaaagaaaatataaattagctgagtaat

SEQ ID NO: 264617 - DNA, 1229 bp, Zea mays
gcgggcctctgtcagctcacagctcagtcctcttcaaccccgtttcgccgcccctagcccaaatcccccacctactcgccgccggcgccgtctcagcctcatccttctccgctagccatggccgccgcgggtcccgggctctactccgagatcgggaagaaggccagagatctcctatataaggactaccacacggaccagaagttcacgctcaccacctacgccgccaacggagctgccattactgctgcaagcacgaggaaagatgaagctatctttaatgaaatccagagccagctgaagcacaacaatgtgactgtggatgtgaaagcaacttcagaatcaaatgtgataactacaatcacagttcatgagctgggcacaccaggcttgaaggcaattttatgcgttcctttcccgtaccagaaatctgcaaaggctgaactccagtatttgcaccaccatgctggtgttgctgcaagtgttggcctaaatgcaaaccctgttgttaacctttctggtgtattcggaactaaagctattgctgttggcgctgatgctgcatttgatacttcttctggggacttaaccaaatacaatgctggactgagctacacgacgcctgactttgttgctgcagcgactttgaacaacaaaggagacaacattgccgcttcctactaccactcggtgagtccaaccacagccgtcggaggagaactgagccacagcttctcgaccaacgggaacaccatcacctttgggacgcagcatgccctggaccctctgaccactgtgaaggcacgcttcaacaactacggcatggcaagtgcactgatccaacacgagtggaggcccaagtcactggtcaccatctccacggaggtggacaccaaggccatcgagaagagctctaaggttgggctctccctggtcctcaagccctgaggtcaccagcttctgcttttgggatgttaggtttatttttatttttatcagcagctgaagtccagtaaacaagcttggactaaacttgtcaactttggtgcccatcccataaactcaattcgttgtctgttaccatatcctaaactacctgagaggtttatgttacaatttacgtcgtgcttctgattctgggcgctgtctacttatgaaaaacaaatatgaagtgtaatttaaggtaaaaaaaaaaaaaaaagggcggccgcccgggaattcggacggta

SEQ ID NO: 264618 - DNA, 1061 bp, Zea mays
gcgtgcgcccacgcgtccgtcgacgcgtcctttcacgcttccggatttttttaggcggctgctggcctgcctgtctccactggaagctccggattacgtaggaaaggggcgggcggcatgaggatccagtgcgacgcgtgcgaggccgcggcggccacggtggtgtgctgcgccgacgaggcggcgctgtgcgcgcgctgcgacgtggagatccacgccgccaacaagctcgccagcaagcaccagcggctcccgctcggcgacgccgcggcgctccccgccagcctcccgcgctgcgacgtgtgccaggagaggccggccttcatcttctgcgtcgaggacagggcgctcctctgccgcgactgcgacgagcccatccacgtccccggcacgctctccggcaaccaccagcgctacctcgccaccggcatccgcgtcggcttcgcctccgcttcgtcagcgtgcagtgacgcctgcgacgcccacgacgactccgaccaccacgccccgcccaaggccgccgtctcctccgcggcgcagcaggtgccctcgccgccgcagttcctgccacacggctgggccgtcgacgagctcctgcagttctccgactgcgagtccagcgacaagctgcacaaggagtccccgctcgggttcaaggagctggagtggttcaccgacatcgacctcttccacgagcagacgccgaaagccggcaggagattggccgaggtaccggagctttccggaacccaggccgcgaacgacgcggcgtactacaggccggccaaagccactgccactgccggcgccggggtgcgccagagcaagaaggcccggaccgaggtcaccgacgacgaggaccacctcatcgtccctgatctcggctaaaataaaagaaagggcacgagttttgtttcttctcctgctgtgtgtacaaccagtgtcatgtgtcgtgcatctttgactgtagtattgcccagctgtgaacatgataactctaagcacactttgtgtctttgttgctacgctagtagcagtctaagagaccctttcatgttttt

SEQ ID NO: 264619 - DNA, 1220 bp, Zea mays
acttgtgtgccggggcggaatggcccggaggcgggcgtgatgcgtgatgcgcgctgcgcgatttatacgcgccaaccacgccagttgctcgctctgctttgctcccgttcccatgctgatttttttaggcggctgctggcctgcctgtctccactggaagctccggattacgtaggaaaggggcgggcggcatgaggatccagtgcgacgcgtgcgaggccgcggcggccacggtggtgtgctgcgccgacgaggcggcgctgtgcgcgcgctgcgacgtggagatccacgccgccaacaagctcgccagcaagcaccagcggctcccgctcggcgacgccgcggcgctccccgccagcctcccgcgctgcgacgtgtgccaggagaggccggccttcatcttctgcgtcgaggacagggcgctcctctgccgcgactgcgacgagcccatccacgtccccggcacgctctccggcaaccaccagcgctacctcgccaccggcatccgcgtcggcttcagctccgtctgcggcgccagcgccgagggcctcccgccggcgccgcccaagggcagctccaagcccgcggccgtcgtcagcgcgccagctgccgggacgaccaccaaaacaaggacggtcaaggacgcgctgccgcaggaggtgccgtcctcgccgttcctgccaccgtccggttgggccgtcgaggacctcctcgagctgtcggactacgaatccagcgacaagaaagactcgtctcttgggctcaaggagctggagtggttcgaggacatcgacctgttccacgcccattcgccagctaaaactgccatggcggagttcttcgcctcgccgcagccagtgagtaacgccgggttctacaaggcgaacggggcgcgcctgttcaagaagtcacggatggaggtgcctgacgacgacgacgaggactacttcatcgttcctgatcttggctgagatgagagatctctgcatgattctccagtcatgtgatgtgtgtatgtatgcaaaatatgtatgtataccatcatggggtgcactgacgcttacattggacatatgtaattatccagtcatgtgatgtgtatgtacgcaaaatatgtatgtatgccatcatgggatgcactgacacttacgttggacacatatgtacctataaaaggcagggccatgctttcagcctgataaatgaggtcagtttgatgt

SEQ ID NO: 264620 - DNA, 622 bp, Zea mays
ctcattgattgctccagttgcgtgctcgcgcgcgcgagctcgtcctcctccatcgcagtcagtggccttatcttgttcgtccttgcctccctcgttgttgcgacttgcgagacgacaggacaggatagcgagctgggcctgggagtatagactgcagacagagaggtggagcggccattaagatccagtgcgacgcgtgcgagggcgcggctgccaccgtggtgtgctgcgccgacgaggccgcgctgtgcgcgcgctgcgacgtcgagatccacgccgccaacaagctcgccagcaagcaccagcgcctcccgctcgaggcgctctccgccagcctcccgcgctgcgacgtctgccaggagaaagcggcgttcatcttctgcgtggaggaccgggcgctcttctgccgggactgcgacgagcccatccacgtcccgggcacgctctccgggaaccaccagcgctacctggccaccggcatccgcgtcggcctcgcctccgcttccgcctgcagcgacgcctgcgacgcccacgactccgaccaccacgccccgcccaaggccaccatcgagccgccgcacgccgccgtctccgccgcggtgcagcaggtgccctcgccgcc

SEQ ID NO: 264621 - DNA, 530 bp, Zea mays
cccacgcgtccgcacaagcgtgcggccacacgtgctcccagacgttcgctacgacaacgcggactacttcgatcgttactgatcttggctgagattagagatctctgactgattctccagtcatgtgatgtgtgtatgtatgcaaaatatgtatgtataccatcatggggtgcactgacgcttacattggacatatgtaattatccagtcatgtgatgtgtatgtacgcaaaatatgtatgtatgccatcatgggatgcactgacacttacgttggacacatatgtaattataaagatcaggctgctggccaggaacactcatcgttgaggtgggagggcttaagtgaataaaaagcactaatcgttggattaagaaggaacactcacgatttaaagtgctcacatgagcacggacgtcgcgtgagcatgagatacgttcccaattataaaaggcagggccatgctttcagcctgataaatgaggtcagtttgatgtatgagatgaattcacttggtaaaaatgttcttc

SEQ ID NO: 264622 - DNA, 435 bp, Zea mays
cccctcccttgccgtccacttcttcctccaccacagtcatcagtggcgttatcctcttcgttctcgcctccctggttgttgttggctgggtgttggcgagctgggagtagagaccgagaagtggagcggccatgaagatccagtgcgacgcgtgcgagggcgcggctgccacggtggtgtgctgcgccgacgaggccgcgctgtgcgcgcgctgcgacgtcgagatccacgccgccaacaagctcgcgagcaagcaccagcgcctcccgctcgaggcgctctccgccaagctcccgcgctgcgacgtctgccaggagaaagcggcgttcatcttctgcgtggaggaccgggcgctcttctgccaggactgcgacgagcccatccacgtcccgggcacgctctccgggaaccaccagcgctacctggccaccggca

SEQ ID NO: 264623 - DNA, 716 bp, Zea mays
cgaccggcggcggcggcgaggtgatggcgatggacccggacgcggtgtcggccaccggcatgcgcgtcggcctcgcctcggcttccgcctgcagcgacgcctgcgacgcccacgactccgaccaccacgccccgcccaaggccaccatcgagccaccgcacgccgccgtctccgccgcggtgcagcaggtgccctcgccgccgcagttcctgccgcagggctgggccgtcgacgagctcctgcagttctccgactacgagtccagcgacaagctgcacaaggagccgacgctcgggttcaaggagctggagtggttcgccgacatcgacctcttccacgagcaggcgcccaaagccagcaggacgttggcggaggtgccggagcttttcggataccaggcggcgaacgacgcggcgtactacaggccggccaaagccgccgccggcggcggcgctggggttcgccagagcaagaaggcccggatcgaggtcaccgacgacgaggattacctcatagtccctgatcttggttaaataagagagcgcaggagttttgtttcttctcctgatgtgtaccagagaagaattttactgtgtacaagctagtgtcaagtgttgtgcatctttgactgtagtgtcgctcaattctgaacatctattaagccacttttgttgctatgctaataccagtctgagagacactgatgtttttaacag

SEQ ID NO: 264624 - DNA, 650 bp, Zea mays
aacccactcgcaacaacggataacgctctcttccttcggctcctcccctctcgctcctatcctctcccctccaatggcgaccgccatttcctctctagtaactcctccgaccctccaccggcgctgcctgggccctgcctgcgtctccgtctccgtgtgcacccctatccgcatctccttccggcccgccgccgcgcctcaggtgtcgcgccggggctcggcgctgcgggtgtccgcctcctcggcggtgctcgaggcgccagaggcggtggcggcgcggaagctctacgtggggaatatccccaggaccgttacaaacgacgagctccgcgacatgttcgctgcgcacggcaccgtcgagcgggccgaggttatgtacgacaagtatacgaatcgcagccggcggtttgggtttgtcacgatgagcacagcggaagaggccaatgctgcagttgaggctctcaatgggactgaggttggggatggaaaatttaaggggaccgtaccaaaagcgcttttaccgaacatggaccgaccagaaccgaacccaaagcttttgttggaaaatggtcagtccagggttaatgtgggaaatttggcaaaaacggtaccacccgaggttttaaaaacctttttttccaaaaggggga

SEQ ID NO: 264625 - DNA, 787 bp, Zea mays
ctcggcctcgtgtacgccgtcgttaccccgcttctcctgccgtttataatcgtcttcggcgcctttgctttcctcgtctacagacaccagatcatcaacgtgtacaatcaggagtacgagagtgctgctgcgttctggcctcaggtgcactcccggataatagctagcctactcatctctcatgtaactctgtttgggttgatgagcacaaaggaagctgcgtactccacccctctgctcatcttcctgcctctgctgacgatctggttccacaaatactgcaagagccggttcgaaccagctttcagaaagtatcctcttgaggaagcaatggcgaaggacaccatggagcacgcatcggagcctaacctgaacctggaatccttcctggctaacgcttacctgcaccccatcttccgccttttcgaggaagccgggaaagaggaggagacggtggaggtgaggatcgacaaagccgagaagcagcagcatcgccatgaggaggacgaggctcacgcgaggagctcgtcgcagtaccgggaggaggtgactcacttcaggagcacgcacgagacgcattaccaccacgaggagagccacgtcagcaggagcacccagtatcatgagggcatccacgtgaggagcgacacggactcgccgtcgccgccacacttcgtctaccactacgacatccagcagtgatgatgtcgtctctaactttgttttcctgggtgtcttgtgaatgcttctaacctgtccaccccctccccccagaggttgctaaaat

SEQ ID NO: 264626 - DNA, 965 bp, Zea mays
cggacgcgtgggcggacgcgtgggcgcgcgcttcaccttccccaactcgccgccgccgctgccaacgccgcctgctgccgcatccgccatgggggcgtacaagtacgtgtcggagctatggaggaggaagcagtccgacgtgatgcggttcgtgcagcgcgtgcgctgctgggagtacaggcagcagccggccatcgtccgcctcacaaggcccacccgccccgacaaggcccgtcgcctcggctacaaggccaagcagggatatgttgtttaccgtgtccgtgtgaagcgtggtggcaggaagaggcctgtgcccaagggtattgtctatggcaagcccaagcaccagggtatcacccagctcaagttccagaggaacaagaggtctgtcgctgaggagagagctggacgtaagcttggtggactgagggttcttaactcctactgggtgaatgaggatagtacctacaagtactttgagatcatccttgtggacgttgcccacaaagccatcaaaaccgacccgaggatcaactggctatgcaaccctgtgcacaagcaccgtgagctccgtggcctcacctcagcaggcaagaagtaccgtggcctgcgtggcaagggccacacccaccacaagaacaggccctcaaggagagccacctggaagcgcaaccagaccctctccctccgccgctaccgctgagcagctcgtcgggtgcttggatactgccactgtccgatcattcccaatcaagacaacaagcgtgcctgtctctggttgcattttcaaagttttgctatttgtgttcttggcacttttaatgttagaagtcaattatggagcatatgtcatgaactatttgcaattcggttgtattatcagacaatgaatggttagtgatcaaatgctgcctgctaatgtggaaaaaaaaaaaaaaaaaaaaaaaaaaaaaaagggcggccgc

SEQ ID NO: 264627 - DNA, 1013 bp, Zea mays
  unsure (1)..(1013): unsure at all n locations
gctgccaatcgccgacctgctgttcgtttgccgcacatnngggggcgtacnaagtatggtggtcggatactatggaggacggaaggctagtcggaccgtgatgccgcttcgtggccagcgcgtggcgctgcatgggagtacangtngcagcagccgtccaatcgtccggcctcaccatggcccaacccgccccgacaagggcccgtcgtctcggctacaaggccaagcagggatatgttgtctaccgtgtccgtgtgaagcgtggtggcaggaagaggcctgtgcccaagggtattgtctatggcaagcccaagcaccagggtatcacccagctcaagttccagaggaacaagaggtctgtcgctgaggagagggctggacgaaagcttggtggactcagggttctcaactcctactgggtgaatgaggatagcacctacaagtactttgagatcattcttgttgatgtggcccacactaccatccgcaatgatccaaggatcaactggctatgcaatcctgtgcacaagcaccgggagctccgtggtctcacctccgcaggcaagaagttccgtggcctgcgtggcaagggccacactcaccacaagaataggccgtcgaggagggccacctggaagcgcaaccagaccctttccctccgccgctaccgttgagcacatacaacttgatgttctgctactgtggaacctacctcatgcatgctctgatagtatttggtatttttgttgcatcgttaaattttgctacccatgttacaagctccttgaactctgttatcagtgtaccatggagaaattgaagcgaactatgtttgtggttatcctgtgttatctcgatgaaaatgatggtttagttgactattaaaaaacgtcaacgtactacaatgcggttgaactcttattaaatgcaaatggtgggactatctataggatcctagtttacttacacctgcatccgacggaatgtctgttcaatagtgtcccttaaattaa

SEQ ID NO: 264628 - DNA, 403 bp, Zea mays
ctggctatgcaatcctgtgcacaagcatcgtgagctccgtggtctcacctctgcaggcaagaagttccgtggcctgcgtggcaagggccacacctcaccacaagaacaggccgtcgaggagggccacctggaagcgcaaccagaccctgtccctccgccgctaccgttgagcacacacatcttgaattcttgatgctctgctaccgtggaacccgccccatgcaggctctgatagtatttggtatttttgttgcattgttaaattttgctacccgtgttccttccgagccccttgaactgtgttgtcagtgtaccgtggagcaagtgtcgcgaactatatttgtggttctcagtcaatgaaaatgattgtttgtagttaaaaaaaaaaaaaaagggcggccgc

SEQ ID NO: 264629 - DNA, 533 bp, Zea mays
cccacgcgtcccctcctcagactcctctccgcacataccctccctacctcgccgtcgccgtcgcatctgccatgggggcgtacaagtacgtctcggagttatggagaaggaagcaatccgacgtgatgcggttcgttcaacgcgtgcgctgttgggagtacaggcagcagccggccatcgtccgcctcacaaggcccacccgccccgacaaggcccgccgcctcggcttcaaggccaagcaggggtatgttgtttaccgcgtccgtgtgaggcgtggtggcaggaagaggcctgtgccgaagggtattgtctatggcaagcccaagcaccagggtatcacccagctcaagttccagaggaacaagagatctgttgctgaggaacgggctggacgaaagcttggtggactcagggttgtcaactactactgcgcgaatgaggatggcacattcgctgactctgagatcattctgtgtgacgagggcgacactgagattattgacgacccaacactgaccggcgcttgcaatgct

SEQ ID NO: 264630 - DNA, 299 bp, Zea mays
cgacgcgtcgggaccgcgtgggcgcgatcgcgtgtctgcgccaggcgccgctgccaatgccgcctacggccgcagccgccatgggggcgtacaagtatgtgtcggaactatggaggaggaagcagtccgacgtgatgcgcttcgtgcagcgcgtgcgctccggggagtacaggcagcagccggccatcgtccgcctcaccaggcccacccgccccgacaaggcgcgccgcctcggctacaaggccaagcaggtagatctcctccagtgcagatcccattggcgcgcgcgaactttgacg

SEQ ID NO: 264631 - DNA, 331 bp, Zea mays
cccacgcgtccgcccacgcgtcaccccaccttccctacaccgccgccgccgtcgcacgcagccgcatccgccatgggggcgtacaagtatgtctcggagttatggaggaggaagcaatccgacgtgatgcggttcgtgcagcgcgtgcgctgctgggagtacaggcagcagccggccatcgtccgcctcacaaggcccacccgccccgacaaggcccgccgcctcggctacaaggccaagcaggggtatgttgtttaccgtgtccgtgtcaagcgtggcggcaggaagaggcctgtgcctaagggtattggctatggcaagcccaagcacc

SEQ ID NO: 264632 - DNA, 1160 bp, Zea mays
ggacctggcgctttcttccctgcctccacttcaactgcagccatccgccattcccgaagcttccagaagctcgcctgcaatggcgaggcttctcgtgctccgcacggcgccgtaccgtcactctgcccacctttgcgctgccaccctcctcgtgctccctccctcccagcaccgccacttcgcctccttcacctcccctgccccctttgccgcgcgccgcatcctcccctcgccactccgccttcctatccgcgcagtggagtccttcgcccgggcccaccaaagaggatcaggagccgtctccggccgccagtgaggcccaggagcagctagcgcccgcggtgcctgcgttcgaggtcgaagagcttgggtgggggacccagctcgccgtcaagctccgcatgctcgtagcgccgccgtggcagcgtgtccgcagggaagcgtcctcaacatgaagcttcgcggcgagatatctgatcagttgaagacacgcttctcatcagggctgtcgctaccacaaatctgtgagaattttgttaaggcagcatatgacccacgaatctcagggatttatctgcacatagagccactgagatgtgggtgggcgaaggtggatgagatcagaaggcacattgtggatttcaagaagtctggtaaatttgttgttggttatatgcctgtttgtggggagaaagaatactatcttgcttgcgcgtgtggtgagctatatgcacctccaagtgcttatgttgccctgtttggcctaactgttcagcagacatttctcagaggtgtccttgagaaagttggaattgaaccggaaattcaacgaattggtaaatacaaaagtgccggagatcaacttgcacgcaagagcatgtcaaatgaagttagggagatgctggcagcactgcttgacaatatttatggaaactggctggaaacaatatcttctacacatgggaagaaaaaagaagaaattgagggatttattaattcaggggtgtaccaggttgccagactcaaggaagaaggttgggtaacagatttactgtatgatgatgaggtaatgacattactaaaggagagagtagggcagaaagacaagaaaagtctgcgtatggttgactacagttaatactcgcgtgttatgtaaaaga

SEQ ID NO: 264633 - DNA, 713 bp, Zea mays
cccacgcgtccgggagtactcccgttccgagcacactagtcttccctgcgcttgctcgctccttcttgcccccatggcgctgctcgccgtccagggcatggccatgtccaccgccgccgcggccctcccatctcacaaccacggcgccgtctcatcctacgtctccacctcctcctacgcgctcgcagcctccgccgccttcccccgcgcccgggctgcgttcgccgtcggcgccgtcttgtcggccaccgtcactccagttcttgacgtctactgcgggagaggggacaagaaaacgaaaaggggcaaaaggttcaaccattcatatggcaatgcgaggccgcgcaacaagaagaagggaactgggcctgcgcggctctttgctcctccagctcctccaaggaaggatcagttcgatgatggggagatcatttcaatcgagattgacgagggcatcctggaataggttgtccgagttctgccttgctttatatttgccctgagcttaattggcctagtttgtaccaaatcaaatactacatattttaagtaattatttcctcgcctataattatcgatgggtaggctgccacactttcatttggctagtaatgttcctactactgactgggttctttattttcctttccagctgctgagttctttactctcttcaaaatgaaactgtgtcgaaataagtttttttgagaaaa

SEQ ID NO: 264634 - DNA, 619 bp, Zea mays
gggcgacacagagaagctgaaagagctgatggggaactccgagcccgaggcgctgatggcgggcttccaacccgaagacgtgctgccggacgcaccggcgaggttcgtgagatgggtgacgggcctcaataagaagctcgaagacttggtggagtcgtgggacaagttcctgtccgatatagtggccgcacacaaggagaaggggggtggcgacgcagaggaggatgaggacttcttggatgtcttgcttcggctgcgggaagaaggcgcagatgggctcgagctcacagacgatcgcatcaaagctaccgtcaaggacatgatagcggctgcaactgaaacatcgtcccaaacgctggaatggaccatggccgaactcattgccaacccgcgggtgatgagcaagctccaaggcgagatagcgcgagtcgtcagcgccgatcagacgaccatcgctgaaccggacctgaacaaaatggagtacctgagggcagtgttcaaagaggtgcttcggctccacccaccagcgccgctcctcgtcccgcacgaatcaacaacgcccgcagttgtgcagggctacgagatccccggcaaaacggctctctttgtcaacgtgtgg

SEQ ID NO: 264635 - DNA, 875 bp, Zea mays
cctactcgtccgcccacgcgtccggcttcgtctctctcgccggcgcggcaactatcatcacttcattagctcatccaatctattccgatgacgaccgtgcccacgccacagcaggtggcgtactcacgggcacggctcgcaccccgcgcgatcggcgccttgctggagtttgccccagcctcctcctccctccgcttcgccgtgcaccgctgccgcactgctcgcctagaggtgaaggcatctggaaacacgtttggaaactactttcaggttgcaacctatggtgaatctcatgggggtggtgttggttgtgttatcagtggttgtccacctagaattccactcactgaggcagacctacaagttgaactcgatcgaagacggcccggtcagagcagaataacctccacaaggaaggagactgatacatgcaaaattctgtcagggacacatgaaggggtgactactggaacgccaattcttggtattgtcccaaacacagatcagataggcagtgatcaccgtgaaatagccaatgtgtaccgaccttctcatgcagacgcaacttatgacttcaagtacggcgttagagctgtacagggaggtgggaggtccgccggcacagaaaccgttggaagggtggctgcaggggccctcgccaagaaaattcttaagctcaaatggggattagagatctcgtcgtttgtttccaaagtgcatcacggtgggctcccagaagacgccgttgattatggatctgtaactttggaacatatagagagcaacatcgttagatgtgctgatccagagtacgcagagatgattatagacgcaatcgacagagttcgagttccaagggattcggacggtggaat

SEQ ID NO: 264636 - DNA, 446 bp, Zea mays
cacaggttgaacgactcaaaggtgaaaacgcaacactgttccagcaactttcagatgccaaccaacagttcagtactgcagtcacagacaacagaatcctcaaatccgatgtagaagcgttaagaattaaggtaaagatggcagaggatatggtagcgagaagtgctgtatcgtgtggcctaggcgaccttggcctggcaccatacgtgaactcaaggaagatgtgccaagctttgaatgtgctcacagggttggatttactagggagtgatgcgttcaggggtccaaccgcagtacacgagtacagaactcaccagtacagagcactgcaagcctagagagtctggataaccgaaagtccaacgaggtgaccagttgcgcggcggacatttggccttgagcttcaagccattgatctgattcagagcttgctccaccctcaaaaa

SEQ ID NO: 264637 - DNA, 509 bp, Zea mays
agatagacaggagagagagagagaggggaagagagagagagagagagagagagatagatgtggtaactcaagaactgttcttatgcatgcagcagccataagcattgctactagggtttcatgcggggcgaacagctggtctctgccgcctgaacgccgccggaatctgcgaggcctccccgagctgcgtgcgtcgtcggataaggcagccggcacggcaatgccggttccgcttgctccgtacccagctcctccggcgccattcacgccgcccaatggggcccagagccagctcgtctgcaccgggtgccggaacctcctcatgtacccagctggtgcgacgtcggtctgctgcgccgtctgcagcaccgtcaccgccgtgccggctccaggaactgagatggcgcagctagtgtgcggaggatgccacaccctcctcatgtcacatacgcaggatcgacgagcgtgcagtgttcttgctgtcacactgtgaacctggttatggtagt

SEQ ID NO: 264638 - DNA, 560 bp, Zea mays
gcgtccacttcactataaattcgtcgacctctccatatcacagagagatagagagagagagagatagacaggagagagagagagaggggaagagagagagagagagagagagagagatagatgtggtaactcaagaactgttcttatgcatgcagcagccataagcattgctactagcgtctcctgcacgtgctgtgtcgtttccagggtttcatgcggggcgaacagctggtctctgccgcctgaacgccgccggaatctgcgaggcctccccgagctgcgtgcgtcgtcggataaggcagccggcacggcaatgccggttccgcttgctccgtacccagctcctccggcgccattcacgccgcccaatggggcccagagccagctcgtctgcaccgggtgccggaacctcctcatgtacccagctggtgcgacgtcggtctgctgcgccgtctgcagcaccgtcaccgccgtgccggctccaggaactgagatggcgcagctagtgtgccgaggatgccaaaccctcctcaggtacatacgcggcgcgacgagcgtgc

SEQ ID NO: 264639 - DNA, 641 bp, Zea mays
tgccgtccgcgcaaaaccctccctgctcagacttctgctgcagcgcctccgccgccgccgccgcatctaacgcagttccctccgccgcagcccgaggcaagatggttctccagaacgacattgatctgctcaacccgccggcagaactcgagaagctcaagcacaagaaaaagagactcgtccagtcgcccaactccttcttcatggatgttaagtgccaggggtgcttcagcataaccactgttttcagccactcccagactgttgttgtgtgccctggctgccaaactgtcctctgccaacccacaggaggaaaggcaaggctcactgagggctgctctttccgcaggaagggagactagagcggatgtggtcttcaagttttgctctatgccagatactagcgtcatgaactgcctttagctaagattttccataagttgttctcgagcagctatgtgttgcatgttggctacttccaaacttatatctggtttggtttggattgtgatgaactaatggctctttgaatttatattatgatgttgacgatatttggtgccaaaaacaatcttggtagactgtgtccttcaaaaaacgacagatgcctcagtgcgaccgctcgcgatctagaaccgaag

SEQ ID NO: 264640 - DNA, 775 bp, Zea mays
gtccgcgcaaaaccctccctgctcagactcgtctgctgcagctcctcctccgccgccgtgtcaaacgcactctcctccgccgccgcccgaggcaagatggttctccagaacgacatcgaccttctcaacccgccggcagagctcgagaagctcaagcacaagaagaagcgcctcgtccagtcccccaactccttcttcatggatgtcaagtgccagggatgcttcagcataaccacggttttcagccactcccagactgttgttgtgtgcccaggctgccaaactgttctctgccagcccacgggaggaaaggcgaggctcacggagggatgctctttccgccggaagggagactagagctgagtctgttattagtactggatcggttgtcaatctccagtatgtggtcttcaagttttgctctgtgcccagacgttaaggtcatgaactaccttagctaaggctttccgcatgttgttctggtgctgctatgtatcgcacgttggttattgctgaacttatagcttgtttggttcggattatgataaaccaaatggatatttgaatgtatattatgatgttgacgatattcggtgaaaaaagaatatcaagcaaaaagctcaacaaaaaagaaaaaagcaaacaaaggtaaagcgcactagggtggccgacctgactgccgcttgcttgctacggcatcactcttctatggtagcacgtaaacagagtcacctagacgaatatgtacaccgtattcactggccaaacttcatcg

SEQ ID NO: 264641 - DNA, 565 bp, Zea mays
gagagagagagagagagagagagagagagagagagagagagcccgaggcaagatggttctccagaacgacatcgaccttctgaacccgccggcagagctcgagaaactcaagcacaagaagaagcgcctcgtccaatcccccaactccttcttcatggatgtcaagtgccaggggtgctccagcatacccacggttgtccgcctctcccacaccaaccacgtgtgcaccggctgccaagctctgctcagccaacccacaggaggaaaggcaaggctcactgagggctgctctttccgcaggaagggagactagagcggatgtggtcttcaagttttgctctatgccagatactagcgtcatgaactgcctttagctaagattttccataagttgttctcgagcagctatgtgttgcatgttggctacttccaaacttatatctggtttggtttggattgtgatgaactaatggctctttgaatttatattatgatgttgacgatatttggcgaagaaaataaaaacatgtactagaaatattataaataaaaaaaaaaaaaataa

SEQ ID NO: 264642 - DNA, 353 bp, Zea mays
cagacttctgctgcagcgcctccgccgccgccgccgcatctaccccagtccctccgccgcagcccgaggcaagatggctctccagaacgacattgatctgctcaacccgccggcagaactcgagaagctcaagcacaagataaagagactcgtccagtcgcccaactccttcttcatggatgttaagtgccaggggtgcttcagcataaccactgttttcagccactcccagactgttgttgtgtgccctggctgccaaactgtcctctgccaacccacaggaggaaaggcaaggctcactgagggctgctctttccgcagaagggagactagagcggatgtggtcttcaagt

SEQ ID NO: 264643 - DNA, 289 bp, Zea mays
caaaaccctccctgctcagactcgtctgctgcagctcctcctccgccgccgtatcaaacgcactctccttcgccgccgtatcaaacgcactctcctccgccgccgcccgaggcaagatggttctccagaacgacatcgaccttctcaacccgccggcagagctcgagatgctcaagcacaagaagaagcgcctcgtccagtcccccaactcattcttcatggatgtcaagtgccagggatgcttcagcataaccacggttttcagccactcccagactgttgttgtgtg

SEQ ID NO: 264644 - DNA, 602 bp, Zea mays
tctgaaaactcgaaggctggttgtcaaagtgtgcgacatcgtcacccggagagctgcccgcctagccgccgctggtattgtcgggatactgaaaaagctcggccgtgatgggagcggtgttgcttcaagcgggagaacgggagggcagatgaggcggacggtggttgccatcgagggtgggctgtacgagggctacccggtgttcagggagtacctagacgaagccctggtggagatcttgggggaggaggtggcgcggacggtggcgctgagggtgacagtggatgggtctggggccggcgctgccctccttgccgccgtacattcgtcgaatagacagcaaggttccatatagggagaagggaagatggtgatacagccccctctgtgcaaatgtaaaaaggaacattatttgatatctatattcatatatatataatctggtcttgtgcagaagaaatacctgttctcctatctatgctcttgtgattcttctgccttgcccttgtggatgtaggcgtcgctgtgtactaggtttacattttttcagtcttgaggggatttataattctttgtaaaaaaaaaaaaaaaaaaaaaaataa

SEQ ID NO: 264645 - DNA, 1071 bp, Zea mays
cggaccgtggcggcggcgcgcagatgctgctcttcggcggcggaggcagcgccaacagcaacgggcttcgtccgaggtgttccgatggcggtcctggccatggacgacgcgacgcgcgtgggcaagcggcccttcttcacgacacacgaggagctcctggaggaggagtactacgacgagcaggcgccggagaagaagcgccgtctgacggcggagcaggtgcagctgctggagcggagcttcgaggaagagaacaagctggagcctgagcgcaagaccgagctggctcgccgcctggggatggcgccccgccggtggccgtgtggttccagaaccgccgcgcgcgttggaagaccaagcagctcgagaccgactatgaccgcctcaaggctgcctacaacgcgctcgccgctgaccaccagggcctcctggccgacaacgatagcctccgggcacaggtgatctgcctaacagagaagctgcaaggcaaggagacatccctgtcggcaaccattgctacccaagaggtcgaccagccagacgaacacaccacaggcacggaggaactgctggcgcagcagctcaaggacgacctccacagcagcggcgactgcactggccatggcaccctctcttcggaagaagacgacggtggcgtggtcagtgacgagggctgcagcttcgctctcccggatgccatgttcgctgccgggttcacccaccatggcgccgaggaggtgcagctggccaactggacatccatgttctggaactgatcagcggatggatgcatccaagtgcaaagatcggatcctctcctcgtctcaacccttttctgcagcatataattaccgtgttaattatgtgccgtccgatgtttttaagtgctcatgttttaagtttgtgttttttttgaagtttttgtatgttcatatatataataatgtgcttcgaacatgacactcgaaaagttgaataattggacatgtcgacctgctgtgcactagcagctggcatgttttgtttagggctggtttgggaagttcatttttcaaagaattcatatttttc

SEQ ID NO: 264646 - DNA, 653 bp, Zea mays
gggaggcccgttcggcggggaggagctcgacctcttcatgacgcactatgtattgctcctttgctcattcaaggagcagttgcatacggcagcatgtacgtgttcatgcaatggaagcagtgatgggttgctgggagcttgaacaatctttacaaagcctaacaggggcatctcctggtgaaggcactggagcgaccatgtctgatgatgaagacaaccaggtggatagcgaagccaacatgtttgatggaaatgatggatcagatggtatgggctttggccccctaatgctgacagagggtgaacgatccttagttgagcgtgtacggcaggagctgaagaacgagcttaagcagggttacaaagaaaagcttgtcgatatcagggaagagatcatgcgcaagcgcagggctgggaaacttcctggagataccgcatctgtactgaaagcttggtggcaagctcattccaagtggccgtacccaactgaagacgacaaggccagactggtgcaggaaacgggattgcagctaaagcagattaacaactggttcatcaaccaacgcaaacggaactggcacagcaacccaacatcctcgggtgaaaagactaagaagaaaaggtgatattgatccagagcaatcttgacgatg

SEQ ID NO: 264647 - DNA, 909 bp, Zea mays
cccactcgttcgcccacgcgtccgcccacgcgtccgcttctccttccctcacctgctctctctctctctctctctctctctctccctttctttcccgcggcgacggtgacgacgaccgcgcgagcgccgccgactccctactgcatcaggtgcctcggccttcgtcgtgctctccgccggcaacgagtatagacgggcgcgcatggccaccttcgagctgtaccggaggtccaccatcggcatgtgcctcaccgagacgctcgacgagatggtctccaacggcaccctcagcccggagctcgctatccaggtcctcgtccagttcgacaagtccatgacggatgctctggagaaccaagtgaagagcaaggttactgtcaagggtcacctgcacacctacaggttctgtgacaatgtgtggaccttcatcttgacagacgcaagcttcaagaacgaggaggccacggagcaggtgggcaaggtgaagattgtggcatgtgattccaaattgctcggacaataggcctgtgtaccctcgaggtcaaggaaggaagcttttaagtgcggcgaggcggggtctgtctgcgcgtcagctgtacacgcctaggctaccgcgaggcggggtctgtctgcgtcagctgtacacgcctaggctaccgcccgaacggcatttcatttgccttcttcgtactgtatgtgtatcttcttttttttcccttgtatacaatctgctgcagctataccggccagagtatggcatggtatggcggcaggcagccgcaaacttgtttttacctacttggtgtagcgcctgtgtaacagttttcgatcgctcttgcttgttgctaatcccgcagtgtaattgacgaaaaaaaaaaaaaaaggacggccgctcgccggacgcgtggg

SEQ ID NO: 264648 - DNA, 306 bp, Zea mays
cgcccgaacggcatttcatttgccttcttcgtactgtatgggtatcttcttttttccccttgtatacaatctgctgcagctataccggccaaaagtatggcatggtatggcggcaggcacccccaaacttgtttttacctccttggtgtagcgcctgtgtaacagttttcgatcgatcttgcttgttgggttgtcgatgctaaacccccagtgtaattgacgaaatgcctaaaatgaagagtagtgtagtagatgtcccacaaaaaaaaaaaaaaaaaaaaaaaaaaccaaaaaaaaaaaaaagaa

SEQ ID NO: 264649 - DNA, 761 bp, Zea mays
agaggatgaagatttcgttgcagacaaggatgatagtggatctcctactgatgactcaggtgatgaggaatcagatgctagtgatagtggtggtgaaaaggagaaatcatccaagaaggaagcaagcagttcaaagccagttcagaaaagaaagcataaggccagggatgacgaaggacaagagaagaaaaagccaaagaagaaaaaagatccgaatgctccgaaacgagccatgaccccgttcatgtatttctcaatggctgagcgagggaacatgaagagcagcaacccagatttgcctacgactgagatcgcaaagaagcttggggagatgtggcaaaagatgtcaggcgaagagaaacagccttacatccagcaggcccaggtcgacaagaaacgttatgaaaaagaatccgctgtctatcgcggtgaagctacagtcgatgtggattctgggaacgagtctgactagagatccaagctcttgggctggcatggtggcacgggatgaaagtctagtgccatgtgtgctattgttatgtcagcaaccgttgcctccaacattgctgacagtaaagagagtttctctcgcagcttacctctgcagggcaaaagaatgtacgagtgtagtctagtgattttgtgtaaaacaaccaacatacgtggttttctgagagctggtaagacgtcagtttaactgttgtcaattggctgttttgcctgatctcgttggtcagatccaaagttaagagatgcccacc

SEQ ID NO: 264650 - DNA, 915 bp, Zea mays
gcaagtaacaatgaagcagctgagactgagagatactagtgcttcccttgctttgactaaatcaactcgcagcctgtgagttccatggagcgaggaggagcacaggcagttccttgccggcctggagaagctgggcaagggcgactggcgaggcatcgccaggagctacgtgccgacgaggaccccgacgcaggtcgccagccacgcgcagaagttcttcctccggcagagcagcatggccgagaagaagaagcgccgctccagcctcttcgacatggtgccgatctgcgagaacagtgcgagcatctccgatccgctggacgtggcacgccatggcgtcgcctcggcagactccgagagggcggccgtggacctgatgaattcgacgacggagggtgacgacggcaggagcagggacgtcgtgtcgtcggcgtcaggtgcagggaccacactgcggttcccggcagcggcagctcagacggagccgctgcatccttcgtcgtcgcatggccatgggcgcggccaccactgctctccgttggacctggagctgggcatgtccctgcccgccccatccgtcggaacgtgatggagatgaggcgaggccgtggccatggccgtgcgtgactgctgtctccctcagctgtgtgtgtcagccagatggagatgatgcgctagccaatacagtactgttcgtgatcgtgaaaacggtgtgcaaacactagcacagcggcactaaactaggatgtcgctcctcgcaccatattgggtactgtaaccacgttgatccacatcatctctatctcttcaccaccgttggatcataggctgtcagtttcatctatccgtccatgtgtcatactcattcacgatgcggtggcttaatgatccagcagtcatttttcttctttcgtg

SEQ ID NO: 264651 - DNA, 601 bp, Zea mays
cactgatgctgcaacccttcaactgcaagtaacaatgaagcagctgagactgagagatactagtgcttccctgcacattattgagtccttgttgggttggtcggtagcagctgatgtttctaaacaaaaacaatactctggatatataccgacgacgccaggagttccatggagcgatgaggagcacaggcagttcctttccggcctggagaagctgggcaagggcgactggcgaggcatctccaggagctacgtgccgacgaggaccccgacgcaggtcgccagccatgcacagaagttcttcctcaggcagagcagcttggggaagaagaagcgccgctccagcctctttgacatggtgccgatttgcgagaacagtgcgagcatctccgatccgctgggcagcgaaggggcctcaacctctctgtcgctgaacgtgccacgccacggcgtcacctccgtctccgagagggcggccttggacctgaattcgacggaggaagacgacagcagggcggacgcgtcgtcggcatcggcatcaggtgcagggaccagaccaccgttcccggcagcgcagacggagccgctgcagccttcgtcg

SEQ ID NO: 264652 - DNA, 620 bp, Zea mays
ctgaagctgggtagctcctgctcctatcccggctgctggcgcgccgtggttttgtgctcttgtggacacactggcctccacccatccctctcacgtctctggccatccgcagccaaggcgcgcggcccatcgtcgatttatagccacaccatggccaggaagtgctcccactgtggcaactacggccacaactccaggacctgcggactaggactaggactaggacacagagaaataatgctctgcgaaggtggcgacgacaataatggccgcagcggcctaaggctcttcggagtgcaggtccgtatcggcggcggcggtggcgcagggtcggcgtccatgaagaagagctacagcatggactgcctgcagctcgcggctcctcatgcttgttcgtccctcgtctcgtccccgtcgtcgtcgtcgttgtgctcgtcctcgtccccgtcgtcgctgctgctgtcgattgatgatgggttgcagagaggggcggccgatggatacctgtctgatggacctcatggcagagctgtgcaggagaggaagaaaggagttccatggagcgaggaggagcacaggcagttccttgccggcctggacaagctgggcaagggcgactg

SEQ ID NO: 264653 - DNA, 1014 bp, Zea mays
gggggaggccgccaagaacggggccgccgccgcggatggccacaagcctggccccgtgccattcttcgccgcggggattagttcggtgcttcaccccaagaacccatttgctccaacattgcattttaactaccgttactttgagacggatgcaccaaaagatgcacctggtgcaccaagacaatggtggttcggcggtggtactgacttgactccttcatacatcattgaagaggacgtgaagcatttccattctgttcaaaagcaagcatgtgataaatttgatccaagttttcacccaagattcaaaaaatggtgtgatgattatttctatattaagcaccgtaatgagcggcgtgggctaggtggaatattttttgatgaccttaatgattacgatcaagaaatgcttctcaactttgctacagaatgtgcggactctgtacttcctgcgtacataccgatcatagaacggaggaagaacactccgttcaacgaggagcacagggcatggcagcaattgcggagaggtcgttatgtggagttcaaccttgtctacgaccgtggtacaacatttggcctaaagactggaggaaggattgagagcatacttgtgtcccttccacttacagcacgatggcagtatgatcataaaccggaagaaggaaccgaggaatggaaacttctggaagcctgcataaacccgaaggattggatctgattagccgttattcttgagatcttttgttagagttttcccttctgtagggctaagaccacgtgcagtttcattatatattttgcatctgtagaatcgtgaataaatatgatgtagtgatgttgtagctgtttgtatctatctgctgttttcccccatgtgaatgagagaaccattggcttctgtatttacgaaggattcaggtttctgaacactatcatttgctactactatggccaatactcaccgatgcagccccataggtctgtctaaaaaaaaaaaaaaaaaaaaaagaa

SEQ ID NO: 264654 - DNA, 378 bp, Zea mays
ttccggtcgaccactcgtaccctggtaaacccgaaggattggatctgattagccgctattcttgtgtcccttccgcttgcagcacgatggcagtatgatcataaaccggatgaaggaaccgccgaacggaaacttctggaagcctgcataaacccgatggattggatctgattagcccttattcttgagatcttttgttagagttttcccttctgtagggctaagaccacgtgcagcttcatgatatatcctgcctctgtacaatcgtgaacaaatatgacgtagtaatgctctagctgcctgtatcatatctgctgttttttccccatgtgaatgagagaaccattggcttctgtattacgaaggattcaggtttct

SEQ ID NO: 264655 - DNA, 1133 bp, Zea mays
ccaaggtctcactcatccggattgggacgcgtgggagtcctctggctcttgcacaagcccatgaaactcgggaaaaactgaaagccgcacactctgagttagctgaggagggggctattgagatcgtcatcataaagaccacaggagacatgatcttggacaaaccccttgcagatattggaggcaagggtttattcaccaaggagatagatgatgcactcttgcagggaaggattgatatagctgtgcactctatgaaagatgttccaacatatctacctgaaggcacaatattgccctgtaacctcccacgagaagatgtaagagatgcattcatatgcttgactgcaaattcgctcgcggagcttcctgctggcagtgttgttggaagtgcttccttgcggagacaatctcagattctctacagatatccatcactgaaagtagttaacttcagaggaaatgttcagacacggttaaggaaactcaaggaaggagatgtgtctgctacattgttggcgctggctggattaaggcggctaaatatggcagaaaatgcaacagctgtactatcagtggaagaaatgcttccggcagttgcccaaggtgctattggaatcgcttgccgaagcaacgatgacaaaatgatggagtatctgtcctcgttgaaccacgaggataccagactagctgtcccatgcgaaagagaattcttggcagttcttgatggcaactgccgaactccaattgccgcctatgcttaccgtgacaaggacgggaactgctcattccggggcctactggcttcaccagacggatctaaagtatttgagacggcaagaagtggaccgtactctttcgacgacatggtcgagatgggcaaagacgctggccacgagctgaaggcgaaggctgggcctggcttcttcgatagccttcaatgaacagaatgtgcggccatgcgcgatttcagttggcaccctttcggttgaaaacgagggccaaagtaggttgttgaggggtttgtttttgtttcttctttttttctcctactactaggtcctgctagagccttgtactcatgttgagcagccccattcagcttttgttgtatctcatgttcttttagcact

SEQ ID NO: 264656 - DNA, 762 bp, Zea mays
gaccggcttccgtctgtcttacggtggagctcaggagtacttcgggatcacccctgacgtgacgaccttgggcaagatcatcgggggtggcctccccgttggtgcctacggtgggagaagggacatcatggagatggttgcccccgcaggccgatgtaccaggcaggaactctcagcgggaaccctctagccatgaccgctgggatccacacgctcaagcggctgacagagcccggcacctacgagtacttggacaagatcaccggcgaactcgtccgtgggatactggacgtcggtgcgaaagcagggcatgagatgtgcggaggacatatcagaggaatgtttggcttcttcttcaccggcgggcccgtccacaacttcggggacgccaagaagagcgacaccgagaagttcgggaggttctaccgtggcatgctggaggagggcgtgtacttcgctccctcgcagttcgaggcggggttcaccagcttggcgcacacctcccaggacatcgagaagaccgtcgaggccgctgagaaggttctgaagcggatatagggggtccgcttcaagcaagcatgcagagagcatttcctcgtatctacgttcttgtactcttagttctatatgccaccgaggttttgtattgtgcagcagcaggacagcttctgtaagttcctctttctgaattagtgggtcttgtttttgtcagtgcccataaatctctggtccacgattacggtttcgttgttgtactgatgt

SEQ ID NO: 264657 - DNA, 1024 bp, Zea mays
aactaccacgcgaccggaatgaagctgctgtgctaggttttgttggagctccgtttaccttggcatcttattgtgtggaaggaggttcatcaaagaactttacattgattaagaaaatggccttctcagaaccagcgattctacacaatttgctacagaagttcacaacatcaatggctaactatattaaataccaagcggacaatggggcgcaggctgtccaaattttcgattcatgggctactgaactcagcccggctgattttgaggagtttagcctgccttatctaaagcagatagtggatagtgttagggaaacacatcctaacttgcctctgatactctacgcaagtggatctgggggcttgctggagaggcttcctttgacaggtgttgatgttgtcagcttggactggacggtcgatatggcagagggcaggaaaagattgggatctaacacagcagtccaagggaacgtggaccctggtgttctttttggatccaaagagtttataagcaggcggatttacgacactgtgcagaaggctggcaatgttggacatgtattgaaccttggccatggcatcaaggttggaactccggaggaaaatgttgctcacttcttcgaggtcgcaaaagggatcagatactaaagaaccttgcatggttctttcctttctccaaatcggcagaagttgtagagtcggcggtcgaggatagatgcagaaagccatgtgcagtatagagtgcctgaaaacatttttgtgactgattctgtctgtcgcatttcaagttccggtttcagtgtaatattgtaagcagatttgagtcgaggcgtaatgaagtgcctacttgtttatagcactactatagttctgtacaaccagtagccttgtctatgagacttcgaagcagaaatactgatcatgtgttgacatgatagaaatgtttcagtcttaccccatcgagggtgtttggtcttggattctctcagaaaactggttacaaacattttctttgcatg

SEQ ID NO: 264658 - DNA, 772 bp, Zea mays
gagaccgcgagagtgtacgtgccaccaggagcagcagcagcaatggccgccgccgccgccacctcctcatcctcccacctgctcctcctctcccgccagcaggcggcctccctacgatgccgcctctccttcctcggccagcccagaaggcccggcagggtcacggcccaggcgccggccgctaaggacgtgcggtgcatggcggccgtggacactactgcggcgtccacggcggcggcggagacgagccccaagtcgagcagctacgagatcgtgacgctcacgacgtggctgctgcagcaggagcggaccggcgcgatcgacaacgagatgaccatcgtgctggccagcatatccacggcgtgcaagcagatcgcggcgctggtgcagcgcgcgcccatctccaacctcacgggcgttcagggcgccgtcaacgtgcagggcgaggaccagaagaagctcgatgtcgtctccaacgaggtgttctccaactgcctcaagtcgagcgggcgcaccggcgtgatcgcctcggaggaggaggacgtgcccgtagcggtggagcagagctactccggcaactacatcgtcgtgttcgaccctctcgacggctcctccaacatcgacgccgccgtctccactggctccatcttcggcatctacaaccccaacgacgagtgcctcgccgacgtcgacgacaatgacacccttgattcggtggagcagaggtgcatcgtgaacgtgtgccagccggggagcaacctgctggccgccg

SEQ ID NO: 264659 - DNA, 1310 bp, Zea mays
cccacgcgtccgaacgaggacgaactgctaccccctcgcctcgccctcgccgcctgctcctctccagttctcccccaccaaccgcagcagcgagagcgagactgagaatggccgcggcgccgtcgtccctcgtgtcctcccatctctcccgcctcgccgacctccgccgcgcggcggcgccggccactcccaccgtcccacagcagcttcgcgtcggcttctcgcgccgccgcgcccagcgcgtcgtcgccatggctggatccggcaagttcttcgtcggaggcaactggaagtgcaacggaacaaaggactccgttagcaagcttgtctctgaactgaatgctgctaccctcgaaactgatgtagatgttgtggtggctcctccattcatctatatcgatcaggttaagaattcactaactggtcgcattgaggtttctgctcagaatgtgtggattggaaaaggaggagcctacaccggagagatcagtgcagaacaactggtggacatcggctgtcaatgggttattcttggacactctgagcgtagacatattattggtgaaaatgatgagtttattggaaagaaggctgcatatgcattgagccaaaatgttaaggttattgcctgcataggagagctgctggaagagagggaagcaggcaaaacttttgatgtatgttttaggcagatgaaggcttttgcagatagtatttcaaactgggcagatgttgtaattgcatacgagcctgtttgggctattggaaccggaaaagttgctactcctgagcaagcccaggaagttcatgctgctgtacgcgattggctgacgaccaacatatcacctgatgttgcctctagcacccgaataatctatggaggttctgtgaatgcagccaactgtgcagagctagcaaagaaagaggatatcgatggttttcttgttggtggtgcctccttgaaggccccggacttcgccaccattatcaactcagtgaccgccaagaaagttgcagcctgatggaccaccctgtgaagaaataagaggccatcaccgtgtcgcctcatctgccacgccttaaagcctgtaggaggcgtcacctcctgtttttgctgatttgcagcacggggacagaaaataatgttttgctctcgtggatctgcacgtgacgaggagagttcagttgtcgtgagcgatgtacgttgggaatattgttatgtggtccttttctaaagaaaaaaaaatgttgacagtcaaggagaaatgtaagcgtgtttttttttaacagagaagctacatcttactgtg

SEQ ID NO: 264660 - DNA, 591 bp, Zea mays
cagagcaaaagccaaactggcagccagcacagcagagcgccactcgactcgactcatcgtttcgggtcccctcccccctccgcgttccacaaccctcgagaagcttccaccctcccctcctgcgacgccgccagagccgcggaaaccctacccaccccggccgctcacgcaccgggcgcccgcagccgccggtcgcgtgcctgccgccgacaccgcccaaagcgattggatctcgagatcgtcaggagccacgatggaggactgggattctgaagaattccagccagttgtgcctgttgtgaaagccgagccacttaaaaatcagtgggctgatgaagatgttgaagaagatgatgtaaaagaatcatgggaagaagaggaggaggaggagaaacctaagccagcgccagtggaaaaggttgctgcaaaacctagcactaaggctcctgctaaaaagggaaaacagctagcattgacaagtgctgaagaaccagatgagcctcctcttagtcccactgtacagaatattggccaacaaagacttgtggaagaagctgccttcaagtcgaccaccgtgctttttgcaaagaa

SEQ ID NO: 264661 - DNA, 436 bp, Zea mays
gcgattggttgacgaccaacatatcacctgatgttgcgtctagcacacgaataatctatggaggttctgtgaatgcagccaactgtgcagagctagcaaagaaagaagatatcgacggttttcttgttggtggtgcctcgttgaaggccccggacttcgccaccattatcaactcagtgaccgccaagaaagttgcagcctgatggaccaccctgtgagaaataagaggccatcagcgtgtcgcctcatctgccacgccttaaagcctgtataggaggtgatccgtgtgatggtgtgcccgtcacctcctgtttttgctgatttgcagcacggggacagaaaataatgttttgctctcgtggacctgcactgcacgtgacgaggagagttcagttgtcgtgagcgatgtacgttggggatattgtgatgtggtcct

SEQ ID NO: 264662 - DNA, 401 bp, Zea mays
ccacgcgtccgccctcgcgtctttgcgtacgaggacggcttctagtccctcgcctaccccgcccccgaacctggcgtctgccctaccaaccgcagcagcgacactagaatggccgcggcgccgtcatccctcgcgtcctcccacctctccccaatcgcggcggtgtccactcccgccgtcccacatcagcttcgcatcggctgctcccgccgccgcgcccggcgcatcgttgccatggctggatccggcaagttcttcgtcggaggcaactggaagtgcaatggaacaaaggactccattagcaaacttgtctctgaattgaatgctgctacccttgaaactgatgtagatgttgtggtggcaccctcatttatctatattgatcaggttaaagaattcac

SEQ ID NO: 264663 - DNA, 1076 bp, Zea mays
caattatgcccatcgaaggcccaactagaacccaattacaagtataactccattcccctccgtcctcccgcatcaactcgaaccgaagggacgaccgagcggagtctagactcgagagcaacctcgacctcccggatctctctcccacccacgcctcgtcggcgccgtcgtctgctgcagcgatggcctcccccgacctgctcttcaatctgcggaacctcttctacctgggcgcctaccaggcagccatcaacaacagcgacgtcccgggcctcgacgccgacgccgccgctgagcgcgacgccatcgtcttccgctcctacatcgccctcggctcctaccagctggtgatcagcgagatcgactcgtcagccgctacctcgctgcaggccgtgaagctgctcgcgctgtacctcactggagacaaggaaggtgctatctccagtctcaaggaatggttgagtgattcagcaattggaagcaatcctgttctgcggttgattgctggaattgtatttatgcatgagcaggactacaatgaggctctcaagcacacacactctggaggaactctggatttgcatgcattgaatgtccagatcttcatcaagatgcatcgttcagactatgctgagaagcaattgaagatcatgcaacaaattgatgaagaccatacacttacacaacttgcaaacgcatggctgggcattgctgttggtggctctaagatccgtgaagcttatctcatattccaagactttgctgaaaagtacccaatgacagggatggttttaaacgggaaggcagtctgctgtatgcacatgggaagctttgaggaggctgagactctgttgcttgaagcgttgaacaaggacgcaaaagatcctgaaactcttgcgaatctaattgtatgtaatctccacttaggcaaaccatcatcacgatacctcaggtacgaaactgaaaaaatatctttagtttcttgactttcttctgctattctgccagtcattatgtgattgggtatgctttgtcttgtgaatttgaactaaaattcagtaaatacatgataaact

SEQ ID NO: 264664 - DNA, 847 bp, Zea mays
gtcttttacataggcctacggtcctacgagctggtgatcatcgagagcgactagggagtcgctacctctgtgcaagccgttaagctggtgcggctgtacctgactggaaagaaggaaggcactagatccagacgtaaggaatgggatcgtgatggcatcacttgggagcgatcactgtgtgagagtgattgctggaattatatatatgcatgagcaggactgcaatgaggctctcaagcacacacactctggaggaactctggatatgggtgcgttgtatggacacagcttgatcaagatgcctagggcagactatgctgagaagcaattgatgatcatgcaacaaattgatgaagaccatacacttacacaacttgcagacagctggctgggcacatgggaagctttgcggaggctgagactctgttgcttgaagcgttgaacaaggacgcaaaagatcctgaaactcttgcgaatctaattgtatgtaatctccacttaggcaaaccatcatcacgatacctcagccagctgaagctatcgcatcctgaccatgtgctagttaagaatgcggcagcatcagaagcgaccttcgagagggccctccaagccgttgcttgagctcgacacaccccacccagccagattgcaggaatcagcacattctggtctcttctccaattacgagtgtattaacccagagtatggtggttttggttgcctgtatcgtcgctgttaatgcgactccgccagtcttgtactacaaactgctgtataaacggatatgtcgaatattgaatccttacatctgttgccaataaaaaaaaaataaaaaaaaagggcgccc

SEQ ID NO: 264665 - DNA, 931 bp, Zea mays
cagtacggtcggaatccgggccacgccgcggccgtggcgatcccagcatccgagagagctccacaggccaggtccccatcgccgcggcgcttgccccacctctcccccgcccggtagtagcctcgccgccgttgccgagatggggttcgtgtccttcgtcgggagggtgctcttcgtcgccgctttcctcctctccgcctaccaggagtttaatgaattcggtgctgatggtggaccagcagctaaggcccttcggcccaaattcaacgtgtttgtcaaaaatgtatctgctcatctgggagtagctgtgccacacattgagttgaagcatgtgattgctgctacaattggtcttaagggtcttggaagcctcctttttattttgagcagctctctcggtgcttatctcctgctgctgtaccttgctttgatcactcctatcatccatgacttctacaactacgatatggagaaggcagaatttgcaggcctctttgcgaagttcacccaggatttggcgctgatcggagctctgctcttctttctgggcatgaagaactccatcccgaagcggcagggcggcaagaagaaggcccccaaggcgaagacgaactagggctgcttagatagctgcacgcctcaggcggggtgtatcaggccacaggtctatttcgaagcaggcccagcgcgatgcagcgaatgccatcgagctgcgcttttacatgtttatcatcagattccattttgcggggcacggcccggacaaaggtgtgaccggggtgggttaggcgactagattgcacgattatgtacttgcgatttgtttgttgaactgggttgccgacagttaatcttcatttgattttatcttgttagcagcgccaaaaaaaaaaaaaaaaaaaaaaaaaaaaaaaaaaaaaaaaagggcgaa

SEQ ID NO: 264666 - DNA, 617 bp, Zea mays
ttctgggcatgaagaacttccatcccgaagcggcagggcggcaagaagaaggcccccaaggcgaagacgaactagggctgcttagatagctgcacgcctcaggcggggtgtatcaggccacaggtctatttcgaagcaggcccagcgcgatgcagcgaatgccatcgagctgcgcttttacatgtttatcatcagattccattttgcggggcacggcccggacaaaggtgtgaccggggtgggttaggcgactagattgcacgattatgtacttgcgatttgtttgttgaactgggttgccgacagttaatcttcatttgattttatcttgttagcagcgcaggaaccgttgctgattcagtggttggtagtttctttcacttcctgagttgttggtttagggcatgttcgttttgctcttaatccatgtggattgagtgggattggataggtttaatctcaaataagttaaaatctttcataattttttttaaaaaaaaaaaaaaaaaaaaaaaaaaaaaaaaaaaaaaaaaaaaaaaaaaaaaaaaaaaaaaaaaaaaaaaaaaaaaaaaaaaaaaaaaaaaaaaaaaaaaaaaaaaatttttgggggggccccc

SEQ ID NO: 264667 - DNA, 686 bp, Zea mays
cgcccgtctcgatcccacaggatccgagagacctcacaagccgccacgccaggtccccatcccatcgcggcgcctgccccacccccgccctgctcccgcccggtagtagtagcagagcctcgccgccgctgccgagaatagatggggttcgtgtccttcgtcgggcgggtgctcttcgtcgccgctttcctcctctccgcctaccaggagtttaatgaatttggcgctgatggtgggccagcagctaaggcccttcagcccaagttcaatgtgtttgtaaaaaatatctctgcacatctgggagtagctgtcccgcacattgagttgaagcatgtgattgctgctacaattgctcttaagggacttggaagtctcctttttattttgaccagctccctcggtgcttatctcctgctgctgtacctcgctctgatcactcctatcgttcacgacttctacaactacgacacggagaaggaagaattcgcgcggctgtttgcgaagttcacccaggacgtggcgctagttggagctctcctcgtcttcctgggcatgaagaactccaccccgaagcggcagggcaagaagaaggctcacaaggcgaagacgaactaattagaagttgctcgctcgggctcaggcgggtgtcaggagacgaatagtggcccaatgcgaaacagtcgatg

SEQ ID NO: 264668 - DNA, 1879 bp, Zea mays
cttcgatgcaactggtgtggcggcggcggctgcgggcggcgtgatacggcaccccctcctcccgcccccttatgcaagcgggcaatcagaactccgatcacccgcacgccggcacgccagtgtcgtcttcgcaaccatgaactccatcgagcctttcaaccggctggtgaggctggcggcccgcgccttctacgacgacgtctccatgaagggcgacaaccagcccaagacttcccgcggggacaaccgcggcatggccgtcgtcgtcctggacgcgctcaccagacgaccgtgggttcgggaggaagatttggctaaagcattgaagctccactcgaaacagctgcgtcggattctccgtttctttgaagaggagaaactagtcacgagggatcatcgaaaggagtcagcaaaaaacgcaaaagcacataatgctgcagctgctaatgatggtcaaccaattgctaaggagggagaagagaaagtcaagctgcacacacattcatactgttgcttggattatgctcagatctgtgatgttgtaaggtaccggattcaccgcatgaagaaaaaattgaaggatgaattggacagcagaaatacaattcaacactatatatgtcctagctgtaataaaagatactcagcctttgatgcactacaactggtaagctacacggatgagtacttccattgtgaaacttgcaatggtgaactggttgctgaggatgacaagcttgcttctgaggaaatgggagatggcgatgacaatgttagaaagcgcaggcgtgagaaattaaaggacatgcagcaaagaatagaagagcaattgaagccattggttgcacaacttgatagagtgaagaatattcctgcaccagagtttgggagtctacaaacatgggaaagagcaaatattggtgcttttgcaattggtgaccctgctgcagctgattcttctaggaattcacaagggcagtatggtacaccaatgccatacattggagagacaaaggttgaagttgatctgttgagtgatggtgtgaaagaaggtgctgaatcaggtaaaactgattctgaactgaaagttttacctccatggatgatcaaggatggcatgaatcttactaaggaacaacgaggagagataattgcgccacaaaaacttgagaaatctgatgccaaagatgacaagaagcatgacttgaaagatgatcatagtgttcaggaagaatacataaaggcttattatgaggccttgaggaaaaagcaggaagaggaagaagcaaaaaggagaatgcagcaggaaggcaaggtctttctcccagattttcaaactgaacgccaagtgggcaagaaatacaagcgggacggtgatgatgaaggtattgaatgggaagaacatcaacctacagcttctggttatgcaaccgaaacatacaaattggcagatttgaacgcggaggctcaagaatctggagatgatgaagatgataatgtgtgggaagagggttaatgctgaaaagataactggcgacccctgctccctctcgaattttgaactggtatcccgtcacacgggtcaaaattatttcactgatgagcctgattatgttgaacgcatgatcacaagaaatttttagttgaagatgcacaaaatacccttatatttgagtagcgccccaccatttttttcggtaccttaaaattttaagaagcgggttaatatttgatgtgtgggggcaacttacacgcctctgtttatctgaaaggaatcagagtgaaaaatgacagatccaaacttctatacgtacatgcacgtttatgtcctgaaagtgaaattgcaatctttcgatacccacgtttgacatatagttcc

SEQ ID NO: 264669 - DNA, 655 bp, Zea mays
aggaagaggaagaagcaaaaatcagaatgcagcaggaaggcaagatttctgtccatgattctcaaactgaacgcaagtgggcaagaaatacaagcgggacgacgatatgatgaagacattgaatgggaagagcatcaacctacagctgcagggaatgcaaccgaaacatacaaattggcagatttgaatgcggaggcccaagaatctggcgatgatgaagatgataatgtgtgggaagagggctaatgctaaaaagataacagactattcctgtgcggctgcgcccttaggattttggtatcccaccagaggtcgagagtatttcactaatgagcttagttatgttgaacgcatgatcccgagaaacttgtcaagtgaaaagccagcccctatgcatttttagttgaagatgtacaaattatacttaaatactttatgagccggtcagcagtttcccctgttacttcgaagagctgttgtagtcttgtagactgttaatgtgtgggcaacttgcatgcctttgtttcgctgaaaggtattacacgtacatgcacgtttatgtcctgaaagagaaaatgcaatcgttgtagttgccattaaaaaaaaaaaaaaaaaaaaaaaaaaaaaacaaaaaaaaaaaaaaaaaaaaaaacaa

SEQ ID NO: 264670 - DNA, 269 bp, Zea mays
tgggagatggcgatgacaatggttggaagccccggcgcgagcgcttaaaggacatgcagcaaagaattgaaggaatgcaaccggaacatacaaattggcagatttgaatgcggaggcccaagaatctggcgatgatgaagatgataatgtgtgggaagagggctaatgctaaaaagataacagactattcctgtgcggctgcgcccttaggattttggtatcccaccagaggtcgagagtatttcactaatgagcttagttatgttgaa

SEQ ID NO: 264671 - DNA, 791 bp, Zea mays
accggaagggttcggtttgacccacttgcgtttcggacgcagacggaaacgaagaaaccctcctccaccaacccaatccagctacatccgtctgggtgaactccagggccaggagcagttcgccgccttcgttcgcatcacctacgcggttcaatccaactggcaggaaggaacgtgatggccaagacgagctcgttcaagctggagcacccccttgagaagaggcagtctgaggctaatcggatcagagagaagtaccctgacagaattccagtgattgttgagaaggctgagaggagtgacattcctgacatcgacaagaaaaagtacctcgtccctgctgatcttacggttggacaattcgtgtatgttgttaggaagagaatcaagctcagtgctgagaaggctatcttcatatttgtgaaaaacacccttccaccaacagctgctctgatgtcttcaatctatgaagagaacaaggacgaggatgggttcctctacatgacttacagtggtgagaacaccttcggactgctctagatggcccgcaatggggtcgccttgcccttgcccatgcctcctgtaaataagacctgccaagcaactgtgtatattctggtttcgtcgtcgcaagtggttgcgctctactgctaaagcctacctatcagttgtggagttgtcgtcgatgttatggacacacttaatcaagtttattaattgactggacctgaatcttgggtcagtcacgtgacatctcctatgtcgtttacggttactggccattgtactcc

SEQ ID NO: 264672 - DNA, 1000 bp, Zea mays
tctatccgccccccgtcttttcccttttctctaccctctatctacccaccgttcccgtctctccgccgcttccttggaagacgaagaaaccctcctccaccaccaacccgatccagctacatccgttgaggcccgtgcgtttcttccctgttctcccatcaatcgacctagccttacgccgaccaggggcttcctctaatcgatctggtgtctgttctgtggtattggtctgggtgcactccagggccaggagcagctagccgtcttcgttcgatccgttcgcaccccccaacgcggttcgatttgtaggaaggagcgtgatggccaagacgagctcgttcaagctggagcaccccctcgagaagaggcaatctgaggctaaccgtatcagagagaagtaccctgacagaattccagtgattgttgagaaggctgagaggagtgatattcctgacatcgacaagaaaaagtacctcgtccctgcagatcttacagtcgggcagttcgtgtatgttgttaggaagagaatcaagctcagtgctgagaaggctatcttcatatttgtgaaaaacacccttccaccaacagctgctctgatgtcttcaatctatgaagagaaccaggacgaggatgggttcctctacatgacctacagtggtgagaacaccttcgggctgctctagatggcgcaacaccacggctcaccacaatcgggtctgccttgcccttgcttccgtactgatgccctgcctcctgtaaataagacctgccaagcaattgtgtatattctggtttcctcgctcaactgctggaagtctaaaacctaccttatcagatgccgtcgatgtaatggacaccgtttaaattaagtaattgactggacctgaatctcgggggtcctatgacctatgtcgtttacggttactggtccttgtaaatgctgtaacgaggtcaattggattcgcagtatgctattgaatcccattgctgttgccgtttt

SEQ ID NO: 264673 - DNA, 491 bp, Zea mays
gccttttacataagcaacccccccgacctcttttccctaccctctctttcgttacctacaggctacagctcccgtctctccgccgcttgcttggaaaacgaagaaaccctcctccaccaacccaatccagctacatccgtctgggtgaactccagggccaggagcagttcgccgccttcgttcgcatcacctacgcggttcgatccaactggcaggaaggaacgtgatggccaagacgagctcgttcaagctggagcacccccttgagaagaggcagtctgaggctaatcggatcagagagaagtaccctgacagaattccagtgattgttgagaaggctgagaggagtgacattcctgacatcgacaagaaaaagtacctcgtccctgctgatcttacggttggacaattcgtgtatgttgttaggaagagaatcaagctcagtgctgagaaagctatcttcatctttgtgaagaacacccttccaccaa

SEQ ID NO: 264674 - DNA, 392 bp, Zea mays
tcgctacgcgtccgcaccgttcccgtctctccggcgctttcttggaagacgaagaaaccctcctccaccaccaacccgatccagctacatccgttgaggcccggccaggagcagctagccgtcttcgatcgatccgttcgcatccccaacgcagttcggtttgtaaggcaggaaggagcgtgatggccaagacaagctcgttcaagctggagcaccccctcgagaagaggcaatctgaggctaaccgtatcagagagaagtaccctgacagaattccagtgattgttgagaaggctgagaggagtgatattcctgacatcgacaagaaaaagtacctcgtccctgcagatcttacagtcgggccagtcgtgtatgttgttaggaagagaatc

SEQ ID NO: 264675 - DNA, 440 bp, Zea mays
cgcgtccgtctccgccgcttccttggaagacgaagaaaccctcctcctccaccaacccgatccagctacgatccgttgaggcccggccagggagcagctagccgtcttcgatcgatccgttcgcatccccaacgcagttcggtttgtaaggttttactcggttggctcttagtatttgctgctcgatcggctagattgttctgcggcttctcggcgatttaatttggggattggctggtgcatgtaggtaggaaggagcgtgatggccaagacaagctcgttcaagctggagcaccccctcgagaagaggcaatccgaggctaaccgtatcagagaggagtaccctgacagaattccagtgattggggagaaggctgagaggagtgatatccctgacatcggcaagaagaagtacctcgtccctgcagatcttacagtcg

SEQ ID NO: 264676 - DNA, 1250 bp, Zea mays
gcgctgggccgccggcgccggcggcgaagcggaaggagggagggaaggcggtgaacctgttcacggccgtcaaccaggcgctccacatcgccctcgacaccgacccccgcgcctacgtcttcggagaggacgtcgggttcggcggcgtcttccgctgcacgacaggcctcgccgatcggttcggcaagagcagagtgttcaacacgccgctgtgtgagcagggtattgctggatttgccatcggcctagcagcgatgggcaatcgagctatcgcagaaatccagtttgcggactacatctttccagcctttgatcagattgtcaatgaagcagctaagttcagatatcggagtggaaatgaatttaactgtggaggcttaacgattcgaactccctatggtgctggtgggcatggtggtcattaccattcacagtcaccagaggctttcttctgtcacgttcctggactcaaggttgtcataccacggtgtccgcgcgaggctaaggggttgctgttggccagcatccgagatccaaacccagttgtattttttgagccaaagtggctgtatcgcttggctgttgaagaagttcccgaggaggattacatgctgccgttatccgaggcagaagtgattagggaaggaagtgatataacgcttgttggatggggagctcagcttgcggtgctgaaagaagcctgtgaagatgctgcaaaggatggggtgtcttgcgagctcatcgatctgaaaacactcgtaccatgggacaaggaaacggtagaggcctcggtgaagaagaccgggaagctcctcgttagccacgaggctccagtcaccgggggcttcggcgcggagatcgccgcgtccattgccgagcgctgcttccagaggttagaagcacccgtggcgagagtctgcggtctcgacacccctttccctctcgtgtacgagccattttacatgcccaccaagaacaaggtcctggacgcgataaaagccactgtagatttctgaaacatgttgcttgatcgatacagagtactctagttagatgtgcacggtttgtgctggtctgggtctgtagcctgccaggatgagcgatccacaaaccggcttatttgtattcaacaatacagcgataaataaagccgcaaggtgcaaaattgtaggatgtcatgatgtatcgaagtgttccccgcgaaattcatacgtatgtaattatcacactaatcagtggtatgttatgtc

SEQ ID NO: 264677 - DNA, 1074 bp, Zea mays
ctttctcttctccccttgtgtcgcgctcgcgcatctgaagcaagggggggaagggccaagggggatcggtcttgttctcggagagggttgagctgcttgacggttttgactcggatcatggtgtgcagctctatcagatagagagctgacgtgaggtgtgagacgcggatcgtggagtactactcagtaggagaggtggggagggggaagaaggcgatagccggggaggatggtgcttgtgcttgcgctgggggatctgcacatcccgcaccgggcgcccgacctccccgccaaattcaagtccatgctcgtgcccggcaagatccaacacatcatctgcactggcaatctctgcatcaaggaagtccatgactacctgaaaagcctttgccctgatctccatattaccagaggtgaacatgatgaggatgctcgatacccagagactaagacacttacaattggtcagtttaagcttgggctgtgccatggccatcaggttgttccatggggcgacctggactccctggcgatgctccagcggcagctggacgtggacatcctggtgaccgggcacacgcaccagttcaaggcatataagcacgagggaggcgtggtgatcaaccctggctctgccacgggcgcctacagcagcatcacttacgacgtgaacccaagctttgtgctgatggacatcgacgggctccgtgtggtggtgtacgtctacgagctgattgacggcgaggtgaaggtggacaaaatcgacttcaagaagactgcgacgatgcacggctagccctatccttccactccgtgattgagtgcaagacatgtctagcttctgtttcttttctttcagcttcttgattcagagcctcctgaacacgctttctacctgttcatgcgcaaagaactttttaggtctggttgttaacaatgtttctcggagccatgaatttaaatactatactttttaattgtcagaaaaagaagctagacatgtcttgcactcaatcacggagtggaaggatagggctagccgtgatcgtcgcagtcttcttgaagtggaaggat

SEQ ID NO: 264678 - DNA, 451 bp, Zea mays
gggggatcgatcttgttcgcggagaggggtgacgtgcttgacagttttgactcgaatccatggtgtgcatctctaccagatagagagctgacctgaggtggagacgtggatcgtggctcctggggtggaggtacaagcgtacagctcaataggagatcaagagtaaagagtgtggggaggggaaggacgcgatatcgggggaggatggtgcttgtgcttgcgctgggggatctgcacatcccgcaccgggtgcccgacctgcccgccaaattcaagtccatgctcgtgcccggcaagatccaacacatcatctgcgctggcaacctctgcatcaaggaagttcatgactacctgaaaagcctttgccctgatctccacattactggaggtgaatatgatgagtccgctcgatacccagagactaagacactttacaatggtcagtttaagc

SEQ ID NO: 264679 - DNA, 280 bp, Zea mays
gtcgcgctcgcgcatctgaagcaagggggggaagggccaagggggatcggtcttgttctcggagagggttgagctgcttgacggttttgactcggatcatggtgtgcagctctatcagatagagagctgacgtgaggtgtgagacgcggatcgtggagtactactcagtaggagatcaagacgtaggaggtggggatggggaagaaggcgatagccgtggaggatggtgcttgtgcttgcgctgggggatctgcacatcccgcaccgggcgcccgacctc

SEQ ID NO: 264680 - DNA, 697 bp, Zea mays
cgtcgctgtcgacacccgcgatggcattcgcctcggctttgaggtggagccgaaccaagacttccatgggctggtatgcgagggcgccaacatgctaccgtccaagttcatggaagatgcatttcgcgatcgccatggaaaaattattaacattaggcatctggatcaagtgatcaagtctgttaacagatggtatcaggagcgtggcctaactgggttggtttcatatgctgagatactttctggagggattctgaggctgcaggtttcagaagctgaggttaataacattagcattcgctttctagacaggaagaccggtgaaccaactcttggaaaaacacagcccggaaccatctcttcggcagcttaccaccaagaaagggcaggcttacaatagggcacaagtgaaaagggatgtagaaacaatacttactatgggaataatggaggatgttacgataattccacaaccagttggagattctagtaaagtggaccttgtcatgaatcttgttgaacgcccttcgggtggtttctctgctggtggcggaatttcaagtgggataacaaatggacccctttctggacttattggcagctttgcgtattcacatcggaatgtttttgggaggaacaagaaattaaatctctctttggaaagggggcaaatcgattcaatatttagattgaactt

SEQ ID NO: 264681 - DNA, 908 bp, Zea mays
ggcggcgcaacaccagctgttccagcgccaactcttcctaatgcagcaggcgcagtcccatccgcagcagctgtcgcagcaggccatgtcccgcttcccctccaacatcgacgctcacctccgccctctagggccgcttcgcttccaacagccccagccccagccccagccgtcccactcccagggtccatctcagtcgccgtcgcaggccacgcagcaggcgtcaccccagcagcagcagcagcaggcggcggcggcggcggcagcggcgcaggcacaagcacaggcccaggcccaggcggcacgggtacgaagccccgagatggagatggcgctgcaggacgccatgcgggtctgcaatccggacgtcaagacgcccttccagtccatcgaggacgctgtcaacaggttattaccttaccatgttgttgccgactatgaggctgaagaagatgacaggatccttgatagcgacacaacaggccagatcccttctcgcctgcagcaatgggaccataatattctggtgaagattgctgagttcacgacaacttttgacaagcaagtattggcatataacataatgaccaagaaaagggccatcggtgagttcaggtcggaggagcggctcatgctggagcaagccttattgcaggaggaaaagcaagctatgctgggactgagggcagagatggagtcgagagagaaagctggtcgcgaggctgccgaagtgaagatgcgtttggcaatggagcatgctcgtgctgaggcacaagctcactctgagatgatgaatcatggtcctataagggccagtgctgctgctttcgcaaggggaggatggtccgagtcatgacatggtgcaagaacatggcgaaaatgggtgggggaattctcaaagggatgat

SEQ ID NO: 264682 - DNA, 1588 bp, Zea mays
  unsure (1)..(1588): unsure at all n locations
gagttcctttacgggctcaaggacaggttcgatctcggggtcttcgtaggcgacctcgccctcgatgaggaagtcaccagtgacgacgagtccctggaggggctgcagcaggagcttgacaactgcaagaatgaccaggaagtcgcaaacattctagccagtggcatcaaactgcgcgagtacacaaaaggcgtcgagaataacatacgccaaatcgagctggattctatccaggattacattaaggaaagtgaaaatctagtttctctgcatgatcaaatttgtgattgtgacaatattttgttacaaatggaaacagttctgactggattccagacagaaattggttccataagttcagagataaaggtccttcaggagaaatctatggacatgggattaaagctgaaaaatcgtaaggctgcagaatctaaattgtcaaaatttgtcgaggatataatagtacctccaagaatgattgacataattgttgatggagaggtcaatgatgaatacatgaaaacacttgagactctaagcaaaaaaatcaaattcatcgatgctgaccccatggttaaatcatccaaggctctaaaagatgttcaacctgaggttgagagactacgacagaaagccgtctcaaagattttcgagtttgtcatccaaaagttctatgccttgagaaaaccaaagactaatattcagattctacagcagagtgttcttcttaaatacaagtacacgataaatttccttaaggaacatgctaaggagatatatgcagaagttcgtacggcgtatattgacaccatgaataaggtgctaagtgcacatttccgggcttacatacaagcattggagaaactacagatggacatagcaacttccactgatttgcttggtgttgaaaccagaagcacaggcttcattttctccattggaaaagaacctctgaaaacccgtccttcagtgtttgctctgggtgaacgaataaacattttgaaggaaatcgaccagccagcattgatacctcatatagctgaagcgaagtcacagaaatactcgtatgaagttcttttcagaagcttgcagaaacttcttattgatactgccacttcagaatacctgtttactgatgatttctttggcgaagaatccatattccatgatatatttgcaggaccgattcaagttgttgatgaacatttcaatactggactcctgaactgttatgatgcaatgggcataatgcttatgatcagaataattcatcagcaccaggtgaactttgatttaccttataatatgatggagcaccttgtgatttcgacatttatatattaagaataacgctgaggacaatttntgtttctggtctcacagtggctgtgagttgtgaacaatgtttgtaggaatttattgaccattcaatatctttggttggtggttggaagctaatagttttcatctagtttgagacaagagtttacaaagctgtttgtattggattggcttacagtcccatgtgggggttaccttgaaaatggtgaaatctaccatttttcggcgttcttgttaagcatttttt

SEQ ID NO: 264683 - DNA, 1560 bp, Zea mays
ttgctaagtgcacatttccgggcttacatacaagcattggagaaactacagatggacatagcaacttccactgatttgcttggtgttgaaaccagaagcacaggcttcattttctccattggaaaagaacctctgaaaacccgtccttcagtgtttgctctgggtgaacgaataaacattttgaaggaaatcgaccagccagcattgatacctcatatagctgaagcgaagtcacagaaatactcgtatgaagttcttttcagaagcttgcagaaacttcttattgatactgccacttcagaatacctgtttactgatgatttctttggcgaagaatccatattccatgatatatttgcaggaccgattcaagttgttgatgaacatttcaatactgtactcctgaactgttatgatgcaattggcataatgcttatgatcagaataattcatcagcaccagctcatcatgtttaagcggcgaatcccatgtttggactcttacctagacaaagttaatatgtcactctggcctcgcttcaagatggtgttcgacttgcatttgaacagcttgcgaaatgcaaatattaaaacactttgggaggatgatgtccatccacactatgttacaaggagatatgctgaatttacagcttctctagttcatctcaatgttgagcatggggacggtcagcttgatctaaatttggagcgattgcggatggccattgaggatttgcttgttaagttggccaagatgttttccaaaccgaagctacaaactgtctttctgataaacaactatgatttaacaatttccattttgaaggaagctggaactgagggtgggaaagcacaacaacacttcgaggaggttcttaagagcaacatcgcaatatatgtggaagagttgctcctggagcagttcagtagtttgatcagattcgtcaaatctcgtccagcggatgagacggctgcgaattccgagaaagccagcattgccgaagttgagccactggtaaaggatttcgcgagccggtataaggccgcgatcgagctgatgcactatgatgtgatcacatctttcagcaactttctttgcgggatggagatcttgagagcgacgctcgcacagctcctgctatactacaccaggctctccgagtgtgtcaagagaatcaacggcggctctgctctcaacaaggaccttgtctccatatcctccatcctgttcgaaatcaagaagtattctaggacgttttagttgtttcacccccttccatgtacactaggacggctagctgaggggtagctgtgtatccttactttgtaactggtatgtgcgactgcaggggaaacaagggcattttgtcgtggtttgtatcttcgtctgtgttacccgacttgacccctgcccctttccagcacagaactatgatctctaggctgtctccacagttatcctattctatcttctgtcctatcatctattttaaacttcattttgtaaacagtatcgattatagtgcaaatctacaattttatacgatcccccgtggtt

SEQ ID NO: 264684 - DNA, 548 bp, Zea mays
cggttcggaattcccgggtggagccacgcgtccgcggacgcgtgggcggacgcgtgggcggactcgtggggtcgtcttgtcgggtcttcaagccacaccaaaccacactgcgacacacagtaggcgaggcgaaggagaggcaaggcggcgcggcgggcaagatgtttgacgatcaagacctgggcttctttgccaatttcctgggcatcttcatctttgtcttggttattgcgtaccacttcgtgatggcagacccgaagtacgaaggaaactgatgtcctctagtgcaaagatcctattatctgcaggccgaaatagggctatactgttagctaatgctagtgagatcgcttgacactttgagtgcatatcatggaagctggacatgcagttcctggcattttggttttgcccatgttttaatctgctgaattagtaaatcctggagaattcaaaagcgttttcaagtactgcagttggtggttgtttctggtcctagtgtatgcatgccagaatcttatgaataatattctttgttttgttgccag

SEQ ID NO: 264685 - DNA, 690 bp, Zea mays
tagggatccaaataagcaaatttgccctccctacgcacccactgaaatcccttcaccaagttgaggacctcctccgaatccgagggttcaagcgaccgacggcgaacatggcggcggacggcggcccagcgacgtcggcgctggaagaggccctcaagcccttccaggaaagagcctccgaggctgagatacgcatagcgaagctggaagccttgctgtacaacaaagatggtccgagcggtggatccgaggcaacttcctctgccgtgaaggatctccagtcgaagctagatgtggttactgcagaatgcttgactgaaaaggagaagaacaagaagctgaccatggagaacgagaagctccagtaccgcatgacccatctgatccgtgcgataaaagaggcggaatcgagataggagcagcccggcgaggccgatttcaaagcctgatgtcgaagtgttccccacccgccttgctgatcctacacgctgttcctgcatctacctcaagttatcattgtgatcttgagatagagcttggtcacaagtcaagactgtattatcaaactgtcgattgaaaatgatgatgtgtgcacagctttctgtcttcacctgaccccatctcgaagggcacattggaacacaaaatgttatctgaaatgacagttcatattttgaaacatttcgcccc

SEQ ID NO: 264686 - DNA, 1034 bp, Zea mays
ctttccctcctcagcttcagccttcagctcgtctcctctcctttcctttcctctgctctcctctccacagctgcagccagagccacccaccttatcgtcatcctcgctcgctcctcatcgccagcgcctcctcctcctcctccttcttccccaccgctgccgacatggctgcgcaagaagagaagaccgctgttgttgttgctgctgctgccgatgtcgcgacagaggagcctacgccggcggcggagcagcaacctcagccggctggggcggcgcgcagggcaggaccatcggcgcccggcggggctccgcccaaccccttcgacttctccaccatgatgaaccttctcaatgaccctagcatcaaggagatggcagagcagatcgccaaggacccggcgttcacggagatggcggagcagctgcagaagacggtggtgtccccgcggcagcaacagcagcagcaggcgcggcagcagcagcagcagctggacccgcagaagtacgtggcgacgatgcagcagctgatgcagaacccgcagttcgtggccatggcggagcggctaggcagcgcgctgatgcaggaccctgccatgtccgccatgctggggggcctcaccaacccggcgcacaaggagcagctggaggcccgcgtcgcgcgcatgaaggaggaccccacgctgaagcccatcctcgacgagatcgagtccggcggccccgccgccatgatgaagtactggaacgaccctgaggctctgcagaagttcggccgcgcgatgggcgtcggcgtcggcccgtccggcgaggccggcggcgcagagcacgccgaggcggaggacgacgctggggaggaaggcgagtacgaggacgagtccatcgtccaccacaccgccagcgttggcgacgtcgagggcctcaagaaagcgctggaggacggcgcggacaaggacgaggaggactcggaagggcggcgtggcctccacttcgcgtgcggctactgtgagctccagtgcgcgcaggcgctcctggaggcc

SEQ ID NO: 264687 - DNA, 310 bp, Zea mays
cggacgcgtgggcggacgcgtgggcggacgcgtgggcggacgcgtgggcggtggtgtccccgcggcagcaacagcagcagcgagcgcggcagcagcagcagcagctggacccgcagaagtacgtggcgacgatgcagcagctgatgcagaacccgcagttcgtggccatggcggagcggctaggcagcgcgctgatgcaggaccccgccatgtccgccatgctggggggcctcaccaacccggcgcacaaggagcagctggaggcccgcgtcgcgcgcatgaaggaagaccccacgctcaagcccatcct

SEQ ID NO: 264688 - DNA, 1780 bp, Zea mays
cccacgtgtccgggactctcagattcccatctcgtcttcttatctccacttctccctccacacacatcccctcctctctctcctctgtttataaaactcgccaggcgcaatctctctcgctccgtccatccccgtcgccagcatcgcttccacttcggtctcagcgacggtcgccaccaccgctcccctccctctccccctcctcgcccagcggcaattaccacagcctccccagcaagccgggatggctgcactcaaggcatcgttccggggtgagctcagcgccgcttccttcctcgactccagcaggggacctctcgtccagcacaaagtggattttacgtttcaaaggaagggcaaacgagctatttcactgagaaggacatgctgttctatgcaacaggctccaccaccagcatggcctgggcgagctgttgctgagcctggccggaggtcatgggatggcccaaagcctatctcgattgttggttcaactggttccataggaacacagacattggacattgttgcggagaatcctgataagttcagagttgttgctcttgctgctggctccaatgtcacgcttctagctgatcaggtcaaaacattcaaacctaagttggttgctgtaagaaacgaatcattagttgatgaattgaaagaagccttggctgattgcgaagagaagccagaaattattcctggggagcaaggtgtcatagaagttgctcgccatccagatgcagttacagttgtcacagggatagtaggttgtgcagggctgaagcctacagttgctgcaattgaagctggtaaagacatagcattggcaaacaaagagacacttattgcaggtggtccttttgtgcttccccttgcacacaaacacaaagtgaaaattcttccagctgattctgagcactctgcaatatttcagtgtatacaaggcttgtccgaaggtgcacttcgtcgcattattctaactgcatcaggtggtgctttcagggactggccagttgacaggctgaaagatgtaaaagttgctgacgctttaaagcatccaaactggaatatgggaaggaagatcacagtagattctgctactttattcaacaagggtttagaagttattgaagcacattatttatttggtgctgaatatgatgacattgagattgtgattcacccacagtctatcatacactctatggttgaaacccaggattcatctgtcctagctcagttgggatggccagatatgcggttaccaatcttatacaccttatcatggccagatagaatctattgctctgaggtcacctggccccgtctggatctttgcaagttgggttcactgacattcaaagctccagacaacgtaaaatacccatcaatggacctagcctatgcagctggccgcgctgggggcaccatgacaggagtcctgagcgctgctaatgagaaggccgtggagttgttcattgacgagaagattagctacctggacatattcaaggtggtggagcttacatgtaacgcgcatcggaacgagctggtaacaagcccgtcactggaggagatcgtccattacgatctgtgggcgaggagatatgcagccagtctacaaccatcttctggcctgagccctgtccctgcataataggtcgtcacgacaacgttgtacagcaggagttctaagatatgatgtgtttgtggctcctggttccatgttcaattgtcaggcccccacatgaataaaatgcatctattccatgtg

SEQ ID NO: 264689 - DNA, 527 bp, Zea mays
taccggtccggaattcccgggctcgaatggtcgaacagtagtttgctcgctattatccatggcgacttctacggctgctgccactgcactgctccgccccaggccggcagttccagccaagttggcgcagaggaggtgcctccatgcggttgctgggtggacgacgatgaggaggaggggagctgcaggggtcgtgcgagctttcttcaaccctctcggggatgagcgcatcctccgagaagccatcaaggagccagtagcattcatgggtggtgtgtttgctggcctcttgaggcttgacctgaatgaggatcctctcaaggaatggataagtcggacagtggaggcttctggaatagctgaggaaaacagctctgaagaatcaagtgaggcagatcaaaatgatgcacctcagcaaattgagattgagtgaggtgcattgtctacttttgtccacttgtcacttttcccttgtaacttatcctgaacctatgtgacacctgattcatcacgggcttggcaaaaac

SEQ ID NO: 264690 - DNA, 847 bp, Zea mays
cgtccgggagacacatgcacaggtgagccagatgtacttggttgcaccactagacttgcatttttctatcctatatgatgtattgaagaaacatgtcgcagaagatgcagactacaaagttattatattctgtactactgcaatggtcaccatccgcgggcccgggcttctctcccagctgaaactgaatataagagagattcattccagaaagtcgcagtctgcaagaactaaggtctcagacgaattcaggaaatcaaaaggtttgatactggtcagttcagacgtatctgcccggggcgttgactatcctgatgtcactcttgtaatacaggttggagttcctgcagatagagagcagtacatacatagactaggccggaccggacggaaaggcaaggaagggcaaggactcctactattggcaccttgggaaaaatattttcttggtgctgttaaggatttgtcaatagcagagtctgctgtaccaccagttgattcaagtgttgagacagaagtcagaaatgcggtcagaaaagtagagatgaagagcaaagaatgtgcctatcaagcatggttagggtactacaactcgaacaagaccattggtcgagataagtccagacttgttcaccttgcagaagagttcagccaaagcatgggtcttgcagttcctccagccataccgagaaacattcttcgcaagatgggccttaacaatgtctctgggcttcgttcatctaatctcgatgtcacgatatcaactcagaagacgtgtgctacaggaacgtacatgcatttgaccagccataatgctgttaacttcgtaaacatcatttgttgctgg

SEQ ID NO: 264691 - DNA, 772 bp, Zea mays
ccacgcgtcagatcgtactggaccaatctgccaccacactttgatcacacacaggaagttgagatcagaaaaatgcaggctgccgctactgccgccgggttctcggccgtgctgcccgccaagggcaggccggcggcgaggagcagggtggtggcccgtgtccccgccacaaggaggagcgtccgtgtagctgccgtcgtcgcgaccgaggccgcgcagatcgactacagctcaagcgtctcggtgttcccgatggaggcctgcgacctgcttggtggcgacgcgtgcaacgggcccatgttcccggaggccaagcccgcctcggcggcggcggcggcgagcaggagtgtggtcggggtggacagggactacctgtcctacgacgagccaaagacggtgttcccgggcgaggcgtgcgatgaccttggcggcgagttctgcgaggcgccgtaccaggacggcgtctccaaggagctggcgcacgcctgaagaccctgatccatccatttctgtccaccacgctatgtacgtatgtgtagcagatggtttacatctacgtgttagagcccggagagctggagaagctagctagcgtgcttacagaataacagcagccaagcaaagccaagggtgtgtatataataggcatgccttgggttgtgtcagctgcgactgtatgtatagtttaaaccaagatgaaatggtactgatggtgatattccgtgttttacgatacaaaggctagaaaatagattttgcctccgatcgtgat

SEQ ID NO: 264692 - DNA, 1561 bp, Zea mays
  unsure (1)..(1561): unsure at all n locations
caggtctaaatangcttcatcgttcaaatagccggaaccaaaggaacaggggatcaagaatcaaaacactactccaagctaccttgcttataggtgttattttttggctcctatatcaggtgaagcattcctatgataagaaaaatgagtacttggatgatgctgaggatcagcttgcccataatgatagaagcatgttccaggcgaggaaacaaaaggcaggtagttacagtgatagcaacgtccaaatggttgtcgacaattctgatgtaacaactaaaccagaggaaggtgatgtagatcatcattctgatacttttgatcataacgagaagactgtagaaactgtgttcgataaagatagtactaacctgcatgaagatgacaagagaaacactgagagttcagaagcggaaggacaagtcaacagtggagatagtaatacagaagctaataataataagaatgaagatgaaaccaccagtcttgtagaaggacgcaagcatgatactgaatccaactctgctgctgagagtaaaagtgaagtcaattcaactggagatgaattgtcccaaaacaatcatgcacaagaggaaaacactagggaggcaagtggaatgtctcatgatgaagtagcgcatggtgaccaatcaaccagtgcaagtggaacttggaatggatcagatggagaaggtgagaaaaaggaggcagttgatactcaaactggttctgaatcccttcctgatgatgccaaggctgaagcaactgatgaccgtgctactgtcagcctttctgacgaaaccgggaacataccatcagttcatactgataattcgcaaaatgatgccagtgaaaaccaaggagatgcaacttacactacctcggattcgtctgagcatggcattgttgaggctgtccatattgaaactggattggaacatggaagtgcaacagcatcatctgggactggatctggtgatgacagcggtaactcatctgatagcgcctctgcaggaaaaaatacggagactctatctggtgatgataagaccaactccagcagcactccgcatgcggctccggatccctattttgcggagcctagctcactattcatcagtccagcaggctccgcatccggctccgtaaaacgcacggcctgtacctgcactccccatttccacgctttctctctcctctccgcagctctctgcgtgcgcgcgcggctgctcgcgggccccaggtgtcatagactgcatgcggagtgggatgtggagtgttgctggaaacggagacggatacggagaggagagagaaactgttggccgcgcgttttagggatacggagagggagtctgctggagttggtcttagagcccggagagctggagaagctagctagcgtgcttacagaataacagcagccaagcaaagccaagggtgtgtatataatagacatgccttgggttgtgtcagctgcgactgtatgtatagtttaaacgaagatgaaatggtactgatggtgatattccgtcgttagaaatagataggtaacaggaaa

SEQ ID NO: 264693 - DNA, 677 bp, Zea mays
cagcttgttgagatcagaaaaatgcaggctgccgctactgccgccgggttctcggccgtgctgcccgccaagggaggtccggcggcgagcaggagtgtggtcggggtggacaaggactacctgtcctacgacgagccaaagacgcactggactgcagggtgttcccgggcgaggcgtgcgacgacctcggcggcgagttctgcgaggcgccgtaccaggacggcgtctccagggagctggcgcacgcctgaagaccctgatccatccatgtctgtccaccacgctatgtacgtatgtgtagcagatggtttacatctacgtgttagaccaactccagcagcactccgcatgcggctccggatccctattttgcggagcctagctcactattcatcagtccagcaggctccgcatccggctccgtaaaacgcacggcctgtacctgcactccccatttccacgctttctctctcctctccgcagctctctgcgtgcgcgcgcggctgctcgcgggccccaggtgtcatagactgcatgcggagtgggatgtggcgtgttgctggaaacggagacggatacggagaggagagagaaactgttggccgcgcgttttagggatacggagagggagtctgctggagttggtcttagagcccggagagctggagaagctagct

SEQ ID NO: 264694 - DNA, 982 bp, Zea mays
cccacgcgtccgcggacgcgtgggtggagatggtgagaaaaatgaggcagttgatattcaaagtggttctgaatcccttcctgataatgccaaggctgaagcaactgatgaccgtgctactgtcagtcttcctgatgaaaccgggaatataccatcagttcatactgataattcgcaaaatgatgccagtgaaaaccaaggtgatgcaacttacactacctcggattcgtctgagcatggcattgttgaggctgtccatattgaaactggattggaagatgaaagtgcaacagcatcatctgggactggatctggtgatgacaacggtaactcatctgatagcgcctctgcagaagaaaatactgagactgtatctggtgatgatgagaagggcatgggaacaggtacaaccactgaagcgtcatattccatacaacagaactctgagaacagcagtgtctcagctgaggcagagaattcccaaggggattcttccagcggagtgaatggttcttcagaagagacatctaacaagggtgatggagctacagaaacgtctaacaagggtgagcaggtggatcccaagactgaaactagcacatccaccagtaacgtgcacaatgaatctcaaggggctgatggcagttctggatcaaataactcaattggtaacggccctgaacaaaccggtaaaactgaaaggcagtgataccactatctagacacgaacattgttttagtataaagatttgtttcctggagattgaagaggctagtactgaaccaagaaaaactgttcacattgtggcttatggtgattttagttgatactgctgaagtacaattgtgcacatcgcaagatcggttgtctgctatgcttattgcttatgccatgatttctcgtcaagttgtatcagaacgagtcattatagctgtacggttattaatctctactagtacaatgcccgtcccttctgttgcc

SEQ ID NO: 264695 - DNA, 577 bp, Zea mays
ttccgggaccacccacgcgtccgcaggacgcgtgggggcccgtgtccccgccacaaggaggagcgtccgtgtagctgccgtcgtcgcgaccgaggccgcgcagatcgactacagctcaagcgtctcgtacgtgttccctggccttgatcaacaaacaaccagtcggtgtagagctaagttctggatggtatggttagaatttgggtcggtgacactgacacgcatgttggtgacgctgcagggtgttcccgatggaggcctgcgacctgcttggtggcgacgcgtgcaacgggcccatgtgcccggaggccaagcccgcctcggcggcggcggcggcgagcaggagtgtggtcggggtggacagggactacctgtcctacgacgagccaaagacgtaagcagcagctagcaactagcataggataacccagcttttagcaccatctgttcttggtgattcgtcgaggcagcaaactaactgtggccatggtgaatccactggactgcagggtgttcccgggcgaggcgtgcgatgaccttggcggcgagttctgcgaggcgccgtaccaggacggcg

SEQ ID NO: 264696 - DNA, 522 bp, Zea mays
gtgatgacagggataactcatctgatagctcctctgcaggaaaaaatacggagactctatctggtgatgataagggcatggaaacaggtacaaccactgaagcgtcatattccaaagaagagaactctgagaacagcagtgtctcaactgaagcagagaactcccgaggagagtcttccattggagtgaatggttcttcagaaacgtctaccaatggtgagcaggtggatcccaagactgaaactagcacatccaccagtaacgtgcacaatgaatctcaaggggctgatggcagttctggatcaaataactcaattggtaacggccctgaacaaaccggtaaaactgaaaggcagtgataccactatctagacacgaacattgttttagtataaagatttgtttcctggagattgaagaggctagtactgcaccaagaaaaactgttcacattgtggcttatggtgattttagttgatactgctgaagtataattgtgcagatcgcaagattggttgtctg

SEQ ID NO: 264697 - DNA, 495 bp, Zea mays
  unsure (1)..(495): unsure at all n locations
cggaannacccgggtcggacccacgcgtaccgccgatggggaggcctgcgacttgcttggtggcttacgcgtgcaancgggcccatgttcnccggaggcgcaagctccgcctttcggcggcggggcggcggcagagccaggagtgttgnngtcggggtggacacgggaccctacctgtcctacgacgagggccaaggacgtcgtgttcccgggcgaaggcgtgccgacgacccctcggcggcgagttctgcgaggcgccgtaccaggccggcgtctccagggagctggcgcacgcctgagcctgatgcaaattcgcatccatatctgtctagaaccgagttggtctcggtagatcatgttagtcgggtagagatgttcacgccatgtaaggtatgtgtgtagcagtctagcatatgaccaagcaaggccaacggtgtatgtaatgtatacaggcatgtagtagaaaccaggatgaaatggtactggtgtgattca

SEQ ID NO: 264698 - DNA, 749 bp, Zea mays
tgctgttatctcatctgctgatctgaagagtgaatcctttaccgacccatggaagctttgcacagttacccaggtggaagaattgaagatcctaataagaatgtttcccatttgggctactactatcatattcagtgctgtttatgcccaaaactcttccatgttcatagagcagggcatggttcttgacaagcgcattgggtctttcaacattcctcctgcatctctctccacttttgatgtaatcagcgtcatcatgtgggtcccactctatgaccgcatcctggtgccactagctagaaaattcactggaagggagaaggggtttttctgagctacagcggatgggaattggattagtcctgtccattctcgcgatggtatctgcagctctagttgagttgaagcgtttagagattgccaggtctgaaggtctcattcatgagaaggctgctgttccaatgagcattctttggcaaataccacaatatttcttggtgggcgctgctgaggtgtttacttgtattggtcaagttgagttcttttacgatcaggccccagatgccatgaggagtttatgtagtgcacttgcacttattacagtctcactgggaaactatataagctccatcatactgacattggtgtcgtacattacaactcagggaggagatcctggatggatccctgacaatctgaatgaaggccatctcgaccggttcttttggttaattgcagggataaagctt

SEQ ID NO: 264699 - DNA, 779 bp, Zea mays
gtcagtttgtttgcgcgaaaaaggttaggaatcctcttgtgtcctggccgtcggccgtcgctgcgtcgttccagatttggggaaggaaatccggcaccgagattcgagtcgaaaaggacatcatttgctagatggcgcgtaccaagcagaccgctcgcaagtccactggaggaaaggctcctaggaagcaactcgctacaaaggcagcccgtaagtctgcacccacaactggaggagtgaagaagcctcaccgttaccgcccagggactgttgctcttcgtgagatccgcaagtaccagaagagcactgagttgctgattaggaagctgccgttccagaggcttgtcagggagattgctcaggatttcaagacggatctgcgcttccagagccatgccgtgcttgctctgcaggaggcagcagaggcctacctggttggtctcttcgaagataccaatctgtgcgcgatccatgccaagcgcgtgaccatcatgcccaaggacattcagctggcaagaaggatccgtggcgagagggcgtaagtctgtcgacgggaggaagaactctgcgctcgttttgtgtgttcgcctctctcaccctgtaagttttgtgagaagatgatctagtaaactgtacttggcctgtttgactgtagccgcagtagcatatgcatgcgcatactgttggctgttggcgtgtctggagtcttttatccatccattctagtactacttaataatcgtgatatatcaacgggttgctgaacgtgtatccagact

SEQ ID NO: 264700 - DNA, 737 bp, Zea mays
cacgcctcctacgcgcgcctcctggtgcagcacgccaccgccttcgtcgaggacctcgtccgcgtcggtgcgcgccgcgtcgccttcatcggcatcccgcccatcggctgcgtcccgtcgcagcgcaccatgtccggcggtctcgaccggggctgctcgcagggccacaacgagatcgccgtcgcatacaacgccgggatggtgcagcagctggcggcgctgcgggccaagtaccccgacacgctgctcgtcttcatggacatctacggcttcctctacgacatgatgatgcacccgcgcagctacggcttcacgcagtccaccagaggatgctgcggcacgggcctcctcgaggtctccgtcctctgcaacggcgtcacctccgccgtctgccaagacgtcggcgactacctcttctgggacagctaccacccaacggagaaggcgtacaagatcctcgccgacttcgtcttcgacaactacgtcaagctcatcctcgtctagcttaccattattttcatttcatgagatggatttgatctgctggattatgcattaattgtttgctgctgtatttacatttgcttgtctgattaattgtttgctagctaatcttccggcctctacatctctctatctatctatatttacgtgcatttattacgactctattaattgaattattgtacgtccgtgtcataaattaattaattaatactataataatagttgtatct

SEQ ID NO: 264701 - DNA, 2404 bp, Zea mays
cgcgctccgctccccacgccagcacgcccgagccccgaatcgagtcccctaccccatcgatgcccgccgcccgcctttccccgccattcttctagaacctacccagctctcggggaccttctctcccagcccgagatccctccccaccgagatcccgcgccgccatggtgtcgtgacggcggcggaggcggcgtcatggagcgggagcccaagtcccccgacgaccgccctgagcccgctgcggcggcggcgcagccgcagccgctggagtggcggtttgcgcaggtctttggcgagcgcgccgcgggagaagatgtgcaagatgtggacataatctctgcaattgagtttgacaaatctgggaatcatcttgctactggagatagaggtggacgtgtggttttgttcgaaagaacagacattgctgataatgcttgtcgaagagaacttgagaggcaacaatatcttgtttctaggcatcctgagttccgttacaagaccgaatttcagagtcatgaacctgagtttgactacctaaaaagtttggaaatagaagagaagattaacaagatcaagtggtgccaaacaaccaacaatgcactctttctcttgtctacaaatgacaaaacaatcaagtattggaaggttcaagagaaaaaggtgaaacgcgtttcagtgatgaatttggacacctcccaaagttcagacaatggttcaacttcaagtccgggtaccagtagttgcagagctcttcttccaaatggtggatgcacaggaaaaatgtacagtccaaacaacaatatgtcatttcctccaggaggatgcacatcgctgcgtttgcctgtggtggttacaggccaagaatttactcatgttgcgagaagcagacgtgtatatgcccatgcccatgactaccatattaattccatttcaaataatagcgatggagaaacgttcatatcagcagatgatctgcgaataaacctttggaatttagaaattagcaatcagagctttaacattgttgatgtgaaacctgcaaacatggaggatctaactgaggtgatcacttgtgcggagttccatccaactcactgtaatacactagcatatagtagctcaaagggtactattcggcttattgatctgcgacagtcagcactgtgtgacaaccatgctaaactatttgaggagcatgaagcacctggatcaagatccttttttacagagataatagcatcagtttcagatataaaatttgcaagggatggaagacacattcttagtcgtgattatatgacactcaagttgtgggatctaaacatggattcaggcccagttgcaacttttcaggttcatgaatacttacgtcctaagctttgtgatttatacgagaacgattcaatttttgacaaatttgaatgctgtctcagcggcgatggactccatgttgcaactggttcttatagtaatttgtttcgtgtttttggttgttctcctgaaagcgtggaggcatcaacgttggaagccagcagaaatcccatgaggcgacaggttgttgatccagcaaggcctgcacggactctgaccggtgctgtgaggagaggtggagagaacacaagcgttgacgccagcggaaactcttgcgacctttcaacaaagctgctccatcttgcgtggcacccatttgagaactccatggcgtgcgctgtcgtaaacagcttgtacatgtactacgcataggggaacgtgctacagagaactggcgcaggaaactgttgtcggttcgatggctggggagcccccgaaaagcggcagtcggtggttccacaagatcagtcctggcacaagctgacttcctcctcgggatttccttggtggatgtgaagctgaagcatgtgttactggtttattacccgcgcgggttggcacccaaggtatgacgacggctgtagctgcctgccttgtagcgaaattggctgcggaaggataaaaggaagcggtaagaagacagacagacaggactctgatgctagtttcaccaaaggtcacaggaatacctgctcacgtatcacaaaggctgtaagattttttttccttctcttttacgacgtgtaatgcaacatcctcagggctaaccaccagttgtcatggactctgatagttttctaccatagattggtactgtagctttatataagcagctgctgttgtattcattagattgttcggataagtgtaccagtgcacttggttgtgatttgcttgctgtggccgtgatgtggccccgctctctgtaccgttcaaattgaattccgattctatgtgcaaatgataagtgtttcgtagcccagctacggtgcgcgtcaaaaaaaaaaaaaaaaagaaaaaaagaaaaaacaca

SEQ ID NO: 264702 - DNA, 814 bp, Zea mays
cccacgcgtccgacttttccaagcgtggctaaacttgtactatttaaccattggaattgcggaaacccatacaggcgacaggttgctgatccagcaaggcctgcacggactctgaccggtgctgtgaggagaggtggagagaacacaagcgttgacgccagcggaaactcttgcgacctctcaacaaagctgctccatcttgcgtggcacccaactgagaactccatcgcgtgcgctgccgcaaacagcttgtacatgtactacgcataggggaacgtgctagagagaactggtacagtagtgctttttttttgcttgtttgcttgcttgaagtgaaaggcgtggtctttcacacgttcaaggatccaggcgcaggaaactgttgtcggttcgatggctggggagcccccgaaaagcggcagtcggtggttccacaagatcagtcctggcacaagctgacttcctcctcgggatttccttggtggatgtgaagctgaagcatgtgttactggtttattattaccgaagctttttggcacccaaggtatgacgacggctgtagctgcctgccttgtagcgaaattggctgcggaaggataaaaggaagcggtaagaagacagccagacaggtcacaggaagacctgctcacgtatcacaaaggctgtaagatttttccccccttctcttttacgacgtgtaatgcaacctagtcagagctaaccatcagttgtcgtgaactctgatagtttctgtcatagatactgtagattttatctatgcagctgctgttgtattcattagatctgtccggat

SEQ ID NO: 264703 - DNA, 963 bp, Zea mays
tttttataatctacgacaaggtcaccaacaggagccggggcttcgccttcgtcaccatggccaccgccgaggaggccgccaaggccattcagatgttcgatggcgccgtaagtaccgcaccggccaattggatcagcacttccacacctcacagaattgggatcctgctcttgcccgtgaatgtgcaagcgtgtgttctgacttctggcagatctttggcacatgtcttctccaatgcagctgctgggagggaggacggctagggtgaactacccggaggtgccgcgtggcggggagaggagaacagtcaccatgagtggccgcaggcgtgacgatggcacttacaagatttatgccggcaacctggggtggggggtgcgtgccgacacgttgaggaacgtgttcgagggtagggccggcttgctcgacgccagggtcatctttgagcgtgagactggtcgctccagagggtttgggttcgtctccttcagcaccgcagaggatgcacaggctgcattggagtctttggatggagtggagctggaagggaggtcgcttcgtcttagtctggcagaacagaacccgccacctggttccccgcctagcactgcgcaggcacagcaggaagaaacggattcaggcgcacctgctggtgggggtacggaggcagccagttcttcagaaccatctgaagcagaggtgggcgagagcaacttgcaaacagctgcaaattattgctaagcaggagccacagggttataaatgtgttgcaacgacctctaaatcctgccattcgagtccaaggtgtgctgatagggaagtacattttgacacgagtgatgctgtagcgaggattcagcatttgagctatacatatacactagaatggattaagtgttgttaggaatgtatttgtgtaatgaattctgcaaagtatgatctcaactgcagttgtgtagcctt

SEQ ID NO: 264704 - DNA, 661 bp, Zea mays
cttatcgcgtccgcgcgccgccaccgtccgggagcgccagcgccgactctacaccggcgagcgccagcggggactggggcgggggcgacgacgggccccgcgcctggacgcacgtcaagctggagcacccgtccacgttcgccacgctcgccatggacccggacaggaagcgggaggtcgtcgacgacctcgacatgttccgcgacggcagggactactacgcgtccgtgggcaaggcgtggaagcgcggctacctgctgttcggcccgcccggcaccggcaagtccaccatgatcgccgccatggccaactacctgggctacgacatctacgacctggagctcacggcggtgaagagcaacacggagctcaggaagctcttcatcgagaccaagagcaagtccatcatcgtcatcgaggacatcgactgctccatcgacctcaccggcaagcgaaagaagaagaagaaggacaagaacgacacggtacgaagaagaagaagaaggcgccgtgggaagaagaagacaaggacgaaggcagcaaggtgactctttcggggctcctcaacttcatcgacgggctgtggtcggcgtgcggcggcgagcgcatcatcgtgttcaccaccaaccacaaggacaagctggacccggcgctgatccgg

SEQ ID NO: 264705 - DNA, 588 bp, Zea mays
ggaaacgttggcctcagaacgagctaataaaaaagccgaagcggctgccagtaaatctgaagccgacacgaagacgacaccttcagaggaggcagctgctactcctagcgcggtgaacggggctcaggcctctctagagaacctcttgagtagagccaaagtgatcagtgcggatttctcgtgggagaagttcagcacacagtttgccgacgtgacgacccctctaacctcatcactagagaaggaacccaacaaggcacagatagccactgtgcgaggccaggaaaaagcgaagaagctggcaccgcggattgctgttgtgaagccagcagcgcagaaggcgaagcagccggatcccaaaccagaagtgagagcactgtttggtggcctcttcaaacaagaaacggtgtatgtggatgatgactaaaacgaggagcgccaatttatcctctacgtgattttctttcttttgttttttttttgtttgtccagtgccttggtgtactcttgaaataggaacgcttaaagttgtacaaaaattggctatatataagaaccaatgatcatgtgttacagaagattgtcgat

SEQ ID NO: 264706 - DNA, 946 bp, Zea mays
ggggcctacgagagcgcagccgtgggacaggtgaacaagtccggggccttcagcgtcccggtggccggcgacgccgtcggcgaggacggggagctcaagtcggaatgcttcgcgcagctcatccacagcgcgtcgagtgcgccgtgccccgggcaggagccctccaggatcgtcgccgcgccacccggccacacggtccacaccaacggcaacgggaagacgttcctcgcgctcggcggcagggtctaccaaccgtcgcccgagtgcgcctcggcgttcctctgccaccctttcttccacagcatgcaccaccatcacgtaggagtccacacgcctgtgggtatcccgcacctgcccgttcacggccactccgtgccgcctgtcaccaagccgccgccggtagacgttcctgagcacataccggcgccggtgcccgtgccggaccacaagcctccgtcgacgccgccggtagacgctcctgagcacaaaccggcgccggtgcccgagccggagcacaagcctccgtcgacgccggcgaacgctgcaccgtcgacgcccacggagccgtcagcgccggttaattcgccgccgaagccagcccccatctaccacccaccggcaaggcacgacgctgccactggcccgtagctcttcaagaggctgcgcccgggcttcaagaagttgcccttctttcctccttctgcgatggagagtcagcactagaatgtttggacagtgtttcttggcttttgcaggttatgcagttttctcggaataatttgtgacgttgattagttcagcatgaacgttgggtcagtttaagagtgtgtgttctacttccatctaatggaggcaatttcatgtcaaaaaaaaaaaccggaacgcattagaccatatagctgtgatggcattgagggattctatcaaaagagccctcaagctgaca

SEQ ID NO: 264707 - DNA, 763 bp, Zea mays
gcgtccgggacggtgggcagcagcaaagtcatcagcaacccacgatcggtcgatcgatcgggtacctgctagcgaattcgatcggtcgggtacctgctgctagcgatatatagcagcagcagcagccagcagatcgtcgccggcacgatggccagctcgtcgtcgtcgtcgtcagctctggtcgtcctcgtggtggttctagccgcggcggtggcgtgctccgcgacgcgccccgtccccgcgcggcagcgggcggcggcggcggaggaggaggacgtgaggcggccggacacgctgcacgagggcacggtgctgatcccggggatggggcgctacgagatcggcagccactacatcccggacatcggcgggctggaccacagcgtccccgccgccacccacggccagttcatccccggcgccgacgacacctgggtgcccaaccccggcttcgaggtccccaaccccttcatgcccggcgcggccactccctgaacacgtacccgcgctggcgaaggtggctctcggtcgatctgatcgtcgcgcgccgccgcccgccctgaacgaataatactactagctactactcgctctgctacgtattagctagccgtgcttgcctgctgcatgtacgcatgtcttcgtgtggcctgtcccacgtctctcttctagtctctgtgcactttacgctccagtgaagttactgaagtgtgcgcgcgcgatgcgtacagatcttttggccggtaagttgtgctggaagtgt

SEQ ID NO: 264708 - DNA, 476 bp, Zea mays
ctcgaaagcaacagcaagtcagcaacctacctagctagagctatcactatatcagtatcaggtacctagacctagcagcagccacacccacaccgtacgtcggcatggctaggtggtcgtcgtcagctctggtcgccgtcctcgtggtcctggccgcggcggtggcgtgctccgcggcgcgccccgtccccgcgcagcagcagcagcaggcggtagaggacgtgaagcggccggacacgctgcacgaggggacggtgctgatcccggggatggggcgctacgagatcggcagccactacatcccggacatcggcgggctggaccacagcatccccgccgccacccacggccagttcctccccggcgccgacgacacctgggtgcccaaccccggcttcgaggtccccaaccccttcatgcccggcgcggccactccctgaacaccgtaccgcgctggcgaaggtggctctcggtcg

SEQ ID NO: 264709 - DNA, 549 bp, Zea mays
gccggacacgctgcacgagggcacggtgctgatcccggggatggggcgctacgagatcggcagccactacatcccggacatcggcgggctggaccacagcgtccccgccgccacccacgggcagtacatccccggcgccgacgacacctgggtgcccaaccccggcttcgaggtccccaaccccttccgccccggcgcggccactccatgaacacgtacgatcgagtacgaccccgcaacgccggagaactcgatcgatcgatcatatcgtctcgcgccgcgctgaataacgctacactagccgtgcttgtgcttggctgctgaatgcaagcatgtcctttgttgtgtggtttaatttgtcccacgtacgtctgtgcagtgtttttgcagtttgtgctccagtgaagaagtgtgcacgcgcggtgcgtagaaagcgcatcagaactttgcatggcccggctgggtagcagcagcttgtttctcggtcactactgttacaaatacaaaatgctgcagacacatcaaaaaaaaaaaaaaaattatttaaaa

SEQ ID NO: 264710 - DNA, 1008 bp, Zea mays
ggaagctgttatgttggaccttcttagaatagttgggcatcacaaagcaaggcttgctacccaaattcgaacagttcagaaatcatatggcaatgcagacttcgataacattccttttggagaggacatgtatagtcgagtccgtggccggccacttctgattgatacatctgcaaggatcagtgatgacaaacccaggcctcgacctgtatcatcacgtgaggagcagaaagtcaagacaaatggctcggtagatattaagtccagttcccctgaaaatgctagttcaagcaactctgaaaagcaggagccgaaaaaaatggtgcctgaagatactcgggtgaagaacattaagggtgataatgtgatgccagtaacaccatctttagatcctgctacgtcaacttctaaggctggtaaagggaagacacgggaaccagagcccactgagcggcaaggagatgggccagtctcggtggctaatccaaagaaagaatctagaccagtttttgaagataacattgttctgggcgtagcccttgagggttccaggaggacactgcctattgaagaaggaaatcctcatctatcactatctgagactgaggtggacaccgaagaggcggcttcatcaccgaaggataagataggccaaagcccaaaactttgaggtccagaaaaaaagccgttcagaggaatctcgataggtcatccgagttcaaactgtatccttgtgaagatttgtcaccaagcctaccttttttgtgcgcttgtgcaaatacaatgccaccacacatcagtgttgtatgcttaaggggtaaattcacactgacgattattcagggaacattacctgtcagtcgtattgctacaggcttgtaaagaagcaagtgcttcaataggcattttgtaaagattatattattgctcacccaagtggcttcttgcatatcccccggcagttcggcatgcgccgttgctactaaaaaaaaaaaaaaaaaaaaagaa

SEQ ID NO: 264711 - DNA, 797 bp, Zea mays
cggacgcgtgggtgaaggtgctggtaatctcaagtcacagatcggaccgcccattctctgggaaaatcatctcccgccgtcagatctaggtcacccggcagccatcctataaaacctctccatctctcctccttacttccgtccccgcccacgcgacaggagaggaagagcgcgcggagagcgagagcccgggagaaacagcggccggcggcaaaatggtgcagcggctcacctaccggaagcgccacagctacgccacaaaatccaatcagacccgcgtggtcaagacccctggtgggaggcttgtgtaccagtacaccaagaagcgcgcgagcggaccgaaatgcccggtcaccgggaagaagatccaaggaattccacacctgagacctgctgagtacaagaggtccaggttggcaaggaaccgcaggactgtgaaccgtccatatggtggtgttctgtctggtaccgcagtgagagagaggatcatccgtgcctttttggtcgaggagcagaagatcgtgaagaaggttttgaagatccaaaagaccaaggataaggcctccaagagctaggcgatataggccacaatgtttgagtccattcgaatttatttcagcaggaaaatttctcgcgggtatggggaatcctgatacttacgctagtatgcgagatgatgtggtttaaattttgagcggaagttgcggatccttttattttttaaaatctcggtggaatgtttatcaaaaaaaaaaaaaagaaaatacatgtacgagtgcactttcaaaagaaataaa

SEQ ID NO: 264712 - DNA, 581 bp, Zea mays
cccacgcgtccggcgcggagagtgagagcccgggagaagcagcggctgggagcaagatggtgcagcgcctcacctaccggaagcggcacagctacgccaccaaatcgaaccagacccgcgtcgtcaagacacctggtgggaaacttgtgtaccagtacaccaagaagcgcgcgagcggaccgaagtgcccagtcaccgggaagaagatccaaggaattccacacctgagacctgctgagtacaagaggtccaggttggcaaggaaccaaaggactgtgaatcgtccatatggtggtgttctgtctggtactgcagttagggagaggatcatccgtgcctttttggtcgaggaacagaagatagtgaagaaggtgttgaagatccaaaagaccaaggataaggcctccaagaactaggcgatataggcatcttccacaatgttcaagtcccttagatgatatggtttaaattttgagcggaagttgcggatccttttatttttttaaaatctcggtggaatgtttttcactcgtctatgtggatgtcagatattttgctaatgttgcctgcccatttgctcc

SEQ ID NO: 264713 - DNA, 308 bp, Zea mays
agaagatccaaaagaccaaggataaggcctccaagagctagtcgatttaggccacaatgtttgagtccattcgaatttatttcagcaggaaaatttctcgcgggtatggggaatcttggtacttatgctagtagtatgtgagatgggtgtggtttaaattttgagcgtaagttgagttctgttaacttgttaagttcggtggaatgttttaaactatgtggatgtcagattttgttaatgtttgcgcagtttgccccaattttggccttcattacgtaaaataaaaaaaaaaagggcggccgccgact

SEQ ID NO: 264714 - DNA, 1795 bp, Zea mays
ctttcctcgaattccccattctataaattccagttaaacttaattcgtaagatcaatcataattctcgagttgcaaaccatggacatggctttggcgtctaaagcctcccctccgccatggaatgccaccgccgccgagcagccaattccaaagcgtgacaaagccgctgcaaatgattcaacatacctcaatcctcaagctcatgatagtgttcttggaatcattctgggaggtggtgctgggactagattgtaccccttgacaaagaagcgtgccaagcctgcagtgccattgggtgccaactatagactgattgatattcctgtcagcaattgtctcaacagcaacatatccaagatctatgtgctaacgcaatttaactctgcttccctcaaccgtcacctctcaagagcctacgggagcaacattggagggtacaagaatgaagggtttgttgaagtcttagctgcacagcagagcccagataatccaaactggtttcagggtactgcagatgctgtaaggcagtacttgtggttgtttgaggagcataatgtgatggaatttctaattcttgctggcgatcacctgtaccggatggactatgaaaagttcattcaggcacacagagaaacaaatgctgatattaccgttgctgccctaccgatggatgagaaacgtgcaactgcatttggcctcatgaaaattgatgaagaagggaggatcattgagtttgctgagaaaccgaaaggagagcagttgaaagcaatgatggttgacaccaccatacttggccttgatgacgtgagggcaaaggaaatgccttatattgctagcatgggtatctatgttttcagcaaagatgtaatgcttcagctcctccgtgaacaatttcctgaagccaatgactttggaagtgaggttattccaggtgcaaccagcattggaaagagggttcaggcttatctgtatgatggttactgggaagatatcggtaccattgcggcattttataatgcaaacttgggaataaccaagaagccaataccagatttcagcttctatgaccgttctgctccaatttatacacaacctcgacacctgccaccttcaaaggttcttgatgctgatgtgacagacagtgttattggtgaaggatgtgttattaaaaactgcaagataaaccattctgtagttggactccgatcttgcatatctgaaggtgctatcatagaggacagtttactaatgggtgcggactactatgagacagaagctgataaaaaactccttgccgaaaaaggtggcattcctattggtattgggaaaaattcatgcatcaggagagcaatcattgacaagaatgctcgaattggagacaatgttaagatactcaatgctgacaatgttcaagaagctgcaatggagacagacgggtacttcatcaaaggtggaattgtcacagtgatcaaggatgctttactccctagtggaacagttatatgaagtgaacgtgcgacatgcagctgtgtgtctcgacattcgacaatgatcagcacctggttacatgcgtgatctgcagatcagtctgttggagatcatcggagcaataaaagtgtcatccaaggcattttttctttctttttgctcttttgtgtccttcaatgttgtagggtagaatgttgtagcagcaaatgttagttacatgttgaatcgacattgggggcctggatttggggatacatcatgctgtaaattgatcagtttaattaccatactgtgctgctttgagcg

SEQ ID NO: 264715 - DNA, 687 bp, Zea mays
ctccgttcctgcatttctgaaggtgcagttatagaggactctttgctaatgggtgcagactattacgagactgagaatgataagaatgtcctttctgagactggtggcattcccattggtattgggaaaaattcacatatcagaaaagcaataattgacaaaaatgctcgcattggagaaaatgtgaagataatcaattttgataatgtccaagaagcagtaagggagacagaaggatattttatcaaaagtggaattgtcacggtgattaaagatgctttaattcctagtggaacaatcatataaagtcagccaacaccatgtatataaggttgggttgcatcatatggtgatcgccaatgcgcatcaagttctctcatcccttgcgagaccatgcttatttccattgcaaaatcatcaagctctgcatcaacttgttgtggataataatgaaataataaatggtgccattccatggcaacatttttctgtcactagtatgaggcactgttctaaatgtactgttgagtggaatttgaatatgtatgcttttgcaatcgcacacctaaataccttgtgcttatactcgttacctaaatatgctcactgtcatcttagattgttgtaaaatgtcatgcataacatgatttttgttagattgttgtaaagcttacataagtttcttct

SEQ ID NO: 264716 - DNA, 427 bp, Zea mays
attaaaaactgcaagataaaccattctgtagttggactccgatcttgcatatcggaaggtgctatcatagaggacagtttactaatgggtgcggactactatgagacagaagctgataaaaaactccttgccgaaaaaggtggcattcctattggtattgggaaaaattcatgcatcaggagagcaatcattgacaagaatgctcgaattggagacaatgttaaggtattccaaactgatgttccaacggtcaagaatattaatttagatttttccttaggatattacataatacttgatatgccattttgtcctcttatttttaacatttatttttgaaaatattaacttgaaagtatgaataggcttgcatgctcttttttaaatatgactgtctatacttatctttccctaattgcctgcataa

SEQ ID NO: 264717 - DNA, 707 bp, Zea mays
gaaaatgtgaagataatcaattttgataatatccttcagtatcccttacagcttctaggacattatcaaaattgattatcttcacattttctccaatgcgaagataatcaattttgataatgtccaagaagcagtaagggagaagaacgatattttactcaaaagtggaattgtcacggtgattaaagatgctttaattcctagtggaacaatcatataaagtcagccaaaaacatgtatataaggttgggtagcatcatatggtgatcgccaatgtgcatcaagttctctcatcccttgcgagaccatgcttatttccattgcaaaatcatcaagctctgcatcaacttgttgtggataataatgaaataataaatggtgccattccatggcaacatttttctgtcagtagtttatgaggcactgttctaaatgtactgttgagtggaatttgaatatgtatgcttttgcaatcgcacacctaaataccttgtgcttatactccttgttacctaaatatgctcactgcattgcccaaggaatcagatgaaaaatgtcatgcataacatgatttttgttagattgttgtaaagcttacataagtttcttctagcctcagagagatgtttagagtggaaactgtcatcttagatgtgtgagtttcaggtgaccaaaagagtgaattggagccaatactttttttgcac

SEQ ID NO: 264718 - DNA, 879 bp, Zea mays
  unsure (1)..(879): unsure at all n locations
ctgtatccactgacgaagaagatgttgaaataagagagtcgaccctctgtttctacaggcccatagatatncctgtcagcaactgtctcaacagtaacgtctccaagatatatgtgctaacacagttcaactctgcttcgctcaaccgccacctctcgagggcctatggaaacaacattgccgggtacaagaatgagggattcgttgaggtccttgcagcacaacagagtccagagaatcccaactggtttcagggtactgcagatgccgtgcgtcaatatatgtggctatttgaggagcataatatcatggagttccttattctggctggagatcatctgtaccgtatggattaccaaaagttcattcaagctcatagagaaacagatgctgatataacagttgcagccctgccaatgggtgaacaacgtgcaactgcatttggtcttatgaaaattgatgatgaagggaggatagttgagttcgcagaaaacccaaaaggagagaagctgagatcaatgatgttaaggagagaggctgagatccctgatggtagacaccactatattgggccttgatcctgaaagggccaaagaactgccttatattgctagtatgggaatctatgtttttagcaaagatgtgatgcttcggcttctcagagaaaattttcctgcagcaaatgactttggaagtgaggttattcctggcgcaacagaaattggattaagggtgcaagcttacttatatgatggttactgggaagatattggtactattgaagcattttataatgcaaacttgggaataaccaagaagcctgtaccggattttagcttctatgatcgttctgctccaatttatacgcaacctagatat

SEQ ID NO: 264719 - DNA, 518 bp, Zea mays
gcgaaacaaaacgccaaacaggctcctctgaaactcccagagccggtagaggcacgccactccgcagtgtcagtcactgcccccccatcacgccgcccgccctttctcggccgttgccgcgagctcgctccgacccaccgccgatggcgacggcgatgggcgcgatggccgccacctgcatggcctcgatcccggccgccgctacgttccccggtgatctcggcgtcggacgacgccgagcggttgtaccagggtggcgcgccggtgggagacggctgcgtgcgacgccgcctgcccggaggccgttcctgttctcgccgaagggcgtttcggactcgcggagctcgcaaacgtgccttgatccggacgccagcacgagtgttcttgggatcatccttggagggggtgctgggacaaggctgtatccactgacgaagaagagggcgaaaccagcagtgccgttgggcgccaactacaggctcatagatatccctgtcagcaactgtctcaacagtaac

SEQ ID NO: 264720 - DNA, 1464 bp, Zea mays
gtcgccgcgggcaacgccgtcacgtcacgtgcatcacgacaatctcctcctccgcctcgtcttcctgccaggccgcgggagcaccagcccagcggcagatcagtcgaggcgggcgattccagggtttagagaggagcggagatggtgaaggtcatccacgggcgcccggccgagatggggttccggatgccggcggagtgggagccgcacgagcagtgctggatgggatggcctgagcgtccagataactggagggagaatgctggtccagctcaagaggtatttgctagaactgcaattgccatttcaaagtttgaacccgtcacgttatgtgcaagtgccaagcagtaccccaaagtccacgagctgatggaacatcaaaccaacatcagggtcgttgagatgagcatgaacgattcctggttccgcgacatgggccccacttttgtcacctgtaaaggggattcaggaattgcagaacaaacaatagcaggaattgattggcaattcaatgcctggggaggaatctatgacgactggagtcttgacagcgatgttgccaagaaaatagtcgagatcgagaggatccctgggtttccccaaaaaattatccttgagggtggaagcattcatgtagatggagaaggtacatgcattacaacggaagaatgcttgctgaatcctaataggaaccccaacatgaccaaactagagatagagaatgagctgaaggattttcttggagtctcgaaggtcatctggatacctcgtggactttatggtgatgaggatacaaacggccacgttgacaacatgtgctgcttcatcaaacccggtgtgatcctgctgtcgtggaccgacgacgagaaggaccatcagtacgaacggtcggtcgaggcactgtctgttctctcccagtccgtcgacgcgaaagggcggcagctccaagtggtgaagatccacgtccccgggcctctgtacatgacagaggaagaggcacagggcgttgtttcatcgggacattctgtgccgaggccagcgggcacgagattggccgcctcgtacgtcaacttctacatcgccaatggtgggatcatagcgccttccttcggcgacaggtgggacgaggaggcgtacgcggttctccagaaggcgtttcctgatcacgaggtggtgatggtcgaaggcggacgggagatcgcgctgggaggtgggaacattcactgcatcacgcagcagcagcccgtgcgcccgtcctaggtgaaacccgcgtcgacgcgaagcgatgaagagcgtgcgagtagtattagaccttgttcgtttctaccggattgatgggtcggaacgatttctgaccagattgcttctctaatttatataaactttgattagctgtaacgattccgggtgtaatccgacggaaacgaacaaggccttattgttttgtatgctgctcctgttttt

SEQ ID NO: 264721 - DNA, 441 bp, Zea mays
cccacgcgtccgcccacgcgtccggtggtggcgagcgtgcggcgcggggactactacgggacgtggcccggctggtactggcccttccacatggtcatgtgccccgcgccggagctgctcgactggttctcccgggccttctacgtctccagcaagtccggcggccaggacggcggcggccccgcgctgagtaagaagatcctggaggccgtcggcgggaaaaagttcctctacccccagaccatcccctgccagcagacccccatgggtggcagctaataactactgactcgctcaagatggtagccagacataaagataccccattttacatgtataaactcgcgcatgcatggtcgatctgttgttgttggattagcatgtccgagatgaggattgaaagggccggctgggtgaaattgaaatgggtgcgtccgcccc

SEQ ID NO: 264722 - DNA, 2204 bp, Zea mays
gcgtaagctggatccttagagtcgcttactcgtcctttttttggccgccaaatcaaagttatcaaagggtggttcttttgacgaggaaggtaatgaaggacaacacaagggtcgccgtaacaaatcttcaaaaaggagaaggaagaagagatatttttattcggagtcagatagctcttctgagtcagagactgaatcatctgattctgagagcgattctgatacttactcaagtgactcatctgatgtcagcagttcaagtgatgacaggcgaaggcgcagaaagagacattcgaagaaaaataaacgcaagcgttcaagaagaaagcgtgaccaaaggcgtgaaagaaggcgtaggaagcgtgataggaaatcaaaacagaagtcaaaaaggataaagggtgacagtgaagctgaaagttcgagtgatagcagctctgaagatgctagaagcaagagacaccgccacgggcggaagtccaaggcatcatctcaagtttttgaggaaaatattgctgcagtgtctgctttgaaggatgccacgtcacctcaacaaaagagtggcatacagaacagtccagcacaagatgtctcctccctgcaaaatggggaaatccatacaaatggtgttaatgactcaaaaattgaaagaaatgccgctgtcatgcctgttttaactggcaatcgaagcaaatctaggagccagagcatgagtgttaatcactcaatgagcaagagtatgagtatcagtccaagaagaagcccaatgaaaaggtcaagtaccagcccgaagaggtcacttagcaggagccctgttgacaataatcacagtagaagccctatccgtactcccaaaagaagcgtgagcaggagtccagccaggcggcagatcatgagcaggagccctgctcggagcccacccagaaactcaagcagaagccttcacataagcaggagtcctgttaaagcccacagaagaagcattagcaggagctcagctaggtccatgcaacagagaagtccaagcaggagtctggagagaactcatgtacgaaaaagtatcagtccaagcccacctttggagaagggaagaagcattacccgtacctctgtggtatctccattgcgaagtgttagtcggagcccagcaaggatttcaaggagcccacataggccttctaggagaagccctatgagaagtccacgatggaacatacgcagaagcctcagcaggagccctgcaagaatacctagaagaagtgtgagcagaagcccagtaagaggtggtcgacctcgcaggaacattagcagaagtcccagtccacatcgcagggtagtaacaccaccaaacaatggaagaagcccatccaggagtggttctcctgatgggtcacccaaacgcataagacgtggacggggttttactcaacgctattcatttgcaagacaatatcgctcaccttccgctgatcgcttgcatcgttatggcggaagaaatgaccgtgacagatacatgggttaccggggtttccgccaccgatcacctcctagacggtataggagcccccccagaggcagagtgtcatcgccaaggtacaggaggaggagccgaagcgcctcacgcagccctgtccacagggaaagaggaaggggaggtgggtacagcaagagccctgtacggagccgttcaccccccgccaggaaaccaaggtcacatggtgaccgtgcacggtcagtttcaagaagccacctttctgggtcagtatcaaggtctcctccagtgcatcatccctctccacctgattccccatcagtgaagcatgcaagtgatgagaaatctcagtccgcgtccccagctctgtcactgtctggtagccctaatcgtggaggcaagaaaggtttggtttcctacggggatggctcacctgattcagctgggaagtaggtttccaccggggcattgaaatgtatcttacaccgttagccattggctgttgatcaggtccatcaatactttttgttatatttctactgtaagaagcggtttggtccttgagctgcccagctgttacatatgttgtttgggatgatcggctatgtcctttggttatcacaagagtcgtaatttgagcttaggttttgctgttgctaaacatgtagcacagattcagtgtgggatttccatgttatataagcttcaacgc

SEQ ID NO: 264723 - DNA, 779 bp, Zea mays
cgtgaccaaaggcgtgaaagaaggcgtaggaagcgtgataggaaatcaaaacagaagtcaaaaaggataaagggtgacagtgaagctgaaagttcgagtgatagcagctctgaagatgctagaagcaagagacaccgccacgggcggaagtccaaggcatcatctcaagtttttgaggaaaatattgctgcagtgtctgctttgaaggatgccacgttacctcaacgaaagagtggcataccaaacagttcagcacaagatgtctccccgctgcaaaatggggaaaactatacaaatggtgttaatgaatcaaaaattgaaaggaatgcagctgtcatgcctgttctaactggcaaccaaagcaaatctaggtttcctatacttcttcatacatcattctttgtgcttactgcttctggaagcggtgcttcatctgacattgataagcaggagccagagcatgagtgctaatcactcaatgagcacgagtatgcgcatcagcccaagaagaagcccaatgaaaaggtcaattaccaccacaaagaggtcagttagcaggagccctgttcaccataatcgcagtggaagtcctgtcggtgctccccaaaaaagcgtgagcaggagttcagccagaaggcagagcatcagcaggagccctgctaggagcctcagcaagagcccacccagagatgcaagcagaagcccccacataagcaggactcctgttaaagctcacagaagaagcattagcaggagctcagctaggtccatggaacaga

SEQ ID NO: 264724 - DNA, 579 bp, Zea mays
  unsure (1)..(579): unsure at all n locations
cgatcgtgcacggtcagtttccaggagccacctttctaggtcagtatcaaagtctccaccagtgcatcatccctccccacttgattctccatctctggagcgtgcaagtgatgggaaatctcggtccccatcaccgtctggtggaggcaagaaaggtttggtttcctacggtgatggcactcctgattcagctgggaagtaggtttccaccggatgtattgtactacctttggccattgtctcttgatccgtccagtgttacgtcactactgtagagaagagaacggttttggtccttgaggcgccccctgtactggtgttgtcgctgtagaactgttacttaagttgtttgggatgatcgtcgttgtccttagattatcttaagactagtaatctgagcttagtttacgctcatgctgaacatgtagcacggcttcagcttaattaccattggtggaatttggatgttataaggttagacgcatagagaatcattacattattttgatctcggagcccaataacatgtataattaattccttctggaacttacnnnaaaaaaaaaaaanaaaaanaga

SEQ ID NO: 264725 - DNA, 1229 bp, Zea mays
tcctctcgtgcgcacaactccacgtcacacacctcacagagctgcagcagcatcagctgccacctcctgcctctcctccttccttcctgcctgcataggttgctacacgtatatattctgaagaagagatcgagatgaccagcgtgtggaagaccaaggttctgcctggcctcaacaagatctttgacaaggatggcaagaaggctgcagctgcaggcttcttgaagtccttcaacaaggaggagattgacaaggagattgaggacaagaagacagagctggagcccaaggtcgtggaggcctacgaagcatctcctcctgaggtcaaggctctcttcaaggataagaagccagtcaaggtcagcaagaagaactcggctgcagtcaccaagttcctcgatgagctggctaagattgacttccctggagccaaggtggtgagcgaggcggtggccaagtccggcacctcgcccctgcttccggcgatcaccttcatcttggacaaggtcgcaccgtttatccccaaggaggagcccaaggcggagccggcggcggaggccacctcccgggaagtcgccgtggaggagaagaaggaggaggccgagccagctgcagcgacggaggcggcaccggcgccggcagagacaccgtcggaggcggcggtggtagaggagaagaaggaagaagagaagaaggaagaggaggataagccggctgccgaagaggcggcgccgccagcagcggcagctgctgctgctgctgaggagaagtgatcctgttgacggatcgagcatgcaaagcgctccctcctcgctcccttgcttgcttgctgctggtaaattaaattaagttgccgtgatacttaagcgtagccgcacggagtgaaaagttatcaagtaaaagcagacaaacacttggcatgcatggacattaatttgttattctttgtaccgtcgtcgtctcgatgaaccgcgtgtacatttgtagtgtggggttttctttgttttcgatttgggggtgatcattacaagaatgtgtaattatttatgttcatatgtttgttgatgatggaaggacatatttaagaagacaactcttttgtgtatatatatttcttgttattttcaaaggattaaagtggataataaaaaaaaaattcgaaaaataaataataaaaaaaaaggtggacggaaaaaggagtgtagaagcccccatggatattagacacg

SEQ ID NO: 264726 - DNA, 970 bp, Zea mays
cgccctgctggtggttttccattcatcatcgatcttcctgcgtctctgaactttttctgctgtgtctgttggccgggagcagaggttgctacacgtatatattctgaagaagagatcgagatgaccagcgtgtggaagaccaaggttctgcctggcctcaacaagatctttgacaaggatggcaagaaggctgcagctgcaggcttcttgaagtccttcaacaaggaggagattgacaaggagattgaggacaagaagacagagctggagcccaaggtcgtggaggcctacgaagcatctcctcctgaggtcaaggctctcttcaaggataagaagccagtcaaggtcagcaagaagaactcggctgcagtcaccaagttcctcgatgagctggctaagattgacttccctggagccaaggtggtgagcgaggcggtggccaagtccggcgcctcgcccctgtctccggcgatcaccttcatcttggacaaggtcgcaccgtacatccccaaggagcgtgcccaaggcggaggacgcggtggctgaggccacttcccgggaagtcgccgtggaggtggaggatgccgagccggctatagctgatgcagcggccgagacaccatcggaggcgaagaagggagaggaggaaaagccggctgccgaggaggcggcgccaccggcagcggctgctactgaggagaagtaatactccgatccacagccatgcctctccctacgtagctgcagcagagtgaaaagtgattcagtcagtcagacatacacccttgcattggcacgcattattcatggacatgtacgttgctgccccgtgtgtgcgtgtgcgtgtgcgtgtgtgtggggggttctttgttttttattttggggcgattgttacaaatgtgtaattatttatatcgatatgtttgtttcattgatggaccgcatttaataagacaattctttcttgtgt

SEQ ID NO: 264727 - DNA, 370 bp, Zea mays
gttcagctcctggtggtgctacgggggtgactgcgggggcgactgcggctggtggctgttgtcctcatcgaccatctcggcgacgtcctactcgagcgagatctcgctgcagtccctcgagatctggaggagattgacaaggagattgaggacaagaagacagagctggagcccaaggtcgtggaggcctacgaagcatctcctcctgaggtcaaggctctgttcaaggataagaagccagtcaaggtcatcaagaagaactcggctgcagtcaccaagttcctcgatgagctggctaagattggccgcacttgaagaaatcttatatcagtttgaggaaaaactccaagctgaaaaagtggaagctgct

SEQ ID NO: 264728 - DNA, 588 bp, Zea mays
actcggtttcgagcctatagctgaatagatctggcagcagcatcagctcgcacctcctgcctctcctccttccttcctgcctgcataggttcttcctgcataggttgctacacgtatatattctgaagaagagatcgagatgaccagcgtgtggaagaccaaggttctgcctggcctcaacgagatctttgacaaggatggcaagaaggctgcagctgcaggcttcttgaagtccttcaacaaggaggagattgacaaggagattgaggacaagaagacagagctggagcccaaggtcgtggaggcctacgaagcatctcctcctgaggtcaaggctctcttcaaggataagaagccagtcaaggtcagcaagaagaactcggctgcagtcaccaagttcctcgatgagctggctaagattggtaagcatgttagttctttgtatgtatgtatgtatgcctcagtagtttccatgcatgacaactgaagttaattaccacagtatagtataggtttcctttgcttcctagtatattatatgctgttctaggatttcaactgcatcagcttctctaactgaagttacat

SEQ ID NO: 264729 - DNA, 606 bp, Zea mays
gagaagtgatcctgttgacggatcgagcatgcaaagctctccctcctcgctcccttgcgggcttgcttgcttgctgcagcgacggaggcggcaccggcgccggcagagacaccgtcggaggcggcggtggtagaggagaagaaggaagaagagaagaaggaagaggaggataagccggctgccgaagaggcggcgccgccagcagaagcagcagctgctgctgctgaggagaagtgatcctgttgacggatcgagcatgcaaagctctccctcctcgctcccttgcttgcttgcttgcttgcttgctgctggtaaattaaattaagttgccgtgatacttaagcgtagccgcacggagtgaaaagttattaagtaaaagcagacaaacacttggcatgcatggacattaatttgttattctttgtaccgtcgtcgtctcgatgaaccgcgtgtacatttgtagtgtggggttttctttgttttcgatttgggggtggtcattacaagaatgtgtaattatttatgttcatatgtatgtttgttgatgatggacggacatatttaagaagacaaaaaaaaaagggcggccgctcgcgatcatagaac

SEQ ID NO: 264730 - DNA, 454 bp, Zea mays
cattcataggctgcctgcctgcctgctgatctcgcacctcaaacccacacacagcagcataggttgagatagatggccagtctgtggaagaccaaggttctgcctggcctcaacaagatcttcgacaaggatggcaagaaggctgcagctgcaggcttcttcaagtccttcaacaaggaggagattggcaaggagattgaggagaagaaggcagaactggagcccaaggttgcggaggcttatgaagcatctcctcctgaggtcaaggctctgttcaaggataagaagccagtcaagatcagcaagaagaactcgactgcagttaccaagttcctcgatgagctggctaagattgacttccctggagccaaggtggtgagcgaggcggtggccaagtccggcgcctcgcccctgtctccggcgatcaccttcatcttggacaaggtcgcaccgt

SEQ ID NO: 264731 - DNA, 1659 bp, Zea mays
agtatttttccttttattttaggaattttgggaacatttcaacaaaggagatctttcacaggtcaaacgagacctaagacttaatctaaaagaaattattagattgaatctatttgcattaaaaaaaccgatcaaaaaaggacgagcgaagtaagtaatcgaaaaactttcttctttgttcgtcctatctataagaggagagcatatgaaaaatgtaacccattcttttgtttttttagctcactggccattcgctgggagtttcgggcttaataccgatattttagcaacaaatctaataaatctaactgtagtggttggtgtattgattttttttggaaagggagtgtgtgcgagttgtctatttcaagaatagattggatctatccggctgcactttagaatatttttagtattttttttgataaataagaaaaggtgcacgatctcgacgaattacttctgaataacttcagaaatcatatggaagaaccatagcatttcgcgattcattggtaaatttactttgattctctatagaccaataatgtgagaccattaacacggttaaagctaaactgcttgaagtccgggcaaaaaggggtactctttctacaactacattagtattagtctcgaaatgctttaaacgggaaatagctagtgtagaatttatctgatatagaacactcatatcgataaaatagtttgaactatttactagaagggcacgcagccctttttccaatgccaaatcgacgacctatgtataaaaaaaagagaaattttttggatttgaagaaaaaataaaaggaattctatcaatttttattttccatttatttagttagtttttcttaatgaaattgaaattattaactaacagagcaaacacaaataaagaaacaactttgctgaccatgatagatttttatctagttggaagagtcctcttaatattcatctagtcttatataagtttgggtatatagaaatacaaacagaaaagagaggatagaggataggctcattacataaaaaaaagatatggaaatagccataatacataacaaaaaagaaaaaaaggagcgggagagccaaatgaatcgaaagattcatgtttggttcgggaagagatcataaaaattgtaaacttaatagcaagataatctactttcattaaaagatttattagataatcgaaaacagaggattttaagtactattcgaaattcggaagaattgcgtaaagggacccttgaacaactcgaaaaagctcgtattcgattacagaaagtcgaactggaagcagatgagtatcgaatgaatggatactctgaaatagaacgagaaaaagaaaatttgattaatgctacttctattagtttggaacaattagaaaagtctaaaaacgaaaccctttattttgaaaaacaaagggcgatgaatcaggtccgacaacgggttttccaacaagctgtacaaggagctctaggaactctgaatagttgtttgaataccgagttacatttccgtaccattcgtgctaatattggcattctcggggccatagaatggaagagataattcaatttattaggttttgaacttctacttttgtttagaatttaggcattatttttcccttgcttccaaaaa

SEQ ID NO: 264732 - DNA, 913 bp, Zea mays
cccacgcgtccgcccaacgagaggaatcaaattggacaaccctgtcgccctctcggtctccctcgagcttttcttgtgcgcaccgcagccgcatgcttttcgttcgtcttcatcctacgcgagggcgaaacccacaaaccctctccctcccgtactccggcctacacatccaggggcgatgacgctgggtagctccggcgccggatcgagcgtcgtcgttccccgaaacttcaggctattagaggagctcgagcgtggagagaagggcattggtgatggaacagtgagctatggaatggatgatgccgatgacatctacatgcggtcatggactggtaccatcattggccctcacaatactgtacatgagggtcgcatctaccagctgaagttgttttgtgacaaggactatccggagaagccaccatctgtcagattccactcaagaatcaacatgacatgcgttaatcacgagacaggaatggttgatccaaggaagtttggtttgctagcgaactggcagcgggactacacgatggagaacatcctcacccagctcaagaaagagatggctgcctcgcagaatcgaaagttagtgcagcctccagaagggacattcttctaacgaagtgttcacttggcccgtcatgggatccaacagtaattgaaagttttatgggctaaaaaacagcgtctacatctggtgcccctgcctgtctttgtgattttttatgacttttatgttcttgtatcgtgaaccgcagtgaacaacggttgttgcaagttccagggatatctttggaagtggtaaacaaatgcgtcttatttctatgtaatattagaccccgtgcgtgtgtggtttcgaggtacagctccctatcaactgttgccgtgcattccgtcgatttgcttg

SEQ ID NO: 264733 - DNA, 404 bp, Zea mays
  unsure (1)..(404): unsure at all n locations
gtcgaccgacgcgtacgcccactcgttctctgactcctgggtcctcacccatctcaagaaagagatggctgcctcggagaagctaaagttagtgcggcgtcgggaatgnacattcttctaacgaagtgttcacttggcccgtcatgggatccaacagtaattgaaagttttatgggctaaaaaacagcgtctacatctggtgcccctgcctgtctttgggagtttttatgacttttatgttcttgtatcgtgaaccgcagtgaacaacggttgttgcaagttccagggatatctttggaagtggtaaacaaatgcgtcttatttctatgtaatattagtccccgtgaaaaaacccacatagtttaacacttccatgttccaaaatgagtagtaactaggctttt

SEQ ID NO: 264734 - DNA, 835 bp, Zea mays
gcttcggatcggaagttacggcacgggagtggtgatcatgttcaacatccaccaaaaaccctctcttgattttcccagaggaacttgtgttaacaaccagtatacggtcatgttcaagaagggtgcctttgagcttgggtgtgctgtctgtccaatagctatcaaatacaataaaatatttgttgatgccttttggaacagtaagaagcaatcttttacgatgcacttggtccggctgatgacatcatgggctgttgtgtgtgatgtttggtacttggagcctcaatatctgagggagggagagacggcaattgcatttgctgagagagtaagggacatgatagctgctagagctggactaaagaaggttccttgggatggctatctgaaacacaaccgtcctagtcccaaacacactgaagagaaacaacgcatatttgccgaatctgtcttgatgagactggaggagaaatgaagggacgtcaagccgtacaagtgcacttcgttagggttttacatgcagctaccttgtaattcggttggcttccaggaaaaaaaaagtgagcctgggacacgtcaagtgaccacctcagttttgttgtaaatttgttactagtttgataggattattagtatgtacttatcaggaaaagaattctcagtatgtgttttggctgcccattcaatgataggtcagtgattaacaccgaagcattgtgctctcgtgagatgctgtgttggtcttaatatattgacggtactgtaccatggtttaaatgtgattattgaagcaatgtgaatggagggcggggataaaaaaaaaaaaaggaaggcc

SEQ ID NO: 264735 - DNA, 474 bp, Zea mays
agcagctagagctggtcttaagaaggtcgcgtgggatggctatctgaaacacaaccgccctagtcccaaacacaccgaagagaagcaacgcatattcgccgaatctgtcttgaggagactagaggagaaatgaagagacatcgaacactacaagcgcatttggttagtggtttaccgttcagctaccttgtaattcggttggctccccgaaaaaaaaaagtccgggacacgtcaagtgcccagctcagttttgttgtaaatttgttagaaatttgacagaattggtagtgtgaacttaccaagaaaggaagaatagccgcatgtgttgtggctgttcattctatgattggttaggaattgacacttgaaacacggtactctattcagaggctgtgtccgtatttatgaatcgacgatgtaatggtttaaattcatgtgattattgattcaataatatgagtagattacatcctc

SEQ ID NO: 264736 - DNA, 1894 bp, Zea mays
cccacgcgtccgattcccggatccaggaatagcaacatgaactaaatgtcctgttgctattgcccgatccaggggggagtaccttcgatgggataatttcttagatgtattaccctatccccagggggttgggtccccttctgacgggtcagtggaatctttatgcccaaaatcctgattcgagtaatcatttatttggtaccactcaaggagcgggaactgccattctgacccttcttgggggattccatccacaaacacaaagtttgtggctgaccgatattgctcatcatcatttagctattgcatttatttttctcattgccggtcatatgtatcgaactaacttcggaattgggcacagtatcaaagatcttttagaagcacatactcctccggggggtcgattaggacgtgggcataaaggcctttatgatacaatcaataattcgattcattttcaattaggccttgctctagcttccttaggggttattacttccttagtagctcaacatatgtactctttacctgcttatgcattcatagcacaagactttactactcaagctgctttatatactcatcaccaatacattgcagggttcatcatgacaggggcttttgctcatggagctatttttttcattagggattacaatccggaacagaatgaagataatgtattggcaagaatgttagaccataaggaagctatcatatctcatttaagttgggctagcctcttcctaggattccataccttgggcctttatgttcataacgacgttatgcttgcttttggtactccagaaaagcaaatcttgattgaacctatatttgcccaatggatacaatctgctcatggtaagacgacatatgggttcgatatactcttatcttcaacgaatggccccgctttcaatgcaggtcgaaacatatggttgcccggatggttgaatgctgttaatgagaatagtaattcgcttttcttaacaataggacctggggatttcttggttcatcatgctattgctctaggtttgcatacaactacattgattttagtaaagggtgctttagatgcacgcggttccaaattaatgccggataaaaaggatttcgggtatagttttccttgcgacggcccagggcgcggcggtacttgtgatatttctgcttgggacgcgttttatttggcagttttctggatgttaaataccattggatgggttactttttattggcattggaaacacattacattatggcagggcaacgtttcacaatttaatgaatcctccacttatttgatgggatggttaagagattacctatggttaaactcttcacaacttattaatggatataatccttttgggatgaatagtttatcagtatgggcttggatgttcttatttggacatcttgtttgggctacaggatttatgttcttaatttcctggcgtggatattggcaggaattaattgagactttagcatgggctcatgaacggacacctttggctaatttaattcgctggagagataagcccgtggctctttccattgtgcaagcaagattggtcggattagcccacttttccgtgggttatatattcacttatgcagctttcttgattgcctcaacatcaggcaagtttggttaatttagttatttttttttgtactgtatcagaacccagttcattactcttgatggagagggaggatccgcctttttagatttttgctatttatttttctatctaggattagaaccatatacttggtaataataggaacggcacattatggcaaaaaaaagtttgattcagagggagaagaagcggcagaaattagaacaaaaatatcatttgattcgtcgatcctt

SEQ ID NO: 264737 - DNA, 732 bp, Zea mays
cccacgcgtccgtttacacgtaagacctattgctcatgccatttgggatcctcagttggggcaacccgctgtggaagcctttactcgaggaggtgctgccggtccagtgaatatcgcttattctggggtttatcagtggtggtatacaattggattgcgcaccaatgaagatctttatactggagctctttttctattatttctttctacgctatccttaatagggggttggttacatctacaacccaaatggaagccaagcctttcgtggttcaaaaacgccgaatctcgtctgaatcatcatttgtcaggacttttcggagtaagttctttggcttggacaggacatttagttcatgttgctattcccggatccaggggggagtacgttcgatggaataatttcttagatgtattaccctatccccaggggttgggtccccttctgacgggtcagtggaatctttatgcccaaaatcctgattcgagtaatcatttatttggtaccactcaaggagcgggaactgccattctgacccttcttgggggattccatccacaaacacaaagtttgtggctgaccgatattgctcatcatcatgctatctatagcgtctattaaggtcatggccatgatatatctatcgttctaaccttctaatcgtatacagtatgatagttcttttacaaacgcactttctcgctggaatgcaatatttgctttctattaca

SEQ ID NO: 264738 - DNA, 588 bp, Zea mays
gtgcccgaggagcccgagctcgcagcgttgctccgcgtcaacgcggacacgggcaaggccggtgaggtttacaggctcctgcacaggacgcgcgtcctcgtcaggcaggtctgcgacaccactgcccaggtcgtccgcccccgcgtccggtcggacgcagcgtcccaggcgggggtggacagctgggatcccaccaaggtaaaggagggcgtcgtcaagggcggcggcggctggcatggccagggatggcttggcaagggcgcatggagcgttggctggaccgagatgggcaaggatgggacatgccaacgctgtggggagaggcttgtctgcattgacattgatccagccgagactgacaactttgcaaattcgctcaccgaactggccattaagcttgaggccagggaagatttcctcagttttcagagctggctacgccgccatggaccattcgatgctgttatagacgctgctaatgtaggcctttacaaaagtaaagatttctgtttttcacaggttaactctgttgtaaatgctatacagagaggtactaaatcaaagaagttgccactgatcgttttgcat

SEQ ID NO: 264739 - DNA, 1020 bp, Zea mays
gcgcctttgtgctgtcctcgtaatcgaaaggtcccgtgctgtgctctgctctcgcctcgcacggactcgtggtaaaggatggagaccatgtcggctctcgcgaggacggcgccgccccttgctgggaccattcgccggccgtcctgcgcgctgcggccgacggcgtccctctccttcgccgccgcttcaacgacgccccgcggccggctcgggctggggctgagcacggcgccggcggggagcgggagggcggccagggctcgcgccgtcccgcagcgcatcgtcgcctcctcggaggttgagcaaagctacattatgatcaaaccagatggtgttcagcgtggtctggttggagagattatttctcgctttgagaagaaagggtttttgttgaaaggcttaaaacttttccagtgccccaaggacttggcgcaggagcattacaaggatttgaaggataaacctttctttcctaagctgatcgattacataacttctggccctgttgtctgcatggcctgggagggtgctggtgttgttgcatcagctcgcaaattaataggagctactaacccccttcaagctgaaccagggactataaggggtgatcttgcagttcaaactggaaggaacgttgtccatggaagtgatagtcctgataatggcaagcgtgaaattgaactgtggttcaaagaaggcgagctctgccaaaatgggaatcagttcaagcaccgtggcttatagaataactcttgctaatcatttccagagttgtattcaatgtttttttttgtgttcgtcttgattcaaggagccatgcaagagtgtatgagtttagttcggctaagtaattagctcatgagggcttgaattatcggttctttttgaggattgaggatttgtgcaactgaaacctttgatcagttgctcatgttgagaagctaatttcttgtcatatttacatgtactaaagtccctctactacagggctaaattagtatttcctatggtccaattaag

SEQ ID NO: 264740 - DNA, 667 bp, Zea mays
caagcctatgatgatctgttgaattcatcgaagcagactttgagcagcatgatggagctgcaggaggctatgctcgagagtaatcaggctacaaagggtgccaatgaaattccttctgcctcaaatggagacaacgacgagtggtcagaagtacagagattgcagacaaggataacaacattcagaaatactgagatagataaatggcagaggaaaatacaggtgacaacgggtgctgctgcacttaaaggaaagctacatgcatttaatcagaacattagtgaccaagttgctggttacatgagagatccaagccggatgattaacaggatgtacttgaccaactctgctgttagtgtatttggaaaggatgtgggagaacctggaacagctgaggaggggcacaatatggaaggtgatcctgaacttattgacgattctgagttttatcaacaacttctcaaggagtttcttgaatcatgtgataagggggcctcagagtcggcaatttatgctctaaaaaagcagcaggttaaaaagaggaagcttgttgatcgtcgtgcttcaaaaagcagaaagatacggtaccatgtccatgagaaggtcactaatttcatggccccagagcccatggttcttccttcaatggctccgaaagttgttgaga

SEQ ID NO: 264741 - DNA, 1827 bp, Zea mays
tcgttcacgcgtccgcgactactggctctggcttgctccggcgacccagaaagagctaggctatagccaccgacgacccctgccggccgcctctggtacaacgtacgtagagagagagagaaagagagacgatcgtcgatggccggcgccaccgtgaccgtggaggaggtgaggaaggcccagcgcgccaccggccccgccaccgtgctggcgatcggcaccgccacgcccgccaactgcgtgtaccaggccgactacccggactactacttccggatcaccaagagcgagcacctcaccgacctcaaggagaaattcaagaggatgtgcgacaagtcgatgatccggaagcgttacatgcacctgacggaggagttcctggcggagaacccgagcatgtgcgcgtacatggcgccgtcgctggacgcgcggcaggacgtggtggtggtggaggtgccgaagctggggaaggcggcggcgcagaaggcgatcaaggagtgggggcagccaaagtcgcggatcacgcacctggtgttctgcaccacgtccggggtggacatgccgggcgccgactaccagctgaccaaggcgctgggcctgcgcccctccgtgaaccgcctcatgatgtaccagcaggggtgcttcgcgggcggcacggtgctgcgcgtggccaaggacctcgcggagaacaaccgcggcgcgcgggtgctggtggtgtgctccgagatcacggccgtcacgttccgcggcccctccgagtcgcacctcgactcgctcgtgggccaggcgctgttcggcgacggcgcggcggccgtggtcgtgggcgccgacccggacgaccgcgtcgagcgcccgctcttccagctcgtctccgccgcccagaccatcctgcccgactcggagggcgccatcgacggccacctccgcgaggtggggctcaccttccacctgctcaaggacgtgcctggcctcatctccaagaacatcggccgcgcgctggacgacgcgttcaagccgctcggcatctccgactggaactccatcttctgggtggcgcaccccggcgggcccgccatcctcgaccaggtggaggccaaggtcgggctggacaaggccaggatgcgcgccacccgccacgtcctctccgagtacggcaacatgtccagcgcctgcgtcctcttcatcctcgacgagatgcgcaagcgctccgccgaggacggacaggccaccacgggcgagggcctcgactggggcgtcctcttcggcttcggcccgggactcaccgtcgagaccgtcgtgctccacagcgtccccatcaccaccggagcggccaccgcctgattcatcgattcatcaacgatcaaattcctcccctctccgatccaattcgtcgtcgtctcgttcgtcattattttacgtcgtccgtccgcaaataatgtgctctctgctataattgtcgtgtgtagtagtaagtagctgttactatttttccatgtactgtcagtcgcacaatcatcatatataattaatatctctatatatgcatttcatgcaagaccagggtagagctagcttgaggagaagacccttatcgttgtcactttagcatgcatggggtggtgaggtattgggtatacctgtgtaagacaagcttggctggtttaattatatattttttttaaaaaaaaatctgtttgatacaaaaataacacctgtaatgtgcatggtgacggcaaattgaccgccattttcagtgcacctaaagctgtattggataaatgcttctactcgattattgattgtaagaggtccactgttagcttgtgt

SEQ ID NO: 264742 - DNA, 494 bp, Zea mays
cccgctcccacacacagcaggcagcagctcgatcgctagctcctccgaaccggaaagccaagcccgctttggcgatcgtgcttgcttgcttggttccttcaattcctgccggagccagcgagagctagctgctgctgtcgcgtggtagacgtcgtcttgccagcgagagcctagctcgatcggtctctctggtacaacgtagggagaaagatcgagggggagaggacgacgacgatggccggcgcgaccgtgaccgtggaggaggtgaggaaggcccagcgcgccaccggccccgccaccgtgctggcgatcggcaccgtcacgcccgccaactgcgtgtaccaggccgactacccggactactacttccggatcaccaagagcgagcacctcaccgacctcaaggagaaattcatgaggatgtgcgacaagtcgatgatcccgaagcgttacatgcacctgacggaggagttcctggcggagaacccgagcat

SEQ ID NO: 264743 - DNA, 496 bp, Zea mays
gtctagcgcctgcgtcctcttcatcctcgacgagatgcgcaagcgctccgccgaggacggacaggccaccacaggcgagggcctcgactggggcgtcctcttcggcttcggcccgggactcaccgtcgagaccgtcgtgctccacagcgtccccatcaccaccggagcggccaccgcctgattcatcatcaacgatccaattcgtcgtcgtctcgttcgtcattattttacgtcgtccgtccgcaaataataatgtgctctctgctataattgtcgtgtgtagtagtaagtagctgttactatttttccatgtactgtcagtcgcacaatcatcatatataatatctctatatatgcatttcatgcaagaccagggtagacgagctagcttgaggagaagacccttatcgttgtcactttagcatgcatggggtggtgaggtattgggggatacctgtgtaagacaagcttggctggtttaattatatattttttt

SEQ ID NO: 264744 - DNA, 1282 bp, Zea mays
cggacgcgtgggtgccaacactcgttaggctaccatggtcaaggcacgaggaaatggtgatggctgacatgcaaataaggcctggagaaggctgggaatactgtcctagaaataccttgaggaaagtcacaaaagttctgttagatgagttcaatgtgacaatgaaggcaggttttgaaaatgaatttttccttcgcagaaaattagtaagtagtggagttgagatgtggattccatatgataataccaattactgctcaacttcagcatttgatggtgcatcatcacatattacaagaagtatattcttccctcaaagattcaggcattgttgttgaacagttgcatgctgaagctggaaaagggcagtttgagatagccttgaagtatatcttgtgcactgttgcggctgacaaactcatatatgctcgtgagactattaagtcgattgctcgaaagcatggactggtagcagcatttcttccaaagcctgatttggatgattgtggatctggttctcacgtgcatctgagcttgtgggagaacgatcagaatgtttttatggggtcaagtaaagataactttcatggaatgtcaaaaactggagaacagttccttgctggagtgtatcatcaccttccgtcaatattggcatttaccgctcctcacccaaacagctacgaccggattcagccagatacttggagtggagcttatctatgctgggggaaagagaacagggaggctccattaagaaccgcatgcccacctggtgtgcctcttgatttagtcagcaacttcgagatcaaatccttcgatggttgcgcaaatccgcacttgggtcttgctgctatcgcagctgctggcatcgatgggctaagaagacaccttaagttgcctgagccaattgaatcaaacccttctgatcactcttcaaaactgaaaaggctaccgcagaacctgcaggaatctggagaatcgctttctgcagataaggttttgcatgagttaattggtgataaacttgtcacaactgctatagctatacggaaggctgagatcaatcactttgcgaagaatccgggtgcacttaaggatctcatcgaccgttactagggcaaaagaacggaatgagaagctacatcttcttggacgtggcaaggggtttcactgtatgaccaaccgagagactggaagaataaattttgttccaatggttaacttcggattctcatatcctgtgactgaacttttgtgactgaacttttgatacccagtgttt

SEQ ID NO: 264745 - DNA, 515 bp, Zea mays
gcggcgtccacgagtcacgaggagcccagaggcttcttcacagcagcagcggcaggtcggctgatgccagactccccccagctccaccaaccgcctccccctcccgcgccgccgccggccagcgcaacaccagccgcgccagcggcagcaaatgcgcaacccaagctgactgccgtgaagctgaggatgatcatcaagggcgtgctcgggcggtaccagcgctggaaccccgtgcacccgacggccggcaccttctggggtgtggggctcggcgtcggctgcggcgtcggctggggccccggcttcgggcctgaggtgattgggtacgtaggcgccgggtgcggcgtggggttcagcgttgggttcacgctcgccggcgtcggcatcggcctgccgcagcacagcctcatcaggaaccacgaccacggtggttttgcgagcagcgtccctgttgattcagcgagattctacgccctaaccatcatcagaggtctggtatgggacgccatcagcta

SEQ ID NO: 264746 - DNA, 572 bp, Zea mays
gacgatgacccttcacgccaaccagaaaggagcaatgaggctgctggcgcttatgcacaggcatgcatagatgttgccacagaattgaaccatccagttatagacatctggaccaagatgcaggaatttccagactggcaaacatctgcattgagcgacgggctccacttcaccccggtaggaaacaagatcctgttcgaggaggtggtgaagacgctggagacgagcatcggtttcagccaggagcggctcacgtcggacctcccgctgttccacgagatcgaccccaaggaccccatgaaagccttcggagcttagcttgggccgcacggttggatcagccacgtctgctgcatttgagttcgtcgtcagtatgcaggagggctgctgaggccattacaggaacagtgagctttaataagcggtgttttcagtaccgtttggttgtcagcgcaacacgtgttgttggaacactgtggttccatatatataccatatatgtatctaagattcatcattatccatttaaatgtagacataaaaatcaataactccagtgaccaatatttggg

SEQ ID NO: 264747 - DNA, 393 bp, Zea mays
gggctccacttcaccccggtaggaaacaagatcctgttcgaggaggtggtgaagacgctggagacgagcatcggtttcagccaggagcggctcccgtcggacctcccgctgttccacgagatcgaccccaaggaccccatgaaagccttcggagcttagcttgggccttatcggaggagacgcacggtcgttggatcagccacgtctgctgcatttgagttcgtcgtcagcatatgcccgaggcctgctgaggccattacaggaacagtgagctttaataagcggtgttttcagtaccgtttggttgtcagcgcatcacgtgttgttggaacgctgtggttggataaacaaatcataccctatcagtcccacattaaaattcattttaccttt

SEQ ID NO: 264748 - DNA, 934 bp, Zea mays
tcgcgtgtctccctccttcgcgtgctcctcccccgaaccccatccccctcccacccaccgagtcgagggtgcgcgcgagatccagatccgcgtctagatccatcgcccggggtccgccatgatcccgacgcggtccgcgcaggcgtcgttccgcgaccgcaccaacgagttccgcgccgccgtcgagagagcgcgccgccacgccgtaccttcctcgtcgtcagcccccgccgcgccgagtagcagctctaccgggcccctcgacgggttgatcgcagccacgtcggctcgctcggagttcaacaaccgcgcgtccaagatcgggctcgggatccaccagacctcacagaagctatcccgccttgcgaaattggcaaagagaacatctgtttttgatgaccctacagtggagattcaagagttgactgcagtcattaagaaggatatcacggctttgaattctgctgttgtagacctacaagctctctgcaattcacaaaatgagagtggcagtctctccaaggacacatcaaatcattccactacagtcgtggacaacctaaaaaatcgtctgatgagtgcaacaaaagaatttaaagaagttcttaccatgcgaacagagaatttgaaggttcatgaaaatagaaggcaaatgttctcttcgtcagctgcaaaggacgcgtcaaatccattcatccgtcaacgaccccttgttgctagggatccatcagagtcctctgtgcccccagcaccatgggccagcgactctgcatctaccccactattccagaggaagaagactaatggagatcatggagcatcatcatcatctcagcctttcgtgcagcagcagcaattggcagtacaacaggacagttacatgcagagcagagctgaagctctacaaaatgtggaatcaacaatccatgagctg

SEQ ID NO: 264749 - DNA, 1229 bp, Zea mays
tcgtgggtcgtcgcaatcctctaaagtgacgtcgtgacttatcgcgtccgcggaaggttggaggagaaccgagagcagagagacatggcgccccaccaccagcagcgggcgctgctcctgttcccactcgtcttcctcctcctcctccttgccccgcccctcgccggcgcgtggggaaaggagggccacatcatggtctgcaagatcgccgagaagtacctgtcggagaaggcggcggcggcggtgcaggcgctgctgccggagtcggcgggcggggagctgtcgacggtgtgcccgtgggcggaccaggtgcgctggcactaccactgggccagcccgctccactacgccaacaccccccaagtctgcaacttcaagtattctcgggactgccacaattctcgtggccagcaagggatgtgcgtcgtcggggctatcaacaactacacggaccagctctacagctacggccagaagacttcgtataacctgacggagagcctgatgttcctggcacacttcgtcggcgacgtccaccagccgctgcacgtaggcttcgaagatgacgagggcggtaacaccatcaccgtccactggtaccggaggaaagcaaacctccatcacgtgtgggatgtcagcattattgatacggcaatcaaggacttctacaacaagagcatggataccatggtagaggctctcaagatgaatcttacagatggatggtctgacgacatcgtccactgggaaaattgcaagaacaaacacgcgacctgcgcgaacgactatgcgattgagagcatccattattcctgcaactacgcctacaaagatgtggagcaagacatcactctaggagatgattattttttcagtaggtacccgattgtggagaagaggttagcgcaggctggaatcagattggcgttggtacttaatcggatatttggtggaggtgaagcggatgatataccactacaagtacagtaacagctgtaataaaaaggaagcatggctattacaaggatttgtccattacatcgtctatacatcaataaattggcatgaatttgtaactccattgctatacatcaataaattggcatgaatttgtaacaactgaaaggatcaagatgccacccttgaattgcacttctccaaatttcttgaacaaaataaaaatttataatcaagttcaactttaaaaaaaaaaaaataaaaaaaaatat

SEQ ID NO: 264750 - DNA, 1463 bp, Zea mays
ggagactattgacaccagatcttgcctaacatggtccaaaatgccacacacacaacacatcccagtacattaagtcattaatcgccaaggaccaggacaatgagtctcaaacaaaactcgaagcagggagcagcaggaagaaataaaaaaataaaacaagccgacggcgagcaatccacaaggaaggcaagtacatcctattcgccgtacaagagctcgccgccggcgacctgtgcgaagggaggttcgtgttcagccgcgagacgagccgggccaggctccggagccccgaggacgatgacaagagcaacctcataaaggacgggatgaaccccaagagcctgctgcagacgctgctgatgcgggccggccacaccccgcccaggtacaagacgaagcacctcaagacgaacgagttcagggccgtggtggagttcaaggggatgcagttcgtggggaagccgaagcggaacaagcagctcgcggagcgggacgccgccatcgaggcgctggggtggctgacgcagacctccggcgtgaatgctgtcttcatccgtcgggagcaggagctccctcctagactcaatctgcagcggcatgtgatttgactgaaaattgagcaacgcggctatacaatacctgttggggtgctgctcccggacgaagcggatgccaccgttgcagaggttgcaggcgcctgcaagcacagagcacttcacccccacaggctgctgggcgcggacgagtgtcgggttacgtcctgattctcagcagcgagataccccgtagcgcccccaagttgctcttcttcctaggctgcgggtcgcggacgccgtacctggttcggtgctcgccgatatgctgcgcgcggttctttagatcgacgatctgggtggcgatgttgcggcaggggtaccacgtccggatctcgtagagaatcttgcggacgaccgtcacctagccgctgcccctggggtctggacggaggctgtaggcgaagtcgtcgatgcagtcttcgatgtcgtaggcgacatcccagatctgcttcatccagtcctccgtctagttgttgtggccctcctcgcacttgctcaggctgctgaggaaggtctgcatgctggctagctcgtcggtgataaattggatgtcgccccggacgccacggatcagggcatactcctctgcgaggagggcgtggatttcgtggagcgctcagctaggctagggcacgcgcggatcgcggagagggggaggcgggggcatcctatgcactggatctgggcgtggatgttggcgtggatctggtgcgcggaggtagtagctgggcgagggatttcgcagaggtagcagctgggcatgcggcgggcggctcgtggcggttgaaacggtcacggcgccattcgcgtagggatttgcgtgcttgaggatcgcggaggcgggaggatcgcggcccacgcgtccaa

SEQ ID NO: 264751 - DNA, 458 bp, Zea mays
gcggaacaagcagctcgcggagcgggacgccgccatcgaggcgctggggtggctgacacagacctccggcgtgaaggctccggacgagaacgacgacgactcgccgctggacctgactgacagcatgctcaagctcctcaccaggccgaggcggcactcgaagaatagctctaggaaacggtgattttttgggcgaggatttgctgtagattgatcgcgcacacgcccaaaaggcatagagagagagagagagataggaaacgtcagctttggttacacgaatgccccatggtctcgatgtgttgctttggacattttttatttttatttttccccgctatgtcatcagaatcagaagttcctccatcctgctgattgctgtcaccgtagaacatggtttaaaaaattaaaataactgcctatagcgctgttatttctatagaaataaccctccgaag

SEQ ID NO: 264752 - DNA, 441 bp, Zea mays
cggacgcgtgggcgcctacaaagatgtggagcttgacatcactctaggagatgattattttttcagtaggtacccgattgtggagaagaggttagcgcaggctggaatcagattggcgttggtacttaatcggatatttggtggaggtgaagctgatgatataccgctacaaatccttgtaatagctatgcttccgggcagccacgagtatcagccccggcgagcggcggcgatgcagaacctgctgtccggcgcgtcccacgagacgctcccggacagcttcatcttcccggccgagcagcgcccgccggcgtcggccgccgccgtcgcgctccccgtcatcgacctgtccgggcctcgcgacgaggtccggcgagccgttcttgaagctggcaaggagctacgcttcttccaggtggtgaaccacggcgtgccggagca

SEQ ID NO: 264753 - DNA, 473 bp, Zea mays
catgttactccaagaccaatgatgcttttctagtttctaacactgtaagctgtaggatggatggtctgacgacatcgtccactgggaaaattgcaagaacaaacacgcgacctgcgcgaacgactatgcgattgagagcatccattattcctgcaactacgcctacaaagatgtggagcaagacatcactctaggagatgattattttttcagtaggtacccgattgtggagaagaggttagcgcaggctggaatcagattggcgttggtacttaatcggatatttggtggaggtgaagcggatgatataccactacaagtacagtaacagctgtaataaaaaggaagcatggctattacaaggatttgtccattacatcgtctatacatcaataaattggcatgaatttgtaactcccttgctatacatcaataaaaaaaaaaaaaaaaaaaaaaaaaaaagaaaaaagaga

SEQ ID NO: 264754 - DNA, 1599 bp, Zea mays
tgtgcaggcctgaaaccctgaaccagagaggccaccacacaggtgtatcaatatgcttcaagattgcagaagtgttgatgagtttgagaggctcaacaaaattaatgagggaacatatggtgttgtatacagagcaagggataagaagacaagtgagattgttgcattgaagaaggtaaagatggagaaggagcgagaaggtttcccattaacctctcttagggaaataaatatcctcttgtctttccaccatccttcaattgtggatgttaaggaagtagtagttggaagtagtctagatagcatttttatggttatggagtacatggaacatgatcttaaaggtgtcatggagaccatgaaacaaccatatacacaaagcgaggtcaaatgtttgatgcttcagctgctagagggtgtaaaatatctacatgacaattgggtgcttcatagggatctgaagacctcaaatcttttgttgaataaccgtggtgagttaaaaatatgtgattttggactgtctcgtcaatatgggagcccattaaaaccttatactcaactggttgtgactttgtggtacagggccccagaactgttgttaggaacaaaggagtattctactgctattgatatgtggtccgtgggctgtataatggctgagctccttgccaaagaaccattatttaatggaaaaacagagtttgaacagctagataagatttttagaacacttggcacacctaatgagaagatttggcctggctatgctaaattaccaggcgtgaaagtaaattttgtcaaacaaccgtataataggctaagggataagttcccagccgcttctttttctgggcgaccaatcctgtctgaagctggttttgatctattgaacagactgctgacttatgaccctgataagcgcatatcagcagacgatgctctgaagcacaaatggttctctgaagttcctctgcctaaatcaaaggacttcatgccaacattccctgctcttaatgaacttgacaggcgttccagaaggtatctgaagagtcctgatcctctggaagagcaacgtttgaaagaactgcaagggaacataggcaaccatgggctttttgggtgaactagaagcacttgattgggtctgcaagggaacataggcaaccgtgggctttttggctgaactagaagcacttgattgggtcctgtccgtcctaactgttatgcttcacactgaaatcctgagttcatgaggttagatatcttctgaggtgaggtgccatggacatgaagtatcacatcttctcggtgtctagcagcaactgatagtgttctttagcaggcttggtaccggtttaaatggataaggtttctccttgtggcccatcatagaaattttgttgcaggattaacgcttcatccagatcgatcataaaagcaaatataatctacctgcatcataaggtgtggcgtgttggcttttattggttacaccagtttcacctttggaacttctctatgtaaaatattccagattggtacgttgtaaacaatgtccagtgtgttggatttaaatttaaataaaacatcatcattatt

SEQ ID NO: 264755 - DNA, 817 bp, Zea mays
  unsure (1)..(817): unsure at all n locations
cctggccaaagaaccatcatnaaattttttaattttagnnngaacagctagatgcgcctttttagcacacttggcacacctagcgagaagatttggcctggctatgctaaattaccaggcgtgaaagtaaattttgtcaaacaaccgtataataggctaagggataagttcccagctgcatctttttctgggcgaccaatcctgtctgaagctggttttgatctattgaatagactgctaacttatgatcctgataagcgcatatcagcagacgatgctctgaaacacaaatggttctctgaagttcctctgcctaaatcaaaagacttcatgccaacatttcctgctcttaatgaacttgacaggcgtaccaaacgttatctgaagagtcctgatcctctggaagagcaacgtctgaaagaactgcatgggaacataggcaaccgtgggctttttggctgaactaggagcacttgattgggtcctgtccgtcctaactgttatgcttcacactgaaatcctgagttcatgaggttagatatcttctgaggcttggtcccggtttgaatgcataaggtttctccctgtggcccatcatagaaattttgttgcaggattaacgcttcatccagatcgatcataaaaccaaatataatctacctgcatcataaggtgtggcgtgttgccgtttattggttacaccagtttcacctttggaacttctctatgtaaaatattccagattggtacgttgtaaacaatgtccagtgtgttggatttaaatttagaacgagccatcatcattattagaattcat

SEQ ID NO: 264756 - DNA, 516 bp, Zea mays
cttacacgttctcccacccacacggccacacgcccacacgcactgctcctctgatctgagatgctcatgcatcctcctaatgtaacctgaagctttaagaaaacaaagtgctcccggaagactccaagctgcagctaccggccttcctctcccccattccaattccgagaacaggggcggcggagtcaaccaggtacgatgtgctcggtagcgaggctggcgtttgtgcttgcactggccatagccgcctcgtcaattgaggttgcggagagcagagattttaatatctttgctcagggcagcttgcctgatgcaaccaagggatcgtctggtctagctgcaaccagtggaaagttgtgtcagttatgcgagcagtactcatccgaggcgctcctctatctcacacagaacgagacccagactgagattcttagcattctacaccatgaatgtgccagccttgcccctctcaaacagcagtgcatcacgctggttgactactacgtaccccttttc

SEQ ID NO: 264757 - DNA, 622 bp, Zea mays
  unsure (1)..(622): unsure at all n locations
ctagtatcgtctattgattattcgataagaaaaaaaattgttctttgaattcttatattcacttggacttgtgagtgagttccgtcgtcgaacgaaacgcagcatctgcggcgcccagcaagaggcgcgtcgtctcctgcagggccgtcagcagcaggtcgctgtccatcatcaggtgcgagcagagcgcgaagaagggcggcgggccggacacatggctgggccgcgcggccatggtcggcttcgcctccgcgatcgccgtcgaggtggccaccggcaagggcttccgccagaacttgggcgtgggtactccggcgccgacgctggcgctggccgtgtcggggctcgtcgtcggcctcgccgtcttcttcctgctgcagtcgggaggaggcacgcgagactgacggctgatggaaccccatgagctgagagcacgcgcacgtcgaacatcgtctccccactcgacatcagttgctgtaatggttggtgaagtgaggatgaaaacccagggcatatatcatcatcatcatgtcatgtgtaacaaagacgataactctcatgtgttgttggtgttgtctgctgctgttgtacgacatccgccgctcgcttgtaaaaaanaaaa

SEQ ID NO: 264758 - DNA, 481 bp, Zea mays
caagaccagacgaggaggaagagaggcgcgcaagcggtccggtctcatggcgcccttccccgccctccgctcatcgtcgccggtggccgccgccgcggcgccgtcgctcggtcgcgtgtccggccacgcatctgcggcgcccagcaagaggcgcgtcgtctcctgcagggccgtcagcagcaggtcgctgtccatcatcaggtgcgagcagagcgcgaagaagggcggcgggccggacacatggctgggccgcgcggccatggtcggcttcgcctccgcgatcgccgtcgaggtggccaccggcaagggcttcctccaggtagggaccgtcgtagagtatgagtatcaacgtaacatcgacagcagcgaggaacgccgaaacgcgtgcgtaacaaacataccacgagtttgttgtgggtggcgtgcagaacttgggcgtgggtactccggcgccgacgctgaggacggcccgtgtcggggc

SEQ ID NO: 264759 - DNA, 2173 bp, Zea mays
cgagaacctgctccttctctcgaccattgatccctccaaggaccccattcgctctggcctcgaaccttgccttgagaggcctgaggggtaccctaacggtgaaggcgggtcttaacgcgattgacattatgctaatgatgagagcaaggagggtgcttgcaaagcttgctgagaaaagaaaatcggctgtggaatcttcacgctcagaaaggaccttgggtggaattgatctgacatccaagattgtggactttgggaatgcttgctgggccgacaagcaatttacagattttattcacacaaggcagtatcgggcgccagagatcattctaggtgcaggatactcgttttctgttgacatgtggtccttcgcatgtattgcttttgagctcgcaacaggagaaatactatttacacccaaggaaggccatggatacagtgaagatgaggatcacttggctttaatgatggaactacttggcaagatgccgaagaagattgcaaccatgggaacacgatcaaaggaatattttgaccgccatggagatctgaagcggatacgaaggctgaaattgtcatccattgaacgtgttctcgttgacaaatacaaaatttctgaatctgatgcccgggaattcgccaattttctttgccctttactcgactttgcaccagagaagaggccaacagctttagattgcctaaagcatccatggcttaaacatgacgaggataaaacatgtgggtctcttaacaataatgatgccaagagcattgatctggtccaaagcacagggagtatcaccaccgttgactgtacaaatattgatttgacgagcaaaaaaggcagctccactggaacttgtgataagactgttgatgcaaaatacaacacaagaagcattaccagcaatgctaccatgaacacttatgtacaacccacttctggaagttttgccaacagacttgcgaaaaatgttgatgtaaatccgaacattggatccatcagtaatagagatgccaagagttctgatatgaaggcccacatgggaagcaacaccatcagtgacgccaaaagctctattgtaaagctagatacaggtaacatcactgatagaaatgccaaacctgtcgatataaagcccaactctgacaacatctccagcagagatgacaagagcagtaatgtggacaccaccacttccagtgttgtcaacaaagatgcgaagcgcagcattagaagtgtcgttaattcttatatcaagaacttcgatgcaaagtgcaacactggaagcactgctaacagtgatgctagggacccatcagatacgaaatccagcactaaaattgttagtagtgctgataatgccaagtgtgtggacataaaaccgatcaatggaagtgataagagcaatgacaccagtgataagagcaatgacaccgtcgatgctaatgtgaaatccaactctggaattgttgcaaacagtgatgctagtaacaccgatgtacagactaacactggaagtgtcaacaacagcgatgattacagcattgactcaaaaccaaacattggccgggttgctgcaagcatacagaggttggagagcagtatggggaaatacagggccgacctttctcaagattgaggatccggcaggtaccagctggcgttattgtatatctctattcctgctgactgtacaaagttttgtatttgcctacagaacttacacggaggtaaatattccccatacataccctggaacaaattatgtcaatgctcacggattgactgcactgagaattacataacattcttttggacattttagtgggtaaacgtggaatctctttgggaatatacctgtacatgcagtggtagcagaagatcgctgttccttgtatggtggatgcactggaaggggaagaattgtactctgaccagccacacgtcatctctcttgatcatgtccatattctgccctcagtgaaaaaaaagagatttctttatgtcatttaacacggatcaccatttatctgagcaagggtgacatttttgtttggtttatggtgtgaggtttgcttgtaaaaagcgggacatgtgttgtataaaactattctttgttcattttgtagtgaaacaatcatatacatgaaatgtttttattcccac

SEQ ID NO: 264760 - DNA, 832 bp, Zea mays
cccacgcgtccgcaaggggatcgaagcggagagcaagggagcggtcgagcgggtgacatcatcgtcatccagggtttctcaatcggcagcgatggcgaccagggcggcggcgaggttcctgcagcgcaggtttctgtcttccggcggcaaggtcctcagcgaggaggagaaggccgccgagaacgtgtacatcaagaaagtggaacaagagaagctggagaagctcgcacgcaagggccccagctcaggagagcaaccctcgtcaaccacaggctctgcagcaagtgatgtgaaggccgatgctgggccaacggagtcagcatctgcaagtgtgtcgacggacaagaacaagaactatgctgttctggcaggcgcagttgctgccctgggtggcttgggttggtatctattgttaaagcctaagaagtcggaggaggttgtggactgaagagggaggttgtgaatgcggatggtcggccttatatctcaccatggttttactttctgcgcatagacctgcaacttctgaaaataattgttgaaatttactctgcactacttgttcttaggcctgttgcatcacagaaccttgaagtatgcactcgagttgttcagtagttctctccctcgcttggcaggttgcaatgttgagtgatgcttgtagtgctgcctacatcgttgctggataggtttttggatagtttggtttagaaggtgaggcactaaaccaggcctcaatctacttcaattcctttctcccaaacaatctttctgattcaattccaaacgtacgctctactttcctatatagattattacatgtactttccta

SEQ ID NO: 264761 - DNA, 838 bp, Zea mays
agactccaaggctgctcccagcaactcgtttctttcttcgagagagggcaaaaaccggcaaggggagcgaagcggagagtctcgagagcaagggagcgcggtgacgtcatcgttttccaaggtttctcgatcggctgctatggcgaccagggcggcgtcgagattcctgcagcgcaggctcctgtcttccggcggcaaggtcctcagcgaggaggagaaggccgcggagaaagtgtacatcaagaaaatggaacaagagaagctggagaagctcgcacgcaagggccccagctcaggagagcaaccttcgtcgactacagtctctgcagcaagtgatgtgaagactggggctgggccaacagagtcagcgtctgcaaacgtgtctaccgacaagaacaggaactacgctgtcctggcaggcacaattgctgctctgagtggcctgggttggtatctattgtcaaagcctaagaagtcggaggaggttgtggactgaagagggggttacgaatgcgagctgtggatggttggccttatatttcaccatggtttactttctgcgcacgccttctggaaataattgttgaaacatacgctgcagtctgcattacttgttctgaggcctgttgcaacaccgaacattgaagtctgtactcgagacgttccgtagttctctccctcgcttgacaggttgcaaatgttgagtgatgcttgtcctacgtcgttgctggagaagtggagaggtttttttggtactgatgttttgaatgtaaactcgttgcccctggccagcacacatgacgaagagcattctgtgataaaaaaggaagcggggaac

SEQ ID NO: 264762 - DNA, 1364 bp, Zea mays
tctggggcaaagccagtctcaaatcccaggggccaaaggaggagtgggagatcgaccttgcaaagctggagatccgctatgtcatcgctcaggggacgtatggcacggtctaccggggcacctacgatggacaggacgtcgcagtgaagcttttggattggggagaagatggttttgccacagaggctgaaactgctgctttacgaacatcatttaagacggaggttgctgtttggcataagctcagccaccctaatgttacaaagtttgttggtgcatctatggggaccacagaccttaagattccatcaaacaattccaatggtgctgcacgtacaaatttgccagcaagagcatgttgtgttgtggtagagtatcttgctggaggaactttgaagcaatatttgataaagaatagccgacggaagcttgcttataaagttgtggtccagcttgcattggatttggccagaggattgagctatctgcactccagaaagattgtacatcgggatgtgaaaagcgaaaacatgctgcttactccacagagaaaccttaagattgccgatttcggtgttgctcgtgttgaggctcagaatccaaaggacatgactggtgcaacaggcacacttggttatatggctccagaggttcttgatggtaagccatacaacaggaagtgtgatgtttatagttttggcatttgtttatgggaaatctattgctgtgacatgccttacccagacctaagttttgccgatgtctcatctgccgttgttcaccagaatttgcgcccagacattcctcgctgctgcccaagcgcatttgcgaatgttatgcggaaatgctgggatgcaaaccctgataaacgccctgatatggatgaagtggtgcagcttttagaggctctggacacgagcaaaggcggtggcatgatacctgatggccaatcatcaggatgcttatgcttcacaaaggctcgtggtccatagatacttttcatggtactcccttcccttggcaacactttccccgtgtaaatgactgggccacagcatgcttctctttgcacgacctgtgcagtcgtcgcttacagttctccatagctgccttgcgatcattgcgtgtcaacctgtagctctcatacgatttttgctgtcctctgtcgacaatcttttcatatactagtgtgctgctgtaattgtggttctaaaagagatttggcatacgcgttacactcttgaaactgctgtatgatcagtataaatctttactctgatcattatttccatttgtgctaagagttgagtacaagaatggcctaaaataaacccgtgtttagctgatccaaaaaaaaaagaaaa

SEQ ID NO: 264763 - DNA, 546 bp, Zea mays
tggaatcatagagagacggaaatactttttaaattagaatctaactacaattcgatttagttcaagtcaatattcagagttctactttctggaattattcagagttcagttattcaaagttattaatagctatacttagccacccatgatgtagtcaagaaaaaaataactgaactcttctgcttataatttcaactatattaatagatattgttatcaggtgtttaaaaagaatgtggtcatcttgtgtgacatttgtgttcttaaattgttgctctgcttataaccttttttacaatgtactcatcagttctatactcgcagccaaaatctatagtgggaactcctgcatacattgctcatgaggctcttctgaagaaggaatacaatggaaaggttttatgcgtagcgtcgttaattattctacacttgacatactgcctttgattaatgtgcctgctattattctccacttgaacaacatgttaagctgtcacaccatgttatacactcacgatttctacctatgcataacacggcactatg

SEQ ID NO: 264764 - DNA, 716 bp, Zea mays
  unsure (1)..(716): unsure at all n locations
ccggnncggaattaccgggtcgacccacgccgtccaaaaaaattaaagggaggaatgtgctgccaacaatgctctccgcttggacgatcctgctctggagtccgggtcaggtcagcttagcagagacaaccggtggcgcattcagggagtatatcgacacgtttgacggctacaccttcctgtacccgaagaattggatccaggtccgtggagctggcgcggacatattcttcagagaccccatggtcctcgacgagaacatgtcggtggagatatcgtcgccttcgtcgtccaggtacacgagcgtcgaggacctcggcccaccggagaaggctgcagagaaggtcctcggtcagtacctgacggagttcatgtccaccaggctgggcgttcggcgtgaatccaacgtcctatcggcgtcatccaaggtcgctgacgatggcaagctctactacgaggttgaggtgaacataaaatcctatgcgagcaacaacgagctggcggtgatgccacaggacagggtgcagagcttggagtgggaccgccgatacctgtcagtgctcggcgtcgagaacaagcggctctacgagctccggctgcagacgcccgagcaggtgttcatgcaggaagaggaggacctcanaagagtcatggactccttcagggtcatcaaggcggcgtagtttgtcgatagtagagtgcacatgttttggttt

SEQ ID NO: 264765 - DNA, 733 bp, Zea mays
caagtgtcaccagaatttgctgatgcaaatgaagaaaagctgtatgattttcttaggatcgagctaaaaagcgatatgaaaagaattcaaaggaggaatgtgctgtcgacaatgctctccgcttggacgatcctgctcttgaggccgggtcaggtcagcttagcagagacaaccggtggcgcattcagggagtatatcgacacgtttgacggctacaccttcctgtacccgaagaattggatccaggtccgtggagctggcgcggacatattcttcagagaccccatggtcctcgacgagaacatgtcagtggagatatcgtcgccttcgtcgtccaggctgggcgttcggcgtgaatccaacgtcttatcggcgtcatccaaggtcgctgacaatggcaagctctactacgaggttgaggtgaacataaaatcctatgcgagcacacaacgagctggcggtgatgccacatgacacaggtgcagagcttggagtgggaccgtcgatacctgtcagtgctcggcgtttagaacaagcggctttactagctccggctgtagacgcccgaacatgtgttcatgcatgaagaggaggacctcagaagagtcatggactccttcagggtcatcaaggcggcgtaattttgtcatagtttagtgcacatgttctgttttagtttgcttggttctttctttagtacccgcagaaatgtactatatacttgttttttttc

SEQ ID NO: 264766 - DNA, 1403 bp, Zea mays
ctcttccacggtccttccgggtcctatcgctcctctccgtcgccggtggagctcatggcatcctccatggccgccgccgccaccgccaccgccctcccgctgccgtccgggacgacgcagaggccgtctgcccagggccgcctcctcttcaccgccgcgcccgcccgctcccgctgccgctccctccgcctccgccccgccggccgccggtcggcccgctcctcgcctcgggccaccaaggctgtggtggcagcgttggctgatcctctcaaggtcatgatatcaggagctccggcgtccggcaagggcacacagtgcgagctcatcaagaccaaatatcaactggcgcacatctccgccggagatttgttgcgggcggagatcgctgctggctctgagaatgggaagcgggccaaggaattcatggagaagggccagctcgtgcctgatgagattgtcgttaatatggtgaaggaacgccttcggcaaccagacgctcaagaaaatggttggcttttggacgggtacccaagaagctattcacaggccatggccttggaaactcttgaaatccggcctgatactttcattctgttagatgttccagatgaactccttgttgaaagggtggttggaaggcggcttgatcctgtaacagggaaaatatatcatttgaagtattctccgccagagaatgaagaaatcgcttcaaggcttacacaaagatttgacgatacagaagaaaaggttaagttgaggctggagacttattaccaaaatatcgagtccttgctatcaacatatgagaacattattgtcaaagtgcaaggagatgccacagtggatgctgtctttgctaagatcgacgagctgctgggttctatcctggagaagaaaaatgaaatggtttccagcacatgagcaaggtaaaaatgattgggtgcagtgcagatccgacaagttcatgtaatgcaagtcacctctcatgataggaacttctccaggggaatatatctgaagcacaggacgacacgtacaagtaatgtaagccagtctcacgtaatggaaatttctccatgtggatgtggtcaaagcataggaatttttttcctccaattattaactgtacgcgaatggaagcgacagatcattcgtaggttgtgagggcttcagagatcatctgctgctgtacatgttttgttgctgtcttgtgaacatacatgtcttgttgtttctcaactggaggaatgctgttaacctgctgtatcatttccttgaatggcttatgtgagagggaggaggacctgagcaacagctcttgcaatctttgtctaaattccttcggatggtgaagcccatttcgtctgttctccgaaaagtatattgattgcattttccgaagg

SEQ ID NO: 264767 - DNA, 569 bp, Zea mays
aattctccgccagagaatgaagaaatcgcttcaaggcttacacaaagatttgacgatacagaagaaaaggttaagttgaggctggagacttattaccaaaatatcgagtccttgctatcaacatatgagaacattattgtcaaagtgcaaggagatgccacagtggatgctgtctttgctaagatcgacgagctgctgggttctatcctggagaagaaaaatgaaatggtgtccagcacatgagcaaggggaatatatctgaagcacaggacgacacgtacaagtaatgtaagccagtctcacgtaatggaaatttctccatgtggatgtggtcaaagcataggattttttttctccaattgttaactgtacgcgaatggaagcgacagatcattcgtaggttgtgagggcttcaaagatcatctgctgctgtacatgttttgttgctgtcttgtgaacatacatgtcttgttgtttctcaactggaggaatggtgttaacctgctgtatcatttccttgaatggcttacgtgagagggaggaggacctgagcagcagctcttgcaatc

SEQ ID NO: 264768 - DNA, 1454 bp, Zea mays
tagagagttcttgtatcatattctaggggaagtcataaaagctggagctacgtctctcaatatcccggacactgtcggatacaatcttccttatgaatttggaaagttgattgctgatataaaggcaaacactcctggaattgaaaaggctatcatttccactcattgtcagaatgaccttggtcttgcgactgccaacacactagcgggcgctcgtgcaggagcacggcagttagaggttactattaatggtattggtgaaagggctggaaatgcttctttggaggaggttgtcatggcaattaaatgccgcagagaactgttagatggtctctatactggaatcgattcccgccatatcactttgacgagcaaaatggtgcaagagcatagtggacttcacgtgcagccacataaagctattgttggtgccaatgcgttcgctcatgaaagtggaattcatcaggatgggatgcttaaatataaaggaacatacgaaattatatcgcctgatgatattggtctaacacgtgcaaatgaatttggtattgttcttgggaaactcagcggaaggcatgctgtgagatctaagctagtagagcttggatatgaaatcggtgacaaggaatttgaggacttctttaaacgctacaaagaggttgcagagaagaaaaagcgcgtaactgatgaagacttagaagcgttattgtcggatgagatattccagcctaaggttatttggtcccttgctgatgtacaggcaacatgtggtacacttgctttatctacggcaacagtgaaactgatagcaccagatggagaggagagaatagcatgttcagttggaacaggtccagttgatgcagcttacaaggctgttgaccaaataatccagattccaaccgttctccgagaatacggtatgacctcagtcacagaaggcattgacgcaatcgcaacaactcgggtggttgtcaccggagatgtgaccaacaactccaaacatgccttgactggccgcgctttcaaccgctccttcagcgggagcggggcagcaatggacatcgtcgtctccagtgtcagagcttacctgagtgccctgaacaagatgtgtagctttgctggtgccgcgaaagccagcggcgaggtacctgagagtgcaagcgtccaaagcgcagagtgagcttggcgacgatttggttctcatgtggactgggcggcgtaagagccagagcaactgttaaagagggtgacatttcgtttctgtgttagcctgttcaatgttgggggttttgccttgtcagtgtggtgtgactgtactgttctttttttggaggatagcccaccttgcaacgtgcaggcggtggtggaacctaggtagtgtacaatttgtatcttatatgaccaagccttccaataatcgaaaggcttaagatgggatgctggagactgtt

SEQ ID NO: 264769 - DNA, 817 bp, Zea mays
gtcggaatgcagcttacaaggctgttgacaaaataatccagattccaacattctccgagaatacagtatgacatcaggcacagaaggcattgacgcgatcgcggcaactcgggttgttgtcactagagatgtgagcaacaacgccaaacatgccctgactggccagtctttcaaccgctccttcagcgggagcggggcatccatggacattgtggtgtccagtgtcagagcttacctgagcgccctgaacaagatctgcagtttcgctggcgccgtgaaagccagcagcgatgtagctgagaccgcaagcgtcccgagcacagaatgagctcccgtttggttcagagtgacatgttgttcaaaatttctgctggaaggatcgtcccttgagcttaggacaggcaggaagtcttggggcctatgtagtgtacaatttctgtgtgtcatataccgtgctcgttgccagtttgtactgtaccatatataaaccatagaatatgttgccatttagaagtctggccaaggtcagctgtaatgcttcacatgcttatagcctggaaacattagacattgaaaacccgagcggtgaataaaggatgcccaaggtagaaatacaaatacgtattgtctcaatgcatttaaaatctgttttattcaaagaaaagctaaagcaaaaacactggcatatgaccatgcaagactgtcagtgccaacaaagacaactctaatcagcacatcgtacactggactgcagtgcttcccagattattgaagaatgttacagacgacttgcctgatttttgaatgagcgtaaaat

SEQ ID NO: 264770 - DNA, 889 bp, Zea mays
atacgatcatataggaagcggagctgaggacggccgggaaaccgggtgtggccacgcggtcggcagaggcgcctcgatccccaacaggcaacagcccagccgctgtcgccctcgttccgtagtacggcgccgccagatcgtcagtcaccatgatcatctccaagaagaaccgccgcgagatctgcaaatacctcttccatgagggggtcttgtacgccaagaaggactacaacctggccaagcaccccaagcttgatgtgcccaacttggaggtgattaagctcatgcagagcttcaagtcgaaggagtatgtgagggaaaccttctcatggcagtactactactggtacctcaccaacgatggcattgagcacctccgcagcttcctcaacctgccatcagaggttgtgcctaataccctcaagaagtcttccaagcccccgtctcgccccttcggctctggcccacctggtgaccgccccaggggccctcctcgttatgaaggtgacaggcctaggtttggtgatagggatggttacagaggaggtccacgtggcgctccaggtgactttggtggtgataagggtggtgctcctgcagatttccaaccatcttttaggggtagcagacctggctttggccgcggtggcggcggtgctttcggtgctggtggatcttccatggagtgatgtgtcaacatgagctagcataacattcgtctttgaactatgagaacaatgagattttgttttgttttaccgagctgttgccgtgggttgacatggttttgtgatcgtttttgtttagatgaaattattgaaatcaagcagcgggttatcaatccaaaaaaaaaaaaaaaaaaaaaaaaaaaaaaaaaaaagggcggccg

SEQ ID NO: 264771 - DNA, 407 bp, Zea mays
agctcctcgacccccgcccaacactcccagccgtcacgccgtcgccgccgcgagtccttcattcaccatgatcatctccaagaagaaccgccgcgagatctgcaagtacatcttccatgagggggttctatatgccaagaaggactacaacctggccaagcaccccaagcttgacgtgcccaacctggaggtgattaagctcatgcagagcttcaagtccaaggagtatgtcagggagaccttctcctggcagtactactactggtacctcaccaacgatggcattgagcacatgcgcagcttactcaacctgccgtcagaggttgtgcccaacaccctcaagaagtcctccaagcccccggaccagtcctttggatctggcccaccgggtgaccgccccatgggtt

SEQ ID NO: 264772 - DNA, 238 bp, Zea mays
gacctggcttcggccgtggtggcggcacgcttttggtgccagtggatcttccatggagtgatctatcaacttaagcgggaaaattgattcaggataggcacatgtttgttgatctttgaacttttgaggacaatgagattttggtttaccgagctgttgccgtggcttgtcatggttttgtgatcctcctttttttgttacattaaattattatagcagcaagtcatcattcgcatcg

SEQ ID NO: 264773 - DNA, 593 bp, Zea mays
cggtccggtattctcgggtcgaccctcgcgtccgccacaacaagaatatccacagcattcttcccaaaacaaccgtttggaccaactcgtgctgggatgagtttgtgagcctgccagctattgttccacggggccctgttgcactactaggtttgggtgctgggacctcagcacatctgatgctaaagttttggccttggttacaacttattggctgggagatcgaccctatgataattgaattgtcaagggattattttggtatgtctgatttagagaaggccacagaatcaggtggttcacttttggtgcgcattggtgacgcactttctccatcagctacagttgaaggaggatttgctggaattgttgtagatttgttttgtgatggaaaggtcatacctcagctacaagaagccaaaacttggttgcaaattgcaaaaaggctaatgccagacggtcgaatcatggtaaattgtggtggatcagacactgaagaatctctctcatcgccttgggttcaaaaccctacagttaaagcactgtgttccgcatttcctggacaggtaagctggaagagactatcggagaaa

SEQ ID NO: 264774 - DNA, 1061 bp, Zea mays
cccacgcgtgcgtccacgcgttctcacacacaagacacaaccccactcacccggcagggaggccctcttcgtcggcggaggccatggtttccctcaagccgcagaagaggctcgccgcgggagtcctaaaatgtggcaaggggaaggtgtggcttgaccccaacgaggtctacgagatctcgatggctaactcgcgtcagaacattcgtaagctggtgaaggatggattcataattaagaagccacagaaaatccactcaaggtcccgggcaaggagggcccatgaggccaagcagaaggggaggcactcgggttacggtaagcgcaggggtaccagggaggctaggctccccaccaagatcctttggatgcgcaggatgcgtgtcctcaggcgtctgctgcgcaagtaccgtgaagcaaagaaaatcgacaaacacatgtaccacgatatgtatatgaaagtaaaaggaaacatgtttaaaaataagagggtactcatggagagcatccacaagtcaaaggccgagaaggccagagagaagactctctcggatcagtttgaggccaagcgagccaagagcaaggcttcccgtgagagaaagattgcaaggagggaggagagattggctcagggcccaagggaacctgcggcagcaccagtatcagctactgctccgtttgcagctgcaccaaagaaggcgaagaagtgaaaaaggtggtcttctagttctaggacctaattttggagcgccccaactcttttgctgttacatatccaagctgtcagatatctgtaataacatcttatctcgtttttcatgttggacaatgtagtagagttgtttgtcccaagtgtatttggaacgaattttcacagaatctgcttaatgcttcggtggaacccagttctggttttgctattttaccgtgtagatctggccgctgtggctagcctccgtgcttttttgcttcgatgttccataaccttgtctggtgttgacccgcgatgacgcaggttttgtagtgttctttggtgaattatgagctctgatgtgatattg

SEQ ID NO: 264775 - DNA, 1595 bp, Zea mays
gaaaaacgaggctgtacgcggccaggattttgagaaggctggtgaattaagggaccgagaaatggaactgaaggctcaaattacggccattattgacaagagcaaggaaatgattaaagcagagactgaatctggtgatgtcggtcctcttgttactgaggcagatattcaacatattgtctcctcttggactggaattcctgtggagaaagtgtcgtctgatgagtctgaccgtctcctaaagatggaagagacgctgcatacacgtatcattggccaggacgaggctgtcaaagctattagccgtgctatccgccgtgctcgtgttggcctgaagaatccaaataggccaattgccagcttcatattctctggaccaactggagttggcaaatcagagctagcaaaggctctggcagcctactactttggctcagaggaggctatgattaggcttgacatgagtgagttcatggagagacatactgtctccaagcttattggatcacctccaggttatgttgggtacactgagggaggccaactaactgaagcagtccgtcgccgcccatacacagttgttctctttgatgagattgagaaggcacatcctgatgttttcaacatgatgcttcagatattagaagatgggcgattaactgatagcaaggggcgcacagttgacttcaaaaacacactattgatcatgacatctaatgtgggaagcagtgtcattgagaaaggaggccgcaagatcgggtttgaccttgactatgatgagaaagacaccagctataacaggatcaagagcctggtgaccgaggagttgaagcagtatttccggccagagttcttgaacagattggatgagatgattgtattccggcagctgactaaattggaggtgaaagagattgctgacattatgctgaaagaagtgtttgacaggctgaaggccaaggagattaatctccaggtcacggagaagttccgagatagagttgttgacgaaggttataacccgagctatggtgccagacctttgcggcgtgctatcatgaggcttctggaggatagtctggcagagaagatgctggctggtgaggtgaaagaaggtgactctgccatcgttgatgtggattcagatggcaaggtgatagtcctgaatggtggtagcggtgttgctgagccactggaacctgctctcagtacctaaccgaggttaaaatctttgggccgaaatggccttctttacaagtcagctgggctcttcgtgatggtaaagtagactgttattacttggccgctccattagttgctttatctttcattgatttttttttgttggaagtgaggcagtagggtcactatggaaacgaatagacggagaggcattagccgaaatgaatgtttttcagtttgatgcccttgtattattaggccttgctagcaacaaggtgcagatgcccccccgtttgctgttggactttagtgtaacttaccttccgaatgtattattaggcgttgctagcaccaagatacggaggttatacatttgattttcagtaaaaaggtagactctttgttgccccgcc

SEQ ID NO: 264776 - DNA, 564 bp, Zea mays
ccgggccggaattcccgggtcgacccaagccttccgacttaaatggaaggggaaggaaatggctgtctttatgctgaaagaagtgtttgacaggctgaaggccaaggagattaatctccaggtcacggagaagttccgagatagagttgttgacgaaggttataacccgagctatggtgccagacctttgcggcgtgctatcatgaggcttctggaggatagtctggcagagaagatgctggctggtgaggtgaaagaaggtgactctgccatcgttgatgtggattcagatggcaaggtgatagtcctgaatggtggcagcggtgttgctgggccactggaacctgctctcagtacctaaccgaggtcaaaatctccattgggccgaaatatggccttctttacaagtcagctgggctcttcatgatggtaaagtagactgttattacttgtccgctccattagttgcgtcatctctcattgatcagctgattagatgagacctatccgcgcacgcccagatgggaaccttattaaggatacagctttgacccgagtcaatgg

SEQ ID NO: 264777 - DNA, 481 bp, Zea mays
aattgctgagccactggaacctgctctcagtacctaaccgaggtcaaaatcatcattggtccgaaatatggccttctttacaagtcagctgggtttctcgtgatggtaaaaactagactgacattacttggccgcccattagttgctttatctttcgtttattttcttttttgttggaagtgaggcagtagggttgctatggaaatgaatagatggagaagcatttagcagacatataatatatgctagacttttgagttgccttgttttgggaagaaacttggaattttcagtttgatgcacttgtattattattaggccttggtagcaacaagatacggatgtcgtctctacgtttgctgttgtacttcagtgtaacttgcctcccgaatgtatgagtattatttatcaagtcccaaataacagtgacggattgctaaaaaaaaaaaaataaaaaaaaaaagaataaatgaaagaaaga

SEQ ID NO: 264778 - DNA, 1862 bp, Zea mays
atgtgattttatgctgcatttgttggcgcttcttatatgtgtgggagggcagtctcctcaacagtatggggaatcgtggctgataagtatggaaggaaaccagttatcgtactgacccttattgcaatagttatcttcaatactatgtttggactaagctcaaactattggatggcattaatcacacgatgcctgcttggaatcatgtgtggttatctcgggccaattaaggcttatgctacagaagtgtgccgaaaagaatacaatcatctggctttggcagttgtttcttcctcacgaggcattggtctcattattggtccagctcttggtggttatcttgcgcagcctgcagataaatatccaagtatattctctcagacgtccatatttgggaggtttccatactttcttccgtgcctgtgtatatcaatccttgcagttattgctctaattgcctgcatctggtttccggaaactttgcataaacacaatggggatgccgttgataattcagttgaaaccgtagaagaatctcttgctggcaccgacactgaagaaaatggaggtggcggatgtctaaaattatttacaaactggccgttgatgtcagctattactttatattgtatcttctctcttcaggatgtggcttatgcagagacattctctctttgggctgtcagtgacagatcgtttggtggattaagctttactaccacagatgtgggcaatgtccttgcgatgtcaggtctcttcctttttctatatcaaatgttgatctatccgttccttgccaaaacggtggaccacatcacattagtccgtgcagtggcgttattgactctaccggttcttgctagctacccattctttccttcgttgtccgggttcgggctcatggtggtagtaaattgtgcatcttttctgaagaatacattctcggtaactaccattaccgtgttcaacattttgatgaatgaagctgtgactcaggatgtaagagccgcagccaatgggatagctgtaacactaatgtccatctctaaagcggttgctccagctgttgcaggaatcatattttcgtgggcccagaggcgtcaaacagctgcatttcttccaggcgaccacttggtgttcttcatactgaacatcttcacgttcatcggtttcgtcttcaccttcagaccgtttttcgttcgaggcagtgccaagcactgaaacatggatgaagcggacgacgacccatgggtatcctatccaggggcaatcgaatatagattttcttgtggcgtggccaagggcggtgccgagcctgtaccagtacgacgactcaggccagaacacacggcgtatggtatggtacacagcaaggccgtgttgttgctgtaagttttgtaatttctgtttccttctcggcttcgcagcatgcagttgctgtatatgatggaagaacactctgttactgggcatgttgcgcggtttccacgcgtgtaagtaatgtagaagtcgctatggtaggtatttccataccgtcattagtggatcattgatttttttttgtaagaaggttattgcaatgccctttttccgggcatgaataagaaaaaggaaatatgcttatatgcatggtattaataaaaaaaaaaaaaaaaaaaaaaaaaaaaaaaaacaaaaaaaaaaaaaacaaaaaaaaaaaaaaaaaaaaaaaacataataaaataaaaaaaaaaagaaaaataaaaaaaataaaaatgaacgaagaattacaacgaaaaaaaaaaaaaaagggcccgccttttaagaaactcaatctttcttgcgggggtttccaaattcaaaagcttttttaatggccccca

SEQ ID NO: 264779 - DNA, 838 bp, Zea mays
  unsure (1)..(838): unsure at all n locations
aatctgagaaggacaaatggatcgagcttgttcaggaaatcgcatgcagttcctcagtaaaacgaccaaaagatgttctgccaacttgcgttatcttgtgtaatgctctcaaccgaaatcagagggctgaaagggaggctgctgctgctgcactatcagaatttatccaccacattgaaaaagaacctacattgcttgaacaaatggttgaggaaatgtgtcaacatgtttctgatgattcaccaactgtcaggagcctctgtttgcgtggacttgtgcaggctcctgagagccacatgcttaaatacatccagcaagtgttaggagtaatattagcacttcttgaagaccccaacgagtctgttcaattaactgctgtccaatgcttgttaaatgtccttaatttgtcagaacaagatgctgttggtccaatcttaataaatctcttagtaaggctgcgaaatcttcaggtctcaatgaatacgaaaatgaggttcaatgcgtttgcagcttatggtgctttaagtgcatatggtgtcggtttgcagcgcactgcttttattgagcagatacatgctacccttccccgtctgatcctccatcttcacgatgatgacctaagtgttcgtcttgcctgtcggaacacattccagctccttgcgacattgatggaagtcgagggcttgtctgtgctcctcagcaagcagtattctgcttctgatcgccgttctgactatgaggacttcattagagacttaacaagacaactgtgtcggttgtctcnacgcagagtcgacagctacctagaatcggctatcccagcattcgatgcaccttg

SEQ ID NO: 264780 - DNA, 524 bp, Zea mays
gttttcccggacaaggtgtaatagctgtagcattctcagggatcatgtgcgctcaccgagtcgctgcagatattggactagagcaaaaatctccggctctagatgctggtcttcttgggctactcagatggttgagaacacttgcatagaacgatatcagacagttgaaaatggacttcatttttccccccggaaggctgatgtttcaccagagttaggattctgcacgatctgttatgatgatcttgttatctgtaccatctcagcatcgatttcttgaaactcctaacggaaaaaaaaaggaatacgaatgggtgtacaggtttcagattttgaattatatgattacggtgtcagggccatggcatattggtatgcatataacgactacatcatagagtaaccagatggtgtacatcatctgattaccgcaataagcagagcactacatttgggagcaatgtagatcatgttacctaggactttgaaagttgaagggtatctcaaaacagactagatcgcga

SEQ ID NO: 264781 - DNA, 2254 bp, Zea mays
acccacgcgtccgcccacgcgtccgcccacgcgtccgcccacgcgtccgcttgatgagtatggaactaatgtaacaaaattagcacaggagggaaaattacatcctgttgttggaaggcagccacacagtgagcgtgtggtacaaattttaggcagacgaaccaagaacaatccctgcttgattggagagcctggtgttggaaaaactgcaattgctgaaggacttgctcagcgcatttctacaggcgatgtacctgaaacaatagaagggaaaaaggtcataacccttgacatgggacttcttgttgctggcacaaagtaccgtggagaattcgaagaaagattaaagaagctgatggaggaaataaagcaaagtgatgagataatactctttattgatgaagttcacactctgataggagcaggagcagcggaaggtgctatagatgctgctaatatcttgaagcctgcgttggccagaggtgaattacagtgcattggagccactacactagatgaatataggaagcacattgagaaagacccagcacttgaacggaggtttcaacctgtgaaagtgccagaaccaacagtagatgaaaccattgaaatcctcagaggactgagggaacgatatgagatccaccataaacttcgtgacactgatgaagctctgattgcagctgcaaagctgtcatatcaatatatcagtgatcggtttctcccagataaggcaattgacttgattgatgaagcaggttcccgtgttaggctacagcatgcacaggtccccgaggaagcaagagagcttgacaaggagctcaaacaagtcacgaaacagaagaatgaagctgttcgaagccaggattttgagaaggctggggaattgagagaccgtgaaatggaattgaaggcccagataacagccctcattgacaagagcaaggaattgagcaaagcagaggaagagtctggagagacaggacctatggtcaatgaagaagatatccagcacatagtatcttcatggactggcatccctgtggagaaggtttccagcgatgaatctgataagcttcttaagatggaagagactttgcacaagcgtgtcattggccaagatgaggctgtggtagcaattagtcgctccatccgccgtgctcgtgtgggtctcaagaaccccaacaggccaattgcaagctttatttttgctggtcccaccggcgttgggaagtctgagcttgcaaaggctcttgcagcctattactttggctctgaggaggctatgatccggcttgatatgagtgaattcatggagagacacacggtatccaagctgattggttcacctccaggatatgtaggatacactgagggtggccagctgacagaggcagttcgacggcggccatacacagttgtgctctttgatgagattgagaaggcacaccctgatgtcttcaacatgatgcttcagattttggaagatgggagattgactgacagcaagggaaggacggtggacttcaagaacacactcctgatcatgacctcaaatgtagggagcagtgtcatcgagaagggtggaaggaagatcggatttgaccttgactctgatgagaaggacagtagctacagcaggatcaagagcctggtcatcgaggagatgaagcagtatttccgacctgagttcctcaaccgtctcgatgagatgatcgtgttcaggcagcttaccaagctcgaggtcaaggagatagcggacatcatgctccaggaggtctttgacaggctgaaggccaaggacatcaatcttcaagtgaccgagaagttcaaggagcgggtggtggacgaaggctacaaccctagctatggtgcacgcccgctgaggcgagccatcatgaggctgctggaggacagccttgctgagaagatgctcgcaggggaggtaaaggagggcgactctgccatagtagatgtggactcggaggggaaggttgttgtgctcaatggtcagggcggcataccggagctctcaactccggcgatcaccgtttagctcgtacataacaaatgacaaaattaatagcatagtttttgttcaaacacattatcatttatggttagaatatctgtgtatatgtagtggtatagtcaatggggaaatcgttcctgcctctaaattcctttttttcaagttaaggtgtttcttttgtcgcaagttaatctgcctggttattaagatattattgtttac

SEQ ID NO: 264782 - DNA, 443 bp, Zea mays
cgccaattaggataattatattggatctgagcacctgctccttggactgcttcgtgagggtgaacgtgtggcggctcgtgtgcttgagagtctcggagctgaccccagcaatatccgtacacaagttattcgaatgattggtgagaccacagaagctgttggtgctggagttggcggcggcagcagtggtaataagatgccaactcttgaggagtatggaactaatttaacaaaattagcagaggagggaaaattagatcctgttgttggaaggcagccacaaattgagcgtgtggtacaaattttacgcagacgaaccaagaacaatccctgcctgattggagagcctgctgttggaaaaactgcaattgctgaaggacttgctcagcgcatttctacaggcgatgtacctgaaacaatagaagggaagaaggtcataaccc

SEQ ID NO: 264783 - DNA, 1339 bp, Zea mays
tgtttttctcgtctaccagataatcaagaaagattttagtattgcaagatttgctcagatgatgcggaggttaaatttctttgtggcattctgttgcattgggcatatataatagagcatgagatcattgtcaaggatcacttggtctgtttaacaaatacaatgaggtaccatcaatcatggctattaagattgcttgctgcttcttgtctgtaattttgatatgggaaatccctggggtatttgaatcattgtgggccccctttacgtttctgctaggctataaagatccatcgccatccaaggcacacttacccctgctacatgagtggcatttccgatctggcctcgatcgatacatatggattattggaatgatttatgcttacttccatcctaatgttgaaagatggatggagaagctggaagaatctgagactaaggttagattatcaatcaagggaaccattgtcactctttcattgacggctggctttctgtggtatgaatacatatacaagctagacaaagttacatacaacaagtaccatccctacacgtcatggatccctataactgtttatatctgcctgcgcaattgctcccagcagttgaggagtgcctctttggtccttttcgcatggcttggcaagattacactagagacttatatctctcagatccatatttggcttaggtctagcatgccaaatggacagccaaaatggcttctttgtttcataccagattatcctatgcttaacttcatgcttactacggcgatctatcttcttctatcataccgtgtgtttgagatcacgaatgtcttgaagtcggcttttatccccagtagggataatagccgtctgtaccaaaatttcgttgctgggatcgccatctcagtgtgcctgtatctctgctcacttattcttctgaagattcctgttgtatagggatgaacatacaccaagcaatcttgatagtagaaggtttcttgtaaagtgtttgcttgataggatgtttccagctctggcctggattcccttttgcttggtaggattcgaacatatacggggaactgagagattcaattgccagaggctgcatatacagaaatccgatcttttgatctctttgatggttcaaaacactctgctgtatgtatacaacaagtaggcaattagcgcattcttttggaagctgtaacaactactactcgccagccgatgttgatgcaacctcttgtaaaagtaatcctgtagaaccgaaccgtgtagggtagtcccataggtagttgggggctgtccaaaaaccgacgggcttttcctcttccttgaaa

SEQ ID NO: 264784 - DNA, 926 bp, Zea mays
caaatggcaatgattcctgggagatccatgaagagatgctaaaaaattcataagatgggtgcatggagattgggctaccataccaagttgtttccattgtctccggtgctcttaacgatgctgctgctaagaaatacgatttggaagcatggttccctgcatcaaagaccttccgagagttagtatcctgttcaaattgcactgactttcagtcaaggagacttggaattgggtatggccagaaaaaggtaaaagaatgacgagcagtccaagcagttttgttcatatgctgaactctaccttgactgccactgagaggaccctctgttgcatcctggagaatttccagaaggaggacggcgtcgaggtgccaaaggcgctgcagccttatatgggtggaatagagttccttcctttcaagcaacctttggatgccaaacaagctgctgactccaaatcaaacaagtccaaatcaaagggaaatgctgcttgagttggacgaagaacagactggaatgcaaatgcacgtgcaggttgcaaattcttatttatgttaatttttggggcctatcagtacacagtactcatagcatgacaaatggcgttgcaggttttggtttttacccgttttggtttcctggttgccgcattctctgacgacccacttggcacacttgtattgcaatagcattttttgaaatccggaatgcttgaccaccaccaccagctcaaccgggctgtgtgtatcgcgttgccacagaacgccggcttgtctgtctccgaaaccaccaggtgttctttgtagctagcacattagaaacggcttgctggcggattgattttttatcctttttttttttcaatgacggtggattggtgtacttctgatcgataatgaagaaaaaaaaggcatcttgtgtttgtgg

SEQ ID NO: 264785 - DNA, 659 bp, Zea mays
tcctgctcaaactgcactgactttcagtcaaggagacttggaattgggtatggccagaaaaagaatgatgagcagtccaagcagtttgttcatatgctgaactctaccttgactgccactgagaggaccctctgttgtattctggagaatttccaaaaggaggacggcgtcgaggtgccaaaggcgctgcagccttatatgggtggaatagagttccttcctttcaagcaacctttggatgccaaacaagctgctgactccaaatcaaacaagtccaaatcaaagggaaatgctgcttgagttggacgaggaacagactggaatgcaaatgcacgtgcaggttttggtttttacccgttttggtttcctggttgccgcattctctgacgacccacttggcacacttgtattgcaatagcatttcttgaaatccggaatgcttggccaccaccgccagctcaaccgggctgtgtgtatcgcgttgccacagaacgccggcttgtctgtctccgaaaccaccaggtgttctttgtagctagcacattagaaacggcttgctggcggattgattttttatccttttttttttcaatgacggtggattggtgtacttctgatcgataatgaagaaaaaaaaggcatcttgtgtttgtggaatc

SEQ ID NO: 264786 - DNA, 687 bp, Zea mays
cccacgcgtccgcccacgcgttcgcggacgcgtgggcactgactttcagtcaaggagacttggaattgggtatggccagaaaaagaatgatgagcagtccaagcagtttgttcatatgctgaactctaccttgactgccactgagaggaccctctgttgtattttggagaatttccaaaaggaggacggcgtcgaggtgccaaaggcactgcaaccttatatgggtggaatagagtttcttcctttcaagcaacctttggatgtcaaacaagcttctgactccaaatcaaacaagtccaaatcaaagggaaatgctgcttgagctggatgaggaacactatgttaatttttgggcctaccagtacacaatacccatagcatgactatggcgttgcaggttttcgttttacccattttggtttcttggttgccacattatctaatgacctacctggcatacttatattgcaatagcatttcttgaaatctggaatatttgaccaccatcagctctaccggctgtgtttatcgcgttgccacagaacgctgcttgtttgtctccgaaaccaccagcgttctctgtagcacattagtaacaatttgctggtggatttgatatcatcttttttgaatgatggtgtattggtgtacttgtgatcgataatgaaaaagacatcttgtgttagt

SEQ ID NO: 264787 - DNA, 684 bp, Zea mays
cggacgcgtgggcgccatccaggcccaccgcgtcgcgcacgtgctctgggcgcagcagcggcggcccctcgcgctcgcgctccagtcccgcgtcgccgacgtcttcgccgttgacatccaccccgccgccgtcgtcgggaagggaatcctcctcgaccacgccaccggcgtcgtcatcggtgagacggccgtcgtcggcgacaacgtctccatcctccaccacgtcaccttgggcgggaccgggaaggcggtgggtgaccggcaccccaagattggggatggcgtgctgattggagcaggggccaccattcttggtaacgtgaaaattggtgccggggctaagattggagccggatccgtggtgctgatagatgtgccggcgaggagcacggcggttgggaaccctgccaggctgattggtgggaagaaggccgagggtgcgaatgaggaggacatgccaggggagtccatggatcacacgtccttcatacgtcaatggtcggactacaccatttgagagcggttatccaaggtctattgctcttcttttgtatcactagtaatggtgatgtaccaaataccgagtacttgctctttgttgtgtgctatggtttgtgtattgtacttagaagcctagtggtgtttatgatcattgtcagctgagtgtgccatgcctgaatactg

SEQ ID NO: 264788 - DNA, 565 bp, Zea mays
  unsure (1)..(565): unsure at all n locations
cgcgccggcggcttgtgttccctttaaagcttggctgctcgtctgctcctgctgctgtctttcttctgctcttccatcgcgccagtgttttgagaagctggtcggcgctcctagatcccttcgcctctctcgcgttcgaggctaggtagccgccaccatgagccgctcggggcagcctccggatctcaagaagtacatggacaagaagcttcagattaagctgaatgcaaaccgtgttgttattggcacacttcggggattcgaccagttcatgaatctggtgatcgacaacactgtggaggtcaatggaaatgacaagacagatattggaatggtggttatcaggggaaacagtgttgtcatgatcgaggcactggagccagttgccaagtcgcagtgaatccttatttttcagctgatatagtcgcagcatgaaaactgatgtaaatgctatcagtgaaccctgttgtacttcggactcgtgcttttgcacagcaacataactcggctaccagcaccctggttaaataaaaaaaaaacntaatattaaaaactaattcaaaaa

SEQ ID NO: 264789 - DNA, 608 bp, Zea mays
gtctgtttgttgtgttagggtttcgtctcgtgtataaggcgttcggagctcgcaaatcctttcctctctcgcgttcgaggctaggtagccgtcaccatgagccgctcggggcagcctccggatctcaagaagtacatggacaagaagcttcagattaagatgaatgcaaaccgtgttgttatcggcacacttcgtggattcgaccagttcatgaatctggtggtggacaacattgtggaggtcaatggaaatgacaaaacagatattggaatggtggttatcaggggaaacagtgttgtagggatcgaggcactggagccagttgcgaggtcacagtgaatcattgttctttagcactagcagcgtgaaaactgatgtaaaagatatcagtggaccctgttgtatttgactaatgcttttgcacagcaacataacttcagaggtggaatgtctatccctttctctatgggatgcttgtagctatacaatcatcgagctcttaaattacatgatctaacgcatgctcatcgagctcttaaattaaaaaacaagaagatccaaccaagcaacaatgttggatgttagccgaaaaaatagaatcattaaaa

SEQ ID NO: 264790 - DNA, 611 bp, Zea mays
gcctaaaggatatgggttcgtgcattttggagatctgaatgagcaggcacgtgctatgaccgagatgaatggaatgatgttatctacaaggaaaatgaggattggggctgcagctagcaagaagaatacagatgctcagcagacatatgcaactaatggtgcataccagagttctcaaggaaattcttcagagaattatcccaacaatacaacagtctttgtaggtgggttagattccaatgtaaatgaggagtatctaaggcaaatttttactccgtatggagaaatttcctatgtgaagattcctgtaggcaagcattgtggatttgttcaatttaccagcaggtcatgtgctgaggaagccatccgaatgctgaatgggagtcaggttggtgggcagaaagttcggctttcatggggccgtagtcctcaaaacagacaggcttctcagcatgatgccaacaaccagtataatgggaacagctattatggataccaacagccgggttatgaaggttatggctatggtgcttccagtgcacaagacccaagcatacaaaactactacggatactctggttgtggtaactatgagcagcagcagccaacac

SEQ ID NO: 264791 - DNA, 1143 bp, Zea mays
cgtgaacttcctccagtgcctgcagctgagcaaatcgttaaaactggctgtgcaatcagaagggctgagggatgataccacctgtattgttgttgatataatagtagaaaaaaacaactcttccatgccacttgctaaaaggcaaccaggaattggtgtcttcaaaaatatgttcggcaagaaaaaatcatcggattcatcatcccattcccattcagatagagaatatatggatccagataacgtggaggacatatttgaggatgggtgtgcgcttctttctagacggctggattctgaataccctgttcgaaatatgttcaaactgttcatatgtgccatttgtcaagtagagttaaagccaaaccaaggtatatctgtacatgaagattcatcacaacctgggagcttgcgtcgctgggatggtccattcctttgccagagctgtcaggaaaagaaagaagcaatggagggaaagcgtcgttcacgaggttcatcaagaaacagtgggtcaagtgaatagctgccgtgtgtagagtgatcaggtaactactgaccagcaacaccccagcaccaccattttgcagcatttcttctgttgtggcacttccttgatcacattcacatgtaatatctgggagttctgatctagaactagattgaagtattgaattgctactgtggaggtggctgctgcttatagctctcatcccaagtgaggagcatgccttgtcctcagcaaggtccttgcccaggaatgtaggcagctttactcagccctttgaccttgatggcacatacaggttgaaagattaacgatgccaaaatgatatggcttgtatattctaaggtccattgctgcgacgatcttcttatagagttctggcaaatagctatggcactgttgctgaattagaactaggcgcttacatcaattcttccccgttcgagctagccttaatttatggctagagaccttagtattatcagtcctgctgaggtccagccttcgctgacaccaatgtaattgtcatctaaaatattctttcaagcagctgtgattcatcagtaagacattagttgtcatgtacaatgtacaaaatcttgctaacaagacagatctgcctcgtcattacttggatg

SEQ ID NO: 264792 - DNA, 1125 bp, Zea mays
agcgtgttgaacaacaataaggttccggtaccggctccggtgtactacgaggacatgttcgttaacttcaacatcgccaaggagaccgcctcccagattgctgggatccggctctgggtgaccaacgagtacatgcactcgggcttccgcgacggcggctcgcacgtctttgagtatctcatggctcttctgatcggcaagaagcctttgttttagctgtttcagaagccctgctatctaggttcgagtgtcagctgagctgtacctgctatgattgtatcgagcaaataatgaggcccgtttggtttcatgatcaacccccataatgtttaccttgtagacatttcacggataatgtataacgttttgaaatttggtccgcagctacatcatagaaatggaattggtctgctcgcaagacacgttccgagcagtactatgaaacaaatgttcgggttcttcgtagacatttgtgtccaaagtccaaacagatccagaagccagaggtgccattgtttcaaacaggcctggttcttttttttttaaatttacaatacaaaatttactttacaaagttcccaataagcctaagcctcctttgtacctgccaagctcatgccgagtccccctgccccttattgctcatggatctacagagaagctcaaatcccgttcacatattccaaggagatgacagatgactagctctagcttctaccctagatattagctcttagggttgatttagtgataaaaggggatcacggaagattggggagattgaggagaaatgaactaatttcactctcaacctcttccaatccccatgatctaaggactaatttggtggccaaggatcgcgagaggatccatgtcagaggaatcccattgctatttatggatcccctcgtgatctctggtcatcaaaccggcccttagcagcgattcttgtggctacaactacgtcccccgaagaacaaaattgtgagcgactacaagccacagcagtagatgccacgaatgggaatggctgaatctgggaagacaagctgctttccatgtgaccacagaagtgacgtgccagctttctctcaagttcagcggacgcgtgtgcggatgcgtggg

SEQ ID NO: 264793 - DNA, 732 bp, Zea mays
aattccggtcgagcacgcgttcgccagcgttcgtcaagcgttcggtgaataacatgcttgatgggaggaacgagctggtaaagtataggcttccaccaaagatggaaaagaaggtggtcaatgagcagaggtatgtcccagacacaagatatgtgctccatgacattgaccaggaggccaaggaacaggcattgctgtaccacagtgagaggctggcaattgcttatggtctgattagcactccagcacgaactccacttcgtatcattaagaacctgaggatatgtggtgactgccacaacgccatcaagatcatgtcaacgatcattgggacagagcttattgtgatggacaacaagacgttccaccacttcaaagatggaaagtgctcctgtggagattattggtgataatggattaaagccgctcttcgatcctttatatggagctgctggcagccatggtttcagttgataataagcaatatgaaggtatccaatgggtgttgctagtattttgtcatccttaaatattcttaagatacttagctgcaagcacttgtatcatgcaaggctatcacttgttgatgcgctaatcgatcctactctcctctgtatcaacatcttgtttcccatgggaaaacatgtgctggtctggagtatataacaactatacggttgtaagagctgggccttaaagaaaaaaaaaaaaaaaaaaaaaaagggcggccgc

SEQ ID NO: 264794 - DNA, 442 bp, Zea mays
  unsure (1)..(442): unsure at all n locations
accacgtgacccccatccggtgcctcatcgcaggcctgctagactgcaaccctataatgtccaagagaatatgtatagacgattcctcggttacggttcttgagcattcgctgaagacaggatggcagataaaaaggctgaatgatactgcacatctcaggcttctctagctgatcagtgtgtcactgtaaagaaactatctgatagcattctgcaaatcagatgctgaaaccacttgctgcacgcatgtactatgcggccatcacaagtgtggtctcgtcactgtatttcaattgtacctatcgaatgtttctactcaatgtagaagggttggcctgtactggcgttgtgtagtatttgttgttatttttatcaagattatttctcaaattgtagttttccatcagtgtctagttactntttcttggtgggtagttagtgg

SEQ ID NO: 264795 - DNA, 1632 bp, Zea mays
gttttgaggggtgttcttctgatatgatgagctctgctggttgtgctgatttttattgccatgaatgttgggaaggctacattagcgctgcaattggtgatggtccaggatgtttgtcattgcgatgccctgatccatcttgtagtgctatggttcttcaagggatgattaatgaattagctaaagatgcggatagaaaaaaatatgcacgatttctcttacgcgcatatgttgaaggtagcaagaagactaaatggtgtccagctcctgactgcacatgtgctgtggagttccttggtgatgaaaactatgatgtttcatgcaattgcatgttcagcttttgttggaattgcactgaggaagctcatcgaccagtgaactgtgagactgtttctaagtggatattaaaaaacagtgcagaatctgaaaacatgaactggatactggctaattctaagccctgtccaaagtgcaaacggccaatagagaaaaaccagggatgcatgcatatgacatgcacccctccttgtaaattcgaattttgctggttatgtctgggtgcatggtcagatcacggagagagaacaggtggcttttatgcttgcaatcgttatgaatcagcaaagaaagagggagtttacgacgagactgatgcaaggagggaaagagctaaaaactctcttgagagatatatgcattactatgagcgctgggcatccaatcagacatcgaggcagaaggcccaagcagatctgctaaaagcggaaaaggaccagattgcaaatttaactgacattttcgggataccagagacccagcttaagttcataatcgaagcttggtcacagattatagaatgcaggcgagtgttgaaatggacatatgcttatggctactatctggatgataagatcaagagtgatttttttgagtatctgcaaggtgaggctgagtctggtttggaacgcctgcatcagtgcgctgagaaagacttgcaaaattttttgccgtctgtgaaatctgacagcactgaaacaacgacccctacagtggctgaatttggtgaattccgcgtgaagcttgctggacttacaagcgtgactcggaattactttgagaaccttgttcaagctttggaagctgggttggaggatgtccgtgccacaggccaggctgctggtacatccagcactgccaccagctccaagaaaggaggaactaaatccaagaagaagcagcacactgcaccatcatctgaccacactgatgatgggtggccctgcgagcgctgcacatttcttaaccctcctacagtggatgcatgcagcgtctgcgaaaagagtaggtactagatgatggaatagctcaaagggagccagggaggcatcccaagaaaacctcaaagctcgtgagaagcatgcatgcatcggatgctgagaagaagagcttccagctgccgcaatgttgtacagagagttattttagggcctcggttggaaacggtgtggaggctcaagtggtcacatgtttgtgggggtcatttggttttctagttcttttctgttgttccttgtaaatatatttgttgtgatgtggtgacctgtgtttatgtgatgagtttttgtttctccc

SEQ ID NO: 264796 - DNA, 1375 bp, Zea mays
ggacctgggtgcgggccgcgagtgaattccgcaaccccagtcaatccgacgccagagagagtggcgactggcgacgcggtccggtccccccaattcccaacggccggcggcgcgacaccccgatccggatcccatcgcctgcccggagcctcgattcgggcggcggggacgacgattcgaccgcgtcggtaaccaggcagagaggcaaggaggggatgagcttccaggacctggaggcgggccacgtccggggggcgccgcccggcggcggccggaggagcggccggggccccgcgggggccggcggcgccggcgccggcgcgtcgcaggccgtggcgtcgggcgtcttccagatcaacaccgccgtcgccacgttccagcgcctcgtcaacacgctcggcacgcccaaggacacccccgacctccgcgacaggatacataaaacacggcaacacataacacaactagtgaaggatacatcagacaagcttaaacaagctagcgaggcggatcatcgcgttgaagtcagcgctaccaaaaagattgctgatgcaaagctagctaaagatttccaagcagtcctaaaagaattccagaaagctcaacgattagcagtagagagagaagctgcatatgcaccttttattactcaagcgggcctgccacagagctacaactcaagtgaagtgaataatggtgctgataagttggcagagcagcgcacgcagcttctagaatctagaaggcaggagttggtcttcttggacaatgaaatagtgttcaatgaggccatcattgaggagagggatcagggaatacaagagattcaacaccaaatcactgaagtaaatgaaatcttcaaagatcttgctgtgctagtccatgatcaaggagcaatgatagatgacattgattcccatatagagaatgctgttgtagcgacttcgcaggctaaaggccagctttcaaaggctgccaagactcagaagtcgaactcttcgctgatatgcttgttactcgttattttcggagtggtcctgctcatagtgataatagtacttgcagcataaaagcttggaaggcagctggggttccgatgatcgagcttattgcgacaaattccttcataagttatttttgctgtgctgctaggaatgattcctggtacccaggcggtgattggcgctctgcttgtggtgtggcggtatatgtggtgatgatgaaatctgatgcataaaagtactctttcctgcaagtgtagtgcctcatgcacgtttttgtttatatattgtgatgtatgagtgcgtgctgtagaacaaggttggattatccgtggcatgaagtttctcgacctcatgagacgcttatttcctct

SEQ ID NO: 264797 - DNA, 464 bp, Zea mays
atatccgacgccacacgaaacgaaacacaagagaagagaatagagagaaggtcggagggctagacccggtcccccaattccaattcgcccctctcgcggccggcctcgcgagacgccgattcggatcccatctcctgctcagagcctcgattcgaccggcgggggcgacgattcgaccgggtcggtagccaggcagaggcagcggaaggagaggatgagcttccaggacctggaggcggggcacgtccggggggcgccgctcggcggcggccggaggaacggcaggggccccgcgggggcggggggcgccggcgccggcgcgtcgcaggccgtggcgtcgggcgtcttccagatcaacaccgcggttgccacgttccagcgcctcgtcaacacgctcggcacgcccaaggatacccccgaccttcgcgacaggatacataaaacacggctacacataacacaac

SEQ ID NO: 264798 - DNA, 400 bp, Zea mays
  unsure (1)..(400): unsure at all n locations
aacacacacaactgtagccgtcgtcgtcgttggcgtgcgtgttgctctgctttcggagcccgtgcgcgagcggaaccaaagtaccagaccatggagggcctgctgccgttcctgtaccgggccatcctccacctcgccagcggcgggcagtcgcccatcggcaaccccttcttccgcgacgactcgccgccggagtcgccgctggcggcgcactactacgtccgcctcgccgccggcgccgacgtgccggccttcctctcctccgcggcgcgcggctactacgaccgcgggtgagagcccggccggaccaggaacgacgctgggcctgtgcgtgcgagcaggaagaatcctcgtgtgctccttcagatgcgtgttcagagtgctgggtctnctcccctct

SEQ ID NO: 264799 - DNA, 477 bp, Zea mays
gcgccggcggcgttgcctggcgagccccgcgctccctgtcgccgctccgccgtgccggcggcgccatcatcccggtcccggtgagcgagtgactagctagtaggctggccggcgtgcatggtgtgtccgagcatccgtcgacacgcggttctctcggctgcccgcgcgccgccgtcggttgtagatatcgctaggcgcgtacgtacgtagcgagcgtgaccagtgttcttggggggtgttagtgagtgagcctgcccgtgctttgcgcctgcgcgcgcggacatgggatcggagcttggtagacgacgacggtatatagtaggtagcatcgccatgtgtacgtactgcgtggttcctggtacagtagcatagcatgctctgtttctgtatcctgctgtgctcttcttcttggtggtgtgtgtatgtatatataaatatatgtttacgatgagttaaaaaaaaaaaaaaaggggcgca

SEQ ID NO: 264800 - DNA, 444 bp, Zea mays
cggacgcgttgcctcctctgcaccccccatcctcggacatcctcgcctgcagcagaccctcctctggtgcgcgtgcgccgccggcgagatgtcgaagaaaatcgtggtgaagctgcacctgcaggacaacaaggacaagcagaaggccatgaaggctgtctcggcgctcaccggcatcgacgagatatccgcggacatggcgtcgcacaagatgacggtggtcggcatggtggaccccgtgagcgtggtgagcaagctgcgcaaggcgtcgtggtcggcgaccatcgagtccgtcggcccggccaaggagccggagaagaaggacggggaggcagccaagaaggacggcggcgagggcgagaagaaggaaggcggcgagggggagaagaaggaagcaagcgatggggagaataagaaggaagcaggcggcgagaaagacaagga

SEQ ID NO: 264801 - DNA, 682 bp, Zea mays
atttcaattatactttggagtatactaatgaatttgacatgactgtttatgttaatgctagaatgcctctaacaattcatttgacatgcaaaagtgcaaatgcccttgctttattgtaataacatcataaactcccttcttcataggtagtaagaccaaaaaatgcttttagatgctaactagggaaaaatactatttgatactcataaacttgtaatagtaccaaaaacaatgtgttctgtggcaagccacaaaactagttcaggttttgattttcacccaaggagctaaggtactattcttttacaaataagatgataatcattgcagaatctgggtaaatgctcaatatgaactaattgtatataatttccatttcctgtaggatggttgatcaagtcagattcactcagatgtttccagactgaaaaggaatttttgctctgtgtactattagggaattcttgagagattagcccttaaattctttgaaacatcccttttctcgatggacctcctatatatatcgtatgcttgattcatctacatgtttgtgttgctttttgaaggatctagacctgcagttatgattcaggatttcaaatagaagctttttatccatctaatcaggctcatccccttgagaacattgaccctgaaagattatgtagcccttgatccc

SEQ ID NO: 264802 - DNA, 1123 bp, Zea mays
cccaagcgtccgcaaaaccttcacaaaaaaagccacccaaaaaaatccgtttcataactgaaaaaatcaaatagaaaaatcaagtgaagccggtaaagaaaaaaatggcagtggttggcctatccagtgctttcgctcctctcagaggttcttggatagccgtaaggatcaggcagggtggccaacgtgcagggatcagcttgtgtccatctccaaggagcaggaggagctgcgcggcagtggttcgggcggaggtgagcttcgtggacgccgacgaggcgaagaggctcgtgggcgaggagggctacacggtgctggacatcagggacagggcgcacgcgagagggcacacatcaagtcctccacacacgtgcctctcttcattgagaaccaagacaacgacattgggaccatcgtgaagcgccagctgctcaacaacttcgcggggctcttcttcgggctgcccttcaccaagctcaacccggacttcgccctgacagtcaaggacaagttctcgccggaaagcaagctgctggttgtctgccaggaaggtctcaggtcagcagctgctgcagatgcactggagaaagaaggcttccaaaatattgcatgcatcacatcaggtcttcaaacagcgaagccaggaacgtttgaatctgtggtgaaaagtgagctgcagaacgcggggaaagctggccttgtgaccatccaagggaagatttctgcagtccttgggactgtattgattagtgcctacctgtttataacattcttcccagaccaggctgagaagctttttgacttggctggcatcagcttgtgatcagagctgatgttcttcggtactccacttcataatcaggatggttgatcaagtcagattcactcagatgtttccagactgaaaaggaatttttgctctgtgtactattagggaattcttgagagattagcacttaaattctttgaaacatcccttttctcgatgtacctcctatatatatcgtatgcttgattcatctacatgtttgtgttgctttttgaagtatctagacctgcagttatgattcaggatttcaaatagaagctttttatccatctgaaagaaaataattttacttaa

SEQ ID NO: 264803 - DNA, 803 bp, Zea mays
gttttcgcgtgatctgatgatagtttaccactagcatgagaagaacaagaacatgcttgctgtgtcaagcaaaacagagcctctcacctgacagatcgagcgccatcgaacacgcacagaccaacctggctgcacaccctctgtggatccgtctgtgcgatgagcatgtcgaggatcatctctccgtactggctcacaacttccttgcactccgtgctgatgatcccgtctgccccgatcgcttcgttcacctgggcaattatggccgttgggccagcgagcaaggaagtcccggagtcgacgatggcagcgcaccccttggcgcagaaaccggtggagtggccgtcgatgagaaggtcccccatgtcgaactgccagtatcccttgcgggagacggggacgtaggtgtggttcccgctgaagtgcgcagggtcgacgccgccgaagacgagctcgccgccggacgctgcgtccgcgtccgggctccggttcagccagaaggagaagacgtcctccgccagcagctcctgctcctgcatgctctgccagatcggaggagccttgccgacggagatctcggggtatccgagaccgaggatgccgtcgaacttgccgattatgaacgttacgctgctttcgcgcgttgtctcgatgaacttctggtttttgacggtcaggtccccgaccagcatgtcgtcgtcgctgaagaacccggcgatcgagccggacccgtaggtgatcttgccggtctcgcctggcgagggcgcacgcagtgggaccacccagtcagtacggaccggtcc

SEQ ID NO: 264804 - DNA, 1021 bp, Zea mays
aataaaaggcgatccacaaattattttataagtgataagctgtgctaccatgaacaaacaaatttcaagacgatcgagcagcactcgtcgctctatttctcaatacacatcggacatgcatgtcttgaagcatccatttgctcttctccagaaacaaagaaagcagtactgttcacgtttctggtttcagcaattttggccaccgatttatttgcagcgtactgttggcatgtagtggatagacagtaaactacacatccctaatacatagggtatcgtctttataaagatgagagtgctctccacactcatgcagattccgcgaagccaatcctgtcgttgccgaagtcgaacaccgtgtggtaagctcccatgaagacgtccccaagaatccagagaggaccacgcggcggtggcacgtcatacgccatgaacccactgatgcagacggtttggcctccttgctccagcttcacaatgtactgctcgggtgttagggtgaaggtcttgtttgcgatggtgaacgcaaggctgggcatcttggagatctcctggcagctgactgttgactctccgttggggctcggcagacgctcacacagctggttagcgtactgcagtatgagctccttggtcttgttttcgcggagctggttctctatccacacgacagccatctgacaggccgagcacatgacatctgagcccaggttttctttcccgacaacagattcaatcccctcgctgacagatcgagcgccatcgaacacgcacagaccaacctggctgcacaccctctgtggatccgtctgtgcgatgagcatgtcgaggatcatctctccgtactggctcacaacttccttgcactccgtgctgatgatcccgtctgccccgatcgcttcgttcacctgggcaattatggccgttgggccagcgagcaaggaagtcccggagtcgacgatggcagcgcaccccttggcgcagaaaccggtggagtggccgtggatgagaaggtcccccc

SEQ ID NO: 264805 - DNA, 958 bp, Zea mays
  unsure (1)..(958): unsure at all n locations
gttccggttcagccagaagnagaagacgtcctccgccagcagctcctgctcctgcatgctctgcctggcaacctacatgtgatgggccggccgccgcccgccggcgggtgcaagagcaatgagatagatatctgccagatcggaggagccttgccgacggagatctcggggtatccgagaccgaggatgccgtcgaacttgccgattatgaacgttatgctgctttcgcgcgttgtctcgatgaacttctggtttttgacggtcaggtccccgaccagcacgtcgtcgtcgctgaagaacccggcgatcgagccggagccgtaggtgatcttgcaggtctcgccgtccgccttgtacgtgctagacttggccgacttgtatctgtggtgcaggtagcaggcaatcgagaagtagcatctggaggaggggacccagaggttggagctgccggtgtcgaagatgacggtgaagttctgcggcggcgtgccgatgccgacgaccccgtagtactgggtgttgaggtagtcgacgagagggacgtcgccgccgccggaggccccgagacggcttgcctcctgctgcctcgcggccttggccgccgccagcgcgcgctggtcgagcccgccgccgcgcctgctgagcccgaccctcagcaggccgccggcgccggcgccagcgccgtgaggggacgcgtgcagcagcagcgcgcacgacagcgcccacaggcaggcggctgctgccggcagcaggaggtggccgcgcccgcgccccatgatccttgttgtcttgttagcgtgttctaccttctttttcttccgaacaagtgctggagagcggattgatcaggaggaagaagagtggctaagtgagtgagtcaaggcggagagggggaaagaggggcaggcgtatgggcgacaaacacaaacgctgggattggcatcgtccacgtactactccg

SEQ ID NO: 264806 - DNA, 864 bp, Zea mays
aaagacgagctcgccggcggcccccaccgcgtccgggctccggttcagccagaagaagaagacgtcctccgccagcagctccggctcctgcatgctctgccagatcggaggagccttgccgacggagatctcggggtatccgagaccgaggatgccgtcgaacttgccgattatgaacgttatgctgctttcgcgcgttgtctcgatgaacttctggtttttgacggtcaggtccccgaccagcacgtcgtcgtcgctgaagaacccggcgatcgagccggagccgtaggtgatcttgcaggtctcgccgtccgccttgtacgtgccagacttggccgacttgtatctgtcgtgcaggtatcaggcaatcgagaagtagcatctgcaggaggggacccacaggttggagctgccggtgtcgaagatgacggtgaagttctgcggcggcgtgccgatgccgacgaccccgtagtgctgggtgttgaggtagtccacgacaggcacgtcgccgccgccggaggccccgagtcggcttgcctcctgctgcctcgcggccttggccgccgccagcgcgcgctggtcgagcccgccgccgcgcctgctgagcccgaccctcagcaggccgccggcgcccgcgccagcgccgtgagggcacgcgtgcagcaggaggtggccgcgcccgcgccccatgatccttgttgtcttgttagcgtgttctaccttctttttcttccgaacaagtgctggagagcggtttgatgaggaggaagaagcgtggccaagtgagtaagtcaaggcggagagggggaaagagggccttgaggcgtccccacgcgtccgcccacgcgtcaacgaaaacgtggg

SEQ ID NO: 264807 - DNA, 1883 bp, Zea mays
cggtttcttgggcggacgcgtgggcggacgcgtgggcggacgcgtgggcagctaccggccgtgacgttcttctcaccgtacgtcgccgagggattagataaactaagcagggcgctgcacgaggatggggtgcggggcgtcgagccagaaggacgccggggcgccgcggaggcggccggtgagcgtcggcgacgtggtcgtcttcctcccgggcctccgcgtgccgagggccgtcgacttggcccaggcgctcggcggctgcctggccaggagcgccgtggaccggctgtcggctctgcgatcgcgggtcgtcgacatggcaatgcgagagtcggcggcggcgctcaagcccaggcggagggcggcggcacggcacgggtctagtacagccaatcttctacaggccctcgaagactacttgccggctctgctaggactggtaaaagaaggtagcgtcttgaggaacaaagtgcacttcacctggagtaaccaggaggataatgctgaggagacggccatgccagacgcctggtacgaggtgctgtccatgctgcatctgatggccatggtctgcctgctgcaggccaacgccctgcttctcccgaggtcatacggcgatggctatgccccaagggtttctgaagagagtcgacgggctactgttgatgtcttcttgaaggcagctggatacctagactgtgcagttcggcatgtactcccgaagatgccactggagctaaggagacaacttccagtagacctggctgaaggaaatctcaaagctctaagcctccaagccctgggtcagggggttgacatgcagctcggtttggctattgatagtccaaaggccactttagcagtcaaaaggcgcttagcctgtgagatggtcaaatattggcaacaagttcaagagagcattccagagcttcctgtctctgatggatggggtaaaaagcaccggctctttgtaaagtggaaatatgttgaagctaaggctgcagcatactatttccacggtttgattcttgacgagggaaataccgaaaaatcccatggaatggcaatagctgcactccaagcttcagaggaatttctaaaagaaagcaaaagggtttcagaagccttccatgcaactcctccaacatcgaggagtcccaatccattcggaacagcaaaatatctgtttgacaagatcccaagagatgcttccagcaaggttcgaatcaaccaggacctgtatactcaagaaaaggtcattggagcgccacccccattaccagattttgcattggcgctaacacctgaagaatatgatcttcctccactagatccactttggaacaaagaagacacaagccattaagtgtatatgcagcagaatggttgcttctggcaaaaatattggctctggagagaaaggaaggaccaagatctgccatgtcaagagctgatgtgtaatgaatgaagtgtacaaagtattttcaaacaaaaatacatgttcacaaatttacgcaaggcctgaagacaatctgaagagctttgtacaggcgattcttcttctgacaagggaaatgctatgtcaaagggttccttgatcattgtgcatcttgatgcttgcattttgtcaaaaacagattttcagcaatttatgtagaactgtaaactagcctctgatcgaaagtggcagccttcaaatttttttttgccataaaacatttgcatcggcgccttaaaacatgccgtgggacaatcagtttcatctgagcacttaggtgaacaggattttcaaataatcagtggatactgtggcaaagtcagcttccagccattcagtgcatgcatatacagtcataaaattttagttttgaacttctgaatgc

SEQ ID NO: 264808 - DNA, 447 bp, Zea mays
aagatcccaaaagatgcttccagcaaggtccgaatcaaacaggacctgtatactcaagaaaaggtcattggagcaccacccccattaccagattttgcattggcactaacacctgaagattatgatcttcctcccctagatcccctttggagcaaagaagatgcaccccattaagtgtctatacagcagattggttgcttctggcaaaaaattgcgctctggagagaaaggaggaccaagatctgccatgtcaaaggtcgaacatggtaacaaatgaagtgtaccaaatattttcaaacaacattacatgtcaacaaaattaagctaggcttgaagataatctgaagagctctgtacaggcaattttcttctgagcaagggaaatgacatgtcaaaggggtccttgccccaagaggaaaaaaataaaaggagaaagaataaaagaaa

SEQ ID NO: 264809 - DNA, 652 bp, Zea mays
tcccacgcgtacgcccacgcgtacgcccacgcgtgcgcccacgcgtccgcggacgcgtgggccgccatgccagacgcctggtacgaggtgctgcccatgctgcatctgatggccatggcctgcctgctggaggccaacgccctgcttttccagaggtcatacggagatggctatgccccatgggttcctgaagagagtcgacgggctactgctgaggtatccttgaaggcagctggatacctagactgtgcagttcggcatgttctcccgaagatgccactgcagctaaggagacaacttccagtagacctggctgacggaaatctcaaagctctaagcctccaagccctgggtcagggggttgacatgcagcttggtttggctattgatagtccaaaggccactttagcagtaaaacggcgcttagcctgtgagatggtcaaatattggcaacaagttcaagagagcattccagagcttcctatctctgatggatggggtaaaaagcaccggctctttataaagtggaaatatgttgaagctaaggtgtataatctatgctactaccatcattctttttaacttcaaattcttgcctaagtatcaaacatgctaaattttcttcagatggtatatttctctaatgtgtgat

SEQ ID NO: 264810 - DNA, 800 bp, Zea mays
gttcaaacccaacccaaagcccaagccgaagaggaaaggataggagacggatagggtacccgcgatgaggcccgccgccgccagtaccggcgggttccatctcgtgctccccgcggcgcacaggctgcctcctagtcttcctagcatcagtagccgaagaggtgtaaggatacgagcggcggcggcagcaggcggtggcggcgcgctgctggggcgtcccatggaggacgtgtacaaggtgcgcgtggagcgaggcgaggtggcgcgggcacggatggaggcgctgcgggtcatggagacgtggtcgtcgtggcgcacgggtggccggtgccggatgccgtgggactggcaggtcgaccagctcgtgtacatcgtgtccggggaggtgaaggtcatccccgccggcgctgtccacggcgacgactacatgcacttcgtggccggggatctggtcaggtacccgcgctggttcgaggccgacctctacttcgacggcccgtacgaggagcgctaccggtttctcgcctacggagacgacaactagttagtacatctgcatttcaagcagctttgcctagaccctagagtatccatctaccggcaatgcatgcgttgtaatgttcctctgtaatgtattggtgtggcgtagtcaggcaccgaaataaaccaatcattccaatgtttgcgaattttattatttaacttattagttcctccaaacttctaaattggctatgatacgcgtgcaagagaaataaactgtttcttaattccaaaaaaaaaaaaaaaagggcggccgc

SEQ ID NO: 264811 - DNA, 1695 bp, Zea mays
tcgttatgaccagaataagacaattaatgtcatcacagagctgttcacgtctggaagtcttaggctttaccgtcagaaacatccacgtgttaacttgaaggcaataaagaattgggcaaggcagattcttcatggattggattacctgcatagccaccaacctccgattatccatagagacttgaagtgtgataatatttttgttaacggaaaccatggagaagttaagattggagatcttggactagctacagtaatgcaaacacctagggtgaggagtgttattggtaccccagaattcatggcacctgaactttatgatgaaaattatgatgagcgtgttgatatttactcatttggaatgtgcttgttggagatctttactcttgaatatccatacagtgaatgtacgaatccagctcagatttttaagaaagtatccacaggtgttaaacctgctgcattggctagaatttctgatcttcaagtaaagcagtttattgagaaatgtttagttcctgcttctgagaggtcgtctgccaaagaacttttgcaagacacatttctttgtcctgacaatacacatgaacctgctgtcactaagtttatatctccagcacctaataaaacagtagatatctctctggcgtctttgcatatggaagttgacacttttggatccagccctactgattcaggcaaggaaaatggttgtgttgctccatatacaccagtcttggagttcacaagaaccaacaaaaatacagagctaaagctaaagggcgagaaacttgataacaactccgtgtcactggttttgcgaattgctgatttctctggtcatgcaagaaatatccatttcctcttctacttggactctgatacagctttgtctgtagctgctgaaatggttgaacaattggagttagcggactgcgacgttaccttcattgctgattttattgaccttttgatagtgaatcttattccgggttggagacctgtaaatgatgcagcagcgaactcgtataggcgatctgaaagtgaacttgcagtcaattcccatcagaacatctcaaagttggtacctgattatgcattaattgatggtgtgatgcgcccaaaagatgtgaatgcatcaactagttgccttgactctgtatcaagtgcaaccaacctaggaggatcaccaggctctgaaggttcagtcatttctgtacagcttgctgagagttccaaaagtgtgagtgactatgggcccgaggattatggtactatggactgtggtgggtacaaagagggaatcagtacattaaattgcagccatgttgtagataatggatcgaggtcgattttccatatagatcaagatcacctttcttggagttggccagctgtggttcatcaacttcaactgataaccaggatgtgatgaacggggagcttgtttttattgaagctcagtacaagcacttggttgatgagttgacaaggatgcgagaagaggctagggaaggagctcgaaaaaactggttgccagatacatgatgtttttgttcaaatttggcatttcctctaaacatcataaactatgttcgatttcatgtttgaagtgtgagaaatgttaataatctgtcttagttaaaaaaaaaaaaaaaaaaacaagagaaagaacaaaaaaagaaaaaaaaaaga

SEQ ID NO: 264812 - DNA, 548 bp, Zea mays
  unsure (1)..(548): unsure at all n locations
cgtccggtactatgggcctgaggattatggaacttatttctgcggggggtacaaagagggaatcagggaagaaaattgcagccatgttgtagatgatggatcgaggttaattttccatattgatcaagatcacttctcttggagttggccaatggtcagcagtgcttcaatcatctactactgataatcaggatgtgctgaacggggagcttgtcttgattgaacctcagtttggttgagatgaattgacaagggtgcacggggagcttatcttgattgaaccccagtttggttgagatgaattgacaagggtgcgggaagaggctatggaaggagctccaaataagtgggttgccagataaatgatgtttttgttcaaatctggcatttcatgtgaacaatcataagctatgttcgatttatgttagaagtgtaagaaactatactgatcttttttagttaaaacataatatatgggtagattgtcgtgaaaaaaacaaaacaatangaaaaacccgcgaaaacccgaaaaaaaaaagggcggccgc

SEQ ID NO: 264813 - DNA, 532 bp, Zea mays
caaaagcagccgtcctccctagctcgcccgcccgaagcgacgcctgacttcgcatctgtttcgttccacccgccccgcgagaagcttctagaagggggagacccgccggagccatgccggaggaggagtcgacgtcgatcccgctcagccaggcggcggaggccgtcgaccccgaggacccagccaagtcgccgccgcgacccagctcgcccaccacctccacacgcaaggcatgctgtgctgttcttcaaagttgggtctcaagaaaatttatgactggatgtgtagtccttttccctgttgcagtcacgttcttcatcacatggtggtttattcaatttgttgatgggtttttcagtcccctatatgcaaaaatggggttcgacatattcggccttgggttcttgacctccctggggttcatacttcttggtggaatatcttgtgctcctggtggtcaacggtctctgggttgaaatgttataaagaatgcctttagccatatatcgacaacagtacatgtgttacaaca

SEQ ID NO: 264814 - DNA, 992 bp, Zea mays
tttgcgtaaggtaaacttaaccaagcagaatccgtccaaccaaccgcattgccggaggacaaggagtacgcgcccgtgccgctcggccaggcggcggccgaggcggcagcccctgactccgaggaccctgccaagtcgccgccgggacccagctcgcccggcacgtccactcgcaaggcattctttgctgttcttcaaagctgggtgtcaagaaaatttatgactggatgtgtagttcttttgccaattgctgtcacattcttcatcacttggtggtttatccaatttgttgatggttttttcagcccactctatgcaaaacttgggttcgacatattcggccttgggttcttgacctccctggtgttcatacttctggttggaatatttgtttcttcatgggttggttcaaccatcttctgggtgggagagtggtttataaagaaaatgccatttgtaagacatatatattcagcatcaaagcaagtcagcactgcaatttcaccagatcaaaatacgactgctttcaaagaagttgcaataattcgtcatccacgaattggtgaatatgcatttggattcataacatcaaccgtggtccttcagactgacaaaggtgatgaagaattgtgtagtgtgtatgtgccaaccaatcatttatatatcggtgacatctttctggtaaactccgccgaaattataaggcccaatttgtctattcgtgaaggcattgaaataattgtttcacgaggaatgactatgccgcaggtgatcacgtcactggaaccaacacctcggaagagccacgtgcgtttagacagagtgaggactgtatgaggcatgaatgaaagcgatgggtgtttcacgatggattgtctaattaatggattcaaagctggggcatggagcatgaagcaggatcagtttgtagattgcattcagaactcctgtgcacgttggtagacgtagatacatgacaaccctgattgact

SEQ ID NO: 264815 - DNA, 576 bp, Zea mays
cccacgcgtccgcccacgcgtccgcccccgcgtccgcccacgcggccgtaattcgtcatccacgaattggtgaatatgcatttggattcataacatcaacggtggtccttcagactgacaaaggcgatgaagaactgtgtagtgtgtatgtgccaacaaatcatctatacatcggtgacatatttctggtgaactctgaggagatcataagacctaatttatccattcgagaaggaattgaaataattgtgtcaggaggaatgactatgccgcaggtgatcatgtcactggaaccaacacctcggaagagccagaacgtccgtttggacagagtgaggacagtatgactgtatgaggcatgcatgaaagtgatgggtgtttcaggatggcttgttggttatggattcaaagctggggcatggagcttgagacaatcaatttgtagattgcattcagaacttgcgcattattggcagatacatgacaacctcacactaacttgcgttgctatcagttggtgacacgaaaattgcagctccacttacaattacaagcacgacatgcacttttaactga

SEQ ID NO: 264816 - DNA, 674 bp, Zea mays
gtgccaacaaatcatctatacatcggtgacatatttctggtgaactctgaggagatcataagacctaatttatccattcgagaaggaattgaaataattgtgtcaggaggaatgaccatgcctcaggtgattgcatcactggagcccatgccacggaaaagccagaacattcgtctaaatagaatgacgtgatgtaaaacatgtcacatatgcaacaaggtcgtgcatcaagcagatagcatgacctgtggggcacgattagggtgccttggctatatgcgtaccatgtgatttggatagaggagcaactttgtgctgagccattgtggcatttccatactgcagggaagcatcgtgttgatgccctgggataatttattgtcttaggctagtttggcaaccccatttttacaggggattcctattttttcaagaaaatatagtttattttcccttaaaaaatagaaatctctttaaaaaatggagttgccaaactaatcagtaaattgaaggggatcatgggcttcaattcactggtcaccaaaccagccctcaaacttgtgctactctttgtgcacttactagtactggttcaaaatgttagcgtctacgcgtgaggtgtataattgattaaattcgtttgtaactacgtgctgtataacctcttacgttcc

SEQ ID NO: 264817 - DNA, 642 bp, Zea mays
cccacgcgtccgcgcagaccaaagagcacatcctcctcgccaagcaagtcggtgttcccaagatcgttgtcttcctcaacaagaaggacatggtcgacgacgaggagctgctcgagctcgtcgagctcgaggtccgcgagctgctcagcaactacgagtacgacggcgacgacgtgccaatcgtcgctggctccgccctcaaggcgctcgaggccctcatgggcaaccctaccctgaagcgcggcgacgatgagtgggtggactgcatcttcaagctggttgattctgtggattcctacattccagtgccacagcggcagaccgacctcccgttcttactcgctgttgaagatgtcttctccatcaccggtcgtggtacagttgccactggccgtatcgagcgtggcaccgtcaagattggtgacacagttgatatcgttggaatccgggacacccggaactgcaccgtgactggcgttgagatgttccagaagaccatggacgatgccatggctggagacaatgtcggactgctgctccgtggtatgcagaaggatgacattgagagaggcatggtgctggcaaagcccggctctatcacaccgcacaccaagtttgaggcttgtgtgtatgtgcttaaaa

SEQ ID NO: 264818 - DNA, 1273 bp, Zea mays
gcgtccccaacgcgaatcatccttcttccgtcaccagacagacggtagagagtcgaacaatcgccggctcgacgcccctcttcccgacgccgcacgccttcactgtcctcggcagccgatcttccagagcggttcgacaccgtgctcgccacggtcgacatcactgccgccgccgccggaaagttggcatcgttgtcgacctctttctccccttcttccacccaggaggcaacatgtcgtcgctcgccgctgcgagagcggataacttctactatccgccggaatggagccccaagaagggtgggctgaacaagttccatggccagcatgcgctcagggagcgagcgaggaagctcgaccagggcatcctgattataaggtttgagatgccttttaacatttggtgtggtggatgcaattccatgatagcgaagggagtaagatttaatgctgagaagaaacaagttggaaattattactctaccaagatatggagcttcaccatgaaatcgccctgttgcaagcatgaaattgtcatacagacagacccaaaaaatactgaatatgtcataatcagtggggcccagaagaagacagaagattttgatgttgaggatgcagagacattgctgctgccagcagatgaagatcgagacaagcttgcggatcctatgtaccggcttgaacaccaggaagaggatcttcggaagaaaaaagaagctgagccagttttagttcgccttcagcgactctcggacagccggcactctgatgattatgccctgaacagagcactccgcgatcgtcttaggagccaaaaaaaagagagttgctgaagagaagaagtccgcgagaaagataggccttggtgttccggtcttggcttccttcggaaaaaaatccaacggaacgggttcaatggaagttggattggaagtggcgtaaagccgaagggataagagggccccaatcaaagctgcctccatctttccggagtcatcaagctcagcatcacatggtaaacccgacctcgtgctgaagaggcggaacataaaagctggagccgctacagcactgatggcaggcagggtgaagccgtcctcgtggcagagcgccagttccacgagctcaaggactcggatgcctgttctggcagcacgcaagtaggcagctcgttgcctcaggctttgtgtgggaaatagggggcttgtgaaatatggacttgcccgtaatattgctatgtttctttggttgtactatactcacaaatatg

SEQ ID NO: 264819 - DNA, 515 bp, Zea mays
  unsure (1)..(515): unsure at all n locations
gtttttatgtagagccaaaaaaagagagttgctgaagagaagaagtccgcgagaaagataggccttggtgtgcggctcttgcctccctccgcagaagatgccaccgcagcggcttcagtgaagtttgcatcgaaatttgagaaaagcagaagggataagagggccgcaatcaaagcgggctccatctttccggagtcatcaagctcagcatcacatggtaaacccgacctcgtgctgaagaggcggaacataaaagctggagccgctacagcactgatggcaggcagggtgaagccgtcctcgtggcagagcgccagttccacgagctcaaggactcggatgcctgttctggcagcacgcaagtaggcagctcgttgcctcaggctttgtgtgggaaatagggggcttgtgaaatatggacttgcccgtaatattgctatgtttctttggttgtactatactcacaaatatgacgccgntgacttttttcaaaaatttgaccactcgtcttattt

SEQ ID NO: 264820 - DNA, 1325 bp, Zea mays
ccttcgcgttcgcccacgcgtccggtcacacacatgcaggagttccggggacgacgatgtagcgataaagatcctgtactgtgggatgtgtcactctgaccttcacagcatcaagaacgagtggcacaacgccacgtaccccatggtccctggtcacgagatcgccggagtggtgacggaggtgggcaagaacgtgaccagcttcaaggccggggaccgcgtcggcgtgggctgcatggtgaactcgtgccagtcgtgcggcagctgcgacgaggacttcgagaacagctgccgggccgtcatcttcacctacaactccgtcgaccgcgacggcaccgtcacctacggcggctactccagcagcgtggtggtgcacgagcgcttcgtggtccggttccccgacgcgatgccgctggaccggggggcgccgctgctgtgcgcgggcatcacagtgtacagccccatgaagtaccacggcctgaacgtgccggggaagcacgtcggcgtgatggggctgggaggcctgggccacgtcgccgtcaagttcgccaaggcgttcggggccaaggtcacggtcatcagcacgtcgcctgggaagaagcaggaggcgctcgaccggcttggcgccgacgccttcgtcgtcagcaaggacgccgaagaaatgaaggcggctgcgagcaccatggacggcatcatcaacacggtgtcggcgaacctcaccttggccccgtacatgggcctgctcaagcccaacggcaagatgataatggtcggcctgcccaccaagcctctcgagatcccgccctttgatctcatcattgggaacaagaccctggccgggagctgcatcggcggcatgagggacacgcaggagatgatcaacgtggcggccaagcacggcgtgacggcggacatagaactggtggccgcggactacgtgaacacggccatggagcgcctggccaaggctgacgtcaggtaccgcttcgtcatcgacatcggcaacaccctcaagaattcagagtgatcagacctaaaacgccggcgacacctctactgctgctgcttgttgtgccctgtcggctttatacgatgaaccgcgtcctttttttttctgtgtcagtgataatattttagctaaggcagacgtaaacgtagttcgcgaggattgccttcccatgcatgttatggaagttggatgcttttattgttgttgccgtaaaacgagatatgatgcagcatttttttattttccctctatcatttggttgctgcatcctctcggttctaaattataaattatttaagtttctacaaaaaaaata

SEQ ID NO: 264821 - DNA, 1135 bp, Zea mays
tttcccacgcgtccgggtacggggacaccacacgctccccgcactctctctctctccctccctccaactcattggcagcagcagcagcaaccgcagccgcgagggccaagcaggggggacaaggaaaagggccgacgaagaggaaaaaggaagaacgcgtcgcggagccatggggcttggccttggcgtgcgggcggcgcccttcacgtacgcggcgcacgcactggccgtcgcggcggcggccatggttctcgtctggtccatccagttccgcggtgggctcgccatcgagtccaccaacaagaacctcatcttcaacgttcaccctgttcttatgcttatcggttatgttattatcggcggtgaagctataatggtgtacagggtacttccaacatcgaatcatgacacaactaagctgatccatctaattctccacgggattgcactcgtccttggtgcggttggaatatactttgctttcaaaaatcacaatgagagtgggattgccaatctttacagcctgcactcttggattgggataggaacaattactttgtatggtattcagtggataattggattcgtcacgttcttcttccctggtgctgcgccaaacgtgaagaagggtgttcttccttggcacgtactctttgggctctttgtctacatcttagcactggctaatgcagaactcggctttcttgagaagctcactttcctcgagagctcaggtctcgacaaatatggcacagaggcattcttagtgaacttcacagcattggttgtcgtgttatttggtgcctctgttgtggtggctgctatagctccagttcgccttgaagaaccacagggttatgatccaattccagaaaactagcgcaaatgaaatgtacagcgtatgcagttgccaagattggctgttaccacatggagataagatattcatgtctctttattgacgaagaaggtgatggaattatcacaataaagatgtagacataaatgtgtgtatatacattctgtgacacttcaaagtttcagtatatgcaaaactgaatatgctgcttcataaatgtgtgtatttgctttcatgaatatcctgcttcataatgtgctatctctattctctagt

SEQ ID NO: 264822 - DNA, 1173 bp, Zea mays
ccgcgacatcgaggtggccaccatcgacgtcgccataggcaacacgtacctggccctcgcccgattcgacgaggccgtcttctcgtaccagaaagcgctgaccgtcctcaagtctgcccgcggcgacgaccaccctaccgtcgcgtccgtctacgtccgcctcgccgacctctaccaccgcacgggcaggctccgcgagtccaagtcctactgcgagaacgccctgcgcgtctacgccaagcccgcgcccggcgctgcccccgacgagatcggcggagggttgatggagatcgctgccatctacgaggcgctcgacgacctcgacgaggcgctgaagcttctgcagagggcgctgaagctgctggaggacgcgccggggcagtggagcaccgtcgctgggatcgaggcgcagatgggcgtgctgtactacatggtggggaggtacgcggagtcgaggagctcgttcgagagcgcggtcgcgaagctgagggccagcggcgagaggaagtcggcgtttttcggcgtgctgttgaaccagatggggctggcctgcgtgcagctgttcaagatagacgaggctgcgcacctgtttgaggaggcgagggcggtgctggagcaggagtgtggcgcctctcatcctgacactcttggcgtgtacagcaaccttgctgcaatctatgacgccatgggaagagtggacgacgcgattgagatcctggagcacgtgctgaaggtgagggaagagaagcttggcacggcgaaccccgacgtggaggacgagaagaagcggctggcagagctgctgaaggaggcggggcggtcgcggaaccggaagcagaagtcgctggagaacctgttcggtaccaactcacagcgggcgaagaaggaggccgggaggaggtggtccaacttcgggttcaggagctgagctgaggtgccctttttgtttgtaacattaaaaaaaaaggcacgtgtaaagatgttgctgtaggtgagtagtattgttagcaaggtgggtggtgattatgctgtttgcttggcactgcattgctgttactgttttgggttattttcgagttaaaatttgttttttttattattaactgcgagctgagctgctgtacccggatggatggagaaagagtctctgtggtgttgcctgatgacccatcc

SEQ ID NO: 264823 - DNA, 994 bp, Zea mays
ccctcgcgcccgcccttactcgcgctcggcacaccggttctcagggcggcggcgctcaggctcgggctctcagcgacggcgtcaacggcttcccctcccgcctccgctcctccgcacaccggccggtgaccctgctgaactatagtcttatggcggcaagcgcgggcgagagccagggggtggaaagactcctctcctatgctgaagatctcgtggccgtcctttgcgtcagcaccgactgcgacgacaatgcacaggtcggtgccggagtgcagaggctgctgtctgcctgtcgatccgagtctgacgatctcgagatgcagctcaaagagtatcaggaaaaaatacactcctgcaaagaaaagattgacaaagcaaaggctgaaaccattactgacgatgaactcaatgcactacaaagcaagatggaagaaaaactgcaggaagagaagcagcttcgccaagagttaagagtgttacatgatgagcttgatgacctagaaagccaaagactttctataaaagaaagaaaggatgctgtcaagaagaaaaagaatgacacccagaaagcagaacgtacgctttccatgtgtctgtcggttacaaatatcatcccaaatttggaagaccaggataaggtttcaggatatattgtcgaccagaacaggaagaagatagagaagtttgaattcgagaacacgacgccaccagttgagatatgcgacgagctctggaagaagatttagcgtgtttcagatcattcttgttgtaaggcggcggaaacctgtgcctgtagattgtcgcggtgtggttgtcctcccaggatgcagtttgccatgttgtttgtatcgttagttcatgacgctgtactgttttgtaaggcggcggaaacctgtgtttgtatcgttagtttgccatgtcagattagctactacttcgtgtgttttaaataattccaaattccaagttgttctaataaaaaaaagaaaaatat

SEQ ID NO: 264824 - DNA, 551 bp, Zea mays
gcttttcgtccacggtgcgccctacttcaccgtcaccaacggcgaggttgcccgggtcgttggtgggtgggaggcgcgggggatcgtcgccgagtggaaggcaacgttcgcgtgcttcgatctggccaccggaaaatttacagacttcgagaaggagggaacagctaaaaagtatgtgggagtgccagccatgaactcgatatgcaaatcactctgtctagaggatggtgtggtggccaaatttggtgtcactgtgggcaagatggattggcttcaagatcggagttcgtggtcactagctagcctggatgggaaagatctaggctattttgattatgttgtggcgacagataagaacatagcgtcaccagcattttctgggttgactggaagaccgccacctcttgatttgtcgtcatttccacgcctgcctacagcacttcaagatatcccaggtcgtccatgttttgctcttatggtagcattctcggagccattggctacggtacctgttcatggtttctctttcaacaattccaattctctgagct

SEQ ID NO: 264825 - DNA, 826 bp, Zea mays
gtgggatcggggacggcgacggtggcagcaaccgcgccgccacggacgcccactaccggcagatgatcgaggcggacccgggcaactcgctgctcctggtcaactacgccaggttcctcaaggaggtggccggggacgcggcaagggcgcaggagtactgcgagcgcgccatcctcgccagccccggcgacgccgaggcgctgtcgctctacgcgggcctcgtttgggagaccagccgcgacgctggccgcgccgaggactactacagccgcgccgtccaggccgcgcccgacgactgctacgtcctgggctcttacgccgggttcctgtgggacgccgaggaagacgaggaagagaactccgagcccttgccaccgccttcgctgttccagggggcagctcagcgtccttccatcacagcggcctcttagatgatcgtgaactcgatctagatctcaccaccgcctgtgaacgaagctgaatctggaaccctggagagtggagagtgactgggtgataaccgtgcagaaacccccgacgagtgactcacatcgccggcaggctcctcgccgcttgtgaactgaatcacggcacatgtaaaactgaatctggcagagcacacacgcgcctaagcctattagcgtctatagactttgcagggctatgtatagtagatatgtagattgagaccctgctgaacttgtacgtgcagtatgttcctagtcacttgtgtatcattactagtaatgcagtatccctcgtgaaataaacgtcaaaaccccttcctgctgcttcaagagaagcatacaaaaaaggcgggcgctct

SEQ ID NO: 264826 - DNA, 461 bp, Zea mays
cggacgcgtgggcggacgcgtgggcgaatagcgcgccgccgccgctccgtctccacctgtattttctgcccctcgcctcccccataccggggcccggtaaccagcatccctcggcagccgctgccgaccgatccgtgtccgtgcgagacgcgggagggattggcgccggaggctgaccgggatgttctccggcgactggacgccgccgtgcggcagctgctgcaccaagaaatacgcgagcctcgtgcagatcccatggagggtgttctgcaagaaggggtgcaacgcggacggcgacacctgggacgagtgcataggaaaatgtactgaaatatgctacaaagatccggtgttagaagatcgccagtggagcgcttacattgaccgatctccagggcaggatagctactctttggaatgcttcaatgcttgtgtgtctggctgtggattcagatttgaca

SEQ ID NO: 264827 - DNA, 1316 bp, Zea mays
ctcgcggtggaataatatgccaaccatctctctccggtccggtccggagcggttgaagctaagcgagagtcaactaccgccgccctctctctagtccagatttccagcggtccagaccgagagctcggctccctacacgacatcatcatggacgccgccccgctcctcgctctcctcctcgcggccgtgtccctctccgcggcggcggcgggcgacggcgcgcacccgggctactccgacgagggcacctgcacggtggacgccgccggagcgggcgtgggctcgggcccggagctgcggcgcctggaggagcgccggcccgggcgcatcatcgacatcacgcacgcgtacgtgccggaccttctggcgttcgcgccgggggctgtcacggggcccttggtccacctcaaggagtccatggcgaacgggtccgagtacaacctgtcggagctgcggttggagtgccacatgggcacccacgtcgacgcgccaggccacatgaaccaaggccacttcgccgccggcctcgacgtggacacgctcgacctcgacgtcctcaacggacctgcgttgctggttgatgttccgagggacacaaatataacagctgaagcgatggaattcctgaatatccctagaggagttcgccgagttctattcaggacgctgaacactgacaggaagttgatgtggaggaagggaggtgacatgagctatgttgggtttacagaggatggcgcacagtggctagttgacaacactgacataaagctagtcggaatcgacagtctatcggttgcagcatttgagcacttgatctctgcccatgtggtcttcttcaagaccccggatataatccctgtcgaaggcctgaagctagacaacattgagacgggaatatacatgctgcattgtttacctctcagactggttggagccgagggtgcaccgaccagatgcatcctcatcaagtgatcacccccctgctcttgctggaggtgacattgtatcatgccagctgagctgatgcttcatcgtggccaacgcattgattcgcagtcttcgtcttcgtctatatgaaacatagtgttgtatgcccatgtagatatgcttgtacggccaatagagacacagcaatacttccatcaaggaaatacttttgggtaagccggtaatgtaaaagacagacatacagttgactgaataaactagaggcctgagaggctgaggcctcgtgcttcacaaatgacaaatgcagaaatcagtgtaagttttgaacacaagaagattcattaaccccgtctttggtttgtggg

SEQ ID NO: 264828 - DNA, 447 bp, Zea mays
cccacgcgtccgcccacgcgtccgcccactcgtccggtccagattccaattccagtccgatcgtgagctcagctcagctccgctagtcctctccccgcacgcaccaccaccaccagcagtccagcaccatgggcggcgccctgatcgtcgcgctcctcctcgcgaccgtgcccctctccttgggcggcggcgcgcacccgggctactccgacgccgacgagagcgcgtgcacggtggacgcgggcgcggagctgctgcggcggctggaggagcgcgggcccggcgggcgcagcatcatcgacatcacgcacgcggtcgtgccggacctgccggcgttcgccacgggggcggtcgcggggcccatgctgcgcctcagggagtccatggcggacgggtccgagtacaacctgtcggagctgcggatggagtgccacaccggcacgcacg

SEQ ID NO: 264829 - DNA, 2754 bp, Zea mays
ccctcgtttgcgcggacgcgtgggctcgccggtgctgctgcaattaacgccgcctccggccaaccacccgaaacctacctccgccgccgtcgtcgccaccgtcaacatggcgagccaaggggagccctcggcctctgcttccgatccgaaggagaagaaggacttctcgacggcgatcctggagaggaaaaagtcaccgaaccgccttgtcgtcgacgaggccaccaacgacgataactccgtcgtcgcactgcaccctgacaccatggagaggctgcagctcttccgcggcgacaccgtgctcctcaagggtaagaagaggaaagacactgtctgcattgtccttgcggacgaaacctgtgaggagccaaaggttcggatgaacaaggttgtccgccagaacctaagggtgaggcttggtgatgtggtttctgtccaccagtgccaggatgtgaaatatgggaagcgtgtccacattcttccaattgatgatacagttgaaggcattacagggaacctgtttgatgccttcttgaaaccatatttcctagaagcatacaggccgttgaggaaaggagaccttttccttgtcagaggaggaatgagaagtgtggaattcaaagtgatagagactgatcctgctgaatattgtatcgttgcgccagatactgaaatattttgtgatggggagcctattaagagggaggatgaggagcgtcttgatgaagttggttatgatgatgttggtggagttagaaagcaaatggcccaaatcagagaactggttgaacttccactgcgtcatccccagcttttcaagtctattggtgtgaagccaccaaagggcatattgctgtatgggcctcctggctccggcaagacccttattgctagagctgtagctaatgagacaggtgccttcttctttttgatcaatggaccagaaatcatgtcaaagctagcaggagagagtgaaagcaatctcagaaaggcatttgaagaagcagagaagaatgctccatctatcattttcattgatgaaattgattccattgcacccaagagagagaagaccaatggagaagtagaacgtcgtattgtttcacagctactgactcttatggatggactcaaatctcgttcccatgttattgttatgggtgctacaaaccgaccaaacagcattgatcctgctcttagaagatttggaaggtttgatcgggaaattgacattggagttcctgatgaagttggccgtcttgaggttctccgcattcacactaagaacatgaagctagctgaagatgttaatttggaactcatttcaaaggatacccatggatatgttggtgctgatcttgctgccctttgtactgaggctgctcttcagtgcattcgtgagaagatggacatcatagatcttgaggatgagacaatagatgcagagatattgaactctatggctgttacaaatgaccatttcaagactgcgcttggaacaagcaacccatctgctctgcgtgaaactgttgttgaagtcccaaatgtctcttgggaggatattggtgggctggagaatgtcaagagggagctacaggagactgttcaatatccagtggagcatccagagaaatttgaaaagtttggcatgtctccatccaaaggagttttgttttatggtcctcctggctgtggtaagaccttgttggccaaggcaattgccaatgaatgccaggctaacttcatcagtgtcaagggtcctgaattgcttaccatgtggtttggtgagagtgaagccaacgtccgtgaaatttttgacaaggctcggcaatctgctccttgtgtcctcttctttgatgagcttgactcaattgctactcagagaggaagcagtgtgggtgatgctggaggtgcggctgatagagtgcttaatcagctactgaccgagatggatggcatgaatgccaagaaaactgtgtttattattggtgctacaaacaggcctgacatcattgaccctgctctgctgaggccagggcgtcttgaccagctgatctacattccactgcctgatgagcagtctaggctccagatcttcaaggcctgcctaaggaagtcccctgtggcaaaggatgtggacttgaatgctcttgctaagtacacacaagggttcagtggagcagatatcacagaaatttgccagcgtgcgtgcaaatatgcaatcagagagaacattgagaaggatattgagagggaaaggcggaggaaggacaaccctgaggcgatggaggaagacgaagtggatgagatcgctgagatcagggccgctcacttcgaggagtcgatgaagtatgctcggcgcagtgtcagtgatgctgatatccgcaagtaccaggcgttcgcccagacattgcagcagtcccgtgggttcggcagcgagttccgcttctcagagcagtcggcgacagctggtgctgctgctgcagccgatccgtttgcttcggctggtgctgcggctgacgatgacgatctatacagctaggtgtcctgttgggttggttctgggttgtgcaatatcagtctcatcagtcatctgtttaaaactctgattatacttagacacgggatgtcatgcaatgatatttgttttccgtacatttggacgttgagataatgcctgtttattttatgccatactctccatgccattttatgaatgattgtttgtcattgagtatatgagtcacgttttat

SEQ ID NO: 264830 - DNA, 634 bp, Zea mays
agtacggtcggaatccgggcgaacaccgccgggacgtgcttcagatcttcaaagcctgtctcaggaagtctcctgtggtcaaggatgttgacttgaatgctctccccggacccgcccagggtttcagcggtgcagatatcaccgagatctgccagcgtgcgtgcaagtatgccatcagggagaacatcgagaaggacatcgagcgggagaggcgcaggaaggacaaccctgaggccatggaggaagacgaggtggacgacattgccgagatcatggctgcccacttcgaggagtccatgaagtacgcccgccgcagtgtcagtgatgccgacatccgcaagtaccaggccttcgcccagacactccagcagtcccgtgggtttggcagcgagttccggttctccgaccaaccgacggcagctgccggtgcggccgacccctttgcatccgcagccgacgatgacgacttatacagctaaactgcacttctattgtgacgcatctttcctccctccgtatatatgattatatcatatgttaatgcgtgtgtgggggtgttgctgtacctatacagtgaagttaatatttctgttttgcatgcttgcctgttgcctaatttcactaatttaagatg

SEQ ID NO: 264831 - DNA, 819 bp, Zea mays
gcagtgtgggtgatgctggaggtgcggctgatagagtgcttaatcagctactgacagaaatggatggcatgaatgccaagaaaactgtgtttattattggagctacaaacaggcctgacatcattgaccctgcctaggaagtcccctgtggcgaaggatgtggacttgaatgctcttgctaagtacactcaagggttcagtggagcagatatcacagaaatttgccagcgtgcgtgcaaatatgcaatcagagagaacattgagaaggatattgagagggaaaggcggagaaaggacaaccctgaggcgatggaggaagacgaagtggatgagatcgctgagatcagggcccctcacttcgaggagtcgatgaagtatgctcggcgtagtgtcagtgatgctgatatccgcaagtatcaggcgtttgcccagacattgcagcagtcccgggggttcggcagtgagttccgcttctcggatcagccggcgacagctggtgctgctgctgcagctgatccgtttgcttctgcgggtgctgcggctgatgatgacgatctatacagctagttgggttgttcaatatcagtcccgtcactcatctgtttaaaactgatcatactaaacacgcttgtcatgcaatgatatttatttgccgtacatttggacgtcgctgagatgatgcactctcggccttcggttaacttttcatgccatattctccatgtcattgtctgggccatgacattttattaattattgtgaaatctatcatctctcaaaaaaaaaaattataaataatattattatatataatttatt

SEQ ID NO: 264832 - DNA, 609 bp, Zea mays
ctcgccaaatacacccagggtttcagcggtgcagatatcacagagatctgccagcgcgcgtgcaagtatgccatcagggagaacatcgagaaggatatcgagagggagaggcgcagcaaagacaaccccgaagctatggaagaagacgaggtagacgacatcgctgagatcaaggctgctcacttcgaggagtccatgaagtacgcccgtcgcagcgtgagtgacgccgacatccgcaagtaccaggccttcgcccagacactccagcagtcccgcgggtttggcagcgagttccggttccccgaccaaccgacggcagctgctgctgcggccgatcccttcgcatccgctgcagcagcagctgacgatgatgacttatacagttaaattagcagtcctgtgttgtgacgcatattgagtactttgcttcgttatatgcttattatagtagactacgtgcaagacgcggagtcgctgtacctatataatacttaagttaatattttggtacgatcctctgaatcgtgccatgagccatggtttgtgttcatttgagattatcaaagatggccagctctaccaaaagaccacgtcgcggacgcgtggtcc

SEQ ID NO: 264833 - DNA, 780 bp, Zea mays
ttcgtcgcgtgccacttttttgacaaaggcatttgaagaacctgagaaagatgcaccttacatcattgtgatcgatgtgatagagaacatagaccacaagaagtggtggcatgaagatatgagggggatacaggaacagctctagactgttatggatgggctcaagccacgtgcacatgtgattgttatgggcgccgccaaccgtgcaagcagtgtcgatcctgctcttagaaggtttggtaggtttgatcgcgagattgatattggtggtccagatgaagttggccgccttgaggttcttcggggtcacacgaaaaacatgatgctgtctgatgatgttgacttgtagcttattgtgaattgttcctatgttttattgttgtgtttattcattatttattttatgtcttattcttttttattttttttttttttttttttatttttttattttgtatttttttttttaatttctatttattcattaattaattatattttatagttattttttatttattcatttttattatttttttattgttttttatttttttttaattttttttcttttattatttattctgtttatattttattattatattttttttaaattaattttatttttattttaattattttttttatcatttttttattttttattttattatcttctatatttctttttttataaatttatatttttttttttttatttttcttttttattatacttttcactttatctaatttattctcttttttttattcttt

SEQ ID NO: 264834 - DNA, 635 bp, Zea mays
agcatatcggtggcccaagcgctcccaatctctcggggtccttctctctccgcattctgcgtcatggctgagccgacgccgtcgcagtcgccagcgcagacgccgcccccgccgccgacgcagcagactcccgcggcgggtgggctcgaggacatgctggcgtgtgtggcggcgctggaggccgcgctgctgccgtgcctccccgcgcgcgagctccaggccgtcgaccgctccctccagtcctcccaccagattgatgttgagaggcacgcaagggatttcatggaggctgccaagaagctccagtcttatttcatcagcctgcagcgtgaggaaccgccatctgcagaagagatgcttcgaaaggagattacgacaatggaggaagagttgaagagcaagtctgagctcattgccaagcacaagaagttgattgaagggtggcaaaaggaactgaaggagcagctgggcaagcacatcacggagcttgaaagggtgtgaggagtgcgattctgcggtttaccttgtagtgatcatgaacctctaggtgaccaaatgttatgttatgccctataaaactgtgtacatgtgcttagaatctgacgccatggttagcaatcgccttttgttggttt

SEQ ID NO: 264835 - DNA, 729 bp, Zea mays
  unsure (1)..(729): unsure at all n locations
gatatacgctaccataaaagtgaccgaaaatttattccgaagataaccaaacaataatagtaggtacgtacgtgacgtagatagatagatagatagatagatagaacataaataacaggcaatagacagtactagtactactaccagcaccgccgccgcaggcacacgtggatctgctgcgcgacctgagaaggggaggcgtacagtggccggcggatgcgagagcggccagcgggtcatgccggcggcggaggcttggcgacgacgacggggaagtcgacgacgagcaccttgtcgatggcggccatgaaggtggcggcgaaggcggtgtggctgtcgtgggccatgtaggcggcgaggtcggcggcggatgcgaaggtgagcgagaagacgtgcgtgaagccctgcgtcagcatctcctggttcagcacgtcctggccccactcgaaagacttgaccgtgtccatcccggcggcgaggtcggtcatgcccttgagcacgtcgtccaccacgacgccctccttgaacttggccaggcacaggtgcttcacctcccccatgtccggcgtcggaggaagccctcctccagtaggcagtagctagctagctcccctcccctcaaagctctcctcacacccactcactgactcagtcagtcactcccccgatgcggacgcgtgggcggacgcgtgggcggacgcgtgcgtccccccgggnnttncggnccgg

SEQ ID NO: 264836 - DNA, 525 bp, Zea mays
cgcgacctgagaaggggaggcgtacagtggccggcggatgcgagagcggcaagcgggtcatgccgacggcggaggcttggcgacgacgacggggaagtcgacgacgagcaccttgtcgatggcggccatgaaggtggcggcgaacgcggtgtggctgtcgtgggccatgtaggcggcgaggtcggcgaggtcggtcatgcccttgagcacgtcgtccaccacgacgccctccttgaacttggccaggcacaggtgcttcacctcccccatgtccggcgtcggaggaagccctcctccagtaggcagtagctagctagctcccctcccctcaaagctctcctcacacccactcactgactcagtcagtcactcccccgatggctttatttgcagaggagtccgatggatcgtggcgacatggtggccaatttaagtaccgccgccgacaggggtcactggctgcagagctcatcactcctcctagacctagagcagtagagcctgagcctgtggactggatcactt

SEQ ID NO: 264837 - DNA, 403 bp, Zea mays
gtcctcggccatgtaggcggcgagctcggcggcggaggcgaaggtgagcgagacgacctgcgtgaagccctgcgtcagcatctcctggttcagcacgtcctggccccactcgaaagacttgtccgtgtccatcccggcggcgaggtcggtcatgcccttgagcacgtcgtcctccacgacgccgtccttgaacttggccaggcacaggtgcttcacctcccccatgtccggcgccggaggaagccctcctccagtagctagctagcgtcccctccccccacgtctcggacgtacctactattattgtttggttatcttcggaataaattttcggtcacttttaaaaaaaaaaaaaaagggcggccgctcgcgatctacggacgcgtgggcggacgcgtgggct

SEQ ID NO: 264838 - DNA, 1300 bp, Zea mays
cgcacgcggagaaaattccgaagcggaagaagttgaaccgacaggtgagagagaaagagataggagagacgaggccacgactccacgggggaggcagggagagaaggtgagagaagatgcgttgcgccgccgccgcgcttgcggtcgccctcatcgctgccgttgccgccgcaaccgctgcggggtcgccggccgcgggcacgtgcgcgcggaggggcgcgccgccgttcctcgacgccgtcggatcccgctgccccttcgtccggatcgacccgtccccgcctctcgaggtgagaggagagactgttgatactgagttgaaccttcgaaggaggggtgcttcatactccattctcttctatgctgcatggtgtcctttttcgagcaaatttcgaccgatatttgaaactgtcagcactatgtaccctcaggtacatcactttgctgttgaagaatcttctgcgacaccaagcctgttttcaagatatggagtccgtggtttcccagccattcttcttgtaaatgagactacgatggttcgatatcggggttcaaaagatcttaactctctggtcgatttctataaagaaactacaggtctcgatccaattgcatatattgatgttgttgaacaagagagcacaggaagcttgagctcagttatgccatgggatcgttctattcgtgaaatggccaaagatgagatgtatttgttagttgcagttctttttattatcgtgaaggttgtagcacacttcatacctgttgtcatgtctcatctgagagctttcttagttgttcgtgtccaaaacttgaacctagggatccgtaggggatcaaaccagctcctggaacgagccttgaatgttcttgatgtaaggaggctttggagcaagctgaggctgagcaataaggcaacagacttgaggaagggagcaaataatgctcgagcgtgggcttcctcatttccttctgtttcactgggtgaaccgtcatcttcaagacaagcttagccatcttaaagatgtttgttagggtagctgctcacatgtttctgtgcaaaaccatttaatctttgctccccactgtttctgtgcagtcaggaagggggggaaaccttgcatgcatgtaaattttgaggaaatcatgtgctgttgtatattaggaatacctttgcatttgctggtgcctaatctttctgtctattaaccagagttatttggcaatgtatcatgaacatctctgtaggggttttttaggatttctctcttgtttgtggtgttgttttactttacactgt

SEQ ID NO: 264839 - DNA, 882 bp, Zea mays
tttccgtccacgcgtccgagagaatggagtatgaagcacccctccttcgaaggttcaactcagtatcaacagcctctcctatgccgcatggtgtcctttttcgagcaattttcgaccgatatttgaaactgtcagcactatgtaccctcaggtacatcactttgccgttgaagaatcttctgctacaccaagtttgttttcaagatacggagttcgtggtttcccagccattcttcttgtaaatgagactacaatggttcgatatcggggttcaaaagatcttagctctctcgtcgaattctataaagaaactacaggtctggatccagttgcatacattgatgttgttgtccagcaagagagcacagcaagcttgagctcagttgcaccatgggatcgttctccgcttgagatggccaaagacgagccgccgtatctgttggtcgcagttctcttcatcatcctgaaggccgcagcgcgcttggtacctgctgccatgtctcatctgagggccttcttggccgtccgtgtccagaacctgaacctagggatccgcatgggatcaagccaggtcttggaacgagccttgaacgcccttgacgtgaggaggctgtgcagcaagctggggctgagcaacagggcaacagatctgaggaagggtgcaagcaatgctcgagcctgggcttcctcgtttgcttccgtctcactgggtgaaccttcatcttcgagacaagcttagccatttttttttgttttttttttggagatgtcgcttgttagggtagctagctgctcacatgatgcaaagaccatataaggtttgcttcccatcctgtttgtttctgtgcagtcaggaggagaggggaaatcttacatgcctgt

SEQ ID NO: 264840 - DNA, 583 bp, Zea mays
taattgaattgcttactttctagcaggagtatatattgtatagccctctatttatactttctgactgcctggcctttgtattcgtgcagtttgcattgccacatattatgggttgggaccaggctttaaccaatcaccatccagctccagctcctccagctagcagcaggcccccggtagagcgtccccacccggattccgaatgggagaggtgaagctccctgctagaggatggaggcctttggctttgggccccagtacaagttgctgctgcaaagtatgtgtgcttgaacaatctcttagaaccctgtctgccggccgcattagatttctggaacttaaggctagatgaagcacgatgaaccattgtatttgttcagtgcatgtataactatatcccgcccactaaaggcatatttctagtcgagtcgagctgttttacgcttgcttgtcgacgatgtctgtgcttggttacgcatcggcattctacgcatcacacgccaggatgcattaagagaaaccaaggaaatgggcattttagattaaagtaaaaaaaaaaaaaaaaaaaaaaaaaaaactcgac

SEQ ID NO: 264841 - DNA, 893 bp, Zea mays
ggtttcggcgcctcagtgggacgaaactcactggctccctctccttcccccagtccgcggcgctcgctccgttcacctcggccgcggcgaccttcgaggcgacgagacgatgctgcggctctcccgcttcctcccctccgcctgcaggaggggttttgatctaaaagaatctctttggagtggttcattgacattccaacaagctgtttccactgcagcaacaaatcttgatgggaacttgtctggcaaaaagtttgcaagttataccgtgttcaagggaaaggctgcactttctatacatcctatactgccaagtttcagcaaattagaatccggaggatctcgagtgagcaaaaatggatcagtaatgctgaccttctttcctgctgttggacaaaggaagtatgactatacaaagaaacagctctttgctctgtcacctactgaagttggaagcctgataagtcttgggcctgctgaatcctgtgaatttttccatgacccatccatgaaatcaagtaatgaaggaacggtgaaaaaatcgctgtcgatcactccacttggcagtgacagtggatactttgttaatataaccgttgtgaacagtgcagagaggactaatgatcgtctttcagtccctatcacaaaagctgagtttgctgtgatccgcacaactctgagttttgcattgccacatattatgggttgggaccaggctttaaccaatcaccatccagctccagctcctccagctagcagcaggcccacggtagagcgtccacacccggattccgaatgggagaggtgaagctcccttttagcggctagacgatggaggcctttgggcaccagtacaagttgctgctgcaaagtatgtgtgcttgaacaatctc

SEQ ID NO: 264842 - DNA, 1106 bp, Zea mays
cttctccactagcgggaggtgggacgtggcggacgcgtgtgcacgaagaagccgtcgccgttttccacgtcggagatctgggcatggtcagctatattcctcgcgtcgtccggcgtcgcacgtttcaatcccacggcgtttggtaccacggcaagaacatgccttcctttcctgcttgctgctaatgtgctgggatacatggttggttctgggttaccacctggcgtcaagaaagtgctgcatccgatcatctcctgcgcactctgtgcagatttcgcggcgctggcctatgggtacatctcagggtttggacttgatgccgtgctaggtgcttacctcacaaaggtgccctctaatcctggagccggtgacgtactaatgactttccttgggtctgtgatcatatcatttgcattctcgatcttcaagcagagaaagcttgtgaagaggcacgcaacagagattttcacatcaattgccatcgcgtcgacattctctctgtactcaactgctatcatagggcgcctgattgggctagagccatcgttaaccatatcaatactgccaaggtgtattactctggcgctggctttgagcatagtgtctttctttgaaggtgtaaactcttcggtaactgctgtcgtggttgtccttaccgggctcatcggtgcgaactttgtgctagcagccatggagaaacttggtctgaacgaccccatctccagaggagtagggacagcttccagcgctcaaggactgggaacagcagcactggcggccaaggaacctgaagcgctccctttctgcgccatcgcttatagtttcacggggattttcggcacgctgatctgctcggttccggcagtcaggcaaagcctgatattcatagctggttaagagatgatctgaatttgacggtttcattctttagataaaagaagcagcttgcttcctccctccgtgttcagaaggtcaggaagcaacgccccacatgtcaggtcaggatccaatatgtgtaggggcttgagaaaaaaaggcgaataattctgtaatcaggatgtaaccgacatactacagttttttttttcttgtgacaaaatactact

SEQ ID NO: 264843 - DNA, 1539 bp, Zea mays
cggacgcgtgggcaccatcgcagaagcgcagtaggaagccggacaaagctacgcaaggagggagaaagcgtgtaaaccatggcgtcctccgcgttcctcaacgctctcgtcctccgatcgccatcaccgtcgctctcgtcctcgtctaaccgccgcagcaccggcgccttcgcgttcccgaacccaccgcgcttcccatgcctgcgttctgcgcgtcgactcgtccttgcgagggcggcggcagcgccggcgccgggcgatggccccgaggacgagtgggggccggagcccgagggcggttccgctgtcacgggggccgcggtggcggaggcgccggaggcgagagaggtcgcggagctcaaggcgcagctaaaggacgcgctgtacggcacggagcggggcctgcgggcgtccagcgagtcacgagccaaagtgctggagctcatcacgcagctcgagacgcgcaaccccacgccggctcctacggaggcgcttacgctccttaacgggaagtggatcctcgcgtacacatcattttcccaactattcccactattggggtttggtaatctgcctcagctggtgaaggtggaggaaatatcacaaaccattgattctgagaacttcacagtgcaaaactgtatcaagttttcaggacctttggctacaacctcagttgccactaatgcaaaatttgaaattagaagccccaagcgtgtgcagatcaaatttgatgaagggattgttggtacaccacagttgaccgactccattgtgctaccagagaagtttgagttatttggacagaacatcgacctgagtccactgaaaggcatattttcttccatcgaaaatgcagcatcctcggttgcaaagaccatatctgagcagcctccgctcaaaataccgatcaggacaaacaatgctgaatcgtggttgcttacgacataccttgacgaagagctcaggatctccagaggcgatggcagcagcatctttgtgctgttcaaggagggaagtactcttctatactgagatccaaatcccgagtccatgatcgttgaagctgaaccgtgaagtagttatactgcttatgcttttctttcttatagtaatatactccgtctcaaaataagtcaatttctagaatcacttaaagtcaaattatctaaagtttgaccaattttataggaaaggtaccgtcgtctatgtttctatgacaccaaatgagtacattatgaaaattattttatggtgcattagtgacactaattcagtgccatgctctttttatgaatttggtcaaacttaaaaatagtttgatttaagataactctgagaaattgatttattttgggacagagagaatgtttctgggttgtcttgtaaatacagttcttgtcattagagtatatgatgactaggaccggtttaatccgaattatataaactctctatatatcccaaaaaaaaaaaaaaaaaaaaaaaaaaaaaaaaaaaaaaaaaaaaaaaaaggcggaagaaaaaaaaaaggggggg

SEQ ID NO: 264844 - DNA, 585 bp, Zea mays
ctcacgcgtccgtccacgcgtacggtcaaattgtagttgtctggcacgtgtcgcactgagggaggagcagtctaccacgctaaacaggaagccggagaaagcgtgtacagtaccggaatccagcaccatggcgggatcagcgttgctcaacgctctcgtcctccgcgcgccatccccgtcgctctcgtcctcgtctaaggtccgcagcgccggcgcctttgtgttctcgaacccaccgcgcttcccatccctgcgttctgagcgccgcgtcgcccttccgcgggcggcggcgggcggtgaccccgaggacgagtgggtgccggagcctgagggtgggtccgctgtcactgggaccgcggtggctgaggcgccggaggcgggagaggtcgcagagctcaaggcgcagctaaaggatgcgctgtacggcacagagcggggcctgcgggcgtccagcgagtcgcgggccaaggtgttggagctcatcacgcagctcgagacgcgcaaccccacgccggcgcctaccgaagcgctgacgctcctcaacggcaagtggatcctcgcgtacacatcattttgccaactgtt

SEQ ID NO: 264845 - DNA, 434 bp, Zea mays
  unsure (1)..(434): unsure at all n locations
ttgcaaagaccctatctggccagcctccactgaanataccgatcagggcaaacaacgcagaatcgtggttgcttacgacctaccttgacgaagagctcaggatctccagaggcgacggcggcggcatctttgtgctgttcaaggagggaagtactcttcttaactgagatcggaatcctggtcgttgaagatgaaccttggagtagttatactgcttatgctttccttttcttatagtagtatactccgtcccaaagtaagtcagtttctagaatcacataaagccaaactatcttaagttcgatcaattttataggaaaggtaacgtcatctatgaagatatatttcatgacgtgttactgatactaattgagtgtctaaatattgtccactacttatacaaatgtcaagtatatccatctaaataccattac

SEQ ID NO: 264846 - DNA, 1108 bp, Zea mays
ctcaaccttcagaggagccccctaagaggttaattgagcaacacagatggccagccatgatagctgggcaggcgccgaagaatctcatgtcaagaagcattgacctttcggacaaagctaatataccagtcccaccatcaaatacatcaagaggtctttcaccaaggaagacgccttctgtcagacctgttgcatcatcaaatacatcaagaggcctttcaccaaggaagaccccttctgtcggaccagtcccatcatcaaatacatcaagatgcccttcaccaatgaagaccccttctgttgaagcttcagtgaaactgtcaaatcagtcattggatgaagtggcaaggagtttggctattcaatcaagcagaagagatgataaggtagattcacagacaatagagagatccaaatctttgagccgaccaaacagaacagttacttttcctgttccaattctacaacgctcatcatcaccaagcagagcattgccagctacgtcctcaacttccagggcctttcagagcccatctcggacaagaccatcaacaccctgtcagtcccaaagtgctggagctatccaatcaagcgttccatcttctcttattaactacatggttgatgcgcggaaaggaaagaagaatgccagccaaatcgaaaatatccaccaagtgcgtttattgcacaatagacatttacagtggctctttataaatgcttatgcagaagatgctttatcttttcaaaaggctactgttgagaataccatgtataatgtttggaggaatactgtaaacctgcgggattctggtaatatgaaaagaataatggtgcaacacttccaacaagaactcaggctttacaacattctgaaagagcagattgcttaccttgaacaatggccaacgctagaaagggagaatagtatctctttactaggggcaactgaggctctgaaagcaagcaccctgcgcctgccagttacattgggagcaaaggctaacacaattgctctcaagaacgctgtaagctcagctgttgatgtcatgcaagttttgggctcatctgtttgctgcattcattcaaagatcacggacagcacatc

SEQ ID NO: 264847 - DNA, 772 bp, Zea mays
  unsure (1)..(772): unsure at all n locations
aggctccacacagacaactccgtagagctccctgctttgttcagacttcagagcccttcctcttgtgtccgtgcaaattggtgatacttgaacagggatctcctccatattagtgagcaggatgtataatcctcccagtgggcaggacatgtcctactacgatcatgtgcagaagcgccatgaggagaagggctgcctatatgcatgcctgttcactgcgtgctgctgcttctgctgcttcgagacctgtgagtgctgcctcgaggccatctgctgctgctgctagttctgcttggagggcatgggcgtccatcatcgtggagatgtggccatgcgggacacccaccgccgaataaaatgctgtacttatatgcacgcacgttagaaatgcattagtgtctgtttgatgtgatcttgtgtgtgtgtgtgcgcgcgcatcttcatttgcactggaaaatgctttattatttgtgaaggtctgtaaatctgttgtatgtatcttggtcagatgaactctattattgtgccatatatctcgcttaaaaaaaaaaaaaaaaaaaaaaaaaaaaaaaaaaaaaaaaaaaaaaaaaaaaaaaaaaaaaaaaaaaaaaaaaaaaaaaaaaaaaaaaaaaaaaaaaaaaaaaaaaaaaangggggggccgttttaaagaaacaaagtttactcccccggaattccaacttaaaactttttttatggggtaacaaaaaataaattaatgggccgtggttttaaaacgtagggacgggaaaa

SEQ ID NO: 264848 - DNA, 417 bp, Zea mays
cagacttcagagcccttcctcttgtgtccgtgcaaattggtgatacttgaacagggatctcctccatattagtgagcaggatgtgttatcctcccagtgggcaccacatgtcctcccacgaccacgtgcagaagcgccatgaggagaagggctgcctatatgcatggtatggtactcgctaacctttctgttgtttctgttcttctcgattacacccatctctgttatacatgtgtgtgtgggtttgttaacatagtttccaccatgatacccgtgatgaaaactaagaacactttgaactctgaaacttgtcttcattcatttctttgggaaacaaaagaaggaggaatcttgcattgagacttgatgttaaaagcttatccggagttcagtttcagaatattgggtggttcaatt

SEQ ID NO: 264849 - DNA, 818 bp, Zea mays
accacgcgtccgcccacgcgtccgcccacgcgtccggttagcaggatagagagggagaggagcagaagatagcagagggccagaggcgcagaaggcagtcgcggacaggaggaagaggaagaagaagcggcagcgagcgaggatgccgtgcctgaacgtgtcgaccaacgtgaacctggagggggtggacacctccgccatcctcgccgaagcctccaagtccgtcgccaacatcatcggcaagcccgaggcctacgtgatggttgttctcaagggttcggtgcctatggcatttggaggtacccaggagccagcagcttacggtgagctggtttccatcggaggcctgaaccctgatgtgaacaagaagcttagtgctggcatcgcttctatcctggagtcaaagctgtctgttcccaagtcacgcttctacctcaagttctatgactcgaagcgctcggacttcggttggaacggctccaccttctagacttgaggtctgcagctgaaataaaagaaattcgtggaatcatggtacctaatgcccatggctattgcctattaaggacaatgtcataagatgtgtcttaatcggtgctgaactgagaaacagtaactgttgtcgtggaactggaagtggggtgctggcgtgtcagagtgcttgcttcctacctagcatagcatgcctgtgctatcttgttattggtattggcttgatatcagtctatattatcatttatcatggttggtccttcgggtttggtaactgtatcttcaaacaaaaagaagaaggaaagaaggagaaggagaaagtggtg

SEQ ID NO: 264850 - DNA, 729 bp, Zea mays
cggacgcgtatctatccttctatccccattcccatcccgagacaggagaaggcaaggatgctgctcctgagctcccccttcgtgtccgtgtcgccgccgccgccgccgctcagctcccatggcgctcgcccggcgctgcggatcgaggcggccaggcagctgacggggcgggtggtgacgaccaaggcggacaagacggtcggggtggaggtggtgcgcctggctccacaccccaagtacaagcgccgggagcgcatcaagaagaagtaccaggcgcacgaccccgacaaccagttcaaggtcggcgacgtcgtcgagctccaaccctcccgtcccatctccaagaccaagcacttcctcgccatcccgctcccgccccgcgacactcgccgcaagtctcagctcctaccgccgctccagtccgacgacgaccaggagccgtcctcgcgagagtgattgattgtgattgattgctgcctgtctatggcttcgtcgtaagctcctctccatcagaggtgctgcttcccaattccaaatgcgaatccatgtgtgtttttgtcagactatttcctttttctttttgatcataggctttagcccaatttcatccgaaatagctgttgcccttgttggaactgatccatggatatagctgcatattcccatcctgatgtcgtgtgttctattgaaatgctttatttgctaatatacttaatttatattgttcag

SEQ ID NO: 264851 - DNA, 2186 bp, Zea mays
gcaaatttctcagccgtgacaacacagcctgcgctccccttctttcccgttcggctcacagcgaagaaggaagccggttagggtttccacctcctttcccctcctctccttcagcgacgaccgcgggccacaccctcgatatccttcccctcggacccggaggcgagcagcagcctccagcgcctgccacgcctgcccgtctcgttattgggaggattcgccatgtctgacatggagtccgtcgcagctcttatgaactcgacaagctccaagatacagcagcttcaggaggcatttgctgagcttgagagccagagcacggtttccatgaacctcaagtggaagcagcttgaagaccactttcgtggtcttgaacagtccctcaagaaaaagtttgacgagctaaaagagcaggagaaggagttccaggagactgtcgcaaaatcagagcagatgctggagcagcgggaggcagctgttgtggccaaggaactgacctctttggagaggttgcaggagaagagggaagctgcattagctatgatctttagcaagtccaggctttccttacctgttccttccatcaacccaatgaacaaggcactggataatcttggtgtcaagtggcctaaaccggcttctgaggagagtgtgcacttgcaagttgataatgctgcagtgaggcctcgttctgagcttgttgcactctgtgaggaaatgaatgtgaacgggcttcataagttcatatccgacaacaggaagaacttggcagccatccgcgaggaaattcctagtgcactgaagaaaacatctcatccttatggcctggtgttggattccctggaagacttttattctggagataatcttgtattagatggaaaaaaggatggtgaccttctgggtgttagaaggacatgtttgatgttgatggagtcacttggacaactgcactctaatgatataacttgttcttctttggagaggcacatgcttacaactaatatcatagagcgagcaaagacgattgcatttaagtggaagtccaagttagataatcttgacattgatgctagcaatgggaactgtcttgaagctcatgcgtttcttcaactcctggcaacctttggtatttctgctgaattcaatgaagatgacttgtgcaaattgcttccatatgtcagtcgtcgtcgtcagacacctgaactttgtcgattgcttgggttgtcgcagaaaatgccaggtgtcattgaagttctggtggaaagtggaagacctattgatgcaattaatttggcttatgtgtttgagcttactgaacaatttgaaccagtacaccttcttaaagcatatctaagggatgttaagaaaatgtcacacgccaggaatgtcaaaacttctcctggagcacagaatgagatgaatgaacgtgagttatctgcgctgaaatctgtcattaagtgcattgaagagcacaaacttgagcagcagtaccctgtggatccacttcagaaaagggttttgcagctagagaaagcaaaggcagacaagaggatggctgttgaagcagcaaagccgcagtccaagaggcctcgtgccaatggatcggcctttgcaacccgtgctacaggctttgctgacaagagcttctactcagcaaccccagagaggcatccattcaatccttgcgagaggcagtttgtgtatggcgctgaggttcatcttcctcccatgatgacctcagcgtcttacacgatgcaacctgcccatggaccttattacggtaatggctacccagttcagtaccaggtctcgtatatccactaatggagacagccaggtgcaggtgctctttcctaacaatctagcttaacctgctgctctttgctgtagtcgtatcagttactctgcaagtttccctagctggaaatatttggaccactcaatgtgtgtgctctgagtggctgttgtggtaattttatgccctaatgacatgacataaattactcctaatatttagctatcgatgaatctcccaatgtacttcattcggcttgtgaaatgcctgtcactgaagaagcgcccaggggcatgaaaatatcatgtcgtcatggacgcctgccaaactgtcagttgcatcctgaccggctgttgtttttagtttgccgcatcttttatgcccaagt

SEQ ID NO: 264852 - DNA, 418 bp, Zea mays
tccattcaatccttgcgagaggcagtttgtgtatggcgctgaggttcatcttcttcccatgatgacctcagcgtcttacacgatgcaacctgcccatggaccttattacggtaatggctaccctgttcagtaccaggtctcgtatatccactaatggagacagccaggtgcaggtgctctttcctaacaatctagcttaacctgctgctctttgctgtagtcgtatcagttactctgcaagtttccctagctggaaatatttggaccactcaatgtgtgtgctctgagtggctgttgtggtaattttatgccctaatgacatgacatgaattactcctaatccttagctatcgatgaatcccccgatgtacttcaaaaaataacagtaagggcggctgctcgcgatctagcgcgtggc

SEQ ID NO: 264853 - DNA, 992 bp, Zea mays
gtcgccgctggtcatcttcccgcagttccatcttccgctcactcccttcatcgcgctcggcacacaggcgacggcggcggagctcatgctagggctctcagcgaaggcatcagctgcttcccctcccgcctctcgccaatcgcctcccgtcctccgcacaccggccggtgatcctgcgtcttttcattcgtgatttcatactccaggtatctgcatcgcaggggaaatggcaagcaaagcaggtggtgatggcaaagaagccataaacgagcaagtagttgccaacacttatgccaacatgcgtaccgaaatgaaccagctctataccaagatcacagagctggagatggaggtcagtgagcactccctcgtgattggtgcgatcgagccgctggacccctcaaggcgctgttacaggatgattggtggggtcctggttgaaaggaccatcaaggaaggcctgcctgctgtgaagcgcaacaaggagggccttgaagaagtgattgctcgcatgcatgaggcactggagaggaagaagaaagagatcaccgagtttgagcttaagtacaagatcaggatccggaaggctgacaatgacgcagaggacgaaggcggcaagaaggaaggcactgcacagggagtccttgttgggcctgctggacagtaaaacttaattagatggattttgtgtaaaagatgaggaccgatgtgaactgaagtagtttctttgtcacctcttcgggtgctgcagcaatccaagtttttgtttgttattgatgacacatcgcaaaaaaaaaaaaaaaaaaaaaaaaaaaaaaaaaaaaaaaaaaaaaaaaaaaaaaaaaaaaaaaaaaaaataaaaaaaaaaaaagggggcggccgttttaaaggatccaagtttacttccccgtgcttgcaacgtaatagtttttttttagggccccctaaattaaattaactggccgcgtttttacaacgtttgaactggaaaa

SEQ ID NO: 264854 - DNA, 1141 bp, Zea mays
gccacgccgtcggaaaaaggtccggaccgccgttcagatggcaccgggtgcgtgagacgtgtgagcgaagcaatctgtacgcgccgcagtaattggcggcgaccgtgaattttatcgagcagctgacattcctgtgacgtggtgccgatctcgtggttatgttatattgttatgtttcttcctcttggtgtgacgcagggaaccgcgcctccggccggacgccgctggactgggagacgcggtcggcggtcgcgctggcggcggctcgcggcgtggcgcacatccactccacggggcccacggcgtcgcacggcaacatcaagtcctccaacgtccttctcaccaagaactacgaggcgcgcgtgtcggaccacggcctccccacgctcgtcggcccctccttctcgcccaccagggtgtccggctaccgcgcaccggaggtcaccgacatccgccgcgtctcgcagaaggccgacgtctacagcttcggcgtcctcctgctggagctgctcacggggaaggcgcccacgcacgccgtcgtcaacgaggaggggctcgacctgccgcgctgggtgcagtccgtcgtgcgggaggagtggaccgcccaggtgttcgaccaggagctcctcaggtaccaaaacgtcgaggaggagatggtgcagctcctccagctcgccatcgactgctccgcgcagcaccccgacaggaggcccgccatgtccgaggtggccacgcggatcgacgagatccgccgctccagcctcggcgaccggcaggtggccgacagcgccgaaggcgacgagccatctctataaccgccgtagcagtagctcctcccctgatccaccaccacacgtactgtgtcaatctcagtgaatgaaaattgcttagttctttgcatggatcgatattgctcttgcttcacatcagcaacttgtgcatgtatgctttttctctttttcttctcttctttatcttttttttttttttggcctctttctcacgggctttgatgattctattctatagcacatgtcactgtactcttttattcttggaaagcaacatttggtgatgccttacttgtatctaagaccagcaccattgccagctgcattagtgctgtattgtttgctatcct

SEQ ID NO: 264855 - DNA, 495 bp, Zea mays
ttgcttacgcgtccgcccacgcgtccgcccacgcgtccgcccacgcgtccgtggagaacgggtccgccgtggcggtgaagcggctcaaggacgtggacctcccggagcctgagttccgggagcgcatcgcggtcataggcgcagtgcagcacgagctggtggtgcccctccgcgcctactacttcagcaaggacgagaagctcctcgtctacgactacatgtccatgggcagcctctccgccctgctgcacgggaaccgcgcctccggccggacgccgctggactgggagacgcggtcggcggtcgcgctggcggcggctcgcggcgtggcgcacatccactccacggggcccacggcgtcgcacggcaacatcaagtcctccaacgtccttctcaccaagaactaccaggcgcgcgtgtcggaccacggcctccccacgctcgtcggcccctccttctcgcccaccagggtgtccggctaccgcgcaccggagg

SEQ ID NO: 264856 - DNA, 820 bp, Zea mays
cacgactgcacgaggacgaaaaaaaaatatccggacatccggtcacggttgccattcttttcctgtaaccgaaccctgaagggtagcgtcatcatccagacctgcattaccagagtgctctgctctcgctggaggccgtggttcattcacgttcatggaggccgccgccattcccaccagtgccccggaaaccaggattgccgttgtcaccggcggcaacaaagggatcgggctagaggtgtgccggcagctggccggcgccggcgccaccgtcgtcgtcttaacagccagggacgagacgaggggtgcagccgctgcacaagagctcagagaatctgggctctccgatgtcatcttccatcagctggacatcaccgacgctgcgagcgtcagtcggctggctgagttcctcaaggctcgttttggaaagctagatatcctggtaaataatgccgcagttggtgctgttgagtacgtccaagatcctgctgacagttcaacgagcgaggaagagctgagtggcatggatatggtccaaaggcttcagtgcatgcttaagagagtccgggagacctacgacgctgcgacagaaggcatcaagacaaactactatggcataaagcatgtgatcgaagccttgctgcctctgcttcaagcttcctccgatgggaggatcgttaacgtctcctctgacttcggcctgctaaggctgatcaacaacgaggagctaaggcaggagctggacgacgtggagaagctcaccgaggagaggctggacgaggtgctggccgcgtacctgagagacttcgacgccggcgag

SEQ ID NO: 264857 - DNA, 1079 bp, Zea mays
  unsure (1)..(1079): unsure at all n locations
aaanngggccgacccacgcgnncgcggacgcgtgggcggacgcttttggagcgtattctcaggnttgcgcgtatgagacttatcggggaactcaattgtgcgagtgacancangagctcttccaaaaggccttcacatgttaagcctgtcaaagaataacatatcaacaattgaaggccttagagagttgacacgattgcgcttgttggatatcagctataatagaatatctagaattggccatggattggcctcctgttcctcgttgaaggagttatatctggccggtaacaagatcagtgaggtagatggtcttcaccggcttctgaagctcaagattctggacctgcgccacaacaagatttctacatcaaagggcctcgggcagctagctgcgaattacaactctctagaagccattaaccttgccggcaaccctgcacagaagaatgtaggcgatgagcacctgaagaagtacctgcttggtctcctgccaaacctcgctgtgtacaacaagcagcctattagggcgactggatcaaaagacgtctcggaccgccatacccgcaagatctcttcttcgcaccattctgaccgtggtggcagacccgaccgcagatcttccaggttggtgggtgccccgtctgctcacaagccacagagctcgcggcatggacgctctggatatgtgtcaagctcagcgctcaagtacacgagagcccgcaacacgcacaagacctcgctggggtcaaggccccttgaacatgcgagtgccatagatctggcgaagcaaacccagacagagggaaggacacagtaagatcagtcaagcacgaccatcgatatactaccatggtattgttgtgaagtaaagcgaggcaccagttttgctggtggatttttttctctctctcacgtgaataaagctcaaaacagtaaacagagcagtgctttcatatcagcccatattttttttctaatattgttgagtggtattgatggcaattgggaattgtatgatttacttgccttatgaataaagcttgaaagaaacaaaataaagattagtattttttttc

SEQ ID NO: 264858 - DNA, 1745 bp, Zea mays
aggattttctcttttttccattcattattattctatttattctgacctccatacctcgatcgagatagtggacataggatgccactctttaaaatgaaaaaaaggagtaatcagctgtgacacgaaaaaaaacgaatccttttgtagctcgtcatttattggcaaaaatcgaaaaggtcaatatgaaggaggagaaagaaataatagtaacgtggtcccgggcatctagcattctacccgcaatggttggccatacaatcgcgattcataatggaaaagaacatatacctatttacataacaaatcctatggtaggtcgcaaattgggggaattcgtgcctactcggcatttcacgagttatgaaagtacaagaaaggatactaaatctcgtcgttaattgaattcagaatagaaagattcagaataaacaaaatttataggattcaaataatcaaataaagtaaaggtaggcgggtaataaccttatttatgacaagtttcaaattggtaaagtatacccctaggataaagaagaagaaggggctgagaaaactcgcaagaaaagttccaaccgatcgtctacttaaattcgaacgggttttcaaagcacaaaaacgcatacatatgtctgttttcaaagcacaaagagttctagatgagattcgctggcgttactacgaggaaaccgttatgatactgaatctcatgccttatcgagcatcgtatcccatcttaaagttggtttattcggcagcagcaaatgctactcattatagggatttcgacaaaacgaatttattcatcactaaagccgaagtcagtaggagtactattatgaaaaaattcagacctcgagctcgaggacgtagttattctataaaaaaaacgatgtgtaatataacaattgtactaaatatagtaaagaaatcaaaataatctttagatcaatctaagatttcgattcccagtaaaaaaaaaagaaatataatagaaaaatatgggacaaaaaataaatccactcggtttcagacttggtacaacccaaaatcaccattccttttggttcgcacaaccaaaaaattattctgaaggtctacaggaagataaaaaaatacggaattgtatcaagaactatatacaaaagaataggaaaaaaggctcgaatagaaaaatggaatcagactcaagttctgaagtaattacacatatagaaattcaaaaagaaatcgatacaatccacgtcataatccatattggattccccaacttattaaagaaaaagggagcaatcgaagaattagagaaagatctccaaaaggaagttaattctgtaaaccagagacttaatattgctatcgaaaaggttaaagaaccttatagacaacctaatattcttgcggaatatatagctttccaattaaaaaatagagtttcattccgaaaagcaatgaaaaaagctattgaattaactaaaaaagcggatataaagggaataaaaatccaaattgcgggtcgtctagcaggaaaagaaattgcacgtgccgaatgcatcaaaaagggtagactacccctccaaacaattcgcgctaaaattgattattgctgctatccaattcgaactatctatggagtattaggtgtcaaaatttggatattcgtagaagaagaataactaaccatgtcttcccattccgcccagtgatagaataaaaaagacaagccccttgtttttccgataatccct

SEQ ID NO: 264859 - DNA, 483 bp, Zea mays
gtggaggtggaggaggaggaggaggaggcggcggcggcggaggtggcggcggtggaggcggtggtggtggtggtactggaggaggaggtgggggtggaggaaactagattgccttgttgctcatcacttgtctctgtttcaatcgtttcaatcattctgggatggtggaggtagccgtatctatgttcatgtttatggccaagccatgcatgtttatgcatgcatgtgtgtagtgcaaagatgaataaggacgtcgagctaaatctatgcaaccctcgacgtggtgtgattgtattttgtatttgaatcttgtgaagcatgtgtgtgtgtgtcatgtactcagttatattatgtggtgctctcacattacatatgatatgtcctcctgagcttgggctgctggccgctacagatattcatcatccaaatttttgcttgaaaaaaaacaaaaaaaaagggcgacagatagcgatctagaactag

SEQ ID NO: 264860 - DNA, 439 bp, Zea mays
cggacgcgtggcgtgacgcgtgggcggacgcgtgggcggacgcgtgggcggtggtgatggcggtggaagaaactagattgaccttgtttttgcatcatcacttgtctctgtttcaatcgttctgggatggtgaggtagccgtatctatgttcacgtttatggccaagccatgcatgtttatgcatgcatgtgtgtgtagtgcaaagatagataaggacgtcgagctaaatctatacaaccctcgacgtggtgtgattgtattttgtatttgaatcttgtgaagcatgtgtgtgtgtcatgtactcagaggtcttcgcgagtcacaagtggcggtctaatacaaggattgacgcggtttagtgtttgtaatatatattacatatcatgttttaagttgaagtttgtttgatccacaaaaaaaaaaaaaaaaaggggggcc

SEQ ID NO: 264861 - DNA, 1565 bp, Zea mays
taacgctgcaaaaatggtttgatcaagagcttgaagttatggtgcatgtgcatgaagtccgaaatgagtacgaaaaacaaagccaactgcgtgctgcgcttggtgaggagcttgccattttgaaacaagaagatatacgggctggtggatctagtccccaaagagggaagaatggaaactctaggacaaataccttgtcaccaaatgcaagacaagctaggatagcatcacttgagagcatggtgacaatctcttcaaacactcttgttgcaatggcttctcaactctcagaagctgaagaaagagagcgtgccttctctgggcgtagtcgttggaatcaattgcgatcaatgggggaggcaaagagcttactgcaatatgtctttaatgttgctgctgatgccagatgccaagtaaaggagaaggaagtggagatcaaggaaatgaaggaacaaatgacagagctggtgggcattcttcgacacagtgaatcacgcagaagagaaatggagaagcagctcaagcaaagagaacagacaactccaatggccactacacctccgaaaagtggaaatggcacgacgaagcactctgctgatgaccccaacacaccactgtcccctgtcgccgttcctgcacagaagcagctcaagtattctgctggaattgtaaatagccccagcaaaggagttgctgcgataaaaaaagagcaacttaagatggttccaattgcacagttgtctgcggggaagagagtttcaatagcagggcattcaggaaagctctggaggtggaaaagaagccatcaccagtggctgatgcagttcaagtggaagtggcagaagccgtggaagttgtctgaggtgatacgacacagtgatgaaacaatcacgaggattaggcccagacctccacttcttccacataaacctcataactgatgtgaaacggacttgtttttgtctcaacaagaactgacacggtttgcaaacctacacagctaactgcctgcacaaggtaacaatgcagttaatactccatgagatctccttcgtgcttgtttttacttggccacgggatcgacaagtatgtgttcatgggtgactcttgtctatggatagatgtaaattccctgtgggttggtataaagtgagatgtcaacgtagagaaagaaaatagttagtgggtgagtgagcagagtgaatgggcattctttcatgcaaatactgagcacaatgcttaatgtttcagccttcactgacggtgacatgtcaatagttggtgttcgtcttcacaaaggaatctgtcaaaggaaggcgccttgtaaagtctttcttgtgctgttgtgtgatagttttgtgtgaagggtaactgaaagttgaatgggttttgtgctcgagtgatagtctattttcccctcttcttttgtttgttgatactaaatgagaaaagacaagtgatattggtttggtttgctaggagtattgtgatgtaatgcagaaacttgttcccctatatcagtacacccttttaatttatatattgtggaggcctgattgctggct

SEQ ID NO: 264862 - DNA, 545 bp, Zea mays
aaggtggaaaagaagccatcaccagtggctgatgcagttcaagtggaagtggcagaagccgtggaagttgtctgaggtgatacgacacagtgatgaaacaatcacgaggattaggcccagacctccacttcttccacataaacctcataactgatgtgaaacggacttgtttttgtctcaacaagaactgacacggtttgcaaacctacacagctaactgcctgcacaagccttcactgacggtgacatgtcaatagttggtgttcgtcttcacaaaggaatctgtcaaaggaaggcgccttgtaaagtctttcttgtgctgttgtgtgatagttttgtgtgaagggtaactgaaagttgaatgggttttgtgctcgagtgatagtctattttcccctcttcttttgtttgttgatactaaaatgagaaaagacaagtgatattggtttggtttgctaggagtattgtgatgtaatgcagaaacttgttcccctatatcagtacacccttttaatctatgtatcgtggagtactgattgctgact

SEQ ID NO: 264863 - DNA, 1010 bp, Zea mays
acttggcacacgacacccacaaaggtggaccgtcacaagaacacacacacacacaaaggcaacacgacggcctcaattctccacaccacacgaagaccaccacccagctcagctctcgcagcactaaaccccatccactcgctcctttatcatcgtctccctcccctccattctcagtctcaggctctcagctcagctgcgtcctcctgccacccatggcaaacgcttctctgcaatccttccttctcccgcacgaccattctttcgccggcgccggcggcagccgtgacggctccgcgtccgccgtgcacaagctctccaccaacaccagcggcagcatttccttcaggctctacaccaaaacctccccctcggtgacagcagcctcagccaccaattcgtcagctccgactccagttgccccggcatctgcaccagcggcaggggacgaagaagaagaagaaggcccctctctcgacctcctccgccgccagctcgccgcgggcgactaccggcaggcggacgagaccacgcgggcgctgatcatcgacctcgccggcgagcccgcgaggcgccgagggtacgtcttcttctccgaggtccagttcatcccggccgaggacctcgccgccatcgacgggctctggaaggagcacagcggcggcaggttcgggtacagcgtgcagcggcggctctgggagaagtcgcggcgcgacttcacccgcttcttcatccgggtcggctggatgaggaagctggacacggaggtggagcagtacaactacagggccttccccgacgagttcttgtgggagttgacggacgacacgcccgagggacacctgccgctcaccaacgccctcaggggcacgcagctcctggcgaacatcctcacccacccggccttccaggaggaggaccagggagacggagctgctgctgcagaagagagtgcaaacaccaaagatgataacaaagggagggagagacccaggtccatgagagatttc

SEQ ID NO: 264864 - DNA, 773 bp, Zea mays
gttgactcctcaagttgcagtatcacatcaggtagctctgttattctgtataggcctagcaccagcaagatgaaaaagaagcaacaggttgatgaaaatgctaggaggttttcaagaactgaagaaggaaacgctaggcggtttgcgaaatccgaagaatcatttgaagaacgccctagaaacagaccaggcagaagatctgttggatctggatccacatttaagggggcgcaacagaagagaagaccgatggcatccaacgggtcttcgtcatatggccgaggatagcagtggcagtaaacactatatgcttgcttttttttcgtgttgtctgtgctccggaccctggagcgttcatgtgaagttctcgacgaactggggggagcacgtggcagtgtttagttcgacttttgacaagtaagttgtggttccaggtctcatcaactgcacaatgaaataggcacaggatactttatgtgtcagctacgtgcaatttggtgcaagactagcacaggaacatggagtttcttcagtgttgtccgtatacctcttccatctggtccttgacatcacagcagaggaccatccattggactgtcatgtttttgcgacttcgttgagcagctgtctgttgatgtttcactgacagtctcaggctggtgcagagccaagtgcttaacatccatattgctcctgtgatgagttatgaccatggttccaagaaccatctcagcaatattgccatagttctgacacaagtgtggggggagcct

SEQ ID NO: 264865 - DNA, 967 bp, Zea mays
cccacgcgtccgcacacagtacgtacaagcctctcatcagcaatggagtccaccaagctctccgcgctgctggtgctcgccatgctcgcgctctcctcgtccccgctcgctctcgcgtgggagaaggcggaaccggagtgccactcgtgcgagtccggctcgccaccctcgaccggcggcgtccccctgcctcccgtcagcataccgtcagtcccgctgccccctgtcagcataccgtcggtccccctgccccctgtcagcataccgtcagtgcccctgccgccggtgaccctccctcccattccgatcgttgggggaagcccgagcccgacgaagaagggacaccggaaggcgtgcccaccgcctccgtctcccccgacgcccacgcccacgcccacgccgtcctcggacaagtgccccatcgacgcgctcaagctcggcgcctgcgtggacgttctcgggaacgaggtgcacgtcggcgacgccaacgtccagtgctgcccgctcgtgaagggcatcgccgggctctccgcggcggcgtgcctttgcaccgccatcaaggccaaggtgctcgacatctccgtctacgtgcccatcgcgctcgaggtgctcgtcaactgcggctgcgccgtcccgccaggctacaaatgcacttgaacgattccatcccattccatttccatttccacccacagcacacgtgcacagcaaaacgtctccttttgccctcccgatgcaaagtttgaaaaggctcgtcgacggatttgggtggtagccgcccgcgcgccgccgggctgttcagcaagtgcattccttcatttgttttgctattctcgttgcatgcctgtatatgcatcgtccggtgtctcctcaaattccacttgtactttgtgtgattttgtatcaaactattctctttttttgggattcgattaaaaaaaaaaaaaaaaaaaagtaggaaagaaga

SEQ ID NO: 264866 - DNA, 924 bp, Zea mays
cacagtacgtacaagcctcatcagctcgctagcatagcagcaaccagctatggactccaccaagttatccgcgctgctggcgctcgccatgctcgcgctctcctcgtcgccgctcgctctcgcgtgggagaaggcggagcgggagtgccactcgtgcgagtccggctcgccgccctcaaccggcgtccccctgcccccaatcagcataccgtcagtccccctgcccccagtcagcataccgtcagtcccactgccccctgtcagtataccgtcggtccccatcccaccggtcacccagctgcccccagtcgtcggactgccgccggtgacccttcctcccattccgatcatcggaggaagcccgccgaagaagggccaccggaaggcgtgcccgccgtctccgtctcccccgacgcccacgcccacgcccacgccgtcctcggacaagtgccccatcgacgcgctgaagctcggcgcgtgcgtggacattctcgggaacgaggtgcacatcggcgacgccaacgtcaagtgctgcccgctcgtgaagggcatcgccgggctctccgcggcggcgtgcctgtgcaccgccatcaaggccaaggtgctggacatctccgtctacgtgcccatcgcgctggaggtgctcgtcaactgcggctgcgaggtcccgccaggctacaaatgcacttaaacgactccattccatttcatcccatctcaccatgcgtgcacagcgaggtctccttttgccctcccgaatgcaaagtttgaaaggctcgtcgacggatttgggtctccttttgcccacccgaatgcaaagtttcgaaaggctcgtcgacggattgggctcttcggctactgcattcttccttatttcattcttccttagtgtcttctcaaatgtcactttgtactttgtgtgaa

SEQ ID NO: 264867 - DNA, 394 bp, Zea mays
acagtacgtacaagcctcatcagctcgctagcatagcagcaaccagcaatggactccaccaagttatccgcgctgctggcgctcgccatgctcgcgctctcctcgtcgccgctcgctctcgcgtgggagaaggcggagcggaagtgccactcgtgcgagtccggctcgccgccctcgaccggcgtccccctgcccccaatcagcataccgtcagtcccactgccccctgtcagtataccgtcggtccccatcccaccggtcacccagctgcccccagtcgtcggactgccgccggtgacccttcctcccattccgatcatcggaggaagcccgccgaagaagggccaccggaaggcgtgcccgccgcctccgtctcccccgacagccacgccca

SEQ ID NO: 264868 - DNA, 578 bp, Zea mays
atcatctgcagttgtagctatgctggcaaaatcaggtttcacggcggcatttacactgatttttgtatctgagattggagataagacgtttttcattgctgcactactcgcgatgcagtatcaaagagcactggttttacttgggtcaatggctgctctctccctgatgactattgtgagtgttatacttggacggattttccagtctgtgccagcacagttccaaacaacgctacccataggagagtattctgcagttgctctgctggcattctttggtttcaagtcaatgaaagatgcattagcacttcctgataatgccaacgggaaccttcaagggaattcagaaagtggagaactggctgaggccgaggagcttgtcaaggaaaaggtctctaaaaatctcaccagccctcttgaagtcctttggaagtccttcagtcttgttttctttgctgagtggggagatcgctctatgcttgctacaattgctttgggtgctgctcagtctcctttgggctgttgcttgtggagcctttgctggacacttgattgcaacagcctttgctattcttgga

SEQ ID NO: 264869 - DNA, 912 bp, Zea mays
tgaccagtaacgaatctattcttctcgtctacatttgcgctccaggaaggtcgtcgtcgtggagcgtctgacgcagaaagtttaatctaccttctatatttctcttgtggtggagtttgccccgaccttgactctgtcgaaagtgcacttcagtggagggagacgtcatggtctaggagagtcatacagcagaagttgggcgacatctcagcagtgttaaaagcttttgcggattatgttgacagcctttgtggaaccccgtacccgatggactatgagatctggttgaaacggcttcgaagaacaatgaacgaagatcatgggaaggaggtcgacacatcctcgagttaataacacagcgccattttctcgcaaatccgagattcggaagatcaagtgattggcctgttacctgtttttgttgttgtagataatttatttgtgaaaggtccataggtcatagtctgtccatcgttttgatataccgttgcttggatataagggtattctgaagttgcaatctgctgctgctatcctcaatgggatcactgcccagtgtttactatcccgtgtgcttgccctaagcccttccttcgcacaggtgatccttgaggatatcagcaacatgatgtattttgtgaatcttgggtaaattggtgagcctccgctctggttgccttgagagattctggtcccgttttatccggttctggtaggcttcagggtgatttgtttttcttgtgatcggtgtcagaacttgttaatcagttggtgaatgtgtacctctaactgtgtggtatcaatcttttgccaagcagtttaggcctgtttcccacacaaaggttggatctagaaaccattgaactgaacctagagtatttattccattaaatacacaacattattattttt

SEQ ID NO: 264870 - DNA, 2440 bp, Zea mays
tctactcgtccgcaccatcccttcctgcccggggcggctccgcctccatggccctcgcgtgcgcgcccataccgctcccgagtccctagggcgcggcacgcacacttctcgcgggcgggggcgcgggcgcgggcgcgggcgggggcgcgggcgcgggcgcgggcgggagcaggcggcatggcgtcgcaggtcgctgggtcaaccccggcggtggcggcgcttgggttcctcctcccgaccttctgggagatcgaggtcacgtgcgccgccgcgatgatcctcgtggcgctttacgttgcctacgagctcctcaacccgcgctcctcgcaggcggcagcggcgggcgacgccgacgagctcctcgtgcgggggctggacggcgccgacaagttcaaggggggtgtgagcggcccctctgcctatgtagtgaagctcgaattgttggctgcaaaaaatttgatggcggcgaacttaaatgggacatctgacccatatgcattgatcacttgtggtgcagagaagcgtttcagctccatggtccctggctctagattcccaatgtggggagaggaattcaatttttttgttgatagtcttcctgtaaagataaatgtcacgatatatgactgggacattgtatggaaaagcacaatccttggctcttttactgttactgttgaatctgaggtaccgagtggaccaatttggcatacacttgacagcacatcaggccaggtgtgtcttcatattaaagtaatcaaggttcatgaaagttcctccagggcaataaatagctcagctgaggctggtgctcgtagaaggatttccttggataagcaaggtcctactgtagttcatcaaaagccaggtcctttgcagacaatttttgaactgcctccagatgaggttgttgaccacagttattcatgtgcacttgaaaggtcatttctgtatcatggacgcatgtatgtctcttcatggcatatttgctttcattcaaacgtcttttcaaagcaaatcaaggttgtgattcctttgagagatattgatgagataaggagaagtcagcatgcagttattaatccagctattacaatttttcttcgaatgggagctggaggatttggtgttcctccgttaggatgtccagatggaagagtcaggtacaaatttgcatcgttttggaacagaaaccatacatttagagcattgcatcgagctatgaagaacttcgtaatgatgatagacgctgagaaacaggaacgtgctcagtctgcattacgtgcacacagtagttcaagaaaaaatagcaagaaggagataaatgtaccagaagattgtgctgcattaacagggaagttacaaccttttgtcaaagaagaagttttggtccctgtattcaatggaacttttccctgtactgcagaacagttcttcagtattcttttaagtgatgattcaaattacataacagagtatcgaacggatcggaaggataaagatataaatctgggccaatggcacgttgcagatgagtatgatggccaggtgagggaacttaattgtaaatcaatatgccatagtccaatgtgtcctccttattcagcaatgacagagtggcagcatatagttctttcagctgacaaaatggatctggtatttgagacagtacagcaagtacatgatgttccatttggttccttctttgaggtgcactgtaggtggtgtgtgaaaactatcagttctagcctgtgcagtcttaacataagtgctggtgcacatttcaagaaatggtgcataatgcagtctaagataaagagcggtgctgtggatgagttgaagaaagaagtcaaggaaatgttagactttgcacaggggtatatgctcaaagttaggtctccggaccaagagaacagtaatctcgcccaacaagacaacgtggcaccggatgcagtgtctggcgatcaatgattatttcaggttgtgcctcctgatttagggtggggtgacagctgccatgacaacgaattatgatgttatacacagaagggcaggtggacctgtaactagtccacatgaaccacatctaacatgttaagctgacttccaaaagatgggtggaccgtgtattgtgtgtgtaaacttctttttcctgtcattccgctatccattctggcagtttggctgatgtatatagttgtaaaaacaagtatagtgctgactgcggacggttcagcggtgcgttgttccaagataaccaaagaaagaaacaaaagagaaatattcgcaccagaaccatcagaacttgtgcagtgtacatttttgtagccaaagggaactgttgcttattgcttttctgcatctgggccaatggcccgtcgcagatgagtatgatggccaggtgagggaacttaattgtaaatcaatatgccattgtccc

SEQ ID NO: 264871 - DNA, 458 bp, Zea mays
agtgaaggtgatgttagactttgcgcaggggtatatgctcaaagttagctctcctgaccaagagaacagtaatctcgcgcagcaagacaacacggcgccggatgcgccttctgatacagggtgacagccgccatcacatgacaacgaatcatgccattacgatgttatacacagaagggcaggtggaccagtaactagtagtccccatgacccccctctaccatgttaagctgacttccaaaagaatgggtggaccgtgtgtagcgtgttaagttcgtttcctgccattgctctatccgtttttggcagtttggctgatgtatatatatagctgtaaacccacgcaaatataaagtggtggctgtggcaggccagtgtgttgtttgagtataaaaccaaagaaagaaacggaagagagaaaaatttgccaaaaaaaaaaaaaaaaaaaaaagataaaa

SEQ ID NO: 264872 - DNA, 461 bp, Zea mays
acgacgcgtgggttccttcctcccctggtcgcccccgcctccatggccctcgcgtgcgcgcccataccgctcccgagtccctaggacgcggcacgcacccttctcgcgggcgcgggcgcgggcgcggggcgcgggagcaggcatggcgtcgcaggtcgctgggtcaaccccggcggtggcggcgcttgggttccttctcccgaccttctgggagatcgaggtcacgtgcgccgccgcgatgatcctcgtggcgctttacgttgcctacgagctcctcaacccgcgctcctcgcaggcggcagcggcgggcgacgccgacgagctcctcgtgcgggggctggacggcgccgacaagttcaaggggggtgtgagccgcccctctgcctatgtagtgaagctcgaattgttggctgcacaaaatttgatggcggcgaacttaaatgggacatctgacccatatg

SEQ ID NO: 264873 - DNA, 1644 bp, Zea mays
cccccttccacccgcgttcgcttcttccccagcatccagcaaggtaggaggaagaagaagatggaggagaggggacggtccgcgaatcctgcctagccttcgccgccttcctccgctcgagcggctcgccgaggaaatagcgaaagggcgctatgagttcagcgaatggtacaaccaatgtccatgggaaagaagcagcaccgtatgaggagcagctgttcaagattggtaaagttagaactgacctaggacaactatctggaaaatcagctctatattgctcagatgcttcaattgcaaggtacctgatagcaaggaactgggacataaggaaggctactaaaatgctgaagaaaaccttaaaatggcgttcagaatataagccagatgaaatccgttgggatgacatatctgatgaagcggtgactggaaaaacttaccgaactgattactttgacaagatcgggcggagtatccttgtcatgagacctggatgccagaataccaagaatgccaatgggcaagtcaagtacttggtgtactgtatggagaatgcaattctaaatctgccacatggtcaggatcagatggtttggctcattgattctgctggtttcaatttaggcaacttgtcaattcaggtgacaaagatgacggcagatgtcctacaaggccattatcctgaaaggttgggtgtggcaattctttttaacgctccaaagttttttgagcctttctggaagatggcaagcccccttcttgagaagaagaccagaaacaaggtcaaatttgtatactcagatagacctgacaccatgaagatcatggaagaccttttcaacatggatgagttagaatgtgcgtttggtggcaagaacccagctactttcaatataaatgattatgctgcgaggatgagagaagatgacaagaagatgccatcattttggagccctgagaattcagctcttgcttctgagccatatcagatgagcagccaaaaagccctaggaagcgtttcaggtgcgaagactgaagatgctggatctggaaagatggacgacatggagactgctcctgaaaagagtgaagaatcgggtactgaatctggagaggaggtacaaacacggactgaatcgagcacaggtgagcagaaaaacttgcctggagaagataatgccccagcagataaaagtggcctttaatctgatctccgggtatcaccatgaaacataaatgtgaaacattgataggagctctaccacatttcactaaggtttgaacatgaaaggcgacgagaaactcttttaacacggcaaatcggcatgcctgacttgttttgtagtcggcacctatttctctgtcctcaagatcttatttggggaaccttttcatgacagaatgagatctaccagatggtaaagaactaataccatactgttaccctcagttttcatgacagaatatggtctggtgttcagtttctgatatgcccttgtattttcgctggaaaagaaaaatactattgtatctggagctgttgggttaataatatatcattgttcagtttgaaaaaaaaaaaaaaaaaaaaaaaaaaaaaatcaaaaaaagaaaagaaaaggaaaaaaaggaagggggaagatg

SEQ ID NO: 264874 - DNA, 1674 bp, Zea mays
aggtcagcagcatcattagaaaacgacgtctcgccgttcttcgtcttcagatctagggttctctcgtgctctgttctcatcttctgctcgctggtgtcccctccctctcacccatggcttcggcggcggcggcaactcaggtggggacttacttcctgcggaactactacaacctgctgcaacaaacccccgatgtcgtccaccagttctacagcgaagccagcaccatggtccgcgtcgacgacctcaccggcacgaccgcggctgccaacaacatgatggacatacactcactcatcatgtctttgaacttcacccaaattgagatcaagactgccaattttgtgaactcatggggcgatggggtgctagttatggtctctggtctagtgcagaccaaggagtacagccaccaaaggaaatttatccagatgttcttccttgcccctcaagagaagggttactttgtcctcaacgattactttcacttcgttgaccaagaacatgtgcagcctgcgccagtgattgctcaggaagactacgagagcaatttggcacccaacacagttgttgagaccgctcctgagtacgttcacgaggaagaagctcaacaaatagcacctgaagtacatgatgtggtcgaaaactatacttattctgagccacaacagcaagtagtgtcggacaactggggagaggagcctcttcctgaagaaccgccttctttctcaaatgaaatggcagtcgctcctgaggagccagtgcaagctccacctgtgccacttcctcacgtggatgagcctgtttgtgaaccagtaaagaagacttatgcttccatcctaaaaaccgcaaaggctcctcctgcattcccagtagcccagcaagtacctgtgagtaagccttctcaccctacaacagagtcaaaccaaacccagcattcagttatggcttcatcaatgggaaccgagaaaccgaggtctgatgtttttggtgagggtgcttcccatgatgacgaagagagcaaatctgtgtatgtcggcaacgtgccatcatctgtaagtgaggctgatcttgaaaatgagttcaagaaatttggccggcttattcctgacggtgttgctatcagaagccgaaaggagactggcggctattatgctttcgtggaattcgaggaactcagcggtgtacacaatgcgttaaaggcttcaccaattgaaataaatgggcggcagatatatgttgaggagaggaagccaaatagcggaataagaggtggaaggaggggaggacgtggccgtttcagtggtggaggccggggatattcgagaggtggaggcgacgagtacaatagtaaccgtgggaggtcaaacggttacggtcgtgctcctcaccaagagaggggcatacttgggagccacaccccaaggaactgattcagtccagcagcaaacataaggttttgatccgtgtcgtcaaagcgagagagagagagatcctaaacaatctgcctatcagctactaggccgcgtttgggttttggggcttgttttgtcgatgaatgtgtgtgcgcgcgtcatcgacctatgtgacacttaaaacttttgctagtctgacgctatctctttacattaagatcggctgttctattaaccttgctgctattgttgctcgtgc

SEQ ID NO: 264875 - DNA, 535 bp, Zea mays
ctcgtgctctgttctcatcttctgctcgctggtgtcccctctctctcacccatggcttcggcggcggcggcaactcaggtggggacttacttcctgcggaactactacaacctgctgcaacaaacccccgatgtcgtccaccagttctacagcgaagccagcaccatggtccgcgtcgacgacctcaccggcaacaatactgcaacaaggagctgtcgttcagccattgccaagccgagagcagaagcagaagagaaactgagaagaacccagcttagatcagactgaagaactagatgcggtggacgccttcaagacctgctgacatgagggctgctagtcagagctgctgtttttggcctgttctttgacatgagggtacccaaaaactctagttgctcgtgggtgtcaactttttattatatgttgttatgtttgtgcaaaatcaactgaaatgtgaagtcaagtggtgatgctgtgaactgagtttagtgttgtccacttagtgtgtatgatcactggtatactagttgta

SEQ ID NO: 264876 - DNA, 545 bp, Zea mays
cactgttctcagcttccgctcgctggtgtcccctctctctcacccatggcttcggcggcggcggcaactcaggtggggacttacttcctgcggaactactacaacctgctgcaacaaacccccgatgtcgtccaccagttctacagcgaagccagcaccatggtccgcgtcgacgacctcaccggcaacaatactgcaacaaggagctgtcgttcagccattgccaagccgagagcaggtgatggcgctggcaccttgctcgaattgatggtgatgcacgacctgccttggtgtgaggagtatttttgtagtttttatttgtaggatgagtgttcttcctggaaaaaaagggaccaatgtctacgctacgcagttcctctgattgtttttacatctaatttgttgacttgctacttatagagttcagtgattgttttagtgaaacatattctaatttgcttacttacatggctgctcttagccccaacaattgttttggtgacttcaaagcagaaagcttaatgggattagataagctctatcca

SEQ ID NO: 264877 - DNA, 974 bp, Zea mays
gcaggaggacaagtggtggttgccctgtccacgagtgccgcccaaggggctgtccgaggacgcgaggaggaagctgcagcaaagcagggattgtgcaaaccagatactcaaggcggccatggcgattaacagcgatgtgctcgccgagatggaaatccccgaagtgtacctggagacactgcccaagagcggtaaatcttgcttgggtgagataatttaccgatacataacagctgagcagttctcaccagaatgtctcctggattgcttggatctatcatccgagcaccacacactcgaagtggcaaacagaatagaagctgccatccatgtttggaaactgaaaggccaaaaaaagtcgacacctcaagccagatcaaagaaatcttggggtggaaaagtgaagggtcttgtcggagataaggaaaagagccacactttgtctgaaagagctaatggtctattgcagagcctaagattgagatatcctggtctgccacacacctcccttgacatgaacaagatccagtataacaaggatgttgggcagtccatacttgaaagctactcaagggttctggagagcttggcatttaacataattgcaagaattgatgatgtgatctatgttgatgatgctacaaacagatcagctgctgctgagtctgtttcgatcttcaatcgtggcacaggtgtgccagttcagaagaggatctctccaagcccattctctattcagaattcgccgtatggctctccgttcgcaacacccactttctgctcatccaccccagttacaggcagccctggaagggtacagcccccattaaacaaaaacattctaggaactcaagaaatcaaggtcgaaaagctctgttcttggtgatctagagaaaggtctggacatatgcaggaaacttgagcgctaggaaagacgctggagatgctcctgagagagacttgaaggcgattga

SEQ ID NO: 264878 - DNA, 360 bp, Zea mays
agccattcccgtcctcctcctcgtcatcgtcttgtggccggccgtcggtgcggcaggaggagaagtggtggttgccctgcccacgagtgccacccaaggggctgtccgaggattcgaggaggaagctgcagcaaagcagggattgtgcaaaccagatactgaaagcagccatggcgattaacaacgatgtgctcgcagagatggaaatccccgaaatgtacctggagacactgcccaagcaagtgttgtcaccaattctaggttctaacccattttgtttccaacgcaagcccgcgggccgtggtacctctagttattagtgtcatcccccattaaatgatgactcgacacacgatatgg

SEQ ID NO: 264879 - DNA, 462 bp, Zea mays
  unsure (1)..(462): unsure at all n locations
atttgctgttgttctagaggtctntgaagttgctccttctctgttcatggtcgatgttcgaaaggttgccggtgacactccggaataccacacgttttacgagaacctatgcagcaaactttgcagcataatctggaggccaaccgaagtttctgccaaatctacgccgctgaggacgaccacctgctagccgcctagcccagcactgagctactgtagtggcatcaccaagagacgtgattcgtagccgtcagaaagggagagcttctgttgaatctagcattgctcgtggagctgggattcatgttgaccaccaggtgtttgtatattgtagtaacgctattgtagatagtctgtatagctccatttgtgcagttgtacgtagcaggaatatgttaaaaaacaacttttaatgtcaggtataatcggtttgcatccaggaagcatctccaacagtgtctt

SEQ ID NO: 264880 - DNA, 416 bp, Zea mays
  unsure (1)..(416): unsure at all n locations
cccacgcgtccgcccacgcgtccggacatactcaagccctcccaaccatatatattcattgatcccccctatacacaagatttagaccactacaaacaacacaagtgccacaaaagagaaagtaagcaagagagagctactcatttgagtttagcactagtgccttgtgagattcattgagagatagtgtgtgctacatatttgggttcattggtgcatggagtttggactcccatggaacttcctccgaagttttggaggccttgtaaaagctagcaacaccaaagagtgtggtggtccttgtggggtcttaagtgatccttgagaagaagaagagctcgctgatcttgagtgatcggtggagagagggaaagggttganaaaganccgtccttagtggactcctcaacggggac

SEQ ID NO: 264881 - DNA, 1008 bp, Zea mays
cccacgcgtccgcaacatgctgccctactgcagcatcgacaggaagcagaagaagacgctcggagagatggagcaggagttcctgcaagccctccaggccttctactatgaccagaaggccatcatgtccaacgaggagttcgacaacctcaaggaggagctcatgtgggaggggagcagcgtcgtcatgctaaacgaagatgagcagaagcttttggaagcttccatggcctatgtctccggcaaccccatcatgacggatgatgaattcgatcaactaaagctgagactaaagaaagaaggaagcgacattgtacaggaaggtccaagatgcagcctacggagtcgaaaggtctacagtgacttgactgttgactacttgaagatgttgctcctaaatgttcccgcagctgttgtagctctggcactattcttctttttggatgatttcacgggatttgaaatcacatatcttctcgagttgccggagcctttcagtttcatcttcacatggttcgccgcactgcctttaatattttgggtagcgcaggcgatcactaatgtcatagtgaaggacttcctgatcttgaagggtccgtgtccaaactgcgggaatgaaaacctctccttcttcggtaccatactgtcagtgcctagcggtggctcaaaaaacagcgtgaaatgtgcaagttgtggcactgagttggagtacgactcttcaacccgattgatcacactcccagaaccggctgaggctaaataagtgatggcgtggtttcgatttcgctagcaggaaagacggcccggccggcccgcagattcttgatcgacgacagtacgaagcaagactgttcttggatcgggtggcaatcgtggagtgatgtatgtttgctgtgctagtctgtgtgtatatatatttgaacaagtttagacacctgcattatatagatctaatgaaatgggtatatgtatgtgcatagagtgtacaaagaaaaatttaataagccg

SEQ ID NO: 264882 - DNA, 1263 bp, Zea mays
ccacgcgtccggaccagaaggccatcatgtccaacgaggagttcgacaacctcaaggaggagctcatgtgggaggggagcagcgtcgtcatgctaaacgaagatgagcaaaagcttttggaagcttccttggcctatacctccggcaacccaatcatgtctgatgctgagttcgacgaactgaaacttagattaaagacagacggcagtgtcattgtgaaggagggtcccaggtgcagcctaaggactcataaggtgtacagtgacttgaatgttgactacctaaagatgttcctcctaaatgttccagccaccaccgtagctctgggactgttctttttcattgatgaattgactggttttgagatcaatgtgttccagctgccagagcctttcggattcattttcacatggtttgctgctttgcccctaatattgttcttagcgcagtcattgactaaggctatagtccaggattttttaatccttaaggggccatgtcctaattgtggtactgaaaacctttccttctttgggactatactgtcagtctccagtggcggtacaacaaacaaagtgaaatgtgcaaattgcagtaccgagctggaatatgactcaaaatctcgggtgatcacacttccagaagcatcaaatgcataaacataggtgactctacatttacgccagtaactataaatggatgctctttggtctatattccaaatgtgggagacatcacaccagctttgaagtattgcccgtctccattgtgaacactctgcagcatatgtagcagataaatgagtgaaactatttgtactgcctgctctgcaaattagtatgaacacccctcaaaaagatttggcccacactctggtctctctgtttgcagctgggaacagggagctccagagcttgtgaattctatagaataaaggtggttgtccgcacagtatagcaaactgcgaagcctgcaactactagagtttggtctgtagcaggctcagttgggaatgtgtagcagagcatgatccatggtgtggatgaattgcagagtactgtgctgtgtgtgtaggaaggaaaagctgccgcctgccgattgtgcagtcagtctagtacgttggtatgcgaccatctcaagtctgggctttgattttaggatatgatttttggcaatgaatgaacaagctatctactgtaaaaaaaaaaaaaaaaaaaaaaaaaaaaaaaaaaaaaaagggcggcggctcgcgcccaccgtccg

SEQ ID NO: 264883 - DNA, 550 bp, Zea mays
  unsure (1)..(550): unsure at all n locations
cttcttcgcctcctcctccacacgtccaaaagcacagntcttcccacttcctacccatcatatctccatccgcggttccgcccagctgctccacatctcaattctcaccacacacacgcacacacactatcgtccagcaagctcgctgttgcttgccacccaccgcctcagctcgatcgcaacgcgctcggcatggcgtccgaggtgtggctatcgccggcgtctcgcctcccatccctctccaacgcaccacctcgcttacgctccaagcctgccaccacaaccgcctctttgctctctccctgtccccgccctgcccgcgccctgcctgtgctgcgtgtccgtcgccgccgccgacttcgcgccaccgagcagcaaggccaggttcaggagcaagatgacgaggtggtggacaggaacatcctcccctactgcagcatcgacaggaagcagaagaagacgctgggagagatggagcaggagttcctgcaagccctccaggccttctactatgaccagaaggccatcatgtccaacgaggagtttcgac

SEQ ID NO: 264884 - DNA, 605 bp, Zea mays
cccacgcgtccgcggacgcgtgggcggattcattttcacatggtttgctgctttgcccctaatattgttcttagcgcagtcattgactaaggctatagtccaggattttttaatccttaaggggccatgtcctaattgtggtactgaaaacctttccttctttgggactatactgtcagtctccagtggcggtacaacaaacaaagtgaaatgtgcaaattgcagtgccgagctggagtatgactcaaaatctcgggtgatcacacttccagaagcatcaaatgcataaacataggaacagggagctccagcgcttgtggattatatagaataataaaggtggctgtccgcacagtatagcaaactgcgaagcctgcaactactgaagtttggtctgtagcaggctcagttgggaatgtgtagcagagtatggatggtcatgatccatggtgtggatgagttgcagagtactgtgctgtgctgtgtgtgtagtaggaaggaaaagcttaggtaaagctgccgcctgccgattgtgcagtcagtccagtacgttggtatgcgaccatctcaagtctgggctttgatttgaagcaatgatttttggc

SEQ ID NO: 264885 - DNA, 870 bp, Zea mays
cccctcctcctcctcctcaccaaggcaccaacacaacaccactccaccgccgttcgaatattccaagcttgagattggaggaggaggggaggggaggggagccgagcgcagaaccctaattacctccatcgattgctaacagctcagatctcagaggcaggggaggtaaaatgccaagagcaaatgagatgttcagggcagattctagaatgatggtggtttttggtgccttgacatcgaaaccagagcagctgacattcgaagaaaccctcagatttgtcaagaaagtgaaggcccgcgattacatgctatacctgtcattgttcgacgttctcggcagaacggaattaccccagctcgacgcctaccgagagttacagcagatgtttcaaaaccacccagatctgcgcgaagagctcgagaggttcagaccgccgccgccgccggtgcctaccacaaagcaggcagcaaacaacaacatctggccctgggtcatcgtctgcgctgctgtcccgttggtcgcagccagcctgctcccgtcactttgaaacccagtgctgtggcttgctcaacacactgttggcgaaaaaatggccgtctgatcgaagaaccgctgcatgcagtacatacattacatgtgcagtggaccgaaccggcctcctgttatcacaactgaatcacagtattgtctgtgtatatatattagagtagtgttctggaagggaacctgcgttcttggtcatcaggtaccactgggcaagaaatgtagtcggtacttgctggcggcgcggtgcaacggtttggccatttgggttgggctttaactgctaaaaatcaagcttgcattgtttgaatctccttttggcagct

SEQ ID NO: 264886 - DNA, 649 bp, Zea mays
tgcttgagattgcaagaggaggggaggggagccgagcgctcagctctaattttgtccatctattgctaacaggcgtggttggtgcttctgttatagtgtttggtgttgtggttggcatgaactgaagttccactctaatctgttaactctggccaatcatataaaaaaacgttggttacaagccaaatgacacttcctggtagatgctgattttctattgacaagatcagagcagctcagacctcagaggcaagggaggtacaatgccaagagcaaatgagatgttgagggcagattcaagaatgatggtggtctttggtgccttgacatcgaaaccagagcaactgacatttgaagaatccctcatatttgtcaagaaagttaaagcccgtgactacatgctgtacctgtcattattcgacgttctcggcagaacggaattaccccagctcgacgcctaccgagagatctgcgcgaagagctcgagaggttcagaccgccgccgccgccggtgcctaccacagagcaggcagcaaacaacaacatctggccctgggtcatcgtctgcgctgctgtcccgttggtcgcagccagcctgctcccgtcactttgaaacccattgcttggcgtgctcaacacactgttggcg

SEQ ID NO: 264887 - DNA, 362 bp, Zea mays
gaatatcctagcttgagattgcaagaggtctccaagaggagggtaggggagccgagcgctcagctctgattggctccatctattgctaacagctctggccaatcatataaaaaaacgttggttacaagccaaatggcacttcctggtagctgctgattttctatcgacaagatcagagctcagacctcaggcaagggaggtacaatgccaagagcaaatgagatgttgagggcagattcaagaatgatggtggtctttggtgccttgtcatcgaaaccagagcaactgacatttgaagaatccctcatatttgtcaagaaagttaaagcccgggactacatgctgtacctgtcattattcga

SEQ ID NO: 264888 - DNA, 1486 bp, Zea mays
tggttccgtggacacggtccacatcaagatgctgagccaataactccggtgggtgtgggtccaacgcccccacctgcacgctggccccccgccccgccgcgggatcaaatacgccgcctccgcccgtccactccctcgccgcccccgtctcctctcctctcctctcccccgcatccacggccgcaggcagcagccagccactcgacgatctagtcgtctctctctccccgctctgccgcctcgctgccgcggcttcccgtcggcgggaggatgaaggtcacggtcgtgtcccggagcggccgggaggtcgtcaagggcggcatcgacctcaaggactcggccaaggtcgcggacctgcaggaggccatccatgccaggactaagaagtattatccttctaggcagcggctcaccctcccccttcaacctggaaaaggcgggaagccagttgtcctcagtccgaaggccagcctgctagaatactgcgagaagggttctgggtcactgacagtggtcttcaaagatttagggccacaggtctactacagcacactgttcttcttcgagtacctgggtcctctcatcatctaccccatgttctactatctgcccgtctacaagtacttcgggcacgagggggagcgggccatgcaccctgtccagacctacgcaatgtactactggtgcttccactacttcaagcggatcatggagacgttcttcgtgcaccgcttcagccacgcgacgtcgccgctctcgaacgtcttcaggaactgtgcctactactggaccttcggcgcttacattgcttactactgcaaccacccgctgtacaccccagtgagtgatctgcagatgaagattgggtttggttttggggtcgtctgccaggtcgcgaacttctactgccacatcctgctgcggaacctcaggagcccaagcggcagcggcgggtaccagatcccccgcggtttcttgttcaacatcgtgacctgcgccaattacaccaccgagatctatcagtgggtcggcttcaacatcgccacgcagaccgtggcaggttacgtcttccttgtcgtggcggcaggcatcatgaccaactgggcgctcggcaagcacagccgtctgaagaagctgtttgacggcaaggatgggaggcccaagtaccctcgccggtgggtgattctccctccgttcctgtgaagaggcggtggtggtggctcactgttggtggtcggcccattgtgattcgatgtctacagacagttgtactgtactaatcgtgcctgtttagcggttgaacttggattccgttgtccgaagtttctaatccgaaagatggatttcattttcttcttcttcttcttagcattatgtcactgtctcacgtcgtcctgtctcaatacagtctaaggttcatgtgatgttatccccatttgtccacgcctaagtgaagtgaatgcagtcactatttcgattcgcccct

SEQ ID NO: 264889 - DNA, 781 bp, Zea mays
  unsure (1)..(781): unsure at all n locations
ccggnccggaattcccgggtcggcccaacgccttccggagaacgtttttcgggcaccgtttaagccacgcgacgtcgccgttctcgaacgtcttcgggaactgtgcctactactggaccttcggcgcttacattgcttactactgcaaccacccgctgtacaccccagtgagtgatctgcagatgaagattgggtttggttttggggtcgtctgccaggtcgcgaacttctactgccacatcctgctgcggaacctcaggagcccaagcggcagcggcgggtaccagatcccccgcggtttcttgttcaacatcgtgacctgcgccaattacaccaccgagatctatcagtgggtcggcttcaacatcgccacgcagaccgtggcaggttacgtcttccttgtcgtggcggcaggcatcatgaccaactgggcgctcggcaagcacagccgtctgaagaagctgtttgacggcaaggatgggaggcccaagtaccctcgccggtgggtgattctccctccgttcctgtgaaaaggtggtggtggtcggcctattgtgattcgatgtctacagacagttgtactgtactaatcgtgcctgtttagcggttgaacttggattccgttgtccgaaatttctaatccgaaagatggatttcattgtcttcttcttcttagcattatgtcactatctcacgtcgtcctgtctcaatacagtctaaggttcatgtgatgttatccccatttgtccacgcacaagtgaatgcagtccctatttcgatc

SEQ ID NO: 264890 - DNA, 420 bp, Zea mays
gaccacgcgtccgtgcacgcgtccacttcgccaacatgattcgcgccgccgcgacgtcctccatctccatggcacagcagccactgccactgccagcagcctaccacgcgctcgagggctcgagcccggcgttctgctacaccaccacgcccccagctcccggcaccgccgcgcggctgggcgttgctgcgtcggacgccaaagccttcgaaatggctcctccttcgtcggcggccaccgtgaaccacgccggcaccgcggagcggcggccactcgaaggacctgctgatgagaacgcgagtccccagatggcggggaggagcttgtgggaagagggcgatgatgatctgcagagcctagtcctgatgggattccggaggcgacacgtgatcattggcggcccgatctgattggcggacg

SEQ ID NO: 264891 - DNA, 599 bp, Zea mays
cggctcgagcagaaggaaggtggacatggtcatggctggcctcatggttggggtgctctccaagaccagccgcttcaacgagctcatcgagctgctcaaggaaatgaacggcacaaagctggaccggaggctgtacatgagtgtcctgagaagcctccgcgatgccgggctggaggttcatgtgaagtggctccagagtaacttcaccttcatggaagagaaaacttgatgccaggtgcaggtacttgttcctgtgcacgcatattcagcacccaagtatatcgggcgcctgaagaaaaccttgctctgtacatggaaaccgaaaaaaaaggtaaatatttgcttgcctcagtgctccattccgaagcttgtacgctattgctgcacaattccggcattcattggctcaagtgaatagcgatgtaaatgtattttaagggaagccaactttgtaccagtaacgatctgattccgaaattatcgaacagattgccaagttcagtaactctgcatgtaagatttgctgaaactgttgtaccatagccactatgggcaattgtaactttgtatctataatgaaaaaaaatcatattattttg

SEQ ID NO: 264892 - DNA, 967 bp, Zea mays
cccagagatactgatttgaattgtataggcgactgggttgtcgagtcagttgtcaagaagaagcttaacgtccttagtgtccatttgacaagctcaaagtcattggtcggtatcacaggggttatatcagagattcatcaggaaaggaagggccgagatgtatatatactgggttccgcaaatgttggaaaatctgcatttatcagtgcaatgctaagaacaatggcgtacaaggacccggtggcagcggcagctcaaaaatacaagccaatacagtctgctgttcctggaacaacccttggccctattcaaattgaagcatttttaagcggagggaaattgtatgatacacctggagtccaccttcaccataggcaggcagcagttatccatgctgatgatctgccttctcttgcaccacaaagtcgtttgaaagggcgatgttttccgatgttgaattgagcgggaattcattattctgggccgggctagtccgcattgatgttgtcaaggctcttccacgttcacggctgacattctatgggcccaagaagctaaagattaatatggtcccgacaacagaagctgatcaattttacgagactgaagttggggtcacattgactccgccaactggtaaggagagagctgaaggatggacagggcttcaaggggttcgcgagttgaagataaaatatgaggaacgtgacaggcctgcctgtgacatcgcgatctctgggcttgggtggatttctgtggagccatcaggtgtgccttcaaacagcgccgatgaccacgctgaggaagtttatgatggcggtgagctgcatctggtggtacatgtgcccaaaccggttgaggtcttcatgcgtcctccattacctgtcggcaaagcagcgtcgcaatggtaccggtatcaagagctgacagaggaagaagaggagctgaagcctaaatggcattactg

SEQ ID NO: 264893 - DNA, 1901 bp, Zea mays
ttctttcgcgtccgtccagagcaaaaaaaatatattatcgaatactaaagcattttcctcatcgatagaatatagaattttaaaaagggagcgaaataggttttttcctttttgcagctccgtcgtccaccaacctcctccgatccggccgctgcagcgtagccgaattgtcccctcgctagcttctccggccggctagaggctgtttcaggcggcctcgatctcctccgcgcggctgaggaaggagatcacgcggttgctcaggggctggggcgtgcatgatgggattttggttgattccgatggagactccggcgaggcttctgtggagcacgagcttcttccgccacaagatcgccgccatgctcgcctcctcctcctgcttcttatagatcccaccccctcgccgtcgtcgtcggcacggcagctagctcgctagcttctgtacataggtcgacgcgccatatagatactagtctcggattaagcgataattaaggcaaagaatctccaagtttgcttcgctcttgcattgaaccatggagtctggacggctcatcttcaacgcgccgggctctggcgccgggcagatgctcttcctcgactgcggcgcaggcggcggtcccggcggcggcttgttccatcgaggcgggagaccgatgcttggccttgaagaagggcgcggcgtaaaacggcccttcttcacctcgcccgacgagctcctcgaggaagagtactacgacgagcagctgccggagaagaagcgccgcctcaccccagagcaggtgcttctgctggagaggagcttcgaggaggagaacaagctggagccggagcgcaagacggagctggcgcgcaagctgggcctgcagcctcgccaggtggccgtctggttccagaaccgccgcgcccggtggaagaccaagcagctcgagcgcgacttcgaccgcctcaaggcctccttcgacgctctccgagcggaccacgacgccctcctccaggacaacaaccgcctccgctcacaggttgtgtcgttgaccgagaagctgcaagagaaggaggatgcgacggagggcggcgccaccgctgacaccgccgcgccggcggtggacgtcgaggcttccctggccgacgacgtcgaggagccagcagagcctgcggcgacgttcgaggtgctgcaggaggtgaagtccgaggacaggctgagcaccggcagcggcgggagcgcggtggtggacgcggacgcgctgctgtacggcaggttcgccgcggcagttgatagcagcgtggagtcgtacttccccggcggcgaggaccactaccacgactgcgggacgatgggccccgtgaatcatggcgccggaggaggcatccagtcggacgacgacggcgccggcagcgacgaggggtgcagctactacgccgacgaagccgccgccgccgccgccgcgcgttcttcgccggacacgccacccaccaccacgcggacgaggacgaggacgccggccagatcagctggtggatgtggaactagacgttcgatcttcccacgccgatcgatcgaccgtcttcgaatcctgtgtcaacaagaagaaaaaagaatcgtgccgtgatttttctttgcgcaacgctgctgtaagcctgtaatggtgaatttctagctatggttatgccgttatgaaggaagaaagtgtatgcatgcatggtagggtaaagagtgggtaattaatatcgttgatcatcccagtcactcgtggtgttccagaagatcaatggagttgggggagaaataagtgcgcatagaggcaagtactactctttttatggcacagtgcctatgtcaaatcagggtgttattaccagctggtttttttttaaaaaaaaatactgtactattacgc

SEQ ID NO: 264894 - DNA, 766 bp, Zea mays
tgcccttcgcgcggaccacgacgcccttctccaggacaaccaccgcctccgctcacaggtggtgtcgttgaccgagaagctgcgagagaaggaggcgacggagggcgacgccaacggcgccgcggcggcgttgccggcggtgggcgttgtcagggcttccgtggccgatgacgtcgaggaaccggagccggagccggagccggaggcagaggcggcggcgttcgaggagcggcaggtgaagtccgaggacaggctgagcacgggcagcggcgggagcgcggtggtggacgcggcggacgcgctgttgtacaacggcaggatcggcggcgcggccgtcgatagcagcgtcgagtcgtacttccccggcgccgaggtccaggaccagtaccacggctgcgggacgatgggtccagtaacccacggcgctggaggcatccagtcggacgacgacgacggcgccggcagcgacgagggatgcagctactacgccgacgaagaagccgccgccgcgttcctctccgaacacacccaccacgcggacggcgacgacgaggacgccggccaggtcagctggtggtggatgtggaactagcagagcaatcttcccgcggggaccgaccgccaaatctcgtgccaaaaaaaaattactgtatgcattttcgcatgtgtaatagctgtgagtgaaagtgaaaccgatagcgcgttctgtccgaattttttgtttttttagctccttttgccataaaaatttacgtttagaccccag

SEQ ID NO: 264895 - DNA, 908 bp, Zea mays
ccaaaccttctggcttctgcactgctctcctccacccctcaacgaagcctctggtgcctcggccaccgcagcagcctggccctgccccggcccccgggcgtggtgtcaggtctcaggtgtggtggcgctttctcctctccggcacggtggccgcgtcatcccagctctcccgcgcggcggcggcggccgtttcctctcctgcgctcctcctgccgcacacagccagaaaattgcagctgaagtttgtttgaggataggcgacagctttgcgagtccttcgtgttgaaggagaaattgtagctgaagtgaaaaaacagcagggaacaatggcactatcacgaagtatgagagcatgtttgcacagtggaagacttgcacttcttgccatattggtctctggtggaattgtattgcaaatcttggcttgtgctctctataacaactggtggccaatgctaacagttctcatgtatcttatcctaccaatgcccctcatatttttcctgggttctgatacttcctccatgatgtccaatgggggagacggctgggtgaacttcacgaaattcttgacgggcgcatcaatagtagggagcatcgccattccgtcgatcctgaagcatgcgggcgtcattggatggggagccctgacgatggagctgtcatcctttgtggtctttggcgtggcaatcctgtggttcctccagatgaacggtgaagacgagtacagcggagtgttctaatccaaacctgctgctgctggttctcttgccagcgtggcactctgtgcatggtagttgtgaactgggctgtactgctacaacaggggaagcattgccctgggacctgatttactgacaccagtacatgtttggtctgcataaaaaaaaaaaaaaaaaaaagggcgg

SEQ ID NO: 264896 - DNA, 1185 bp, Zea mays
tagcattccgtttcctcgctcgaacacacaccgaagagagagacagagcgagagaggatggcgtccctggcgcagcacgtcgcgggcctaccgtgcccccctctatccggcgcgtcgcgccgtcgccccgcggcgcagaggcggcctccgtcggcgcttgtgtgcggtacctatgcgctgaccaaggacgagcgggagcgggagcggatgcgccaggtgttcgacgacgcctccgagcgctgccgcaccgcgcccatggagggcgtcgcttctcccccgacgacctcgacaccgccgtcgagtccaccgacatagacacggagatcggctcgctcattaaaggaacagtatttatgactacctcaaatggtgcatatatcgacatgcaatccaagtctactgcttttttgcccttagatgaggcatgtcttcttgatatcgataatgttgaagaggctggcattcgtcctgggttagtagaagaattcatgataattgatgagaacccaggtgatgaaactttgattctaagtttgcaagcaattcagcaagaacttgcatgggaaaggtgccggcaacttcaggccgaagatgtcgttgtcacgggtaaagtaattggtggaaacaaaggaggtgtagtagctcttgtggatgggcttaagggtttcgttccattttcgcaagtgtcatcgaaaacaaccgccgaagagctgcttgagaaagaattgcctctgaagtttgtagaggtcgatgaggaacaaggcaggcttgtcctcagtaatcgcaaggcaatggcagatagtcaggcccagctaggtattggatcagttgtcttgggaactgttgagagcctaaaaccttatggcgccttcattgacatcggcggaatcaacggccttctccatgtgagccagattagtcatgaccgtgttgcagatatctcaacagttctgcaaccaggagataccctcaaggttatgatactgagccatgaccgtgaaagaggccgagtcagcctttccactaagaagcttgagccaacacctggtgacatgatccgcaatcccaagcttgtgtttgagaaggctgatgagatggctcagatattcaggcagcgaatagctcaagcagaggctatggctcgtgctgacatgttgagattccagccagagagtggattgaccc

SEQ ID NO: 264897 - DNA, 714 bp, Zea mays
gccgagatcacgccagtagagatgagggccacgtcgtcccccgtggctgccgccgtcctcgccgccccttcctccgccgccgccgtagtcgtaaagcctctgcctcgtggcgcagcgaatggcggcagcacgggcaggcgcgacgtgcttgccgggaccgggctgggcgcggcgctgctgctggcgctggggcccgtgtgcggcgcggcgcgtgcggcggacgaggaatacgtgagcgagacgaaggaggtgatcgggaaggtgcggtcgacgatcgggctggacaagtcggacccgagcgtggccgacgcggtggcggagctccgggacctgtccaactcgtgggtggccaagtaccggcgggagaagtcgctgctggggcgtccgtcgttccgggagatgtactcggcgctcaacgccgtgtcgggccactacatcagcttcggccccacggcgcccatcccggccaagcgccgcgcccgcatcctcgaggagatggacaccgccgagaaggcgctccaacggggcaggtaggccaaatcccagcgaagctggcccgttgcaggaacgcgagtgcccagctcggcgacaacgctaccattttgtttttgtaactactgcgatgcattcgtcgtcgttgttttcgcggctgggagcgtgtgttgtgactgtggagtaaaaagttaccgagcttttgagctgagtttgcgactt

SEQ ID NO: 264898 - DNA, 728 bp, Zea mays
gccgaccccacgccagtagagatgagggccacatcgtccccagtgcccgccgccgtcctcgtcgccccctcctccgccgccgtagcagtgaaacctcgtgccgcagcgagtggcggcggaggcagcacagcaggcaggcgcgacgtgcttgccgccggtaccgggctgggcgcggcgctgctgctggcgctggggccggcgcgcgcggcggacgaggagtacgtgagcgagacgaaggaggtgatcgggaaggtgcggtcgacgatcgggctggacaagtcggacccgagcgtggccgacgcggtggcggagctccgggacctgtccaactcgtgggtggccaagtaccggcgggagaagtcgctgctggggcgtccgtcgttccgggagatgtactcggcgctcaacgccgtgtcgggccactacatcaggttggcccccacggcgcccatcccggccaagcgccgcgcccgcatcctcgaggagatggacccccccgaggaggcgctccatcggggcaggtaggcccaatcccacctaagctggcccgttgcaggaacgcgagtgcccagctcggcgacaacgcgaccattttgtttttgtaaccactgcgatgcattggtcgtcgtacgtgatgcgagctgtgttttctcggctgggagcgtgtgttgtgactgtggagtaaccagttaccgagctttccagcccagtttgcgactttcggtcac

SEQ ID NO: 264899 - DNA, 289 bp, Zea mays
cgcgccgcgcgcgcatcctcgaggagatggacaccgccgagaaggcagccctccgcggcaggtaggccaaatcccagcgaacccggccatggcgatcgccgtcgccgtggtggcaggaacgcagctctcagcgacaacgctaccattttgtaactactgcggtgtagtatatatatgcatgcattcgtacgtgatgcgagctgtgttttcggtccgatgggagcgcgtcctgtgactgtgactggagtaaaaatttaccgagcttctggagagtatcacattgtgtatc

SEQ ID NO: 264900 - DNA, 1683 bp, Zea mays
gttagtcgtagtcagataaccaaacaccccaggctgcatgttcaccattttcgccccaaatctgccgaggggattagccgatcgaagcgtcatcggcggctgcggcaatggcggggctgtcgctgcggtgcggcgactgcggcgcgcagctgcggagtgtggaggaggcgcaggcgcacgctgagtccaccaaccacgccaacttcgtcgagtccactgaggccgtcctcaaccttgtctgctccaactgcggcaagccatgccgctcccataccgaggtggacctgcacacgaagcgcacgggccatacggagttcgcggacaagaccgcggaggcagccaaacccatcgatctcgaggcgccgcttaagccggcctccgaggatgccacggacgtcgacgcgtcggcctcggcgactgaggagacacaagagatggttgtcccggaggtgaacaaggaggtgctcacggaccttgagggcatgggtttctcgacagcgcgcgccaccagggcgcttcacttctccggtaatagcaccattgaaggtgctattaactggctttctgagcaccaagaggacatagatattgatgagatgcctctggtaccagccaactcaaaaacggaggataacaagcccagcctgactcctgaggaaatgaagattaaagcacaggagctaagggatcgtgctcgtaaaaagaaagaggaagatgagagaagaatggaaagagaaagggagaaggaaagagtacgaatcggaaaagaacttcttgaagccaaaagaattgaggaacaaaatgaaaggaaacgcatgatagaattgcgaagacttgagaaagaggaggagaaaagagctagagaaaaaatccgccagaaattagaagaagataaggctgaaaggagaaggaaactaggattgccaccagaagacccagcagctgccaaaccaagtgcaccacctcctgttgaagagaagaagagtgcattacctgtcaggccagccacaaaggcagagaggatgagggactgtctaagaaatctgaagcaacagaataaggatgatgatgccaaagtgaagagggcattccaaacactgcttacttacattggaaacgttgctaaaaatcctgacgaggagaaatttagaaagatcaggctgacgaatgcaacatttcaggagagggttggaaatctgcatgggggcatagagttcctggagctctgcggatttgagaaacttgaaggcgacgagttcttgtttttggcaagggaaaaagtcgacagtgctatcctgaacacagctggagccgagctgaattctgccatcaccaatcctttcttcggagtcctttgaatcgtaaaaggctacaatgtatactcaaaactctcgggttctcctttgcttgacatcaattgggcgccaactgtagatttccaagtctgtggtcagtctcagattccatgaattattatcagaccggattccgtacattgctgaggcaatctttgaagcaacttgctgcgcatatatgcttgggatctttccgatctcatcgcttcgctgaccttgatgcattttacaatgttctagcaccaaaaataagtgatgtactctgatgtatgcgttttaccacgccttcacttgttaatgaccccccgatcatctttaattatagatt

SEQ ID NO: 264901 - DNA, 297 bp, Zea mays
agggaacgagtacttgtttttggcaagggaaaaagtcgacaaggctatcctgaacacagctggagccgagctgaattctgccatcaccaatcctttctttggggtcctttgagtcgtaaaaaaccagtacaatgtatactcaaaactcttggtttctcactttgtttgacatcaactgggcgccaactgtagatttgtaagtctgtggtcggtatctgatttcatgaattattattgttgcatacagactagtacttgcgtgcatcgctgaggcaatatatcttccattctgttttc

SEQ ID NO: 264902 - DNA, 1365 bp, Zea mays
tagtcgacccacgctttcggtgagccaccccgttactttttgacgcgcggtgagtctcagtcgagtaaagtggacgccaagtcagtcacgctcacaccaccgtagcacacaccagtacaccacacactcgcctttccgatcccatccctctccagccaccttcctccgctcgccgtgcttctgcttcctccgccaccaccgccggcatggctgcgcgctgcccctacttcgccgtcgaggagtcctcccgcggcatccgctcgggggagtccccggccgcggcgctccgccggatcctcgcgacgcctggtgcgcaccaggcgccctgctgctacgacgcgctcggcgcgcgcctcgtcgagcgcgcggggtttccgatcgggttcatgggcggtttctgtgtttctgccgcgcgacttggcttgcctgatgttggcctcatttcctatggagaaatggtagatcaagggcgtctcatcaatgaagctgtttcaatcccagtgattggtgatggagacaatggttacggaaactctatgaatatcaagagaaccataaaaggatatatcaatgctggttttgctggaattatgcttgaggatcaggtggcacctaaagcatgtggacatactgaaggaaggaaagtcatatcaagggaggaagctgtcatgcacataaaagctgctgtagatgctaggaaagagagtggctctgacattgttattgtagcaaggacagattctcgccaagctatttctcatgatgaagcattatggagggtgaaagcatttgctgatgctggagcagatgttctatttattgatgcccttgcttcagtagaagagatgaaagcattttgtgcggttgcaccagaagttccaaagatggcaaacatgttagaaggtggtggtaaaactcccatattgagccctgctgaacttgaggaaattggtttcaggcttgtagtatatcctttatccttagttggggtatcaatgcgtgcaatgcaggatgctctagttgcgataaaagacggcggtgtacctccacctagcgtcctgccatcttttcaggagatcaaggatacattgggtttcaaccgctattataaagaagagaaacaataccaagtggacaagtgaaggaagcagctgaagtctgatcctgtggattcagtcggatcgtggccatggcttaatttccaccggacatgctgggcttccaccggacatgatgcagaccaatcgtatttatgttgagttgtaatcgaacgctgcgtacgcagtatcccgaagaacatatatatggggtcttctcttccgtttctgctctgctgtggtttcaataatcccgaaactgtgattc

SEQ ID NO: 264903 - DNA, 555 bp, Zea mays
  unsure (1)..(555): unsure at all n locations
tacacgactctatagtgaatcgtgttatggaacgactcccataatgattgctacagaacttcctgcaattggattcaggcgtgacttacgatcattccctctactgtggggtatcactacgttcattgcaggatactccaccatccaaatttaaccagtagcgatacgtcagctatctgcgtgcaatcatatcacgatatctatgttagattgcgattcaactcctatgttccagtaccaaaataatatctactgtaatgtgaacagcataccatgttgtcagtctctgtggattcagtcggatcgtggccatggcttaatttccaccgcacatgctgggcttccaccggacattatgcagacccaccgtatttatgttgagttgtaaccgaccggtgcgtagcgcagtatcccgaacaacatatacacaaggtattctgtacggagtaggccctgctgtggtagcaataagcccgaaattgtgattccagtttaatataacaggccagcttgatggggctttcgttttaaaaaaaaaaaaaaaaaaaaaannaa

SEQ ID NO: 264904 - DNA, 1141 bp, Zea mays
ccggccgacccacgctcacagtaagaatgaggccatacccgattcaggacacccaaacaacgttccagttcaggcaaccgatttatacggtcacctaaggaaaaaattctctaagacaacatttcccactgaccacaagattccggcatgtaacggttgaggaaacggcggcggtgccttccggggccaagcagatccctgcagctggttccaagtaccagaattttacgcgcctagatgatgatgtccaggttgattggaggcagcagggtgctgtcactcctgtcaagaaccaaggccaatgtggctgttgctgggcgttctctgcagtaggtgccatggaaggtttgatcatgataacgacaggaaacctggtctccctgtcggagcagcagattctagactgcgacgagtcagacgggaaccagggctgcaacggtggctacatggacaacgccttccagtacgtcatcaacaatggcggcgtcaccactgaggacgcctacccttactctgcagtccaagggacgtgccaaaacgtccagccagccgccaccatcagcggcttccaggacctgcccagcggcgacgagaacgcgctcgccaacgcagtcgccaaccagccggtgtctgttggcgtcgacggcggatcgagtcctttccagttttaccagggtggcatatacgacggggatggctgtggcacggacatgaaccatgcagtgacggcgatcggctacggcgccgatgaccagggaacccagtactggatcctcaagaactcctggggcacaggatggggtgagaacggtttcatgcagctacagatgggcgtcggcgcctgtggtatctccacgatggcctcctacccaactccatgaacacaaatcttcagataaagcgtagtatataccagtccatgcatatgactgcagaataaagcatggaagattaattacatgcgtgcatcaaggcatgctacgtactgtattaaaacttcggtactggccagatatatacacaaaggtagaatgtttgtgtgataatatagtaatgcttgtacgaatgcaatgaacatgacctttcaataataaataagattaggctaaaaaaaaaaaaaaaaaaaaaaacccacggtccg

SEQ ID NO: 264905 - DNA, 606 bp, Zea mays
cgggtcgccgcacgcgtccgccaacacgtccgcccacgcgtccgggtacgcaaggcacagcccaagaccaccgcaccgcacctgcacaccgccagggatggcggcaaccgcgcacctcaccggtgtcctcggcgtgtcgtcgccgcctctcgctccgtcccactgcagctgcagcggcgccaagaagcagagctgctctctgcgtcaggggcggcagcagaggaggcgcctccgcgtcgcccgcgccgtcgaggtggacgcgccttccgccggcgcaccggagccggaggaggcggaggagccgtccgtcgacttcgctttcgtcagcccgcggctgctgccggacgggacgccggacgtgcactaccggacggcgcgcggcgggcagaagctcacggacatcatgctcgacggctacatcgacctctacgggccctacgataacgttcttctcaactgctcacgaggcggcgtgtgcggcacctgcatcgtcgaggtggttgaacgcaaggaaatgctgtccccgaaaactgatgttgaaaaggagttgctcaaaaggaaacccaaaacgtggagattggcgtgccaagcaacggtgggcaacgc

SEQ ID NO: 264906 - DNA, 1522 bp, Zea mays
tttcgctctcaatcgtcgtcgcctcgggctctcggcagacagctgcggcggcgtgcctggcagtgaagcggtagcaggtagagccagccagtctagcttagccaccacactagtgtgatggcgaccaccggcggcggcaaggcggcactggtgctggggcggcttctgcttctgctgtgcgtgctcggccatggagctgcgcagcggtacaacgccatctggagcttcggcgactccatctccgacaccggcaacctctgcgtggggggcgggtgcccttcctggctcaccacggggcagccgccctacggggagaccttcttcggccgccccaccggacgctgctccgacggccgcgtcatcgtcgacttcctggccgagcactttgggctgcccctgctgccggcttcgaaagccggcggcgacttgaagaagggggcgaacatggcgatcatcggcgccaccaccatggactttgacttcttcaagtccatcggcctcagcgacaagatctggaacaacgggccgctggacacccaaatccagtggttcaggcagctgctcccctccgtgtgcgggaaggattgcaagaactacctgtccaagtccctgttcgtggtgggcgagttcggcggcaacgactacaacgcggcgctcttctcggggcggtccatggcggaggtgagagggtacgtgcccatggtggtgagcaagctcgtccgcggcctggaggcgatcgtgaggagcggagccgtggacgtggtggtgcccggggtgctcccgatcggctgcttccccatctacctcaccctctacggcacctccaacgccgccgactacgaccgcgacggctgcctccgcggctacaacggcctctcctcctaccacaacgcgctgctgccgcggagcactgtccggcctgcggaggacgtacccgcacgcccggatcatgtacgccgacttctacacccaggtcacccacatgatccgggcccctcacaacttcgggctcaagtacggcctcaaggtctgctgcggcgccggcgggcagggccagtacggctacaacaacaaggcgcggtgcggcatggccggggccagcgcctgcgccgacccgggcaactacctcatctgggacggcatccacctcaccgaggcggcctaccgctccattgccgacggctggctcaagggcccctactgcagccctcccatccagcactgatcgagctagctgggccgggggactgaatagctaattaagctagcagcatattattcatgagtgacatcatcgtgctttgtttgtttacggctaattgccatgtgcatcatcctagcgctctagcaggttcatcaatgatgggtttgctatttggtttgtcaattagttgttcaattggtgaggaaggggtagctggtgtttcggcggtgtggtgggaacagtgatgaataaacgtgtaatggactgtttacaattagctacgacgtacgtgaacaataagctcatatcacaaaaaga

SEQ ID NO: 264907 - DNA, 1141 bp, Zea mays
gtcaccgttgactggccagatgttgccggacgcgtcaagattcttgaggtccactcccgaggaaaggctttggcgaaagatgttgattttgataaaattgctagaaggacccctggtttcactggtgctgacctccaaaacctcatgaatgaggctgccatccttgctgctcgccgtgatcttaaggaaattagcaaggatgagatctctgatgctcttgagagaatcattgctggccctgagaagaaaaatgctgttgtttccgaggagaagaagaggctcgtcgcttaccatgaggctggccatgcccttgtcggcgccctcatgccagagtatgatccagtagccaagatttccatcatccctcgtggccaggctggtggactcacattctttgctccaagcgaagaaaggctagaatctggattgtacagcaggagctatcttgagaaccaaatggctgtagcccttggtggcagggttgctgaggaggtgatctttggccaagacaacgtgacaacaggagcttccaacgacttcatgcaagtgtcacgtgtcgcaaggcagatggtcgaaagatttggattcagtaagaagatcggccaagttgcgatcgggggaccgggtggaaaccctttcttggggcaacagatgtcaagccagaaggactactctatggcaacagcggatgttgtggacgccgaggtgagggaactcgtggagaaggcctactctagagcaaggcagataatcaccacgcacatcgacatcctccacaagctcgcccagctcctgatcgagaaggagaccgtggacggggaggaattcatgagcttgttcattgacggccaggccgagctgtttgtcgcttgagatgtcacaaggcttgcggtgcgtatgcttttcggtgttttgtgtcagagcgagcaatcacaaagcaatggagagcccagcttgtaggaaccacatcgatgtatagtagttgatacgcatgtactgactaatttgagcaagtaaaatgttactgctcacaattatagcacacggttcatctgtgaaaccaaatatgctcatctcgtgctaatgggctttattaggctatctccaacagatctactatgccttccggtaaattaatctt

SEQ ID NO: 264908 - DNA, 352 bp, Zea mays
cttgcggtgcgtatgcttttcggtgttttgtgtcagagcgagcaatcacaaagcaatggagagcccagcttgtaggaaccacatcgatgtatagtagttgatacgcatgtactgactaatttgagcaagtaaaatgttactgctcacaattatagcacacggttcatctgtgaaaacaaatatgctcatctaaaaaaaaaaaaaaaaaaaaaaaaaaaaaaaaaaaaaaaaaaaaaaaaaaaaaaaaaaaaaaaaaaaaaaaaaaaaaaaaataaaaaaaaaaaaaaaatcaaaaaaaagaaatacagaaaaaaaaaaagggggggcctcttttgatttaaaacctatatga

SEQ ID NO: 264909 - DNA, 1617 bp, Zea mays
  unsure (1)..(1617): unsure at all n locations
cccattcgtccgcccacgcgtccgatctctccccctctccccctctccctctcgtggccacgactgccgctgccgccctacgccaggtgtccaggtcatctccggcccattcgccggcgacgagcaccccactagatcgaccgagctatggacggcctgtggcatctgggggacgagctccgcgggcagcccaaggtggtggaggaccgccagtggtcgctcatgacgtccaagctggcagagatcaccaggtccaggggcgagaggacgaacgacctcgactacgccaggatgaacgccgcccccgacgccaagcagtggggcaaggcggcgtcctaccagcaccacgacgagggcaggatggaccaccacgtcggcctcagcctcaagatgaacgatctcaagatgaacgaggccgccgctgccgccgtcatgaagctccccttccgcggcgtgccctacaacgtcaacccgatgtaccccaaggggagcaacgccaacgccaatgtcaacgcgttcaagatgaatgtcggggtgaacaagtactccagcagcgcgaacgggaaagacgccggcgggaaaagcagtggcggtggcagcaacaacaacagcggcggcggaggcaacggcaatgggaccgccaacggcagttccgcggtcgacaagcgcttcaagacgttgccgacgagcgagatgctgccgaagaacgaagtccttggtgggtacatctttgtctgcaacaacgataccatgcaggaggacctcaagaggcagctttttggattgccagcaagatatcgtgattcagtccgggcaattactcctggcttgcctcttttcctctataactacaccactcaccagcttcatggggtatttgaggctgccagtttcggtgggtctaatatcgatcccactgcatgggaggataagaagtgtaaaggtgaatctagattcccagcgcaggtgaggatccgcgttaggaagctctgcaagccgttggaagaggattccttcaggccagttttgcaccactatgatggcccaaagtttcgccttgagctctccatcgcggagaccctgtccctgctagacctatgcgagaaggaaggcatctgagctgttggctgcctcgtgaggttctagtaaatatcaatcatccttgtatgttctgtggatggtggttggcaatgttgtttatttttcaagcgcaagctgctgccggtctcgttttccctgtcctggatggaagcaaagggacctggtactttgaaggccccccctcaaacataagctgtgagcctgtcagtgcacgtgtccgccgttgtcgtcaagaaccaaaccaaatcatgaaatcttgcgccgacggagagttggagcgtgtatgttttgctatctctatctacatgtctcagtagagtggatataccctggggtccccaaaagatgggggcctgtatgtaacactacgtgtaatggttaaggtgaatgtgccgtgaggccccccaaaagttggagtgtgtattttttgttgtcaccttgaaccgactttgcgtatgctttttttagtgctgctacaaaaaaaaaaaaaaaaaaaaaaaaaaaaaaaaaaannaa

SEQ ID NO: 264910 - DNA, 1600 bp, Zea mays
cccactcgtccgcccacgcgtccgctctccttccttccatccattcctccctgtctccgccctcttctgactcccgtaggccgtggtgccgccgccgactgctgggactgccctacaccaagtgcccaggtcatcttcgggccattcgccggcgacgagcaccaccaggtgtgccaggttgaccgagctatggacagcctgtggcatcttggggacgagctccgcgggcagcccaaggtggtggaggaccgccagtggtctctcatgacgtccaagctggcggagatcaccaggtccaagggcgagaggatgaacaccgtccctgacgccaagcagtgggacaagacgtcctaccagcttcacgacgacagcaggatgggccacatcggcctcatgaacctggatctcaagatgaacgaggctgccgccatgaagctccccttccgtggcatgccgtataacatgaaccagatgtacctcaaggggagcaatgccaattccaatgtcaatgcgttcaagatgaatgttggagtcaacaagtactccaatagtccaaacgggaaagacgccaatgggaaaaacaatggcggcagtggcggcaacaacaacaatgggagcgccaacggcacttctgtggctgacaagcgcttcaagacattgccgacgagtgagatgctaccgaggaatgaagtccttggtggatacatctttgtctgcaacaacgataccatgcaggaggatctcaagaggcagctttttggtttgccagcaagatatcgtgattcagtccgagcaatcactcctggcttgcctcttttcctctataactacacaacccaccagcttcatggggtatttgaggctgccagttttggtgggtccaatatcgatcctactgcatgggaggataagaagtgtaaaggtgaatctagattcccagcgcaggtgaggatctgcattaggaagctgtgcaagccgttggaagaggattccttcaggccagttttgcaccattatgatgggccaaagttccgccttgagctctccatcgcggagacattgtcactgctagacctatgcgggaaggaaggcatctgagctgtcgaggaggtggtggtggttgccttgtgagcttctagtaaataccaatcatctttgtatgttttgtggatggtggttggcaacgttgtttatttatgcgcaagctgctgctggtttcgggatggaaggaaagacctggtccctgaaacaagctgcggagagtgagcctgtcagtgtattgtgtctggcgtggtcaagaaccaaatcaatgttggaccgaccgactgagagtttggagtgtgtatgttttgctattactcttatctctagtagagtgtgggtatacctgggcagaatgtgtccccaaaagttgggggcctgtctgtgtactgtgtgcgatggacgccctaagtaaaaaaagggcaggtgatggtcgtgctccaggtttgtgttttgtactctgttgtaccttgaacctcctttgcgttttgcctaatcagagaatgaatgcaaaaaaaaaaaaaaaactgccagagtgttggctcctggttcatgttat

SEQ ID NO: 264911 - DNA, 363 bp, Zea mays
gccccccctcaaacataagctgtgagcctgtcagtgcacgtgtccgccgttgtcgtcaagaaccaaaacaaatcatgaaatcttgcgccgacggaaagagttggagcgtgtatgttttgctatctctatctacatgtctcagtagagtggatataccctggggtccccaaaagatgggggcctgtatgtaaccctacgtgtaatggttaaggtgaatgtgccgtgaggccccccaaaagttggagtgtgtattttttgttgtcaccttgaaccgacttggcgtatgcttttttttagtgctgctaccttctgcgctgtgtttggcttctggttcatgtttttgtaatataaggtggcttgcgc

SEQ ID NO: 264912 - DNA, 1319 bp, Zea mays
ggaaatgtctacagatgaagaatcggatggcgttgttatatgccatccgaatggtaacactgatggatgtgacgaagccattagtggcagtcacgatgatgatagcccagaaggccaggaaactagttccatcaaggaccctgatgtagaaggtgacacacaggaagacaagcgtgtaaatcaagattcactgaagttgattgatcaagagacgtctgctccccccaagtccccagcgaagtccgcgactgcgagttctggaccagagaagcctaaacgtgttgtcacccaaccattgtctctttctactcaacgaaggtcatctggagtaaatggtggtgtgaccaatccatcacccaataaggataaatctggtgataaaagtagcatctctccagcaagcatgacaaagaagtgtacgccgttggcacctaggaagactttgcagcctgagcaagcatttcaccctctggaagaggactcttgttctgtgacttcctcaactacaacatcatcaagagctggcagaactaagacaactgttcctgttgccccatcatttgtgtgtgctaaccgtgctgacaagaggaaggagttctacacaaaattagaggagaaacataaagctttggaagcagagaaggacgaggctgaggccaggaaaaaggaagagcaagacgttgctataaagcaactaaggaagtcattggtgattagagcgaaacccatgccaagcttctatcaagaaggccccccaccaaaggctgaacttaagaaggtgcctcctactcgtgccaaatcaccaaagtttacaagctcaaggagaaagagctgcaatgacacaccacagacacccgagggaaaaaacaccaacgcaacatctaccacccggccacatcgtcacagcatcggggcttctaaagatgccagcagagtacagtgctcgccgaagagcggcgtggcgaccaaaactagatctgtcaagcctgagctgaaggccctctgaagcgcatgcgtagcagccaagtgctgcgattgtctctgtacaaacagaatcgcctgactcttagccgtttccatttccatgcattttttttgttttgttttgttctatacccagcatctccaccaaaaagaaggctgtagggccaatgacgttgttcgcgatgctggaccttgtctccattttcgtcttgtactcgttaagaactctgttgctgctgggaccatgtgacattcattccatgtaaattacctggggatccctgtagggagctcgactggtgttttggtcttgtgaagtcctcaatgccttaact

SEQ ID NO: 264913 - DNA, 528 bp, Zea mays
gagctggcagaactaagacaactgatgatgatgttgtagtcgaggaagtcacagaacaagagtcctcgactacaacatcatcaagagctggcagaactaagacaactgttcctgttgccccatcatttgtgtgtgctaaccgtgctgacaagaggaaggagttctacacaaaattagaggagaaccataaagctttggaagcagagaaggacgaggctgaggccaggaaaaaggagttgcattcatgaaacatttgatccatctacatgcatatcaaccgccagatgagacgcaacatgttctaaagattgaggctcattctggtggcctaaatgatatagcagtctctcgaccaaataagcaaccttttgatgtcacctgggagatgataaactgattaagaaattatttacactcgaaggacacaaggtgactgtgtattctatatcccagtgtaatctttattctaaacaagatcgatgttattacaatgaatcagaattgctgaatcaagagtttgtataccct

SEQ ID NO: 264914 - DNA, 2293 bp, Zea mays
cggacgcgtggcggcgcgtctgcccacgcgtccgctccactccagcactgaacacttgattgattcagtgggtagctagctagctgaatcacaatggatcctaccaagttccgtccgtccagtagccacgacacgacggtgacgacgacgaacgctggcgctcctgtgtggaacgacaacgaggcgctgactgtggggcctcgcggtcccatcctgctggaggactaccacctgatcgagaaggtggcgcacttcgcgcgcgagcgcatcccggagcgcgtggtgcacgcgcgcggggcctccgccaagggcttcttcgagtgcacccacgacgtgacgtcgctgacgtgcgccgacttcctgcgcgcgcccggcgtgcggacgcccgtgatcgtgcgcttctcgacggtgatccacgagcgggggtccccggagacgatccgcgacccgcgcgggttcgccgtgaagttctacacccgcgagggcaactgggacctgctgggcaacaacttccccgtcttcttcatccgcgacggcatcaagttccccgacgtgatccacgcgttcaagcccaacccgcggtcgcacgtgcaggagtactggcgggtgttcgacttcctgtcgcacctccccgagagcctgcacaccttcttcttcctcttcgacgacgtgggcgtgccgtccgactaccgccacatggaagggttcggcgtgaacacgtacacgttcgtgagcgcggcggggaaggcgcagtacgtcaagttccactggaagccgacgtgcggcgtgcggtgcatcctgacggacgaggaggcggcgctggtcgggggacggaaccacagccacgcgacgcaggacctgtacgactccatcgcggcggggagcttcccggagtggacgctgtacgtgcaggtgatggacccggacacggaggagcagtacgacttcgacccgctggacgacaccaagacgtggccggaggacctgctgccgctccgccccgtggggaggctggtgctggacaggaacgtggacaacttcttcaacgagaacgagcagctggcgttcgggccggggctggtggtgccagggatctactactcggacgacaagatgctgcagtgccgggtgttcgcctacgccgacacgcagcgctacaggctgggaccaaactacctgatgctgcccgtcaacgcgccgcgctgcgcgcaccacaacaaccactacgacggcgccatgaacttcatgcaccgcgacgaggaggtggactactacccgtccaggcacgcgccgctgcggcaggcggcgccgcccacgccactgccgcccaggccggtcgcggggaggagggagaaggcaaccatacgcaagcccaacgacttcaagcagccaggggagaggtaccgctcctgggacgccgaccgacaggaccgattcgtgaggcgattcgccgactcgctcggacacccaaaggtcagccaggagctcaggtccatctggatagacctcctcgccaagtgcgacgcgtcgctggggatgaagattgccacccggctcaacatgaagccaaacatgtgatgcttctgctgaataataatgaagacacgcatgcatgtcgtcgtcaggaacaagagaaataatacaagaccagcacgcatgggcatactctatattatagatggccaaaaagcacgaggcccgtgagcccggcacgaagcccgctttttgggcccggtccgagcacggcacggtagaataagcgggcgggcttgaacaggaaactaggcacggcgggctagcccggcacggcctgtttacctctaagcccgttaaacccgtttttttttacactaaaacgtgcttaccggcccgtttagcccgcttttcggcccgttatttcgtgctaaacgggccggcccggcccgtttaggcccgctgcgggccgggcttggacagaaacttaagcccgctggctcagcaggcccggcccggttttggccgggcttcaccgggcccgggccgggccgggccggcccggcccgtttggccatctctactctatatatatgtatagcccgtgcccgtgtccgcatttgtaccaatacaagccaagcctagtcaagtggatgtgtattattgttgcgctatcacatacatgtacccctgctacctgaagatggatgtgtatcgagttatcaaattaaggcaccagcagcaaacgctatatatatattgcataataatactcgtctcgatatggacatgattcactcagctaatataaccctccaac

SEQ ID NO: 264915 - DNA, 1367 bp, Zea mays
aagtttcaccctattaatgacggcgccgcaatagtaatccaccttagtccaaaaggaccggttgattcacccaattggtcatcgcgcttggttgaaaagccattggcccgaagcttccgtgtgccggattatgactgaccgcctctaagtcagaatccaagctagcaaccggcgcctctgctcgccgcccgccccgacccacgttagggcgttcgcgccccaagggcccgtgccattggctcagcccgcccggccgacgcgccgcggcgggccgcctcgaagctcccttcccaacgggcggcgtgctgaatccttgcgacgcggggctggatctcagtggatcgtggcagcaaggccactctgccacttacaatgccccgtcgcgttttaaggccggacacggaggagcagtacgacttcgacccgctggacgacaccaagacgtggccggaggacctgctgccgctccgccccgtggggaggctggtgctggacaggaacgtggacaacttcttcaacgagaacgagcagctggcgttcggcccggggctggtggtgccagggatctactactcggacgacaagatgctgcagtgccgggtgttcgcctacgccgacacgcagcgctacaggctgggtcccaactacctgatgctggccgtcaacgcgccgcgctgcgcgcaccacaacaaccacggcgacggtgccatgaacttcatgcaccgaaactaggaggtgtactactacccgaacaggcacgcgcctttgccttaggcaaaaccaaccacgccactgtcggccaaacagttcacgggaaggaaggagaaggcaaccatacgcaagcccaacgacttcaagcagccaggggagaggtaccgctcctgggacgccgaccgacaggaccgattcgtgaggcgattcgccgactcgctcggacacccaaaggtcagccaggagctcaggtccatctggatagacctcctcgccaagtgcgacgcgtcgctggggatgaagattgccacccggctcaacatgaaggcaaacatgtgatgcttctgctgaatagaataataatgaagacgcatgcatgtcgtcgccaggaacaagagaaataatacaagaccaccacgcatgggcatactccatatatatatgtatagcccgtgcccgtgtccgcctttgtaccaatacaagccaagactagtggatgtattattattattattattgcgctatcacatacatgtacccctgctacctgaagatggatgtgtatcgagttatcaaattaagacacctgcagcaaaaaactatatatgttgcataaaaaaaaaaaaaaaaaaaaaaaaaaattaccttaactgctt

SEQ ID NO: 264916 - DNA, 762 bp, Zea mays
gcggcaatttctttctctcttttgttgtactgatatatatcatagacttattcccatcgatctcccaaccgaaaccaaccaagcaagcaaccaacccagtactacaatcgcgaaggttaaaaaagagacaaacaacgaatttaacaacccatcaacccaaggtaaacaaaaaagagagaaggggcagcagctgcagggaggaacggttgtacaagtacatggagctgaggagcgacaccaggcacgcgtcctgatttcttcagccgagcaaactaatcaagaaattaaaaggactggatacaccagtactacaccagcaggagcagcagcaactaaacaaggaaggaaggaatcacatctcaagacacgcgcacaccgcgtcccccgccacgagatcaccctgcgcgcgcattgcatgctaacgcaccggccggctacttggtgatggcccagacggcgtagatgatgccggggaggtagccgaagaaggtgaggataaggcagatccagaactcaaccccgcagccgaacttgaagaagaccccgagcggcggcaggataatggcgaggatgatgtcgatgcaggtcgccgtgccgtccgacatcttgcttttctatccgtgtgctctgtttagctagctccgtgtgcctcgctcgctcgctcgctcagccgatctaccgctgagaagtaaaatcagagagcctctggtatgggtatgggttggtggggtgcgtggtcggacgcgtgggcgaacgaatggg

SEQ ID NO: 264917 - DNA, 1449 bp, Zea mays
tcccgggccggccggtcgcgatctaggggaacaggcatggatgtgtaccagtaccatttcaaaccagtggcaggcagcggtgtcggcggcaaaaaatttcgaaacgagaggtgtctgcctatcacttgcgaagaaatcgcgaggggaagcgtgacacctgacgagctgagcaggcaggcggtagtggccgagcgaaagcatcctcgatctcgtcgtatcgtagctgccgccgctcagagcaatggagagagcggtgccagttcggaagtcgcacaccaacacggccgaccttctctcctggtcggccacgggccctgacgcatctgcctcgccggccgcgtcctcccgccccagcctcaagccggccgccgggattacgcctgcgatgttcggcgcgccggtcaccgagcaggaggccgaggatctgagcaagagtgaaaggaaattttgctccggatcaaagttgaaagagatgggtgggagtgggatttttgctgagaagagtgaaaatggtgatcagaggcttcaaatcctgctaacaagacttccttgaggatgtaccagcaaactgtgactggaataagccagatttcatttagcgctgatggaagtgtttcaccaaagaagccatcgtcgatacctgaggtggctaagcagcgagagcttagtggcaccctggaagatgctgatgctaaaatcaataagcagctttctgaagccaagaccaaggagcttagtgggagtgacatctttggtccgcctcctgagattccagcgaggccattggctgctcgtaacatggagctacaaggaaatgtcgatttttcacttccacagcgaagcgtccacacatcagttaaagtatctaatcctgccggaggtccaagcaacatctctttcagcgaagagcctgtagtgaagacagcaaagaaaatccacaaccagaagttccaggagctgacaggtaacaacatcttcaaggaggacgtccctgcctcggccgagaagtctctgagctctgcgaagctgaaggagatgagtggcagtgacatcttcgccgatggaacgccagctccccgagaatacctcggcggcatccggaagccccctggtggcgagagcagcatcgcgctgatctgattgtcctggactgctttaattcggaccggctgtagctcccctcgccactaaagctcgcagagagtgcatttctcgacctctcgattctccagtccgtgttgggatcataatttatgttgggtgtcgttagtctaatataatgtagagtcagcagaatctgactcgtatcgtctgatacgccggtgtgtgttctcgcatctgttattgttgcgacattattatgttatatatttgtacacccgaaccgaaacttacgcaataattatattttggacccattttcagggataaaaaaagaaaaaaaacaaa

SEQ ID NO: 264918 - DNA, 1815 bp, Zea mays
ggtgaccttgcgtacgtacgtcgtagcggctcgtccagctcgctcgccaccgccatggacccgtacaagcaccgcccgtcgagcgccttcaacgccccgtactggaccaccaactccggcgcccccgtgtggaacaacgacagctccctcaccgtcggcgcacgaggtcccatcctgctggaggactaccacctggtggagaagctagccaacttcgaccgcgagcgcatcccggagcgcgtggtgcacgcgcgtggcgccagcgccaagggcttcttcgaggtgacccacgacatcacccacctgacgtgcgccgacttcctgcgcgcgcccggggtgcagacgcccgtcatcgtccgcttctccacggtgatccacgagcgcgggagccccgagacgctgcgcgacccgcgcgggttcgccgtcaagttctacacccgggagggcaactgggacctggtgggcaacaacttccccgtcttcttcatccgcgacggcatcaagttcccggacatggtgcacgcgctcaagcccaacccgcggacgcacatccaggacaactggcgcatcctcgacttcttctcgcaccacccggagagcctgcacatgttctccttcctcttcgacgacgtcggcatccccgccgactaccgccacatggacggatccggggtgcacacgtacacgctcgtcagccgcgccggcaccgtcacctacgtcaagttccactggcgccccacctgcggcgtgcgctcgctgatggacgacgaggccgtcgccgttggcggcgccaaccacagccacgccaccaaggacctcacggacgccatcgcggcggggaacttccccgagtggacgctctacatccagaccatggaccccgagatggaagaccgcctcgacgacctggacccgctggacgtgaccaagacgtggcccgaggacgcgttcccgctgcagcccgtgggccgcctggtgctcaaccgcaacatcgacaacttcttcgcggagaacgagcagctggccttctgcccgggcctcatcgtccctggtatctactactccgacgacaagctgctgcagaccaggatcttctcctactccgacacgcagcgccaccgcctcggccccaactacctgctgctaccggccaacgcgcccaagtgcgcacaccacaacaaccactacgacggatccatgaacttcatgcaccgccacgaggaggtcgactacttcccctccaggtacgacgccgccaggaacgcgcccaggtaccccatcccgaccgcccacattgccggccgccgagagaagactgtgattagcaaggagaacaacttcaagcagcccggggagaggtaccgcgcgatggacccagcaaggcaagagcggttcatcaccagatgggtcgacgcgctctccgacccccgcctcacccacgagatcaggaccatctggctctccaactggtctcaggccgacaggtctctgggccagaagctcgcgagccgcctcagcgccaagccgagcatgtaagatctaccagacaagggcgccgcgcgggggaggacggacggagctctctgtctgctttcgctcatgcatcatatgcatggaaccaagacaaattactctagcagactagcacgcaaactgaatcgcgtttagtttagtttttttggccccggataaaggctgctagcttggttgtaataatggctggctgtgtccagaactcttgtagaagacagaactcgtccaatacaacatcgacactgcattcatggttaaaaaaaaaaaaaaaaaaaaaaagca

SEQ ID NO: 264919 - DNA, 928 bp, Zea mays
aatagaaaaaaagaaaaaagtagaaaagataaatataaaagagaaaaaataagaagaagaaataaaaatatataaaaatgaaaaaaaaagaaagtaagaaatataaaaatataatgaaaaaaaaatataaggataaaaaaggaaataaaaaaaaaatataaaaaagaaaaaaaaaaataagaaataaataaaaaaaaagagaaaaaatataaaaaagaaaagaataaaaaaagatataagaagaaaaatagaaagaataaacaataaaagagaaaaaaataaaaaaaaaaaaaaaataaaaaaaaaaaaaaaaaaaaaagaaaaaataaaaaagaatagaattaaagaaataaaaaaataaaaagaaatataaaaagataaataaatataaaataaaaaaaaagaaaaaaataataaaaaaaaaaaaagaacatataaaaaaaaaaaaaaaaataaaaaaagaaaaaaaaattagaaaaaaaaaaaataaaaaaatatttataagaaaaaagaaaaaaaaaataaaaaataaaaagaaaaaataaaatagagaattacataaaagaaaaaaaaataaaataaaaaaaatagaaaaacagaaaataaaacataatagaacaaaaaagaaacaaataatcacacaaaaggacaacacacatgattaaaaaaaccagtagagagaaactcacgtaaacagaaatataactgaacgcctcaaagtcagaatccaagctagcaaccggcgcctctgctcgccgaccgccccgacccacgttagggcgttcgcgccccaagggcccgtgccattggctcagccaacccagccaaggagccgcgccggcccgcctagaagctcctttcccaacggccggcgtgctgaatcatccagcggcgtggtcaaccggaaatccggaccgtacctgcaggc

SEQ ID NO: 264920 - DNA, 411 bp, Zea mays
tccgacccccgcctcacccacgagatcaggaccatctggctctccaactggtctcaggccgacaggtctctgggccagaagctcgcgagccgcctcagcgccaagccgagcatgtaagatcaaccagacaagggcgccgcgcgggggaggacggacggagctctctgtctctttcgctcatgcatctcatatgcatggaaccaagacaaattactctagcagactagcacgcatactgaatcgcgtttccgcctgatcctttccctagtttagttttttttcgccccggataaaggctgctagcttggttgtaataatggctggctgtgtccagaactcttccaaaacaacaacaaaaacaacatcgacactgcattcatggttaaaagaaactcaaaccaacactacaac

SEQ ID NO: 264921 - DNA, 781 bp, Zea mays
aaaaatataaaaaaaaaaagttaaagttaaaaaaaaacataaagaacatataaaaaaaaagtggaaataaaaataaaataaataaaaagataataaaaaaaaataaaaaaaaaattaaaaaaataaaaaaaataggagaattaaaaaagtaaaataaaaataaaaaataaaaaagaaaaatatgatatataaaaccaaaaatccaaaagtagaataagacaaagagaaaataagaaaaaagtttaatgtaaaaaaaagtggaaataaagaattggaattaaaaaaaaaaaggaataaagaaaaccatgtaaaggtataaatctgaaacgcttgtaagtcaagaaatccatagctagcaaaaggagactctgctgaccgcccgcaccgacccacgttagggcgttcgcgcaacaagggcccgtgccattggctcagcccgcccggccgacgcgcctcggcgggccgcctcgaagctcccttcccaacgggcggcgtgctgaatcccgcacgcgtggccggcaggcggacgcgccgcaggaagccctacaggtactcgtcatcgtgctccgcgagctcgccaaccacaggtacgtgtccatagggcggtccttctactcgccggacatcaggaagcagcagcggctcgcagacggcctgcagtcatggtgtgggttctaccagagcatccggccgacccagatgggattgtcactcaacatcgacatgtcgtccacggcgtttattgaacccctgccttcttgatcttgattcggttagcata

SEQ ID NO: 264922 - DNA, 445 bp, Zea mays
  unsure (1)..(445): unsure at all n locations
cgagttaaggagatgagcggcagtgacatcttcgccgatggaacaccagctccccgagaataccttggcggcatccggaagccccctggcggtgagagcagcatcgcactgatctgattgttctgggttgctctaattcgcactggctagcagcgccccctcgtcagtcgtcactgaagacgctcacagagtgcatttcttgacctcttggttctcgaatcgtgttgggggtcataatttatgttgggtgtcgttagtataatataatttggagtcagcagaatttgatccggttacctccgtatcatatgatacgggggtgtgtgatctaatctgtgattcatcctccattattatgttatgcccccccaactgagaacttatgcaacaattatagttgggctcgtttttnnannnattaaaaaaaaaaaaaaaaaaggcgcgg

SEQ ID NO: 264923 - DNA, 759 bp, Zea mays
ggactgatatatatcatagacttattcccatcgatctcccaaccgaaaccaaccaagcaagcaaccaacccagtactacaatcgcgaaggttaaaaaagagacaaacaacgaatttaacaacccatcaacccaaggtaaacaaaaaagagagaaggggcagcagctgcagggaggaacggttgtacaagtacatggagctgaggagcgacaccaggcacgcgtcctgatttcttcagccgagcaaactaatcaagaaattaaaaggactggatacaccagtactacaccagcaggagcagcagcaactaaacaaagaaggaaggaatcacatctcaagacacgcgcacaccacgtccccccacgagaccaccctgcgcttgcattgcatgctaacgcacgcgacggagtcacagctagctgcctggcactggcaggggaccgtggttcatctgctccggccggctacttggtgatggcccagacggcgtagatgatgccggggaggtagccgaggaaggtgaggataaggcagatccagaactcaaccccgcagccgaacttgaagaagaccccgagcggcggcaggatgatggcgaggatgatgtcgatgcaggtcgccgtgccgtccgacatcttgcttttctacccgtgtgctctgtttagctagctccgtgtgcctcgctcgctcgctcagccgatctaccgcggagaagtagaatcagaccaccccctggtataaataaagcttctggggtgcg

SEQ ID NO: 264924 - DNA, 580 bp, Zea mays
gagacaaacaacgagtgttaggaatccatcaatccaagggaaacaaaaaagagagaaggggcagcagctgcagggcggaatggttgtacaagtacatgcagctgagcagcaacaccagacacgcgtcctgatttcttcagccgagcaaactaatcaagatattaaaaggactggatacaccagcaggagcagcagcaactaaacaaagaaggaaggaatcacatctcaagacattgcatgctaacgcacgcgacggagtcattgcagggggccgtggttgctctgctccggccggctacttggtgatggcccagacggcgtagatgatgccggggaggtagccgaagaaggtgaggataaggcagatccagaactcaaccccgcagccgaacttgaagaagaccccgagcggcggcaggatgatggcgaggatgatgtcgatgcaggtcgccgtgccgtccgacatcttgcttttctacccgtgtgcctcgctcgctcgctcgctcagccgatctaccgctgagaagtaaaatcagagagcctctggtatgggtatgggttggtggggtgcgtggtggat

SEQ ID NO: 264925 - DNA, 645 bp, Zea mays
ttctatcatacgcaagcccaacgacttcaagcagccaggggagaggtaccgctcctgggacgccgaccgacaggaccgattcgtgaggcgattcgccgactcgctcggacacccaaaggtcagccaggagctcaggtccatctggatagacctcctcgccaaggtacgtggatggcatggcatggcagtggcacacgtgttttcgttccatctagctactcatgcatgatatatatacgattgctttgcatatgcagtgcgacgcgtcgctggggatgaagattgccacccggctcaacatgaaggcaaacatgtgatgcttctgctgaatagaataataatgaagacgcatgcatgtcgtcgccaggaacaagagaaataatacaagaccaccacgcatgcatgggcatactccatatatatatgtatagcccgtgcccgtgtccgcctttgtaccaatacaagccaagactagtggatgtattattattattattattgcgctatcacatacatgtacccctgctacctgaagatggatgtgtatcgagttatcaacttaagacacctgcagcaataaaaaaaaaaaaaagggcggccgcgggcgccccaaacccagggcagagtctcatggtgacggggaga

SEQ ID NO: 264926 - DNA, 726 bp, Zea mays
ttatcagactcgaagttgtcaaccctggcaccaatggattagacttacctgccaccatacataagctatggtcatcgcaagagcgctggcaggaattttgggagctcatgagtgtccgccctcatattatgttgctatccgattttttaatttttctgtagctagtattagttgtagtatttcttttttcggacgcgtgggcgcgacggggcattgtaagtggcagagtggccttgctgccacgatccactgagatccagccccgcgtcgcacggattcgtctgcaaaggattcagcacgcccgcccgtggggaagggagcttcgaggcggcccgccgcggcgcgtcggccgggcgggctgagccaatggcacgggcccttggggcgcgaacgccctaacgtggggacgtggtgtgcgcgtgtcttgagatgtgattccttccttctttgtttagttgctgctgctcctgctggtgtagtactggtgtatccagtccttttaatttcttgattagtttgctcggctgaagaaatcaggacgcgtgcctggtgtcgctcctcagctccatgtacttgtacaaccgttcctccctgcagctgctgccccttctctcttttttgtttaccttgggtgatgggttgcttaattacgtggttgtctctttttaaccttcgcgattgtagtactgggttggttgcttgcttgggtggtttcggtgggagatc

SEQ ID NO: 264927 - DNA, 639 bp, Zea mays
gttcttttctgtttttttttttttttttctctcttttttttttactgatagatatcatagacttattcccatcgatctcccaatccaacccaatactacaatcgcgaaggttaaaaaagagacaaacaacgaatttaacaatccatcaatccaaggtaaacaaaaaagagagaaggggcagcagctgcagggcggaatggttgtacaagtacatgcagctgagcagcaacaccagacacgcgtcctgatttcttcagccgagcaaactaatccagtgagtcaaaggactggatacaccagtactacaccagcaggagcagcagcaactaaacaaggaaggaaggaatcacatctcaagacacgcgcacaccgcgtcccctgccatagagtcacttcgcgcgcgcaatgcatgctaccgcgtctcggccgcatacttggtaatggcccagacgtgtgtacatagtgcccgaatggtacccgaggaaggtcagttacaggcagatccagacttcaatgtggcagcagacctgcattaaggctcgatcgtcgcgcagtataatggccatgcatcatgtcgatgcagcgtctccgtgcctgtcatacatcttgctgtacgacaggtgccatttgtgtatgcgc

SEQ ID NO: 264928 - DNA, 454 bp, Zea mays
gctccttcgcaacgggcggcgtgctgaatcctttgcagacgaatccgtgcgacgcggggctggatctcagtggatcgtaggcacaaggccactctgccacgtacaatgccccgtcgcgttcgagcacaataatggccggaggaggtgacgatgaactcaagctgctgggggcgtgggcgagcgcattcgtcctgcgggtgaagctcgcgctcagcttcaagggcctgagctacgaggacgtggaggaggacctctccggcggcaagagcgagctgctcctcgagtccaacccggtgcacaagaaggtgcccgtgctcctccacaacggcaagcctgtgtgcgagtcgcagatcatcgtgcagtacatcgacgaggccttcgccggcactggtggcccgtcccttctccctgccgacccgcaccagcgcgccgtggctcgcttctggggtgccta

SEQ ID NO: 264929 - DNA, 327 bp, Zea mays
agaatccaagctagcaaccggggcctttgctcgccgcccgccccgacccacgttagggcgttcgcgccccaagggcccgtgccattggctcagcccgcccggccgacgcgccgcggcgggccgcctcgaagctcccttcccaacgggcggcgtgctgaatcctttgcagacgacttaaaacgcgacggggcattgtaagtggcagagtggccttgctgccacgatccactgagatccagccccgcgtcgcacggattcgtcatttttttaaaaaaaaataaaaaaaaaaaaaaaaaaaaaaaaaaaaaaaaaaaaaaaaaaagggcg

SEQ ID NO: 264930 - DNA, 803 bp, Zea mays
cggacgcgtgggcggacgcgtgggcggacgcgtgggctgcagcgagaggaaagagaaaaaggaaaggaaaggacaaaggagcggcggcgaggtctatggcgtcgacggcggggtacctggcgcggcgggcggcgcagaaggagcgggtgcgcctgctctaccgcagggcgctcaaggacacgctcaactgggccgtccaccgccacctcttctaccaggacgcgtcggatctccgggacaagttcgaggccaaccgacacgtggataacctggacgtggtcgataggctcatcgacgatgcggaggctcagtacaggaacttccagcaccccgatccctacattgttccatgggcaccaggcggcactaaattcacaagaaacccccctccacctcaagggatcgagatcatctacaattatggcaaggaggaccagtaaacaagagtcctgcaagcggggggcagaacttccacagttccaaatcacttcctgtttaatcgagttgttgtacgagaaataagaatggaaattactggactccatccatgcttctcatttgcttgttctgataatcatatgctcttcatctagtgcatattgaagtgatgtttcctgtcataaaatggaattgtactatctttgtcgtgcagtttaaactgaccgccggcatctcagttttttttctttggtttttctgcgttttcacgtttttctagagaaagtatatagattcatgacataagatttatgtttttagatttactatgaaaaatactttcataatatataattcatatgctg

SEQ ID NO: 264931 - DNA, 1498 bp, Zea mays
aagcgctgatgatgcgtgggcgggtgggaatattggggtttgtggcgtttcatggcctattttcaggtggggtggtggaaaggatgacaaatattttgcgaggcttgggaagaatataatatctgtctacgaaacagatacattctcccttcttgataagaagtctttgaaggtagaaaatgtagtggacttcagctggtctcccactgatcctatcatatctctgttcgtgcctgaaatgggtggtggaaatcagcctgcgagggtgagtctagtgcaaatccctggcaaagaggagctgcgacagaaaaaccttttcagtgtcagtgattgtaagatgtattggcaaaacagtggagaatatcttgctgttcaagttgatagatacacaaaaacaaaaaagagcacctacactgggtttgagctgtttagaattaaggagagggatatcccaattgaggtccttgaactcgagaacaagaacgacaagatcattgcatttgcatgggaacctaaaggacatcgctttgctatcatccatggtgatggccctaagcctgatgttagcttctacaccatgcgaacagccaataacactagccgtgtatccaagctcacaaccctcaaggccaagcaagctaatactctgtactggtctcctgctgggcgcttcatagttcttgctggactgaagggtttcaacgggcagctggaattctacaatgttgatgaactagagacaatggcaacaggagagcattttatggcaacagatatcatgtgggatccaactgggagatatctcgcgactgcagttacctcagttcatgaaatggagaatggctttcaaatatggtccttcagtggcaagcatctttacaaggtgtcaaaggatcatttctatcagtttatatggcgcccgagaccgccctcactactgacggccgagaaggaagaagagatctcaaggaacctgaagaagtatagcaagaagtacgaacaagaagaccaggatgcattcaatcagttgagcgagcaggaccgcaagaggcggacacagcttcaggaagaatgggactcatgggttgccaagtggaagcagatgcatgaggaggagcgtgcttacaggagggagctcagggatggggaggccagcgacgacgaggaagagtatgaggccaaggaagttgaggtggaggaagtcgttgatgtccgtcaagaagttcttgcattcgacctagatcaggagtgaaaacacttattatagaatctgttgatttctttcctgttggtgttaaagttcattggggtcgcattgcataataggccctagtgatcaagtgcgcaatttactgatcgttgtactgcttatttgtacacttgctgcttgaattgttggatcatgtgtttagatatcaaattttgctgctggattactaatctgtctggttctgcaaaattagttgtactgcattcacaattcatctgctttcatatt

SEQ ID NO: 264932 - DNA, 284 bp, Zea mays
cgcttgtcgcgtgccagatcggggttcaattccccgtcgccgagctcagggatggggaggccagcgacgacgaggaagagtatgaggccaaggaagttgaggtggaggaagtcgttgatgtccgtcaagaagttcttgcattcgacctagatcaggagtgaaaacacttattatagaatctgttgatttctttcctgttggtgttaaagttcattggggtcgcattgcataataggccctagtgatcaagtgcgcaatttactgatcgttgtactgcttatttg

SEQ ID NO: 264933 - DNA, 425 bp, Zea mays
  unsure (1)..(425): unsure at all n locations
gcgagatgtatgcaagagataatactggtgattatgtccttcgacttggtgctgatcagtcttctgaaaatttaacattgctagaaactggtgagcctatctattccccgacactgcaggaaggccccatcatgacagcagagcttataaaagaaacagaggagctagtgttacggacaggaagtcttggtgctggatgctctcaacttctatcagatatgcaggctttcaaggcagcaaatcctggttgtgtcctggaagactttgttagatggcactctccacccgattggtctgaggattgtgctgcaaacagtaccacagttggggaaggctcatctagacgtgggcggttaagtgataggatgcanacaaaagaaggtaacttgtggaaggaactgtgggaggctgcaaaacctatacct

SEQ ID NO: 264934 - DNA, 2017 bp, Zea mays
ggtgtgcactgttatgtctgggtgctttgggtttgcttcttgagacagctagacgcgcattttctgcggacgcaatggaacctgctgaaggtattctactaattgtagaaagtcttactatggaagctaatgagagtgacataagcattgcccaaagtgtttttacaactagtactgaagcgattggcgctggtgaggaggccaggaaaattgttctcatgtttttggagagaatatgtcatccttcaggtgccaaaaaatcaaacaagcaacaaaggaatgaggagatggtggcaaggatcctgccgtacttgacctatggggaaccaacagctatggaagctcttattcaacattttgagccctaccttagggactggtctgaatttgatcaattgcagaagcaacatgaagataatccaaaagatgataatataagccaaaagctgtcaacacagcgatctgctatcgacaactttgttcgtgtatcagagtcactcaagactagttcatgtggtgagaggctaaaggatattattctggagaagggcatcacaaaagctgctgttgagcatgtaaaggaaagctttgcttctgctggacagactggcttcagaacaagtgaagaatggacaacaggcttaaaactgccatctattccacccattctgtcaatgttgaaggggctggctaagggccatctgcctacacagaaatgcattgatgaagaaggcatattaccactgctccatgctctggaaggggtgcctggtgaaaatgaaattggtgcaagagcagaaaatcttttggatacactagccaataatgaaaataatggtgatggcttccttggagagaagattcaagagctgcggcacgctacaagggatgagatgcgtcgccgtgctcttgagaaaagagtgatgctacttcagggaatgggaatgcgccaagaatttgcttctgatggaggtagacgtattgttgtatctcagcctacaattgaaggtttggatgatgtggaagaagaggaggatggtgtagcctgtatggtttgtagagaagggtacaccttaagaccaacagacatgttgggagtctatgcattcagtaaacgagtgaacttaggtgcaacaagttctggtagtggccgtggggactgtgtttacaccactgttagccacttcaacatcatacactaccaatgccatcaggaagctaaacgagctgatgctgcactgaagaatcccaaaaaggaatgggacggtgctaccttgcgaaacaatgagacattgtgcaattgtatctttccattgagggggccatctgttcctcttgggcagtacactaggtgtgttgatcagtactgggaccaattgaattctcttggacgagctgatgggagtcgcctccggttgttgacatatgacattgtgctgatgctagcaaggtttgcaacaggcgcttcgtttagcacagactgcaaaggtggggggagggagagcaactcccggtttcttccattcatggtccagatggcttcttatctttctgatggaagtgccaaccagcagcgtcatgtgatggccaaagctgtcaccacctacttgtccggctccccaacactggaatctcctattcgagtttcagcatctctctctgggtcccgtggtggttcaggttcctctgaggagactgtacagttcatgatggtttattcacttctgtcggagtcatacgagagttggctccaaacaccgccctgtgtttctacagaggggcatctaccatgcctacatgcaacataggcacgggcggtcgaccctcaagctgtcatcggactcgtcatcatcagcagttcgggcagacgaaagttcatcctctgatacaagtgacaacaagaagctcttcgccatagtccagccgatgctggtgtacaccggcttgattgagcagctacaacagttcttcaagaagggcaaatcgtccagcttgatcaagacggatgagaaagatg

SEQ ID NO: 264935 - DNA, 445 bp, Zea mays
cccacgcgtccgttagagtatgctcgaggtggacacgcatcaacatgcggggatgtttgacagttttggaatagtgcttctagagatgcttacagggagaaggccaactgatcatgtgtttgtggacgaactaaacattgtcaaattcgtggagaggagcttccctgataaaatattggatgtgattgatggttccttacgtgatgacttcaagagtgcccaaataaacatggtaacagagcgtgagacctaccgatgcttgttttctctactgcaagtagcactttcttgcacacgtgagattcctggtgaacgaacgaccatggaagaagcagctagcagaattggttcaatccagaccacgtatgctagaggaattgaaaacgcaagcaggcattgaattgaaaccacctctatgttgagcgaacgtacgtggggatggaca

SEQ ID NO: 264936 - DNA, 923 bp, Zea mays
agtagttctttgggaaatctaacctacctatccctcctacaactagaacagaacaacctcaaagcaaatgataatgagggatgggaattcatagatgcattgcgcaaatgtcagttcctggaaaaactcttattatcttacaatcagctaggaggagccataccaaattcagttgggaagttatccaacaacagccttcagtacctacgattcggcagaaacaacttgtcgggagctgttccggagagcatggggaaccttattgccttaaatacgttagatctagaacaaaacaatttgaacggtctgattggatcatgggttggaaagttgaacaacttggtaagattatctctttcagacaataacttcagtgggcccattccatagtccattagttggtaatagagatcgagtgagctaggcctaccgatgcttgttttctagtacactgcaagtagcactttcttgcacacgtgcgtgaaattcctggtgaatgaacgaccatggaagaagcagctatctagcagtagaattggttcaaatcaagaccccgtatagcagaggagtggaattgaaaacacgagcagacattgaattgaaaccatctctgtgttagcacaagcaccggtctatgtttgcctcaccaagcggacatggggatgaacaacatgtcaacacagctacaccaagtgaaaaccgaagccaaaccgatgaagattcaacaagtgccattgatcaaggcgccagggcacgaccacctttacaccgttcctgtgtgttggcccgaattggccctgttagaaccattgggctctgctctaataagtgagaggtataattgcctcattaccacagaacgcaacccttatgtacacaacactgtaactacacgagggagagccctctctgtgttttcccag

SEQ ID NO: 264937 - DNA, 1304 bp, Zea mays
cccacgcgtccgcccacgcgtccgaacgccgtagcaactagcaacgctaccacagtgcgcgcttgaagataggttaacaccgcttcttatcctcagttccaaccccagctcctcagttctcgtcatcgtcctcgcgctcagtgtcatttgcagttcccggcagcagccatggcgtcggtgcagctgtctgggccgcgggtggtggcggctgcgaaaccggctgcgttgggcgggctcctcctgacgccgtcccttgcggtgccaaaggggcggagaaccagggggctcgtggtgagggccgccacggtcgtgtcacctaagtatacatccataaaaccattgggagacagagtacttgtgaagatcaagacctctgaggctaaatctgatggagggattttacttccagtatcagttcagacaagaccacaaggaggggaaattgttgcggttggagaagggagaagttttggaagtaaccgcattgagatcagtgttccggttggtgcacaagttgtctactcgaaatatgcaggcacagaattgaaattcaatgacgccgaccatctcattttgaaagaagatgacataattggtattcttgacagtgatgatgtgaaggatatgaaaccactgaatgatcgcattctgattaaggttgctgaagctgaagaacgaactgctggtggtttgctattgacgcaggcaactaaggagaaaccttctgttggatcagtggtagccgttggcccagggccgttgggcgaggacggcagcaggaatcccctgtcgatcactcctggaagcaacgtgatgtattccaagtatgcggggagtgagttcaagggcgaggacggtgagtacatcgtgctcagggcgtctgacgtgatggctgttctttcctgatccccaaaccatacagcgccaggtgcgcgataggaagttttgatgttgaggccgaaccttatcttttatttgctcttgtttggaattggtggaggcttttgaactgtaatctggtgcgaattataaggaaaataagccgagttgtgtagacttgagacaggactgtgctgtgctgtttggctggtaggtgagctaaccagtgttcagctggtgggtgagctgaccagcacgtcgggttcggctgttcttcctgatgtcagcgttgtacgccaaggttggccaacggcatcaatattactaatagcatctaggctaccgtttgagtttttcatggattaatgacaacacaagatgtgactattatataaaaaaaaaaaaaaaaaaagggcggccgcccg

SEQ ID NO: 264938 - DNA, 1156 bp, Zea mays
ctaacacgtggcggacgcgtcggctactacagctcctcatctcaagtgtgtagacgagacagagagacactgagagagcgccatggccagcctccaagtcactcctacttcggcgttcactgagtggaacgagctgaagttcgaaggcctgtacctgttccacacgcccctgggctcaggcgccaaccaagctcaggtcatagacaacaaggcgccgattggcatcggtgccaccgtagttaacaactggacagtgtatgacgggccagggccgaacgcaaagctcgttgcccgtgcacagggcttgcatatccaagccggcaactgggtcaactccttcagcctagtgttcgtggatcaaaggttcagtgggtccacgcttgaagtgaccgggatagtagttgaatccggggagtgggctattgttgggggcaccggtcagtttgccatggcaaacggtgtcatctccaagaagttccatgagcagagaagcgaagggaacatcatacaactcaccatccatgctttctgtccggtgctcggaccgacaaagcgctcggccacaaaagttggaccgtggggtgggagcggcgggtctccgatggacatcacggcagagccccagcgtctgaagagcatcaccgttgctactggcatcgccgtgacctcgattgccttctcctacgtcgactccgccggccaaacccaatctgctggtcgctggggcggttccggtggagaaactgagccggtgatccagctcggcgactccgaggtgctcacggagctgtccgggacgatcggcaacgtcgacggcctcaccgtcataacctccatcaagttcgtcacaagcctcaagacctacgggcctttcggagcatggggggacgggagtgacactccgttcgcgatccccgtgcagcaagggagtgccatcgtcggcttcttcgcacgagctggggtctacctcgacgcccttggcgtttacgtgcgatccctgtgatgagactctcacgagaggggcagctagctgctctgctagctccaccggctttcatcgcgtcaccctccgttttatttcctactgctacttgttgtgtcttgaataatttcgataaataaaggactccgccagagattggcacttgaatcgatc

SEQ ID NO: 264939 - DNA, 646 bp, Zea mays
  unsure (1)..(646): unsure at all n locations
aaggncgaccgacgcgtccgcggacgcgtgggtgactactatagctcctcttctcattctcaagtgtgtagccgagagagggagagagagagagagagagagagagagagagagagagcgccatggccagcctccaagtcactcctacttcggcgttcactgagtggaacgagctgaagttcgaaggcctgtacttgttccacacgcccctgggctctggcgccaaccaagctcaggtcatagacaacaagacgccgattggcatcggtgccaccgtagttaacaactgggcagtgtacgacgggccagggccgaacgcaaagctggttgcccgtgcacagggcctgcatatccaagccggcaactgggtcaactccttcagcctagtgttcgtggatccaaggttcagtgggtccacgcttgaagtgaccgggatagtagttgaatccggggagtgggctattgttgggggcactggtcagtttgccatggcaaacggtgtcatctccaagaagttccacgagcagagaagcgaagggaacatcatgcaactcaccatccatgctttcttgccggtgctcggagggacaaagcgatccctgtgatgggactctcacgagagaggcatggggggacgggagtgaca

SEQ ID NO: 264940 - DNA, 1198 bp, Zea mays
agattaaaccttccgtacccatatccacctgctgctccgaccttccagtcttctccgtaggggcttcgctccatagatttcgccgcaaggggcaacggcacacccaccaactgacctgacccacgagggatccgcagatgaagatcattccggtcccttgcctggatgacaactatgcctacttaatcgtggacgagagcaccaagaaggcagcggccgttgaccctgtggaaccggagaaggttctcaaggcggccggcgaggtcggcgcctacgtcgactgcgttctcaccacccatcaccactgggatcatgctggtggcaatgagaagatgaggctgcaggtgccagggataaaggtatttggaggatccctggacaatgtgaaaggctgcactgatcaggtggagaatggaatgaagttgtcacttgggaaggacattgagatactatgcctacacacgccttgccacactaaaggtcatatcagctactatgttactagtaaggagggtgaagatccagcggtcttcaccggagataccttgttcattgctgggtgtgggaagttttttgagggttctgcagagcaaatgtatcagtcccttattgttacactgggttcgctgccaaagtcaacccgagtttactgtgggcatgagtacactgtgaagaacctaaaattcatgctgacactggagccagagaatgagaagacgaaacagaaactggaatgggctgaaaagcagcgcgaagcgaatcagccaacagtgccctcgactataggagacgagtttgagataaatactttcatgcgtgttgatctaccagaaatacaggcgaaattcagtgtcaactctccagttgaagcaatgagagaggtcaggaagaccaaggataactggagaggttgaggacacccatggccgccactagtctgttgaaccagcattccaaagtgaactaatgctgaaaccttgccctgtaggtgggaatgaggtttactgccgtgcaatgctttgagaaatgtgttgttgtgaaggagaagactcctacaataagctccgcgttaatgagtagtaacaatacgctccttgtaacttgtggtctgtttgccaataataatgtacggactgtagtgcctatcttgaaaatatgaagagctataatgggtataacctgcctgcattttatattt

SEQ ID NO: 264941 - DNA, 566 bp, Zea mays
tcgacccacgctttcgtccttcctcgcgagaacgagaggctagaccgcatccagtggtggggctcggtatgggcggaagcgaatgcgccctgggcgacgccgctataggcgaggaaaccctaaattacgacggcgatgacgttgagatggccgacgccgactcggatacggaggaagcccgagcagctgaggtctccgctgcaactggaggatccgccggaggtgttaggcaggcggagaaggacggaccggatggaaagaagaagaggaagaagaggaggaacaaagggaagaagaacaaagggaggcaagatggggcgcccaccaacatcgcggacattaatcgatttgttcttaacacttgcaagcgcttgaaggagaagaagtcgtaccttgtctggaatgctgttggctgccttggtgtcactgctgtcaatgatcttgttagagaggtggaggctattcagaagtgtggtgggcagactattgctgatggaagccgctttcgactggtggtggaattctttggacatctaaagtcgcggaaccaggcttacaggaaatat

SEQ ID NO: 264942 - DNA, 428 bp, Zea mays
tcgaggcggcttccactgtagtccgggccggcgtgaccattccaaatcttccgcacccatctctcgccgcctcgcctgcaccggagactggccctagtgcccgcgcgcctgcgaggtatcgaacacccaaagatggcaatggcaaccttcacatcatccccagttctctgcagcttcaggaccatcgaacagaagaaggcccctctgctgaacaacagcacaaaacggccgcttcacttgggcttcccaaggagcgtgccgacgtcgccgagcttgagagagaggctagacctgcgcgtcgccgctgtctacaaggtgaagctcctccgccccgaaaggcaagatagcgtgctctacgtgccagaggacagctacattctggacgccgtcgatgaggcccgtcttgacctgccctacttctgacgcgc

SEQ ID NO: 264943 - DNA, 448 bp, Zea mays
  unsure (1)..(448): unsure at all n locations
cagttcaacaccttcatccggctgctcaagtccacgggcgtggcgtcgcagatcgacaaccaggtcgccaactgcgggaacggggtcacggtgttcgcgcccacggacaacgcgttccagtcgctgccctcgggcacgctcaactcgctgtcggaccaggacaagaacgcgctggtgcagtaccacgtggtgtccgccgccatccccatgtcgcagttcgacaccgtcagcgacccgctccgcacgcaggccggcagcgcctcgccggggtgagttcccactcaacgtcacctcctccgagggccagcaggtcaacgtcaccacgggcgtcgtcaccgncaccgtcgacaactccctctactcgggcgacagcctcgtcgtctaccaggtcaacaaggtgctgcttcccatgaagctcttcggcgccgcggatgcgcccgcgcccgcg

SEQ ID NO: 264944 - DNA, 785 bp, Zea mays
gtccaagcctctacagtaactcgtggtatccacactcccttcccttcccttgtacccactccaatggcgccctccctcctcgccgccgtctccgcctcgcccttcctcctacccggcagcagccgcaggccgctgggcgctgcccccacccgccgggccggactgcgcgtggccgcgcttaagtacgaccctgccaaggtggcaccgcagaacgaccgggtgctcgtccgtcttcagcagatccctgagaaatctgctggtggtgtattgctaccgaaatctgctgttaagtttgagaggtatctgatgggtgagattctatcggttggtgctgatgttagtgaagttgaggctgggaagaaggttctcttctcagacatcaatgcttacgaggtggaccttgatacggatgagaagcactgcttctgccgggagtcagatttgttagctgtagtcgaatgaattttaccatgaaaattacagacttacctgcccatgctccaactgcatggacttatcttgcacctactttgttgtacttgaactcggcttctagatgagtgttagttatcattgtattttggccgcaataaacaggaatcgtgtcaatgccccatttctttacagcacgctctcataaagtgcttagattttgataggaaggcgtgaacggaacttggaagatgaaatgcttacattgttcatctggtgttcgtgtttctgaacattcttcaagcaccgtcgtaaacatttcaactagagactgcagattttacatttttaag

SEQ ID NO: 264945 - DNA, 856 bp, Zea mays
ctcgagccgattcggctcgaggtggttcttgtttttgtctcagttcagcacgcgacgcaactatcctcgagagagagagagagagagaggaagcccgtcgttctggaagtttccacgctccgcgcctccgccccctggtctgagtggtctccgctccaatggcgccctcactcctcgccgccatgtccacctcgcccttcctagccagcagcggcagcagccgcaggccgctaggcgctgcccacacccgacgggctggactgcgcgtggccgcgcttaagtacgaccctgccaaggtggcgccgcagaacgaccgggttctcgtccgtcttgagcagatccctgagaaatctgctggcggtgtgttgctaccaaaatctgctgttaagtttgagagatatctgatgggtgagattctatcgatcggtgctgaagtcagtgaagttgaggctgggaagaaggttctcttctcagacatcaatgcttatgaggtggagcttggtaccgatgatgagaagcactgcttctgccgtgagtcagacttgttagctgtagttgaatgaattttaccatgaaaatttcggacttacctgggaatgctccaacggcatgaacttatcttgcccccactctggtgtatgccatttgaacgttcgtgaattcagcttctaggtgattgttagttaccgttgatttttggtcgccataaactggaattgtgttaatgcccattttctttacagaggcccttgctcacgttgggaacacgaaactgtgctccgtgtaccgaacttgaaatgtctgcattgccaatctgatgtttgtgcttctgaacattctttaggcaacaccctaa

SEQ ID NO: 264946 - DNA, 454 bp, Zea mays
ccctttcgtttgggccccatgagcgtaagccatgctcccaatggagtcacagaatggaaatcctcaaattcttcagagcaaggtctgggtatgccgccaattccacctagccaaaaccagttttctgctcgtggacggatgggtgtccggtccagatatgttgacacattcaatagatcaggtgcttctggtgcggtgccatcatataacaaaccagctgctccatccgtgacaccaccagctggtgccaagttcttcatgccgactgcagcacctgttgccgcggatcagatgatgccacaccaagcagcagagatacacagtgaaaccatccatcaggatgagcgggcagcctcaccgcctgctggaacatcattctcttcaaccccaccacccacgcaatttccatcaccagtgcaatcaacaatttatcggcaatctagtatggagaaca

SEQ ID NO: 264947 - DNA, 454 bp, Zea mays
caccaagcagcagagatacacagtgaaaccatgcaacaggatgagagggcagcctcaccgcctgctggaacatcattctcttcaaccccaccacccacacaattttcatcgcccccaccacacacgcaattctcgtcaccaatgcaatcaacaatccatcggcaatctagtatggcgaacatctccaccccttaccagagttccggggtatcatcattaagcagcgacacctcattctcaaaatcacgagccgcatcctggagtggaacatactctgagcagttcagtgcttttgcgggcacaagatcacctgatggacagacggtgcgctcaccactcatgcctggcaaaccatcacacagtcgttccaacagcaactcatcagtgcagctcaatggattgacagaggatcttcatgaggtcgagctctaattggcggctgctcagcatgact

SEQ ID NO: 264948 - DNA, 769 bp, Zea mays
ggaacagaaagccttggaagagccgaggcggaagcagaactgggaaggggagaagattccgatggggactaagaaacagggaggaggcggaggaaaccagaaggtcctcctctggaggctgccggtggtcacctctaaggagctcggcaagataggccccgccctcggaatcggcatcggctgcggcgccggcgcaggcatcggattcttcggtggtgcagggttaggctatggatttcctggactcacattaggctttggagttggagctggatgtggtgtgggaattggctttggttatggcttgggcaaaggaattgcatatgatgaaaagaaaaaatactccaatgttggcaagatgttccaggaagctccacattttcctatggacactgtcggtgctttatttgacgagctggttataaacaccaagaagcttgtgacatcaacatcaaaaggaatcgaaaaatggcgttgagcggcagcactgcattgccgtctctataatcgccttgaattgtatcaacggagattgcgagcagcagttatcttgaacaggcaggacctggccctagaatgcagcctgttgcgtgtcgtgactttctttctattgttcgtcagctagtagctttgtatttaggtaggatcctgagataatacatgttatttctggtcgatatttattagttgcattgaactgtattctgggttgctcatcacttgtatgttaaattggaggaaaattgatgctatgagcttcaggtgaatc

SEQ ID NO: 264949 - DNA, 937 bp, Zea mays
tcgccctctcgtccggagacattcatatcagcagatgatctccgaataaatttatggaacttggaaataaacagccagagctttaacattgttgatgtgaagcctacaaacatggaagatctaacagaggtgattacatgtgcggagttccatccatcccattgtaatacactggcctatagtagttcaaagggttctatccgacttattgatctgcgtcaatcagcactgtgtgacaaccattcataaatatttgaggaacatgaagcacctggatcaagatccttctttacagaaattattgcatcaatttctgatataaagttttcaaggaatggcaaatatattcttagccgtgattatatgacgctcaagctatgggatctaaacatgaattcaggccctgtttcaaccttccaagtccatgaacatttaagacctaagctctgtgatctgtacgagaatgactcaattttcgacaagtttgagtgctgtcttagtggggatggacttcgtgttgcaactggttcttatggtaatatatttcgtgttttcggtcgtcctccgggaagcatagaggcaacaactttggaagcaagtaggaacccaatgaggcgtcagattgcaaatccagcaaggcccacacggacactaacttcttttgcccgtggtgttcggagaggtggagaaaatcaaggcgttgatgctaatgggaattcactcgacttctcaacgaagctgctccacctcgcatggcacccgaccgagaattctattgcatgtgctgctgcaaatagcttgtatatgtattatgcgtagagaatgccctacagaaaatttgtttttttttgtggcttgctctcggtaaaggcccaaggctctttaattgcaaccagagagatggtgcaggacattgttgtcacgtcaccccttgggg

SEQ ID NO: 264950 - DNA, 1377 bp, Zea mays
attgtcaccggcgccaccgtccaagtttgctgggagaagttcgcgcgctacttcgaggtcgagctgaaggaagtgaagctgagcgacggctactacgtcatggacccgcagaaggcagtggacatggtggacgagaacaccatctgtgtcgcggccatcctcggttccacgctgaacggcgagttcgaggacgtgaagctgctcaacgacctgctcaccaagaagaacgcggagacaggctgggacacgccgatccacgtggacgcggcgagcggcgggttcatcgcgccgttcctgtacccggaactggagtgggacttccggctgccgctcgtgaagagcatcaacgtcagtggacacaagtatggtctggtctacgccggcatcgggtggtgcatctggaggaccaaggcggacctgccggaggagctcatcttccacatcaactacctcggcgccgaccagcccaccttcaccctcaacttctccaaaggttccagccaggttattgcacagtactaccagctgatccgccttggctttgaaggttacaagaacatcatggagaactgccaggagaacgcgacggttctgaagcaaggtctggagaagacggggaagttcaacatcgtgtccaaggacaacggcgtgccgctggtggccttctccctcaaggacagcagccggcacagcgagttcgagatctccgacttcctgcgccgcttcgggtggatcgtgccggcctacacgatgccccccgacgcgcagcccgtgaccgtgctccgcgtggtcatccgcgaggacttcagccgcaccctcgcggagcgcctggtgctcgacatcgagaaggttctgcacgagctggacgcgctgcccgcccgtgtccccagcggcgacctagccgcgctcgccgcggctgagtccagcgagagggagatggagaagcagcgccaggtgatctcgctctggaagagggccgtcctcgccaagaagaagaccaacggcgtctgctaagcagccgagccgacgcatttctggccgtattggcatggggtgaaatttgtctgagtacgcgtttgcagtttttacccgggtgaagattgttatgtgtcgaggttgagttttagaggacggaattgctccggctcggtgtatgtagcgagtgttttacgtgctcaacaactctcagacttccctcccctcttgcatgtaagctgtaagtcgatgcaaataatgttgcgtgtcgagcgacgattagtaatagtacctgatggggtacttgtattagtattgatatttgaattacactatacattatgtgacatactattaatattgctcgacaaagtaatattatcggctcctgtttgattttct

SEQ ID NO: 264951 - DNA, 492 bp, Zea mays
aacttgcctctggtggcaagctctgtcccgcgctgattgtcataagagagcacctcccttctggtaaagcatgcttaagagtcaacattgatgcaaccagagtgggaaatgtggctcgctttatcaaccattcatgtgatggaggcaacctgcacccagtgctggtgaggagctctggtttgttgctcccaaggctctgcttctttgctgccagggatatcgtggagggagaagagctcaccttcagttacggtgatgctagggttaggcccaagggtttgccatgcttttgtggaagctcgggttgttctggtgtgcttccttcagaagaaacttaagaactgatgccatcaccttggatgtcttacaaatgagtttgattctatttctgacttcgcaataacatggcttcatgaggaattgcctggcccattcttttagccatactgtaatgtgtgcaacatacaaaaaacaagctgtcagtttttggtg

SEQ ID NO: 264952 - DNA, 1116 bp, Zea mays
gcaagattaccgatgcaagcctgttcgccatcgctgagagctgcagccagctcgccgagctcgacctttcgaactgcatggtcagcgactacggccgcccgcgcgtcccagcggcaaagcagctcaggctgcgcgtcctctcgctgtccggctgtatgaaggtcacccagaagagcctccctttcctaggcagcatgtcttcgtccttggaggggctgaatctccagttcaacttcattggcaaccacaacatcgcgtccctggagaagcagctctggcggtgcgacatccttgcttagaggaacacggcggttattcgtcgctggagatgctaggtcaaccttctccggatgcaaatacacgaccgaagcagtagtttagtactcaagtctatgctctgtagttgagtctggtttccggctcgtgtttgtgtcatggtgggtcttctgttcgtcgtcgtcctagggccagttgtttttccgaggggggtgtttttttccggaggctcatttttttgcaggaatcctcctgtgaggatctctgtttcttgagcccttggcagccattgctatggcactctgcccccttttgtcccaaactaagccctcgtgatcagtcgttccaccatgcagtttctcaagttgtgtttgaaacccaagtatctgtgtcaagtgtgtgttcttttccggtattcctgggtatagagctgcagacatcaacactcttttgattgcaattgtagcaagtccagttgtcggtggttgcaactctccatccagaattgcagacatcaacattcttttgagtgcaattgtatcaagtcccacctgtcggtgtctccattcagagaaacttagctccatgtctttgatgtctgggtgcctgcaatcttgccgagtgcagtgtgttgttggccatgggcggaagtgtcggtatggtttgcctatgtgcttggggatctggcctttgcaaggttcattctacagagccttttgccttcacagccctgtgtggttgtttttcttctgcagagacctgattttgacaggcaggtggtttaaacactgtaatatttgcaaccttcctctgaagataaataaaggttgtgtttcggtt

SEQ ID NO: 264953 - DNA, 534 bp, Zea mays
aaccggtgcggagtcccaggcgtgacgccagacgaaccgctgtgtcacacacccactcacaacacggcggccgaagcggcggagccaccataaattggtgctctctccgtccgaagtgctctctgaaattccccccaaatatcccagccactgccgtcgtgcagtcaaagtgtcaaaccatgccggcagtagcgttcgcgtcggctcctgccatattcgcctccgcctccgcgcgtccctgccgcagcgcggctccgggcatcctttcctccgactccgggcggccccgccgcggcgcgcgtggcgccgtccagtgtgaggtcgcctcctcctcggcaccgtcggcggctggaccccaggccgcccggtgggcccagaggaccgtggtcatcccgccacagcgccgcgggtgccacctcatcaccaacaagatcgtaaatgagatagggaatgacctggccgacttcaagtgtggcatggcgcatctgttcttgcagcacacaagtgcgtcgttgactattaatgagaactacg

SEQ ID NO: 264954 - DNA, 512 bp, Zea mays
cccacgcgtccgcagaacctggtcaagctgatcagagtgctcggcgacgcccaggtcggtggtgacgatatcacagaggagctgaagagcgtgctgaacagcgctgcccctgaagtacgccgtccttactgcaactgtctgatcgatgtatgccgcaaccacggcttccctccacagagggcaagggaagtcttccaccttgcccagacctatggtttgtactccaagcttcagagcaggaaggacgaggagtggtcgctggacctgcggtcgctctcggttggtgcagccaagacagcgtttgatgactggatgcagactgtctcggagcgctgggcgcagcagaaggacttgccagagtccttcagcgtgtacaccggatccagcacccacaagtttgcgcaggggctggcaagtgcttttgccgctcatctggaccaaatggcggtgccattccatgcgagcgaatctcaagccggcagcttcatcagttcaagagatgatctggtctc

SEQ ID NO: 264955 - DNA, 747 bp, Zea mays
tccggtctggaattcccgggtcggccgcgcttacgcccacgcgtagaggaaggaaagaacataggcagccgaagcgactgtcgcgaggcaaggccatcgtccgccatgacgctctccctctccacctctttcctccccatccccgccgccgcgaggaccaccgcccgcaccctacgctccgtcgtcccctcccaggggatgcgctgctcgatgcgcaagaaggggttgcacccggagatctacgaggacgcgaaggtgtactgcaacggcgagctggtgctggtgacggggggcaccaagccggagtacacggtggacgtgtggtccggaaaccacccctactatgtcggcgacacctcggcgctcgtggtcatggacagccagatcgagaagttccgcaagaagtggggccacatcaaggagtactggcccgaggaccagtggagggagatgcacccagacggcgacccggagttcgagcccgagggggacaactgattgatggctccccgtcttcctcacccggtgcgtggtcaccggtccagtttacatttgccctcttgaatggaattgagactctgtctgttcgcattgctctccaggtgttcggttaatgttcggaatggaaatgtacaattactacttcacgagatagggtcttgttgatcatgggcccccaaaaaaaaaaaaaaaaaaaaaaaaaacaaaaaaaaaaaaaaagggcggccgcttgcgatgtagaactat

SEQ ID NO: 264956 - DNA, 1067 bp, Zea mays
  unsure (1)..(1067): unsure at all n locations
caatcacaggccgcctgtggattcacgcagcatccaaggttcctgaccccgacactatcaaagccatggaggattctacagggagatttatgccgtcgatggcatcactggcatcaagttccctgatcattaccctgtctcacgcctccttggctgtgttgaggtggtaggctgcctcaggtctgaagagcttgtttgctgggaacatgtgcctgagtctgtcaggcttgaagggctgactgacttttgttggctctgtgaaaatccacagaagttggtggttccattcgagatgcgtggttaccagggtgtctacaatttagaaagaaggatctatgatggggctgtgaggggccttttacctgttcaaggtccactgcctgtcaagttccctcttccagatcccagagaccccttctccttgaagccaggatctcttacatttgctgcttccaaacccactctgcaaaaatctgaaagtgttgctgcagcaatagccggggctcgagctgcagccactcaattctcaaagaaggatcgcaaagctgctgctagtagtgaaattggtacagaagagcaatcctggggaagccatggcggtagcagttcagttgattgcaatggtctgtcaattgtccatggcagctatgcgcatctacagaaccagaatcggccttcaattttcccgagcactcaagcgaattcccaaaatccaaattctgagcctcgaagaagccctagactagaatttggagcttccaataggtggcactgagtgaactgaagcagttaagcttgagcacgcttcggccaggacaagctgttcccagaagctgaccaatgcaagctaacgagtagtaatgcttgtcatagcccatagggcgagagagtgtgtttgtagaaagatgggtgatgtttgcagaattcatggtagcttgtaattaagtatatgctccagtgctggaagtgttgccattgtgtgccttcttaggctgtctccngcnncgtcatcattaaaannnnaaaaaaannaaannaaaaaaaaaaaaaaaaaaaagggcggccgc

SEQ ID NO: 264957 - DNA, 401 bp, Zea mays
ctgaagcagttaagcttgagcaagaaaggaacaggacaagcagttcccagaagctgaccaatgcaagctaacaagtagtaatgcttgtcatagcccatagggcgagagagtgtgtttgtagaaagatgggtgatgtttgcagaattcatggtagcttgtaattaagtatatgctccagtgctggaagtgttgccattgtgtgaattattaatgcttgtcgtcacacgtacgtacgctagcagtgtcatcgctgaggcgggctcttttggcatttggttgtcataggagataggacctacccggctctgacctatatgctcttaggaattttcttaggagtttgtttgtaacgacagaaccccatgggatatggcgattctttgaaaaaaaaaaaagaagaa

SEQ ID NO: 264958 - DNA, 992 bp, Zea mays
cccacgcgtccggctatatctatccaatttattcactgatatgaggagcacctggggctggtatagacaatgtacctgattagctacatgacaaatattcctctgatcagcctatttatcaaaagatagcgaacggtctgcgtactttgatacttggtcttattctgtgtgcttaccacagccgaacattttccatgttaaatggatggggtgctcccctgcacatctatcagtcatctagaacatcatgatgacactggacccgggtctattctgtgtgttggaagtgagtggcatcgctatccatcatcgttcttcataccctcctatatcagtgaagtccggtggatagatgatggcttccgtgggttacttccatttcccttcaacgagacactgggtgggaccactgcagctccgtcctacttcaataacaagaacaaggcggctgaagggcaatatctgaaagacattggagcatgtaacttactggtggaacttgatctaagacggccttacccctcgcgcgggagtgacttgtcgacatgggaggcattggccgcactgccgttcctggacagagagctttcccctgcattatatcggtccttcttcataccataccgatggcaacaaaacaatgtgttcggcctgtacaagctactgaggaggttgcatcctgaccatgcgtaatcaagggaaatgtggggtttgcttcaatgagcttaatcacgtgatttcttttaacaaacagcttgcagatttttactgccatagattttctgatcccaatgtgtaatggcgtacctatttttgtcccactgatccttccatcatacaaattcatcacgagatgccgaggatgagagtgctcaactgctgatgtagggagggatgttccagcagaatcatgttgtgaaacggctgcttcgccagttgttacctttttggactgtttgttgaatattagccaacgccagactgatagatct

SEQ ID NO: 264959 - DNA, 425 bp, Zea mays
cccacgcgtccgcaccatttcttccttgtctctgtctcaacacggcgccgccgcttctgccgccgggagccgagcccaagcctaagcgaaagccatggcgattggttctctgatcgcctctactttcgccagatctagccatgccctccccgctgccgccgcttcggccatctctcaggctcccagatcccagcacaccgcatctcctctactctccggccttggagcagcggctcgtgctttcagctcaagggctctatggaagggagcattcgttgacgctttcctgtctagaattaagaagaacagagaaaatatgaatggcaagaagatttggtctcgtagatcctctattttgccggaatttgttggttcctctgtgctcatttacaatgggaaaactcatgtccggtgcaagatcactg

SEQ ID NO: 264960 - DNA, 497 bp, Zea mays
tttgcttcgcggaggagctcgcgcgccaggtgttcgaccggatgtccgagcgggacctcgcgtcctggaacgccatggtactcgcgctcgccaaccacggccgcgtccaggactcgctcgatctgttcgatcggatgacgagggtggagggcctggtgccaaatgccatcgcgttcgtcgcggtgctcagtgcctgcaaccacggtggactggtcgacgaagggaggaggtactttgctgccatggtcagtgagcacgggatcaggccgaggatcgagcactacgggtgcatggtggacatccttgcacgggcggggttcatcgaggaggccctcgatgttgtggccgggatgaactgccgtcctgattccatcatctggaggagcctccttgacgcgtgctgcaagaggaatgctgggctggagctcagtgaggctatggccaagctggcgcttgatgtccctgacgacgctgtgagtggcgtctacgtccttctc

SEQ ID NO: 264961 - DNA, 1112 bp, Zea mays
gagaccagtggcgcggggtgtgcctaactctgcccccaaatttgttgccttgaagcggcggccggcgggagagagcagctctagagagaacagagagcgcataactagcggcggcggcgatgaggatagaggaggtgcaatcgacctcgaagaagcagcgcatcgccacccacactcacatcaagggcctcggcctcgacgccaatggaatgtcgatgccgttggcggcggggttcgtgggccaggcggcggcgcgcgaggcggccgggctggcggtcgacatgatccgccagaagaagatggccggtcgcgcgctgctccttgcgggcccgcccgccacgggcaaaacggcgctagcgctcggcatagcgcaggagctcggcagcaaggtcccattctgtcctatggtaggatcagaagtgtactcctcagaggtcaagaaaactgaggtgctgatggaaaatttccgtagagctataggtttgcgtataaaggaaaacaaagaggtttatgaaggagaggttattgaactttccccagaagaggctgagagcacaactggtggatatgcgaaaagcattagccacgtaatcattggcttaaagactgtcaaagggactaagcaattgaaattagacccttcaatttatgatgctttgatcaaggaaaaggtggcagtgggtgatgttatatacattgaagcaaatagtggagcagtgaaaagagttggtagatgtgattcttttgctacagaatatgatcttgaagctgaagagtatgttcctatccccaaaggtgaagtccataagaaaaaggaaatagtgcaggatgtcacactccatgaccttgatgcagcaaatgcccagccacaaggtggccaagatattttgtcccttatgggccagatgatgaagccacggaagactgaaatcaccgaaaagctacgccaagaaatcaataaggtggtaaacagatatatcgacgaaggaatcgcagagcttgtacctggtgttttgttcattgatgaggtccacatgttggatatcgaatgcttttcttatcttaaccgtgcattggagagcccattatcaccaattgtgatacgcgctacg

SEQ ID NO: 264962 - DNA, 915 bp, Zea mays
gggccgagaatcccggggccaaccaagcctccggaacaagaaaggactggcccagatcaccggcaagcacccatgggacctgatgaccacctccggcgacgagggccaattcctcaacatgctcatcaagctcatcggcgccaagaagaccatggagatcggcgtctacaccggctactcgctcctcgccaccgcgctcgcactcccggaggacggcacgatcttggccatggacatcaaccgcgagaactacgagctaggccttccctgcatcaacaaggccggcgtggcccacaagatcgacttccgcgagggccccgcgctccccgtcctggacgacctcgtggcggacaaggagcagcacgggtcgttcgacttcgccttcgtggacgccgacaaggacaactacctcaactaccacgagcggctcctgaagctggtgaagctgggcggcctcatcggctacgacaacacgctgtggaacggctccgtcgtgctccccgacgacgcgcccatgcgcaagtacatccgcttctaccgcgacttcgtgctcgtcctcaacaaggcgctcgccgccgacgaccgcgtcgagatctgccagctccccgtcggcgacggcgtcaccctctgccgccgcgtcaagtgaaaacatgccctggcctggcctgccccaccaccgccaccgacggcgccgccggccgcatcctcattccaatcataatagacgacccgcagcattaattatccaccggcttttttttttggctctttcttgcccctgttatctttctcctcctcttcttcttgggaattgtcgctgccgtttcgatacgtaaatcacgagatcggtaatacagtaatgctcctcaattttccaataaaaaaaaaaaaaaaaaaaaaaaaaagggcggccgc

SEQ ID NO: 264963 - DNA, 583 bp, Zea mays
gcagtacggccgaatccgggcgagtacccgacgcgctagctagttctattgccgcaccccagatctccaggagggactcgttcgttcagctaactacactgcacgcaatggccaccacggcgaccgaggcggcgccggcgcaggagcagcaggccaacggcaacggcgagcagaagacgcggcactccgaggtcggccacaagagcctgctcaagagcgacgacctctaccagtacatcctggacacgagcgtgtacccgcgggagccggagagcatgaaggagctccgcgagatcaccgccaagcacccatggaacctgatgacgacctccgccgacgaggggcagttcctgaacatgctcatcaagctcatcggcgccaagaagaccatggagatcggcgtctacaccggctactccctcctcgccacggcgctcgccctcccggaggacggcacgatcttggccatggacatcaaccgcgagaactacgagctgggcctgccctgcatcgagaaggccggcgtcgcccacaagatcgacttccgcgagggtcccgcgctccccgtcctcgacgacctcat

SEQ ID NO: 264964 - DNA, 636 bp, Zea mays
cccacgcgtacgcccacgcgtccgatacccgacgcgcaaccagtgccgcacccagaccagatctccgcgacatatcagtcgttcgtccagctaactgcactgcactgcactgcacgcaatggccaccacggcgaccgaggcggccaaggctgcaccggcgcaggagcagcaggccaacggcaacggcaacggcgagcagaagacgcgccactccgaggtcggccacaagagcctgctcaagagcgacgacctgtaccagtacatcctggacacgagcgtgtacccgcgggagccggagagcatgaaggagctgcgcgagatcaccgccaagcacccatggaacctgatgaccacctccgccgacgagggccagttcctcaacatgctcatcaagctcatcggcgccaagaagaccatggagatcggcgtctacaccggctactcgctcctcgccaccgcgctcgcactcccggacgacggcacggtccgtcgttgttccctcccttttcccagatctgccaccccacctccctgaaggcgaacagctagcggtcctcccactgataaaccaaggatttctctctccctctctttgttgttcgtcccgccccgcagatcttggccatggacatcaac

SEQ ID NO: 264965 - DNA, 552 bp, Zea mays
cttcgccttcgtggaccccaccagggccacccccctcagctaccacgagcggctcctgaggctggtgaggcccggcggcctcatcggctacgacaacacgctgtggaacggctccgtcgtgctccccgacgacgcgcccatgcgcaagtacatccgcttctaccgcgacttcgtcctcgccctcaacagcgcgctcgccgccgacgaccgcgtcgagatctgccagctccccgtcggcgacggcgtcacgctctgccgccgcgtcaagtgaaaaaaagaagaagaagaaaaaaaacataataccctgcgttcctgctgccccggctgtctggcccccactactgccaccgacggcggcgccgaacccccgttccaatcatcatatcgtagacgacgcgcagcattaaactatcaatcaccggatctggctctttcttggccctgtactgtactattaatgttccgttcttgtttttttattcggaattgtcgccgtttcagtatacgtaaatctcgaggtcgataatacagtaatactaccaatttaactgt

SEQ ID NO: 264966 - DNA, 439 bp, Zea mays
  unsure (1)..(439): unsure at all n locations
ccacgcgtccgcggacgcgtgggcggacgcgtgggcgtgacgcgtgggtccgacgcgcaagccagtgccgcacccagaccagatctccgcgacatatcagtcgttcgtccagctaactgcactgcactgcactgcacgcaatggccaccacggcgaccgaggcggccaaggctgcaccggcgcaggagcagcaggccaacggcaacggcaacggcgagcagaagacgcgccactccgaggtcggccacaagagcctgctcaagagcgacgacctgtaccaggtaaacaagctgagcgcaatgagtggctgaatctgaccgggatctgagtctctgaccgcgggggaagaatgatccgcagtacatcctggacacgagcgtgtacccgcgggagccggagagcatgaaggagctgcgcgagatcnnacgcaagcacccat

SEQ ID NO: 264967 - DNA, 561 bp, Zea mays
cccacgcgtccgcccacgcgtccgacgccgtcggggccgcactggcacgcgctcctcgtcgagatcgtcgtcaccttcaacatgatgttcgtcacctgcgccgtcgccaccgactccagggcggtgggtgagttggccgggttagcagtcgggtccgcggtttgcattactcccgtccgcgctgggcccgtgtccggcggatcgttgtacccggcgcggacgctggcgcccggcggtggccagcaacgtcttcacgggcctctggatctacttcctcggccccgtcgtcggcacgctctccggagcctgggtctacacctacatccgcttcgaggaggcccccgcagccgccaagcccgacacccagaggctctcctccttcaagctccgacgcatgcagagccagtccgccctcgccgccgacgagttcgacaccgtctgacgcgcgcccgcccgcccgaagagatcgagtactactgcgtgtgctccctcgctctgttcaaaatctcaggtgggagagagctatagctagctgcgcgcgcgcgcgtgtgtgctggtagg

SEQ ID NO: 264968 - DNA, 990 bp, Zea mays
ttcgattcctggaacgagtcttggacgtgcacaacgagcggcgactacgcgagggagggaactttgtggcaaaggatatgttggacgtgctgctgcagctggccgatgacactagtcttgaagtccagctcagcagggacaatgttaaggctatcacacaggacctaatcatcgcaggcacggatagtaatgcaaacacgctggagtgggctgtctcggagctcctcaagaaccctaagatcttagccaaggccatggaggagctgaaccatgtcatagggccggaccgactggtgacggaaagcgacctccctcgcctcccctacatcgaggctgtgctcaaggagaccatgcgcgtgcaccctgccgcgccgatgctggcaccccacgtggcccgcgaggacacatccgtggacggatacgacgtgctcgctggcacggtcttgttcatcaacgtgtgggcaatcggccgcgaccctggactgtgggacgcgccggaggagttccggccggagcggttcgtcgagagcaagatcgacgtgaggggccatgacttccagctgctgccgttcggctctggccggcgaatgtgccccgggatcaacctcgcgctaaaggtgatggctttgagtcttgccaatctgctacacggcttcgagtggaggcttccggacggcgtgacggcagaggagttgagcatggaggaggcctttcagctcacggtaccgcgtaagttcccgctcgaggccgtgggcgagcccaggttgccagaccgcctgtatacgggcgcttgatcgatgcccgtacctgtgttggacacttggactgttggcatgtgtggagtatagcacatgattttcagctcttggaactttgttttaataaaacacaaatatatgtgttatgttggttagatgaatgtgaatataaagttgacaacctaggtaattcgaacccctattggtatataattttactttatttttgcat

SEQ ID NO: 264969 - DNA, 535 bp, Zea mays
gtggatgctctacattctcgctatcgcgtcgttaattgccgttggaaaggaaggtttggggttttggagctgatgaagtaagcgaagctcgaacgacgctctctaggtgtccgtcggatttccgatgccagacgtcgtcctctctgttccgtgtctccctgcatcttcatcgatgtagcatcggtcgtcaacctcgccgtggcagctctcaaactaggagtgttggtgcaaaaccgtcgtcaccccgtcattgcaggtcgctgcgctatcgtttgcttatgtttcatcatctacgccatggcacttgttattgtccctagtttaattctatgtgtggttaatggtcgaagtgtagattgcaaatgccaattttaatgaagggtatgtgtaggcatatatgtgatgagctgtcgaattaatgatatgtaagataggtctagtgtttctatcggctagttgtcatattcgactagaattatgtgagccaattatatggatacaatgatgacttgctttagaaattgtcgtgtcgatg

SEQ ID NO: 264970 - DNA, 2532 bp, Zea mays
gtggagatgcagtagaggccgccaggcgcagatggaatgagcgaccgggctctgctccgccgctagcctgccgccgcaccgcgccgtcgatcgccgcgccatgaacggtccccgcggctaccccctttctccaccggcaccttacccccgtatggcgtgatccaatgatagcaccaagagcgcaccttcccctctccctgacggcgtcgtcctccccgcacggcggcgcgcgcacccgcaccaagaagaggaagaaaccatgtcccccaacctggacagcgccatcaagagccaggtgccggcgctgctcctgaggcgtctcttcggcgcgtcccggcgggacgaggccaagcagctccagcggaccccggcgccggtggggaggcggcgggtgtttgtgcagacggagaccggctgcgtgctcggcatggacctggaccgcggggacaacgcgcacaccgtcaagcgccggctgcagctcgcgctcaacatgcccaccggcgggacctcgctcaccttcggcgatcgcctcctggagaacgacctgtccttcatacgcccggactcgccgctgctgctcacccggaacagcatcaaccggagctgctccaccccgtgcctctgccccgtctccaaggacttcgagcacaaggactgcagcggactggttgagatgctcggctgttccagcagctgtgcccgggtgaagcgcctcgtggacgacgtggtgactgccatcaggagcggcgtggatccggtccccattagcagcggccttggtggctcgtactacttcaggaacgtcttgggcgacagggttgctattgtgaagccgacggacgaggagccctttgcgccaaacaatcccaaggggttcgtcgggagggcgctcggtcagccgggcctcaagagatctgtgcgagtgggagagacggggtttagggaggttgcggcgttcctgttggaccatgacaacttcggcaacgttcctgccacggctctggtgaagataacacactccattttcaacataaactgcccggtaaatggaggaaacctggcaccggctcatgaccagcaacagcaagttaacagcaagattgcttcgttccagcagttcatagcccatgacttcgacgccagcgaccatggcacgtcaagcttccctgtcgctgctgttcataggatcggcatactagatatccggattttcaacactgacaggcacgccggcaatgtgctggtgaggaagcttaacggtggcacaggccgctttggttgccagacagagctgttcccaattgatcatggcatgtgcttgccggagaacttggaggacccttacttcgagtggatccattgggctcaggcttctatcccgttctctgaggaagagctcgagtacatcagaaatcttgatccaaggaaagatgtgcagatgctgcgccgggaacttccgatgatacgtgaggcctgcctacatgtactggccctgtgcacaatcttccttaaggaggctgcagctttcggactctgcttggccgagataggcgagatgatgaccagggagttcagagggatggaggaggaaccaagccagctggaggttatgtgtatggaggccaggaagagagtagcagagtgggagcccttctctgccacagctgaacatggagaagataccgatttccagttctcggtggatatgctaggagaatacagtgatgtagtgcgatcaccaaggttcaatggctcaggttccaaagtgtccagtttcagaagccctttgtctaagctcgtcgagagcgtcgacgagggcagtgatggccatgaagatcaaaacgagtctgatcgagtcttgtatgctggatggaatacatctagcgttcctagcaaagctatgggccatagtggcaatgcctcaaaaagtgcaatgaacaggagtgccgatgaacaacttccatcaagtatgtgttttgtcaggctgtcggatatgagtgcagatgagtgggatgtattcctcgaaaaattccaggagctgctgaaagaggcactgcacgagagcgcaagggcagcagcaggtcaaaggatgaagcagcggctgggcacttcatgcaagttttgagcagggcaatagcgcatcagagaagaaaaaaatatgcagtgctacttgtactgcttgcttatggagtgagtacatgatgaagatatcatcgtatgcggcaccttcaaccttaccttgtgcaacgatctaggttgcagcagccatgtccagcaggtagataggaccacaagcatatgtagtgacggtgtggagaactgcgacgcgtgtttattagctatatgtttacgaaggggaatgcttaataataaatgtttgtgagcctgtgtatattggcttgatgttagatactccagctttagcatgcaatttcttagtcgctgaaaattctttgtagcttgtgatgtgacctgtgagcagtgtaaacattgcacctttggtggaaaaataatgcttacctgttgttgaat

SEQ ID NO: 264971 - DNA, 645 bp, Zea mays
tcggttgtagaggccgccaggcgcagatggagggagcgaccgggctctgctccgccgctagcctgccgccgcaccgcgccgtcgatcgccgcgccatgaacggtccccgcggctaccccctttctccaccggcaccttacccccgtatggtgagcgccgagatttgagctgccgtctctccttcgcatcggcgtgatccaatgatagcaccaagagcgcaccttcccctctccctgacggcgtcgtcctccccgcacggcggcgcgcgcacccgcaccaagaagaggaagaaaccatgtcccccaacctggacagcgccatcaagagccaggtgccggcgctgctcctgaggcgtctcttcggcgcgtcccggcgggacgaggccaagcagctccagcggaccccggcgccggtggggaggcggcgggtgtttgtgcagacggagaccggctgcgtgctcggcatggacctggaccgcggggacaacgcgcacaccgtcaagcgccggctgcagctcgcgctcaacatgcccaccggcgggacctcgctcaccttcggcgatcgcctcctggagaacgacctgtcctttatacgcccggactcggcggtgctgctcacccggaacagcatcaaccgagcttgtca

SEQ ID NO: 264972 - DNA, 391 bp, Zea mays
  unsure (1)..(391): unsure at all n locations
cccaagggcaccagtaggtcaaaggatgaagcagcggctgggcccttcatccaagttttgagcagggcaatagggcatcagaaaaaaaaaaaatccagtgccccttgtactgcttgcttatggagtgagtccaggatgtgggcatcttcgtatgtggccccttcacccttgtgctcccctctaggttgcagcacccatgtccagcaggtagataggcccccaagcatatgtagtgccggctgtggagaccggctacgcgcgtttattagctatatgtttacccaggggaatgcttaataataaatgtttgtcagcccaaaaaaaaaaaaaaaaaaaaaaaaaaaaaaaaaaaaaacacaaaaaaaaaaaaaaaaaaaaaaaaaaaaaanaa

SEQ ID NO: 264973 - DNA, 613 bp, Zea mays
gccagaccccgacgaccttctcttctccggccgcgaccgcgcggcgctctggtcggactcgtcctccgacggggagaggcccgaggtcgaggtcgaggtcgaggttgaggccgccgatcaggtggagcgggccggggtcacggcggcggctgacgcgggcgagggggccgtggcgaagggaggagggccggcccagtggtggcggctgccgctggacgtgctgcgggtgtgggcgctgcgcgcggccaggagcgtctggtcggtgccgctcgccgtcgcgctgctcgggttcgccgtgctcgggcgccggctgtaccggatgcgccgccagagcaaggccgtcgcgcgcgtccgcctcgtcctcgacgagaagaaggtctcccaattcaagggccaacgatcacgtctgagatgaatccatgacggtggcgcggcgaactcctatcataaaacctatgcttcctgccaacggagtgactccatggcctgtcctgggacacctgtgagatgacgtgatagagcgagtagtacaactggcccagcgagccatgcagagacgctcgacttgccacaggccggggcatattacgcgatgcccagcagcagatgtact

SEQ ID NO: 264974 - DNA, 730 bp, Zea mays
cccttcactgaataaacgatgtcatgcctcacggtagctgactgtctttggagatgcccttgtgctgaagccaaatcacagaaaggaaacaaaatactcctgcaattgcatctgcggttgcttcaacttataggacttcgttgtagaacgtgaacagatcgtgaatggcagagcagatgtaatatcagggtattcctagatcgacgattcagcaagtcattggttggaatgctgggaaggtctcccaattcaagggccaaggatcacgtctgaatgaatccatgacggtggcgcggcgaactcctatcataaaacctatgcttcctgccaacggagtgactccatggcctgtgctgggacacctgtgagatgacgtgatcgagctagtagtacaagtacaactgccccagcccacgttgccacaggcgggcatattatgcgatgcccagcagcagatgtactactggctgcttgtaatttggaactacacacttgtggaagaccttgtaagtttaggacctgatctagtttatgccccttctgtgtatacccatgcttatatttttatttcctgaatccttatgtcatcgatcttgtgtgctggagttgtaaatgattggatactcagtacccatggtactatggtagtgtgatgtatatgactattacccataaatcaatgcacgagtggaagcttgattatgttctgggcattcatcgccttctatcc

SEQ ID NO: 264975 - DNA, 470 bp, Zea mays
tttcagggcatccaaaggatgaaagaaatcggtttgctatggtgagctaaacacaattacaccttttgtggagctgcttcaggaaaagggtaatacttggaagaatgatatcatccaagctacaagcagcctatgtttgaagtagtgaaatcgcaaggccttgctgccattatagagtgtagacgcacctggatagataagcaggtgtgccggtgctgaaactattgcttgagatgtcaataaacactggaattatgttgtggtttgggggtggtataatgattcatacgtgtgtaatgcagtgtggattcattcccttgtacagattgtagatataggtgagattctgcagtaagtgacaatcacagatgtacatgtgcggtattcttgtctctgcgtgccgcaggcaggtcatgatagtttgtggctgacgattggggcacaaaaaaaaaaaaaaaaagggcggccgc

SEQ ID NO: 264976 - DNA, 954 bp, Zea mays
actgcccacgcgtccggggaattgttattggcctcgacaatttggatgctgtgattcaaataatacgagaaacatcaaatcacactgcggcaacaagagctcttgtcaatgaatttgatctatctgagaaacaagctgaagcgctgttggatatcacactaaagaagcttacttcccttgagcggaagaaatttgtggatgaagctaaaaccatgtcagaggaaatttctaagttaaatgagcttctgtcaagcaagaaacttatcctccagcttatacaacaagaagccgccgatttgaaaagcaagttttctacaccgaggcgttctgggatagatgattcaataagcagtggagctgatgacatcgatattatccctaacgaggaaatgcttttgattcttagtgagaaaggctatgctaagcgaatgaaccccgacacattcagtttacaacatcggggaaccataggaaagtctgttggaaagatgcgaatgaatgacagcacgtcagatttcattgtttgccagacgcatgaccatgttctttatttcagtgacaagggaattgtatactcagcacgtgcttataagataccagaatgtactagaactgctactgggactccgttggtacagttgctacctttatctgatggagagcggataacctccatcattcctgtgagtgaatttggtgagaaccaatatctagtgatgctcaccgttaatggctatatcaagaaagtaccccttaatgccttttcatcaatcagatctactggtatcatatcaattcaactggttcctggtgatgagcttaagtgggtccgtcattgtggcaatgatgacctggttgcattggcttcacagaaaggaagggtaatagtcaactcatgtgataagcttcgtgcccttggaaggaataccaggggtgtctgtgccatgaagttaa

SEQ ID NO: 264977 - DNA, 1192 bp, Zea mays
  unsure (1)..(1192): unsure at all n locations
cggacgcgtggattagaaaggccgaagccgtctccgttcctcctcgacgcgtctcttccacagccgcaacctctatccctcgtctggtatcgtctctcccacacccctctgccccaacccagaaaaaccctcgaaaagcggcggcggcgcgacatggcggaggtcgaggctccagctgctgcggttgcggcggcgacccctgaggtggcgacggtgaccgagggcggagccgctacggaggcgaagggtccgcataagctgcaccgccagtggaccttctggtacgacatccagtccaagcccaagcccggcgctgcgtggggcacctccctcaaaaaggcgtacaccttcgacaccgtcgaggagttttggggcttgtatgatcatgttttccgtccaagcaagttgcctggaactgctgattttcacctattcaaggctggagtagagccaaaatgggaagacccagagtgtgcaaatggtggcaaatggactgtcccatgcaacagaaaggcaacctttgagaccatgtggcttgaaacgttgatggctcttattggggagcagttcgatgaaacagaggacatttgtggaattgttgctagtgtccgtgcaagaggagataagctggcattatggactaggactgccagcaatgaagctgtccaggtaaacattggcaagaagtggaaggatgtcatcgactacaacgacaagatcacgtacactttccatgacgactctaagagagacaagcccagcagaggtgggcggtacaccgtgtaagctggacgtcaagaaggccgttgctttggattggaagtggagagcggaggtggggattttcttctgggatcggcgccgactttcgtttgattcagcttttacacgaggcagttttcgccgctattacaatgttattttcctctcagacagcttatgtggtacaagaaagagacgttggagacattgacggtttctgtatggcactagatttctatcttaatatggcccccccggttcagtagcaaccccaccgagtcatttgctttttggagatccctgcaatgcatggccatgttttagatcttatatatattgtactgtatataaaacgtttgtgatctgtggagccataagcaccttgaaagcacccctgccctgtcggtaaaaaaaaaaaaattaanaaaaa

SEQ ID NO: 264978 - DNA, 478 bp, Zea mays
ttgttttttggcccgcgaaccccttaacgtatggtctttttttaacacgggtcacaacccttggatcctccccccccccctccccctcccagaaaagacccctcgaaaaacggcggcgctgcgacatggcggaggtcgaggctccagctactgcggtcgaggctccagctgctgcggtcgcgacgacgacccctgaggtggcggcgcccgaggccggagccgctacggaggcgaagggtccgcacaagcttcaccggcagtggaccttctggtacgacatccagacgaagaccaagtccggggctgcgtggggcacctccctcaaaaaggcctacaccttcgacaccgttgaggagttctggagcatgtatgatcagatttttcgtccaagcaagttgtctgggaatgctgattttcatctattcaaggctggagtagagccaacctttgagaccatgtggcttgaaacgttgatggc

SEQ ID NO: 264979 - DNA, 344 bp, Zea mays
tcgcggacgcgtgggccgttctctccgtttttccccttcgcgtatcttgggccgcgagcgcaacccttcacgtatcgtctctctctcacacggtcacaccctgacctcccccctccccctcccagaaaagacccctcgaaaaacggcggcgctgcgacatggcggaggtcgaggctccagctactgcggtcgaggctccagctgctgcggtcgcgacgacgacccctgaggtggcggcgcccgaggccggagccgctacggaggcgaagggttcgcacatgctttaccggctgaggaccttctggtacgacatccatacgaagtccaagttctgggctgcttgg

SEQ ID NO: 264980 - DNA, 415 bp, Zea mays
gtccaagaggagataagcttgcattgtggactaggactgccagcaatgaagctgtccaggtaaacattggcaagaaatggaaggatgtcatcgactacgatgacaagatcatctacactttccatgacgactcgagaagggataagccaagcagaggtggacggtacaccgtgtaagtcgcacacgaagatggtcgttgttcggactggacagaggctgagagtggagttttgtgctgagatcggcaccagctttcatttaatacagcctcagcttacctgaggcaattttcgcacctgttatgatgttgttttgctctcagataggtttatgtagcacaagaaagatatgttggagacgttgacgattttgtatgcaactaaatttctatcttaatatgccccgattcaacagc

SEQ ID NO: 264981 - DNA, 723 bp, Zea mays
gagctcgccatgtgggacaagctcggggcggtcgtcaggctcagctatggcattgggatctacggggccatggcactcgccgggagattcatatgccaaatggccgggatcgactgcacggggggcttccatccgtctctcacggcactcgtcgagggtcttggctatgcagctccaccaatcatggctctgctcttcatcctcgatgatgaagttgtcaagtattcgcctcacgcgcgtgccatccgtgatgtggaggatgaggagcttcgcagcttcttctgtggcatgtcaccatggcagttcatccgcatcgtggctgctagctcaattggcgaggagctgttctaccgcgccgccattcaaggagcactggccgatattttcctgagaagcacggagctaatgaaggatgctcgagggattgcatcactggtataaacacatatatgctttttcagctgaatcgagatgaaactgaattttgcgatacacaagaccacctaatacatgtctctatgaaactgtgccggcgcaataatgcagagtggtatcgttcctcctctggttccattcgctcagacgttcgcggcagtcatcactgcagccctcacaggaaccctctactacgtcgccacaactccgaaaggtgacccagatgtcctcctgacgacgacagtcctgattcgcgtgactatgttaatttcttttggtttttttctt

SEQ ID NO: 264982 - DNA, 503 bp, Zea mays
ctcgacttccgccccgagcgcttcctgcccgggggcggcgcggagaaggtcgacccgcgggggaactgcttcgagctcatcccgttcggcgccggccggaggatctgcgcggggaagctggcgggcatggtgttcgtgcagtacttcctgggcacgctgctgcacgcgttcgactggcgcctgcctgacggcgaggagaagctggacatgagcgagacgttcggcctcgcgctgcccaaggcagtgccgctccgcgccgtcgccacgccacggctcgtgccggaagcctatgcctgagcctgagttagctgtcagagttcttcacgcgtgctgtcccaacaagcatggtttggcttggatggtctactctgttggtgttgctgccttcctgcatgcgtgcgcatacactagtattctgtgttgatcctacacttgttgcctggtatagtacacaacatttgaaccgatgatggttgatctgaactcagaggagttaactagag

SEQ ID NO: 264983 - DNA, 1911 bp, Zea mays
ctgtaattgacttgacctcacttcccctgtggggaggctttaattttcttccgatcgatcatagtatccgctgcggtgtgattgcctgcccccaccccattgcgcctgcgcctgcgcctcgcttcatccggtgcgctgcccgcctcactcccgtcgtcctcttcctcgtcctcgctctcgtcgcggagcggtgtggaggcgcgcgctcctggaaggcacggggcaagagcggaggaagatcatctgggtgttggagtcatccagaggcacaagctgaggaatggggcaaaaggactccaagccttcacatggatatggctactcttcttatgattacgggagtgcttcatcgggatacacctcgagaaacactgggaattcgtcctccagttatagcgtcaggtacgcgccttcttcggagaacagtgtacagccggagacacatgccaggttgcagaggaagtattccaagatcggtgatgactaccgttctctgagccaggtgactgaagctttggcgcaggcaggccttgaatcttcaaatcttatcgtaggcattgattttacaaagagcaatgaatggacaggtaaaatttcattcaatcgccgctgcctacatgatattggaaacactccgaacccatatgagcaagctatatctattattggaaggacactttcagtatttgatgaagataacttgattccctgctttggatttggtgacgcatcaactcatgatcaggaggtattcagcttttacccagagaaccgcccatgcaacggatttgaagaggcgctagacagatacagagaaatcgttccaactcttcgattagcaggacctacatctttggcgccgatgattgacacagcaattggaattgttgacagcactgggtggtcaatatcatgttcttatgataatagccgatggacaggttacccgaagggtcgatacacaatatggacagttgagtccagaggagcgggatactattgatgcaatagtaagagcaagccagttccccctgtcaattgttcttgtcggggttggtgatggaccatgggacatgatgcaccagtttgatgacaatatacctgctcggtcatttgacaatttccagtttgtgaatttcacggagattatgtcgaagagcatagcagctgacagaaaggaggcagaatttgcattgtcagcgctgatggaaatccctacacagtacaaagcaacaattgatctccaactcttaggccgtcgccaaagaataaccccaagaattgctctgccaccaccaacaaggaccgcgtattcgcggtccagtagctttagccaacagtctggtgtttattcgcgatcaagtagctttgaccaacaaacaagtggcgcctctcagcaacgttctgagagcttgaaacagcagaagaaacctgcagccccgaagagacctgacacttatgcttcagaaagagctttagaggacagaattctgtgccccatctgcatgtataaatcgaaggaccttgcatttggatgtggacatcagacttgctacgaatgcgggagaaatttggagcgctgccctctgtgccagcagaacataaccacgaggatcaggctctactgatttgatcaggctatgaattagaaaaatcttggaacaacagactcccgggcaagatgttcagaaccagctttgtttgtaccgtgcttcattttgtaattggtgtcacttttctcggtagttatgccaaaggaaagcgcaccagaaaataatgtacatatttatcttccagtagtactgtacattgcgagctgcacatagatcaaggtgttttttttttgtgtgtgggtgtgggggtgttcaaataggggccgggtgaagggaagaaatcaaggtgtcatatata

SEQ ID NO: 264984 - DNA, 459 bp, Zea mays
gtgccccatctgcatgtataaatcgaaggaccttgcatttgggtgtggacatcagacttgctatgaatgcgggagagatttggagcgctgccctctgtgccagcaacacataaccacgaggatcaggctctactgatttgaagccaatgggattgaaaaatgttcagaaccagctttgatgctactgtgcttcatcattttgtaattctgaatgagataacactgtctcagtagtttcgctacactagttatgccaaaaggaagcgcaccagaaaataatgtacagatttttcctccttttatctcttttgttaggtaaacaagttagacagcagtaaaattctgaatgagataatggatattgtgaagcaaaactatcgccatggaaaatatgcattctgtatgcaatgaccccatggattaaagcttcagtaataagtaagatggtcccctctatat

SEQ ID NO: 264985 - DNA, 279 bp, Zea mays
aaattgcagcattgcctccggcttgagcaataattgacttgacctcacttcccctgtggggaggcttttcttccgatcgatcatagtatccgctgcggtgtgactgcctgccccaccccattgcgcctgcgcctcgcttcatccggtgcgctgcccacctcactcccgtcgtcctcgttctcgtcgcggagcggtgtggaggcgcgcgctccatggaaggcacggggcaagagcggaggtgagtctagcccgagccccgtggattgctggttcggtggt

SEQ ID NO: 264986 - DNA, 611 bp, Zea mays
  unsure (1)..(611): unsure at all n locations
gcttttgtgtacatacctcctcaagacagatgggaagtcttgaagatccctcttgatcgctatttacccacatggagaggaaatgtgatccaggcaaagttggaaatgaaccctgctcggatcgtggggatgtctctctctgtaaacgcagaaggcggtgttcctggcgccaagactgggcctggtgattttaggcttgatgttgcttggatcaaagcgttgagagctttgtgaactccacaagtcatagttttatttcacatcggccctttccttctttatcaccctgccccagtggcgccgctgaactcatcacccgaccacaaccacaggagtaaccatagcacagattgccaactcctttatgcacttaataatggattttgttttgcttctgaggtttatgaataagtggtagaaaaatggagcatttagttaaggtgccccctttggacagatgttgctttttctctctctctagtatctgatcggccgataaaacgagtgcattccacccggacgataatgcgagagtaggattcagtttaattctttgactgttaagagtactactgtttcatcgtttgaattatacncgttcgtttgagtac

SEQ ID NO: 264987 - DNA, 949 bp, Zea mays
gacagatgggaagtcttgaagatccctcttgatcgctatttacccacatggagaggaaatgtgatccaggcaaagttggaaatgaaccctgctcggatcgtggggatgtctctctctgtaaacgcagaaggcggtgttccaggcccagtcttcgcgtatcctcgcgcccaaactgcggtagcgaaaacgcgagcgctgcggaacaacgatggcgacgatgtctcttgccgcggcgtcacccctcgcctccattccccgcggcatcgccgctcaggctccttgcgcggcattcctgtccatccgcttaggtggcgcgacggcgacgcggttcgctggactggcggtggcctcgcagccagcggagcgtcgcgccgcggcgatggtcgcgatggcgaagagggagcaggagctggaggagatccgggccatgacgacggaacagatggaagaggaggtggtagacctcaagggggagcttttcctgctccgccttaagcgctcggcgcgccaggagttcaagaacagcgagttcagccgcatgcgcaagaggattgctcgtatgctaaccgtgaaaagagagcgggaaattgaacaaggaatcaataaaagattgtctaggaagcttgataggaaatggaagcagagcattgtggtcagaccaccaccatctctaagggggaacaaagaggagtagaaagccgcaaaaagagggcaatgtgcaaaagtcgtttcatgcgagtgttgcaggaaggtcccttcatgatttcaacccttattgcgttgttatgtattccatgtttacattttgctaagcattgctatctgaatctgaatttcagttgttagtctcttctgtaaattttgacttatttaaatttacacttctatctgtgttatcagtaatttaggagggcagtcatttgcccccaaaggggcatgctcccctccc

SEQ ID NO: 264988 - DNA, 764 bp, Zea mays
gccagatgttctgtctcatgtgtcagtccgagcaaggaatagcaaggtactgtttgcgacctgttttgaccacaccactctatctgaacttgaaggatatgatcagaaactgttttccttcaagcctacttctgcagatataacctatagggagatcacagagagtgaacttcagcaatcaagttctccaaatgcagaagttggccatgcagtaccatctatttcattggccaagaagaaatttcttggaaaatatgcaatatcagccgaagaattctctgaggaaatggttggggccaagtctcggaatatagcatacctcaaaggaaaagtaccttcatgggtcggtgtcccaacgtcagttgcgataccatttggcacttttgagaaggttttgtcagatgggcttaataaggaagtagcacagagcatagagaagcttaagatcagacttgcccaagaagattttagtgctctaggtgaaataagaaaagtcgtccttaatcttactgctcctatgcaattggttaatgagctgaaggagaggatgctaggctctggaatgccctggcctggtgatgaaggagacaagcgttgggagcaagcatggatggctattaaaaaaggttggggcatccaaatgggaacgaaagaacactatttaacacacgccagggtgaacctggttaagaattaccttccaagggcggtccccgtgcagaagttggtgatggcaaataaggctttggcaatcaaaacaaaaa

SEQ ID NO: 264989 - DNA, 822 bp, Zea mays
  unsure (1)..(822): unsure at all n locations
cggacgcgtggccgcacgcgcgggttgcagcatcacaagcaaactgaagtcactcacagctctccagcttccatccagaaaggagaaggaaacaagctagtggacaaccaaccatgatcagcgccaagaagattgctcatctcgccaagaagtggcagaggatggctgcacaagggaggaagcgcctcgccttgggggcggcagcaaagcaagccgacgagtgctgcagctatgtggcgagcaagggccactgcgcggtgtacacggccgacggggcacggttcgaggtgccgctggcgtgccttagcaccccggtcttcggggagctcctacaaatgtcacaggaggagttcggcttcacgggcggcgatggcaggatcacgctgccctgcgacgcggcgatcatggagtacgccatgtgtttgctcaggagaggagcctctgctgagctagagcaggcgttccttagcaccatggccatgtcatgccactgtgccagccacatggcgccgtatgttggacgagctcacgagccagacagcagattgttgtttagtttctgttcagtgtagtgtagatagtggagcaaaggtattagctagataaatattattccaagccttctgatcgtgtgcaaggacgcgactaatcaagcaaggtcttaagaagttagagagacatgatttatgttctgtacttttcgaaaattgtgaggactactcacattacatagcaaaagactttcttgtgcncanncataaataccactagaatacagatattttgaaaaacaatttttaanttttaagctctagtttatgt

SEQ ID NO: 264990 - DNA, 537 bp, Zea mays
ataggtgatgctgctgcacctgcacggtaccgattcgcagtgttcgacccagagccacccgccgctgggttgccttatcccccctgacttgagggtgctgctgcagatgttacaggaggtgtccggtttcgctggcggggatggcactggcaggatcacgctggcctgcgacgcggcggtcatggagtacgccatgtgtttgctcaggagaggagcctctgccgagctagagcaggcgttccttagcaccatggccatgtcatgccactgtgccagctacatggcgccgtatgttggacgagccaggcagcatcagatcgttgtttagttagttgctgttccgtgtatgtagacgtgtagtgtagagcgatgattttaactagggggggtgctattcaaagcctttctgatccacagcaacccatcaagtgagggtgttgttagttcaagagaattaagagacgtgattcttgctttgaaaaaaaaaaacttaactgaggaaaagctggaaaaaagtatatggacagtaagaatatt

SEQ ID NO: 264991 - DNA, 458 bp, Zea mays
ccggttcggaattcccggcgtcacaagcaaaccgaagctagtcagtcacacacagctctccagcttccatccacaaagaagaaggaaacaagctaaccatgatgatgagcgccaagaagattgctcatctcgccaagaaatggcagaggatggccgcgcaagggaggaagcgcctcaccttgggggcggcggcggcaaaggaagtcgacgagtgctgcggctctgtggcgagcaagggccattgtgcggtgtacacggccgacggggcacggttcgaggtgccgctggcctgccttagcacccctgtcttcagggagctcctgcagatgtcacaggaggagttcggcttcgctggcggcgatggcactggcaggatcacgctggcctgcgacgcggcggtcatggagtacgccatgtgtttgctcaggagaggagcctctgccgagctagagcaggcg

SEQ ID NO: 264992 - DNA, 999 bp, Zea mays
cgaactcaaaaccaccgtagccatgcaagcaacgcacaccggggagggagctcagtgtcgccgtgggtatttcatgcttgtgcgtccgaccgaggtgattggagggtcgaggaggtgcatccgcgctcgcagaagcatacactacagaatcggggcacacagagttgagtcggtatggagatttttcaccagtggacggatcgtcgccgcgtttcgccctaccttggatcggagctgctatgcttcaatagctgaaatggaagaggaagaagaagagttgcagttggcgaggcacatggtcaataggaggcgacgtgcacgcaatgagcgtcgtcatggtggttcgattcccgggcgtgttaggattcatcgtgatcacatgagcggcgatgcaagaatccgagcggactactttggagccaacccggtgtacacggatgctcaatttcgtaggaggttccgcatgcgtcgccatgtctttgagcgccgtgttgatgttgtgcaacaagtggatccttattttgggcagcgcccaaattgtgcgggtgagattggtctttctgctctacagaaagttgttgctgctgttcgaatccttgcttacggtattccggctgatgccgttgacgaatacgtacgtattggggaatctactgctcatgaggcattgaaacacttttgcacggtcgtccaaaccgcgtttgctccgtattatctctgtgcaccaaatgcagaagatatcgcacgccttctccaagttggcgagtcacgtgggtttcctgctatgcttggtagtgttggtaactgcccaagttcatggaacgggatgtttacagggcgtggtaaacatcctaccatgatcttggaagctggtgcgtcgtatgacctgtggatatggcatgctattttggtctgccaggtagttgcaacgacataaattttcttcaccgttcaaacctttataaaaggcatctgagcggtgacacacctccagtttca

SEQ ID NO: 264993 - DNA, 755 bp, Zea mays
ctatgctggattttcgtggttgttagaggaaaggctgcgtccgtgatgtcgaggacaagaagcagaaggccgtatgcatggagaattacagaaagaaatatgaggatggacgggacaccttatctgatattgatgttgagagggaagaggagtgtgggatttgcatggagatgaacagcaaagttgtgttgcccaactgcacccatgctatgtgtatcagatgttaccaggactggagttcaagatcgcagtcctgcccattctgccgtgacaacctgaagaagacctgtcctagtgacctgtggatctatgttgaggaccaagatgtggtcgacatggagacggtgtcgagcgagaacctcagacggctgttcatgtacataagcaagctgcctctgattgtcccagacgtcatcttcagtgtgtatgattcccacatcaaatgacttccgacgcgaccttcccgacgaccttcagccagtgcccagctccagttaatcttatgcccccatgtcctccattttcatgctttgctcaagcttttggaagtgcctgaactgatttggaaccgcaagccttccggtggtgctttagaaacttgtttagtgcctgcatgcatccttaatcatatgcagccactctgtacatatctgacttggctcagttaataggggactgtgcttgccccaaatggaggcagggccgtttgtgtctttctcatgtttccattagcgaagcaacgcaaagttttgggc

SEQ ID NO: 264994 - DNA, 989 bp, Zea mays
cacgcccgcgcccactcacgcccggccctgccccgcgccctcatcgtctcctcccggcctcccctcagagcccgccgccgctgcccccacgccacccaccccaccccgcccccgcccctaccgcgcggtgcccgagacccagaggccagacccctttcttcaccttccttcccatcgcaatcgcaagcccccggctccggcgctcggcggtcggccaggttcgggagatcacttcgtcgcggcgaggagggagggggtcgccgttagcgcgcggcacttggatgagaagggcagcggtggaggaggatgcggaaggcgtacagggactccatcaaggtgctcgaagctgacatccagcacgccaacaccctggcctccgagtttccccgggactatgatggtgcgtgcctgcagatgcggctgtcgtacagtcccgcagctcatatattcctcttcctggtgcagtggacggactgcagcctcgcaggggctcttggtctgctgagaatcctcatatacaaggtttatgtggatggcacaacaaccatgtcgactcatgagaggaaagccagcatcaaagaattctatgctgtgatatttccttctttgctgcaactgcaaagggggatcactgatgtcgaggacaagaagcagaaggccgtatgcatggagaagtacagaaagaaagatgaggatggacgggacaccttatctgatattgatgttgagagggaagaggagtgtgggatttgcatggagatgaacagcaaagttgtgttgcccaactgcacccatgctatgtgtatcagatgttaccaggactggagttcaagatcgcagtcctgcccattctgccgtgacaacctgaagaagacctgtcctagtgacctgtggatatatgttgaggaccaagatgtggtcgacatggagacggtgtcgagcgagaacctcagacggctgttcatgtacataagcaagctgcctctgat

SEQ ID NO: 264995 - DNA, 846 bp, Zea mays
cgccaccccaagctgaaggcgttctacaggtcgatatcgccccggcacttcttgaacggtgactgggacaccggaggcagctgcgacaacaccagccctctggccaagggagggagcggcgtccacctcgaccgttcggaggacgccgacgccgagggcgccgtgaggggcaccggggtcaggctcctggacgtcactgccctatcgcggctgagggacgaagggcatatttcacggtacagcatcaaggccacttctggcgttcaggattgcctgcactggtgccttcccggcgtgcctgacacctggaacgagatccttgcggcccagctatagcctgtagctgaatttgaagatgccaagggttatgtcgaattgtttatgggtgaagctcgtatatacagtaactaccacggagtactacgtcgttgccggagacccaatgctgctggtagtgaaacactgagctgcagtacattctttcgggaccgtgcttaactgtagaaaatacagggccttttttttgtgtaagtacatgttgtgtttgcctactgttacctgtgtacgccagttgttaattggagaactggattgatagatagtttggaagtgttgcctgagaggtagggcaacgcatcttgcagcatccagtcctttgagaactcatctgttatgtaccaaacacgaacagagagcatcatgcattgctgatccatgtgatgtggttgttggtacgttgattgttgctaggttcgtcctctcaccccttgtatcaccattgtttatggtacatgtggaatcatctggtaagttctgaatgtcataattaattactgaactgttctt

SEQ ID NO: 264996 - DNA, 528 bp, Zea mays
gacaattcaagaagaaacagagttgtcagaagctgtaaatcaaccttgcaacacattaatggtagagtgggcgcatcagagactgcctcttcctatccactggattctaagtgcagtttgctgcattgatgatccaaaaggcacactctcaacatcagccaactatattcttgatgtctcaagggctggtcttatcttccttttaggtctggaggccatttcagctaccccgtgccttcatgctcctttgatctggaaaattcatgcactttcggtctctatccgctctagcatgcatttgctacaggaagacagaagtagggatattttctgtgctttacaggaactgtatggcctgcatctgaacaggttatgccaaaaattctgtaaaccaaactctatcgaggaagttaagggcgttgtactgggcacttcagaggaagcgatggagatcagtagccttgaaattctcaggtttcaggagaaaattcatggaagctatactactttggttgaaagcctggttga

SEQ ID NO: 264997 - DNA, 1102 bp, Zea mays
caacactcacgtttctccagacacagagggcagagcgccgccgccgccgagtcaaggatgatgggcagtgggatgggcgcgcccggcggcgcgctgcgaccggtgcagagcgcggccggggagacgatgctgctgtggggcctggggcagcccgagtcgcaccgcaacaacgcgctggtccgccaggcggcgcacgccttcgagctcgacgcctgcgggcggcgcctgtccctgctgcagtccccctcctccatggccaccccgggggtcacgggggcggtcgtctgggacagcggcgtcgtgctcgccaagttcctcgagcactccgtcgactcccagcggctgctcctccgcggcgcgcgcgcggtggacctcgggtccgggtgcggcctggtggggcgcgtccccgccctgctgggcgcccatcccgcccgcccccgcctcgccgaccggctcaagctgcttaggaagaacgtcgccctcaatgtcgacgacccccacgtcccgggctccgctcgggtcacggagcttgtgtggggcgacgatcctcaccatgaattgctcgaggagccactgcccgatttcgtgcttggctccgacgtcatatacaacgaggaagctgtggacgatcttctgatcactctcaaccaactctcagggaagcacactactatacttctagctggggagcttcgcaacgatgctgtgctggagtgcttcttggaggcagccatggaggacttcctaattgcgtgcatcgagcaggaccaatggcaccctgaattccgcagcaaccgtgtagccttgtttatcttggtcaagaaaccagagaaacctagcgcagagtagtcgtctctcgtctgttcctcgccttggtgtagaacaaggataggaggcatctgggttttccctttttccaattccaattatgttgttgcgatagccaaggttttagcgccggcttaagccatggaagtttgatagctcattgtatggtttgcttgcaacctattctgaaagtttgtacaagagtgaaagaaaggatttagtattaagaagcattaattggccccttttgaacttaactttaatagacattttt

SEQ ID NO: 264998 - DNA, 2181 bp, Zea mays
cccattcgttcgctccaatgtccaatcgatgtttctgttctgatgggcccatggccagtggctatggtgagtacttactgaccaacgaaacgagagggagctcagtcagtgcctcctcgcctataaacaaggggccggggtctctctcctacggcgtgcgcatgctttggcttggcaaacccgattggatcttcagaaaaatcgccatcccctctccctcttctcgtgtccatcgctcctctacccattcttacttgaatcttttctgaagaggaaatctgacttcgggagcggctcctccgcgttgcctggatcgcccgggatcagtattttgcttccagtcagaggtccaaaatatcaaagggatgcagaaagatgtggttgcatgatggagtaccttgcctggaaattggcaggatacacaaacatagttgtactttacttgatctcgatgacattggactgcaaatatatgcacaacaattgcctcatgcacacacacataatggggccgcgagttgtagctcaaccatcgtctctggtttctttctaggtggagatggttaaaattgctggtcacttataattaccagcatcttatacgtcattgttgttcatcgccaacttattcaagtttgaaagtagaacactgagaagatggctgagaaagagaatattctaatgcagagatatgagatggggaagttacttggaaaagggagttttgccaaagtttaccatgctcgcaatgttaagacttcagaaagcgttgctatcaaggtgattgacaaagataagatcaagaagtgtggtcttatggatcaaataattcaagagatttcggtgatgaagttggtaaaacatccaaacattgtccaattgtatgaggttatggctaccaaaaccaagatatattttgtgatagagtatgtcaagggaggagagttgttcaaaaaggttcaacgtggaaggttaaaagaagatgttgctcgtacatatttccaacaattgatcagtgctgttgacttctgccatactagacaagtttatcatagagatctaaagcccgaaaatcttcttcttgacggaagtcacaacttaaagatttcagactttggtttgagtgcacttccaaactgcaagagaaaagatgggttactccacacaatttgtgggactcctgcatatgttgctccagaagtaattagtcaaaaaggatatgatggtgcaaaagctgacatatgggcttgtggagtgatcctctatgtgttgttggcgggctatcttcctttccaagacaagaacatgatggacatgtataagaaaatttgcaaagcagaactcaaatggccaagttggttttcttcagatgttcgaaagcttttgcggcgcatccttcatccaaaccctaatagacgaatatctattgaagaaataaggactcatccttggtttagaattggtcttgatgcaagattgtttgattctacaacgagagattatgtgcctagtgacatggatttggctttgaattccttaaatagcaatatggtcgagtgtaattcagcggcagagaaactgactattttgaatgcttttgatatcatctccctgtctaacgggtttgatctctctggtatatttgagaactcaaacaaggagtctaaattcatgtctaccaacacagctatgacaattatcaccaagctaatggaagttgcaaagagcttggatctgaaggttataacaaaaactggtgggttgttgaatatggaagctgccaaatcaggaataaaaggtgtgatgtctataaatgctgagatatttcaaatcacaccaaattatcatctcgtggagatcaagaaaatcaatggtgacatccttgagtatcataactttatgaaccaaagcatgagaccggcactagaagatattgtgtgggcatggcatggtgaacaacctgacgagaagtagactcatcaactttagataatcatcaacctacaaccttagatattgtggcagctttaatgctattagaaagtgtatcaggcattcaggccaaaaaaatgtcatgggacttaataatattacttatatgttgtttttattctcacgttcatgcagtccaatgttctttctgttgaccccccctactggaacatggtttctatctcaagg

SEQ ID NO: 264999 - DNA, 602 bp, Zea mays
gtggagcagctgtatttaacaatgtcatttcactgtcacaaccatggcgatgaatgttggctttctcagttttggtccagtttcgttactgaagttaccttttcaaaagagcaggtgaactatcattgtgcaattttgctgggagaaactcttgaacttaaatctttttgatatcactagacttcatcaatcatggtggagcctgttattgtcatgcagatgctcgctaagaagtctgcaactgttggttggtcaagggtgattggcgattttgcacatacggatccgcagttactgctgcctcaggttgctcagcaatgtgctgctggttgggcaccgaggaatccatcaggttgcatcctttttgcccggacgtcgatttgtgcagttgaagtggtaaacgtttttttatcttgtttcgtcctcatgtatatacgtaggcttgagcctttgttggctccccattttttggcgacattaatgcggtaggagttatgtgatgtccgcagtcggccctcccttgttgaattcctttggatgtatcctctctctttcgtacatgccctccctgaaagtcaatgcaaatatctcgtgtttctagt

SEQ ID NO: 265000 - DNA, 909 bp, Zea mays
cgaacgtgaagaagccgcgtgcgttatcctttgagcagtttgggcgctgagcaagtccagtgagagagggagagcggcgagaggatggctgggatggcgtcgctgcagggcgccatggcgtcgctctccatctccgcgctaggcgcggcgacggcgagcagcagcagcttctggggcaaccggctcgccacctactccgcgccgcagcctggggtaaggtttatggtcaagatatgcccaattgaaatgagacttaagagatgggagcgaaagaagtgtaaaccaaacagtcttcctgtgctgcacaagatgcatgttaggatcggggacacggtacaggttattgcaggccgtgagaaaggaaaggttggagaagtcacacgccttttcaagcacaacagcacggtgatcgtgaaggacctgaacttgaagtcgaagcacaagaaaggcacagacgatgaacccggtgaaatcgtcatgattgaaggccccattcatagctcaaatgtgatgctctactctaaggagaagagtgtggtaagcagggttggccacaaattcctggaggacgggaccaaggtccgatacctggtcaagaccggtgaagtaatcgacagtgttgagaagtgggtaaaggtttttaaggaaggaaattcggagtaacagttttagcatgaaaacctgcaaaatgctctgaacgctgactgcgtcttgcatgttgaattgagcctgtttatccctctatgttgttatttacgccagtttttccccctgtaaattatacagttgtcaccaaatcttgcaacgcaagtcaatgcgcatcagcatatgctgatcttgttccgcttcaccagtcagagttttggatgacaacccacgcgtccgcgaacgcgtggacaaagaagtggg

SEQ ID NO: 265001 - DNA, 694 bp, Zea mays
aaagagaatcccggcccgtgtccagaagacgcctcagccaccgcaaaatccccaaatccgcggcggagaggagagagccggagagaggggcgcagccagagagatcggagaaggggaagaagatggtgcgggtggcgacctacttcgcgatgaccttcggggcgttcctcttctggcagtccatggacagggtccacgtctggatcgcccttcaccaggacgagaagaaagaaaggatggaaagggagctggagataaagagaatgcaggcagagttactggcccaagctaaagagaatgaatcatgattgtcatttgtccaatggtttcaggcagttcctttatcgtatttcctctgctgtattttccatgcaatatcttgactgatgtatgctcatgctcagcacctccaataaagcgagacatgctatagcattgttgaatgcaagtgggtatgcagtttgcagtatgcttatgttgaattgatgtaacttagccgaactgaaagaggctgccccagcttgattggaacagaggaatttgctgctgtttttgttcttattacggaacaacacaagtcaactctaaaaaaaaattgtttatgagtctggttataaggtgttgttttgtactgagatttcattgttcacttgaagaaacctctgtcggaggagcagaatgcttggtgctgttt

SEQ ID NO: 265002 - DNA, 880 bp, Zea mays
acaggacagcgtccacagaaagaagaaagagcacagagagtggagtagtggacagaccatggagctctgcgtctctacacccccatcctccgtccgcgccaccgccgcgcccatatccttcgccccgccccgacgtggcgcgtctgcctccaccgccgttccgccccaccgccgcatcccaactcgagtctggcgctgcgccagcgcggccgggcctggcccggtgccctccgaagagccggcatccgcctcctacgccgtcgtcgtcacggacaagcccgatacgcctgccgacgacaaggccgaggaggttagcgccgcgcctagtggctccgcggaggcgcctatggcagagctggtgccgtcagaggcgtcatcatccccagatgatggcggcctggatgagattctaagcaagttgaacattgaagtgtctccaactttaatcctcactggatttggtgcttttattgctttatggatcctatcttctgttgttgctgcagttgattcagtccccctgctcccaaaattgctggaattaataggaactgcttacacaatttggttcatcgcacggtatctccttttcaaggaaagcagagatgacctgtttgcaaagttcgaagatctcaaacagaggattatttgatctatcgtcgaccttttgccacgtgtttaggctttacagccagcttattattaggtttttttccccctttcgtttgaaatatttctggatggggtaagaaggtcatgtatctaaattgtctcctcatggggtctgttaattgttatcagaccccaagttcggctagtgcgcttcttcaggtcaatatggattttttttttactcaatcctatgtgtatactgtcgagt

SEQ ID NO: 265003 - DNA, 542 bp, Zea mays
gcgtccgcacacgcatccgcccacgcgtccgcccacgcgtccgggagagcagagagagcgggagatcatggagctctgcgtctctaccactgcctccgtccgcgccaccgccgcgcccatatccttcgccccgccccggcgaggcgcgtctgcctccaccgccctcccgctccaccgccgaatcccaactcgaggctggtgttgcgccagcgcggccgtgcctgacccggcgccctccgaagagctcgcatccgcctcctacaccgtcgtcgtcgcggacaagcccgattcgcctgccgatgacaaggtcgacgaggttagcgccgcgcctagtggctccgcggaggcgcccgtagcagaaccggtgtcatcagaggcgtccccgtccccgtccacggatgacggcggtctggatgagatactaagcaagttgaacattgaagtgactccgattttaatcctcactggatctggtgcctttgttgctttatggatcctatcttctgttgtttctgcagttgattcagtccccctgctcccaa

SEQ ID NO: 265004 - DNA, 846 bp, Zea mays
tttgtaaacggaagaaatcttcatcaagcaacaggaagcgagagcgtgcgatttcttttttcttcctttccggtgacgccaggtgaatcaccagccggccggtgcgccaaaggctagggttccgcggggcgcgggtgcgggctcgactttcgtagcctcgccgccggcgcgcgggaaccggatgctgctaagctgcgggtcgctctcctcctgggtgcgccgcttcgtcgcctgcgttggagcagtggttgttttggttgtgcccagcctactccgataatagctgttgatgagcccacaaaaggtttaagaattcaagggcgctcagtaaaaagacacaatttatctgacgacttttggagttcaagcccgcacgaaatggagaacagtgccttgcaatcccggcacagtatgtcctcaatcagcactgctgcacagcctaatgatcagcatgcttctggaactagcaagctccccaaatgagtttgtaaatcaaggtagtcttctactatggcaccagactagacagcagtggattggaaaccgaaggcttaattctcagggtcaacaaagtcaagaaccaaaaataagttgtaatgctacatacgaaagcctgctcggaagctcgaagccgttcccacaaccgacccctcttggtgaaatggtggattttctcgtggtcagctgggagcaggaaggcttgtacggttagagctggttattggaaggtgccgttggttagagctggttattggaaggtgccgtttgtaatcacgttattattcgctgaaatgtacgcagcttgagtaggctgcagaagtctgtgtcgtgcttgaatgtggatgc

SEQ ID NO: 265005 - DNA, 864 bp, Zea mays
cggacgcgtgggcggacgcgtgggcagagcagctgcagggaggccgccattatcgcagcacgccgccgcgtcatctaatcgaggcgagggggagacagagaggaggaggaaaaacgggaaataaatcttcatcaagcaacaggtagcgggagcggacgcgaggtgaaccactagctggccagtgccggccgaggctagggttccggggatcgcgggcgcgggctcgggctcgactttcgtagcctagccgccgccgccggccgcgcgggggaaccggatgctatgctgctgagctgcgggtcgctctcctcctgggtgcgccgcttcgtcgcctgcgttggaggttgttttggttgtgcccagcctactccaataatagctgttgacaagcctacaaaaggtttaagaattcaaggacgctcagtaaaaaggcgcaacgtatcagacgacttttggagctcgagcccgcacgaaatggagaacagtgccttgcaatccccgcacagtatgtcctcaatcagcactgctgcacaacctaatgatcagcatgcttctggaagtagcagctccccaaatgaatttgtaaatcaagcaggaaataatatattatgacagagagtctctcacgtataggccaactcctgaaattggtcacacacatggccagatgtaaactatttgttcttatggctcccgaattccaaccctatagggtcttctactatggcaccagactagacagcagtggattggaaaacgaagacataattctcagggtcaacaaagtcaaagaccaaaaataagttgtaatgctacatacgagagcctgctcgggagctcgaaaccatttgcacaaccgatccc

SEQ ID NO: 265006 - DNA, 741 bp, Zea mays
ctcgagccgccctaggcccctagctttcccgcgagcgggacggcagccgccgtatcctccttcctccaataccgagcgggtccaggcaggtagcatcctcgcgccctgtcgtgtcgcctccgcctctgagttcagctcgccggcagccgccgcccgcaatggaggccctccggaaagcggaggcggagctcacggtgtacgtgcacccctccaacgccaagcgcgtccggcacgccgtatcccgccagcttagcgcgcttctcttcacgtatgtggaccgttttgatggcgtgttgctgatgcatgaagtttcattccttattggcaaagacaaagagggcaaacccatatatgaaaggagtgaccgtaatgatcaaattgctgaacccgtttcttatggcaaaatcatgaatggcttggtgccatatttcagcgtccaagtgcatgccaccctgctgctgttctctccccagccggacatgatcctggaagggatggttgaaatgattgggaaggagtcaattcatgccattgtattaggggttttctcagtggcaattatgtctgaagatattaagttcaaattcaaatggaaaagtgatggagggaaatttgtgagcctcacagataaaaaacatgtgattgaaagaggaacaatgataaggttttctgtcaaaagggtggatacagaaatgagttgtcatattactggatctttaatcccaccttacactggatgca

SEQ ID NO: 265007 - DNA, 749 bp, Zea mays
gcgcccactcgttcgtccactcgtccgcccactcgtccgcccactcgttcgcccacgcgtcgggctcgtggaggagtcaattcatgccattgtattaggggttttctcagtggcaattatgtctgaagatattaagttcaaattcaaatggaaaagtgatggaggaaaatttgtgagcctcacagataaaaaacatgtgattgaaagaggaacaatgataaggttttctgtcaaaagggtggatacagaaatgagttgtcatattactggatctttaatcccacctcacactggatgcatgcgttggttgtcagtacatgatcctaaatatgcatcagaactcaaaagtggtgaaagtagatcaagggatacaagcatcaaaattgagcagagtgaacaagaacatagaatactcaagaatgaagatggtatggtgaaatctgaacggccatataaatcccgaaagagggggcgacacattgagaaatgacatttcattgaggccgtgaagatacaagaatgtggaagtcatgttcgcttcaatggttctgctgcctatttatgtttcttgtgggggggagaaggtgcctccagttggagatcccggtagcttcatagaaatgtacgatgatttttgtaaaacgaatggaaggttgcatttgcaaattatcaccttttttgacaagatagtagtaactgatctcaccgtaagggtttattggcaaatggcaagtcccatgtttcaatta

SEQ ID NO: 265008 - DNA, 781 bp, Zea mays
cccacgcgtccgcggacgcgtggggttcgggtgcggcccatgtgagaaggctcgcggtgtttgcttccgccgtcggcaaggaaggaagaagagagcagagaaccctagctagagtttggcgagtggtgcggaggcgcggctgctcctgctcgtcgcgacgtcgaatttcagcgccgcccgcgcgatccttggtctcttcgcccgtgaggagaggcgcgacaatggctgggaaaggcgggccgaccaacctggagaaggagcagatgtttgggatggcggagaaggagatggagtacagggttgatcttttcaacaggcttacaaagacctgttttgagaagtgcgttgaaaaaaggtataaagaagctgagctcaatatgggtgagaacagttgcattgatcgatgtgtttcaaagtattggcaggtgactaatttagtagcatgtttgttggcaccctttctcgttggcctttgccgattcaattttacgccgattcctacactatgcagtctatcataacttggctgtgcactgatcgaatttatcaaaaaatgtccttgatggtgtctttcctactttaggacttaggttggaaaataacgatgtatttctagtgtacctcaacacctgcttattgtgaacaaatagttgatctccctccacaggcaacagatgcctggagatatgctcgatcgatgttttttctgtagcatggtgatcttgatgctctgtaaccttcactttagcggtgccacttgcagatttatagttctgcttat

SEQ ID NO: 265009 - DNA, 615 bp, Zea mays
ggacctggtccgccgccggcaaggaagaagagagcaaaaccctagctagagttggcgagtgggggtggaggcgcggctgctcgtcacgacatcgagtttcagcgccgcccgcgagatccccggatttcgttctctacccctgagagctgcggcaatggctgggaaaggcgggtcgaccaacttagaaaaggagcagatgtttgggatggcggagaaggagatggagtacagggttgatcttttcaacaggcttacacagacctgttttaacaagtgcattgaaaaaaggtataaagaagctgagctcaatatgggcgagaacagttgcattgatcgatgtgtttcaaagtattggcaggtgactaatttagttggtcagatgcttgggaaccggcctcagatgtgaaccgagaagcactcgttccattttgtagcagaatcctattgctctgtttattctttttggttggtatttgaatcccgccacctgctattaagtacaccaatacagcaccagacttgttaatgcgtggatcgctctgaagaaaaatcacggtgtcttgccctttccagtgatgtgcattatctttgaatcatgaacagggaacatgcctg

SEQ ID NO: 265010 - DNA, 1548 bp, Zea mays
ggcggggacgcggggcagggcagcgcacagcatgaacgactgggctgggcggtccgccatggtcacttcccagtctcgagtgacacggcatcatgatgcgtgccctactcagcggggatgcatgcgcgtgcgtggttaacaaactccattggtcgtctcgtcacctatataaagctcgcacgatgcacggccggtttcactacaccagggcacgacgtgcgttgcgtcgtgagtgtttgtgtttcagagctgagagtctgagactgagagagatagaggtgatgatggctctgcaggcgcaggggacgcgggtgccgctggtcctggcgctcttcctcctcctggccggttgcggcagcgaggcgcagccgctggtgccggcgctgtttacgttcggtgactcgtcggtggacgtcgggaacaacgactacctccacaccatcatcaaggccaacttcccgccatacggcagggacttcgccaaccacgtcgccaccgggaggttctgcaatggcaagctggcgaccgacatcaccgccgacacgctggggttcactacctaccctgccgcgtacctcagcccacaggcgtcggggcagaacctcctcatcggcgccaacttcgcgtccgcggggtctgggtactacgaccacacggcacttatgtatcacgcgatcccgctgtcccagcagctggagtacttcagggagtaccagacgaagctggcggcggtggccggcgccgggcaggcgcgctccatcctcagcggcgcgctgtacatcgtcagtgccggcgccagcgacttcgtgcagaactactacataaacccgctgctgttcaagacgcagacggccgaccagttctccgaccgcctcgtggccatcttcggccgcaccgtgcaggagctctacggcatgggggcgcgccgcgtcggcgtcacgtcgctgccgccgctgggctgcctgccggcgtccatcacgctgttcgggcacggcgccgccgggtgcgtgtccaggctcaacagcgacgcgcagagcttcaaccggaagatgaacggcaccgtggacgcgctggcgcggcggtacccggacctcaagatcgccgtcttcgacatctacacgccgctgtacgacctggccacggacccccagtcgcagggcttcgcggaggcccggcggggatgctgcgggacgggcacggtggagaccaccgtgctcctctgcaaccccaagtccgtcgggacgtgccccaacgccacgtcctacgtcttctgggacgccgtccacccgtccgaggcggccaaccaggtcatcgctgactcgctcatcaccgagggcctcatcctcgtcacgtaatcatgcttttgttttggcttcaaatcgatcagactacacaaaagtcgtcgttcctaaacgtatactatgcctgtaaatttattcctcttgtttttcttatttgcgttgattaatgttttcggaagtataagcaacaacatgaatgaatgaatgaatgaatgaatggcctcctattgttgtcaagttcaacgtc

SEQ ID NO: 265011 - DNA, 706 bp, Zea mays
ggctaatccaccgctcgccttctcccatcgccatgcctgccgcttcctggtccgcgcccaccacctccttcgcgccgcgccgggccgccatgggggccgtggaggaccaaggcggcgcctttacccatcaggacgcttccccgccgagtgcttctcaacgcagttggcgaatccgccatggttgctgctggtgacacattgcttggtttgtatgagaaagagcggttaggcctgttgcagtatgccgacgacgagtctaaagaagagaggtactgggaaaccttggatgctgatttgcgttactggaccagatccctgcgcccagtgcagtggtatcctggtcatattgcaaaaacagagaaagaattgaaggaacaattgaggctcatggatgtcgtcatagagatccgtgatgctaggattcccttgtccaccagccatcctaagatggactcatggctaggcaaccggaaaaggatcatagtcttgaatcgcaaggacatgatctcaactgaggatatgaatgcatgggctacttactttggtaatcagggcatcaaagttgttttctccaatggccagctgggtatgggtacaatgaaattaggtaggatggcgaaatcagtagcatctgttgcgaacacaaagaggaaggagaagggattgcttcctcgtccggttcgagctggaatagttggatatccaa

SEQ ID NO: 265012 - DNA, 703 bp, Zea mays
ggtgttttgaaacgattatatgcaccacacagaattctataagatggttgcaatctttcttgttctatccttgcttctgaattgaattaacctatctggtctgcaaggtgatacacttacactgatgatacttattgttgttgttttctacatgcactgtcagttgagttagtgtctctgccatatttgataattgtttgcttagtgtctgatatcccactgcaaactactgtttgcttgtattaagtgatttgttttctatacttccacaaatattattgtcgatgtgtagctttctgtagccctatggctgaaatattcatctatacaatttagtacacatgatgattcacctttgtagattgcatgatgttacttatggtgatgattctgcctctttcacttgcagtgttctagaattagttgatgttgttgtgtatccttcatttctagaaccagtcaaggaaactattttgagggttcacagtgtgaaggtagaatttcagttattccctaccatttagtttcttctcagtcagttctatatattttaaatgcacagttctgtgaatcttcctaggtcaatcttcttagagatgctttgaaaggacaattttgttttttatgtatccataactaagagatcaaacctcagacttaatataagttataaatggagtacacataatattttatcatttta

SEQ ID NO: 265013 - DNA, 1447 bp, Zea mays
caacatctgaacagccatctaaacaaacagaaggtggcgatgagaatatgactgacatttcgggtgcactgaacttgcagttgatcgattcagcagcatgtactaatctggatgccttcatgacagaactgccacgtgataatgaacacaagattgtaaacatcaataaggaagggcacatgttgacacaacttactatggctgatacttctgatgttcctatagaagatcctcttagcatcttaaactccagagctgatgatcatcgtgccctagagttgagggataaggagctccttgtgtcagagctgcaaaatacgcttgatcaaaaatcaaaacagttgggtgaaactgaaattaaacttagtgccatgatggatgaggttaattctctgaagaaagaacttgaacaaacccggggtcttcttgacgaatctcagatgaattgtgcgcaccttgaaaactgtttacatgaagcaagagaagaggcccgaacaaacaaatgttcagctgacagaagggctgttgagtatgatgctctgcggtcgtctgctttgaggatacatggtttgttcgaaaggctaaataactgcatcactgcaccaggcatgactggttttgcagagtcactgcgttctctggctctttccttggcaagctctgtaaagaaggatgaagctgataccactgtacagtttcaacaatgcatcaagatcctggcagacaaagtttatttactgacacgacatagtgctgagctgctagaacgctattcagctatgcaggcggtacatggagatatcacaaaagagttggatttgaagaaagagctgattaagaatctctacaataaacttcaacaagaaaaacaggccagcaaggaaaagatatcatttggtcggttcgaagtccatgagcttgctgtcttttttcgaaactctgctgggcactacgaggcgatcaaccggaactacccaaactactttctgtctgaggaatctgtcgccttgttcaccgagcaccacctgcggtacccagcgtacataatcgggcagatcgttcacatcgagcggcacatagcgcacccaggccaaatgagaggagctccacgccctgatagcagtggcggccgtcggtcgcccgcagccatgctcaccccctacaacctacctgggggccgtgagtacttcgtggtgactgttgccatgctgcctaatgctgcccgttgaaacaaaacaccttcctgatcctgcctgacaatggtctgctgaaatgatgggggaaaactttcccctgtatatatactgaaatttattactatcctctcaattctcagttgcttcccccagttatgtttgtatatatgatcatcttcccggtgtaaaaaaactcggctactgatgctaggcatcttttcgttccaccagactgaatattctttcccctt

SEQ ID NO: 265014 - DNA, 848 bp, Zea mays
cactcgagtggatacttttttctttgcttttttttttgctgcatagattgcccgaatcgcacaaatgttgcacaatatgcatatggtctctctgcttttgggaggcaacttcatgcaatgggactgacagatgcttcagaaatccaccctgatagagtatatattttttctgttactttttttgcaattttgattatcttctcaccttctatctcaattgcagcatttgggcagtcatcctcaagcatatttggccacaactcgtttggagcttcgtagggctagtattattgtaaatttttcgagcatgtttggacaactatcccattcaaatggtttacctatgtgatatatagaatttgtagcagcgcacgagttgttcgaaggctaaataattgtgtcactgcaccaggcatgactgactttgcagagtcattattgtcttctttggctctctccttggcaagatgtgttactgccattcacatatctgttgttcatagtaaattgtcttgaggagatagctacggtgaaatattctctattttgttccagctccgtaaagaaggacgaagttgttatccctgttcagtttcaacaatgcatcaagatcctagcgaaacaaagtttatttactaacccaacagagtgttgagctgctagaacgttattcagctatgcaggcaatacatggaggtatcacaaaagagttggatttgaagaaagtgcttattagtaatctctacaataaactttaacaagaaaaataggtttgtcttggagttttgttactccaatttctgtatttggcaatgaattcccatggtttatggatataaccatttccc

SEQ ID NO: 265015 - DNA, 1358 bp, Zea mays
gcctgtggagtcactcgagcccgcccgggtctcttcctcttccattgattccattcaagatcactactgttaccagccagccagtcgttcgttaagaagagagcgagcgagcaagagagagagagagggagaagggggaagatcagaacgaagagagggagatgagggggcaaacgcagacagcttccgcggggggccggtggcgaggcgacggcgctgcggcgtggtgttggtggtgggtggccgtggtcctcctgcttggccatttaccgagctgcgcgcgcgcggggctgctggagtccaacccgggcctggcctacaacttctacaagaacagctgccccagcgtggactccatcgtccgcagcgtcacctgggcgcaggtcgccgccaaccctgccctcccggctcgcctcctccgcctccacttccatgactgcttcgtcaagggctgcgacgcgtcgatcctgctggacaccgcgcagagcgagaagacggcggcgccgaacctgtcggtgggcgggtacgaggtgatcgacgcgatcaaggcgcagctggagagggcgtgcccgggcgtggtgtcgtgcgccgacatcgtggcgctggcggcgcgcgacgccgtgtcgtaccagttcaaggcgtcgctgtggcaggtggagacggggcggcgcgacggcacggtgtcgctggcgtccaacacgggggcgctgccgtcgcccttcgcgggcttcgcgggcctgctgcagagcttctcggaccgggggctgaacctgacggacctcgtggcgctgtcgggggcgcacaccatcggcgtggcaagctgctccagcgtcaccccgcgcctgtaccaggggaacgccagcagcgtggacccgctgctggactcggcctacgcgcggacgctcatgtcgtcgtgccccaacccgtcgccggcgtcggccaccgtggcgctggacggcggcacgccgttccggttcgacagcgggtactacgccagggtgcagcagaggcagggcacgctggcctccgacgccgcgctggcgcagaacgccgccgccgcgcagctcatggccgacctctccacccccgccagcttctacgccgccttttccatgtccatgaagaagatgggccgcgtcgacgtgctccccggccccaacggccagatcaggaagcagtcccgccagatcaacacatcttgaataccttggtttctcttcaaattttttttcttctctcctggcttgcctgatggctccctcccattcatcaccatgcgtcgattcggcgcgcatcaatatatttcttttcgtcgaaaaaaaaaaaaaaaaaaaaaaaaaaaaaagggcggccaaata

SEQ ID NO: 265016 - DNA, 502 bp, Zea mays
gcggagtcgtcagtcgtgcgtgccggtgcccgtcccgttctgccccgctcccctcccccgactccctcactcttcctcttccgttccattcaagatccctgcagccgtccgtccatccatccattcatccgttaagaggagaggggaggccggccggccggccggtggagcggagatgagggggcagacagagacaggccggtggcgaggaggcgacggcgttgcggcgtggtgggtggccgtggtggccctgcagctgggccattcgctgagccgcgcgcgggcggggctgctggagtccaacccgggccttgcctacaacttctaccagagcagctgccccagcgcggagtccatcgtccgcagcgtcacctgggcgcaggtcgccgccgaccccccgctcccggcccgccttcttcggctacacttccatgactgctttggcaagggctgcgacgcgtcgatcccgctggacaacgcgcaaagcgagaagacggcggcg

SEQ ID NO: 265017 - DNA, 480 bp, Zea mays
ccccatcaagttctacgccgccttctccatgtccatgaagaagatgggccgcgtcgacgtgctcaccggcgcaaacggccagatcaggaagcagtgccgccaggtcaacacctcctgatcaacaaggcgtcacagggaggggccatggtttttccctcttcgttcttctctttttctgcaccgcctggtattattgttccatgcatccggtttcggctcggcttcggctcggcgcgcatcaaatatatttcgcccccgcgccgtgattgagggccctcctccgacgaaagaaatccattgctttctttgttatttatattagtttactcactgtcctgtgttcgattgtcttgccttgcaaaatgtaagaaagattaaagatgtaagcaaaaaaacaatgcggatcatccactctaaagattggtgtaaaaaatcggttttttttttttaaaaaaaaaaaaaaaaaaaaaaaaagggaga

SEQ ID NO: 265018 - DNA, 558 bp, Zea mays
cttgtgttcacaaaatgtgacaagcgcaagaagaagaagaacggcggcaggaaacctgtagaaaacgtggaaactttccagggcctaatccgcgaatacttcgaggccgcgcctccttggatcatgacgagcagcgtgaccaaccagggccgcgacgagatactcctgcacatgtctcagcttaggaattattggctcaagcattgagatgcaatgataaccaaaccagggcgaagcaactagaacagcatgcaaagcactgtcgtccattgatgcatggacattcagcagtcggcgcctccgcaatcaggcgttcgcaccaactaatccagccttttgagctgttgactgtccaatatggccccctgtacatgattacccaatcaacactctggggatgcggacaaggtgctaaaatcagctgatcatggtttttttctttatttctattgtgtacacgtacaatcccaaccaacgttttccccttgttcccatctgattataggcttgtgtatactgtggggttaaatgattaataaattctggtgttagctaatc

SEQ ID NO: 265019 - DNA, 738 bp, Zea mays
  unsure (1)..(738): unsure at all n locations
nattaattttttttttttttttaaaatatattgtggtattcaattagagaatgggctgtcctggaacaacaacaaaataaaggaaaaaatgatacggttctctctacgagatacatgtataaatagatgttccatggaaggagcacaacagaccagtcacagaagctaccaagctagctagaggtgacaagcagagcagaagccttacatgtcaataagggcctgcctctgatagccaaggatgacttgcctatgtcctttgtttacaaaggatcagaattgtggacctttgtgttggttcgtaggcagtctccttggctagcctgagtggcccctattgctcatgctaggctcaatcgagactctttgacttgctgcacacaattagacacaggagcctcctcgacctgtgcatgggtgcatacaattaccgtgtgattggttgcccagctctcaacgcctaggctcctcacgagtgttgactgcgcctgcatttctgattggttggctgcacggctgcgcccggaatgtgcgggtgcaagcaaatctattttacgctcctcggcggatgccggcaaccaatcaagagaaagatgcttcaggcggagagtttcactgctcatcgtgtctactgatctattgttatgttgctcgccagcccctttggtcaccgaagtccaaaccctaaagctgttcaacatagagttgtactcccttcctcggttccaaataaaattc

SEQ ID NO: 265020 - DNA, 703 bp, Zea mays
tgcagcaggtgctgccactaggggcctctatcgggtacatcaatttagcaaggttgagatgttcatattctgtcggccagaggagagtggaaaatggcatgaagaacttattacaattgaagaggatctttatgcatcacttggacttcatttcaaaactctggacatggcaactggggatctgggtgcaccagcctaccggaaatttgatatcgaggcgtggatgcccggcctagagcgttatggtgagatctccagtgcatcaaattgtaccgactaccaaagtaggcgactaggcatccgttaccgcccatcaccctcggagcctccatcaacgagcaccaagaaagggaagggagctgcctcaggccctacgcagttcgtccacacgctcaacgctacagcagtggcggtgcctcgtctgatagtttgcattctagagaattttcagcagggcgatgggtcgattgtggttccagagccactaagaccctatatgggtggactagagttgctctccccaaaattcaagtgaccctctacggtcacccgctgttgtgcttgtgtggacttagaactgtctggctgaagtacaagttaaaggaaggtcatttctcactacaaataccccctcctgagtttcgtgccggtgctaaaataataggccgggcgcgtggaacgacaagggtattccggcccggtc

SEQ ID NO: 265021 - DNA, 752 bp, Zea mays
cccacgcgtccgcccacgcgtccggcgcgacacgccccagcgtccacagttcactgcgcgcgcgtcgtgcaggacaccacaccatggcacctgccgcccctgctgccacgggcgcggcgagccccgccggcaccaagggcggcggcaaggttgcagcacgctccgtcaggctgggcctccccgcgctgccgccgctgcccggcctcagcctcgccgcgcagggccagacccgggccgcgtcgtccttgtgcaagcggctggcgagggacgtggtggccatggccgcgggggagccggcggcgcctcaggctgccaacgaggagctgaccgagttcgtcgacgcgttgaaaaaggagtgggacaggatcgaggacaagtacgcggtgaccacgctcgccgtcgccggcacgcttggcatgtggagcgccggtggagtagtgtcggcaatcgacaggctccccgtggttcctggtctgatgcaggctgttggaattggatacagcgggtggttcgcgtatcggaacttgctattcaagcctgacagggatgctttctttgcgacggtcagggaggtctacgaggatattatcagcacttaacagatggagcaccaatgcaaagctcatccaaattaagacatccttctagtttgctgctgttcagttgtttttgctgtgatgtatttcagtgtagcatctaatttggtccttaatgtacgtatggataagtaatttgggtgttaaatttagttt

SEQ ID NO: 265022 - DNA, 1391 bp, Zea mays
cggacgcgtgggtttccggaacagatccgagtatccgacacccggtcgtcgttcgccttcccgtctttccctctccccccacacccggtcgtcgtcgtcgcggcgtgagcgtctgagcgagcgtgcgagagcgagaggggggaacacaaaaccctagcaccgtcgccgacggacgccagagtagagagatggcggtggacgaggtgaattcggtctacgtcggcagccttccctacgaggccaacgaggagatgcttcgcgacgccttcgggtactacggcaccatcgtctccgtcaaggtgattaatgatcatactatcaaaggcaagtgttatggttttgttactttcactcaccccagagctgctgagcaagcaattgcgggcatggacggcaagaaattaggcaaccgtattgttcgagtaaatgaagtgcgtacaagaggcccccgcgattttggccgagatggtttcagacgagatccaagaaggtatggtagagatccatactgggacagaagggacagggaacggagctatgatcgtgaaagagatccctaccatgacagggatagtgatagatcccgtgagcatgatagagaaagagattatgaacatggtggatttaatagagaaattgactatcccatggaccgagatcgtgaaggagatgagagacgtcctagagaacatgatcgtacagcagaaatgcataatgtggattcagataatgacaaagataaggaacatgtatcaagaaaaaggttcagccgcccaaaaggtcgtgatagcagagatttatcaagttccagtgatggtcttcaaaatgatggaaaacatcagttggataaaactattcagatgcgcgaggaccttgaaaatgaggttaaccagattaaggataaaatatctgggaaagaacagcacattgcagatttgcagaagaaagctcagaaactagaggatgaactggttgccgcacggaaagtatcttcagaacgacagttggcggttacagacctgtacaaacatttcctccaacttcaggactacaatgatagggtcaaaacagctgaacagaggctgcagtctctcgttgatgctgccttggtcgagctcgacatggccgaagatgctactaccagagatggctcgatgtacgagaacggcgtgctttgaacacccaactgccatgggtttgtgtggttgctgatttgttagatttgtagtttgcgtctgccatgtaatagaactgcattgtaactagaaacaggaaaaatgttgtgtaagggtcggagaatctgctgtcgtggtccctgagcccggatttctctttcgaagttggattcattaaccggcctgagtattcctgaaaaaaaatactgtaactcc

SEQ ID NO: 265023 - DNA, 712 bp, Zea mays
cggcatacatcctagagaacatgatcgtgcagcagaaacacataatatggattcagataatgacaaatataaggaccatggatcaagaaaaaggttcagccacccaaaaggtcgtgatagcaaagatttatcgagttccagtgatcttcaaaatgatgttagccagattaaggataaaatctctgcgaaaggacaacacattgcagatttgcagaagaaagctcagaaattagaggatgaactggctgctgcacggaaagtctcttcagaacgacaattagctgttacagacctgtacaaacattttcttcaactccaagactacaacgatagggtcaaaacagctgaacataggctgcagtctcttgtttacgctgccatggccgagctttacatggccgaaaatgctactaccaaaaatggctccatgtattagaacggcgtggtttgaacccccaaagggggctgccagctgtcatgtagtcatgtctgcctgtgaggtttactaatttgttaaatttggagtttggatttgccatgtaaaataaaactggactgtaactaaaaacgggaaaatgttgtgtaaggatcaaagaatgaatggctgccccccatgcacatttgctatggcctgtttttttttcaaagttggaaaaaaaaaaaaaaaaaaaaaaaaaaaaaaaaaaaaaaaaaaaaaaaaaaagggcggccg

SEQ ID NO: 265024 - DNA, 519 bp, Zea mays
ctctcctcccaccacacccggtcgtcgttgtcgcggcgtgagcgagcgagaggggaaaacccaaaaccctagcacccccgccccgtcgccgacggccgccggagtagagagatggcggtggacgaggtgaactcggtctacgtcggcggccttccctacgaggccaacgaggagatgcttcgcgacgccttcgggtactacggcaccatcgtctccgtcaaggtgattaatgatcatgctgtcaaaggcaagtgttatggttttgttactttcactcaccccagagctgctgagcaagcaattgcgggcatggacggcaagaaattaggcaaccgtattgttcgagtaaatgaagtgcgtacaagaggcccccgcgattttggccgagatggtttcagacgagatccaagaaggtatggtagagatccatactgggacagaagggacagggaacggagctatgatcgtgaaagagatccctaccatgacaggggatgggattgatcccgtgagcctgat

SEQ ID NO: 265025 - DNA, 686 bp, Zea mays
cccacgcgtccggaccgcagcaattgcgattgcgagtcctccaaaccatggcgctcgccctggcctctccaatggcgtctctctccttccactccgggaggatctcggcggcgtctatcggaggcgtcggccgcactcgcagggcggccccggtgggcgtatccgcctcgccgttcctccggagctccttcgtctcgtcctcctccacgtcgtccgcctccgcctccgcctcccccgcttcgctcgcggcggctgtctcggcgtctctggcatttacgtcctcctccgcgtttgcgggttcatctttgggaatcgagttcagctacagtataatgacaacacggagatcccgtggtatgcagattagggctggaaaggctgccctctgcatgaccaagaggtcaaggtctaggaagtcacttgcccgtacacatggtttccgcaggcggatgcggactacttctggaaggaaggtactgaagcgcaggcgcgccaaaggcaggaaggttctttgcacaaggacaaactcaaacagtgggaagaaaagaatgttctaattacactgcaatttgatgtgctcgcaactgtaagtgtaatgtctacttgcaatcttctaagccgccgtctatgtgtaacaatcatgtagcatcctattcctgtttaattggttaaaaacatctggatcc

SEQ ID NO: 265026 - DNA, 860 bp, Zea mays
cggacgcgtgggcggataaaaaggtgggcgtgcaactttcccttccttcgccgaagccgcgcgacggaaaccccaaacccaacctcatctcttttctcggcctctaccgccccctcgatcggtcggccggtcagctatgacgccgggaagctcggccgccggatccggcgtcgtcgttcctcggaacttcaggctcctagaagagcttgaacgtggagagaagggcattggagatgggacagtgagctatggaatggatgacgcagatgacatctacatgcgatcatggactggcactattattggccctcataataccgtccatgagggtcgcatctaccagctgaagttgttctgcgacaaggactaccctgagaagccaccatcagttcgatttcattcaagaataaacttaacatgcgttaatcatgaaactggagtggttgacccgaagaagttcagcgttctgggtaactggcagcgtgattactcaatggaatacatcctaacccatctcaagaaagagatgacatcgccacagaaccgcaagctagttcagcctccggaagggacattcttctaaagatggcagcaactcatgtccatccatggtgactcggaaacagcttccgcacctggttcctatattttatatatttagtctgatctcccagttatctgtaaaccaccgagatcgagtgcaagcagacttggttgatttacaatttgcccggtggttgctaatgatatgggatgaaacggttgccggtttggctgctattaaggttgtgtaatctgatgggcaatttcagcattctaatgccctaatgatgaatctttggccatttgctgttctgcct

SEQ ID NO: 265027 - DNA, 1020 bp, Zea mays
ggtggttggtgacagcagcaggcctccttcctgctcgctcgcggcgcctccgcctatacctgttgcggcaggcaacaaggcagcagcggagcgccttggtgatctacgaagaggatggattccaggatctccctcctctgcgccctcgtcctcgcctcctccctcctgcactgcgccagatccgacggcaatgacgcgcactcctcaagggcatcaacagctacaggtcctcgctcaaggtcccggcgctggccgagaacaagaacgcggcgtgcctggccgagcagctcgcgaggcagttcaaggggcaggagtgcaccaacacgacgggcgccaacaccgtcatcggcaccgagcagcagttcccggactaccccaggtacctggaccgctgccacctcaacgcgtcggtgaccgaggacggccaggtgatgccggcgtgcgtgccgggcctcgcccccgccgtcgtcctcgccaactacaccaagtcgcagtacaaccggttcctcaacgacagccagttctccggcgccgggatcgcgagcgagggcgactgggtcgtggtcgtgctcagcaccagcacgggatccggcgactactcgccggctccgccgggctccaactgggcggtctcggcggctcggccgttcggcttcggccagctggtccttttgttggtggggtttgtagttttgctggtgaagtgagtgtttagtacgcatgcaccaacatcttcgtggcttatgttgtcacgttcaggtctcgttggctttattaagcttttttcacttgaaaagattgattacgaaacaaacatgtgatttattgttaaaaaaagtaaatcaatctatcgcaatagttaatggaggtcaaaaaaaaaaaaaaaaaaaaaaaaaaaaaaataaaaaagataaaaaagtacaaaaaaaaataaaaaaataataatacaaaagtaaaccttaaaaaagaatatatcgtaagatcaaacaagaataaaaaaaaggggctgcccttttaaag

SEQ ID NO: 265028 - DNA, 627 bp, Zea mays
  unsure (1)..(627): unsure at all n locations
aatgaagacttcccggctttgcctggatataaaggttacccttcggattataatgctatagagttgcatcacaaggaacaactccacgataatgtacctgtaattcaagcacagcagtatcctatggcaaggtcaggcttaggaagtagctacctacccaatcgacaacaacaccagcaaggtgctaattcagtccagaatggcggatcccacaatattttactgagaccacccagtcaaacttctagtttgggatcatatgatccatttctgcagcaataccagcagcctcagcctcaaaatcatttcagattgcagcagatgtcttcagctgcacattcatatcgggatcagattcaaaagattcaggcgggaccgacaccacctgatccatatggcttgttaggatttttgggtgttataaggatgaatgatgctgatttagcatctcttgctttaggaatagatttgacagcattgggtttgaacttgaactcgccagataatctatacaagacatttggctcaccctggtcgaatgacccagcaaaaggagatactgattttcgaattccagcttgttacctctttgacaaaactcctncactacagaccttactttttcag

SEQ ID NO: 265029 - DNA, 405 bp, Zea mays
ggaaccgcccttgtggtacagacggcgagggtgtatcccggagcttttgtgctcgagttccacgttgggatcgtcgtcgcgtttgtgttcctgctcctgagcctgatgggcaccctgttggtggtcacctgggctaggtttcgggtgcccaggtgctggggatactgccttatgggcatgtacatcttgttcaccgttgtcagtattgccatcgccagttattcaggatgatatgtcatcctttttttttttgtgaagatagccggccgctgatagattgtggtatatagttagcatgcgcaatctgtctgtctggttcaatgcctacgtatgctgattttggcggtgccggtgtggcacgcggaatttaatgtgatatttaatttgctgccgcattttaaaaat

SEQ ID NO: 265030 - DNA, 1548 bp, Zea mays
actggcttgtggactggaaaaccagctataccaccagaatctccgtttttagctctagctcatcatgctagtcatgtggacacaaactcaaacgctgtttcatctttatccgaatctagtcctatggatctcaagtgccagtatgattctgagaacctggcagacggatgcatcaaaatgcaaactgatgatgagattgttgtggatggatctcattctaacgaagattctgttattgagaaaaaaaggcgacgtgtggtcgaggagatagctgccgacggaactttaccatcttatggagatctagaggatgtaaaaggtggttctttgaggcatccttctaatgcagatggatctgaacttgctcgaacaatatcaagcaatgcatcattggcagaacaagtaattgaaccagcccttgtgatgtttgaggtgcatgtgccgcccgtttgcatgcttgatggagttcactctcaacatttttttggaacaggggttataatatatcattctgaacacctgggtctggttgcagttgataggaatacagtggctgtatctatctctgatataatgctttcttttgctgcatatcccattgaaatacctggggaggttgttttcctccatcctgttcacaactttgtcctggtcgcttatgatccttctgcactaggagctggagcatctgttgtccgggctgctaagcttctatcagaacctgctttgcgacgaggagattctgtctatctagttgggcttagtcgaagcttacaagcaacatcaaggaaatcaatcataactaatccttgcacagctgtcaatattgggtcagctgattgtccacgataccgtgccataaatatggaggtcattgagctcgatactgattttggtagcacattttcgggcatattaactgatgagcaaggaagagttcaagcattatgggctagcttttctacccagctgaaatatggttgcagcagctcagaggaccatcagtttgttagaggcataccaatatatgcaataagccaagtacttgagaagattatcactggaactgaaggaccttttcggcttatcaacggaataaagagggcaatgccatttgtcagacttttggaggtggaactttatccaactttgctatccaaggcaagaagttacggattgagtgataactgggtgcaggcccttgcgaagaaggatcctgtgcgtagacaagtcctacgggtgaaaggttgtttggctggatcgaaagcagaaaatcttctggagcagggagatatgattcttgctatcaacaaggagccaattacatgcttccttgacattgagaagacttgccaagagttggaccaatccattgggtcagatggagtgcttaacatgacaatattccgtcagggaaaagaaattgaccttgttgtcggaactgatgtaagagatggcaatggtacaacccgtatggttaattggtgtggttgcattatccaggatcctcactcagcagtgcgtgcacttggctttttgccagaagag

SEQ ID NO: 265031 - DNA, 881 bp, Zea mays
cccttgtttccgcccacgcgtccgcccacgcgtccgtggagtgcttaacatgacaatgttccgtcagggaaaagaaattgaccttgttgtcggaactgatgtaagagatggcaatggtacaacccgtatggttaattggtgtggttgcattatccaggatcctcactcagcagtgcgtgcacttggctttttgccagaagaaggtcatggtgtttatgttgctagatggtgtcatggaagtccggtacatagatatggcctctatgctctccagtggatcatcgaaattaatgggcaaccaacaactgatctggaaacttttataaaggtggtgaagggtctcgaagatggtgaatttgttagggtgaggacggtccatttaaatggaaagcctcgggtacttactctgaaacaggaccttcactactggccgacctgggagctcagctttgaaccagaaactgctacatggcggaggaaaataataaaagcattgcaatcagccagggcgtgatattttcatgttttgctgcgaccttttcatgctttcagaggagcatagaggtatggaagttagaggttcgtgcctttgtttggtaagctaaatcgtgcattatatatgcaggattaagcaaccctgcactttgtagggttagttgtgtgcattagcataggggtgcttgaaagatatataaaaggtacattaaaggtatatggattcattgtctgtggtctctggacaatttgaccacaggatttgccatttgtatatcgtctattcctatattttggtagaaaaagaaataaaccgttagcctttctagcggccatttcactactctgcattaagaatgtgtgttagctatcaagttatcagctcc

SEQ ID NO: 265032 - DNA, 1040 bp, Zea mays
gtctacgcggtccagaggatcctggtcgggtacctggagcacgaggccgaggcggaccggctggactacaacaccgacgacgacttcacctcgacggcgtcgccgcccaacgacgtcggaatggtcggcaagctcatggagtcctacctggctgagatcgcctcggacgtggacctgcccgttgacaagttcaccggcctcgccgagatgatcccggaacgcgccaggttcaacgacgacggcatgtaccgttccatcgacatctacttgaaggcgcatccgtatctgagcgaggccgagcggaagacggtgtgccgggtgatggactgccagaagctgtcgcgcgaggcgtgcgcgcacgcggcgcagaacaatcggctgccagtgcagacagtggtgcaggttctccaccacgagcagcggcgcctgcgcgaggcccctacgtcgtcgttctacggcggcgagtccccgaccccggcgccgagcctccagggccggcacggccggagcgtgccggacgagatgtcacagctgcagcgggagaacgaggagctcaagatggagctgctgcggctgaagatgaacctgagggacccgtcggcgcccccgcagcacagcgacgctccaccatcggggcgccgcccgctgccgaagaaggcggcaggcggcagcggggggttcattaacaacgtgtccaagaagctcgggcggctgaacccgttcctgcggcctgacgccgtgggtggcgccaaagtgcgcaccaagccgtccaggaccaaggatcggaggcactccatcggctagtgattggaattggctcatgctcattgccggcttctttcatcttgaatcttcttgacggctatttcactcgatgaacgtaaaaaaacactcgttgattgattgattgaatggccgagtcgtgagtaaagatgtgtagctatcgcacttgaacataaataagatgctatgttatccttttttaaatcctcctttaaaaaaaaaaaaaaaaaaaaaaaaaattataaaaaaaagggcaa

SEQ ID NO: 265033 - DNA, 771 bp, Zea mays
ccccggtgagccttgacgccgaggacatccgcaacgagaaggtgaaggtgctgaggtccatgaggcagctgaagctcgaggacgtggtggtgggccagtacaagggccactccaagggcggcaagtcgtacccgggctacgccgacgaccccaccgtgcccaagggcagcgtcacgcccaccttcgccgcccccgcgcgcgtcggcgacaacgcgcgctgggacggtgtgccgttcctgatgaaggcaggcggggcgctgcacacacgacgcgcggagatccgggtgcagttccggcgcgtgccgggaaacctgtaccggcggaacatcggcgcggacctggacaaggcgaccaacgagctggtgctccgggtgcagcccgacgaggccatctacctcaaggtcaacaacaaggtgcccgggctgggcatgcgcctcgaccgcagcaacctcaacctgctctactccgagcgctaccgccgcgagatccccgacgcgtacgagcgccttctgctggacgccatggagggcgagcgccgcctcttcatccggagcgacgagctcgacgccgcctgggccatcttcacgcccgcgctcagggagctggaggacaggaaagtggcgccggagctctacccgtacggcagcaggggccccgtcggcgcgcactacctcgccgtcaactacaacgtcaggtggtgagacatcaccagcgatgacgacggcgccttctagctctagacagagacatgcattcatcgattcgtgacgc

SEQ ID NO: 265034 - DNA, 1154 bp, Zea mays
attttcttctcctgcggtccttccttcgcttccccgttcttccagaatcctgtcgagacctgaatccaccctcacccagcggtccccatggcctccggcgaaggtgtagttgatcagctgtacgatgcggctggcggcgaggcagtggccaagatagagggccacgccaacgtggaggcggaggccaacatggacacggaggagccggtgctgtacctcgacctgacgagctaccagctgcacgatctaagcgaggtggacatcccacccacgctggaggaggtcgacctcaccgccaaccgcctctcttctgttcatcctcgcatcggccaactcccccatctccgcaagctctcattccgccagaacctcctcgacgatgacgccgtcgcgccactcacgtcctgggaggctattgccgggttgaaggagttcgtccttagagataacaaacttacaaggattcctgatgctggcatattcaaggatcttctggtgttcgatgtatctttcaatgagatatcttctttgactggtctgtccaaggtttccatcaaattgaaggaactttatgtttcaaaaaatgaagttgcaaagatggaagagcttgaacatttccatgcgctggaaattcttgaacttggtagcaacagattacgggtaatggaaaatcttgaaaccttgacaaatctacaagaactgtggttgggaagaaatcgaattcgagctgtcaacttgtgtggttcgaagctaattaagagaataagtgggcaaagcaacagactgacttcaatgcatgggtttcaggaatgtgctgcattagaggagttatacctcatccataatggaatccaaaagatggaaggcctctctactttgcataacctccgcattttggatgtttcagctaacaagctaacgactatagaaaatatcgaaaccttaaccaggctggaggacctgtggttgaatgacaaccaaataccatctctagagggtatagagacagctttggctggttcgcgggagaagttgacgacaatctatctcgaacgaaatccctgtgcaaaaactccagattactcgtcgacgttgaggaaaatatttccaaatctcgaacaaattgattcagatatcatagcatgataactagc

SEQ ID NO: 265035 - DNA, 1141 bp, Zea mays
attcaagggccgaccgacccgtccacggacgcagtgctcgcggcctcgccttatcccctccgtcactcacctcgaccaccgccatggccatggccttggcctccgcgaccgccgccgcactcttccgctccgccctgtccgcgccacacggcgccggcgcgcgcgtccggccgcagcgccggcagccgttcttggctccgctccacgcggcgaagggccccggctcggcgccggtggtgctggagggcaaggccaagggaaagaagaagaaggggcccagctccgggaaccttcccgcagccctcgacgtcgagatcagggaggcgcaggagtacctcgacagcgaccagcaggaacctgttccagaaaactttccatttgaattaatcgacgaagagggtatgagcgtggttattttgagaagggactacaaggacgagaaggtcgaggttactgtcagcatgcctaatttagaaggaggccccgagtttggtgatgaggatggcgagggcgatggtgagagcgctgccaaggacgacggagaagcagaagaagatgacgagagtgccggggagagcagcatctctcttaaggtggtagtttccaaagactctggcccagagctcgagttcacatgcacagccttccgcgaggaggtcaccgtcgatgatatgctgatagtggagaaaacagacgacgaccacggagaagagaagttcccctacgagggccccgagttcaccgagctccctgtgaatgttcagaaaggcctgttcaagtacctggagcaaagaggggtaacgctgtcggctaccaactatatgcacgattacatggtgactaagcaggctcaggagtacatccggtggatgactaagctgaaggatttcgtggcgcagtgaggaacagcgtcgtgattcggcagcattgtttggttagcctagccttagcatgtgttacagccttacaggaacactacgactacaccgaattggccacactccccaaaaaacaaaaaagggggagcattgtatctgcttcaatgtatctgtatcagctggcaaaacagtagcaagtagatttccagtaatgtttagtggtgggcaaaaaaaaaaaaaaaaaaaaaaaaaagggcggccgc

SEQ ID NO: 265036 - DNA, 632 bp, Zea mays
ccttgtttgttaagagctgagctacatttattctcttcttcttgagcccctggcctgcccctcctgccaggctgcgcattctttctccagctctctgataagctagccagcgtcgtcgtcgtgtcttgttagttattagctctatctcgccgccctgcagctgctgatcgagtgagggaattcagcagcagcagcagcaggtagcatagcatagatatgacggcggcggaggtggaggccgccaaggacatcgccgaggagaaggccgtcgtgccgttgccaccgtcgcccgccaagccggccgacgacgactccaaggccatcgtcgctcttgtcgtcaaggacgctgctgctgggaaaccttctacagctattattggaggctcaactgaaagagatgcttacctcgccaagatcgtgtccgagaagaggctgagtctgatcaccgcctgggaggagagccagaaggcgagagccgacaacagggctgccaagaagcttgccttcatcacgtcctgggagaacgccaagaaagcggagatggaggcggagctcagaaagattgaggagcaactggagaagaagaaggcgcgtacgaggagaagcttaagaacaaagctgcgatgctgcac

SEQ ID NO: 265037 - DNA, 804 bp, Zea mays
cccacgcgtccgcccttacccctaactcccagctctctcgttcaggcgcgctctctctagccggcgacgattgggcgagcggcgccactcaacgccaggtcttcgtgaaaaccatcgccggcgatgagtttcaaccagtctactgtcaaggggcaggccaggagggagaggcctagggctcgccctcatggcctgacgcagcagaggaggcaggaaataaaggaagcttttgatctgtttgatacagataactctggaaccattgatgcaaaagagctcaatgttgccatgagagccttgggatttgagatgactgaagagcaaattaggcaaatgattgctgatgttgacaaagatggcagtggagcgatcgactacgaggagtttgagcacatgatgactgccaaaatcggagagagggatagtaaagaggagctttcaaaagcattccgcattattgatcaagatggaaatggaaagatttctaacattgatatccagaggattgccaaagagctgggtgtaaatctcaccctcgatgagatccaagacatggtgcaagaggctgatagaaatggtgacggtgagatagactttgacgagttcatcaggatgatgaggaggaccagctttggctactaggtgtatttatctgtgagtgcttgacgctgccagtttgtttatgactaccgggcgtgtgttaatcgactggtgttgttactatgaacaataatgttgtgctctggtttcgcttatatatataattttaatttaattttaaaaaaaaaaaaaaagggcgcccgc

SEQ ID NO: 265038 - DNA, 624 bp, Zea mays
ccggtttcggatacccggctcgacccactcgtccgcggtctctctagccttcgatgatagtcttaccggcgccactcaacgccaggtcttcgtgaaaaccatcgccggcgatgagtttcaaccagtctactgtcaaggggcaggccaggagggagaggcctagggctcgccctcatggcctgacgcagcagaggaggcaggaaataaaggaagcctttgatctgtttgatacagataactctggaaccattgatgcaaaagagctcaatgttgccatgagagccttgggatttgagatgactgaagagcaaattaggcaaatgattgctgatgttgacaaagatggcagtggagcgatcgactacgaggagtttgagcacatgatgactgccaaaatcggagagagggatagtaaagaggagctttcaaaagcattccgcattattgatcaagaaggaaaaggaaagaatgctaacaatgatatccaaaggaatggcaaaaagctggggggaaaactgaacctcgaagagaaccaaaacatggggcaagagggtggatgaaaagggggccgggaaaaaaaccttggcgaggtcaataaggagaagaggggggcccaccttgggt

SEQ ID NO: 265039 - DNA, 641 bp, Zea mays
gtaaagactacttactgctagtgctagtacggtagtacctatgtatgtccgtgcgccattgctggatctgatgaacactactagttcgagatctgcgctcccgtgtaccatggatctgggcttctgcttggtacccgtacgccctgccatcgattcgtccaaggaagggtaaggtgaggtggtgacccgacgccagccagatgagatccattgaagccgacagccgagggttgggtgtaaaatatggactcgatgagtgtggtgtttctgtcccgaggtgaaggacacagactgttgttcgttgctcttgtcctacagccatgcttttggtattgcgatccgagtgcgtgtgatctggatggagcttggagatgacggaattgcgacggatcctcatgtgccagcggctccgcctgcgctgaaccgctgtcatgcctaccatcgttgaacaaaggcagtttgtgttctgccgagcgtccatctcgagaacataatgtaatctccacttggctatcaatcatttctctgtatattattgcaatccaagctggcgatttgtccgctaattgaacggaagttgacattgccacaaaaaagaaaaaaaaaaaaaaaagggcggcagctcgcgatcttagaactag

SEQ ID NO: 265040 - DNA, 1114 bp, Zea mays
cggacgcgtggctccgcgtggcactccagggctccagaccccgccgccgccctaagccagacgctagcaggcttgtggtctcttcgccggagacgagcaccaaccaggatgcaatgtttggtccggaatgtctgccgagccggaagccgtggagcggcggcgaggctcctggagcttgccgcggctggtccgggtgcgacgcagccatccgtggccgtcaaactcctcaggccgccttacgagttcacacgtccgatcggggtagttcaacccgtacgtgtgcagagccgggccgtttcgcgtgatggcctcgttcctgccgcggccacctccggttttggtctctgcgcacaagttatcgtcgcgatgaggggtctgtcgacggtggggagtgcggccgaggtcgcttctgattcggacgattccacctcccctgcggttgagcaccccccgcgcatcaagttcaagaggcccgacaagaccgccaggcacattatgaatatcctaaacaaagaggcggtcgaaaaggtccgctcggaaagggagattcctgatgtgcagcctggatgcatcattcagatgagattgcaagttcctgagaacaaacggcgtgagtcgacgctgaaggggattgtgataggaaggcgcaacgccgggatcaatacaaccttcagattgcgtagattagtggctggtgtcggagtcgagtctgtctttccactttactcgccaaacatcaaagaaatcaaggtattggacaggaagaaagtcaggagagctaagctgtattacctgagggacaggatgaacgcacttaaaagatgaggatttcaacttgtttctaggatttctttttgccgcgcggatcagcatggtttctcaagatgcaatcacattgtttggtgttccatctttgaaaaaaaatcatagtttggggttgtcagttgccatgctccgatcttctttcttttgatttgatgcgctgtaacattagtgcgaaaattcatgtgctcaggtctattacgttactttcccgatcttttttagtatgtccgtctgacatgaacaagctggaacactttactcatcaaagcgtaactattgtatgatgatt

SEQ ID NO: 265041 - DNA, 1175 bp, Zea mays
cccacgcgtgcgagtgcccaaataaaatcccctaaacctagcgccgccgccgccatgcttcgccgtctcgccgccgtcgcccagcggaccttctcctcctcttccccgcacgccccgccgctggctgcgtcgggctacaccccgcgccgcgagtacggcctggtgcccatggtgatcgagcatacctcccgcggggagcgcgcctacgacatcttctcgcgcttgctcaaggagcgcatcgtatgcatccatggccccatcactgacgatacggcgtcgctcgtcgtcgcccagctgctcttcctcgagtccgagaacccactcaagcccgtccacctctacatcaactcccccgggggcgtcgtcaccgcggggctcgccatctacgacaccatgcagtacatccgctgccccgtcaccacgctctgcatcggccaggcggcctccatgggctcgctcctcctcgcggctggggcgccgggtgagaggcgcgcgctgcccaacgccagggtcatgatccaccagccctcgggcggcgcgcaggggcaggccactgacatcgccatccaggccaaggagatcctcaaaatgcgcgaccgcctcaacaagatctaccagaagcacacgcgccagcccatcgacaagatcgagcagtgcatggagagggacctcttcatggatcccgacgaggcgcgcgactggggcctcatcgacgaggtcatcgagaaccgacctgcctcgctcatgcccgacggaatcggtggaggcctcgatgtgcccaggctcggtggcgttggcggcggacgggggagggacgtcgaggaaccttccgcggtgtgaggattggcctcaaaggtgaaatcccgttcgcatccggtggatgtgttgtttgttgttagatccaaaggttcgattcttactatacaaggttaaccttgttattatggttatggaaacgtccggctccccattgtccttgttgcttaaattgcttcaattgagctattggggatataattattgcaactctaaggaaattctgcactgttgatactgataaattgacacagtattgtgtatgttgtactatatttgtatcaattccatgccaggacattcaaacttaaaaaaaaaaaaaaaggacggccgctcgcgattagaaccggacgcgtggg

SEQ ID NO: 265042 - DNA, 489 bp, Zea mays
cggacgcgtgggcggacgcgtggggcctcggcgtccccgctcccggcctccacgcgcgggtcctcgcccaggtccagctcgctgagcctgggcccgggctccgccgggctcggcccgcgccggctcgccgcggcggcgcccccacgggcgttcttctcctcgtccccctaccagccgccccagccggaggggttctcgccgcaccgcgagtacggcctggtccccatggtcatcgagaccacctcccgcggggagcgcgcctacgacatcttctcgcgcctgctcaaggagcgcatcgtctgcatccacgggcccatcgccgacgacacggcctcgctcgtcgtcgcgcagctgctcttcctcgagtccgagaacccgctcaagcccgtccacctctacatcaactcccccgggggcgtcgtcaccgcggggctcgccatctacgacaccatgcagtacatcggctgcccgtcacaccctctgcatcgg

SEQ ID NO: 265043 - DNA, 847 bp, Zea mays
  unsure (1)..(847): unsure at all n locations
gtaaagggctaagattgcagttattagtttataatgtattgaaccttcaactttccaggaacaaaggttggatactttaagacacagattgcaaatctcttttgatggctcccgtattgaacatcaagtgtgtattactgatgtagattggttttctaggttgacatcatctcatgaagtaaattaattaataatttatgggctttatcattattaggatgccttgaggcaactctggcgtttagcttatcccgctcgtgagattccaccactcaaatctgaattatggaaggagatgggttggcaagggaacgatccatctactgatttcaggtcctcttgtaatttgatcgtaaggagaatgtgctcatggagaaaattaacccagttgataaacacatctaatactgatcgcatttatgcaggggtggtggactcatatcgttggagaacctcatcttttttgctaggaactaccctgtatagaacttagatctgacacctttttctgttgtcttcctaattttttgatttttgaccattcacctgtacacattctcgtgcagaattcatttcagatgcttctgaacaaagtacatgggcagagatcagattgggagtacccttttgcagttgctggtatcaacgtttcattcatgctggtccagatgttggatctgaagtcaagtaatttcctgttcccaattcccctttacacatatctgcggatttcacattttgttgtttgaactgtcatatttatgcaggtgttccatcttctaagtatggaattcgtttcctagaattgctangacgtgatgagaacgcctttaccacctgtactgtg

SEQ ID NO: 265044 - DNA, 829 bp, Zea mays
  unsure (1)..(829): unsure at all n locations
cttcccctgtccatctcttttttttttggtttcctcgcgtttaaagcttcgaggccgaatcccccttaagttcggcagggtaggacggcttcttcctctgcgccttcaccttcgcctgcgctgccggggctcgtcgcatggtttttaaatcgggtttgtaagttttagatctttatgtcaactaccaatctgaggcggcgactccatcatggagacgttgatggaaggaaaaacgagcatgttgacatatccagtgctgattccctcaatgaacctctattagggaagtccaatgatgacaactttggatcagaggtgtatgatcctagaaaacaggatctgtgggatgatgatatgaagaaagaacaactacactggtcatttcttttctcaaacttgattacacaatgggcacaatggttagcaagcattattgtgagctcaggatctatctttggtagattatcccccttctcttcagagaaccaaataaatccagtatatcttagccccctttacaggtacaaagcgttggatactttaagacacagattgcacatctcttttgatggctcccgtattgaacatcaaggatgccttgaggcaactctggcgtttagcttatcccgctcgtgagattccaccactcaaatctgaattatggaaggagatgggttggcaaggcaacgatccatctactgatttcaggggtggtggactcatatcgttggagaacctcatcttttttgctaggaactaccctaattcatttcagatgcttctgaacaaagtacaagggcagagatcagattgggagtaccnctttgca

SEQ ID NO: 265045 - DNA, 1333 bp, Zea mays
caaagggatagagaagcggcactgcagaggcagagcgtcagagccatcgtcctcgcctcaccccgtagtcccgtacctagcgcagagaagccggcacaatgccagccgccgccgtagcctcccctctcctcctctcgctctcctcgtcctcctcccatttcctctcttcctcatccacctcctttttcccaccctcctccgctgccgtcgctccacacgccgccgtcaggacgaaggcggctgtctccgtcctccgcgcgctgcgcgccgaggcggccaccctccccgtgctctcattcaccggagagaaggtcggggaggtaaccctcgacctcaaatccgcgccaccctccaccgcgcgcgctgtcgtgcaccgcgctatcatcaccgaccgccagaacgcgcgccgaggcacggcctccacgctcacccgcggcgaggtcagaggcggagggaggaagccctatcagcagaagaagacggggaaggcgcggcgggggtcgcagcgtaccccgcttcgtcccggcggtggcgtcgtgttcggccccaagccccgcgactggtccatcaagatcaaccgcaaggagaagcgccttgccatctccactgccatcgtgagcgccgccaaggacgccttcgttgtcgaggagttcgaggaggccttcgcgtcggggcccaagaccagggatttcgtggccgctttgcagcggtgggggcttgacccgaagcagaaagccatgttctttgccacggacttcgacgacaatgtgcggctcagcggcaggaacattggttccctcaagatgctcacacccaggacgctgaacctgtacgacatactcgacgcacgcaagctcttctttactcctgctgctgtagactacctcaactccaggtacggagccagtgtttccgatgactactatactgatgacgaggatgatggcgaggaggaactggtcgagcaagaagcagaagaaggcaccacagcagatgctgctccagatgcaactgaagagggcgaggcagacagcagctcctaggcgggaagtgtagatttgttgtttcgcatttgttatgtcaccctcaggtgaggatggtggggaattctttcctaacggggagaccttttgtctgcttttattgtaagttgattatgttctcttactgaagcagtatactagatttccaaacctcacataagagcatgttttcaaatacatcatccgttgtcgaccactgcatataaagtgttctttcatctacgctgcaatggtgaagaacagcggacaattatcctggaaaaaaaaaaaaaaaaaaaaagggcggccgc

SEQ ID NO: 265046 - DNA, 1461 bp, Zea mays
ctcgagccgggaacatgtggatatcacacgcacgcgcctacgcttattagccctcattcgaagtcgacggcacccgtcttctctccgcactcgaaaccccatccttgactagctccgatctggtacgagatggccggcaagatgaaggagttagacggcgccagccctgccaagatcttcattggcgggctctccaaggatacaagcatgagtacattcaaagaacattttgggaagtatggggatataattgatgctgtcataatgaaggaccgctacacacaaaagcccagaggctttggctttattacttttgctgatcccactgttgttgacagagtgattgaggatgaacatgttatcaatggaaaaccggttgaaattaagagaacgatccctaagggagctgctcctttgaaagatttcaagacgaagaagatttttgttggtggattaccctcagctctaaaagaagatgaattcaaggaattcttttccaagtttgggaaggttgtggagcatgaaatcatccgtgaccatgcaaccaaccggtcacgtggatttggttttatagtctttgatgcagaaaaagcagtagatgatttattacataagaagggcaatatgattgatctaaatggttctcaggtggagatcaagaaggcagaaccaaagaaaccctctaaccaaccacctcgttcacttgatagtgagcctaggggccgtccatatgcagacagttatgatggatttggcagctcttacaattatggtggtagttttggtccctatagatcacctcgaagttttggcgctaggcctagcagctacagtagtgcttatggtcctggtgattatggtagtggctatgctacttatggtggagcattagtaggataccgtgaaccttccctttattctagtcgctatggtagcacttatggaggcagccttggtggtgggtatggtggtgttagttatgatggtggattagctggtgcatatgagcgtgatgctgggggctatggtggttctagctatggtcgtagttatgactcttcctgggctaatactggtgatgggtttggcaccggtggactctatggtgctaggacaggctatggtggcagtggcggcagtggtgctgctggtcgttaccatccatatggaagatagaaaatctccagtgctgctgtttgctagagaagcttgcagaagatgaattctagatgtgtgctcaagagatcatctgcatctaaaagatgcactgaagttcaatatgctcagttttctgtattaggaagtactgttagatcaacttgtagaaatttaaacctttgttttggtatttggaattggaatttaagcatatttgataagcgtatgcacttttatagatagaaaatctagtgacccgtcaaaactagctgccagtacaagcatgagtgaatctttgttagt

SEQ ID NO: 265047 - DNA, 610 bp, Zea mays
gaaatgagagtgaaaagccgtgacactgatcagtggatgtcatatcgacatcttcctgagaacctcaaggaaagaatacggcgttatgaacaatatagatggcaagaaacaagcggggttgatgaagagcaactccttatgaacctccccaaagatcttaggagggatataaaacgacatctttgtttgaaacttctcatgagggttccactgtttgaaaatatggacgaacagcttttggatgccatgtgtgactgcctaaagcccattctgtacacagaagggggctgcgttattcgcgaaggagatccggtgaacgagatgctctttgtcatgaggggaaacctaatgagcgtgacgacgaatggtggaagaaccggcttctttaactccgatgttctgaaggccggagatttctgcggcgaagagctcctcacctgggctcttgaccccacgtcaacatccagcctccccagctcaacaaggacggtgaagacgatgtctgaagtggaagcctttgccttgagggctgaagacttgaagttcgtggccacccagttccgacgactccacagcaaacagcttcagcacactttcaggttctactcgc

SEQ ID NO: 265048 - DNA, 508 bp, Zea mays
aggtcgtcacgctggagcgggtgctcggggacgaatcaatagctgagttgttgacaaacaacaagttatctgagttggcatgtttggcattatatctcatgtatgagaaaaagcaaggaaaggattcattttggtacccctacattaaggaacttgaccgacatcgaggaagggggcagctagctgttgaatcaccacttctatggactgaaagtgaactggactaccttagtggaagccccttgaaggatgaagttgttgctagagatgaggcaataaggagagagtataatgagcttgacacattgtggtttatggcaggttcactatttcagcaatatccttttgacatacctactgaggcttttccgtttgaaatattcaagcaggcttttgttgcagtacagtcttgtgttgttcatttgcagaaagttagtcttgctcgaaggttcgcactagttcccttggggccgccactattgacttacaagagcaacttgcaagcgat

SEQ ID NO: 265049 - DNA, 934 bp, Zea mays
cccacgcgtccgcccacgcgtccgcccacgcgtccgacccaatcagatccgatttcgtagagatgaagccggcagtagaggcggaggctgacgagcgagcggcggaggagatggcacctaagaaggcagcggctgccaagaaagcggccgaggaagttgaggtggaggaggtggtggacggggacgaggcggtcgatggggagggcgacggtgacgaggacgacgatggggaaggcggtgacgaggaggatgatgatgaggaggtggatggggaggagaaggaggcggcaggggttgtggagatctccgacgaagacgacgacgacggtgacggggaggcggacgacgacgacgacgatgacggggatgacgacgacgacgacgacgaggactcagacgacgaggaagaggtcgacggtgaagacgatcaggaggaggagctgggaaccgagtatctggttcagcctcttgggcgggctgaagacgaagagcactcgagcgactttgaaccggaagaaaacggtgagggtgccgacgatgaggagatcgatgaagaggacgatgacggtgaggactctgtgaaggcgcagacctctacgaagaggaagaggtcaggcgacgaagaagaagaagacgacgacgatggggatgatgatggtgacgatgatgacgatgggaggccaccatcaaagcgatagtatggttagctctagttttgtagctgtgtccttgggtgtttggtaggtaggtagtgctgctgatgttggtttagaagaactcatcatcacctgggatatgtgtgtgatttggcttggccgatggatgaatgatgaaggtcttgtactaaaaaaaaaatctttcatgttgatgaactcgcactgattcactgtacatgctagcttctaattgtctgtctagacagctttatgggttt

SEQ ID NO: 265050 - DNA, 272 bp, Zea mays
gacgccggcagtagaggcggacgctgacgagcgagcggcggaggagatggcacctaagaaggcagcggctgccaagaaagcggccgaggaagttgaggtggaggaggtggtggacggggacgacgcggtcgatggggacggcgacggtgacgaggacgacgacgacgacgacgaggactcagacgacgaggaagaggtcgacggtgcagacgatcacgacgaggagctgggaaccgagtatctggttcagcccttgggcgggctgaagacga

SEQ ID NO: 265051 - DNA, 674 bp, Zea mays
  unsure (1)..(674): unsure at all n locations
accgttgctgcacgccaggagcaggccctcgacctcccagccgagcggtccttgttcccatggcgcgtgctcgacttcagcctggaatccctttgccgttgccatgacagccgccggccgagtctcttcctgtcgtgtgtccagtcctctgcgcacgcgcgcgcctggctcgcttctcttgcgcgcggtcctctgttcctgcgcgcctgcgcgcagctcgctccctggctcgactctgcccagttcgcgtcctgctcgccggtcgaattctttgcgacgcgcgcgtagcgttttgttattcctgcgcgtgctgccgcagagctccatgttcagttcgcctccgtcgcgttgtcgtgcgcgcgaaactgtttgcagtcgatatcaagtccgtgacacgcgcgccggacacggtaaagcgttgcgtgggcttgtatccgagtccgcccgaccgtgacctcgctttgcttctcgtgtcgctactcgccaagtcctttccccagtccgcgccataaaattcactcggacacgatctcgtcgtcgttccgtgcgtcatcaagaaatcccgagaatcgggtgaagacgaagctagcagcatggtatttaccaagtgctcgacacangagctaaaccagaatccttgccgtgttcacggatagcgcgtcagatttagaatg

SEQ ID NO: 265052 - DNA, 1051 bp, Zea mays
  unsure (1)..(1051): unsure at all n locations
accggaattgcagggtcgacccgcgcgtcccccgttccatatggcttcctgcaggatggcactcctccttggcttgctgctgctagtagtagcttcgcccgcgatcgctgatgacgactccggtatctactaccagctggctcttatgtggccaggagcatactgcgagcagaccagcgctgggtgctgcaagccgaccaccggcgtctcgccggcgcgcgacttctacataacgggcttcaccgtccttaacgcgaccaccgacgctgcagtgacgggatgcagcaacaaagttccttacgaccctaacctgattaccggcatccaaggcctgaatcagtactggagcaacatcaggtgccccagcaacaacgggcagagcagctggaagaacgcctggaagaaggccggcgcctgctccggcctcagcgagaaagactacttcgagactgccctctccttccgtagccggatcaacccactcgttcgcctcaaagccaaaggtatcgagccggacttcgggctctacggcctcaaggcgatcaccaaggtcttcaagagcggcatcaacgcgacgccggtgatccagtgcagcaagggccccttcgacaagtacatgctgttccagctctacttctgcgcggcggggaacggcacgttcatcgactgccccgcgccgcagcagtacacctgctccaaggagatcctcttccaccccttcaagaagtggatgctcaagcagcagctcaaccaggacgacgaccctttccagctgcctggcgtcgccatggacaactgatacaccgtaccgtcgtctctgtttgcgtttctgtcaagtgtgcatggaataatactgtaactgtgtttcctgccgggcaatgcactgtgatatgatgcccaacgaataaatgtcgcttttatttttattcgacttcccccctgtaccgtgtggaaataaacctattataagcatcgtgttgaaactcaaaataagaaaaaaaaaaaaaaaaataaacaaaaaaaaaaaaaaaaaaaaaaaaaaaaaanaaaa

SEQ ID NO: 265053 - DNA, 438 bp, Zea mays
gtggatgctcaagcagcagctcaaccaggacgacgaccctttccagctgcctggcgtcgccatggacaactgatacaccgaccccttcaagaagtggatgctcaagcagcagctcaacgaggacgtacgacgaccctttccagctgcctggcgtcgccatggacaactgatacaccggaccgtcgtctctgtttgcggtttctgtcaagtgtgcatggaataatactgtaactgtgtttcctgccgggcaatgcactgtgatatgatgcccaacgaataaatgtcgcttttatttttattcgccttcccccctgtaccgtgtggaaataaacctattataagcatcgtgttgaaactcatgatatgcatgagcagctagtgaaaagtttgaatcctagatgaattgaaacacactattatatgattgctaaataatat

SEQ ID NO: 265054 - DNA, 953 bp, Zea mays
cggacggtggccggagctcgacggcgacaagatgctcgtcggcgccaacttcgcgtccgccggcgtccgcatcactcaacgacatccggaatcgcagttcgccaacatcatccatatctccaagcagctgcgctacttcgagcagtaccagaggcgcctggccgcgctgatcggcccggaggcggcgtcccgcgtggtgcgcggcgcgctggtgctcatcacgctgggcggcaacgacttcgtgaacaactactacctggtgccctactcggcgcggtcgcgggagttctcgctgccggactacgtctcctacctgctgtcggagtacgcgcaggtgctggaccgcctctacgacctcggcgcgcggcgggtgctggtgcagggggtgggacccatcggctgcgtccccgcggagctggcgctgcacagcctcgacggcacctgcgacgccgagctgcagcgcgccgccgagatgtacaacccgcggctcatggcgctgctggaggagctcaacgcgcgccacggcggcggcgaccccgtgttcgtcggcgtcaacatgcagcgcatccacaacgacttcatcgacgaccccaaggcgtacggcttccagaccgccacctacgcgtgctgcggccagggccgcttcaacggcatggggctctgcaccatggtgtccagcctctgcgccgaccgcgacacctacgtgttctgggacgccttccaccccacggagcgcgccaaccgcctcatcgtgcagcagttcatgtccggctccaccgactacatcacgcccatgaacctcagcaccgtcctcgccgtcgacctccagaagcagcagctgcgtacgtgacgtgatgtcgtcatccgcttcatcagctgcctgatcagcttcgtgcgtcgccattgccacatcgtcagatcagtttcgtatgcgtgtgtagtgagagtaccta

SEQ ID NO: 265055 - DNA, 256 bp, Zea mays
  unsure (1)..(256): unsure at all n locations
tgatcctgttttaaggaatgttgctcacctcggaagttggcaggttataagcccgntgcaagtatcaggttatgtggttgtggttgatgagttacttgctgtccagaacaaatcttatgataaaccaaccatccttgtggcaaagagtgtcaagggagaggaagaaataccagacggagtagttggtgtaattacacctgatatgccagatgctctgtctcatgtgtcagtccgagcaaggcatagcaaggtactg

SEQ ID NO: 265056 - DNA, 903 bp, Zea mays
ccacctgctagctctctgtctcctgctcagagtcgcagttcgctttgttgtactagagcgctgagcagatctttccttgtttcttcattccggtacgaaggggaggggtccaagtgaagagaagagaaggcctgcgagcgatgggcatcgtcgacgtcgtctccgagttctgctccttgccgaggactcgccggcatctcaagaagaggaagcagttccaggtatatataaaccatcttcttctatttctgttcggggtctcttatcccagccagcccaacaactgaactgaacgggactcgccgcagacggtggagatgaaggtgcgcatcgactgcgaagggtgcgagcgcaaggtgaagaaggcggtggagggcatgaagggcgtgagctccgtggaggtggcggccaagcagaacaaggtgacggtcacgggctacgtggacgccgccaaggtcatgcgccgcgtcgcctacaagacaggcaagcgggtggagccctggccctacgtgccctacgagatggtgcagcacccctacgcgccgggcgcctacgacaagaaggcccccgccggctacgtccgcaacgtcgtcgccgaccccaccgccgcgccgctcgccagggcctcctccaccgaggtccgctacaccgccgccttcagcgacgagaaccccaacgcctgctccgtcatgtagtagacccacccacacaccgaccgaccgacccacttgttttctagctattagttactagtagtatagtaggtgcttgcttgggagagttgctcttggaggaggttttgctcttcctgatttttctttttctttttttcgttttccggtttcatgtagatgtagtgtgcgttttgatttttgtgaaaaaaataaaccagtttgtaacggt

SEQ ID NO: 265057 - DNA, 801 bp, Zea mays
  unsure (1)..(801): unsure at all n locations
cccacgcgtccggctagctctctgtctcctgctcagagtcgcagttcgctttgttgtactagagcgctgagcagatctttccttgtttcttcattccggtacgaaggggaggggtccaagtgaagagaagagaaggcctgcgagcgatgggcatcgtcgacgtcgtctccgagttctgctccttgccgaggactcgccggcatctcaagaagaggaagcagttccagacggtggagatgaaggtgcgcatcgactgcgaagggtgcgagcgcaaggtgaagaaggcggtggagggcatgaagggcgtgagctccgtggaggtggcggccaagcagaacaaggtgacggtcacgggctacgtggacgccaccaaggtcatgcgccgcgtcgcctacaagacaggcaagcgggtggagccctggccctacgtgccctacgagatggtgcagcacccctacgcgccgggcgcctacgacaagaaggcccccgccggctacgtccgcaacgtcgtcgccgaccccaccgccgcgccgctcgccagggcctcctccaccgaggtccgctacaccgccgccttcagcgacgagaaccccaacgcctgctccgtcatgtagacccacccaccgaccccttgttttctttctggacttctggatctcgacctcaagaggtggcagctccatcgntcttcttgtctctagctattagttagtactagtatagtaggtgcttgcttgggagagttgctcttggagggaggttttgctcttcctggtttttttttcttttttttttcggttt

SEQ ID NO: 265058 - DNA, 370 bp, Zea mays
ccaccaccagctagctctctgtctgctgctcctctcaaaagagtcgcagttcactttgttgtactagagcgctgagcagatctttccttgtttctccattccggtacgaaggggtggggtccaagtgaagggaagggaagggaagggaaggagaaggcctgctgcgagcgatgggcatcgtcgacgtcgtctccgagttctgctccttgccgaggactcgccggcatctcaagaagaggaagcagttccagacggtggagatgaaggtgcgcatcgactgcggaaggtgcgagcgcaaggtgaagaaggcggtggagggcatgaaaggcgtgactccgtgcgagtggcggccaagcagaacaaagtgacg

SEQ ID NO: 265059 - DNA, 426 bp, Zea mays
caccagctagctctctgtctgctgctcctctcaaaagagtcgcagttcactttgttgtactagagcgctgagcagatctttccttgtttctccattccggtacgaaggggtggggtccaagtgaagggaagggaagggaagggaagagaaggcctgctgcgagcgatgggcatcgtcgacgtcgtctccgagttctgctccttgccgaggactcgccggcatctcaagaagaggaagcagttccaggcggtggtgatccagcttcttctgtttctgttcggggtctttatcccagccagcccaacagctgaactggactcgccgcagacggtggagatgaaggtgcgcatcgactgcgaaaggtgcgagcgcaaggtgaagaaggcggtggagggcatgaaaggcgtgagctccgtggaggtggcg

SEQ ID NO: 265060 - DNA, 563 bp, Zea mays
gcatggggccccatgctcctcgcctgttgagcagccgcggtaggtgctgccgcgcggatcgcctccttccacatactcggatcttgtttcttctgcagcttgcaatgattctttggtgctatttgatggctgttttcactgatcctggtgctgtacctgaaaactggagacatgatgctgaagatagcgggaacccttcattttcctcttcagatgagcaagaaagtgctcctagatattgttctcgctgtcaaaatggcaaacctccccgatgtcatcattgttctgtttgtaacagatgtgtgcttaaaatggaccatcactgcatttgggtagttaattgtgttggagcaaggaactacaagtattttctcccttttctggtgtatacatttatcgagactgtgctggataccttggtactacttccaaacttcattgaattttttcaagatgaacataggcgttccagctctcctggggatattgctattctatttcttgcttttgttctcaatttagcatttgcgctgagcctcctctgtttcattggcatgcacgcg

SEQ ID NO: 265061 - DNA, 731 bp, Zea mays
ggaagaaagaacgaaaacacttttatactaaccacgggaacggggtcaccgcaaacaagaaagctgtgctatttatgccaaaactacattgaaactactacggcttaatttaggtactctagtaatgagtgggattggaatggattgagatgtattgagagagtatttgatctattagggatttacaccctctccaatccctccaaaacactctaatcccaaaatatccaaactagacctacatgtgtaaacgtaaaattgacaccctgaacgagcctgtagcctctcaactgaacgagcctcaaagattcacaatattgaagtaggagcacgcacttggaaatttcacacgagtgaaaagtagagtaagatattggccaagaaacatacgatgcagtaaacaagcttcaaaacgcgcatcccagttaaccaggagcatctgattaattcctgtgaaagaactcagttatagtgaacaaagcatcagcccgctattgtgttcttctaagaatcagacaatacttttgaataaccccaactaatgaaatttcatcggccaacttgtagaaattggagcataattaacccctcatagtaatgccgatgaagcagttgatgcctcagatataagccacagaggctgacgtgcttgaaggcatgcagcaatatcaaacgggtgtaattcggctccatcaaatataagatttactcctggtaagcggacgcgtggg

SEQ ID NO: 265062 - DNA, 566 bp, Zea mays
ataaaaattaatattaatataaataatattatatttattataatttatttttttttttttttttttttttttttttttttttttttttttttttttttttttttttttttttttttttttttttctttttttttgctatagcagactagttgcccattcctgtattcatggatatattggaggtgtaataacagctgacctaggagttcttcgacttgtaaaaccacgggaaataacgatacaagttagggaataccaaaaacaaccctactggtggcaaagcattggattggaggtaggcacccgaaatgcaggcgatctaggtacaagcaggaagggcatggtatcacaaattcagggctatacagttctagctctactattccttgcagcttccaaggcagtgccattcttcagtgcttcttggctttcagcctccctacccagcttatgaagtgccagggcctgcaggtagtgtcccatcggccagtccgatgcaataatctcggctctctttgcatcctcgaggccttcctgtgggttgccggccaccacatgtgcgaagc

SEQ ID NO: 265063 - DNA, 580 bp, Zea mays
caacagaatgctagttgcccattcctgtattcataaatatattggaggtgtaacaacagccagcctaggcctagtttggatactctagtaacgagtgggattggagtggattgagatgtattgagagagtatttgatctattagggatttacaccctctccaatcccttcaaaacactctaatcccaaagtatccaaactagcccctaggagttttttcgacttgtgaaactaggggaaataccgatacaagttagggaataccaaaaacagcccctactggtgacgaagcattggagggaggcgatctaggtacaagcaggacagggtatcacaaattcagggctatacagttctagctctactattcattgcagcttccaaggcagtgccattcttcagtgcttcttggctttcagcctcccttcccaggttgtgaagtgccaaggcctgcaggtagtgtcccatcggccagtccgatgcaataacctcggctctctttgcatcctcaaggccttcctgtgggttgccagccaccacatatgcgaagcatctccgcctcgagcgattcgagcttcgtc

SEQ ID NO: 265064 - DNA, 1397 bp, Zea mays
ttgacgcgtgggcggacgcgtgggctcctcctcgggtacgtctccaacttcgccttcgcgcgcctccccgtccacctcagctggcgcgccatgttcctggtcggcgccgtgccgcccgtcttcctcggcgtcgccgtcctcgccatgccggagtcgccgcgctggctcgtcatgcggggccgcatcgacgacgcgcgccgcgtgctgcagaagacctccgactcccccgccgaggccgaggagcgtctgctcgacatcaagaaggtggtcggcatccccgagggcgtgaccgacgccgacgacgtggccgccatcgtccgcgccagcggcaaggcctcgtcgtcgtcgtcgtcgtcgcgccacgacggggtgtggaaggagctgctcatcaacccttcccgccccgtgcgccgcatgctcatggcggggctcgggctcatgttcatccagcaggccacgggcgtggactgcgtggtcatgtacagcccgcgggtgttcgagcgggcgggcatcaagtccaagaccaactcgctgggcgcgtccatggcggtgggcgcgtgcaagaccttcttcatacccatctcgacgctgctcctggaccgcatcggccggcggccactgctgctggcgagcggcggcgggatggccatcttcctcttcacgctggccacgtccctgcacatgatggaccggcgccccgagggggaggccaccgcgctgggcgcggtcagcatcgcggccatgctgtcgttcgtggcgtcgctcgcgtccggcctgggccccgtcgcctgggtctactgctccgagatctacccgctgcggctgcgcgcgcaggctgctgccatcggcacggggctcaaccggatcatgagcggcgccaccaccatgtccttcctctcgctctccaacgccatcaccatcgccggcagcttctacctctacgcctgcatcgccgccgcagggtgggtgttcatgtacttcttcctgccggagacgatgggcaagagcctggaggacaccgtgaagctcttcggcaaggacgcggacgacgaggacgtcagcgacatccgtcgtcacgtgcccactaagaagccgtctactgagctgagtgctcagcactgatcgagtaatgtgctacgcaacacgtgtcctcccgagtgtggccgaagcttatgttccgtaaagcttcgatgatgtagtataatatttttttttgtgtgtcggaactgtggtgaatctatgtatatcccgcgcctcttttgtttattagatttgcccattttttgttgatctcgtggcatggtgcgtgtgcgtagaaaaaatattattaaaaatatctatctctgcctagtgtggcctacatgttatatttttgaaaaaaaaaaaaaaaaaagaaa

SEQ ID NO: 265065 - DNA, 459 bp, Zea mays
gcctgacctcaaatatcttaagttgcagggttcaaaagtgtgtatgtacatgggtttgttgaaataaatcgaaatcctctcactttacaaactcgcatcaacagaatgctatagcagactagttgcccattcctgtattcatggatatattggaggtgtaacaacagccggcctaggaattttttcgacttgtgaaactaggggaaataccgatacaagttagggaataccaaaaacagcccctactggtggcgaagcattggagggaggcgatctaggtacaagcaggacagggtatcacaaattcagggctatacagttctagctctactattcattgcagcttccaaggcagtgccattcttcagtgcttcttggctttcagcctcccttcccaggttgtgaagtgccaaggcctggaggtagtgtcccatcggccagtccgatgcaataacctcg

SEQ ID NO: 265066 - DNA, 610 bp, Zea mays
gggtgttcatgtacttcttcttgtcgaagaccatgggcaggagcctggaggacaccgtgaagctcttcggcaaggacgcggacgacgaggacgtcggcgacagccgtcgtcacgcgcccagtaagaagccctccacttccactgagcttgagctcagtgctcagcactgagtgatgtgccatgcaacacgtgtcctcccgagtgtgaccgaagcttatgtctaaagcttcgatgatacagtctactcctagtatcttgtgtgctcgaactgtggtgaatcttttgtagatcccgggcctctccttttttttctgttagatttgtagattttttttgttgatctcgtggcatagtgcgtgtgagtagcgagggattggggcacgcaacactttagtctaatttggatactctagtaatgagtgtgattggagtggattgagatgtattgagagaatatttgatctattggtgatttacaccctcttcaatccctccaaaacactttaatccaaaagtatccaaactaggccttagaaaaaaataggaatatgctaaaattcgcctgcattttagttttgaatgtgatttttattcaataacaatcacattc

SEQ ID NO: 265067 - DNA, 417 bp, Zea mays
  unsure (1)..(417): unsure at all n locations
gcaaacaccaggctgccttcgctgcctcatcttctttcttcacttcttaagcctcacgcttcatccagttcagatgccattgacagtcaattgacagaaatgtcagatgaggaggatgaatatgatcaactaccacccttccgcattctaaagaaatctgaatatgaaaatttgaccaatgaacagaagtctgcatatcttgacgaactggactaccgtgagactttgtacctaaagaaacagtggaaagaaggaatcagaaggaaaaagcttactgaagctcagagtgatgaagttggtgatgattatgatgagagtgcatncncagagattgtgcacatgtcagatatggacattccactaagttttgactctgattatcctgtgcatcgttaccgtcacattataactgatgat

SEQ ID NO: 265068 - DNA, 1197 bp, Zea mays
gattgttgcagcagaggattcactgggcagtgctgccacattcgttgtgtattcttatgggtcggcgaaggagtctctaccaccaaatgttagagatctgttgagctcgtctgaggagaaagctagtctagtcttgagaccaatcggaaatgctctgcaacaggtctatgtagttgttgaaggtgttgagaagaatgttggtttggatccaagtgatcctattgttcaattggcagttgtgcttggaggttcagtgacaatagggacaacgtactggctcttcacatacagtggctattctggagacttgtcacctgaatcagcgtttgacttattgaaaaacgatgacaaagccgtactcattgatgttcggcctgaggatttgagggaaaaagatggtgttcctgatctacgcctcggggctaggtctaaatatgcaagtgtagcttcgcctgagatcaaagatccagtaaagagtatgctcaaagatgaaagagagtttgatgatgctttactggcagttgtcatccgaaacttgaaattggtgaagggcgattcaaaagtcatagttatggattctaatggagctcgatcaaaagccattgctaggttactgaagaagctcggtgtgcagcgaccttaccttgttaaaggtggtttccaagcatggtcaaagaaccttcgtgtcaaagaactgaaacctgagactgcattaacgtcaataaatgaggatgttgaggaaatcctagaacaaataaagcccaccccaactcttgtgtttggatctcttctgggcctctcagcactttcctatgctttactggaatgggagatgactttgcaatacatagctgttttaagcgttgggctgactatctacttgcgattctctacatatgaggactccgaggatttggagaaagacctaaagctgttgctgtctccagtaagagtaggcgcagacgccttgtcatgggcagctaagaagatagagccaaacaaggtgggcctgccaacgtctccttccacgacggcggtgaaagaccgggttcttcaaggccgcggcgaaacacgagtcgcagccatcggatgccgacgagtcgtcggtccaaacagccgaggcatgacacgcgccgaaagcttgggagccagtcgagcggtcacgccgaatccctcataagagcactcggtgggcgc

SEQ ID NO: 265069 - DNA, 357 bp, Zea mays
tctacacactgtcgaggacggcagcgggaagggacgagtcgacgccggtgtgcggtggcggcggtcgcgcggtaacgtttcccttcagcttcgatcatgttggtggcggcgccggccacaaaaggctcacccaccaaggatttgacggctgtcgagcccggggacgaggtggcgcactcggtgttccacgcagggggagctatgggttcggtctcggtttgtcaggcgaatggcaaccaccagccgtcgccgccgcatgcagatagcggaccacgtcgtcgaggatggcgttgccgtcgacaggatcaatggcaactaccatccgcttgatctggtggctgatgcggggcatgtcgt

SEQ ID NO: 265070 - DNA, 745 bp, Zea mays
cacaatcaaaagctaccccctatccgatccaaccctctctggctgctcctccgtccggccggcatcggcagtgcaggatggctctgaggatgtgggcgagctcagccgccaatgcgctcaagctctcggcgggcggcgccggagcccgggctgctgccttctctatctccaggttcttctccactgttcacgatgggttgaagtacactcagtctcacgaatgggtcaagacgacgggcgacgtcgccaccgttggcatcacggaccatgctcagggccacctgggagaggtggtgttcgtggagctgccggaacccggcacgaaggtcgccgcgggaggacccttcggcaacgtggagagtgtcaaggccaccagcgacgtcaactccccgatctccggcgaggtcgtcgaggtcaatgccaaactgtcagagacgcccggcctgatcaacacgagcccgtacgaggacgggtggatgatcaaggtgaagccgagcagcccgggggaggcggacgccctgctggacgccgccaagtacaccaagcactgcgaggaggaagacgctcactagacccaggcccggcccagccagcaagcgtggatgcttaccgcgacagtgcgcgtttggtggtgttgatccgctcagtctttctttagtgttgcaaaaactccaccaagcagtccgccaatgccggcgtacctgatgccttccgttttctttgtgctggtaccttattttttttt

SEQ ID NO: 265071 - DNA, 970 bp, Zea mays
cctactcgtccgcagtcccacaccgtccaggggtatgttggcaacaaatcggccgtctttcccctgcagctccttggctttgatgtggatccaataaactctgtacagttttctaatcatacaggatacccaacatttagaggtcaggttcttaatggcaaacagctctgggaccttattgaaggactggaggaaaatcagttgcttcattatacccatttattaacaggttatataggctcagtttcctttttagatactgtgctacaagttgttgagaaattgcgatcagttaatcctgatcttgtatatgtttgtgacccagttctaggtgatgaaggaaaactatatgttcctcaggagctaatatctgtttatcaacagaaggttgttccagttgcttcaatgcttacacctaaccaatttgaagttgaactacttactggattgaggatcacctccgaagaagatggtttgacagcttgtaataccctccacagtgccggaccacagaaggtggttataactagtgctcttattgaaggcaagctgctccttatcggaagtcacaaaaaaacagaggaacaacagccagaacaatttaagattgagataccaaagatacctgcatatttcacgggaactggagatttgacaactgctctcctactaggatggagtaataaatatcctgatagcctcgagaaagcggcagaactggcagtttccagtttgcaggcacttctgaaaagaactgtggaagactataaaatggccggcttcgacccatcgaccagcagcttagagatccggttgatccaaagccaggacgagatccgaaacccaactgttacatgcaaggctgtgaagtatggaagctgaatccatagtacccccactgacaaaggtgccaacaataatgagcagtgcctgcaccgtcgataagcgggtgcacctacttccatgactc

SEQ ID NO: 265072 - DNA, 829 bp, Zea mays
  unsure (1)..(829): unsure at all n locations
cgcccngaggaccggccggatttccgggcgcccagctcccttttcgcgtgggcggacgcgtgggttcgacatgggcggccacttcgcccgctccggcaccgccgacgagctgcccaagacccccgtcctgtgcaagcctaacgtggacgccatggaggaggcgctcaggatcgccaacgtcaacccgcacaaggcgatcttcttcgacgacagcgtacgcaacatccaggccgggaagcagattggcctccacacggtgctggtgggcaaatcgcagcgggtgaaaggcgcggaccacgcgctggagagcatccacaacatcagggaagcgctgccggagctgtgggaggaggccgagaaggcggaggacgtgctctaccccgaacgcgttgcgatggagacctcggtcaccgcgtaaaacccctgaatgcctccggtgcaccgtcagccgaactttctcgacatctccaggaccgcatcaacgatcacatgtcactcgctccccgagccagggccggtgatgatctcgcgctggaactgaatccaccagcaatggccgggccgaggatcgatttccgacagcaggaagggtgcagcatgtaaagggggaacagatgagatcatgtttgggttggtcccccgttgtatatgtagttatgtatcagccagtcctttgtttgtaaattaccagtatttagaagtaataagaaaaaatggagtttacttgtacgtttcctgtgctctgtcatctgaagcaataaaactggttagcaagaatggaagatcaacccacctgcttctctgtaaaaaaaaaaaaaaaaaaaanaaa

SEQ ID NO: 265073 - DNA, 924 bp, Zea mays
atgcgttgctctctctcgcctctggttggcagagctctcttgaagcctcgagactcgtctcgccgctgctccctcagctctgccgctgcgtgcctgcgttagctgttgcattgcagcgcaccccgcgagccttgagctgctagctcgcccttcaccacagtccccagacatggagttcgaagaccgctgccacaaggtccaggagcccaagttcgactgcctgctcttcgacctcgacgacaccctgtatccgctgagcgccgggatcgcaggccatgtcaagaagaacattgaagattacatggttgagaagctgggtattgacgagaccaagatcgagaacctgggcaatctgctgtacaagaactacggcaccacgatggctggcctcagggccatcggctacagcttcgattacgatgagtaccacgccttcgtccatggaaggctgccgtacgacaacatcaagcctgaccccattctcaagcacattctcaagaacctgcgcatccgcaaactcatattcaccaacggtgacatggtccacgccgtgagagccctcaagaggctgggcctggaggactgcttcgaggggatcatctgcttcgagaccctgaacccgccctgcccgccgcagggagaccaggagcccgagatcttcgacatcgccggccacttcgcccgctccggcaccgccgacgagctgcccaagacccccgtcctgtgcaagcccaacgtggacgccatggaggaggcgctcaggatcgccaacgtcaacccgcacaaggcgatcttcttcgacgacagcgtacgcaacatccaggccgggaagcagattggcctccacacggtgctggtgggcaaatcgcagcgggtgaaaggcgcggaccacgcgctggagagcattcacaacgtcagggaggc

SEQ ID NO: 265074 - DNA, 600 bp, Zea mays
cccacgcgtccgcccacgcgtccgcccacgcgtccgctgacgcgtggagacatggagttcgaagaccgctgccataaggtccaggagcccaagttcgactgcctgctcttcgacctcgacgacaccctgtacccgctgagcgccgggatcgcaggccatgtcaagaagaacattgaagattacatggttgagaagctgggtattgacgagaccaagatcgagaacctgggcaatctgctgtacaagaactacggcaccacgatggctggacctcagggccatcggctacagcttcgattacgatgagtaccacgccttcgtccatggaaggctgccgtacgacaacatcaagcctgaccccattctcaagcacattctcaagaacctgcgcatccgcaaactcatattcaccaacggtgacatggtccacgccgtgagagccctgcttcgaggggatcatctgcttcgagaccctgaacccgccctgcccgccgcagggagaccaggagcccgagatcttcgacatcgccggccactttgcccgctccggcaccgtcgacgagctgcccaagacccccgtcctgtgcaagcctaacgtgg

SEQ ID NO: 265075 - DNA, 319 bp, Zea mays
ggcggaggacgtgctctacgccgagcgcgtcgccatggagacctcggtcaccgcgtaaacccctctctcgaatcctccggtgcaccgtcagcccaaccttctcgacatccaggaccgggacgatcgcataccactctctctcccgagccaggtctggtggtctcacgctggaactgaatccagccatggccgggccgagaatttccgacagcaggaaggggtgcagcatgtaaaggggggagcagatgagatcatgtaaaggggggagcagatgagatcatgtttgggatgctcccacatatgtatagttatgtatcag

SEQ ID NO: 265076 - DNA, 307 bp, Zea mays
cttctgctctctctctctctcgcctctggtgcgcagagctagctctcttgaagcctcgccgctgctctgctccccagctctgccgctgcgtgcctgcgtcactcgttccattgcagccagcgagccttgagctgctagctctctcttcaccacacttctcacgcatggagttcgaggatcgctgccacaaggtccaggagcccaagttcgactgtctgctcttcgacctcgacgacaccctgtatccgctgagctccgggatcgcgggccatgtcaagaagaacattgaagattacatggtcgagaa

SEQ ID NO: 265077 - DNA, 896 bp, Zea mays
cggacgcgtgggcggacgcgtgggcggacgcgtggccgcgaatcacagacgcgtctatctcagcttgctgcactgcactaccctgccctgccatcatatcgtacgtgagcccggccgagcgagagcgagggagaggcatggctgctccgaagctcgcgacgctggcgctggccgtgctcctggcggcgaccgtggtggctcccccggccgcggtgcgcgcggcgatgtcgtgctccaccgtgtacagcacgctgatgccgtgcctgccgttcgtccagatgggcggggccatgccgccccagccgtgctgcggcggcatccgcagcctgctgcagcaggccaacaacacccccgaccgccgcaccatctgcggctgcctcaagaacgtcgccaacggcgccaacgggagcggcacctacatcagccgcgccgccgcgctgcccagcaagtgcggcgtcgccctgccgtacaagatcagcaccaacgttaactgcaacacgattaattaagtgaggcgtcctgtgcgcgtccgggcgaggaatgcatgcatggcgctggcggagagtaataaaataatgctactggtattttaagctatatcgaggtgtgcctgtctctagtcatttattatggtgtttaggaatggtctacacagttcgtaacggtgtatcgtggatgcatgttgccgcgagcagagtacgtaggcatgaaccgatgtgtgcgcttctgtctgtttactctctctatgtagtaatgtgtgggtgctttgatccagatgtattcgctcgtgagtcgtggaagtagatcgtttcagtatcaaaaaaaaaaaaaaaaaataaaaggaaagaaaaagtcggaaggtgaaaaaaaaaaaaggggggcgcgccctttttatt

SEQ ID NO: 265078 - DNA, 728 bp, Zea mays
  unsure (1)..(728): unsure at all n locations
cccacgcgtccggcgaatcgacgcgcctatctcagcttgctgcactgcactgcactgccctgccatcatatcgtacgtgagcccggccgagagcgagggagaggcatggctgctccgaagctcgcgacgctggcgctggccgtgctcctggcggcgaccgcggtggctcccccggccgcggtgcgcgcggcgatgtcgtgctccaccgtgtacagcacgctgatgccgtgcctgccgttcgtccagatgggcggngccatggccgcccagccgtgctgcggcggcatccgcagcctgctgcagcaggccaacaacacccccgaccgtcgcgccgtcgcgctgcccagcaccaacgttaactgcaacacgattaattaaatgaggcgtcctgtgcgcgtccgggcgaggaatgcatgcatggcggagagtaataaagtaatgctactggtattttaagctagatcgaggtgtgcctgtctctagtcatttatggtgtttagcaatcgtctacacagttcgtaaacggtgtatcgtggatgcatgttgccgcgagcagagtacgtaggcatgaaccgatgtgtgcgcttctgtctgtgtactctctctatgtagtaatgtgtggccagtgggtgctttgatccagatgtattcgctcgtgagtggtgagtcgtggaagttgatcgtttcagtatcattaccgtgtattctttcttttacatgcgattctg

SEQ ID NO: 265079 - DNA, 819 bp, Zea mays
tcgcggacgcgtgggctgaatccgcgaatcacagacgcgcctatctcagcttgctgcactgccctgccatcatatcaatatcatatcgtacgtgagcccggccgagagcgagggagaggcatggctgctccgaagctcgcgacgctggcgctggccgtgctcctggcggcgaccgtggtggctcccccggccgcggtgcgcgcggcgatgtcgtgctccaccgtgtacagcacgctgatgccgtgcctgccgttcgtccagatgggcggggccatgccgccccagccgtgctgcggcggcatccgcagcctgctgcagcaggccaacaacacccccgaccgccgcaccatctgcggctgcctcaagaacgtcgccaacggcgccaacgggagcggcacctacatcagccgcgccgtcgtgctgcccagcaggtgcggcgtcgccctgccgtacaagatcagcaccaacgttatctgcaacacgattaattaagttatgaggcgtcctgtgcgcgtccggacaaggaatgcatgcatggcgctgtcggagagtaattgaataatgctactggtattttaaggtatatcaaggtgcgcctgtctctagtcatttattatggtgtttaggaatggtctacacagttcgttacggtgtatcgtggatgcatgttgccgccagcaaagtacgtaggcatgatccaatgtgtgcgcttctgtctgtttactctctctatgtattaatgtgtgggtgctttgatccacatgtaatcgctcaaaaaaccccaaaaaaaaacaaaaaaaaaaaaaaaaaaaaaaaaga

SEQ ID NO: 265080 - DNA, 514 bp, Zea mays
ccttccaaagtggttcagttgatatcgttactttcaaggggtcaaaagtgaaaacgattaaagaagtctggatcggtcttgaatcaagttcatggagattagatggtttgagcttgaaagtaatacatggaccagttggtcagcctaaagaaataaatggaactccagaacagaagttcagcggtttgcagtacacttttgagaacgtaaatgtgttccttggagatgatggagcttcagtagctgaagcaaggccgacggctatcactgacctctcaggagtcggcctttctgatcttcaacaagggctgttatcctcaagaagcaaagctttaagcattaaggaaagtaagagaggatgggttgagagagtacgccgaccttaaacaatctctgctgctctatgacgcatctatagtgataaccggcttctctaccttcatcttggcttcaaatgacagcgctgcctattcgttcctgataggtggcattggaggggtcctgtacctgttgc

SEQ ID NO: 265081 - DNA, 411 bp, Zea mays
gtcggtctggttgacaaatgtctaactggacagtagtgctcccttgtgttataggtgtagaattatatttggttataattcacaaatctatatgtgtcggcgcaattggtacagttgtgaaccagttagccagagcataaaaggcttgtttacatgaagagatacatggctggtgaccaaccggttgaagttgcggttcacgttgatgcagatgcagcacgcccgacacctcacacctccgaactccgatgttgctgctgatgcccgcactgtacttgtaaacaatctttcaaaggcaaatggaactgtgggatacatgtggcagtgtggcacttcgatgatgtgctctggtaaatatttttttaggaaacaatatgctcaaaaaaaaaaaaaaaaaaaaagggcggccgc

SEQ ID NO: 265082 - DNA, 1192 bp, Zea mays
  unsure (1)..(1192): unsure at all n locations
canaatccagacgaaacccaaaatacccaccgaacgcaacctanaatcttcccatccctcctcgatccagccccgcggagaagagccatggccgcggcgtacgcgtactccaagcagggcgccggcccgctccgccccggggtcgatcaggtcgagggcaccgtgaaggccgtcgtcggccccgtctacgaccgtttccacgccgtcccgctcgacctcctcaagttcatcgaccgcaaggttggtgagtccgttgaggagatagaccgccgcgtccctccagtggtgaaggaagccccgaccttggcccgctcggctgcgaaggaggttcgccaggccggcctggtgggcacggccactggccttgccaagtcagccatcgcccgcgccgagccaaaggcccgggagctctacacccgctacgagcctgtggcagagcggcgtgccgccgaggcctgggtggccctgaaccgtctccctctggtgccctcggtcaccagggccgtcctccccactgccgcacagctctctgccaggtacaattcggcggtgcgtgatggtgccaagcgcgggaacgccgtggccacctatctcccgctggtgcccactgagcggctcgcccgcgtgttcaggtaccccgtggctgacgttgctgcagcaccagagatgcagcccattccttcccagtagaagatgaaatggaatgtgaactgcataaaccaatatcaagaagtattactgtgttttgtctttgcgtaccttatggtgaactcatgcgtggttcagtatcgtttcattcctttttgttgcagtgagcctacacaagttcgtctttgttttatggataatatgtataacattatctattggaatagcaatgttgatgcttgtgctttgtcagccccatcaaaaaaaatataagagaaaaaaaaaaaaaaaaaaaaaaaaaaaaaaaaaaaaaaaaaaaaaaaaaaaaaaaaaacaaggaaaaaaaaaaaaagggggcgcccgttttaaaggtcccaaatattaacccccgggcatgcaacgaaaaagtttttttattgggccccccaaattgaatctatgggggagttgttacaccgcggaaccgggaaaacccctggggtaccccacttaaattgccttgcaaaaaacccccttttcgccaggtgggttaatagcaaaaagg

SEQ ID NO: 265083 - DNA, 473 bp, Zea mays
aacgaattgaattggccgcgagtttcctacctataaaacgacccggatcccccacccccacatttcctcatcgtcacaacgcgtcctcgaataaaaatccagacgaaacccaaaatccccaccgaacgcaacctaaaatctccccatccctcctcgatccagccccgcggagaagagccatggccgattccgcaaccaacgacgcccccctggtcgccagcaaccagcccacggaggaggaggtgacggtggagagggccgcggcgacggaggagcaggaggaggagaggctgcggtacctcgagttcgtgcagcaggcggcggcgcaggcgctggtgctggcggccgcggcgtacgcgtacgccaagcagggcgccggcccgctccgcccggggtcgatcaggtcgagggcaccgtgaagggccgtcgtcggccccgtctacgaccgtttcacgccgtcccgctcgaccttc

SEQ ID NO: 265084 - DNA, 1690 bp, Zea mays
cggacgcgtgggctgcactgacaacaattgaggtgattgtggaaaagctgggtgaatttgttaatccatatttgaaagaaatacttgatctggtagtactgcatcctgaatgcagcactcaaatgcatgccaaattagatgcaaaagcagcacgtgttcgagagctattgactgtaaaagttccagtccggcttatcctctcacctttactgaatctgtactctcttactgcaaattgtggagatgcaagtcttacgttggcattcagcatgcttgctagtctagttggtacaatggaccggctggctgtaggaacttaccattcaaaaatatatgaacattgtttagcagctcttgatctccgtcgtcaacaccctgactctttgaagaatataaatatggtggaacaaagtattattcatgccataatctctcttaccatgaaacttacggagggcacttttaggccactttttcttcgtactttggaatgggctgaggctgaagttgatgaatcctcatcaaagaaaagtttggaccgtgcaattgttttctacaaattggttaacaaacttgctgaaaaacacaggtccttgttcacaccttacttcaaatatctactcgagggatctatacaatatctctctgaagacgatgctttgggtggttcgaagcataagaagaagaagaccaaacttgtagatgttcaagttgaacagaaggataaattattggggttaaaattgtggaatttaagagctctagttttgaaatccttacaccaatgtttcctctatgataatgaccagaagatccttgattcctctaatttccaggttcttttgaaacctattgtctcccagttcgttgtggaaccaccaaaatctgttgaatcagttcttgacgctccatcaattgaagaagtagatgaaactataattctgtgcttgggccaaatggcagtaactgcacggacagatgttctttggaagcctcttaaccatgaggtgctgatgcagactaggagtgatgaagttcgccccaaaatgctgggcctgaaggttatcaggtacatggtccaacatctgaaggaggagtatgtcgttctcgtaccagagaccataccgttcctaggcgaattgctcgaggatgtggagcttcctgtcaagaccctgtcgcaggagatcttgaaagagatggaaaccctcagtggcgaaagcctccagcagtacctatgaggcatcatctcctcgcggtagtaccgtttggctgatgaactgtagaacatctactcatttcctgtggattaccagttcaacagatcggcatacttgtcggatgtctggaaactgaaattacatgctgtccaattcatggaaggcaagtgcaattaacttaaccttcaaggaggcaaatgcagtttaaggaaaacttacacgttgaaagcacccatattatgttttcggatgagttcctatgtagctacgttgaaagagtacttttctacacaattgattgaggtgttctcgatttgatctctttttgagcttttggtgtcgttgggattttgcgctaaatattggaaattagaccaaggggctgtttgttcgttgtgaaggaattataatttacttaatatagtaggttatttggtttggaaacaaaaaaaaaaaaaaaagggcggccaaca

SEQ ID NO: 265085 - DNA, 524 bp, Zea mays
  unsure (1)..(524): unsure at all n locations
cggacgcgtgggcggacgcgtgggcggacgcgtgggcggacgtccgatcgtgaacccgccgccgacgcagcagcaggagacgcgccaaggagagcccgcaaggaggcgactatgagggccaagtggaagaagaagcgcatgaggaggctgaagaggaagcgccgaaagatgaggcagagatccaagtaggctgatggggattgtggatggtggtgtcggcatagttgtgttacgtttcttcgatgcgtgagttcatggagagatgtcacatcctagttcgtcgtcaccgtttgccatgggtccaatggctcgtcttggaaacctgcacttcagtaggccatctatcgtggtttctagctatatccagagttttgtgctaagacaaatcagtcagtcgttttgtgaacctattatgatggagctttatttgctgctaatatcgacctacctgttaagtaattgcaacggtcgtctaaaaaatgcttgtttgtgatataaaactttcnnnnnaaaggggcggccgc

SEQ ID NO: 265086 - DNA, 468 bp, Zea mays
gactctttgaagaatataaatatggtggaacaaagtattattcatgccataatctctcttaccatgaaacttacggagggcacttttaggccactttttcttcgtactttggaatgggctgaggctgaagaggaagcgccgaaagatgaggcagagatccaagtaggctgatggggattgtggatggtggtgtcggcatagttgtgttacgtttcattcgatgcgtgagttcatggagagatgtcacatcctagttcgtcgtcaccgtttgccatgggtccaatggctcgtcttggaaacctgcacttcagtaggccatctatcgtggtttctagctatatccagagttttgtgctcccacaaatcagtcagtagttctgtccacatattatgatggagctttataaaaaaaaaatatcgacctacctattaagtaaaaaaaaaaaaaaaagggcggccgccccggga

SEQ ID NO: 265087 - DNA, 503 bp, Zea mays
gtacatgtgttgtgttgtgctgtgctgcgagaagaaggagaagaggaggaagaagagcaggtgctgagaagcctgccggcgcgcgttacgacaagcatatatgggggagatcaccaatgtcatggagtaccaggccatcgcgaagcagaagcttccgaagatggcctacgactactacgcgtccggcgccgaggacgagtggacgctgcaggagaacagggaggccttctccaggatcttgttccgtccgcgcatactgatcgacgtgtccaagatcgacatgaccaccaccgtgctggggttcaagatctccatgcccatcatggtcgcccccactgctatgcagaagatggctcacccagatggggagaacgccactgcgcgcgcggcggctgcggcaggcaccataatgacactgtcgtcctgggcaacttcaagcgtcgaggaggttgcctcgactgggccaaggatccgctttttccagctatacgtctacaaggaca

SEQ ID NO: 265088 - DNA, 380 bp, Zea mays
cccacgcgtccgtatctagatcgagagctgccttgtctgcacatgcagaaccgccaagagcgagcgcctcatgtctttatattgctctcacaccctccgtttctcgctcccacccactgccactgtacttgtgttgtgttgtgttgtgtgctgcaagaagaagaggaggaggaatagcatgtgctgagaagcctgccagcgcgctttacgacaagcatatatgggggagatcaccaagcctttgcgaagcagaagcttccgaagatggcctacgactactacgcgtccggcgccgacgatgagtggacgctgcaggagaacatggaggccttctccaggatcttgagcagcggttgatgagataagattgccaagaaacg

SEQ ID NO: 265089 - DNA, 521 bp, Zea mays
agatgctgaccactatgggaggcttggagtcaccaggctagcttctactgatgaggtaaaagctgcgtacgagaagatgtgtgaagaactaaatagcacagaactagaagaagaggagcttaacaaggaacatgagctcctaaaggaatcatttactatactatcaacggaggaagaacgaagattatatgattggagcttgtcaagaagtggacagcctgagcgatatgtctggccatttgaagttgatccattggagttggcaccagatcctccaaaggaaccagaagatgagttcccaaccaagctcgttggctacttcttactggcgtggttcatactctctgttggcctctcggtggccctcaacaaatgaagattttctccccaaaagaacatgaattgtaatccaataatctctctgccatgtacatcaatgacgctgttgtgtgcacagaagcatatggatgtacatgccatgctcttggcaattagccgaaacatataactacacgttctgc

SEQ ID NO: 265090 - DNA, 484 bp, Zea mays
gtcatgaacgccatcttcagcttcggcaacagctgggcctttgtccacatcgcggcgtacgggcgagggttcgtgcaggcgtctcggagcacgtggagccagttcgaggcgctgccggggatggcggcgctggtggactcggacatcaccagctccgtgtgcttcctgacgggcgtgacgagcggcgcgctgtgcgtggcgctggcggggtcctgggcgttcgcgacgcaccggcactacacggccaccgtgtcgctgctggccttctacgtcgggtacctgatgacccgcatcggcatggcgctgccccaggcgtgcgtcggctgctactacgtctgctacgccgagaaccccacgtcgcggctcttcgacggtaacataccgaaccagctgagcaagatgcaggaaagccgcggcccgtccgtgccgacgccgcggttcgcgcaccgccagcacgtcggcgcgtgagtgagacgacggagct

SEQ ID NO: 265091 - DNA, 501 bp, Zea mays
ttgatacgaagtatctcaggttgcgtggtgcgacaaaccgacaagccaacaatggcgtcgtcagctgctacgaccgcgaagccgatcgcgctcccgccggcgccaacccgcggcggctgctgctgctggaggacacgcaggcccgcgatccccgcggcggcggcgcgcctcaaggtctccgcctccgccgcctcgtcggacgtgccggacttcctctcgtccaattggcttgaaacccgcaagagaaagcccttcggtcccaggttgaattttagtgcagaagaagcagtcgaataccagcttgagtccttaaagtacaatgatctgccccgcccagattatgggatagaggtcatgtaccggtttgcaggctttgaccccttcgagaggtcaacttactttggacgacagtttgatctaggacagttcgagcgctttcggcgtctgtttcaccactcaacctacagagtgctgctgtgcccagagagagaaaatattgag

SEQ ID NO: 265092 - DNA, 547 bp, Zea mays
atctgcatatgtaaacacgtcttgaatttctactatctgatcaattatatactttgcctagtttaaattgacactatccttgcaccatttgttatacttctaatagtaatgaattttaatattttgaattttatgttgacatttagtaatatttttgaattttatgttgacatttagtaatatttttgaattttatgttgacttaatagaaaagatccttctttgtacggtataactgtcagtatatctataacattttctgttgggatctgcatgaggtcggctggtacgcacactgacaagaagaaatagagagcatttcaagttcatggagctggctgccagagattatgttccagtgtctgattttccatacatgtagaacctaatagacatgtcaaagtattatgtatcgaaccagctcatgggattttgctccttccaatgcatccagggtttatgtatcgaaccaatttatgggatcttgctcttattctaatgcatccatggtttgtgaatcaaaaaaaaaaaaaaaaaaactcgaggg

SEQ ID NO: 265093 - DNA, 620 bp, Zea mays
cggccacgcgttcgcccacgcgtccgcccacgcgtccgccgtcggttcacttctccaggtaaggaaagggttcgtactcatggcgccgccgcagccaaagtcgggcctcttcgttggcatcaacaagggtcatgtcgtcaccaagcgcgagctgcctccccgcccgtgccaccgcaaggggaaatcaacgaagagggtgtctatggtcaggggcctgatcagagaggttgctgggtttgctccttatgagaagcgtatcactgagcttctgaaggttggcaaggacaagcgtgccctgaagcttgctaagagaaagcttggaactcacaagagggcaaagaagaagagagaggagatggcgggcgtcctcaggaagatgaggtcggctggtacgcacactgacaagaagaaatagagagcatttcaagttcatggagcctgccagagattatgttccagtgtctgattttccatacatgtagaacctaatagacatgtcaaagtattatgtatcgaaccagctcatgggattttgctccttccaatgcatccagggtttatgtatcgaaccagtttatgggatcttgctcctattccaatgcatccatggtttgtgaatc

SEQ ID NO: 265094 - DNA, 572 bp, Zea mays
taggtgatgcgtcgctgcagcgctgccggtcccgaattgccgtttcgtcccaggcgtacgcatccgcaagggtcatgtcttaaccaagcgcgatgctgcctccccgtccgtgccaccggatggggaaatcaacgaagagggtgtccatggtcaggggccttatcagagaggttgctggctttgctccttatgagaagcgtatcaccgagcttctgaaggttggcaaggacaagcgcgctctgaagcttgccaagagaaagcttggaactcacaagagggcaaagaagaagagagaggagatgatgggcgtcctcaggaagatgagatcggctggtacgcacactgacaagaagaaataaagcatttcaagttcatgaatgtggcagccagagattatcaactgtgttttttccctacctctagaaactagacatggcaaagtatttttgaccgaaacattgtttgttagtaatgtattgaaccacctcgtggtattttgccccaacttccaatgcatcaatggtttgttaaaaaaaaaaaaaaaaaaaaaaaaaaaaaaaaagggcggccgc

SEQ ID NO: 265095 - DNA, 317 bp, Zea mays
cccacgcgtccgagccggctcacaggcaagtccccattcccgcgccgccgtcgccgtcgctgatctgaaacccagcatatctcctgcttatcctcggttgtttgtccccgcgcacaggaaagtgttcgtcctcatggcgccgccgcagccgaagtcgggcctcttcgtgggcatcaacaagggccatgtcgtcaccaagcgcgactgcctctgcgcccgtcccaccgcaaggggaaagcaacgaagagggtgtccatggtcaggggcctgatcagagaggttgctggctttgctccttatgagaagcgtatcaccga

SEQ ID NO: 265096 - DNA, 2017 bp, Zea mays
  unsure (1)..(2017): unsure at all n locations
ntccgcgacgcgtgggcggacgcgtgggcgagtgctcacactcgagcacgtcgagctcaaaggtgaggccgttagccaggaatcccggcaacaatgacttccctctcctccgcggtggcactgccgtcctcgtgccgggcccggccggcggggggcagccggagggcgcggatggtggtgacgcgcgcggcggcgtcgagcccgaagctgccgaacgggcggcggctgcgggtggctgtggtgggaggcggccccgccggtggcgccgcggcggaggcgctggccaagggcggcgtggagacggtgctaatcgagcggaagatggacaactgcaagccctgcggcggcgccatcccgctgtgcatggtgtcggagttcgacctgccgctcgaccttgtggaccgcaaggtgaggaagatgaagatgatttcgccgtccaacgtcgccgtcgacatcggccgcacgctcgcgccccacgagtacatcgggatggtcaggcgcgaggtgctcgacgcctacctccgctcacgggcacagtccgtcggcgcggaggtcgtcaacggcctcttcctaaggtacgaggcgcccaaagagccgaacggctcgtacgtggtgcactacaaccactacgacggcagcaacggcaaggtcggcggcgagaagcggtcgttcgaggtggacgcgatcgtgggcgcggacggcgccaactctcgcgtggccaaggacatgggcgcgggcgactacgagtacgccatcgcgttccaggagcgcgtcaagatccccgacgacaagatggtgtactacgaggagcgcgcggagatgtacgtcggcgacgacgtctctcccgacttctacggctgggtgttccccaagtgcgaccacgtcgccgtcggcaccggcaccgtcacgcacaaggccgacatcaagaagtttcaggccgccacgcgcctccgcgccaaggacaagattgagggcggcaagatcatccgcgtcgaggcgcaccccatccccgagcaccccaggcctaagagggtgtccgggcgggtgacgctggtgggcgatgccgcggggtacgtgaccaagtgctctggcgagggcatctacttcgcggcgaagagcgggcggatgtgcgccgaggccatcgtggcgggctccgccaacgggacgcggatggtggaggagagcgacctgcgcaagtacctggccgagttcgaccgcctctactggcccacttacaaggtgctggacatcctgcagaaggtgttctaccgctccaacgcggcgcgcgaggccttcgtggagatgtgcgccgacgactacgtgcagaagatgaccttcgacagctacctctacaagcgcgtcgtgccgggcaacccgctcgacgacatcaagctcgccgtcaacaccatcggcagcctcgtcagggccaccgcactgcgccgggagatggagaaggtcaccttgtgagccgccgcccgcgacgtcattgccgtcgaaatggtgtcgcagctgatcggccggtgtattagtagagatttgcggctgatcgggttaatttaggccaacatgcgtgggcagtgggcgcggagaggaagagaaacaagttgtgcaagtgcagcaagtagatcaaaagtgctgcctgtttgtatcgatggatcctgcaacatatagcatctggtgatgttgagaattcggagcagttcatcgactggattctgacgccggcaagcatcgacgtcaatgaatgtctaatacttagtacatcaagacatgtaataaaactgaaactcccccgttctggttctgattactgtaaccctaatccatgtatcttcagtttctgaacttctggcgagaaagtctttatttaaatactactatttttttaaaaaattttcttcctctctaaaagatccattcttacatactcgttcttgctacttcatatcttttctttagtgtcaccctaaatttaattcacttgccttcttttacaacctcttacttttaaaaccct

SEQ ID NO: 265097 - DNA, 566 bp, Zea mays
cccacgcgtccggaaaaagacaaggaaaagggaaaggagaaggagaaggaaggcagccagctgcacaaggaaaaagataaggagaagaaagacaaggagaaggaaaaggaaaaagataaagagaaggaggatcataaagataagaaagacaaggatcacaaagagaagaaagaaaagaataaagagaaggaaggcagccagctacacaaggagctcaaggcgggtgtcgccgacatggtgcacacgctcagctcttcggcaccgtcatccgggggcggccacgagcgtgctggctctgcggcggcgggaacaacaatcatcacgctggccggcgagaacaagggcacgtccatgaaggtagacagcagcgccgtagcctacggcacggcggacgcggcgggcagcaaggagcgccgcggccacaagctcgacggcagcgtcatcgtgagcgggaaggagcaagctggggccggcaaagggctgacagctttcgtcaacagcaacgtgcaggtcatcaacaactcgctgctgctgcagagctcctgccacggcggcgacctgggggt

SEQ ID NO: 265098 - DNA, 737 bp, Zea mays
  unsure (1)..(737): unsure at all n locations
cgcacgcgtccgcccacgcgtccgattgccagcaacccatccatactttcagctgttgatacaaaaagagaagagagaatggcggagccaaacccagagttgagtgatcttattactcaaacaaagaagaaaaatatagtgccaaagttcaccgaaaccttccccgtggaggacacggcctacccttacagcgccttcatcacctccgtccggaaagacgtgatcaaatactgcaccaaccatacaggcatcgtccagcccgtgctgccgctggagaagaatgtccccgagctctggttctacaccgagctcaaaacgaagaccaggtccatcacgctcgccatacgtatggacaacctctacctggtcggcttcaggacccccggcggggtgtggtgggagttcggcaaggacggcgacacccacctcctcgacgacaacgccaagtggctcggctttggcggccggtaccaggacctcatcggcagtaagggcctggagaccgtcaccatgggccgtgccgaaatgaccacggccgtcaactacctggcgaagaagacgacgacgacactagcagaggcggcggaggaggaggaggagctgctgctgctgcaggcagcggctgaccccaaagccgaggagaagagcaacctggcgaagctagtgatcatggtatgcgaggggctgcggttcttcaccgtgtcncgcaaggtanacgangggttcaagaagccgca

SEQ ID NO: 265099 - DNA, 633 bp, Zea mays
gtcgacccacgcgtgcgcgggcgcgtggaggagctcggacaaggcagagcgccatcgttcggtttccttgctgaattcccgatcgctcgctcgctcgaaaagaaagaagctagcttttagcatggcgtctctggcgttcggcagcaccgtagcggcggccgtggcggcgacctcggggaggacgcggccggcgcgccggtccgtgctggtcgtgccgcccgctgccagcaggggcggcccggcgccggccaaggaggagaagggcctcggcgagaccatcttcggcttcatcttcaagaaggaccagctggtggagacggacccgctcctcaacaaggtcggcgccgcgccggccgccgcctcccgcgccaagacgaccgccggcaagaaggctgccggcggcgacgacagcggcagcggcggggggttcaacctcggcggcctcggcgggctcttcgccaagaaaagcagctgaacgtgccaagtgtggcgtggtttatggattgtcgaactcaaagctggatttggcttttgagggggaaatggttgcgcatatatatttgtggacgtgtggtggtgtgaccagtgatctttgatgtcataatgtgatatactctacttccagctgcaaaa

SEQ ID NO: 265100 - DNA, 633 bp, Zea mays
atccaacgaaacgttccgttccttccgtccatccatccgccatggcgaccgctacgctactgagctcctccttcgccatgcccgccgccgcccgtagggcctcctccccttcctccgcctcattgagcttcgccacgtcgcagctcgccggcctctccctctccgccggcgttgcaactccaaccgccgtcgccctcctccccaagaggcagcagctccagcccactgtcgcgcggcgtgtgtgcccgttcacggacaagaagacgaaccgggcgaacaaggtgtcgttttccaaccacaagacgaagaagcagcagttcgtgaacctgcagtacaagaagctgtggtgggaggccggcaagcgcttcgtcaagctgcgcctttccaccaaggccctcaagaccatcgagaagcacggcctcgacgccgtcgcgcgcaaggccggcatcgacctcaacaagaagtgagcaagaagtgagcccatccgatgagcagccaaactagtgtggggtggcactagcttagcattcacgttcgcagggtcgtctcgtctgtctgtctgcctgcctgcctcctgctgttctttcgcaatcaaaccatatcattatatttcctcccaagacagaaagagaa

SEQ ID NO: 265101 - DNA, 410 bp, Zea mays
cccacgcgtccgcccacgcgtccgcggactcgtggggaggccgggccgggcgccggcggggggcggttggaggacccctaccggacgctgcgtctgcgccggggggccacccgcggcgaggtcaagaaggccttccgccgcctcccgctcatgtaccatccggacgttcgcaaggagagggagagggagatggaatgcgacggcgacagcggcgtccagttccagaggattaacgtggcgtatcagaggctgatgagcagcatgagggaggccgacgagcggctggagtactggcgcctcaagtacggcctcgccggacgaggatctggacaggtacaggcgccgcctcaacgaggaagacgccgacgactggttcgacatgtgaagaggaagcgaatgaactgaaagca

SEQ ID NO: 265102 - DNA, 881 bp, Zea mays
cccacgcgtccgcacacgcgtccgcggaccgtggccaccaccggataggatgaagccgccggtgagcagggccgccttcgcgtccgtgctgatagggacgcgcacgctcggggcgcctcgcgtgcccgcccgctgcgcctcctcctctgccgccgctgccgtcactgcctatgatcatgcatggtttgtcaaggaaatcgccgcaaccgatcctccagagcatctcaactctctcctcaatgtgcttcaagcacgaggtgaaaagattgtttctcctggagcaaaaagagggttgattccatgtgttgttcccttatcagaaagcccagcaggtgatttgacatctctccttagatggccaaccgctccaactgggatggaaatgcctgttgtggaagttcgtaaacatgggctgtggtttttggctaagaatgtgaaacagtatatccacagaatacttgttgaggctgacttaactggtgatgatttatgggctgctgtgggcgaagctggtaaaaacctttacgctaaaggagaattcaaagagtcgcaggtggcagaccttgatgtctatttgttgaagaaggttggacttttccctgatgttatagagaggaaaacattgcgccatctcgaaaaaggagataatgtctcagctctcatcactggagaattctataccagagataaatttccaggatttggaagaccctttgtgttcaatgcagagatttttaaaagagttggacgtacatctgaagccaaagattcagctcgagtggctctgaaatcaccatgcgtccacacttggctgcagttacgaagaggctgctgaactagctgggtgggaggatgagcagctagagtttataagagagaag

SEQ ID NO: 265103 - DNA, 403 bp, Zea mays
cacgcacacgctcaccctcatcacaacatggtggaatgcccccgcctcccatgtctatgccgccaccgcctccaccaccatctggttaaacacacgcaaaggaaagtaccgtgtggtcaatgtgcaagctgtaactgtagaccaaggatgctggttcctttcatatatctccctgtaacttgtccacgctaggtgaagatgaaattttggagttcacctgacagatacaaacgcgagattaacatgtatttttcttctgttgaaaatcaacgcatttttgtggttgcgtacccattttttgtgttccctaatgccccgatacgttttcaccgatccctatgcccatgttctggtgcccctgaactattgaaggtggatatttcaaacaaaaccatttgggtcc

SEQ ID NO: 265104 - DNA, 552 bp, Zea mays
tgttcgcgacgagctcgcctccaccgggccacttgctacgcagcttgctgaaattgctaatcaggggaaattagtttctgatgaaattatcatcaatcttttgtccaaaaggcttaagaaaggagaagaccagggagaatcaggatttattcttgatggttttccccgtacagtaaaacaagcggaaattcttgatggtgttacagacattgatatggtggttaatctgaaactaagagaagatgttatagtagagaagtgccttggcagaaggatttgcggccaatgtggaaagaacttcaatttggcctgcattgatgttaagggtgaaaatggactcccaccaatctacatggcaccactgttgcccccaaacaactgcatgtcgaagcttattacccgagctgatgataccgaagaggtggtcagaaatcggcttcagatatataatgacatgagtcaacctgtggaaggtttctaccgagagcaggggaagctcttggaatttgacttgcctggtgggatccctgatctttgcccaagctgctcagg

SEQ ID NO: 265105 - DNA, 655 bp, Zea mays
cttttgtccaaaaggcttaagaaaggagaagaccagggagaatcaggatttattcgtgatggttttccccgtacagtaaaacaagcggaatattaacttaatttgcgggaaattcttgatggcgttacagacattgatatggtggttaatctgaaactaagagaagatgttatagtagagaagtgccttggcagaaggatttgcggccaatgtggaaagaacttcaatttggcctgcattgatgttaagggtgaaaatggactcccaccaatctacatggcaccactgttgcccccaaacaactgcatgtcgaagcttattacccgagctgatgataccgaagaggtggtcagaaatcggcttcagatatataatgacatgggttggctctatgtgcaattcatacttaccattgataataaaatgtatgacatattctcattaatgtttgaactgtatgacatactgagtatgccatgttgatgactggtcattttgattctgcaaggttttcatgcaacttaagcgcctgtgtcatttgcattatttgtgtagacagaaatgttgggctgttaaagatgttgaaacctactcactcgtctaaattacaaggacgttttggcttttctagatacattggttttattctggatct

SEQ ID NO: 265106 - DNA, 455 bp, Zea mays
cccacgcgtacgaaactgaagatgacgtccctatcactaggttaaagaggctaacgagagggcctgcaaagactaacagaaggtgacagaaagtgaaaatacacgccggtgcaatgcttcatttggactggacggattttggacttaacgagactgatgcatgaatcatgatggcatgagaccttcgtttagcacactgccagctataattctctagcttttgtgtagtacaatttggaaacatgcgttgctgttggattaggcgtctgtttgtaaataggtgtccctcgcattcaaatgttgcagcttaggccctgtgatccattagctactaatagttagctagctgatacactaaagggcgttagaacgtactagagctaatagttagttgactaagtgaaactagctagctaacaaatatttatctaactattagctaatttgctaaaaat

SEQ ID NO: 265107 - DNA, 1732 bp, Zea mays
tcttctcgtgctgtcacccctttcttcaatcgcctcccgattcccgcggggctcgcagatcccggaaggacaccccgccgcccccgatgagccgccaccgggtcgagacctgcgactcgtggcggcccccgcggaagaaccacgccggtgcgccgccgctcctccgcgcggggcctcggctcctcgccttcgcctcgctctccgtccgcgacggcggggactccgccgcggccgtcgccaaggcggttgaggaggcggttgtcgtacgatccgatgaggtgaaggaggcggtggccggggaggagaggaagaagacgaagtcgacggagcgcaggctgccccccgcggcgcagctggtgagccatccgctcgcgctgctggcgctagtacccaacagcgccgcgatctttgccgcgggggccgccgcgggcactgtagccaagaccgtcaccgcgcccctcgaccgcgtcaagatcctcatgcagacgcatagcgtgcgggtggcgggagagagtgccaagaagggtgttggatttctcgaggctatggcagacattggaaagaaggatgggcttaagggttactggaaaggaaaccttccacaggtcattcgcataattccttacagtgcagtgcaactcttctcgtatgaagtttacaagaaaattttccggagaaaggatggagagctttctgtatttgggagacttgccgctggtgcttgcgcgggcatgacatctacacttgtaacttacccactggatgttctccggctcaggctagcagttcaatctggacacagcactttatctcaggtaaccagtcttgtaagtgcaaatttctgtactttttttttctggaaactggcgtagcctgatgactttgtaggttgctcttaacatgctgagagaagaagggctggcctccttctatggaggcttgggtccatctcttgtagcaattgcaccttacattgctgtgaacttctgtgtttttgacctgatgaagaaatctgtaccagagaagtacaagaatagaccagaaacatctctggcaaccgctcttctttcagcaacatttgcaactttgatgtgttatccgctggacactgttaggagacagatgcagatgaaaggcacaccatacaatactgtttttgatgctattccaggcattgtggagcgtgacggtctaactggtctttatagaggttttgtgccaaatgcgttaaaaaatctaccaaatagcagcattaaactgaccgtgtttgacacggtgaagacactgatagctactgggcagaaggagatggacaaattaattcaagaaaatgaggagaaaagaagctaggaaaagagccttggtcaatcttgaaggctttggtagaaagcatgcctcgttgcacactccatatcgctatgtttcctcgtttgctggtgacatattttaggatctaggcagcgcatctttctgttccttttcaaatagatctagtttccagtgctttccgtagcatccacattcatagagatagaggttcgcattgagttgatctctttatctagtgtcggtagcattcccctacagatcttacctattctaatagaggatagtgtatcaatgtgaccgccccagattccttaaatgtaattatacataatagccagaacaatcaaatgtcatggagcacaggagcatgttctccttgtcaatgaattagcatctttgattt

SEQ ID NO: 265108 - DNA, 781 bp, Zea mays
  unsure (1)..(781): unsure at all n locations
ccccggccattcactcacccacctagctagtcatcactactcacgttcgtccaccagagacaacaatggccatggagacgtgcttcagagcgtgggcgctgcacgcccccgctggcagcaaggacaggctcctcgtcggcaacctgcaggtgctgccgtcgaagcgggcgctcgcgccgctgtccgtcggccgcgtcgccacgcgccggccgcggcacgtctgccagtccaagaacgcagtggacgaagttgtggtggcggacgagaagaactgggacgggttggtgatggcgtgcgagacgccggtgctggtggagttctgggcgccgtggtgcgggccgtgccggatgatcgcgccggtgatcgacgagctggccaaggactacgccggcaagatcacgtgctgcaaggtgaacacggacgacagccccaacgtggcgtccacctacggcatccgcagcatccccaccgtgctcatcttcaagggcggcgagaagaaggagagcgtcatcggcgccgtcccaaagtccacgctcaccaccctcatcgacaagtacatcggtagctcatgagcatgccatgcatgcatgcatcgacgactaaacacatatgtgtatctctagtagcctttgcatacgggatatgatcaattcaagcagccagccgtctgctactgctgtgttatatataccatacctncatgtcgaattccgaggacctttaataggttcaagtcacgaattccaatcagtatatatatatcaatgcctctgggtggatt

SEQ ID NO: 265109 - DNA, 718 bp, Zea mays
  unsure (1)..(718): unsure at all n locations
accggtccggaattcccgnggcgaccgacgcgaaanctgactcatagcctctcctctggactcggcctctggcancaaggacaggctcctggtcngggaacctatgctgcggtggaagcgggcgctcgcgccgctgtccgtgggccgcgtcgccacgcgccggccgcggcacgtctgccagtccaagaacgcagtggacgaagttgtggtggccgacgagaagaactgggacgggttggtgatggcgtgcgagacgccggtgctggtggagttctgggcgccgtggtgccggccgtgccggatgatcgcgccggtgatcgacgagctggccaaggactacgcccgcaagatcacgtgctgcaaggtgaacacggacgacagccccaacgtggcatccacctacggcatccgcggcatccccaccgtgctcatcttcaagggcggcgagaagaaggagagcgtcatcggcgccgtccccaagtccacgctcaccaccctcatcgacaagtacatcggtagtagctcatgagcgcgcgagagaggcagcccatgtctcgtgatgtgcccccgagctgcatctgcatgcatgggatactgggatcgatgatacatgtgcccagctcgcgcataaacaccatgtatctctagccttgcccttgcatatatatggatggatatatgatatgaaaaaaaaaaaaaaaaaaaacccacgcgtccg

SEQ ID NO: 265110 - DNA, 457 bp, Zea mays
aaattcccaaccggcaaaggctaagcccggaagattaacttccgccaaggtgaccacggccaacaccccaaacttgggttcaacttacggaatccgcaccatcccaaccttgctcatcttcaaggccggcaaaaagaaggaaaccttcatcggcgccttcccaaattcaaggctcacaaccctcatcaacaattacatcggtagttcatgaccatgccatgccatgccatgcatacatgcatcgacgactaaccacatatgtgtatctctagtaccctttgcatacgggatatgatcaattcaagcagccagccgtctgctactgctgtgttatatataccatacctccatgtcgaatccagaggccattaattaggttcagttcaaaataaaaaaaaaaaagggcggccgctcgcgatctagcccacgcgtccgcccacgcgtccgccacggtccg

SEQ ID NO: 265111 - DNA, 211 bp, Zea mays
gccggccgttcgcgctcacctagtcaccacattcgttctcgccgtggacgcgcgcgcgtgaggtgagtgagaccaccacgccagacaagaattaatggccctggagacgtgcttcagagcgtgggcgctgcacgccgcccctgctggcagcaaggacaggctcctcgtctgcagcagcggcggtaacctggtgctgccttcgaagcgggtc

SEQ ID NO: 265112 - DNA, 685 bp, Zea mays
cggacgcgtgggcggacgcgtgggaacaaacctgcagatcccccatggcaggctccaccggccgtcgttccccttcccgtccccgcccctccgtgctcgccaccgcttccacacgtccacgtccgcatccccccgccacctgcgcccctcccctgctacacgcctccgcgctgcccggcgtcggcatcccgacgccgtcgttgtcgtcccagatgcccgcccctgggtcggcgatctatcgggcgccgccgcgtcctaccgggacggaagtgaggaggacgaagacgacgcagatgaagatgaggacgaagacgaggaccgcagcctggacctactggcccggttcctgcactccgtattcaggaaggcctcacgccgcgcgcgccgcgctgccaggtccgtgctgccgccttccgtccccgccgagctggtgaagctttcggtcaatggcgtgcttgtcctgacgttcttatggatcctgaagggtcttctcgaggtggtctgcacatttggaagcatggtgtttgcaagcatccttcttgttcgtggtatatggtctggggtgacatacatcagagaaaaccgttacagctatattcaccggatcgacaacgatgagaaccgatggagcagagtccagactggctgttaatattttgctttccttatctatgaacagacacac

SEQ ID NO: 265113 - DNA, 822 bp, Zea mays
cccacgcgtccggaacagccccgactgggctatattcgttctcccggcgtgctccgtctctcctctcagcgcgacgattacggtaacgccgtcgccgccctacggctcagatcttcgtcgtcatcttctccggcaacgagcacccaaagatggtggtccttcaaccagatcggttcctgagcgagctgacgagcatgtacgagcggagcacggagaagggctccgtctgggtcaccatgaagcgatcaactctcaagggcaaggcacagttgcggaagatggagaataaggggcaggaggtagagcacaggtgcctcgtccgcgcctccaatggcaagaagaacatctccacctcggtttctctaaaggagtacacaaagtttcaagcttcatacgcaacagttcttaaggcccatatgcatgctctgaagaaaagggagaggaaagacaagaagaagactgcagatgctgagaaggcaattgagaccgcacccaagaagcagaagaaagcatcttcaaagaaatcttcagggtccaagtcataaggcgctcacagaactcagtgtgtcttctcctttatgttgtttaccgccagactaattagagtgtcgtgaagttttacttatctggtttttattcgaattcgtgtctggaagatgaaagcctgtgaatacacctttatagagccgtgtcatcgatgctaacattttttgaagcagagttttgaggtgaatgtgaggcgctgtgctgccctgattggcattaacgaaaatgcacaagtttgaacttttattgcataaaggtaatggagtttgttaggga

SEQ ID NO: 265114 - DNA, 399 bp, Zea mays
gtaagccactccctgaagtccatgaccgggactgtgagtctgattttgaggagatgcatgatactgatgaggagctgaatgacctgtacaatacgagggagtatgttgtgaagaagatcaagagtgatgagttctttaacatggatgacacacagtggggatgccatgatcaaggaggccacagacaagggtcacttaactaacatgaacgagtgcgaggaaatcctcgaggacatgctctactgggacaagctacttcctgatgagatcaagcaaaaggtggagaccaaatgtaatgagttgggagacatgtgtgagacgtgagagatggaacctgagcaagcatatgagatgttcaaagaatgtgaggataagatggtcgctgagtgcactgaatta

SEQ ID NO: 265115 - DNA, 1133 bp, Zea mays
cttttgttttttttttgtttaactcccaatggatttccatttataacaggtgtgtagtgcaaagccgcataaataaaatctggaatagtaaaataaaattcaagtacacaagggttagaagacaattctagtgttacagacttgtttatcttcaaggcagcatgttacataaacatattatctcagtacagccaacggttgcgatgtcagcgcctttgttcggttatttacttcttgtcatctctgaggacaacgtagttgtggccgttcgtcttctgtatcttcgaaattttcttcagaatttcagcaaatgcattcttgtcctctgcacctcgaagcctagacttgaatctggataccagatcttgtgtggtgactggagccactgcaagaagaacactcctgatttcatcctctgtgacaggtgatacgcttgtcccactttttgatgcagcagaggtctttgatgcaggttttgccaaagatgatgcctcctctttgaggcctgatgctttcgcatccaattccacctttgctttctttgaagctgcaccactagaagtttttgcatcatcaacacctgattttctcttttgcttggatttggatgccggaggtgtgcctcgagcatgtcctgatggtgctggtttagatgggctgctatccacaggttcatctttaacttgatccttctgttttggagcaagcactggcgatgaatcatcttcttgatcttcgtcttcttcatcctcatccgcatctgactcatttagtccagcagcgcgcccaagcaacttttttagttccttgccagacttgctcaggcccccttcttcttcgttctcttcatcatcctgcttgatttcaggtggagcaggaatttcaggagctaaatctgcccgttcctctggatcaatgtctacagcctcatcatcgtcagtgaatgtttcttcatgctcccagtcatcacctttctcaatttcatcatccaaatcgaaatctagatcttttccaccttcctcatcatcatccatgccctttttagttagtccaagtctattcttgcgtgttgcttcctcttcttcatcctcctcacccttatcagaattattaccctcttcattattttttcc

SEQ ID NO: 265116 - DNA, 1164 bp, Zea mays
ttgagaatgagcattttacttatgatatcacgtctaagttgaagaccaagtttttgggaaattcagtggaaatttacccagttggaaggactcgagtgacacttaaaaaatctggtgtcgtgttggatttggtgccaccactaacaaaggttaacaacctgatatttgggcgtacttgggttgattctcctggagagatggtcatgacgaacctgacaaccggagacaaagctgtgctatatttccagccatgcggctggttcggggctggccggtatgaggtggatgggtatgtgtacagtgcagcggaagaacccaaaataatgattacagggaagtggaacaagtccctgagttgccaaccatgtgaccaagaaggcgatcctcttccaggcacggagctgaaggagatctggagagttgctcctgccccacagggcgacaagtatcagtacacacactttgcgcacaaaataaacagcttcaacacggcacctaagaagctgttggcatctgattcccggctgaggcccgatagatatgccctcgagaagggcgacatgtccaagtctggctcagaaaagagcaggctggaggagcagcagagagctgagaaacgaactcgagaggccaagggcgagcaatttactcctagatggttcaacgtgacagatgcggtcgcctccacgccgtggggtgacctggaaatttgtgagtacagcggcagatacacggagcaccgggctgccatagacagctccaacagcaccgacgacgacgacgagatagacgtcacttcggtcgagttcgacccatggcagtatggtggtagctcgtcatctccccaatgattctccgcgtccggaagctgccgtgcctgtgctccttgtgtaaaaaaaaaatgcttccaggcggcctggccttcgctggtttgttgtggcaccagcggtttccgtgcccttgtagtagtattatgacctgccccctctttctcttattaacgctacagatttattcaggaagtggtgtgttttgatagtagtccgcgtactgtcgtgtcgtggatctggcaaaagctgcaaagttttccttgagccaaaaaaaaaaaaaaaaaaaaaaaaaaaaaaaaaaaaaaaaagggcggccgctcgcgatacatagaac

SEQ ID NO: 265117 - DNA, 360 bp, Zea mays
gagcaccgggctgccatagaccgctccgatgtcaccgacgagacagatgtcacttcagtcaagttcagcccatggcaatatggtagctcatcttcccaatgattctccgtggccagaagccgccatgcctacgcgcattgtgtaaaacacttccaggcctggctttgctggtttgttgtgccatcagcggtttccttgcccttgtagtattgtggccttcccccttttttcccttaaatgctacagttattcaggaagtggtgtagtccgtgtactgtcgcaagtctagcagagattgcagagttttgttgaaaaaaaaaaaaaaaagaaaaagaacggccgctcgcgatctagaactag

SEQ ID NO: 265118 - DNA, 357 bp, Zea mays
tcagtcaagttcagcccatggcaatatggtagctcatcttcccaatgattctccgtggccagaagccgccatgcctacgcgcattgtgtaaaacacttccaggcctggctttgctggtttgttgtgccatcagcggtttccttgcccttgtagtattgtggccttcccccttttttcccttaaatgctacagttattcaggaagtggtgtagtccgtgtactgtcgcaagtctagcagagattgcagagttttgttgaaccgttgtgctgttgtatttatgcgagataactgatacccgaaggtaacgaccgcccccaaaaaaaaaaaaaaaaaaaaaaaaaaaaaaaaaaaagaaa

SEQ ID NO: 265119 - DNA, 1624 bp, Zea mays
gtgactgttgtgagctgctgaatccaggatgggcagatatttgcgccaccgtggctataaagcctcttttgaccaaacccttctccctctcacaaaaccctagctttccctcctcccctgttttgcggcgcgccacgaactcgcgacgctctcgagagatccatggatcggcgcaagggcggcaaccgcgacaccaacggcagcctggtcgaggccacggcgtcgcggctgagggtcgaatccgacgaggaggcggaagaggtggggatggaggtggaagagagcttcgacgcgggggtggaagacgagcaggcggcggcggaggtgattggaagcgaaaagaccagcgccgactactacttcgactcctactcccacttcggtattcatgaagaaatgctaaaagatgtcgttcggacaaaaacatatcaaaatgttatcacccagagtagctttcttatcaagaacaaagtagtccttgatgttggtgctggaactggaattctttctcttttctgtgcaaaagcaggagctaaacatgtctatgcgattgaatgttcccagatggcagacatggcacaggaaattgtaaaatcaaatggatattcagatgtcataactgtaataaaagggaaagtggaagaaatagaacttccagtcccaaaagtagatgtcatcatctcagagtggatgggctatttcctcctgttcgagaatatgttgaacactgtcctatatgcacgtgataaatggcttgctgatggtggtgtggtcctgccagacaggacttctttgcgtcttactgcgattgaagacgcagaatataaggaagacaaaattgaattttggaataatgtatatggatttgatatgagctgcataaagaaacaggcgatgatggagccactggtagatacagtggatgcaaatcagattgtcactaactgccagttactgaagacaatggatatctccaaaatgaccccaggtgacgcgtcctttactgtaccattcaagctggtagcagagcggaatgattacattcatgctcttgtcgcatactttgacgtgtcgttcaccaaatgccataagctgatgggcttctcaacaggcccgagatcgaaagccactcactggaagcaaactgttctctacctggaggatgttataactatctgtcagggggaaagcctgagtggttccatgacagtcacacccaataagagtaaccctcgagatatcgacattaagctcaagtactccataaatgggcataggtgtcaggtatcaagaacacagttctacaagatgcggtgacaatggaacaaacaagagttgcttcaaagctcattaaattttgtttaacgagtatcttgtttgacagaaattgtgctatttttattgttcatgtactatgcatcaaatattagattctttggaatctagcaaaagtagggagtagattaaactggtctgctgatatgagattgatgtagtgcaaaactgtcatattgccacaaggccgttggtggttgtatgcatttgaagtcggttgcaaattattgctttacgaaaacacaaaaaaaaaaaaaaaaaaaaaaaaaaaaaaaaaaaagggcggccg

SEQ ID NO: 265120 - DNA, 460 bp, Zea mays
  unsure (1)..(460): unsure at all n locations
cccacgcgtccgcggacgcgtgggcgccgtcgtcggaccaagctagcagcgtacgttctgggggcaaaccatcgccggcagcggcgcgtgctacagcgacccttgcattaaagactgcgctggaaggagtaggagagtctgctagctcgatcatcaccaagaagaaggcgaacggcgagccggccttgaagaagcccaggctcgagacgccgtctccgttgccaacgttcaaggttaggaaggagaagctaggggacaggatcactgcactccaacaactagtcgctccttttggaaagacggacacagcatcggtgctccatgagaccatcgagtacatcaagttgctccacgaccaagttggtgtccttagtgctgcatacttgaagaacaacggccatcatcaagtgctccgncacttgaagagctcaagtcctgacaagtcgtccaaagacgacca

SEQ ID NO: 265121 - DNA, 643 bp, Zea mays
cggacgcgtggggtgcagccgacaccgccggtgtactactccgcgcaggagctgcagccggagcagccggcgaagcagtggtcgccgtcgtacctgtacatgccgtacccgcacgcgcaggcggcgccggagccttactaccagcagcaggactactacagcccgcccgggacgcacgcgtcgccgatgcacgacccgtaccgcatcttcgacgacgagaaccccaactcctgcagcgtcatgtgagaggcgcgagctggtcggcgcggcccggacgccgccggccgccgtgggcagcgagtagtttcggggggaggcggcgccgcgcgctcccgcaacatcagagagagacgtctctgtggctgtataggtagagtagcctgttactggttaccacccctcttccttccatcctatttccacctagtatagaggtcaaacctcttctattctccgtgcagtgacggaaccttttcttcatttccatctttttactgttctgaatcaagtgattagaaagaacatgtaaattgtaacgagatacgttcatgttcaccgcgtctgtatatgccggctactagcaccccgaatgagctaccacagatacatacaaaaaaaaaaaaaaagggcggccggtcgcgat

SEQ ID NO: 265122 - DNA, 888 bp, Zea mays
tgcaaattatttttcttcgcatttccaccacacagcatttttttcccagtactatatacgaaaatgagtcattgataaattctgcagtttcatgtgtttgataggcactgttagcagctagaagttctggagctgtcatttttctaggcacatttggagctcttgcggtaatgaccattatatctgtagttcttggtcgagcattccactatgttgatggcatcattccgttcagctgtggtggtgctgatttcccagttgatgacattgctgcggcatgtctcttggtttattatggggttactacattacttgatgcagcctcaggtgatgatgaaaagatcaatgaggagcaagaggaggctgagttagcagtatcgaaattttctggaaatggtgcgggggtcatgtctgctgctggtactattgctagcacattcgtattggtttttgttgctgaatggggtgataaatcatttttctccacaattgcactagcagcagcttcatcccctctgggtgtcattgcgggatcactagctggtcatgccattgccccactgattgcagttcttggtggctctttgctgggaacattcctgtctgaaaagattatagcatacattggagggagcctattcttggcctttgctgcgattaccatagttgagatagtgacctgaaaagggagttccagcttccacaattcataaaaagtactgatcttttgtcagggcaatgaacaatcagcttgatcgtaatggtagtacattgatgtgttaccgaacatgattgtccacaggaacttcattgttcgtatgggacgtcctaggcttgcgtagagtgttttgtttctggtgatgagatttctgcttctttatccaagaa

SEQ ID NO: 265123 - DNA, 842 bp, Zea mays
cccacgcgtccgaaagaaaaaggcagcacaccaactcaccaagatagtgtggagctgctcctgcctgcagcctcctgctcatcgaccctttcgccccacaagctcgattcctcgctcggccatggctgcacccgcggaggagacgcttgccgccgaggatacggcgtcgccaccgccgccggcgaggtctgcggggttctggttccttggcgaggataagtctgtccacaaggctctcggcgggggtaaaactgctgatgtacttttgtggaaagacaagaagacctctgctgcggtagttggtggtgcaactgtcctatgggttctgttcgaaattgtagaataccatctcctgaccctggtttctcatgtgctgatcgctgcactgaccatcttgttcctgtggtccaatgcgactgtctttatcaaaaagagtcctcctgatgttcctgaagtgcagatatctgaagaccttgctgtaaacattgcgctagcatcgcgtgctgacatcaacaaggcacttgccctgcttcgggagattgctctcggccataacctgatgaacttcctaggcgtggtcgtccccctttggattctttcacagatcggggagctatctgatctcctgagattgatgcacattgtggccttgatcctccacacagtgccgatactgtaccacatgtatcaggaccacgtggacgatttcgccgcagaggcacacagggagctctgcgagcaatacgcggtcctggatgccaaagttctgagcaagatcccaagagcttcaccaaaagataagaaacagaacttgaacctggaggatgacaagcgccttggtt

SEQ ID NO: 265124 - DNA, 500 bp, Zea mays
  unsure (1)..(500): unsure at all n locations
cccacgcgtccgcccacgcgtccgcccacgcgtccgccacgactgcaagagaaaggaaaggctctcccagccccaaagaaaaaggcagcacaccaactcaccaagatagtgtggagctgctcctgcctgcagcctcctgctcatcgaccctttcgccccacaagctcgattcctcgctcggccatggctgcacccgcggaggagacgcttgccgccgaggatacggcgtcgccaccgccgccggcgaggtctgcggggttctggttccttggcgaggataagtctgtccacaaggctctcggcgggggtanaagaattctgcgttcctcaactgctgatgtacgtttgtggaaagacaagaagacctctgctgcggtagttggtggtgcaactgtcctatgggttctgttcgaaattgtagaataccatctcctgaccctggtttctcatgtgctgatcgctgcactgaccatcttgttcctgtggtccaatgcgactgt

SEQ ID NO: 265125 - DNA, 388 bp, Zea mays
cagcacaccaactcaccaagaaagtgtggagctgctcctgcctgcagcctcctgctcatcgaccctttcgccccacaagctcgattcctcgctcggccatggctgcacccgcggaggagacgcttgctgccgaggatacggcgtcgccaccgccgccggcgaggtctgcggggttctggttccttggcgaggataagtctgtccacaaggctctcggcgggggtaaaagtatgagccttttcctcatcttcttgtcttatattgtgattttcctccttttttttttgcaagttgattgcttcgtcgggcaggaattcattgtcactcaactgctgatgtacttttgtggaaagacaagaagacctctgctgcggtagttggtggtgca

SEQ ID NO: 265126 - DNA, 1632 bp, Zea mays
cccacgtgaccgcccacgcgtccgcccacgcgtccgcccacgcgtccgcccacgcgtccggttaacttgcaaatggaattgtgggatcctacattggctaaaggaattaagattttctgagcaacatcaactccactctttggacacgtagctactaattacaccgtgaactaccagaaggccgctagtttcattcagttgagctgcagtggcaatggtatttccttctcagaaatgtggaccttgcaattataacttcgttcagcatatgaagagtagctcttctgaaagtagttctcatgaagtggttgcctgtttcagttccatgtgactggtgtaagcatttcttgctgaatgttagttggctttatcttttagtgcttatttggaatttttatacttgtttttcaggatatggaatgcatgcaggcccttcgccaccacgcagagcagaagccagcaaatttgatgatgatgttagtccacgttacactcatggatatcaagggggtggtagaggaggggcaagggttcgagaggggcctccaccatttggaagaggtagatcatatgggagaggttatggtgctccacatggaaaggatttgattaatattgatggagaatatgttcaccgaaatgacccaaatctgtcgccaagagaaggtgattggatatgccagaaccctaattgtggaaatctcaattttgctcggcgaactcactgtaacaactgcaacaagttccgctattcagcacgtgaagcatatgaacctaggcgcagccctcccttcaggagttaccccagccctccacgagggcctccaaggatggttggtccacctggtgatcgagcccctgcaagagagatggccaggtacagatccccacctcatggttggggagcaagtgatcccagggcatatgcaggtcgatcccctccagaacgtgcaggacggtttacagatccatcaactaagggaagaatgggcttccgtggtgagcgtgacccaagggaccgtgtgaaatatgagtggtctgccactgatgactacgttcagagggagcgcccatatgatggttatcttgacaggagtcggcgtcgctcaggatctcctcgtggtaactggggaaatgatctgcgtgacagaagccgctctcctgcacggaacaggcctatgaagagttccttcaccggaagaggtcgacctgacgactatgctgctgatccatatggcagccgagggagacccaatggtatggaggccggccgtgggcgtgggcatgcttacagagcaggcagtggtccgtaccctggtgagactcgaggtgaccaacgcgctgctccacgcgctaggaacgaggatggctattagatcttcatgaagctgagtgacgtcattttgtctttgttggtcaggaaaggagaaccttagtcaagctggagcttgagaatatctgcagcttgtaatattaaagatcgtgcacacatcctgttcctgcatgttgtggagttatggttggcttctctcatgctcagtggtgggatctattaaagggacatgggtggacacatccacccaataatttctgcaaaaaaaattagtactcatcaagtagcaaataacgttc

SEQ ID NO: 265127 - DNA, 594 bp, Zea mays
gctgcgcgtgcccaccgtgccatggcgttcgcggacggcgcctccatgaagctgacgacgcgggacgtgcctatagacgtcgacgactccacgacgtgcctggcgtttgcgcccaccgacagcacggccatcatcggcaacacgcagcagcagacgttcagcgtcttctacgacgtcgcgcaatccaggatcggcttctcggcaggcggatgcagctgaatagctgatgggtgaaaagtgaaaactgattattgagctctatggagtgggcagctcaagcttggtaatagaaaatgcgtacaaaacacaagtaaattcgctgaagtttatgaaatggtaatgttacaagctattgtattgttgattttacactcctggcaaattgtacatccttttacaggtaaattggagtgtctagatttttacatgtgtacggtcaaaaacagaaatctgttttggatgatttggtctattatttatattgttacccttcaaaataaaaaaataagggcggtcgaccccagttcgatattcatttcttgcttgagtctggagttaataagttcatagcttttggatgtatactgtgattac

SEQ ID NO: 265128 - DNA, 831 bp, Zea mays
cggttcggaattcccgggtcgagccgcgcgtccggcctctactacgcgcttctccacgtcgggctcgccggctccccgcgcaaccccttcctgtcgcacgagatcggcggcgaggacggcgccggggatagcgacctagggttctccaagtgggccgagaagctccgtggcggcgcctcaggtgaaaaagatgctcagcataagagaaagctaactagcaaatggaagcccacgaccaaaggcacactgaaaagaacttacagagtacgatcaacggatgaaggaaggcgggtcctcaaggagatcgcttcagttctgtcccaagatgaccattttgtggatgcctcgtctcacaagggttgccaagttaggagggaaagtgctcatggcgaaagtgtttgctgctacaacgtgagagcgttgttcgatgagcttccaactcctcacctgcttctggagattacacctttccctgctggacaacttaccgacaacgactaccgaaaggcggagaggcttgagatggtgctgaggctcagcgcttctatttaaaaaactggggactggttttttcaatttcccctagtactttctttgcccaagttgtaaattgtcttcctgtgggcctgtaaattgacgcagttggctaagaactacttgcaaaacacaagttctggttgattatttgagcttaagaacctgatatgatatacacttgggcgtttccctgaactgtatcaaatgcttctcactgtttccttttccttgagtaaggaaaatagggatgggcatggattgatccagtgatctacttcgcttaagtaacagatt

SEQ ID NO: 265129 - DNA, 1042 bp, Zea mays
cctacgcttccgcccacgcgtccgcccacgcgtccgcccacgcgtccgcccacgcgtccggatggccgctgcgagaatggcgctcgtctcttgcgcccgccgcctcccgtccttaccctctccgctcaccctctcgaggccccgcgccggcgccgtctcatttctggctgcccaaccgtcgccggcgacggcaccgagatccggcaggaatcttgctctcttctgttctttatcaccgacgtcgccatcgctaactgaggccgccgtagcactgccgccaccgaaggctgcggtggaagagacgaagccccctgtgccgaccggggacgagaagggggaaccgaccgtggaggagctagcgggcctgctggacgtccgggtgggccgagtggtgaaggcgtggaggcacccggaggcggacaccctctacgttgaggaggtggacgtaggtgaggcggagccccggaccatctgcagcggcctcgtcaacttcctccccatcgaagagctccaggacagaaacgtcattgttcttgctaacctcaaaccaaggaacatgcgtggcatcaagtcaaatggcatgctcatggctgcctctgatgcttcccatgagaatgtggagctgctcatcccttcagaaggttcctttcctggtgaaagagtatggttcggttccgaagaagaaaagaaccgtcaatctgaccctgcatcaccaaatcaggtccaaaagaagaagatctgggaagctgttcagcctcatcttagaacaacagataactgcattgcggttcttggtgataaacaaatgcgtacctctgcaggcctagttttctgcaaatcgcttcagggtgcaagagtgtcataaatctttatggccaacatctttcttgtatcatggaatcgtgtgtcatgtatcttccctgcaaataataactaactatatgaggagagcagcagggaatgaatttcctttccaactactgagataatcactgtacttggaccattcacatgtacttctcacttttcaggcttaaaacac

SEQ ID NO: 265130 - DNA, 2074 bp, Zea mays
aggagtgggccaggcaaagtcggctcttgcgtcgacatcgacggggagaaacagctgtgggcaggcgatgaactgtagcgcgtgacagtgaggggatttggttggatccaatgtttggtcggtctgcttgcatcacctggttgcagctctgcattctctggctataaagcgacggggcccttgcgctgggcgcggagactggagagggcgagagtcctcccatccacaagttcttagcttttgcgagattgagatccggctggggacagaccgacagaggaaggtgaattgtgggaaagaggacagaaaaatggggattggagatggatcttcaaatgggaaccagcaaccggtgcataaggaaatacgagatgagaccacaccacttcttccagtcaaggtggaggaggacgaggggtttcatgagttcaatggagcttcattctctggggcagttttcaatctgtcgaccaccatagttggggctggaattatggctcttccagcaagtatcaagatgctgggcatcatcccggggattctgttgatcatccttgtggcactgctcacagaggcatccatcgacatgcttgtaaggtgcagccaccagggcaagattacatcatatgggtggctgatgggcgaggttttcgggcagtgggggagaattgcgctgcaggcctccgtcatcataaacaatgtcggcgtgctaattgtttacatgattatcattggtgatgtattatctggaacaacatcaggcgatgttcatcatcgtggtatattggagggctggtttggagctcatttgtggaattctcgtgccattgttcttcttgccacagctcttttggtgttcgctccgttggtgagctttaagcgcttggattcattaagatacacatctgcgctatcagttgccctggcagtagtttttgtcgtaattactgctgggattgccatcatcaaactcttcaatggaactgtagcgatgcccaaactttttccagaattagatggtcttaattctatctggaatctttttacagctgtccctgttcttgttacggcctatatctgccactataacgttcacagcattgacaatgaacttgaagacagaacacagatcaagccgattgtgcgaacatcgctgttcctgtgctccagtgtttacattgccacaagtttctttgcttatctcctcttcggtgaaggcacactggacgacgtgctcgccaactttgacgcaaatcttggcattccattcagttcagtcttcgacgacatagtgcgagtgagctatgcggcacatgtcatgcttgtctttcccattgtcttctttgccctccggctcaacttggatgggttgctcttccccacgtcaaggcacatctctcgtgacaacaagagattcgccatcatcaccgtctctctcctcgcagtaatttatcttgctgccattctcataccaagcatctgggacgcgttccagtttactggtgccacagctgctgtcctgattggttttatatttcctgccatggtcatacttagggattcttacggaatcgcgagcaagcgcgacaagattctggctgtaaccatgatcgtgcttgctgtcctgtcaaattctgtcgccctatacagtgacgcgatgaacatcttccgtaagaaggaagtggcctgatctcagatttcaaaagtagtcagtgctggatgaagaatggtctcgcaatgcaagactcgatggtacgaaggaaaacgatgcgcttggattccgtgaaggaacgatttctttgtcagcacctcagaatttggccacttgaaagaatctgatgcttgaagtttcctggttctgtgtacacaagtcggctcaatgtcagaattgagccgcttgaaatatatttagttatattctatgcggagagtaggtcttggaaacagccttttccacaataatgtacagttattatgccaatttctgagttcagttaaattttgtgaaatatggacatgggcgtcttgtctcaattaaaattgagaatggtatggttgctcataacgtcgctat

SEQ ID NO: 265131 - DNA, 1969 bp, Zea mays
aaaaaaaatgtagataataaactgcggattctttctttctcttccattcttacgtttccatattaaagtgtagtttttttacttaaatttaataatattaatctaatatgcccattggtgttccaaaagtaccttaccggattcccggagatgaagaagcgacttgggttgacttatacaatgttatgtatcgagaaaggacactttttttaggtcaagagattcgttgcgagatcacaaatcatattacaggtctgatggtatatctcagtatagaagatggaaatagcgatatttttttgtttataaactcccctggcgggtggctaatctcaggaatggcgatttttgatacgatgcaaacggtgacacctgatatatatacaatatgcctcggaatagccgcgtccatggcctccttcattctgcttggaggagaacccaccaagcgtatagcattccctcacgctaggattatgcttcaccaacctgctagtgcttattatcgggcaaggacaccagaatttttactagaagtggaagagttacacaaagttcgcgaaatgatcacaagggtttatgcactaagaacaggcaagcctttttgggttgtatccgaagacatggaaagggatgtttttatgtcagcagacgaagccaaagcttatggacttgtcgatattgtaggggatgaaatgattgacgagcactgcgatactgatccagtgtggtttccagaaatgtttaaggattggtagtgggtggatttcttgtaaatttatctcaaacctaaattcgggttttatgctatagaaaatagaaatacttcatgatgatgaatcatcaggttaagatcgatctaaaccaatccattttatatatacatacgacatgccaacggttaaacaacttattagaaatgcaagacagccaatacgaaatgctagaaaatcggccgcgcttaagggatgtcctcagcgtcgaggaacatgtgctagggtgtatactatcaaccccaaaaaacccaactctgccttacgtaaagttgccagagtacgattaacctctggatttgaaatcactgcttatatacctggtattggccataatttacaagaacattctgtagtattagtaagaggaggaagggttaaggatttacccggtgtgagatatcgcattattcgaggaaccctagatgctgtcgcagtaaagaatcgtcaacaagggcgttctaaatatggggccaaaaagccaaaaaaataagtgattcgtttttagcccttataaaaagaaaacggattcttgaacctctttcacgctcatgtcacgtcgaggtactgcagaaaaaagaaccgcaaaatccgatccaatttttcgtaatcgattagttaacatggtggttaaccgtattatgaaagacggaaaaaaatcattggcttatcaaattctctatcgagccgtgaaaaagattcaacaaaagacagaaacaaatccactattggttttacgtcaagcaatacgtagagtaactcccaatataggagtaaaaacaagacgtaataaaaaaggatcgacgcggaaagttccgattgaaataggatctaaacaaggaagagcacttgccattcgttggttattagaagcatcccaaaagcgtccgggtcgaaatatggctttcaaattaagttccgaattagtagatgctgccaaagggagtgggggtgccatacgcaaaaaggaagcgactcatagaatggcagaggcaaatagagctcttgcacattttcgttaatccatgaacagaatctaggtatgtagacacatggatccatacatctcgatcggaaaagaatcaatagaaggagaatcggacgatatctttttcgaaacaaataaaaaaaaaaaaaaagggcggccactcgcgatctacggacgcgtgggcggacgcgtgggcggacgcgtggga

SEQ ID NO: 265132 - DNA, 1885 bp, Zea mays
gacccacgcgtcctagaaatagaaacgaactaatatatagataatcgaaatcgaaaagaactgtcttttctgtatactttccccgttctattgctaccgcgggtcttatgcaatcgatcggatcatatagatatcccttcaacacaacataggtcatcgaaaggatctcggacgactcaccaaagcacgaaagccagttagaaaatggattcctatttgaagagtgcctaaccgcatggataagctcacattaacccgtcaattttggatccaattcgggatttttcttgggaagtttcgggaagaaattggaataatatcgattcatacagaggaaaaagttctctattgatgcaaacgctgtacctagaggatagggatagaggaagagggaaaaatcgaaatgaaataaataaagaataaagccaaaaaaataagtcgaagatagaagagcccagattcaaaatgaagaaatggaaactcgaaaaggatccttctgattctcaaagaatgaggggcaaggggattgataccgagaaagatttcttcttattataagacgtgatttgatccgcatatgtttggtaaaagaacaatcttctcctttaatcataaatggaaagtgttcaattagaacatgaaaacgtgactcaattggtcttagttagtcttcgggacggagtggaagaagggcggagactctcgaacgaggaaaaggatcccttcgaaagaattgaacgaggagccgtatgaggtgaaaatctcatgtacggttctgtagagggacagtaaggatgacttatctgtcgacttttccactatcaaccccaaaaaacccaactctgccttacgtaaagttgccagagtacgattaacctctggatttgaaatcactgcttatatacctggtattggccataatttacaagaacattctgtagtattagtaagaggaggaagggttaaggatttacccggtgtgagatatcgcattattcgaggaaccctagatgctgtcgcagtaaagaatcgtcaacaagggcgttctagtgcgttgtagattcttatccaagacttgtatcatttgatgatgccatgtgaatcgctagaaacatgtgaagtgtatggctaacccaataacgaaagtttcgtaaggggactggagcaggctaccatgagacaaaagatcttctttctaaagagattcgattcggaactcttatatgtccaaggttaatatggaaattctttcagaggttttcccttactttgtccgtgtcaacaaacaattcgaaatacctcgactttttcagaacaggtccgagtcaaatagcaatgattcgaagcacttctttttccattacactatttcggaaacctaaggactcgatcgtatggatatggaaaatacaggatttccggtcctagcgggaaaaggagggaaacggatactcaatttaaagtgagtaaacagaattccatactcgatctcatagatccctatagaattctgtggaaagccgtattcgatgaaagtcgtatgtacggcttggagggagatctttcctatctttcgagatccaccctacaatatggggccaaaaagccaaaaaaataagtgattcgtttttagcccttataaaaagaaaacggattcttgaacctctttcacgctcatgtcacgtcgaggtactgcagaaaaaagaaccgcaaaatccgatccaatttttcgtaatcgattagttaacatggtggttaaccgtattatgaaagacggaaaaaaatcattggcttatcaaattctctatcgagccgtgaaaaagattcaacaaaagacagaaacaaatccactattggttttacgtcaagcaatacgtagagtaac

SEQ ID NO: 265133 - DNA, 808 bp, Zea mays
cccacgcgtccgcccacgcgtccggatcacactgatccggcctggagcgctggacagcagcagcagcagctcgagctcgaggccgctccgccaccccgcactcgcctgtcgcctcttctcgctttcgccaccggggcagcgctccgccatggctggacctgctgttctcaatgagcgtatcctttcttccatgtcccagaaacatgttgctgctcacccatggcatgatttggagataggaccaggggctcctgaattcttcaattgtgtggttgagattcctagaggcagcaaggttaagtacgagttggacaaggcatctggtctgatcaaggtggaccgtgttctttattcctctgttgtttacccacataactatggcttcattccacgcacactctgtgaggataacgaccccctggatgtcctcatactgatgcaggaacaagttgtccctgggtgtttcctgcgagctcgtgctattgggctcatgcctatgatcgatcagggcgagaaagatgataagattatagcagtctgtgctgatgaccctgaattccgtcactacacggacatcacggacctcccaccgcatcgccttcaagagatccgccgcttttttgaagattataaaaagaacgaaaacaaggaggtcgcagtgaatgagttcctgccagcgaaagatgccatcaacgcaatcaagtactcgatggacctgtatggctcatacgtcatcgaaagcctgaggaagtgatctccagctgcttgattgtggatgctacgtaattttctcaacagctcatcgaga

SEQ ID NO: 265134 - DNA, 458 bp, Zea mays
gagccagtcagccagccccggagccctggacagcagcagtgaactcgaggccgctccgccacctcgccactcgcctcttctcgctctcgccaccgggccagggaagggaccatccgatcggctccgtcatggctggagctgctgctctcaatgagggtatcctttcttccgtgtccgagaaaaatgttgctgctcacccatggcatgatttggagataggaccagaggctcctgaagtgttcaattgtgtggttgagattcctagaggcagcaaggttaagtatgagttggacaagatatctggtctgatcaaggtggatcgtgtcctttactcctctgttgtttacccacataactatggtttcattccacgcacactctgtgaggatagcgaccccatggacgttctcgtactgatgcaagaaccaagtggtccctgggtgttttctgcgagctcg

SEQ ID NO: 265135 - DNA, 617 bp, Zea mays
agcggacgcgtgggcggacgcgtgggccagattgggggttccttggttcctcgtcgagttgctgcttctgagaagaggcaacggaaactgaagagtggacaaaagttgcgccggtttcaggagagctcttacatggatccaaatcaaagtctttgccttggagcactatttaacatagcagcaacaaatggcctagacatgggcagaagattatgcatctttggcttttgccgttctattgaaatgttaagcgatgtagtggaagatacggtattggagcatggcggtgaggttgtcactgcagagaaggcaagcagtaacggcctccaggagaagctaaccatgtctgtcgcagtaccattgctgtggggcattcctccagcatcagagaccctccatgtcgcggtgcggaccggtggaggtattgtcgataagatctattggcagtgggacttattctagatgtccagcgttaacaaaattggttccaagatgtatatgtctctctaattttctgcacgcgttgtgcagcaactgtaaacttagtctctacctgtacagacccggtcccccttgtgcatatatataacagaactttgggatcacaacttaaccgg

SEQ ID NO: 265136 - DNA, 694 bp, Zea mays
tccgcgtgcgcaaccgcatcgcttccctcccggcacaagaagaagattcggttgggttgtttgtctcttgcaaactggaatggctgctgctgccactgctattgctactccgtccgtggcgccggaggccggcgaccggaaggcggtggcaccgccagtcgacgcggtggatctggagctggagctggagctggaggagaagcacgtgctggcggtggacgacagctccgtggaccgcgcggtgatcgccaagatcctgcgcagctccaagtacagagtgacgaccgtggattcggcgacgcgcgcgctggagctgctggcgctggggctggtccccgacgtgaacatgatcatcacggactactggatgcccgggatgaccgggtacgagctgctgaagcacgtgaaggagtcgtcggcgctgcgggcgatccccgtggtgatcatgtcgtcggagaacgtccccacccgcatcagccggtgcctggaggagggcgccgaggacttcctcctcaagcccgtccgccccgccgacgtctcccgcctctgcagccggatccggtgaccgcccgcgcaaggatggagggtctggttgcgcgctctgacttaattagaggagttgttaggatccaattttttgtgtgttcgttcgttcggtcgttctttcctttctttcttcttggacataaaattt

SEQ ID NO: 265137 - DNA, 952 bp, Zea mays
aatctgcgacaagtgacctgggtaaggctaacataggccaccggcatcagccctccaacacagtgacctgacctccacgcgaagtcaccaccacaactccacaagatctagaacctaagaacctgcagaggagaggaagaggagcttggggaggagatggccggcgccgagggcgagaggtgggtggggctagcaacggacttctcggaggggagccgggcggcgctgcggtgggcggcggccaacctgctgcgagccggcgaccacctgctgctgctgcacgtcatcaaggagcccgactacgagcagagcgaggccatcctctgggaatccaccggctccccgttgattcccctctcggaattctctgaccctatcattgcgaagaaatatggagcaaagccggacatagaaaccttggacatcctgaacactacagctacccagaaggatatcgtggtggttgtgaaagtcctgtggggtgatccgcgtgagaagctctgtcaagttatccatgataccccgctgagctgcttggttataggaagcaggggccttggcaagctcaagagggtgctcttgggaagtgtcagcgactatgttgtgaacaatgcaacctgccctgtcaccgtcgtcaagtcaacaagcaccgaaggttgatcttatcgccgagatgcctggatgtgatgttgtaataaagatggttggcctgatgaagaacatgcactagtttctagctatttgaaacatgttgaacgaggcaattctaatgtaataataatagacaaagtgccttatgaaggacatggttgacatgcctttgttgctgtatgagtgatgtttatagttttgagggtttgaagatgtggatcatttgcctattattcttccgctgtcctgtatgagcgatgtttatcaatatgcaatgcaaataaagaaaccctacagatgc

SEQ ID NO: 265138 - DNA, 575 bp, Zea mays
gtcactgccacatgcacctccgtggcaagtgtcctttggctttggcatcaatcaaatagacaagaggccacctctaccgccgccatccgcagtccatacagtgacccccacgaggtcaagaacctgtacgaggagaggaaagaacctggaagagaggagcttgaggagatggcgagcgccgagggcgagaggtgggtgggactggcgacggacttctcgcaggggagccgagaggcgctgcagtgggcggcgaccaacctgctccgcgccggcgaccacctgctgctgctgcacgtcatcaaggagcccgactacgagcagagcgaggccatcctctgggaatccaccggctccccgttgattcccctcttggagttctctgaccctattatcgcgaagaaatatggagcaaaacccgacatggaaaccttggacctcctgaacactacagctacccagaaggaatcctgtggggagatctgcgtgagaagctctgtcaagttatccatgacaccccgctgagctgcttggttataggaagcaggggccctggcaaactcagagggtgctcttag

SEQ ID NO: 265139 - DNA, 291 bp, Zea mays
cgaggagaggaaagaacctggaagagaggagcttgaggagatggcgagcgccgagggcgagaggtgggtgggactggcgacggacttctcgcaggggagccgagaggcgctgcagtgggcggcgaccaacctgctccgcgccggcgaccacctgctgctgctgcacgtcatcaaggagcccgactacgagcagagcgaggccatcctctgggaatccaccggctccccgttgattcccctctcggagttctctgaccctattatcgcgaagaaatatggagcaaacccgac

SEQ ID NO: 265140 - DNA, 448 bp, Zea mays
ccgacgcgtccggtcagccgagtccgcgctgcggccccatcggatctcccgcgcgccaaaccatgccgacgcagcaagcatgttctgctgcggcagcattgagatcgcggcggccttcccctgcatccacgacgacgacctcccggcagctgcggctgcgtccgcctcgtgccgccaccgcgggcgtgcggctgacggtgtcggacgcggagctggagtcccgcgggttcgctgtgcggcgcacggcggagggcatcgacgtggcggcgctgaacgaggtgttcgtgcgcgtgggcttcccgcggcgtcaggaggagcggctgcggcgcgcgctggagcacagccgtgtggtgtggctgtcggccggggaggaggaagggcggcccgtggcgttcgcgcgcgcggccggggacggcgtgttcaacgccgtggtgtgggacgtggtggt

SEQ ID NO: 265141 - DNA, 654 bp, Zea mays
ggtttatgcaattcagataatcctatggttggttttgtggtggaaaccagttcggattatggtcatcttgtcaaagatgttctttgcaggtgtatcactatttgcagccctcgggtttgttctctatggaggaaggttgttcatgatgttgcagcgttttcctgtagaatcaaaaggaagacgaaagaaattgcaggaggttgggtatgtgactaccatatgcttttcttgtttcttgatcagatgcgtcatgatgtgccttaattcatttgataaagaagcagatcttgatgtcctgaaccatccaatcctgaacttcctctattacctgctggttgagatagtgccttcggctctggtgctcttcattctacggaaactgcctccaaaacgtgggatcacacaatatcacccaatccattagagagcaggccttggtgttttctggtggattgtcttatatagcgtggtaaatacagaaggcagagtgaaaagtaccacctttgctctcgagcttgcccagcttttcatacgagggaaggctttagaatctcaggtttagaaaatgcgatctctttctctcagatttagaaaatgtaaaatgtaatttatataactttaatattctcagtgcatatcatttgttcacatctc

SEQ ID NO: 265142 - DNA, 683 bp, Zea mays
gtggtctatgcaattcagttgacatcaatgtatttcagataattctatggttggttttatggtggaaaccagttcgagttatggtcattttgccaaagatgttctttgcaggtgtatcactatttgctgcccttgggtttgttctgtatggaggaaggttattcctgatgttgcagcgttttcctgtagattcgaagggaaggcgaaagaaattgcaggaggttggctatgtgactaccatctgcttttcttgtttcttgatcagatgcgtcatgatgtgcctcaatgcgtttgataaagcagcagatcttgatgttctgccccatccaatcctgaacttcttctattacctgctggttgagatagtgccttcagctctggtgctcttcattctacggaaactgcctccaaagcgtgggatcacacaataccacccgatccattagagagcaggccttgggaacaggcaaaggttttctggtggatagtgttacacaacgtggtaaatacagaacggagagtgaaaagtaccactcgagctttgcccagctttttatacggaagtctttagaatcccaggttgaaattgtgtgtaaaaatgcgatctctttcactaagatttagaaaatgtaacttataatactttgttattctcagtgcgtatcatctgttcacattgcaaa

SEQ ID NO: 265143 - DNA, 1192 bp, Zea mays
cccacgcgtccgctcgcttgaggcggcccgcggccttctcgaagccctccgctcgctccgtgctcgtggctcccgcacgatccccacattccttggccggctccgcgctcgtgctctcgttgggatcgttgtcagttcaggtacggtggcgatgaggtcgtccgtggcccgcctgattcgctcctcctctgcctcgccctcccgtctcagtggaaatgcattcttcggcaatgccacacccagtgatcagaggcacattgagaagccttttaaagtgaaggaggcagaacctgtgaatgtgacaaaaccttcaccacacaagctgctggttctaggaggaagtggtttcgttggatcacacgtttgcaaagaggctttggacaaaggtttagttgtctctagtcttaatagatcgggaaagccatccttaaatgaaccttgggctgacaaagttatatggaaccaaggcaacctccttgaaccagcttcattgaaggatgctatggataatgtttctgcagtggtatcttgtgtcggaggttttggatcaaattcattcatgtataagattaatgggactgcaaacatcaatgccatcagggctgcagcttgagaaaggtgtaaagagatttgtatatgtgtcagctgcagactttggattagtgaattatttattgcaaggctattacgagggcaagagggcttctgaagctgaattgttgtcaaagtttacatatggaggagtgatactgaggcctggttttattcatggaactcgtcgagtgggcagtgtaaagatacctcttggtcttgtcggttctcctatgcagatggtgctccaaaatataaaacctttgactaggttaccacttatcgggccgctattgactcctcccgtcagtgctgcctccgtggggaaggtcgctgtgagagcagcgacggatccggtgtttcctcctggcatcgttgatgtctacgggatcatgcgttacagcgagcaaaactaagctgcctcattcaccgggcagtatatacatgccgctgtacttttgttacagctgtttctttgtttgttttacatgtactggtatccttctttaactcacttgtttacgagacgataaacattcaataaatatgtattttagcgacatgtctgtggtactgttttttttttaaaatattttatcgt

SEQ ID NO: 265144 - DNA, 576 bp, Zea mays
  unsure (1)..(576): unsure at all n locations
atcaagcgcgcggagggggaggcggaagccaagtacctgtccgggctgggcattgcgcgccagcggcaggccatcgtggacgggctcagggacagcgtgctggggttctccgtcaacgtgccgggcaccacacgccaaggacgtcatggacatggtgctcatcacccagtacttcgacaccatgaaggagatcggcgcgtcgtccaaggcgtcctcggtgttcatcccgcatggccccggagcggtgcgcgacatcgccacgcagatccgcgacggcctcctgcagggatcctctgtcgccaaacactaagctgcctgcctgctgttgccgctgctgctgctgaagaacaccaccacccctattatatatataatataatgatgatcttggtaccagagtgatgcttgtctatattgttcatcactcatcgtcaccatctgctaggatggctatctttatgcttggggattggagaaaaccttatctaaccttttagggaaccggtaatatatatataatgcagcatgagtttgcagtatgctcatcagaaaaaaaaaaaaaaaaaaattatntaa

SEQ ID NO: 265145 - DNA, 2191 bp, Zea mays
ctcagctcctcccgacctccctatatctctctgctcccccaaaccctaatcccttccgtttcccaacaatctgtctcccctcactccctctctgcagcgcgcagctttcaaagcgttgggagagatggcagaggagacgcaaccagaggccgccgcagccgccgccgcgcccgccgcggccgaggtagtcgtgaccgaagctgcgccggcggaggcggaggtgcctgcggcggcggaagctgaagccgaggccaaggatgagaagaaaggtgacgaggcggagctcaccgccgatgacgcgggggtggggaccggctcgttcaaggaggaaagcaacctggtggaagacctgcccgacccggagaagaaggcgctcgacgagttcaagcagctgatcgctgccgccctcgccgccggtgagttcaacctgcctcccccgccgccgccgccgaagggcaaggagacgaaggtggaggaagccaaggccgaggagcccgccaaagaagagcccgcggccgaggcggaggctacggcggaggagcccaaggcccaggtggctgcggatgccccggttgaggaggtcaagacggaggtgccgccggccgaggaggccaaggctgagacactgactgaggaagccaagccttccgagcccgagccgcaggagaagaccgtggtggtcactgaggaggagactgccaccaagacggtggaagcaatcgaggaaaccgtcgtgtccgcccccgccgccatcccggaggaagcagcggcgccggaggcggtggtcgaggctcaggcgaccgcgcctgaacccgtgctgatttggggcgtgccgctggtcggcgacgacgagcgcacggacacggttctgctcaagttcctgcgtgcgcgggagttcaaggtgaaggatgccatggcgatgctcaagtccgcggtgctgtggcgcaagcgcttcggcatcacctcgctcctcgacgccgacctcggcctgccggagctggagaacgtggtgttctaccgcggcgccgaccgcgagggccaccccgtgtgctacaacgtctacggcgagttccaggacaaggatctctacgagaaggccttcggcgacgatgagaagagggagcgcttcctcaagtggcgcatccagctgctggagcgcggcatcctgtcgaagctggacttctcgcccagcggcatctgctccatggtgcaggtcaccgacctcaagaactcgccgcccatgctcggcaagcaccgcgccgtcacgcgccaggctctcgccctgctacaggacaactacccggagttcgtggccaagaaggtgttcatcaacgtgccgtggtggtacctggcggcaaacaaggtgatgagcccattcctgactcagcgcaccaagagcaagatcgtcttctgcagccccggcaagtcggcggagaccctcttcaggtacatcgccccggagcaagtccccgtccagttcggcggcctgtacaaggaggacgacaccgagttctccacctccgacgccgtcaccgagctcaccgtgaaaccgtcctccaaggagaccgtcgagatcccagccaccgagaactccaccgtggtgtgggagctccgcgtgctggggtgggaggtgagctacggcgccgagttcacccccgacgcggagggcggctacaccgtcatcgtgcagaagacgcggaaggtccccgcccacgaggagcccatcatgaagggcagcttcaaggccacggagcccggcaagctggtgctgggcgtgaacaacccggcgtccaggaagaagaagctgctgtgccggttcaaggtgaggagcgccgccgcctgatgagggtcgttggtctgggtcccagcaggtacagcctgccagctgcttgaccaccagcccgacatgtataattcgatcgatcgccaaccaggtccataccgccaccatttgaatgaacatgctgcattgcattacatgataggagagagagagagagagagagagaggacaataaagagtttctgcttcctagctaggcccgttccgtgtcctggtcgttctttgattatttgttggcttgctgttcttttttttccttggggggagggtcgcgtttgtatgtgtttattacttgaatgaaaacaaaagtgagcttgttatatgagatagccatggcttgttgaggtc

SEQ ID NO: 265146 - DNA, 842 bp, Zea mays
tcgtaggtcgttacaagactctataccgacgtcctgtcaaggcaccacacctcttcctcctcttcctcctcctcctagcacagctagcgcctgctccccttcgcctgtgatcatgtcttgcagcagcggcaagtgcgactgcggctccagctgctcctgcggcagctcatgcaactgcatgtcccctaacgtggagaccgccgccgccagcagcatcaagaccatggtcctcgccgcgccgaccaccaaggccagcgccggcggcttcgaggcggccaccgagggcggcggctgcgactgcaacacctgcaactgcggcaccagctgcggctgctcctgctgcagctgcaactgagcgcccggcccggcgatggcgcacgagagtcgagaggacgacgacgagtcgtataaatataatagcggcgtctaaataagatcctgtcaactgcacccgccattatcgatccatggtcgctcctggggttcatgttcatctgtaacgtgctcgcggtcatgtccgtctcgtgccggatttaatatttatatgcatgtatttgtgttttaaaaaaaaaaaaaaaaaaaaaaaaaaaaaaaaattcacttactcttaccaaaaaaaaaaaaaaaaaaaaaaaaaaaaaaaaaaaaggaagacaaaaaaaaagattaaaaaaaaaaaaaaaaatgggggggaagttcaaaaagattcaatttaatgtccaaatttaaataaattggcgaccgttaaaaacctcacgaaagggaaaataatggcctttcataaaataacccctttgcaagaaaaacccctttttaaagaagggtaatacgattaaaaggcc

SEQ ID NO: 265147 - DNA, 821 bp, Zea mays
cccacgcgtccggcaaaagcaacaaggcagcagcacaagcaagaaccacacctcctcccttcgcctgtgatcatgtcgtcttgctgcggcggcaagtgcgggtgcggctccagctgctcctgcggcagcggatgcaacggctgcggtatgtaccctgacgtggagaccgccgccaccagcagcgtcaagaccacggtcctcgccgcgccgaccaccaaggccagcgccggcggcttcgaggcggccaccgagggcggcggctgcgactgcaacacctgcaagtgcggcaccagctgcggctgctcctgctgcagctgcaactgagctggcccggcccggcgatggcgcacgagagtcgagaggaggaggacgacgacgaggcgtataaatataatagcggcgtccagtaaataagatcctgtcaactgcacccgccattatccatggtcgctcgctcctcgcctgcgtctcctggtcctggggttcgtctgaacgtcctcgcggcttcacgacggcgatgccgcctccgtcgatcctgtccgtctcgtgccggatttaatattagatctatatgcgtgtttttctgcgttattactacatctacatgtgtctgtctgtggtgtgtctctctgacggccccatgcgtcagcgtcactgcttgcttcagtgctgcatctcactctgttgaggcgcttaacggataacatctttgcagtgctagaaaacctgagaacctcatgatatctaagtaactgagccaagagagagagagagagagagagtatctaagtaccttgatccacttggacagcacagttaga

SEQ ID NO: 265148 - DNA, 458 bp, Zea mays
tcgcgggtcgaaacacgcctctagcgccaatcatattagccagcgccggcggcttcgaggcggccaccgagggcggcggctgcgactgcaacacctgcaactgcggcaccagctgcggctgctcctgctgcagctgcaactgagctggcccggcccggcgatggcgcacgagagtcgagaggacgaggacgacgacgaggcgtataaatataatagcggcgtccagtaaataagatcctgtcaactgcacccgccattaccgatccatggtcgctcgctcctcgcctgctggggttcatgttcatctgtaacgtgctcgcggtcatgtccgtctcgtgccggatttaatatttacatgcatgtatttgtgttaaaaaaaaaaaaaaaaaaaaaaaaaaaaaaaaaaaaaaacaaaaaaaaaaacacaacaaaaaacaacaaacaagcggctggcctgc

SEQ ID NO: 265149 - DNA, 625 bp, Zea mays
  unsure (1)..(625): unsure at all n locations
aaagggcagcaccacaatcagagaattacacctcctcccttcgcctgtgatcatgtcgtcttgcagcggacgcatgtgctgttgcagctccaactgctcctgcagcagccgctgcaacggctgcggtatgtaccctgacatggatcaccgacgatacttaacaagtactgacatccgacgtcgccaccccgaccaccataggtagcgcctgctgcttcgacgcagacaccttgggctgcagctgcgactgcaatacctgtaagtgccggactagctgcagctgcacatgctgcagctgccactgatctggtccagatcgtctatggcgcacgagagtctacacgaggacgtctactatgatgcgtataaatataatagcggcgtccagtaaataagatcctgtcaactgccccccccattatcgatccatggtcgctcctggggttcatgttcttttgtaacgtgctcccggtcatgtccgtctcgtcccggttttaatttttatacgcatggatttgtgttttttctgggttattacatgggccggttttttgggtgtccaccccccaaaaaatttaaaaaaaccccccaaaaaaaaaaaaaaaaaaaaaaaataaannaaaaa

SEQ ID NO: 265150 - DNA, 359 bp, Zea mays
aaagcaacaaggcagcagcactagcaagaaccacacctcctcccttcgcctctgatcatgtcgtcttgctgcggcggcaagtgcgggtgcggctccagctgctgctgctcctgctgcagctgcaactgagctggcccggcccggcgatggcgcacgagagtcgagaggaggaggtcgacgacgaggcgtataaatcatataatagcggcgtccagtaaataagatcctgtcaactgcacccgccattatccatggtcgctcgctcctcgcctgcgtctcctggtcctggggttcgtctgaacgtcctcgcggcttcacgacggcgatgccgcctccgtcgatcctgtccgtctcgtgcc

SEQ ID NO: 265151 - DNA, 629 bp, Zea mays
cccacgcgtccggtgaccgtgagtgcctacccgccgaccgcacgaaccccactcggtcactcccagtctccatctcccactacggcactaccccatccccggtgcggcgccaccttcccggcttccccttccggcctcccccctctcgtcacttatggtgcccagccgctcgctgcgcaactactagcgcaccgtcccctcctcagccatggccgcggcgtcgttcgcccgcgccttatgtctccacatgctcctcctcttcctcgtggttggctcggcgcgctgcaagacggtgaagagagacgtgaaagcattgaatgagatcaaatcttcactaggctggagagttgtatactcatgggtcggtgatgatccttgtgggcatggtgatctacccccctggtctggtgtgacatgttctcagcaaggggattacagagttgtgacggaactggaagtctatgctgtatcaatagttggccctttcccaacagcagtaactaacctgttggatctaagaagattggatctccacaataacaagttgacaggaccaattcccccacagattggacggttgaaacatctcaggatattgaacctgaggtggaataagcttcaagatgtgc

SEQ ID NO: 265152 - DNA, 936 bp, Zea mays
ttcgtgtgtcccgcgtcggtaaaataaagcaagcaccagaactcttttttccccaaactcgcaagtcgcaacggccatgtctccgctgccccgccgccgcctcgtggtcctcgtcctcctcgccgccgccgtcgcggccacggcgtccgccgcgtccctcagcggcgcggcgaacgacctgctgcccaagtacggcctcccgaaggggctcatcccggactccgtcacctcctacagcttcgacgaggccacgggcgccttcgagatccacctcgccagcacctgctacgtccacttcggctcccacctcgtctactacgagaggaccataaccggcaagctctccaggggcgccatctcggacctctccggcgtccaggccaagaagctcttcctctgggtctacgtcacggggatggtcgcgcaccccgaccagggcaccatcgagttccaggccggcttcgtctcggagtcgctatcagcctccatgtttgacgaggtgcgcacctgcggttccagcgctggcgcgcagctgcgcggcgcggctggggtcatcggagagcttgggctgctccccgttgcgcaggcatgaacctcgagtttgagaatccacgctaccggagaaacgcaggagcttcccgtctgctgtcgcgtgagccctagagtgcaggaggcgttcagccgtggtgtgttctgcttctgcctgtacgtaccagtgtctggttgttgcttcccggtctcaatggacatggatgctctgtagaaatgtatatcccatacgctgttgctgaacctgcgtaggatgtaggcaggctggctctcttctctcttgttttcctggatcatcgtatattcatgtcatcatcatgtgtgcaaccatgaactgcccccagaggcgtacagcacgaattcgactagcatgcgttttgtttaaaa

SEQ ID NO: 265153 - DNA, 405 bp, Zea mays
ctgacgcgtgggcgagcacaaaaaaaaaaatcccaatatccgcaacggcaatgtctccgctgccccgcatcgtgctcctcgccgtcgccgccgccgccgccgcagcggtcacggcgtcagccacgtcgctcagcggcgcggcgaacgacctactccccaagtacggcctcccgaaggggctcatcccggactccgtcgcctcctacagcttcgacgaggccacgggcgccttcgagatccacctcgccggcacctgctacgtccacttcggctcccacctcgtctactacgagaggaccataaccggcaagctctccaagggcgccatctcggacctttccggcgtccaggccaagaagctcttcctctgggtctacgtcacggggatggttcggcaccctgacc

SEQ ID NO: 265154 - DNA, 391 bp, Zea mays
gcctccatgtttgacgaggtgcgcacatgcggttccagcgctggcgcgcagatgcacggcccggctggggtcatcggagagcttggcctgctccccgttgcgcaggcatgaacctcgagtttgagaatccacgctaccagagacccgcaagagcttccagtccgctgtcgttctagagtgcaggacgttcagctgtggggtgtgttccagtatctggttgttgcttcccggtctcaatggacatggatgctctgtagaaatgtatatcccatacgctgttgctgaacctgcgtaggatgtaggcaggcgggtctcttctctcttgttttcctggatcatcgtatattcatgtcatcatcatgtgtgcaaccaaaaaaaaaaaaaaaaggaa

SEQ ID NO: 265155 - DNA, 1316 bp, Zea mays
cttacgcgtccgcccacgcgtccgcccacgcgtccgctctctacctctgcactccaatcagatcatcagatagatcactggccccgtgctgattaccgcgcttcccatctgagcagccagcctcccaggctacagggagagacgcagaggagacagctgctgcctggctgagacgatggccggaggcggcgaccactcccagacgaacggaggccacgtcgaccagagggccttggaggagggcaggaaggaggagttcgctgaccagggctgcgccgccatggtcgtctccgtcccatttatccagaagatcatcgcggagatcttcggcacctacttcctgatgttcgcggggtgcggcgcggtgacgatcaacgcgagcaagaacgggcagatcacgttcccgggcgtggcgatcgtgtgggggctagcggtgatggtgatggtgtacgccgtgggccacatctccggcgcgcacttcaacccggcggtgaccctggccttcgccaccagcgggcggttcccgtggcggcagctgccggcgtacgtgctggcgcagatgctgggcgccacgctcgcctccgggacgctgcgcctcatgttcggcggccggcacgagcacttccccggcacgctgcccacgggctccgaggtgcagtcgctcgtcatcgagatcatcaccacattctacctcatgttcgtcatctccggcgtcgccacggacaacagagcaatcggggagctggctgggctggccgtgggcgcaaccatcctgcttaacgtgctcattgccgggcccgtctccggcgcgtcgatgaacccggcccggagcgtgggcccggcgctggtgagcggggagtacacgtccatctgggtgtacgtggtggggccggtggtgggggccgtggccggggcgtgggcctacaacctcatccgcttcaccaacaagcccctccgcgagatcaccaagagcacgtctttcctcaagagcacgagcaggatgaactccgccgcctccgcctgatggatctccatggccggtaatttagcctacaaaactatatattcacccgtgtcgtcgtgtcagtacgtgagaggatatagatatataattcctgcgtgcgtgtgcgtttgtgtgtggatggaaaacatatgaaagaagaggtatggtttgtgtgtggatggaaaacgtactgtgcctgccttcgaccctgggcaacgtcgctctaccccgtgaacgtgcttaacctgttgccgcatgttttgttaactcaattttaatgtgttggcgagatcatacgcaaaaagaagaacag

SEQ ID NO: 265156 - DNA, 448 bp, Zea mays
gaattccgggcgaccttgcctcctcctgcagcagcagcataaccagaggggagtacatcaagccgtttcgagagagctttaggctactgcatgctagcagtatggcttccgctgcgcgcttcctggtggccgtggtcgtggcgtgcgcactcctggccagcaacaactgccacgcggcgcgccgcttggccgacacggccgcggctcccgctgctgctggtgccgtccctggcctccccgctgtgccgaccttgccaacggtgcagccagtgccacaggtggcgctgccacctatgccggccgtgcccgcggtcaccgtgccgcagatgacgctgccgcccatgccagcggctcccaaggtggccgtgccgttgccgccaatgcccgccgtcccgtccgtgctgcccaagctgacgctgccaccgatgcccgctgtcgttccatccgt

SEQ ID NO: 265157 - DNA, 705 bp, Zea mays
ctcccacattaagccatccgtcaccactcaccagccacccaaccagcactcactcactcactagctccgtctccgctccgtccaactcgtacacaacccctctttctctctatcttctctccatccatccatcctctcgctcgcccttccacagctagctaagcagtacgacgtagtatactagcatttagcagttcatcaacgcgctcaacctagcacgacgtacggcgatgaggcgccgcggcagcaactcctcgccgcttgcggctgctgccctgcccctcctactcctcctcgtcgccggctgcttccactgcgcggcaacggcagctcgccacctgccttctcctggcgccccagtccaagcgctggatcaccaagccgagaacggtgccaaggctgcatcagctggtgcagacggcgccggcggccttgtgctccaggaaggtggcacgggcaacaacggcgacgacctctcctccaaaaccctcctcgagacgacgacgacgacgatgggagcggaggcgtgcgaggaggggaacgacaaggacgagtgcgtgcagaggcggctgctcgtcgacgcgcacctcgactacatctacacgcagcacaagggcaagccgtgacggtcagcgaggagaacggtgctttgcgcatggtggagtacgtagatgaacgctgctgcggctagttaattaacatccg

SEQ ID NO: 265158 - DNA, 1372 bp, Zea mays
ccggaacggcagggccgacccacgcgtccccccgcgcgtccgccaggctcaaatagaggaccttggggcagtcaagctccatctgcgtatggaactggagggtatggtggcagtgctgggtatagtgcttggaacaactcttctggtggcggcaatgctctgaatagtcaagcccctggtggacctgcaggctatggaagccagggctatgggtatggtggatatggaggggatccatcatacgctagtcacggaggatatggggcttatggagcacgtattgatagtgctggcaatcctgctactggtggatcatctggatacaatgcaggctatggaagtggtggtgccaactctggctattcaagtgcttggagtgatccttcgcaaggtggtggatttggcggttcggtcaatggaggtgctgaaggacagtcaacttatggcactggctatggcagtgtgcagcccagggttgctcagtaaagagaggcattttgagtgtgcgaaatgaaccagtgcatctgggcagtctatgtattgatttgtcattccagtctctctggttgctctcagcattttgaagattgcccatttgctggttaaatcagtatttctccgggttggaatgcttgatcctttagtggcttactactagaacttgtagtcaataagtagctataatgtggagtagcagtatcttgcggaatgcttttattaatttctacatttagctttatctatctgtgtgctttgccatgagtggagtttcaggttccttcatctctagttataagctagagtagcttgactgcttatgggcaaaattatctagttgtacctctattctacagatcatatatttgtgtttgacattagtatttatgctggatcttgctctaaacctatattctggaatgttctctatttggtggctgtattgacatgtggtattatcaacattgatgggtttgaaacagatgcaaaccctgaaatatgcaagcatagttacttgatgctgtagctgcttctaacagtattttcaactgtagtgcaagtgtttttatgtagctggaatggtacacccttcaagtatatcaccaagctatgaattccatccatttggtcctagatttcaatatttttcaaagcagcagtaagcttattagcagcaagattgtagcgccaagtttctgaggtagtatagataactgggttatctgtgaagctacctgaatgtttaggggtagaaatgtattgtagaacagtcaaggctcggcaactaaagtaattgtccttcctcctaccttcctttatgtacaggttgaatgggatggcattctttttttagatatgcccaagcaaggtctat

SEQ ID NO: 265159 - DNA, 1267 bp, Zea mays
cccacgcgtccgggaagcctcaaatccgctctattcctctctccctctcctcccaccgcagcagcaggcgagcgcgaggcggaggcgtagagatggagtcggaccagggcaagctcttcatcggcggcatctcctgggaaacaacggaggagaagctgagcgagcacttctccgcctacggagaggttacgcaggccgccgtcatgcgcgacaagacgacgggccgcccccgaggcttcgggtttgtcgtcttcgccgaccccgccgtcgtcgaccgagcgctgcaggacccccacaccctcgacggccgcacggtcgatgtgaagcgggcactctcgcgggaggagcagcaggcctccaaggccgcaaaccctagcggtgggaggaacactggcggaggaaatggcggcggcgatgcaaatggtgctcggacgaagaaaatattcgtgggcgggctgccctctactctgactgaggatgggtttcggcagtatttccagaccttcggcatcgtcactgatgttgctgtcatgtatgaccagaacacgcagcgcccccgtggcttcggattcatcacctttgactcggaggacgcggttgaccacgtgctgcagaagaccttccatgatcttggtgggaagctggttgaggtgaagcgtgcattgccccgtgaggcgaaccctggtggctctggtagtgggcgttctggggtgagtgggggttaccagagcaacaatggccataacaccagctctggtagctatgatggtagaagtgatggtggcaggtacgggcaggcacagcagggtagtggtgtctatcctggctatggtgctggggcagctggatatggatatggtgctaaccctgcaattggatatggaaattatggggctggaggatatggaggtgctcctgctgcttatggtggacattatggaaacccaggtgcagctggttctggttaccaaggtggacccccaggctcaaatagaggaccttggggcagtcaagctccatctgcatatggaactggagggtatggtggcagtgctggctatagtgcttggaacaactcttctggtggtggcaatgctctgaatagtcaagcccctggtggacctgcaggctatggaagccagggctatgggtatggtggatatgggggggatccatcatacgctagtcacggaggatatggggcttatggagcacgtattgatagtgctggcaatcctgctactggtggatcatctggatacaatgc

SEQ ID NO: 265160 - DNA, 714 bp, Zea mays
ctagcgtgagtagttttcattttcacccctgcctctgtatccgagcatactagcggatcctggcccgatccctcttcccaccccacccacctccgcttctctccaagtgggaagctggttgaggtgaagcgcgcattgccccgtgaggcgaatcctggcggctctggtggtggtcgttctgggggaggtgggggttatcagagcaacaatggccataacaccagctctggtagctatgatggtagaagtgatggtggcaggtacgggcagacacaacagggtagtggtggtggtggctatcctggctacggtgcaggaggctatggtgctggggcagctggatatggatatggtgctaaccctgcagttggatatggaaattatggggctggagggtatgggggtgttcctgctgcttatggtggacattatggaaacccaggtgcagctggttctggttaccaaggtggacatccaggctcaaatagaggaccttggggcagtcaagctccatctgcatatggaactggagggtatggtggcagtgctgggtatagagcttggaacaactcttctggtggcggcaatgctctgaatagtcaagcccctggtggacctgcaggctatggaagccagggctatgggtatggtggatatggaggggatccatcatacgctagtcacggaggatatggggcttatggagcacgtatt

SEQ ID NO: 265161 - DNA, 511 bp, Zea mays
tctctccccctctctcccccatcgcaccagcaggcgagcgcgaggcggaggagtagagatggagtcggaccagggcaagcttttcatcggcggcatcgcctgggaaacgacggaggagaagctgagcgagcacttctccgcctacggcgaggtaacgcaggccgccgtcatgcgcgacaagatcaccggccgcccccgcggcttcgggttcgtcgtcttcgcggatcccgccgccgtcgacagagcgctgcaggacccccacaccctcgacggccgcacggtcgatgtgaagcgggcactctcgcgggaggagcagcaggcctccaaggccgcgaaccctagcggtggaaggaactccggtggcggaagaggcggccgtggcggcagcgatgcaagtggtgctcggacgaagaagatctttgtgggcgggctgccctctactctgactgaggatgggttccggcagtacttcgagacctttggcatagttactgacgtagttgtcatgtat

SEQ ID NO: 265162 - DNA, 1933 bp, Zea mays
tagaagaagaatccttctcgacgccgcccccattcattcttggagggcaagaagaacgcgcagtccaaaagcgaaacaaggggaaggggcgaggcagccaaacgaatcccagcacctgcctctcctttgcttgcgcagatctagcgatggcggcgggcggtgagttggcgtggggggaggagcccgtggcgcggcgccggcctaagaccaagatcgtctgcacgctcggcccggcgtcgcgatccgtcgagatgatctcgcgcctgctgcgcgccgggatgtgcgtcgcgcgcttcaacttctcccatggctcccacgagtaccaccaggagacgctcgacaacctgcacgccgccatggagctcaccgggatcctctgcgccgttatgctcgacaccaagggtccagagattagaactggatttttgaaagatgggaagcctattcaattgataaaaggccaagaaatcacaatttctacagactatagcattcagggtgatgagaaaatgatatcaatgagctacaagaagcttgctgttgatctgaagccaggcagtgtcatattgtgtgctgatggtaccatcactcttactgttcttcactgtgataaagaacaaggcttggttcgctgccgctgtgagaacactttcaagcttggcgagaggaagaatgttaatcttccaggagttattgttgatctccccacactcacagacaaggacaaggaggacatccttaaatggggtgttccaaacaagattgacatgattgccttgtcatttgttcggaagggttcggatcttgtggaggttaggaaggtacttggtgagcatgccaagtccataatgctgatgtcaaaggttgagaatcaagagggagtagctaactttgatgatatcctggcaaactctgatgcttttatggtggcaagaggtgatttaggaatggaaattcctatagagaagattttctttgcacagaaggtgatgattttcaagtgcaatattcaaggcaagcctgttgtgactgcaacccagatgttggaatctatgatcaagtctcctcgccctactcgggcagaagcaacggatgttgcaaacgcagttcttgatggcacagactgtgttatgctcagtggtgagactgctgctggggcttatccagagttggcggtgcagactatggctaagatctgcctgcaagcagagtcttgcgtagaccatgctgctattttcaaatcaatcatggcttcagctccaattccaatgagtccattggagagccttgcatcatcagctgttcgcacagcaaactctgccagggcagcacttatcttggtcctgaccaggggaggaactactgctaggcttgtagccaagtataggccatccatgccgattctgtccgttgtggttcctgagctgaagacagactcgttcgactgggcctgcagtgacgagggtccggcaaggcacagcctcattgtgaggggtgtcatcccaatgctgagtgccgccactgccaaggcctttgacaacgaagccactgacgaagctattggttttgccattgaaaatgcgaagacgatggggctatgcaacaccggtcaatccgttgtggccctgcaccgcatcgggatttcatccgtcatcaagcttcttactgtgaagtaggggtccaagggtgagggacaccattttgcttggtgaatttttgtgaggctgcttacgcacatcagcgtatccacagcttttctgttgccaaagatacagactttgcgttctggtacaccttggtgttacaaggttgtgggaatttgtcgtttagatattagcgatttaaacagtttatcaactgctatagctaattaatttgcagctgtgctgcaactttatcgtactgaaaattaaatgtttaaaagggcggccgc

SEQ ID NO: 265163 - DNA, 498 bp, Zea mays
ccggccggtctccgctcgtcgtcctcacccagcccagagacacccacggaatcgcaattccccacccccaccccccttctaccttctataaagggaaacctcgccaccaaatctcgaatcccatctcgctgctcaccgccgctcgacgccgacgccgacgccgacacctctccctcccccattccccgtgccccggaccgcggagcagacagaggcgagatccggagcgccgcgcgatggcgaacatcgacatggcgaagatcctggcggacctggaccgcggcgccggcgacgcgcggctgcccaagaccaagctcgtctgcacgcttggcccggcctcccgctccgtgcccatgctcgagaagctgctccgcgccggcatgaacgtcgcgcgcttcaacttctcccacggcacccaccagtaccaccaggagacgctcgacagcctccgccaggccatgcacaacaccggcatcctctgcgccgtcatgctcgaca

SEQ ID NO: 265164 - DNA, 1686 bp, Zea mays
atgagtgacactataaaagaaatagctaaggcctgtcagactcttgaagggaaggattcgtctccaactgctgtaaaaatgttgcgcacacttcattttgaaatgacaaagctttacattctacggctttgttcatggatgcgggcaacaacaaaggagatatcaaaagatgagacttgggttactttatccacccttgagagaaacaagtcccagtatgcgatttcatgcttgcccctggagttccgtgacataacagtttcagctatggaccgaattgatactatgattcttaatctgatgagcgagactgcgaagtcatatgacatttctcaaccacttcaggaaatcaatgagtctgtcagacttgcatttttgaattcctttctggactttgctggttatctggagaggtttggaggtgaactaaccgagaacaggccaaacaatgaaaacaattatgtctcaaatggatacataaatggtactagagaaacatttgctaacacagatggagatttgcacaaaaagctgctggttgttttgagtaacattgggtattgtaaagctgaactttcagaagaactttacagcaaatatagacacatttggtctccagtcaggaataatgaggagcgaagttctgacatgcgagacctgaggacttctttctctgcacttgaagagaaagtcctggaccaatatacttttgcaaagtcaaacttgatcagaagtgctgcacaaagttatcttttggattctgggatttattggggagcagcgccaatggtaaagggcattcgagatgcaactcttgacttactgcacatccttgtagcagtacatgcagaggtatactctggcgctcggcctctgttggagaagacaatgaaaattttggttgagggtttggtcgacatctttcttagtgtttttcatgagaataagaccaaagatattagattgttggatgcgaatggtttttgtcaactgatgcttgagcttgagtattttgagactgtactgcacacgtacttctcacctgaggcgcaacaggctatgaaatctttacaagagaatttgttggaaaaggcctgtgaaagtgttgcagaagccatggaaaatcctggacaccaacgtcgaccaacccgtggcagtgaagatacagcatcggatgacagacagccatcagtatcacctgatgatttgcttgtgattgctcagcagtgcagtagtgatcttctgcaaggggagttggagaggactcgattgaacatagcctgtttcatggagtcgacccttcaaccaacagctgcgccagcaggcccaaagcctgccgcacattcttcttaccaagcacagcatgctcccgtccaaacgtcctcgcctagttttagaaggcagcagactggtacaagttcccctgtagtctccaggcggcgccggtgagcttagtgcatctttccatcattggcgtagcctcttcccggagtttccttccttttcccccctcacatgtgtgctttttttaatcacttgtaattgtcatcctgttgtcatgtgttacgaatttcgatccattcttttggtgttgtataagatgaaaaggaggagtacagtactggcgctgctgcacgggatcatggaattgtataatatcgacgagtcaaatattattgctgcttg

SEQ ID NO: 265165 - DNA, 482 bp, Zea mays
cccacgcgtccgccgcgccgccgtctctcgctcactcgctcgcgctctccatccagatcggagcgctcggttcggataggggcgactaggaggtgaaggcgggcgcgtcagccatggcggacgaggagcacccggagaggagggaggaggcctccgagcttgccccctttgatccaaccaagaagaagaagaagaagaaggttgtcatccaagagccttctgatgaagtggacaagcttgcagagaagacagaatcactagcagtcgcagaacctgctgaacttaacttcactggaatgaagaagaaaaagaagaagcaggtggatcttgattcatctattgatgaccttggagatggggaggacactcaaggtgatcaagttgtagaggaacaaggggacggtattgtgcttggaggtggccctacatatccctgggaaggaactgaccgggattataaatacgaagagctgctggacagg

SEQ ID NO: 265166 - DNA, 1187 bp, Zea mays
aagaggaccagcatgcaaacacaaccaaagatgaagtttctaaagagattgtagagggttcggatataaatctgcagaaaataacagggcctgaagaaaaatctaatgagctagaaactcaaattaccgaaccagtttgtgacagtcaggcaattttggcccatgaaaaggaaatatctgaagaaaactttccaacagcagtcgaaattcaggctgatggtccaaacatgcagatcaaccaagataagcaagatgaagctgctgacatcgaaactgaaatgaagccagaaaaattaggggaatctaattttcaggaacaccaggacaatggtactgagcaaaagtctcctaaagagactgatgaaggagaccagcaacttgtggccaagaaagagattctgacccaagaaatggatgtgcatgagacagttgaaagacctcagcaagcagttgaaagtcctcagcaaacagtgagcataacatccaatgaagaccaggaactgtttgattcaaaggtccaggaacgtgatctcaatgtagtttcacccagagaagcttctgaggctgaagaaaactttgtggacgtaaccaagccagaattcagcacagatgaagaacaaagtccaaaggctgatgcagaagagaagatttatgacgagaagataaaggacatagagggaactaagaatttaactgatgaagcagcaataaaaactgaagcaccaggagcagcccagaagacacgtaaaaaatatagcctattgtctggcgtgggatcgaaggtaaaacaccaactcgcaaaagtgaagaaagccattgtaggcaaacctgggcacacaaaaccagtatctccgacggcataaaactccagtcaccttagaacatgtacattattgtattgtttgtagtcttgtgagccatttatttcggtggtagtgtttgcgatgggctaggagaaggtcctcttcacaaccatagcattggaattctatgatgttgcacatgaaacacccccccccccctcgagagtatgttgaagatgtttgtaaatatgtctagtgtgtaaattcaagtttccctgaaactttgaggtagaatcaaggacatgtaattggtcaattgtttgtattcttcgttgaaatgcacaagcagtttgtggtcatgatgcagcttgcagcatattcttc

SEQ ID NO: 265167 - DNA, 1075 bp, Zea mays
agcacctctgttgttaccacttgcatccctattgttgaagctttgaaattttagctgtattttctttgcaaattctatttacaattaaatatcacaagcttaattgattagttttgcatgtcgggacatcttaaatcgaataagttgttgttttgttactacaatgcgaccttgatttttacaggtgagagcaagagctgcggacctcaatttgtcacctacttctgatatcaacttattggagagccgtgatatccacatacattttcctgctggtgctgtgccaaaggatggcccttctgcaggtgtgacattggtaacggcactggtgtcgctttttagtaacagaaaagtcagagcagatactgctatgactggcgagatgactctaaggggccttgtattgccagttggtggtgttaaggacaaggtacttgcggcacatcgttatggaatcaagagagtaattttacctgaaaggaacttgaaggacttatcagaggttccattaccaattctctccgacatggagattctgcttgtgaagcgcatcgaggaagtactcgaccatgctttcgaaggccgatgcccacttagatcacgctccaagttgtagcacccaagtcgcgtttggtatggatgtttgcttgagaggatcatcgtcacagtaccacgaatggtcaacagtgtgagagtaagagcctagctctcttgccagcacaggtcttggcacgcccttttcggtttggcttcgcgtctggaatgtgtatacaggattactggtcagaattctgagaataacgagaagattctctgctgggatagtgggattccctgcatatttatgtgaaaccagctgtcggtatttatgcacagatgcaacagcaacacaaatctggtaggaacactggtgggtttctgtcgataatttgagtgtatatgtaatattatgtaatctattccagggaaacatagttaaaccgaggttgtgaaagccaaagagattgagaaatatcatacgtactttagggttgggtgacttgttacaaaatgtgcatattcacatttcttcaat

SEQ ID NO: 265168 - DNA, 1456 bp, Zea mays
tcttgtacaggcgcctacgaaagatgcaacctcagcaacctggttatagtagctctcgagcctacttggaacttcttgctgaccttccttggcaaaaggtcagtgaagaaagggagcttgaccttagagttgcgaaagagagccttgaccaggatcattatggactaacaaaagttaagcaaaggattattgagtatttggctgttcgtaagcttaaacctgatgccaggggtccagtgctgtgttttgttggaccacctggtgttgggaagacatctttggcctcctccatagcaaaggccctgaacagaaaattcataagaatctctcttggtggtgtaaaggatgaagctgatattaggggccaccgaaggacatacattggaagcatgccagggagacttattgatggactaaagagggtatctgtgagcaatccagtgatgcttctagatgaaattgacaagactggttctgatgtacgtggtgatcctgcatcagcactactagaagttcttgaccctgagcagaacaaagcattcaacgatcactatttgaatgtgccgttcgacctgtcaaaagtcatatttgttgcaactgccaataggatgcaacctataccccctcctctgttagacaggatggaaatcattgagctgccaggctacacacccgaagagaagttaaaaatagccatgaaacatctcataccaagggtattggagcagcatggcttgagtacgacaaatcttcagattcctgaggctatggtcaaactggtcatcgagaggtacacgagagaagctggtgtgcgcaatcttgaacggaacctagctgcattggctcgtgcagctgctgttaaggtcgcagagcaagttaaaactcttagacttggcaaggaaatacaaccaattactacaacccttcttgattcaaggcttgctgatggtggtgaagttgaaatggaagttattcctatggagcatgatatatcaaacacttacgaaaatccatctcctatgattgttgatgaggctatgctagaaaaagtacttgggcctcctagatttgatgacagagaaactgcagatcgtgtagcaagcccaggagtctcagttggccttgtctggacttcggttggtggggaagttcagtttgtggaggctacagccatggtgggtaagggtgacttgcatttgactgggcagcttggtgatgttattaaggagtcagcgcactagctttgacatgggtgagagcaagagctgcggacctcaatttgtcacctacttctgatatcaacttattggagagccgtgatatccacatacattttcctgctggtgctgtgccaaaggatggcccttctgcacgtgtcacattggtaacggcactagtgtcgctttttagcaacagaaaagtgagagcagatactgctatgactggcgagatgact

SEQ ID NO: 265169 - DNA, 727 bp, Zea mays
  unsure (1)..(727): unsure at all n locations
gaaatggcaccctgacaagaagcaggggcagggcgaagagaattcaacctccaaatttcagggaattaacgaggcataccaaggtctgagtaatccagcaaaaaggcaagagtatgacaaaaaaggcattctatacgttcaagatcagaatgtagtggattacctgaaccggcacaaggggctaatacttacgtgcaatggtcttggtataaggtactcagtatggtgaacacgctcaagggcccacagtttgcactcatctgcagtcttggagaatctgtaatgtatgccatcaaaatttattttcatcccttgtgtgccatagaatggcatatatggatttttgtgtgtatgacaggtggggccagtggggatgaaaataatttctgatgacatacagggaagcctttgatctgaaaatggtatagtgcagcagtgccatgtttgaaagccaaagattgaccacttgagttcatcctacaaggctacaacagagttgatttttatttgtcgatcagctgttgttgaatgaaagaggcagatatgttcctgctgctccttgtatgtaacatactgttcctaaccatgcaatgtaagcgtttgtttctgtcttggcgctttgtattgacgttatgtggacctgaatgtctgtggcaaaacagagtggtaccatgctccttccccggaaacccccaaaaaaaaaaaaaaaaaaaaaaaaagggattna

SEQ ID NO: 265170 - DNA, 306 bp, Zea mays
ctgaaacaaactacctctgtcgtcaacctactaacttccatattcttcacactcagctgtgcaaaatttacttgactggctttttttggcttaaaatataactcagggagacgtgattttgggacgatcaaactgttagggattgcgcttggacattccgggcagcgtgcacccaagattgaccaagctgattcgacggtgctaggacaaagatcctgatgcgtgtctgacttctgcagagattactattgaactaccagattggctacaccatatcgaggcacccaatggatccagccgtcgttc

SEQ ID NO: 265171 - DNA, 699 bp, Zea mays
cagatctctatatctcaacaatccttcagaagttgagtttctgcaggaagtacttattctaagtggtgttaatcatgaaaatattctgcaattttatggggcatgcacaaaacatccagactattgcattgtaacagaatacatgcctggagggaatatatatgactttcttcacaagcaaaataacttcttggacctccataaaattctaagatttgctatcgatatctcaaaaggaatggattatctgcaccagaataacattatacacagagatttgaagtctgcaaatcttctgctaggccatgaccaagttgttaagatcgcagactttggtgtggcgcgacatggaagtcagcaggggcagatgactgctgaaactggaacctaccgatggatggcaccagagataattaatcataagccgtatgaccacaaagcggatgtattcagctttgccattgttctttgggagctggcaacttcaatggtcccatatgacaacatgacacccttgcaagctgcattaggagtaagacagggattgcgcttggacattccgggcagcgtgcacccaagattgaccaagctgattcgacagtgctggaacgaagatcctgatgcgcgtctgacttttgcagagattactaaagaactccaagatagtctacaccatatcgaggcacccactggagccag

SEQ ID NO: 265172 - DNA, 456 bp, Zea mays
ctcttgtttcgtttgcgtctttcttttttttttttttttttcacattagaatctggaaatgtaacttcttatttctggttggccacatacatcatccaaaaaactttattattgaattacaactaataagcaatctaaaagagggcaccaccaatgatgtgttgttggtaggaggccgctgggtttgtcaaagcaagttggacaaagggcaacaattgttgtagttgtaagagggttgcggggttagccgcaaactgctggtagaaaggcagcaactgttgctgtgtcaagaaggaagcacggcttgctgcagctagctggctaaatggtagtagtatttgctgctgcaaataagcagcggggttcagtgcggccaattggttaaatggaagaagttgttgttgctgagagtaggcagtagctagctggctgaatggtaatagttgttgctgcaaa

SEQ ID NO: 265173 - DNA, 790 bp, Zea mays
agagattataccatcctcgtcatgtttgtgtgtgttaatgctcaattttccgtgtagcacaccacaacgatgatttatacttcattactgctgatcttagagcaaaataactatcaaccacatttggagactagaagcacataagaatctagaaatgtactttcttatttctgggaagccacaaacatcagacaaaaaactttattattgaactataactcataagaaatctaaaagagggcaccaccaatgatgggttgttggtagaacgctgctgggtttgtcaaagcaagttggttgaatggcagcaattgttgcagttgtaagagggtgccagcgttaggcgcagcgtgctggtagaacggcaacaactgtggttgtatcaagaaggtagcagggctcacaccagctagctggctgaatggtagtagttgttgctgctgtaaataagcaggagagttcaatgctgccagttggttgaatggaagaaattgctgggggtaggcagcaggtagctggctgaatggtagttgttgttgttgcaaataagaagcagagttcaatgcagctagttggttgaatggaagaaactgctgttgctgagagtaggcagcaaggtttgctagcacaagttgttgtagttgttgtgccctgatgttttgtgccaataaatgcaccataggttactgctgttatagggctgatgattgttggaggaacatgggtgattaatgtaagattccagctgcattgaactgtgcttcttatttgcatactcatcatctaccat

SEQ ID NO: 265174 - DNA, 1174 bp, Zea mays
tttttgttcaacttcatcttagctatgatctttatttttttatttttctttttctttttttttttttttttttttttttttttggaaatataacttcttatttctaggaggccacatacatcagccaaaaaacttcattattgaatgacaactaataagcaatctaaaagagggcaccgccaatgatgtgttgttggtagaaggctgctgggtttgtcaaagcaagttggacaaagggcagcaactgttgcagttgtaaaagggttgcggggttagccacaaactgctggtagaacggaagcaattgttgttgtgtcaagaaggaagcggggcttgttgtagctagctggccaaatggtagtagtatttgctgctggaaataagcagaggggttcagtgcggcgaattggttaaatggaagaaattgttgctgctgagagtaggcagtagctagctggctgaatggtagtagttgttgttgctgcaaataagcagcagggttcagtgtagacagttggttgaatggaagaaattgttgttgctgagagtaggcagaaaggtttgccagagctacttggccgttgctctgctagctagcacgagttgctgcagctgatgttcccttattgttttgtaccaatgtctgcaccaaagataggtctggtgagtcttgattctttttgattctggaaatgtaacttcttatttctggttggccacatacatcatccgaaaaactttattattgaattacaactaataatcaatctaaaagagggcaccaccaatgatgtgttgttggtagaaggctgctgggtttgtcaaagcaagttggacaaagggcaacaattgttgtagttgtaagagggttgcggggttagccgcaaactgcttgtagaaaggcagcaactgttgctgtgtcaagaaggaagcacggcttgctgcagctagctggctaaatggtagtagtatttgctgctgcaaataagcagcggggttcagtccgtccaattggttaaatgtaacaagttgttgttgctgcaaataatcaccggggttcagtgcggccaattggttaaatgcaagaagttgttgttgctcacagtaggcagtagctacctggctgaatggtaatagttgttgctgcaaataagcagcgcggttcaatgtagac

SEQ ID NO: 265175 - DNA, 529 bp, Zea mays
ctagttctagatcgcgagcggccgcccatttcgtgcttttttttttttttttttttttttagaaatgtactttcttatttctgggaagccacaaacatcatccaaaaaacttcattattgaactataactcataagcaatctaaaagagggcaccaccaatgatgggttgttggtagaacgctgttgggtttgtcaaagcaagttggttgaatggcagcaattgttgcagttgtaagagggtgccagcgttaggcgcagcgtgcaggtagaacggcaacaactgttgttgtgtcaagaaggcaacagggctcacatcagctagctggctgaatggtggtagctgttgctgttgtaaataagcagcagagttcaatgctgccagttggttgaatggaagaaattgctgggggtaggcagcagctagctgactgaatggtagttgttgttgcgcataagcatcagagttcactccagacagttggttgcatgtaacgagctgctgctgctcagactaggcagccaggtttc

SEQ ID NO: 265176 - DNA, 867 bp, Zea mays
tctagatcgcgagcggccgccctttttttttttttttttagaaatgtactttcttatttctgggaagccacaaacatcagacaaaaaactttattattgaactataactcataagaaatctaaaagatgacacacctgggtacggttcatcccacgctgaagatgatgcacatggttttgttgttctcgatgatggtgttgagtccggtgaagattttgatgaaaaatcaggccacccttcagatcctgcagacagcaggagctgtgatactggcgcctcatgcaaatgttggttgaagaagcatatgacatgcttgtataaccaagcaaaggaaacaaatgctatctggtctgtggtggttgcagctgcactagttggtattgtgattttgggacgttggcacaaagataaattgcaccttaaccagcttaagtggcgctctggctcagcagtgagaggatgatcaacaagtcgtttgtgctgctctgatgaatcaattcaattcaagtcataaccaagacggtttccgcaatgttattgtgatgatgacgaaaaggggtatgttcaatgcaataatatgatgttcgactggaatttcacttgccgccctacaatgagtgcctcgtgggctctaagatgtcaaatccacttctgccatacacattatcttacagctttacttgcgacctggcacatgatttttggttcctgctacttttgctgtggtatatcatatatgttgactaaatggctgtagaacgtagcaggattgcatactgcgaagtctgttaaaaaacttggtggttctgccagagcaactcacatgcaattgtgaaaatggagaacaaggaaaatttatttggctt

SEQ ID NO: 265177 - DNA, 581 bp, Zea mays
ttggttctagatcgcgagcggccgccctttttttttttttttctaggaggccaggatacatcagccaaaaaacttcattattgaatgacaactaataagcaatctaaaagagggcaccgccaatgatgtgttgttggtagaaggctgctgggtttgtcaaagcaagttggacaaagggcagcaactgttgcagttgtaaaagggttgcggggttagccacaaactgctggtagaacggaagcaattgttgttgtgtcaagaaggaagcggggcttgttgtagctagctggccaaatggtagtagtatttgctgctggaaataagcagaggggttcagtgcggcgaattggttaaatggaagaaattgttgctgctgagagtaggcagtagctagctggctgaatggtagtagttgttgttgctgcaaataagcagcagggttcagtgtagacagttggttgaatggaagaaattgttgcaagtaggcaacagggtttgccacagctagttgagtcagagctggcacaatctgttgcaacaattgttgttgcaggtatgtaggtgcattgcccacagcgagc

SEQ ID NO: 265178 - DNA, 421 bp, Zea mays
ctttgtccaacttgctttgacagaggtcaacaattgctgtagttgtaagagggttgcggggttagccgcaaactgctggtagaaagagtgcaactgttgctgtgtcaagaaggaagcacggtttgctgcagctagctggctaaatggtagtagtatttgctgctgcaaataagcagcggggttcagtgcggctaaccccgcaaccctcttacaactacaacaattgttgccctttgtccaacttgctttgacagaccgagcggcctcctaccaacaacacatcattggtggtgccctcttttagattgcttattagttgtaattcaataataaagttttttggatgatgtatggagccaaccagaaataagaagttacattttcacattaaaatctggaaatgtaacttcttatttctgtt

SEQ ID NO: 265179 - DNA, 497 bp, Zea mays
aatatataaaaaaaaatacattttagaagaaatataaatagaataagtataataataacatgctaaaataaatcatttgatatttttgaagatataatttatctattggaaatataacttcttatttctaggaggccacatacatcagccaaaaaacttcattattgaatgacaactaataagcaatctaaaagagggcaccgccaatgatgtgttgttggtagaaggctgctgggtttgtcaaagcaagttggacaaagggcagcaactgttgcagttgtaagagggttgcggggttagccacaaactgctggtagaacggaagcaattgttgttgtgtcaagaaggaagcggggcttgttgtagctagctggccaaatggtagtagtattggccgcactgaacccctctgcttatttccagcagcaaatactactaccatttggccagctggaaataagcagaggggttccatttaaccaattggccgcactgaa

SEQ ID NO: 265180 - DNA, 388 bp, Zea mays
gtgccttcatatgcatcaattttatcttgtttgttttttatattatttatcttttgatttaaagcttgttactcccaatcttaggaaaagtaattatcgaacacccttggagaccgatatcacattagaatctggaaatgtaacttcttattcctggtcggccacatacatcatccaaaaaactttattattgaattacaactaataagcactctaaaagcgggcaccaccaatgatgtgttgttggtaggaggccgctgggtctctcaaagcaacgtgggtcacagggcaacaattgttgtagttgttattcaataataaagttttttggatgatgtatgtggccaaccagaaataagaagttacatttccagatctaatgtgatat

SEQ ID NO: 265181 - DNA, 502 bp, Zea mays
tgtttttttttgattataccatcctcgtgatgtctgtgttttataattctcaatgaatcgggtatcacactataaggatgatttatagcttgcttcccaatcttagggaaaataattatcgaacacccttgcaggccaatagcacattagaatttggaaatgtaacttcttatttctaggaggccacatacatcagccaaaaaacttcattattgaattacaactaataagcaatctaaaagatggcaccgccaatgatgtgttgttggtagaaggctgctgggtttgtcaaagcaagttggacaaagggcagcaactgttgcagtgtgaagaaaataaggaatcccatacttacattatatcttgggcctcatgccctagagggcaagccttatgatcttaaaattcatcactttccccttttttactatggccaccacagattattcttgtgccgttttctaaccgaagccctttgtaaaaaggtggaggttccccattt

SEQ ID NO: 265182 - DNA, 711 bp, Zea mays
aagaatgttgttgggtctgagagagtttagtttgatgatgaagggaaagacctcttaggtggttatgtggagatgagagatgacacacctgggtacggttcatcccacgctgaagatgattcacatggttttgttgttcacgattatcgtgttgagtccggtgaagattttgatgaaaaatcaggccacccttcagagctctgcacacagcaggagctgtgatactggcgcctcttgcaaatgttggttgaagaagcatatcacatgcccgtataaccaagcataggaaacaaatgctatctggtctgtggtggttgcagctgcactagttggtattgtgatcttgggacgttggcacaaagataaattccaccttaaccagcttaagtggtgctctggctcagcagtgagaggatgatcaacaattggcttgttgaaaactcagatgagtcaattcaactgtcaccaaaatggttttggaatattgctgtgacggtgacgaaaaggagtatgttcaatgtaataatatgttcaactagaatttcacttgccgcctacaatgagtgcctcgtgggcttctaagtcaaactcactcctgccatacacattatcaacctggcacatgatttttggttcctggcttcctgctacttgctgtggtgtatcatatatgttgactgatggcttgagaacatagtacaattgcatact

SEQ ID NO: 265183 - DNA, 399 bp, Zea mays
tcgtccacgcgttcgttctagatcgcgagcgccgccctttttttttttgaggtttttctttgtttgtttttttttttttttagaaatggactttcttatttctgggaagccaccaacattagataaaaaactttattgttgaactataactcatatgaaatctaaaagagggcaccaccaatgttgggttgttggtatgaacactgctgggtttgtcaaagcaagttggttgaatggcagcaattgttgcagttggtagagggtgccaagcgttaggcgcaacgtgctggtagaacggcaacaactgtggttgggttaagaaggtattttacttgctcccggaggctccctctttattctacaccttttatggcatttcacaaagtctgactatgtgtt

SEQ ID NO: 265184 - DNA, 1741 bp, Zea mays
cttggaagttgaacttggactggaccttaaacctcttcctcttccagacaagactagagaagatatatttcttctcttcaaactctatgaacctgaaaaggaacagctacggtatgttggtaggctctttgtaaaggcttcaggaagaccacgggacattctgccgaagctaaggatgttggcaggtttttcacaggatgatgatattgaactttatgaggaaattaagttcgaacccaatgtgatgtgtgaatacattgataacaggcttctgttccgatcttgccagcttggagacggggacataatttgttttcaaaaatcttcaaaggcagatagtgctgaccgatatcgatttcctgacgtcccatcctttttgacgtatatacgtaaccgacaggtggtccactttcgttcactggagaagcccaaggaggacgaatttttcctcgagatgtcaaacattttcacatatgatcgagtcgtggaaaaggtagctgaaaaacttggcgtggatgacccatcgaaaattcggcttacatcacataattgttattcgcagcagcctaagcctcagccaataaagtacagaggcgttgaacgtctactggacatgctgattcattataaccagacttctgatattctgtactatgaagtattggacataccacttccagaattacaagcgctgaagacattaaaagttacataccatcatgccacaaaagatgaggtgtcagttcacagtataagattgccaaaaaacagcactgttggcgatgtgctgaacgatatcaaaacaaaggttgagttatctcatcccaatgctgaactgagattacttgaggtcttttatcacaagatatacaaggtgtttgcaccaaatgaaaagattgaaaacattaatgatcagtactggacactgcgtgcggaggaggttccagatgaggagaaaaaccttggtccctttgatcgattgattcatgtatatcattttacaaaagacactcaaaaccaaacgcaagttcagaactttggagaacctttttttatggttattcgtgaggatgagaccctatcttctatcaaagaacgtatacagaaaaagcttaaggttccagatgaggatttctcaaagtggaagtttgcatacatttcactcggtcgtcctgactattttgaagattcagatactgtagcactaaaattccagagaaacatgtatggagcttgggagcagtatcttggactggaacatccggacacggctcctaggaaggcacacacggctaatcagaaccggcattcatttgagagacctgtaaaaatttataactaggcatgttagaaattgagcgatgagctgccgctcaataccaagccagggctgaagttgctggcttgaaatagagagcatgttgctcaggtttttcgatggagctgtggaactagttcagaggagactgatcgggcgactctgtttgttttgctgccccggatatataaagttgtacagagatgaccccaccagacaattgtcttcagtagataagataactttttacagtcgagtggccgacgttttagtcgatcactctgttctgcagttggtggtggtgctaggtggccttgagctgttgagggtgcttgtctttcgactctttctgtatattattgacgcggcggatgtttgtaattccaatgatacatttcttacttgctggtttccggtgctttc

SEQ ID NO: 265185 - DNA, 773 bp, Zea mays
ccctcgcgtccgcccacgcgtccggaggatttctcaaagtggaagtttgcatacatttcacttggtcgtccagactattttgaagattcagatactgtagctttaaaatttcagagaaacatgtatggagcttgggagcagtatcttggactggaacatccagacacagctcctaggaaggcacacacaattaatcagaaccggcattcatttgagagacctgtaaaaatttataactaggcatgatagaaatttgagcaatgagctgccaagcaagggctaaaattgctgtcctgaaataaagcgtgccggggcatgttgctcaggtttttcgtggagctggtgagctagttcatgagactccaagtatgatcggggcggcttctcatctttccctgcttttccccggatacatataaagttgtgcagagatgaccccaccgaacaattgtctttagtagataagccagtacttcccgttagatgactttatacagtcgaatagccggcattttagtcgatctttccgttctccagttgctgttggtgctaggaggccttgagctgttgagggtacttgccctgctgtatattatgacgtagagtgtacaagtctttgttgttgacaattacacggtgttttgtaatttcagtgatacacttccaggtccttcagtacgtacttgcctggatggtgtcaatttggcattctatgttagatattgatccatctgttctaaattaaaattataagccagtttgacctttttaag

SEQ ID NO: 265186 - DNA, 472 bp, Zea mays
  unsure (1)..(472): unsure at all n locations
ggatacccgggccgacccactcgtccgcccggacgtccgagcattttaacttcatcttttttcttcggcatttaaccttatggagggaaacatgtatggagcttgggagcagtatcttggactggaacatccggacacggctcctaggaaggcacacacggctaatcagaaccggcattcatttgagagacctgtaaaaatttataactaggcatgttagaaatcgagcgatgagctgccgctcaataccaagccagggctgaagtcgctggcttgaaatagagagcatgttgctcaggtttttcgatggagctgtggaactagttcagaggagactgatcgggcgacttgtcatctttcctgtttgttttgctgccccggatatataaagttgtacagagatgaccccaccagacaattgtctttagtagataagataactntttacagtcgagtggccgacgttttagtc

SEQ ID NO: 265187 - DNA, 427 bp, Zea mays
ctcgccacgaacaaacgtgacgcatctggagctccgagcctccgatggactcttcctctccatccccatcgccagcgcccagtggatcccgtgccgcctccaatgccacccagcggtggagcatccttcgccgcgcgctgcttgctcgttcctcctccgcgcgcgccctagggggaatttctagtgaccaccagattaaagatggtaccaataacatttcaagaaaggcttcacgtggttttaaaccggaccgaatgccactccttgccaatttcacagctactgaaatcacttgggaattcattaaacgaaaatgattttgaatgccagaaggatgtttatgtatgttataagctgccttgtagaggttcctctaaacttgatctggtatgtagaaaagaggattcccttgaactaaatgacattg

SEQ ID NO: 265188 - DNA, 438 bp, Zea mays
aagctggaacgcctgcacgtcccgatgcgcacagttcccgaatcgaccgacgcgccctttcaaacttgggaattaccattcatccgtggccgctgttgtaaataatgatacttctgctcaagaggatgaacaacacactattcgaagtatacttgatcagggcaagacagcaactacaataggaaaagtgaataatgataacctgagcaggcttctcacagagtacttggcaatggataatatgcttgctcttgtttgcaagacttacgatggtgttaagggtcttgagacatatgacaaggatgacatcattgataagactagtggcattcatggacttggtcgctctgttggaaaatttgcagatggaagattcatagacttttgtcttgaaaacttgaggccattttctagtgatgttatcattgacgatccaca

SEQ ID NO: 265189 - DNA, 827 bp, Zea mays
cggaattcccgggtcgacccacgcgttcgcccacgcgtccgatagaccacagccagtcagccacatcactagctatctgtgcagaggcaatggcgtccaaggttgagctggtggtggaggtcaagtccccggctgacaagctgtgggcggcgctgcgtgactcgacggagctgttccccaagatcttccccgagcagtacaagagcatcgagaccgtcgagggcgacggcaagtcggccggcaccgtccgcctcctcaagtacaccgaggcggtgccgatgctgacgttcgccaaggagaagcttgagacggcggacgacgagaacaaggtggtgtcgtacagcgtggtggacggcgagctggcggacttctacaagaacttcaagatcacgctgaaggtgactccggccaaggcggagggcgagggcggcgccgtcgtcagctgggccatggagttcgacaaggccaacgaccaggtgcctgacccggacgtcatcaaggagaccgccaccaagacgttccacgacctcgacgactacctcctcaagaactagatggagcgacaactggagatggtccagtacagtacagttccagtccattcatcgacgcgtcacagtttactagtgcacgtcgctggtgtggtgtggtgcccgtgctggttccttaatttgcttgctagctagctacgtaccgcggtccgtgtccttgtctctggctgatgtttgctgcctgcgtccgtcgtgcatccgacgacgtgtcgttgcgttgcgcactggtcctccgagtcaataaagctctcgtgttcatgcgcatcgcttcgaacc

SEQ ID NO: 265190 - DNA, 1346 bp, Zea mays
gccacgcgttcgaccacgcttccgataattatattcactggctaaccatacacaataaagggagaagtttaacattcgacataatgttgctgaacttaatggagtatatatggaatgttcctaagtcaccgaaacgcatggagacaaatagctaaagaggtggagaagggtgtatacttaaattttcttaactttctcataaatgatagcatctatcttcttgacgagagtttgaacaaaattcttgaactgaaagaaatagaggctgaaatgactaacactgttgagtgggagcgcagacctgctcaagaaagagaggagcggctccgtgtatttcatcagtgggaaaatattgttcgatttgacatgaggctagccaatgaggatgttgggatgcttgcattcacctctgaacaaattccagcacctttccttctccctgaaatggtggaaagggttgcgagcatgcttaattacttcctcttgcaacttgctggtccccagaggaaatctttgactgtaaaggatccggagaagtacgagttcaagccgaagcagcttttgaaacagattgccaccatctatgtccatatctcaaggggcgacaaggaatctgtcttctcagctgcaatctcgaaagatggcagagcatacaatgatcagttgttttctagtgcagctaatattctgtggaagattgggggtgatcccaaaatcatacaggagtttgtgcaacttgctggtagggcaaaagctgctgcttctgaagctatggatgctgaggcaatccttggggacataccagatgaattcctcgatccaattcagtatactctaatgaaagatcctgtgacactgccatcgtcaaaggtcacagtggaccggcccgtaattatcaggcatctgctgagtgattctacagatccatttaaccgctcccacctcactcaagacatgctgataccaaacacggagctcaagttgcagatcgaggagtttgtccggtcccagcagtcgagaaagcgaactgctgcggcgttgttggagattggcgaagcggagggtactgatgatatggccgaatgaattgtgccaggagcaggggatggacacattttcttttgtggtggggaaagacggatggttaattcacatgaaatgtatcggtccatctgtccgtataaagttggtttcccggcttgtgtcacctgttgcctccattctttgtaaatattgtaggtgcacacctgatacaaatgtagttatagaggaagcctgtcagcccgtctcatcaacaatgtgttttacgatatccccactacaactatttttaacccgatattatc

SEQ ID NO: 265191 - DNA, 698 bp, Zea mays
gattgttaccatctatgtccatatctcaaggggcgacaaggaatctgtcttctcagctgcaatctcgaaagatggcagagcatacaatgatcagattgggggtgatcccaaaatcatacaggagtttgtgcaacttgctggtagggcaaaagctgctgcttctgaagctatggatgctgaggcaatccttggggacataccagatgaattcctcgatccaattcagtatactctaatgaaagatcctgtgacactgccatcgtcaaaggtcacagtagaccggcccgtaattatcaggcatctgctgagtgattctacagatccatttaaccgctcccacctcactcaagacatgcggataccaaacacggagctcaagttgcagatcgaggagtttgtccggtcccagcagtcgagaaagcgaactgctgcggtgtcagagattggccaagcggatggtgctgatgatatggccgaatgaattgtgcgagcagcagggatggacattttcttttgtggtggggaaagacggatgctaatttacgcgaaatttaccagttcatcggtccgtataaaatcggtttgccagcttgtgtcaccatttgtctccattctttgtaaatgttgtaagtgcacggttgtaattttaagtccctgtttgtttacctttgaaaaaaagtattctaaaaaaaaggtca

SEQ ID NO: 265192 - DNA, 1816 bp, Zea mays
tcggacggccagccctacgagttcatattccgtttctggttgtccgtccatggccgcgtcgctgcttcgccgtggcgtcgtcaccagccgccggcgatgcccggtggagatgctgcggcggctggtctcgtccgaggcggcggctgaccgggcaccgtcgcggccgccgccggagatgccgccgttcgaccaccggccccgcccgtatgccgggctgggtggcgccgagatcttcgagaagaggaaggcggtgctcggcccgtctctcttccattactaccagaagccgctcaacattgtggaggggaagatgcagtacctgtatgacgagcatggaaagagatatctcgattgctttgggggcatcgtgacagtgtcgtgtggccactgccatccggatattgtgaatgctgtggtggagcagaccaagttgctccagcacacaaccaccatttacttgcaccacactattgtagagtttgcagaggcactcacctccaaaatgcctggcaatctcaaggttgcgtattttgtgaattctgggaccgaagcgaatgagttggcaatgttgatggcccggctgtatagtgggaatctcagtatggttgcgctcagaaatgcatatcatggcggaagtgccggtacgattggattgactggtttgcagacgtggaaatacccaattcctcagggtgaaatacatcatgtcatgaaccctgatccttatcgggggactttcgggtctgatgctgcagcttatgctaaggaagtcgaagaacacataacttatggaagttcaggaagggttgcaggcttcattgcagaaacattccaaggtgtgggaggtgctgttgaactagctcctggatacctaaagttagcttatgacattgtgcgcaaggctggtggcgtttgtattgctgatgaagtccagagtggttttggccgtactggcagtcattactggggattccagacacaaggtgtcattcctgacatagtcaccatggcaaagggaattggcaatggcctaccattgggggcagttgtgacaactcctgagattgcaagtgtgttagctcaaaaaatccaatttaacacatttggtggaaatccagtttgttctgctggtgggttagctgtgcttaaggttcttgacaaggagaaacgccaggcacattgtgctgatgttggatctcacttgttggagcgtctaaaatcgcttcaggagaagcacgaaatcataggtgatgttagaggaaggggactgatgcttggggtggaactcgttacggacagaaaggagaagacccctgccaagtcagaaaccattgaactgtttgagaagctcagagatctcggggtactagttggaaagggcggtctgcatggtaacgtcttcagaataaaaccaccgatgtgcttttcgaaggacgatgcagacttcttggtggactccatggactacgcaatgtcaaggctctgaaggaacatgctctgagttgacaatgtgtctgcgtggaaacaacacttcctgcaaccgcaagatgcatggcctgaaatgaaactgaaaggcagatgatttaatgggcatgctccccgggtggtatgttggtggtgttatggtgaagtttaatagtccccctcccccgaataaattgatgaaaggggacagaacgtcttgcccagcttgtgagctgtttgtagaagaactgcagttaataaatagaatagcgagcaagcaagcgtgatatctctcaaaaaaaaaaaaaaaaaaaaaaaaaaaaaaaaaaaagggcggccgctcgcgatctag

SEQ ID NO: 265193 - DNA, 567 bp, Zea mays
cccacgcgtccgcccacgcgtccgcggacgcagggcctccgtctcaggtctcaagtctcaactcttgagcaggggaaacgagagatccttggagtcagcaatggagtctaccgcgctaatgaccgcgagactaccactgctgacctctggctcccgttccaaacccctcccctttgcttccttcaccacggcggcttgccgtctcgcctccgccccctgctccggcagcggcagcgtcgtcctgctgtcgcgccggagccgcgattatgctggcgttggttccttggtctccgccgcggcggctcctggggatacggcggacgccggatccgagtccatcctgctcagcgtccaggggatgatgtgcgacgggtgcgccgcgagcgtgaagcggatcctggagagccaacccgaggttacttctgctaccgttgattttaaggaagcaagcgcagtcgtgtggacaacagatgacgccaaggggacacaaggttggcagaagcagtatggagagaagcttgctaaacaccttggcacttgcggatttgagtctcgccacaaggtaaa

SEQ ID NO: 265194 - DNA, 1109 bp, Zea mays
cggtacgcgtgggagctaccggcctgagctcccccgaccccgagtcccgaggccgacgccattcctgattcctccatcttccgttccgccgcaccgccgccggagatatgtcgaggctcgctgctgccgccctccgctgcgtcgtcactgcatcgagagatacctcctcatctcgcttcgccgtgtctgcgccggtgtctgctcggctcttctccgcggatgcatccggtgaagccgccgccacggccgcagagtcgcaggatgactctttcttcaaggcatcccgcgaaggattagcctatggaaggttttacagtgtcattggtggaggcagtcgtcttgagaagaacatattgaaaactgatattatccatcaccttgacagatgtggattgtcattggatgatgtgaagattgaatacaacaagggatatgctccattggccgctttgttgaggttttcttcgaaggcaatgtttaccaccgcaattaggcaagcaaatcagaatcgtctgcacaggattgatgagataagtcgtgaaacatgggatctcaaaaagtccttcgatgggaaagcggtattactgcaaggagtcccacgaaatgccctcgcagacgacatagagcggtttttgtgtggcacgaactttgaacctccaccgtttgaaacctttctaagagctggtgtcccagagcccataagaatgatgctggttaagttccacacgaagactgatgcgatgaatgccttcatcaccaaaaacaggagtttctgtctgaacagtcaagttagcatgcgtgttctccagtaactgagtagccagtcgaatctcgtgatgtttgccccggctttgtcaaacaaaaagccttttaagtccgatctgaggtctatccagtatccacaaatgttgccgtattgtgtggttgtgcaggttatattggactggcagcctgctttaggttttgattcctactagtttgtggtttcagctgtactgcaccgcttttatttcatgagtactctggaaaatgtaccaccattccgctttacaatgaaataattaacggcccaaaaaaaaaaaaaaaaaaaaaaaaaaaaaatttataaa

SEQ ID NO: 265195 - DNA, 868 bp, Zea mays
tgtggaacccttgtcaggtggtgttcatggtggacgacacgcccatccgggtgtacgagaacgccacgctgcaccaaggccacggccacggccaccaccggcacggcggcgcggcggcggaggccaacggcaccaacaccaccaccaccacgctggctgctgccccggcgccgttccccgggccgcagccgatggccgtgtacagctccatctggaacgcggacgactgggcgacgcagggcgggcgcgtgaagacggactggtcgcacgcgccgttcgaggccacgttccgggaggtgcgcgtggacgggtgcgcctgggcgggcaacgccacggacggcgacgccgcggaggcgcgccggtgcagcgagtcctcgtggggcaaggagggccgctactggtggaaggagaaggagatgtcggagctgagcgtgcaccagagccaccagctcgtgtgggcgcgcgcgcaccacctcgtctacgactactgcgtcgacaccgaccgcttccccgtgcagccgcccgagtgcgccggccgctgagctcctgaccgacctacgtcgatccgtgcatggcatggcaatggatctcgtcgggcggggtggaaatggaactgcttgtttctctcgctggaccgtgggggtttgtgttcgtgcgtctgcagcaatggtgtctgtctgtctgtagctctgtttccgcttattgaaggtcgcattgttggcgacccatgcgtgggtgaaccggcggtggtgtctcttgtagaaacaagtgaatgggagggattatgggaacgaagaacgatgctgcgctccgtttcagagatttgctaaaaaaaaaaaaaaaaaggaaaaagagaaaaaaaaaagga

SEQ ID NO: 265196 - DNA, 339 bp, Zea mays
  unsure (1)..(339): unsure at all n locations
cggacgcgtgggcggacgcgtgggcgctactggtggaaggagaaggagatgtcggggctgggcgtgcaccagagccaccagctcgtgtgggcgcgcgcccaccacctcgtctacgactactgcgtcgacaccgaccgcttccccgtgcagccgcccgagtgcgccggccgctgagctcctgagtcctgaccgaccgacctccatcggcgcggcgcggcgctgctccatgggtggtgggtggtacgtactagtcttgacaatggatggcatggcaatggatggcgtcnggtggggtggaaatggaactgcttgtttctgtttcagcaatggtgtctgtct

SEQ ID NO: 265197 - DNA, 1455 bp, Zea mays
gaatttatttcccgcacccaccggtgctcccgccgcccgagtcgccgtggccgccgcggcagcgccctcccggccgtgagcgcggcccagcgcgcgcgccgcggccaccgccgccctcgaggcgcccagatctgggccctagcgcccccctccctcctataggcctttccccgctgcatcgtcatggcgcggctactgctgaggtggacagcgctgctcctcccatccctcctcgccggcgttggtcccgccgccgacggcgccgcgtccccgccccacgatgcgtgcctggtgcctaccatcgcgcaatccgtccttaggaactcccgacacgtgctcgacgctggatcgccgccttggcgacccggtcggcgtcatggagggggatgagttcaccttagcaacggcagttaatcttcttcatgcaaacaaggatgactatattgctgtactattctatgcctcgtggtgcccattctcacaggaatgcaaaccgaatttcgagacactggcttccttattcccagctatccggcattttgcatttgaggaatctgcaattaggccaagcataatttcgagatacggcatccatggtttcccaacactctttctcttgaactcgaccatgagagtacgatatcatggaccaaggactgttaaatcacttgcagctttctacactgatgtctcaggtatcaatgcatcggtgaagtcaactgcaggggaggccatggtacatcccttggatgatattgagcataaaaaggacgctgaacaggaaaattgcccattctggtgggctcggtcaccagagaatatacttcagcaggatacttatctagcattggcgaccgtatttgtaattttgaggttgctgtatcgtatttttccaaagatagattcctttaccagatgggcatggaggaggcacaatatgtttgcaaaattgatgggagcacatgaatatttcctcacctaccttgagcaagcaagacagaagtttcataggctatacccttcaagttcaaagcgaggaaatctgcaggagggcgcaatgaacgctaccgcttgggcttccaaatcattagcatcagtttcaattggagaaccaagtgcaattggaaggacaaactctacaagtgagctaagatgaaatctgatcttttttgtccccagggattatatgtacagtacagtagagcgatcaggatatgaacacccagaaactgttgtaacggctatattactctttgtatcctccttagcataaatacgtccatgatttggctccttattttctgttgttgttacagcccaattctttggaggaataaagtttctggtgtattgacaggtgtctttctgaaatagggagcatatcagatgcccacgtgtctttcgtgtacatggggctggtgcatatattgaatcaagcaacttaatatggtattc

SEQ ID NO: 265198 - DNA, 486 bp, Zea mays
cccgcacccacccgggcccgagtagccgtggccgccgcggcaggccggcagcgccctcccggcggtgagcgcagcccggcgcgcgcgtcgcggccaccgccgcgctcgaagcgcccagatctagggcctagcggcccccctcctccatggcgcggcgactgccgttgtggacagcgctgctcctccccttcctcctcaccggcgttggtaccgccgccgccgcatccccgccccacgatgagtgcccggtgcctactatcgtggaatccgttcttggtactcgagacacgtgctcgacgctggatcttggcaacccggtcggcgtcgtggagggggatgagttcaccttagcaacggcagttaatcttcttcatgcaaacaaggatgactatattgctgtacttttctatgcctcgtggtgcccattctcacaagaatgctaaccaaatttcgagacactggcctgcttattccaaccattagaca

SEQ ID NO: 265199 - DNA, 438 bp, Zea mays
cataatctgtttgcaaacttgatgggggcacatgaatatttcctcacctaccttgagcaaggaagacagaagtttcatcggctatacccttcaagttcgaagcgaggaaatctgcaggagggggcaatgaacgctaccgcttgggcctccaaatcattagcatctgtttcgattggagaaccaagtgcgattggaaggacaaactctaccagtgagcttagatgaagtgtaaccctttttttctccccagagatatatgtacagtacagtagagcgatcttatggacccccagaatctgttgtaacggctgtatttctctttggatccccccccccttagaataagtatatccatggttttgcccctttttttgttgttacatcccaattcttcggagaagtaaagtttctggtgtattgagtagtgtcttgtgttct

SEQ ID NO: 265200 - DNA, 729 bp, Zea mays
ccctctcttccgagaaagtctggggtcacttcctacagaaaataaggtggatgacaatcccacctttgttgaacaagaaaaacatgaagttaaatgctctgaagaaacacaggaaatggtcgaagaacaaagtgatgatcagctgcacacagaaagatcaattgaaattgatgaggatatcaaaaagaacactcgtgctttagaaataccagcataccaagacaatccccaggatggaatttctggtgaattgcagacagaagaagcagctggtgcttctacaaaaacggtaactagagatattgatatttcgagtgttgtgctggacaacagaacagttggtactgtgtgtcaggaaaaaatggaggtatcaacaaaaaatgaaaatggaagcttgaggagcagcctgaatgactcaacaaacacaatggctccccaagacgatactctaggagaaggacaatcaaggctcgtgctttgaacctttacctgaagacaaaagtgttgatgtactttctgagcaagcaacctttgttgacagaatcaggaatgactgacgcgaatgacttatctagcgatactacaagtgctcaaaaccctgtgtctacaaaacccactgaatctgccagagttgaggccacatattctactgatattcaactggagaatgaagaagtagataagaaagaagaggaccagcatgcaaacacaaccaaagatgaagtttct

SEQ ID NO: 265201 - DNA, 510 bp, Zea mays
gaggaagtgggattggcatatgttgcaggttggctagggattgccgccccagctggctggttatatattaggctgtcgccgccaaagaaaggcctgcttcttcacctcgctccagcttcatatatgttttgagcgtgtacagtgcatgtggtttcagaaatggggacgctggcgtgcccatggagatctggccacctctttgctttcatcaccttcgccgtgctgttcttctcgacttcatttgccgggagacagtacagtttcttgatggatcaagatgccctacgtcaacaagaaggagagggagcacgaactgagcagaaggaagcgctagtgccactggtgcaagctcggcggctcagcgtcaagacgaacgattacagcagctatgacccttccccgtccatggacaagccacactccaagctcataccgaactgatcaatcatgtacgcgtccaggttgcagcagcggagttgccgatgaggaattaacagcttaaatgtgtgc

SEQ ID NO: 265202 - DNA, 1948 bp, Zea mays
ttctcacgcgtccgtatcaagggacttgtcgacgagttccgcgttcctgagagggagaacacaaaggcactagagtttgttccatcatggcggttcgccaatgggatgttcgcaattgtcttgtcgtttggccttttactcactgccctcaggagcaggaaggcacgatcatggcgctatgggacaggttggctgcgtggcttcatcgctgactatggggttccactgatggtgctagtgtggactggagtgtcttacataccttatggaaatgtaccaaaaggaattccgcggcgcctttttagccctaatccatggtcccctggcgcatacgacaattggacagtcgtcaaggacatgacacaggttccactcctctatatccttggtgcattcataccagcaacgatgatcgctgttctctactacttcgatcacagcgttgcgtctcagcttgctcagcagaaagagttcaacttgaggaagcctccatccttccactacgatttgcttctcttaggcttcctgacgttaatgtgtggccttattggtatccctccatcaaatggtgtcattccacaatcacccatgcatacgaagagtttggctactctcaagcaccagatccttcgtaaccggctagtagccaccgcacggaagggcatgagccagaatgcaagcctgagccaactgtatggcagcatgcaggatgcttatcagcagatgcagacaccactggtttatcagcaacagtctgtcagaagaggcttaaatgagctcaaggactcaacagtccagctagcttcgagtatgggtaacattgatgcaccagttgatgagacagtctttgacatagagaaagaaattgatgatctgctgcccatcgaggtcaaggagcagcgtttgagcaaccttctacaggcttcgatggtggtgggctgtgtcgctgctatgcccctgctcaagaagatccctacgtctgtcctctggggctattttgccttcatggccattgagagcttgcctggtaaccagttttgggagaggatcttgctcctcttcactgctcccagcagaagatacaaggtgcttgaagagtaccacacgacgttcgtcgagacagtgccattcaagacaatagccatgttcacagtgttccagacagcttacctgttggtctgctttggaatcacatggattccaatagccggagttcttttccctctcatgatcatgctcctggttccagtcaggcagtacatcctccctaagctcttcaaaggtgcacatctaactgacctggatgcagctgaatacgaggaatcaccagctataccattcagccttgctgcgcaagacatcgatgtcgcattgggacgcagccagagtgcagaaatcctagacgacatggtcacgagaagccggggtgagatcaaacgcctgaacagcccgaagatcaccagctcaggtggcacgcctgtggcagaactgaaaggcatccgcagcccatccatttctgaaaaagcatacagccctcgtctcactgagctccagcatgagcgcagccctctgggagggagaagcaggcctaggacgccatccaagttgggtgaaggctcggcaccaaagtgaataaagcaatgatgcattgcttaagctatgcaactactgggttactggccatcaattatataagtgattttaaagtggtttcggtgttagtatccaagatgtcctctgatgagattactactattcatgtgtatctctagcctctttttctttctttctttctttctttcttttcttttgtgttctcctgattaaaggagtgctatacctgtaatctctgaactagcagaaatattagagtaactactcgaaaaatcctgtcgctaacaaattatcattctttaattgttccaacatggacataaaattgcccccc

SEQ ID NO: 265203 - DNA, 286 bp, Zea mays
cccacgcgtccgcccacgcgtccgcccacgcgtcccgatgagttccgcattcctgagagggaagaccgaaaggcgctagagtttgttccatcatggcggtttgccaacggaatgtttgcaattgtgttgtcgtttggccttttactcactgccctgaggagcaggaaggcacggtcatggcgctatggagcaggttggctgcgtggcttcatcgctgactatggtgttccactgatggtgctagtttggactggagtgtcttacataccatatggaaatgtaccaa

SEQ ID NO: 265204 - DNA, 1069 bp, Zea mays
gcgataaaatccgccgcggccgcctccactccacctcgacgcgcgcttctccaaatccccccttcgccttgcgagggggcggaggggaggtggtagtggtagggtatacaggagtgctctgcccatggagaaggcggggcaacaacgccatgttatcggcggcggcggcaagaaggcgcccgcgctggggctgcagaagcagaactcgtggtcgccggacatcgagcgcgacgaggcgtgggagcgccggcgcaggggcatgcgccgcgggggcacggcgctgcgccgcgcccgcagcgtcacggacgacgacctcgacgagctccgcggctgcatcgacctgggcttcggcttcgagccggcgcacgccgccgcgtgcgctgcgcctgcgcctgcgccgggaggaaccgcctcctggagacgctgcccgcgctcgacctctactacgccgtccacggcggggcggcggaggcgccgccgtgctcgtgcggcgccgcgtcggaggcgtcctcgtccgaggagtcgccgctcggcagccccatgtccatactctctccaggcgacacgccggagacggtgaagatgcggctgaagcagtgggcgcaggtggttgcgctgtccatgctgagccgccactgagctctccgggccacggccgccgctaccttgtcgcattgggaggagagagaaaaaaccattcgagatgcacacaacagcagaaggaaggaatctccggcggtcgcctcaagcagaaaaaagaggaagagaaaaaaaatctgttagggtttggtcatttggtgggccgccgccgccttccaccttgctcgtcctatcttggactgctagctaatcatctttcttccaccatgattgtatgattccgttggagacaaaacatcatgcctaattactttgcttgcttattaatcctcttgcttcccccctaatccatattagtttctcatcttcgtgtatgtacatgattcctttcaagaggcagattaatttccatcatctcagaggaaaaaacagaaaaaaaaaacaataaaaaaaaacctattttgacact

SEQ ID NO: 265205 - DNA, 1690 bp, Zea mays
cccacgcgtccgcccacgcgtccgctctcttcttctcttgcgaagtcgccaaggccagtccccaatccccatccagccagaccgccggcgatgacggaccaccgcgacgtgatgttgcccttgtccctccaatacatagccacccgtgccctcctcctgctcgtcatcgcgtccgccgtttcctgctcttccttgccgccggaggacggcatccgggtcgtctctgcagagaaaagaatcgacctcacgggtcccatcgtcaaagtcttcctaacattgaaggttgagaatgctcccacggcctctgaagcatcacgagttctcctcgccttcacgcccacagagtttcaacatctctctattgtcaaggccacaagagcggaggggaagcgcaagaagaaggcattcgtacccctctcggtccaagcctctgagctcgccaccaccgctcccgacgcccctcgcctctactctgttctgctcagcactcctctgaaaccgggcgatgcaaccactctagaagtgctatacatgctcactcactctttagagcccttccccgctgagattagccagtcagagtcccagttggtttactaccgtgacagtgcggtgcttctctcgccctaccatgtcctggagcaggttacctacatcaaaatgccaagcaataggatcgaatccttcacaagggtcgatcctaccacacgagctggttctgaagtgaaatatggcacatacagtaaccagatgccaaactcctatttgccagttcttgtgcattatgagaataaccgcccatttgctgttgttgaggagcttgtacgcaaggtggagatttctcactggggaaacatccaaatcaccgagcagtataaactgaaacacggtggtgctcgtcacaaaggagtcttttccaggcttgagtatcaatctaggccatctatcagtggagcttcgccctttaagaatcttcttgcaaggctgccacctcgggttcattcagcttactatcgtgatgagattggtaacatcttctcatcccatctgcgcactgattcacacaagtccgatctagaaattgagcccagatatccgttatttggtgggtggcactgcacgttcaccattggctatggtcttcccttgcaagattttgtctttgagtcagctgatggccggcgctacatcaaccttacttttgggtgccctctattggatactgtggttgacgatcttacagttaaagttgtgcttcctgaaggatcaaaaaatccagagcatgtagttccttttgtgacagagaaacatcttgagactagttattcataccttgacgttgttggaaggacgacggttgtactgaagaagaaaaatgttgtaggggagcacaacgttcctttccaggtgtactatgaattcaatccgatcttcatgctggcggaaccattgatgctgatatctgcagtgttgctgtttttcgttgccttcattgcgtatcttcacatggatctttccatcagaaaatcatcataggcctgttggcaattctgtccaccacagtattttttgaggcacatgttctgctaactgtgattgatgaagtaacaatccttgttctagcgcactagttgaactgtttatcagtgcaccatcctcaatggagaaggacgatgttttttttttttgt

SEQ ID NO: 265206 - DNA, 1279 bp, Zea mays
agcaagtgtgtggctatagaggaggacatgtacctgaagcccctcaaccttggccttattgcttcatactactatattagctacacaactattgagcgttttagttctatgctgacccagaagactaaggtgaaaggactcctagagattctagcatctgcctcagaatatgcagagcttccgggtcgtcctggtgaggaagaattcattgagaggcttgttcgtcaccagaggttctctatcgagaaacccaagtatggggatccacatgtgaaggccaatgctctgctgcaagcccatttttcaaggcacacagtggtcggaaatctggcagctgatcagcgcgagattctcctttctgctcataggttgctccaggcaatggttgatgttatatccagcaatggttggcttagtcttgctcttagtacaatggagctgagtcaaatggtgacacaaggcatgtgggatcgggattctgtgctgcttcaagttccacacttcacaaaagacttggctcggaggtgccaggaaaatgaagggaagcccatcgagagtatctttgatctagctgagatggctgtcgatgagatgcgggatctcttacaactatcgaactctcagctgcaagacatcattgaattcatcaagcggttccccaatgttgatatgacctatgaggtccgtgagggtgatgatataagcgctggtgacaatgtaacagtgcaggtaactctggagcgtgacatgactaacgtttcatctgaggttggtccagtccatgcgccaaggtttcccaagcctaaggaagaaggctggtggctggtgattggggacagctccacaaaccagttactggcaatcaaaagagtggcactccagaagagggcgagagtgaaacttgagttctctgctccggcagaggctgggagaaaggactacatgatttacttgatgtcagactcttacttgggctgcgatcaggagtatgaattcaccgttgatgtcaaggatgctggaggggattgatgatgaagactgtgacactatgtcgcatagaagtagaattgagtgtgtactgtaacgcgatattggaacattctgtgttgtaacctcgaacatgtggaagctgtaacttattttgcatgttgaccggtgcactttgggcgttgctgtgttatcctattctagtattgttgtaaggattgcgctcggttacacttgagccacagtattttggatcaacttgttgcttctataaaaaaaaaaaaaagaacaa

SEQ ID NO: 265207 - DNA, 391 bp, Zea mays
tcaaaagagtggcactccagaaagggcgagagtgaaacttgagttctctgctccggcagaggctgggagaaaggactacatgatttacttgatgtcagactcttacttgggctgcgatcaggagtatgaattcaccgttgatgtcaaggatgctggaggggattgatgatgaagactgtgacactatgtcgcatagaagtagaattgagtgtgtactgtaacgcgatattggaacattctgtgttgtaacctcgaacatgtggaagctgtaacaccaacgtatgtgttattgtactttgggcgttgctgtgttatcctattctagtattattgtaaggattacgctcggttacacttgagccccagtattttggatcaacttgttgcttct

SEQ ID NO: 265208 - DNA, 875 bp, Zea mays
tctccttcttctattcatttcgccgagaggcgagagaactgcttcgcacctacgttactgctgaagatccagccggcacaccatcggcgaagaagaggccggagagaggatgatactggccgtgctcttcgccaactccgatggaaacatccttgtcgagcgattccatggggttcccgcggaggagaggctccactggcgctccttcctggtgaagctcggatccgagaacctcaaagggtccaagaacgaggagctccacgttgcctcccacaagtctgtgtctattgtttataccacggtcggggatgtctgcctctacattgttggcaaggatgaatatgatgagcttgctttggctgaggtgatctttgcaattacatcagcagtcaaggatgtttgtgcgaaacctcctaccgagcgcctcttccttgacaaatacgggaggatctgcttgtgccttgatgagattgtttggaaggggttgcttgaaaacacggagaaagacagagtgaggaggttgattagactaaagccccctgtggagccataatttgcatgtaaagcttatgttggcgttgctgtaatccagatccaatcccatttgcatttgtaggcaaattttcagagttttcatctgcacattgtatctacagaattatcatcacttattggaggattgcgtgtgtgacatcaaaaacaatgtatcatctgtgtatttgctatgttgataagtgtgttactgcgttgtattttatgctactgtggcaagctcccatgtatgcataccacttttatagctgatatgggccttttaaaaaaaaatagatgattttattttgagaaaaaaaaaaaatcaattaaaactatattat

SEQ ID NO: 265209 - DNA, 1035 bp, Zea mays
  unsure (1)..(1035): unsure at all n locations
ngtcactcgtccgcccacgcgtccgcggacgcgtgggttgtcggcccgcaccctcggcgacagcggggttgggaagacgtctttgatgaaccaatatgtgaacaagaagttcagcaaccagtacaaggctacgattggggcggatttcctcaccaaggaggtgcagttcgaggacaggctcttcactctgcaaatatgggacactgctggccaggaaaggtttcagagtctcggcgttgcattctaccggggagcagattgttgtgtcctagtctatgatgttaattctatgaaatcatttgacaacctgaacaactggcgagaagagtttctaattcaggctagcccatcagatcctgataatttcccttttgttctgttgggtaacaaagttgatgtagatggtggcaacagccgcgtggtatctgagaaaaaggcaaaggcatggtgtgcttccaaagggaacatcccgtactttgagacgtctgctaaggacggaacgaacgtggaagacgccttccagtgtatcgtgaagaatgctctgaagaatgagccagaggaagaactgtatgtgccagataccgtggacgtggtgggtggcaaccgggcccagagatcatctgggtgctgttaaggcacgaggcatcacgaggcgttgtgaccatcatcgtcggttatgcagtgaccaaacaataccttagcattgctgggtctccgtggttatctacgtatccgtattccatttgttacctttccagtctcactgctatgtacccaagggcgcctgtcaattcggtggactttgtgcagtttcatcagtagcgtcataccttgtgaatacaattggccaaaataagaggaagtgtaaactaaagttcatgctttatggttttgtgttgtattaactcgtccgccttttcctcgctttctgcttcagtgcaaacatgttaatgccatcccttaggctattcattaagaatagttttatcacattgtttctaaggctattatctaaacatttgtcttgtctagaaa

SEQ ID NO: 265210 - DNA, 576 bp, Zea mays
cgctgtggccgccacctgatgacaggcgcccaccactaccaggccaccacaaaacgcaacgcatcgcgacggctccccaaccccaacaagtctctcggccaggtctccctctccccggctctccgccttcctcttccagtccccgcgcgcgagatcgccgccccgtgtgggccctagatcccgatggcctcgcgccgccgcaccctgctcaaggtcatcatcctcggcgatagtggggttgggaagacttccttgatgaaccaatatgtgaacaagaagttcagcaatcagtacaaggctacgatcggcgcggatttcctcaccaaggaggtgcagttcgaggacaggctcttcactctgcaaatatgggacactgctggccaggaaaggtttcagagtctcggcgttgcattctaccggggagcagattgttgtgtcctagtctatgatgttaattctatgaaatcatttgacaacctgaacaactggcgagaagagtttctaattcaggcgagcccatcagatcctgacaatttcccttttgttctggtgggtaacaaagttgatgtagatggt

SEQ ID NO: 265211 - DNA, 319 bp, Zea mays
atcaagtctggccaggtctctcccatatcgggttctcccttcctcttcctgtttccgcgcgcgagatcgccgccccgggtgggctctagatcccgatggcctcgcgccgccgcaccctgctcaaggtcatcatcctcggcgacagcggggttgggaagacgtctttgatgaaccaatatgtgaacaagaagttcagcaaccagtacaaggctacgattggggcggatttcctcaccaaggaggtgcagttcgaggacaggctcttcactctgcaaatatgggacactgctggtcaggaaaggtttcagagtcttggcgt

SEQ ID NO: 265212 - DNA, 595 bp, Zea mays
ttgtcaggtctccctctccccggctctccgccttcctcttccagtccccgcgcgcgagatcgccgccccgtgtgggccctagatcccgatggcctcgcgccgccgcaccctgctcaaggtcatcatcctcggcgatagtggggttgggaagacttccttgatgaaccagtatcctgcgattcggatcgattcttgacaagctgacttgatttcgtttcgtcgattttcttatttcttctggttggctggctggattgttttctttgagctgtgatgtaattcagatatgtgaacaagaagttcagcaatcagtacaaggctacgatcggcgcggatttcctcaccaaggaggtgcagttcgaggacaggctcttcactctgcaagtaagattggttaccctagccgtatgccgtgccgtgatctgggagtagttatgtttctttacgccaacttcagccccgattagtactttcttaattagttcgcgaactcattcatcagctgggatatttagaaagtataggagagggtgtttgccgctcaacatttgttaggtcatagcgtcgtgcttgtcgcgtctgattcagtatcctc

SEQ ID NO: 265213 - DNA, 692 bp, Zea mays
gattcccgaccgacggacgcgtcacgccggtcatagctggaacagccgtgtggtgtcggtgaaaaaggcaaaggcatggtgcgcgtctaaggggaacatcccgtactgtgagacgtctgctaaggatggaacgaacgtggaagatgccttccagtgtattgtaaagaatgctctgaagaatgaaccggaggaagaattgtatgtgccagataccgtggatgtggtaggtggcaaccgggctcagagatcatctggctgctgttaagacatgaggcatccccgaggcgtggtgatcatcatcggctatgcagtgaccaaacaatacctcaacattgctgggcctccatggttatctacgtgtccgtattccatttgttacctttccagtctcctgctatgtacccaagggggcatttcccatgctgtcagtcaatccgtagacttcatttgtgcagttccatcagtagggtcataccttgtgaatacagttgggcaaaataagaggaagtgtaaactaaagttcatgctttatggttttgtgttgtattaactggtccgccttttcctcgctttctgcttcagtgcaaacatgttaatgccatcgcttaggctattcattaagggctagtttggaaaatccatttttccaaggtattcctattttttcaaggacaaatgaattaatttccctt

SEQ ID NO: 265214 - DNA, 649 bp, Zea mays
cggaattcccgggtcgacgcacgcgtccgcggacgcgtggggccgtgtggtgtcggttaaataggcaaaggcatggtgcgcctctaagtgggacatcccgtactgggagacgtctgctaaggatggaacgaacgtggaagacgccttccagtgtatcgtgaagaatgctctgaagactgagccggaggaagaactgtactgtgccagataccgtggacctggttggtggcaaccgggcccaaagctcatccggtggctgttacggcacgcctaagccggccttgttgttcagtaaatagccggttatgcactgctgtgcaaacaattccttagcattgctgggtctccctggttatctacgtatccgtattccatttgttacctttccagtcgcactgctatgtacccaagggcgcctgtcaattcggtggactgtgtgcagtttcatcagtagcgtcattccttgtgaataccctcgccccagatcagaggaagcgtcacctgtagttcatgctttatggttttgtgttgtattaactcgtccgccttttcctcgctttctgcttcagtgcaaacatgttaatgccatcccttaggctattccttcaaaaaaaaaaaaaaaaaaaaaaaaaaaaaaaagggcggccgc

SEQ ID NO: 265215 - DNA, 477 bp, Zea mays
atttgttgggcgtgagaagtacaggaggccgttgtggatcaccaaggcgttggaaaaccctgtagtgacagtccaggaaatgtcaatgcagtcgacgagcaacctgaccatcagatgggcgttgagagggaagcctaagaacccgttgttcgcgagcgtcggaggagacgtcatcgtccgcgtcgagtcacggttcgtcctgaaccagataagcgggcaggtgctggagcaggccgagtcctgggacctctccgcctcgtccctccctgcccaggcctacttctggctgtcccgaagggtctactccgccgtggagtccgggaaggacgcgatcgaagccgccaagagcgcggcgtcgtctgggctgacgaccaagggagaccagaatctcgaggcctatccggatccttctgctgatcctacaaagcgttgttttgggttgcagttctttcagaggccggatgatgggttcagcca

SEQ ID NO: 265216 - DNA, 2197 bp, Zea mays
cccacgcgtccgccggattcagttggtatcgtggccgtttcgcatggttgccgtggcgttgctgcccgcgcctgtggtttggtgaatctagaaccaacaaaaggcatagagatcttgaaagatcgtccctcttggttccgtgattgccgaagtcttgaagtgtttacaaggtttccagctggaaatgggggaacaattgaacttatttacatgcagatgtatgccccaacaactttagtccctgcacgtgatttttggacactacgatacacgacaacaatggaagatggcagccttgtggtctgtgagagatccttgagtggttctggtggtggtccaaatgcagcctctacacaacaatttgttagggctgagatgcttccaagtgggtatttagttcgcccatgcgaaggtggaggatcaattgtgcatatagtggaccatctagatctcgaagcatggagtgttcctgaagtgcttcgaccactgtatgagtcttctagagttgttgctcagaaaatgactactgtggcactgcgccaccttagacaaattgctcaagaaacaagtggagaagtagtgtacgccttgggaaggcaacctgcagtcctacggacctttagtcaaagactaagcagggggtttaatgatgccattagcggtttcaatgatgatggctggtctgtaatggggggagatggcattgaagacgttgttattgcttgcaactcaaccaagaaaattaggaataccagcaatgctgggattacatttggagcccctggaggcattatttgtgcgaaggcatccatgttactgcagagcgtcccaccggcagtactggtccgatttctgagggagcatagatctgaatgggccgattacaatattgatgtgtatttggcttcatcactgaagaccagtgcgtgctcacttcctgggttgcgacccatgagattttctggggggcagatgatcatgccacttgctcacacagtggagaacgaggagattcttgaagttgtccgccttgaaggtcagcctcttactcatgatgaagcccttctttcaagggacatccaccttctccagctttgcactggaatagatgagaaatctgtgggttcctccttccagcttgtgtttgcaccaattgatgagcattttccggatgatgctccattgatttcctctggctttcgtgtcataccacttgatatgaaaacagatggtgtatcctctggtaggacgctagatttggcatctagtcttgatgtgggttctgctgcaccccaagcctcaggggatgcatctccagatgactgtaatttgagatctgtgctgacaatcgcctttcaattcccttatgagatgcaccttcaggacagcgttgcagcaatggcccgtcaatatgtgcgtagtgtcatttctgctgtgcaaagagtgtcgatggctatatctccctcccaatctggtctaaatgctgggcataggatgctttctggcttccctgaagctgccacacttgctagatgggtttgccagagttatcactaccatctaggtatggaattacttaatcaatcagatggagctggtgaagcattgttgaaaatgctctggcatcatccagatgctgttctgtgctgctcctttaaggagaaacctatgtttacgtttgcaaacaaggcagggctggacatgttagaaacatctcttgttgccctgcaagacctgacgctagacaagatcttcgacgagtcaggaaggaaagcactattctcagacatctcgaaactaatggaacagggctacgcgtacctgccgtcaggcgtgtgcatgtcaggaatgggccgccatgtttctttcgaccaagctgtagcgtggaaggtgctcggcgaggatagcaacatccactgcctggcgttctgcttcgtcaactggtccttcgtgtgactgaagcccaacccgtcgggtggttatggcgagctgacccctttttttgtatggaaaatcatcagctgtgacaaaaggcatatgttgcatgcactagttgaagaaactggtccaaatgctttttttgtttgtcattccattcagatgttgctaggtgtggagtggaaatggggcaatagtgtcacggttacacatgacccagcattaaccaaacaaccgcgtcgccagtttcttttttccc

SEQ ID NO: 265217 - DNA, 313 bp, Zea mays
atggaacagggctacgcgtacctgccgtcgggcgtgtgcatgtcaggaatgggtcggcatgtctcattcgaccaagctgtagcgtggaaggtgctcggcgaggacagcagcgtccactgcctggcgttctgcttcgtcaactggtccttcgtttgacacgccatcccatggcctgtgtgatgagcaggccaatttttttgtatggtgatcccaatatggggaaaccatcagctgtgacagaaggctttatgttgcatgcactagttgcacgtcttgaatcgagtgtctctatgaagaaattggatactgcgca

SEQ ID NO: 265218 - DNA, 183 bp, Zea mays
gcgtccacgctacagcttggtccaatgagacatgccgacccattcctgtgtgatgagcaggccaatttttttgtatggtgatcccaatatggggaaaccatcagctgtgacagaaggctttatggtgcatgcactagttgtacgtcttgaatcgagtgtatttatgaagaaattggatacaaa

SEQ ID NO: 265219 - DNA, 812 bp, Zea mays
cccacgcgtccgcccacgcgtccgcccacgcgtccgggcgattgccagtgtcatgcccagtttcctcaggggtatcatcataccggccgggattcagggaatattcatgctggtctctggctacttcagacttccatacgacatcccgaagcccttttggagataccccatgcagtacatcagcttccactactgggcactgcagggccagtgccagaacgacatgaagggcctcgtgttcgacaaccagtacccggaccaacccaagatccccggggacttcatcctcaagtacatcttccagatcaacgtggaccgttccaagtggatcgacctgtcggtcattttcagcatgatcttcatctaccgcatcctcttcttcctcatgatcaagatcaacgaggacgcgctgccgtggatccgcggccacatcgcgaggaagaggatgcagaagaagggccctacccccaccatgggcaagacgccttcgctgagaggctacgtcgtcgatccggagctcggttccaacgagggctagaggtcgtgcttgttcttttgggtagcggaaaaaaaatagggtgtttctcccccccggctcttggtgttatattgtatatttaagatcaggggataaaaaaactggtatcacacgttttggaaccgaagctaatttgagtacaggtatacatacatgcatgtaatgtgagcgaagtggcatcggagattcggagagatcgatgccgagtgatacatgcatgactcgttgttcagaatttattgccttcgacttcgacagacgaagaagtggttgg

SEQ ID NO: 265220 - DNA, 1055 bp, Zea mays
cgaccgacgcgtacgtgattgcttccatccaccagcccagcagctaggtgttcgagctcttcgacatgctcggccggctatcctgcggcaagaccgtctacttctgacaagcatcccaagcatgcgagttctttgctcaagccggtttcccttgcccggctctgcggaatccgtccgaccatttcctgaggtgcgtcaactcggacttctacatggtgaaggccaccctgaaaggatcggggagggcaagggtcgagaggtccgacgatccacttgacaggatgaccacatcggaggccatcacgaagttggttgcatcctacaccaggtcccagtactactacgccgcaagggagaaagtaaatgacatctcgcgaatgaaaggaaccgtgctggattccggtggcagccaggccagcttcctgatgcaggcctgcaccctgaccaagcgctccttcatcaacatgtcgcgggacttcgggtactactggctcaggctcctcatctacctcctcgtcaccggttgcatcggcacgatctacctggacgtcggcaccaaatacacatctatcctggccagggctgcctgttccgcgttcgtctttgggttcgttacgttcatgtccattggagggttcccttcgttcgttgaagaaatgaaggtcttccagcgggaacggctgaacgggcactacggtgtcgcggcgtttgtcatcagcaacaccatctcggcaacgccgttcctgattctgatatgcttcttgtcgggaaccatatgctacttcatggtgcgcctccatcctggcttcgagcactacatcttcttcgtcttgaacctgtacgccagcgttacggtggtcgagagcttgatgatggcgattgccagtgtcattcccaatttcctcatgggtatcatcataggggccgggattcagggaatattcatgctggtctctggctacttcagacttccattacgacatcccgaagtcctttggagattacccatgcagtcattagcttacatacttgacactgcatggccagtgccagaa

SEQ ID NO: 265221 - DNA, 829 bp, Zea mays
ctcgcctcggccgctctggcgcttgtgcggtgggtgaagcgcgggtgctggtgcgggaagcctcgccagacctagcgctgccgactgccgagctgggtgcgggcgcgaggagtcgacgggaagacaagggtgaggaattatgagtgaaacagggcacactgtacaagtcactaacctctcgagcagagtatctgaaagtgatcttcatgagttcttttcgttctctggtcctattgagcatatagaacttatcagatcagaaggatacggtgccactgcttatgtgacattcaaggaacgctttgccttggaaactgcagtattgctcagtggggctactattgtggatcagccagtatgcataacctattggggacaacctgagggaacttttaatttctgggacaggccaacttgggaggttgaagaggaaatcgaatacaggaactaccaaacatgccagtacaacactactccgcaggaagcttttacagtggctcaagatatcatgaagacgatgctagaaaaggggtacgtgctcagcaaggatgctttggctaaggctagagcctttgatgagtcctatggattaacagctgcagcagcagccagggctgcagagctgagcaagagaattggtttaactgatagggtcaatgctggtgttggtgcaatgcgatcagtcgatgagacatatcgcgtaagagagacaaccaagacggttgctactgccactggaagaacggcagcaaaggtggtaaatggcatcgtcaccagcagctacttctctgcaggagccatgatcttgtctgatgctcttactagggct

SEQ ID NO: 265222 - DNA, 535 bp, Zea mays
agcgcgctcgacaggctggaggcccacctcgccggctgccgttacctgtgcggggacaggctcacgctggcggacgtctgcctcttcacgacgctcatccgattcgatctcgtctacaacacgctgttcaggtgcaccaggcggaagctggccgagtaccctagcctccatgcctacacgcgcgacatctaccagatgcccaaggtcgccgagacgtgcgacatggaggccatcatggcaggatacttcaagacactcttccccctcaaccccggcgggatccagccacacccgccggccacctgcgatagggagtcgctcttgaggccgcatggtagggaggccttgtcctctgctgctggcacgccgcttgaagcagctgcggtttcataattcattcaggctttgaacaaaacttctgaaactgcagaaagagtttatagttctaccagatactgatgcttcagcttcacaggatcaaatcacatcgcaataactgccatgtgcaaattcttattttgtccatataagtcac

SEQ ID NO: 265223 - DNA, 1043 bp, Zea mays
aacaattttatattgataatgtgcttccaaggatcaaggagaaaaagataatgtctatcaagccatttgttgataggttaggatatgataatgttccaatggagattaaccgactgaagtgccgagttaattatcatgctttgaagtttttacctgacattgaagaaatggctgacaagctagcaacaaggatgaggaatcgaacaggaagtttaaatccatacatggctcttcacttgcgatttgagaaaggaatggtgggcctttcattttgtgattttgctggaacccgagaggagaaagctatgatggctacttacagacaacagcaatggccaaggcggtacaagaatggatcacacttatggccactagcgctacagaagagaaaagaaggccgctgcccccgtgagcctggggaaataggaatcattttgcgcgcgatggggtatacgaaggaaactcagatatatgttgcatcagggcaggtgtatggtgggaacaacagaatggcacccttgaggaatatgttccccaatatggttagcaaagaagatctcgcaagcaaggaagagatggagcctttcaagaagcatgtaaccagccttgctgcgctggacttcctggtatgcctgaagtcggacgtgttcgtcatgacccacggcggcaatttcgccaagctgatcattggctaccgtcgctacatgggccgccacaggctcaagtcaatcaagccggacaagggtctcatgtccaagttcttcggtgacccttacatgccgtgggcgacgttcgtggaggacgtggtgataacccatcagacacggaccggcctccctgaacccaccttcccgcactatgacctatgggagaaccctctcaccccttgcatgtgtagagcttaaattacagtcagcgagtgatggtgcatagttattctttgtatcatatgctgatatgcaagctgcaaattttgtccaccttgtttatttttttttaccacttctgctgtacaagtttaacaaagcaaagctcagttcatc

SEQ ID NO: 265224 - DNA, 643 bp, Zea mays
catgcatggatatgaaggacgagcagcagccgaaacacgccagctgctccccggagctgcttgtgcagcaggtcaagaccgcggccagcgccgccggggtggagctcgccggcgagaacgcgctggagcggtacgacgaggcggcgttctcgcaggtggcgtcgacagcgcgcggcgccggcctggccgcgttcacgtacctgcgcatgaacaagacgctctttgacggcgacaactggcggcagttcgtgtccttcgtcagggccatggccgacggcggcgcgagaccagcactgccacggtgcgacacggggcactcggacctgtacgtcgggttcctcgacgccgccaagaagagcaaggcgccggaggctgagggcgccgccaccgccgcggcattgtaggtggatgctcatgcctgtgcgtgcacacagacacatgcgccgtgctgttgtataacgtgcaccggagaaggggaactgtatgtatagattcagggccttgcaggttgcagagttttataggctgtaatcgagcaggtcggtaaggaggcaggcatgtcagaacttaggctgtcttcagttcatttgtcccatttggaactgtattgttatgagtctaatccctgtagagagaattctat

SEQ ID NO: 265225 - DNA, 783 bp, Zea mays
cccacgcgtccggctcaacttcacgtgcatggagatgaaggacgagcagcagccgcagcaggccagctgctcccccgagctgctggtgcagcaggtcaaggctgcgaccagcgccgccggcgtgcagctcgccggcgagaacgcgctggagcggtacgacgatgcggcgttctcgcaggtggtgtcgacggcgcgcggcgcaggcctggccgcgttcacgtatcggcgcgtgaacaagacgctcttcgacggcgacaactgggggcggttcgtgtccttcgtcagggctatggccgacggtggcgcgaggccagcgctgccgcggtgtgacacggggcactcggacctgtacgtcgggtttgtcgacgccgccaaggagaggaaggcggcggaggccaagggcgccgccaccaccgcagcattgtaggtggtcgtcggtagatgcccatgcatgtgcttgcataatgcatacatgacacatgcgccgagctgttgtataacgtacacaggagaactgtataaattcagggccttcaggttgcaaagttttataggctgtaatcgagcaggtagataaggaggcaggcatgtcagaacttaggctatcttcagtttatttgttccatttcaaactgtattataaggagcagcttggtgactttcactgtcataaatttagctgaaggttaatagcaatgccaattactacaattacatcaatgaggggagcgagtagtacgagaacacggacaggagggagtatgccatggaggagcacgggct

SEQ ID NO: 265226 - DNA, 719 bp, Zea mays
gtggtggggcgtggtggagcgggagggccccggccgctacgactgggaggcctacgccgagctcgtgcgcatggtggagcgcgccggcctccgactccaggccgtcatgtccttccaccagtgcggtggcaacgtcggcgacacctgcaacatcccgttgccgccatgggtgctggaggagatgagcagcaacccggacatcgtgtacacggacaggtccggccgccggaaccccgagtacatctccctcggctgcgacacgctgccggtgcttaagggccggacccccatccaggtctacaccgactacatgcgcacttccgccagaggttccgtgactacctcggcaatgtcatcgcggagatccaagtgggtatgggtccttgtggagagctgaggtatccttcataccctgaggccaacggaacctggcgtttcccgcggcattgtaggtggatgctcatgcctgtgcgtgcacacagacacatgcgccgtgctgttgtataacgtgcaccggagaaggggaactgtatgtatagattcagggccttgcaggttgcagagttttataggctgtaatcgagcaggtcggtaaggaggcaggcatgtcagaacttaggctgtcttcagttcatttgtcccatttggaactgtattgttataagtctaatctctgtagagagaattctataaaaaaaaaaaaaaaattataaggtcgt

SEQ ID NO: 265227 - DNA, 686 bp, Zea mays
ctcagaagtacaatggatctggttcacgcaaccaccacaactttaggggccgtggaaggggtagagggagtgcgttttcacagtctgtaacagcattcactgaagaatttgatttcacggccatgaatgagaagtttaacaaagatgaagtctggggtcatcttggaaagaaatcgcagtcaagggacaaggatggtgaggtgggagatgatgtgtttgatgaagacctggaggttgaggaaactgataacccagagctatctgttaagcctgtttatgtcaaggatgatttttttgattccctcgctagtggaacatttggacgtggaggaccaaatggaaggggtagaccttctgaacggcgcagagtagatacagaggtttaggaactaccctttccctcccttgatttttctgctagtgctttacccatttttattggcgtgcagacttttggcgaatttccacggcacaggcaaccctaccgtggtggcgcccgaggttaccgtggcggtggacgttcccgaggttcatattatggtggcagaggctatggaaacacagggaccggaggctatggaaacacagggacaggtggccctggaaattcttattctcaccggggctatggcagagattgattatagcagaaatgcgcacgctaccatacttgtagctattgtagt

SEQ ID NO: 265228 - DNA, 1031 bp, Zea mays
gtctttcggtactcgcgcgcgccactcacttctctacttcccttccccagatctacctccattcttccctcaaaatcacagatctctctcggccccgtgcccagcgctccgaaaccctagcgccgccgcgggtgccaggccgcgagcgtcgccatgggcatcgtgtttacgcggctcttctcgtcggtcttcggtaaccgcgaggctcgcatcctcgtcctcggcctggacaatgctggcaagaccaccatactctatagactgcaaatgggagaggtcgtctccacgatcccgacaattggattcaacgttgagacggtgcagtacaacaacatcaagttccaagtatgggatcttggtggtcaaacaagcatcaggccatactggcggtgctactttccaaacacccaggctatcatatatgttgttgattcaagcgatacagataggcttgtaacagcaaaagaagaattccatgccatccttgaggaggatgaacttaaaggtgcagttgtccttgtgtatgcaaataagcaggatcttccaggtgcactcgatgatgctgccattacagagtcattagaactacacaaaattaagagccgccaatgggcgattttcaaaacatctgcaataaagggagaggggctcttcgaaggtttggactggctcagtaacacgctcaaatctggaagcagctaaggagcctccgcctcgtcatgaatcatttgctggaggctaaagaatagccgatgcttgcaagtcagcgcgcaaatcccattctctttgttttaactccagaagttctacaccgccatcaattatctgtaaagtgcgtgttaaattttttggatactacattagatgtaccctcaggttgagatcaagaataggtctgtggaaaatgacgagcaaactgtgccactgtctttacccgtaaatctcatggatcatgacaagtttttttttgtaccccaatatgattaaacttacttgacaaaactaaaaatccgtatcatttaacaaaaagg

SEQ ID NO: 265229 - DNA, 328 bp, Zea mays
aataaaccattcgtatcatcagttaaaatagttcttcatacattatcaagtagtggatgtactgtccgtcgatcaagatgcagttctatgtcattaattacaacaataacacgccttttgcatttacgtgatgagagagctggagacattagtggaggaagcaacttatggttggctattattgcaggctcagtaacacgctcaaatctggaagcagctaaggagcctccgcctcgtcatgaatcatttgctggaggctaaagaatagccgatgcttgcaagtcagcgcgcaaatcccattctctttgttttaactccagaattctac

SEQ ID NO: 265230 - DNA, 598 bp, Zea mays
  unsure (1)..(598): unsure at all n locations
cccacgcgtccgcccacgcgtccgcccacgcgtccgcggacgcgtggggcgctgcgaaacgctagcgccgccgcgggtgccaggccgcgagcgtcgccatgggcatcgtgtttacgcggctcttctcgtcggtcttcggtaaccgcgaggctcgcatcctcgtcctcggcctggacaatgctggcaagaccaccatactctatagactgcaaatgggagaggtcgtctccacgatcccgacaattggattcaacgttgagacggtgcagtacaacaacatcaagttccgagtatgggatcttgggggtcaaacaagcatcaggccatactggcggtgctactttccaaacaccccaggctatcatatatgttgtgattcaagcatacaatggctgtacacaagagaattcatgatcttgagaggaactaaagggcagtgtcttggatgcaatacagacttcaggcctcgagatgctgcaacaatattagactccaaataaaccgcaatgggcgattttcaaaacatctgcaataaagggagaggggctcttcgaaagtttggactggctcagtaacacgctncaaatctggaagcagc

SEQ ID NO: 265231 - DNA, 556 bp, Zea mays
accgctccggaattcccggtgacagacaaccgattttaaggaaggatccaggagacttgagtggaatctaaagaagattgttggtggttctgagcacaccctccgtgcaaagctgacattttctcaggagtcacatgggaatatcacaaaggaagctggcccagtgaacatgaatttcactataccgatgtacaatgcatcaaagttgcaggtcaggtatcttcagatcgcaaagaaatcgaaggcatacaacccttatagatgggtgcgatacgttacacaagccaactcctacgtagctcgtctatgaggaatcagcatctgtactcttgtttccagtccattttttttgggtgtaatatttgagcgttatcatggacatagtggcgtgtattgtgtaactgtatattgaggttcgcataccgctcagctcctgtagtaacaattgtttttcgtcgtgcaatgtgcagatgaataattcatgttcttatgccgcaaaactgattcaggccaggccctattgtcttgcacccttcctgcgaggttttagtaacgt

SEQ ID NO: 265232 - DNA, 827 bp, Zea mays
atctgagattgatggaacaattcaaatgtaagtatatagccactcgagctgaatgttacactaattctctcgagtggctatatacttacatctgagattgatggaacaattcaaatgaaaagttacctcactggcaatccggaaatccgtcttgctctcaatgaggatttgagcatcggaagaactggatcttcttcatacgattacagaagttcttctggaggaggaacagtcattcttgatgattgcaatttccatgagtcagtacatctggacagttttgatattgacagaactttgactttaataccgcccgatggagaatttcctgtaatgaactaccgtatgacccaagaatttaagccaccattccgtgtaaccgcactaattgaagaagctggaccagcgagggctgaagttctactgaaaataagagctgacttctccgcgagtgccactgctaacacaatcgtagtacaaatgccagtgcctgcatacacaatgagagcgagttttgagttggaagctggagcagttggacagacaaccgattttaaggaaggatccaggagacttgagtggaatctaaagaagattgttggtggttctgagcacaccctccgtgcaaagctgacattttctcaggagtcacatgggaatatcacaaaggaagctggcccagtgaacatgaatttcactataccgatgtacaatgcatcaaagttgcaggtcaggtatcttcagatcgcaaagaaatcgaaggctgtaaaaaatgaaaaagaaaaaagaaaagggaatgagaaattgactaaagctggtcatttttc

SEQ ID NO: 265233 - DNA, 772 bp, Zea mays
ccgggtttctgagcatcaaccgcgcaatgagccttgacagcgtggaggttgatctgagcgaggagcttcaggcgccgaccaggccaatcttgcaaacccaggttgaggctgcctggagaggacgggcaattggtgctgaggctgtgaatggagccagcgctcctagatggaggctagtccctactcgcagggagcaggcaaagtgggacagagcggccaaggcagccactggtggaagtgatgttatactaagggagtcaaagtcaagagtgcagcaaggagaccctaaggtattggcagctcggtccagagaagactacttacagctgaaacaaagattacagtggttcactttaggcattggtggcgttggtgtaatctctgcttatatttcatacactcctgaaattgctgtcagctttggtgcagggttgattggatcattggtgtatctccgcatgcttggaaccagtatagattccctagcaggtggaactggagaaactgtcaagagtgctgctgcacaaccaaggttgcttattccagtggtacttgtgatgatgtataacagatggaatcagatattagttccggattatggtttcatgcagcttgagttaataccaatgcttgttgggttttttacctataagattgctacattcgctcaagcaatccaggattctatacctccagtcggaaatcgtgaaggttgaaaagtgtcatgttgtatataaacgaaggtggtagccatggtccctggtcagtggtc

SEQ ID NO: 265234 - DNA, 1373 bp, Zea mays
  unsure (1)..(1373): unsure at all n locations
aacgtaacaaaccaacgataatcctccctcttgctacaaaaaaggaaaaaaaagcatcaataataatccactgcggtcgctcgtcctcctcccaacctcctcccaagttgcctcgtgctctgcttcttcggttttcaggagcgtcggccattgctgctggaaaagcagaccattgggactccctcgtgcgttttccaaatcagtcaggttgatggcgatggagggaccagttttatgccgccctgcaatgcaagccaaatcgcctgctgctgcgctggtcaacaactccctgaccagattcgggcagcttgggaccatttcaaaatacaggaacgtttcaagattcatttctcccatctctcagccatctacgaagaacataggtccatgctgtagcttcagctcgtcttctgatggcaatggatacatggctggaaactttagcgacagtgatgaagattatgttaattctactgtgctagaagcagttgaggtgagaagtggatcggaaggatatgtgataaagatgcgagatgggaaaaacttgcgttgtgtccataacaattctcaagggagaaatattccagagagtgcaccccaacctgctattgttttgaggattgaagatggaagcgaaactttacttccaatcattgttttggagatgccaagtgtacttctgatggcggctattcgtaatgtccacattgcacgaccaaccatatatcaagttgtcaaggaaatgattgataaaatgggctatgaggtaaaacttgttcgggtaaacaaaagaattcaagaagcgtactgtgctgaactttgtctaacaaagattgatgattctacagacagcatcaccttcgatcttcggccttcagatgccataaacattgctgttcgttgcaaggttcctgtacaagtccatagaagtcttgcatacagtgacggcatcagaccagtcgagccagcaagaatggcagtagcagctggcctatcagatgggttgttatttacagagcttgacagacccgatggacaggcatctgttgaggctcaagagtttggattggtgaagaacatgctcattgcagccgtagaagagagatacaaggatgctgcatcatggaaggacaaactgatgcggctgaggtctaagcggaagaactgggcctgacagcgttgcatgtctggatggtgtaaataaagatgatgcccagctgaattccagtacgcattccagataattgatgctgggttatggctatgtaactagctgtacatattgtatggacccgaggatggtcttctgtaaattcagactaagctttgaaatgaacccctaatccttcggggnnannnaaagggaataaggc

SEQ ID NO: 265235 - DNA, 781 bp, Zea mays
tttctatttctttctccaacaaatcaacaattaatactccactacggtcgctcttctcccctcctctcaatttgcgctcgtgctctgcttcttcggctccaaggagcggcgaccattgctcattgatggcgatggagggacctgttttctgccgtcctgcaatgcaagcgaaactgcctgctgctgcgctgatcaacaactccctgaccaaatccgggcagcttgggactgcattgtttggtgccatttcaaaatacagaaacatttcaagattcatttctcccatctctcaaacatctacgaagaacataggtccatgctgtagcttcagctcgtcttctgatggtaatggatacatggctggaaactctagcgagagtgatgaagactatgttaattctactgtgctagaagcagttgaggtgagaagtggatcagaaggatatgtgataaagatgcgagatggaaagaacttgcgttgtgtccatagtaattctcaagggagaaatattccagagagtgcaccacaacctgctattgttttgaggattgaagatggaagcggaactttactcccgatctttgttttggagatgccaagtgtacttctgatggcggctattcgtaatgtccacattgtaatatcttctattgtcattaatactactgtttggtactgtccattctgtttcatgtagtctatataacgcctttatgttataggcacgaccaaccatatatcaagttgtcaaggaaatgattgataaaatgggctatgagg

SEQ ID NO: 265236 - DNA, 403 bp, Zea mays
cacgctaccggcacaaactgatgcggctgaggtctaagcggaagaactgggcctgacaggttatagtctaaacttgtgtagctctgtttttctatccagaaattgtcaatctgcagatctgtttttgtttttgacttgattacgctgacttgataactcctaacagcgttgcatgtctggatggtgtaaataaaaatgatgcccagctgaattccagtacgcattccaaataattaatgctgggttatggctatgtaactagctgtacatattgtatggacccgaggatggtcttctgtaaattcagactaagctttgaagtgaaacactaatccttcggagaaacttggtaccttgtccgtgttcacttgtggtatataatgttggaaattaacagggttcc

SEQ ID NO: 265237 - DNA, 355 bp, Zea mays
ctcaaaagtttggactggtgaggaacatgctcattgcagctatcgaagagagatccaaggatgctgcatcatggaaggccaaactgattcggctcaggtctaagcgggaaaactgggccttaaagcgtcgcatgtctggatggtgtaaataaaaatgacgctcagctgaattccagtatgccctccagacaattgatactgtttatggctctatgtaactagctgtacatattgtaactagctgtacatattgtacgtactatgctcaggtttcacccaaattcagactaaaatttcaagtgaaaaactaatccttttgtaatcttggccgtattaatttgtatgttagtctgtt

SEQ ID NO: 265238 - DNA, 1434 bp, Zea mays
tgggctacatcgacggaaacaacgaccgccgcctcgacgactgcatccgatactgcatcgtcagtgcgcaacaaggctctcgaggctgccggtattgcccacggctccaagcccatggaaaagattgacaaaacccgggctggtgtgcttgtgggcactggtatgggtggcctcacggtgttttctgatggtgttcagaatctcattgagaagggctacagaaaaataactcctttcttcatcccatatgctataacaaacatgggttctgccctgcttggaatggatattggtttcatgggtccaaactactccatctcaactgcctgtgctacctcgaactactgtttctatgctgcagcaaaccatatccgtagaggcgaagcggatataatgatagctggaggcactgaagctgcaattattccaattggtgttggtggctttgttgcatgtagagcactgtcacagaggaatgatgaccctaaaacagcatccaggccttgggacaaggatcgtgatggttttgtcatgggtgaaggagctggagtcctggtcatggagagcctagagcatgcaattaaacgtgatgcaccaataattgcggagtatttaggaggtgctgtgaactgtgatgcttaccatatgactgacccgagatctgatggtcttggtgtttcatcttgcatcaagcaaagtctcgaagatgctggtgtggctcctgaggaggtcaactatattaatgctcatgcaacatcaacccttgctggtgatctggcagaggtgaatgccatcaagcaagtcttcaaggacccatctgggattaaaataaatgcaaccaagtccatgataggacattgccttggcgcacaggcggtttggaagccattgctactattaaagcgataactactggatgggtgcatccaagcataaaccaatttaacccagaggaagcagttgaatttgacactgtacctaatgtaaaaaagcagcatgaagtgaatgttggtatctcaaattcctttggatttggaggtcacaattctgtcgtagtatttgcgccatttaagccataaggtgttcctggcctcacaaaccttggtcagaacaacgaggatctttaggagtttctgcgttcaattttcatgtgttctctttaggggaagttatgtcagatctgagccggcaacgttacaaatgaactaaagctgagatacattgctttttagataactccaggttcacttaggttgtgcgcggctgtacaacgttgctttgaatcatttgtaattgattgtactgttttttcatgtaatggaagaggagtcttgtagatgcacatctggaccttctagttaaatagcatacaaatgaatttggagggcaaaaaaaaaaaaaaaaaaaaaaaaaaaaaaaaaaaagggcggccgc

SEQ ID NO: 265239 - DNA, 337 bp, Zea mays
tgtggtagtatttgcgccttttaacccataaggtgttcctggcctcacaaaccttggtcagaccaacgaggatctttaggagtttctgcgttcaattttcatgtgttctctttaggggaagttatgtcagatctgagccgccaacgttccaaatgacctaaacctgagatacattgctttttagataactccaggttcacttaggttgtgcgcggctgtacaacgttgctttgaatcatttgtaattgattgccctgttttctcatgtaatggaagaggggttctgttgcagaaaaagaaaaaaaaaaaaaaaaaaaaaaaaaaaaggccgcccgcc

SEQ ID NO: 265240 - DNA, 272 bp, Zea mays
caacgttacaaatgaactaaagctgagatacattgctttttagataactccaggttcacttaggttgtgcgcggctgtacaacgttgctttgaatcatttgtaattgattgtactgttttttcatgtaatggaagacgggttctgtagaagaagcacatttggaccttctagagttctagttcaataccacacaaatgaatttggagggtaggaattgtgtccctgctgctggatctggacgctttatggaaacttttttttttgaaatggc

SEQ ID NO: 265241 - DNA, 473 bp, Zea mays
  unsure (1)..(473): unsure at all n locations
gtcgtctcctgcgccgacatcgtcgcgctcgccgcacgtgaatccgtcgccctgggtggcggcccggcgtacaagttgccactgggcaggcgcgacgggctggcgccggcatcgaacgccgccgtcctagcggcgctcccaccgccgacgtccaaggtgccgacgctgctgtccttcctggcgaagatcaacctggacgtgacggacctggtggcgctgtcgggcgggcacacggtgggcatcgcgcactgcggctccttcgacaaccggctgttcccgacgcaggacccgacgctgaacaagttcttcgcggggcagctgtaccggacctgcccgaccaacgcgaccggtgaacacgacggccaacgacgtccgcacgcccaacgccttcgacaacaagtactacgtggacctgctcaaccgggaaggcctcttcacgtcngaccaggacctgctgacccacgctaccacgc

SEQ ID NO: 265242 - DNA, 1353 bp, Zea mays
gcagatctcaatatccaaacagcagtactacactgaactcaatcatcctcagcggaggaaagcagagcacggcacagcgagtcgcagagggatagatccgagcacaagcaggccccgatggcgacgacggcgacgaaccggcgggtgatcctcaaggagtacgtggagggatacccacgcgaggagcacatggagctgctccggggcgccgaggttcccctccgcctgacgggcgccgagccggccgggtccgtcctcgtcaggaacctctacctctcctgcgacccctacatgcggcccaagatgtcgcgcccgctgcgggagtcctacacggccgccttcgtcccgggcgacaccatcacgggctacggcgtcgcgcgcgtggtcgactcctccgacccgcgcctcgcgcccggggacctcgtctggggcatcaccggctgggaggactacagcgtcgtgacgccgcccgccaccaggctcctctccaagatctcccaccacggggccggggagggggcgggcgtgccgctgtcctactacaccggcatcctcggcatgccggggctcaccgcgtacgtgggcttccacgagatctgcgcgccgaagaagggcgagaccgtgttcgtgtccgccgcgtccggcgccgtcggccagctggtgggccagttcgccaggctcgccggctgccacgtcgtcggcagcgccgggtcccgggagaaggtggagctgctcaagaccaggttcggcttccacgacgccttcaactacaaggaggagcccgacctcggcgccgcgctcaagcgctgcttccccgacggcatcgacatctacttcgagaacgtcggcggcgccatgctcgacgccgtcctgctcaacatgcgcgtgcacggacggatcgccgtctgcgggctcatctcgcagtacaacctggcggacggggagaaggacgccgtgcgcaacctcgccgccgtcatctccaagcgcctccgcctgcaggggttcatcgagcccgaccacaagcacctctacccgcagtacgaggcgtgggtgctgccgtacatcagggacggcacgctcgcctacgtcgaggacgtcgccgaggggctcgagagcgcgcccaaggcgctcataggactcttccacggtcgcaacgtcggaaagcagctcgtccgcgtcgccgacgacgagtgagacgcgcctcacttcgattggaccagacgatccatgtgtcgctgttgctatgtttcgattccccattttcatgaataattaattgtgccaatggatgcttttgttcggaatatacgccgcatgccgctttttactaattcgagggagataattgcaggg

SEQ ID NO: 265243 - DNA, 624 bp, Zea mays
  unsure (1)..(624): unsure at all n locations
cccacgcgtccgcaaagctgatgcagaagcgaaggcgaaaaaactaaaatcaagaaagcagangaggagaggagattcttcctcggactctgacagtgactatgacagcgatgttgatcggaaacaccggaggaggaaggatcgtagaaggaacaagaagcatgagcattctgactctgatgatgccaggagacgcaagcataggtccagaaagggctcagactcaagtgatgagagcaaccgtgaatatgaaagcgggtctgaagaagaacgtacaaagaagaagcgttcgcacagaagaaagcatcacagacactcttcaatgtcagactctgaagacaacagtgatgaggatgagcggagatctgccaaggaccattctcagccccgcagacgccaccatcagtcttctgatgatggctcggacaaggtcaggttgagacatgggaagcgtctgagatcaagtgacgagaatgctcggccagattccaacagccataagcatctcaggagccaatccttggaggagtcatagatgatagagatgatgatggaccagagaagataagaaatggcaaaaggtatcacaagaatcatcaccgtcaccaccaccatcatcgtcac

SEQ ID NO: 265244 - DNA, 1098 bp, Zea mays
tcgacccgacccgtccgcccacgcgatagtcagctacctccatccaccagaccagaccagaccaatggccctgcgcctaccaatctcatcgtcccacgggctggcctccacgccggcgccaatctccacgacgacgtgccggccggccgtcttggcgacggccgcggcccagaagaggagcctgctgctggcgacggcctccgagacgaggggagtcgcgccggtgaggtccagcgggatcgagacgagcacggtgggtctgggatgtgaggccgtcaccgggcaggtcacggaggtcaacaaggacaccttctggcccatcgtcgaggccgccggcgacaaggtcgtcgtcctcgacatgtacaccgaatggtgcgggccttgcaaagtgatggctccgaaattccaggagatgtctgagaagaacctggatgttgtgttcctgaagctcgactgcaaccaggacaacaagccgcttgcgaaggagctgggcataaaggttgtgccaacgttcaagatcctcaagggtgggaaggtcgtgaaggaggtgaccggcgccaagatcgacgagctagcgcaagccatcgacacagtcaagtcagactgacaaagaaagcaagtgatgcaactagctagtgtagacgatgaatgaatgagtccctggccggcaaggctgctagatacgtacgtacgtacgtactcatcaacaattaatgatggatgatggcaatggcaaatatacagtcaatgattcatatatgcatgcatggactgctatgctagctagcagccctttgtaaatatattgtttaaggaaatgattcatatattcagcccttaaggacttggatgtcaaaaaaaaaaaaaaaaaaaaaaaaaaaaaaaaaaaaaaaaaaaaaaacaaaaaataaaaaaaaaaaaaaaaaaaaaaaaaaaaaaaaaaaaaaaaaaaaagaaaaaaaataaaggggggggccgttttaaaggacccaactttacaaacccttgcatgcaacataatatctttttttttgggtcacctaaattaaattcactggccgtgtttttaaaaagacccgagtggaaaacccctggggt

SEQ ID NO: 265245 - DNA, 976 bp, Zea mays
taacgccagccgccagcccccccgggcggcgctatcctcagctagctccgtaaaccagagagtacggccgaccagaccaatggcactgcggctacccatctcctcgacccacgggctggcctcctcgccagcgcccatctcctccacgacgacgtgccggccggccgccgccagtgggagcttgatcccgccagctgccctgatcgcagttgccatccgctgggcgtcggcgtcggcgtcccaaaagaggggcctgctgctgacgacggcgaggggcggcggagtcgcgccggtgaggtcgagcgggatcgagacgacgtcgacctcggtgggagctgaggccgtcaccgggcaggtcacggaggtcaacaaggacaccttctggcccatcgtcgaggccgccggcgacaaggtcgtcgtcctcgacatgtacaccgaatggtgcgggccttgcaaagtgatggctcccaagttccaggagatgtccgagaagaacctggacgtcgtgttcctcaagctggactgcaaccaggacaacaagcctctcgcgaaggagctgggcataaaggttgtgccgacgttcaagatcctcaagggcgggaaggtcgtgaaggaggtcaccggcgccaagatcgacgagctagcggaagccatcgagatagccaacaagaagtcaggctgacaaaggaatagcaagatcgacgtgcagtgcaagcaaggatgaatggatgatcgatgaactagctagtgaagactgcgaatgaatgcgccccggccgcgcatttgtgggaccggcaacatgcatgcagaaaacaagctattctagttcttctgcttaggccgtccgcaattgctatctcaaatagctagctgatgtggagctgagagaagaatacaaatagtaatttatctcatcactaaaaaaaataatataatatagttataatgtgggcggccgctctagaggatccaagct

SEQ ID NO: 265246 - DNA, 669 bp, Zea mays
  unsure (1)..(669): unsure at all n locations
actctatctttacctatggcggtgagacgtttcgtggaacaggacaacaccaagaaaccaatcttattagacgacctgacggaactcacatcacaaaactttgatttgtttagatcaaatgtcgactcggtgatcgatagaggtgcttgaaatggtgcgggccttgcaaagtgatggctccgaaattccaggagatgtctgagaagaacctggatgttgtgttcctgaagctcgactgcaaccaggacaacaagccgcttgcgaaggagctgggcataaaggttgtgccaacgttcaagatcctcaagggtgggaaggtcgtgaaggaggtgaccggcgccaagatcgacgagctagcgcaagccatcgacacagtcaagtcagactgacaaagaaagcaggtgatgcaactagctagtgtagacgatgaatgaatgagtccccggccggccttttgtgggacagcaaggctgctagatacgtacgtacgtactcatcaacaattaatgatggatgatggcaatggcaaatatacagtcaatgattcatatatgcatgcatggactgctatgctagctagcagccctttgtaaatatagtgtttaaggaaatgattcatatattcagcccttaaggactaaaaaaaaaanaatacatnaaaaatgaact

SEQ ID NO: 265247 - DNA, 364 bp, Zea mays
ctgatatgaagctgagagaagaatacaaatagtaatttatctcagcactagtatttgatcccgcacgtccagtttctttcttgaaatacgtgaaatcttctatctatttgctcgtcgctagctattctcgtttttcctagattttctatccacgtaggaaaagagagtgaatctagctagtgaaatagcgcttatgatttattactcatcaacatgcatgcgcgtgcgtgatgttaatcattcatatggtggagtgctgctagctagctcgctcgttgtaaattgatgacttgcttcacagctcagagcatttggttttccggtccaaaaaaaaaactaaaaaaaataaattaaaaaaaacaaa

SEQ ID NO: 265248 - DNA, 882 bp, Zea mays
cgttagcacgaaaagtcagcggacgatctggacggtggattattacaggggccgcagggcgccggcgcgggggttcggatgcatatctggccaacctgcacgtttctgaagcgacaaccacacggacgggtgcatcccgacgcccaaatccatggcgagctcgccgcgatctcctccgccggcgcctacgccggaattcgagatctctcggcagtcccgcctctttgcggcgctgtccaagaaggtgatagatctcgatgaactgaggatgctggcggctcagggagtcccagacgcggcgggcgtccgagcaactgtatggaagctgctactgggctatctgcccaatgaccgctcgctgtgggagcaggagctggcaaagaagagagggcagtacgctgctttcaaagatgagttccttacaaaccctgtagaaagagcgcgacaggtgccaacagaaggccaccacaacgtaagtgcagagcatgttgacaatggcttcctgcacaggtcagaggtaacccgagaggagcaccctttaagccttgggaagaccagtgcttggaatcagttttttgagtactcagagattatggagcagattgaccgcgatgtaaagcgcacccaccctgacatgcagttcttctgcggcgactcgtcttttgcaaagtccaatcaggaatctttgaaaaatgtactgttaatctttgccaagctgaatgctggaataagatatgtacaagggatgaatgaagttttggcacccctcttctttgtatttcggagtgatccggatgataaaaatgctgaattcgcggaagcggattcattctttcgcttcgttgagctgtctagcgggttcagagacatcttatctccaga

SEQ ID NO: 265249 - DNA, 732 bp, Zea mays
ggggggcttaatcgaccaaaaccgtgggtagctcgcccagagctcctgcgacggggccggcaccacgaagaacggctggctatgcagggccggctatttgcggcgctgcccaagaaggtgatagatctcgatgaactgaggatgctggcggctcagggagtcccagacgcggagggcgtccgagcaactgtatggaagctgctactgggctatctgcccaatgaccgctcgctgtgggagcaggaactggcaaagaagagagggcagcacgctgctttcaaagatgagccccttacaaaccctgtagaaagagcgcaacaggtgccaacagaaggccaccacaacgtaagtgcagagcatgttgacaatggcttcctgctcaggtcagaggtaacccgagaggagcactctttaagccttgggaagaccagtgcttggaattagtatttagagtacttagagattatggagcatattgacctgtatttaaagttgacccactttgacatgcaattttttcttgtgtgatttgtctttttcaatggcctattaatgattttttatatattgactgttaattttttttcaagctttatgttttattttgatattttcatgtgttgatttgttatatgttacctcttctttttttgtttttatattattctttgttttttatatttctttttgtttttttttttgttattatatatttttttatttttttttttt

SEQ ID NO: 265250 - DNA, 515 bp, Zea mays
cgctttcacacaaccttctcaagctaatatctcacaagccatttgtgatgccacgcgtccgcccacgcttccggatccaccagcccctgcatcagtgagcaaaagggcaaaaaatgttggtactggtaattcaagaacaagaattaacaagcgtacacaagatgggaatgtggttgagatgatgggaaggtttctagaaatgaaagaaaaacaagctgaggcggatgaaagggccacaactaatgcaaatgaggatgatttccctattcaaacatgcattgctattgtggatggaatggaagagttttctgatgatgagaaggttgattcttatgatgtttttaaggatgcccaaaaccgggccattttcatgactgccaaagatgctacgcgcataaaatggttgacgaagaagattgcaggaacatgatatggtattgatcctcttctcatcccttttaacttggttttaatttacgtatatgggtggatgaagtaagcatacttatgaaaat

SEQ ID NO: 265251 - DNA, 476 bp, Zea mays
gagaaaagtgactggactggatataaggaattaggtgcagagaaatctgggaagaatgctgaaggtgattcttggtgggagaagtggaaagaagtactgtaccaagatgaatggagcaatcttgcaagaatagagaagagtgctgaaaaacaagcaaaatcaggtgcagaaaatgctgggtggtatgagaaatggtgggagaaatatgatgccaaaggctggacagaaaaaggtgctcacaaatatggaaggttgaatgagcagtcctggtgggagagatggggtgaacattatgatggccgtggatttgttttgaaatggacagataagtgggcagagacagacttaggcaccaaatggggggacaaagtgggaggagaaattcttttgcaggaattgggtctcgacaaggggagacatggcatgtatctcctggcggtgaacgttggtcaagaacctggggagaagaacctttg

SEQ ID NO: 265252 - DNA, 778 bp, Zea mays
gtggtgccgcccgagagcgcgacccattcgttcgcgagcctcacttccagttccagcacgaatcctcgtccaatccacgcctgctgctcgcgagccatcgccacagtgctggcctggccatgcctggagccgttgcgcttgcgcccacgctcgcggcagcgagcagctccgccgccgcggcctccacgctggctccgaacccgacaagccgaggcgacccgctaactattaggttgtgccgcaatgctcctgctagcgcaactccacttgttccacttgtagccacccgtcgctacgtgcgtggctgccgcggcgcggctctagtcgccagtccccaccacgctccaaaccctcgcctccgattcgcgtctgcggcagaggggatggctgcggaagcgagcacggcgggtgcggcgtcggcagccgaggcgaagcccttcgccgtcctcttcgtgtgcctcgggaatatttgccggagtcctgctgctgaagctgtgtttcggaccctcgtaagcaagcgtgggcttgactccaagtttctcatagactctgctggtaccatcgggtatcatgagggtaataaggcagactcaaggatgagagcagcttcaaagaagcgggggattgaggtcacatcaatatccaggcctatcaaaccctcggattttcgtgattttgatcttatccttgcaatggacaggcagaactatgaagatatattgaactcgtttgagagatggagaccgcaagagccccctccctgatagtgcaccccaat

SEQ ID NO: 265253 - DNA, 692 bp, Zea mays
aaatccactccacccgtccttatcctccaaacaaccacaccgaagccggcgattaaaccagttcacgcagttcacccatcccccgtctcccggcgcctgtccactttccccgtgcttctccgccgtcgaggccgcgtcccagtgcgaagagactccgactcagatggccagccgctgggtccggcccgaggtgtacccgctgttcgcggcgacgggcgtggccgtcggcatctgcgggtttcagctcttccggaacatcaccggcaacccggaagtcagggtaaacaaggcagggagggcagctggtgtgcttgagaaccatgaggaggggagacgttacgccatgcatggcctaagaagctttgtgcacgacaagactcctgagatcatgcctgcagttaacaagttcttcactgaccctaagtgaagcatgttgattggcatactactactactacttgctactggggattttacactttgctggcaactcaatatgttggggacatccatgacctctaaaagtactttgagcgcttggtgatgacttggtatatgtatgatggtggatgagtttgatcgtccatgcttgatgttcatattcatctgtcatctggatttgccgcacttcagtgataaaattgtcatttggatactggtaatggtaccgtcttgtgaagttcgctcaaaaa

SEQ ID NO: 265254 - DNA, 577 bp, Zea mays
tggttgtgttggtgctgcgcaggtgtacccgctgttcgcggcgatgggagttgccgttggcatctgcgggtttcagctcttccggaacatcaccggcaacccggaagtcagggtaaacaaggcagggagggcagccggcgtgcttgagaaccatgaggaggggaggcgttacgccatgcatggcctcagaagctttgtgcacgacaagacccccgagatcatgccagctatcaacaagttctttactgaccccaagtgaagcaaagcagctttggttggccgctgatgacgatggttctgctactagttgcccttggggattgtgtaccctttttatggcaattcgatatgtgaatgagttcgacggtccctgtttgttcctcgtactcacctgtcatgtggatttgatgcacttcagtgataaaactgtcagccaacgttcattacaagtggatttttgcaaactggttatgtaaaggataagtaattgtaatttacaagtgttttagactttgtcttttatgctgtttaagaatatatatggtacacttgatctgatgtatctgtcctttatgcc

SEQ ID NO: 265255 - DNA, 427 bp, Zea mays
aagggcagccggcgtgcttgagaaccatgaagacgggaggcgttacgccatgcatggcctcagaagctttgtgcacgacaagacccccgagatcatgccagctatcaacaagttctttactgaccccaagtgaagcaaagcagctttggttggccgctgatgacgatggttctgctactagttgcccttggggattgtgtaccctttttatggcaattcgatatgggggcgtttggttacttgtatgggtgagcctggctcgtatctagtgagcctggctcagactggactggctgagtgcatgcagtatagcgtgtttggttgtgtgtatgtggccagtctggttcacaagagatgttgtttggttgcttgcatgagtacatggtgcatgagttaaaaaaatttaaaaaatctattaatagacact

SEQ ID NO: 265256 - DNA, 508 bp, Zea mays
cccacgcgtccggtcgacgccgccgccgtcgtgctgctcgcagctcgccagcgtggtgcagaccagcccgcagtgcctgtgcgccgcgctcagcagcgactcgtcgtccctcggtggcgtcaccatcgacaggacgcgcgcgctgcaggctgcagctgccccaggcgtgcagcgtcaagaccccgccggcgagcaagtgcaactctgttggtggcggcagcgctccgggcgccgcgacgccggccgcgccgtcgtccggcgtgccagcgaccgcagccgcaggaactggcagtggatcgaaggcgacgccgacggcgccgttcctaacgtccggcggcgcgtcagtccggggcgcggtgagcctggcgctagcattcgcggctgtcaccgtctatgccatatcggccatgtgacagacttggctcgtctatctctgttacccacggcgtttggggattcagacgtgacacgttcaggatttaatttggcgtagaggatttggcgtcgc

SEQ ID NO: 265257 - DNA, 523 bp, Zea mays
gtgacccaggtggtcgagatctcgccggagagcatcgcgcgcatcaaggacgacttcaaggacgcgacggggcagacctgctccaccttcgacgctgtcacggcggtggtgttcaagtgccgcgcgctggcgatggcgctccccgacgacgccgaggtccggctcggcttcgccgccagcacgcggcacctcctccacggcgtgctgccgtcggtggacggctactacggcaattgcgtgtaccccgtgggcatcacccggaccagcaaggcgatccgtgaggcgtcgcttccggaggtggtcggcgtgatgcgggaggccaaggaggcgctcaccacgcggttcacggactggatgcgcggcggcgccaaggacgaccactacaacgtgccgctggactacggcacggtgacggtgtcggactggagccgcgtcgggttcaacgaggtggactacggcttcggcgaaccggggtacgtcttcacgctcaacgacgacgtcaacatcgtcgcgtcggtgatct

SEQ ID NO: 265258 - DNA, 470 bp, Zea mays
tcccacgcgtccgcggggagtggcggctgaagcggtacgacgaggcccgggacgagtggcggatggtggccggcagcggggtgccccccgaggtgcgccggccgcacgttgtcgctggcgaggtcggggaggtcgctggcgggaggcggaggatatacgtcgtcggcgccgggctcgacgtcgccgtgggcacggtttctgccgccgcatccgccgccgccgcggtacccggcgtcgaggacgaagtggtggagtgggaggtggtcaagggctccgccgagttcgccgggatggcgccctgcaacgcgcaggtcctatacgcatgaggcgccgccggaccccgccttcgggtagaacgtccacaaaccgatggttcggtaccagtcggcgcagccacaggggtccaccagccccgtgccgcatcacgtcgccggcgaacgcatacctagcccacaatgtaatggaacgcg

SEQ ID NO: 265259 - DNA, 348 bp, Zea mays
tatacgtcgtcggcgccgggctcgacgtcgccgtgggcgcggtttctgccgccgcatccaccgccgccgtgttacccggcgtccacggcgtcgagaacgaagtggtggagtgggaggtggttaagggctccgccgagttcgccgggatggccccctgcaacgcgcaggtcctatacgcatgaggcgccgccggagcccgccttcgggtagaacgtccacaaaccgatggttcggcaccagggtccaccagccccgtgccgcctcacgtcgccggcgaagcgcccacctcgcccacatgtcagtggaacgcgacaggctcccgctcaatagtctggtgggcaggagcgt

SEQ ID NO: 265260 - DNA, 976 bp, Zea mays
  unsure (1)..(976): unsure at all n locations
canagattgcctttatgttcttgacaccaggttcattgccttttgagaagttgtggtaggaatntttacagggtcatgatggtcgttattccatctttatccatgcatctcgtgaaatacctgtacattctagctccctctttgttgggcgtgaaattcgcagtgaaaaggtagtatgggggaggatttcgatggttgatgcagagaagaggctgttagcaaatgcattggaagatgtcgataatcaattttgtgtcttgctttctgacagctgtgttccactacatacatttgattacatatataattatctgatgggaaccaatgtcagtttcattgattgcttcttcgatcctggcccacatggaactggaaggtatacgatggaaatgcttcctgaaatagaacagagggacttcaggaagggtgcccagtggtttgctataacacgaaggcatgctttattgattctggcagacaacctttactacaataagttcaagctgtactgcaagccagcagatccgcgcaactgtattgctgatgagcattatttgccaaccctcttcaatatggttgaccctggtggaatagctaactggtcagtgactcatgttgattggtccgagggaaaatggcatccaaggtcatatagagctgcagatgttacatatcaactcttaaagaacataacgtctgtcaatgagaatgttcacattacaagtgatgataaaaaagtgtgtgacacagaccccatgtatgtggaatggaacaaaaagaccctgctatctttttgctagaaagttttacccagaatctttgaacaacctgctgaagctattctccagttacacatcggcttgagttctacatgattcttttggcattttgcctaggagattcctctaggatttatctttntgtgcttcatgtaaattgtggaattgatacttanaggcttaacagagttacagat

SEQ ID NO: 265261 - DNA, 521 bp, Zea mays
cgcaaagaaaagaagtaaaacgaggagaaagcacaaaagttcatcagagtcaagttccagctcatcttcagaatcttcaagcagcgacgatgagggtaggggttcaaggaagtccagatcacagtcgagatcaaagagaacaaggaaggaaaagaagagtcggtcaaggtccaagcacagaggcagtgaaagcgaggaggaaggcctggtacgcctctctaaattcttcgggaagtaaggagtagacgctgctgtacccaagacgcctttttcattttgaaacgtagattggtgggtttggatgtatcattcaacacaaattacttctgaaggttgagcgagccgtttaccatggtgttctcaatatgatgctcagctgttaagagggtctggtcaagttgtgtggcttccaaaaactttgtaagcaactggtaagtcattgttaaatcgctgtaccttggaggatttgatgccatatatttgagacattgaactgctatatttatgttaagactttacat

SEQ ID NO: 265262 - DNA, 812 bp, Zea mays
gtcttaactcacggcaggcagagacgcgcaccaccagaccagcagcagaacgaaagggatctccggtccccgggccccggctcctccccttccgattccaatctggtctcgccggtccgggcctggcggcgagggagagatggggaagaaccaggcgtacaaggcgatgcagcgggcgcggctggggtcctcgtccggcgcgccgggcgccgccgacgcccccgaagacggcatgacggacggttcattccattctccagagtggcatgcggcgcgcctggccagccttaacaagacgcacaccctcacctgggaggagttcaagaagaagcagaaggaagaggaactgaaaaggggcgagctggaggctgacaaagacaaaatgatgagagagtatagagctcaactggatgctgaaagagctcaaaagctagcaaacggaagaaatcactcaaggtcaaactcaaaatcatcatcttccaagaaagagaggaaggataaggacgcaaagaaaagaagtaaaaagaggagaaaggtatactctagcttatgacctgctgcctatttgtgaaattgctgtgatttacctaatggaaatatatttagttatgataactctgttctaggtactttgcttacttaaaatttgtttggtgctctcacatttaaatctttaacagcacataagttcatcagagtcaagttccagctcatcttcagaatcttcaagcagcgacgatgaggataggggttcaaagaagtccagatcacggtcgagatcaagagaacaaggaaagaaaagaagagccggt

SEQ ID NO: 265263 - DNA, 2015 bp, Zea mays
gcagattgtaatcacgccgatggtacagtcgctgtaattgaggcaccacgccaatcagatttactgattgagttgatcaggaagctgcagcctcaggtggttgttactggcatggctcaatttgaggctatcaccagtgctgcttttgagaacctactaaacgtaacataagatgttggctcccggctgttcctggatatttctgagcatctggagttgtctagcctgccaagctctaatggtgtattgaaatatcttgctggaaagacattaccgtcacatgcagctatactgtgtggtttagtaaagaatcaggtgtactctgatctggacgttgcttttgccatttccgaagatgcagctgtatatcaagcattatcacaaactattgagctattggaaggccacacttctctgatcagccagcactattatggttgccttttccacgagcttctggcatttcagattgctgaccgtcatccacagcaagagagacaacctgcggaagtgatacctcagcagatgataggattttctgacccagctgtgtctaccctaaaggctactgaatttttcgttcctggttcagctgaatccagcattattcatatggatttagatcgcagcttcctgccagtaccttcagcagtgaatgcgtctgtttttgaaagttttgtcaggcagaacatcactgattctgaaaccgatgtccgttccagcatccaacagctggtgaaagacagctatggtttatccgcagctggttgtgcagaaattatctacggaaacacctccgtagcactcttcaacaagctcgtcctttgttgcatgcaagaacagggcaccttgcttttccccttgggcaccaatggccactacgtctccgcagcaaagtttgtgaacgctagcaccgtgactataccgacaaatcccagttcagggttcaggatcgagcccaaggttctagctgacactcttaagaatgtatctcggccgtgggtgtatgtttgcggccccacgatcaaccctactggctttctgtacagtgacagtgacatccgagagctgctctccgtatgcgctgaatatggagccagggtagtgatagatacatccttctctggcctggagtacgagaccgatggatggaggcagtggaatctggcaggatgcctttcctctttgaagcgttcagagccatcgttctctgtggtcctgctcggagagctgtcctttgcgctgactgcaggtgggcatgactttgggtttgtgatattgggtgactcgtcgttggctgagacgttccatagtttttctagcttgagtcgaccgcacaccacattgaagtacactttcaagaagctgctggggcttaagaaccagaaggaccagcatttctcggatctgatagtggagcagaaggaggagctgaagaatcgcgccaaccagttgatacagacactggagagctgtggctgggaagctgccatcggttgcggtggcatctcgatgctggcgaagcccaccgcgtacatggggaaggccttcaaagctgctggcttcgacggcgagctggacgcgagcaacatccgggaagccatcctgagggccactgggctgtgcataaacagcagctcctggacggggatccctggctactgccggttcagctttgctctggagaggggggaattcgagcgtgcgatgggatgcatagctcggttcaaggagctggttctgggaggcgctcagatgaatggtgcctgatggagcaatccatgttatacgtaaccttggtgctgtgtagtagcgatgatattgttccaggtgatggagatatcaaggaataacaagagcctacctgctgtgaagtcaatgtactactaggatggatagggcgcttcgatgcgccctttctgtcttcgaattgctgtgctgtgcacggagaataaacatatactattatatatatacatacaatttgctaacctatactcctatttgttgtcgtt

SEQ ID NO: 265264 - DNA, 559 bp, Zea mays
cctataataaacgggcgccacgcacgccacagccgcggcctgcgagcgaggcatacacatccacgggccacgcccaccggcatctcacggcggaagcagccaagcagccggccgggcgcctcccgtgccgccgctgagcatggccgctgctcccgtgggcgctcagaatcgctgcgtcttcgttggcaacataccatacgatgcgacagaggagcagctcgtgcagatttgcgaagaggttggcccagtcgtatccttcaggttggtgattgacaaagagactggcaagccaaaaggttatggcttttgcgagtacaaggacgaggaaactgctctaagtgcacggcggaaccttcagggttacgagatcaatggtcgtcagttacgggttgattttgctgaaaatgggaggaacactgacagaaatagagaaaaggtcgacgatcctcaaatttttactgtagaagagcctttcctaccacctttggagttctctgttaatctgagaagttgtattgtcttcgttctgtgaatgataatagttgcgccttcttcaacc

SEQ ID NO: 265265 - DNA, 411 bp, Zea mays
cgtaaactacaagcttcgagattggctttttgccagacagcgctattggggtgaacctttccctgtgagctaccgtgatgataccaatgaaatggttcctcttacagaagatgacttgcccttgacccttcctgaattggatgatttcactccaactggtactggggagccacctttgaccaaagcaacaaattgggttagaaccattgacccttcatctgggaagcctgcgagaagagaaacaagcaccatgccacaatgggctggatcttgctggtactatttgaggttcatggatcccaaaaactgcagtatattggttgataaggctaaagaaaggtattggggtccagttgacatctacgtaggtggtgctgaacattctgtcttgcacttgctttatgcaagatt

SEQ ID NO: 265266 - DNA, 492 bp, Zea mays
cccacgcgtccgaacccatggttaccttgtacctttgattgaaaagctgtgctcaaaatcttctaccaccaaagatgacaattgtcaggacaccaccccaggagcacatgacatggtgttggtcctttgtcccaatgtcatgctctgcgagcaagttgttcgcatggctaattcattacttgacgagtctggcaaaccacttaaaagtgctgctgctgtttgtgggccaaatggctggccagctgttcatccagatattcttgtagccaccccagctgctctattaaactatctatttgactatgaacccggaaaagaggcgaagagagggattcatgcgtaatgtaaaatttgtagtgtttgatgaagcagacatgctactctgtggaaggtttgagaaccaggtcattcgtctcatcaatatgttgagatttgatgaaaagctactttctagagcacaggattctggaaaggatgtatcacttgggagtg

SEQ ID NO: 265267 - DNA, 806 bp, Zea mays
ctttaatcactcgaattcctctgccttttcaagatatggcaataaaaggatagaaccatcaggtgagattcagtttttcccttctccctgcgtcattgggcaagggcatgttaatggcaagaacccagttttccaacccgatggggtgttgctgcctcccaatgaacataatacaggtgagagtacaaggcaagctcgaatttctctggacagtaggacagagggtgctgccatcctgtgttccactagtgccagggaagatgctggtgcaagtagttcttcccatagaaaggacagtatgagccatccctcatatgggtttgtacctgttccaattcctgtcggtgccacgatgccctaccattgtggtgcgattctgcagcccgtatactacccacagggtcctcttatgcactgtgattcagctgcaatcaacaaggcagcaattcagcaaacctctggccaatctaactaccgtgaagattgtggtagtggtagaccatctcaggttgatgaacacaaacagtcagaggaaaaccaccagttgcatcattcaagacaaattcatcgggaatcaggacaaccagttgacatgggtagagctcacatggatcatgctaaccagagcgcaagctgcagccgggatatctgtaaaggaagcggatgcacgggtagcggtgaagccgataccaatgcgaatacgacggttggcctagagagtggcaacgagagtggcatccaatatagtgacaggtctcaccgagaagctgctttgatgaagttccgcatgaaaaggaagacagatg

SEQ ID NO: 265268 - DNA, 516 bp, Zea mays
  unsure (1)..(516): unsure at all n locations
caacatgacccacatcccacaatctttctttgggcacagaacgaagaaagaacctatggcacagtcgtcgtccgcctccgtcaagctgctggttctggttgtcctccctgcgctcctactgctcctcgtccaagcgcaaggggctcggccagcggcggcgaacgcgacgaccccgacccccgccaccaccaccgggtgcgcggcgtcaagcgtgacggtgtcgcagtccaacacgggcgacagggccgggtacgacccggtgttcgaggtgacggtgcgcaacgcctgccgctgcgccgtccgcgccgtgcgccttcgctccgagggcttcgccagctcggtgcccgtggacccgcgcctgttccgccgcgccggccgcgactacctcgtcgccgacggccgccggatcgagcccggcgccgacgcgcgcttncgctacgcctgggaccgcgccttccggatgaccgccgncgncgtgcgcgacgactgctcctgatggaatgagtgagtgcggta

SEQ ID NO: 265269 - DNA, 1563 bp, Zea mays
ccttttcgtgcggttttgactcctagtcctaaaccagctcccacgccgccatgatgcagccgccgccgccacatcagcagcagcaatgggcaatggcgcccccgcccccgccgcagtactaccaggcggggcaccctccgccgccgcccccgcagttctaccaggcgggccctccgcctcccgctatgtggggccaaccgccaccgcaggcggcgccggcgccggcgccggccggcggcggggcgggggacgaggcgaggaccctctggatcggggacctgcagtactggatggatgagaactacctctatagctgcttctcccaggctggcgaggttatttccgcgaagataattcggaacatgcagactgggcaacctgagggttatggttttattgaattcagcaaccatgctgtagccgaacaagttctgcagaactataatggtcaaatgatgcccaatgttaatcaacctttcaaattgaattgggctaccagtggggctggtgagaaacgtggagacgatggttcagattatactatatttgttggggacttggcctcggatgttacagatttcattctacaagatacgttcaagagtcgttatccatcagttaagggtgcaaaagttgtctttgacagaactactggccgttcgaaaggctatggttttgtaaagtttgcagattcggatgaacagacacgggcaatgactgaaatgaatggacaatactgttctagcagggccatgcgccttggaccagcatccaacaagaagaatactggtggaccacaaccatcgagtgctatttaccagaacacccaaggaactgattctgatagcgatccgaacaatactactgtatttgttggcggccttgacccgagtgtgactgacgagcttctgaagcaaactttcagtccatatggagagcttctctatgtcaaaatacctgtaggaaagcgctgcggatttgtccaatattctaacagggcatcagctgaggaggccataagggtgctaaatggaagccagctgggaggtcagagcataaggctctcatggggccgtagccctgcaaacaagcagcctcagcaagagcagagccaatggagtggtggtggctattatgggtatccccaaggatacgatccatatggctatgctcggccccctcaagatcctgccatgtacgcctacgcagcatatccagggtatggaaattaccagcaacagccaccacagcagcccccgccacaacagtaatgatgtcccgagagtgatcatttgcaagctggtcgcaaagtagctggggggttggggcgcacaactttggtgcgttggcatgagaaattttgcggcggttgcttgtgttgtgttgtattgttccgacgcccttgtacacgtagcctgtgttgtaactgaatttttgccgaggccttatgagtgactagtgtttcaactgtaactggattgcacatttttgtcgcaaggaatgtactattattgtgtggctcgtgccgctttgaacgctgagtcccggtattaatttttcttc

SEQ ID NO: 265270 - DNA, 959 bp, Zea mays
ccagcgccgagatggcgctcaaggcgccttccgatggcaatgcgaagaaacggaaggctagcgggaaggggaaaggcaaggacggccccgggtccaccgccgccaccaaggaggagtccagtgggaaacggtgcaaatcggcggaggagagcagtggcgcggaggagaactccggcaagggtaaggccgccgcgcagagcaagagcgacaacggtgggaagaagcaggggaaggacggcgcgtccaagcctccggagccgcccaaggactacatccacgtccgggcgaggcgcggcgaggcgacagacagccacagcctcgctgagagggtgagaagggagaagatcagccagcggatgaagcttctgcaggatctcgtcccgggctgcaacaaggtggtcggcaaggcggtgatgctggatgaaatcataaactacgtgcagtccttgcaacggcaagtcgagttcctgtccatgaaactggccaccgtgaatccccagctggacttcaacaacctgcctaacctccttcctaaagatatgcaccagtcctgcggcccgctgcagaactcgcatttcccgctggagacctcaggcgcgccgctgccatacctcaaccaggggaaccctctaataggctgcggcctacccaacggcatggacaacagccagagctccatgcacccgctcgacccggcgttttgccggccgatgagctcgcagcagcaccctttcctcaacggtgtcagcgacgcagcgtccaaggtcgggactttctggcaagatgaccttcagagcgtagtccacatggatatggggcagcagagccagcaggagatggctcccacctcctccaacagctacaacgacggttcgttgcaaacagtgcacatgaaaatggagctttgacgtagctagctgaagaagtccagcccagagcttcgacgcctcctccccccc

SEQ ID NO: 265271 - DNA, 766 bp, Zea mays
cccgcgcgtccggctagggccgcccttttttttcttttcttttttttaagaacaaacatgaggaagtgccatttttttaagaagagaaatggatgaaagttacctgtttaaaagtttgccacattgtacgagtacccaaagtcttgccacaagcacatcaaacaagttttcttttgcagcaccgctacatatgctatgctaatacaaaaggcttattgagccacctcatctgtaggcacttcagtatcgccttcaggagcattggaattatcaataattgcgacaccctcgagatccagagggcgcccagtcattggatgaatggggcgcctatcacgtggcccacccttccgtgccatagctagcaatggaggtggtggcagaagtccggcacgaaagagaatactctgcacaggatctgatggctgtgccccaactgacagccaatacttcacccggtcgaatttcaggcccatcctcttgcctccatccttccctgggagcgggttatagtagccgaggacctcgaggtgcttgccgtctcgaggggagcggctatcggcggccatcacccggtagaagggccgattccggcacccgaaccgcgccagacggatccgtaccaccatggctgtagtttcctcggtttcctttcctaggcggtgccggtgccggtgcctccgccgccgccttctttcccaccttcggcagcggtgctgtggtgtgggcgaaagggttcaagggagatgggacgatgccaacagaa

SEQ ID NO: 265272 - DNA, 2125 bp, Zea mays
ggggcatgcttccaattttctgcaagtcgagagtcgagaccgccatcgaagcaccggcgccaatgaagacttgaagagggctaaaacgaaaaagatgccaggatgacaaaatttcccactccactcgaattaaaaccctagcggcaaaaccttcgctctgcgccgccgtcgcctgctcccgtcccgccaccacatccgcccaggagctcgccgtcggggaggctgctcgaggagccgcgctgtctctcccgcgccgcgaccttcgccctcgccgccgccatgatctgcgcgatctccggtgaggtgccggacgagccggtggtgtcgaagaagtcggggcttctcttcgagcggcggctcatcgagcgctacattgaggaccatggcaagtgccccatcaccaaggatgagcttactatggatgatatcgtgccggtcaataccaacaaggtcgtgaagcccaggcctttgcaggctgcaacattccaggactccttgggatttttcagaacgagtgggatgctctcatgctttctaattttgctttggagcagcagctacacacagcaagacaagaacttagtcatgcactctaccagcatgacgctgcctgccgtgttatagccaggttgaagaaggaaagagatgaggctagagcacttttggctcaagctgagagacagattccagcatcagttgcaggagctgctcctgcagctgttgtttccaatggaaaaagagcaatggaagatgaaattggccctgacggaaagaagattcgtcctggtatcaaccctgtcatgattgatgaacttacagagtgtaataccatgctttcagcacagcgtaagaaaagacaggttcctccaactctggcaccattagatgcactcgagagatacactcaaatctccagccatccccttcataagacaaacaaaccaggcattttgtccatggatgttcatccttcaaaggatgttgttgcaactgggggtatcgatacaaatgcagtaatctttgatcggtcatctggtcaaatcttgtgcacgcttactggtcactcaaagaagataaccactttgaagtttattccacgggatcaactctttgtaactggatcagcagataagactgttcgcatctggcaagagaatgagaatggaaactataactgtgtccatacactgaaagatcatactgatgaggttgaagctgttacagtacatgtgactcagaagtattttgtgagtgcttccaaggataactcttggtgcttctatgatatttcaacaggatcttgcctgacacaggttggcgatgcttcaggacaagagggatatacatctgcgtctttccatccagatggtcttatccttggaacaggaactactgatgctgttgttaaaatttgggacgtgaaggctcagtcaaatgtcgcaaagtttgagggtcatgtcggaccagtcactgctatgtctttctctgaaaatggttacttcctagcgactgctgctcatgatggtgttaagctttgggatcttcgtaaattaagaaattttaggactttctctccctatgatttggacacgccaaccaatactgtggaatttgattttagtggaaactatcttgccattggtggttcagatataagggtctaccaagtagctaatgttaaggccgaatggaatctcatcaagacattaccagatttatctggaacagggaaagtaacttcggtaaagttcggagcagatgctaagtacatagccgtaggttctatggaccgcaatctacggatatttggcctccctggagacgaccaaatggaggaatcaaccacagcggcagagtgaggaaaatccatggtacctaatttcctcctcctggtatactccgcaatatgttctgatgatgggtagactgagtgcaaatggatacatcacgagagaagggtcctcgcggcgatgaactggcttgagcttcggtcggtgtaaacaagctgtgacattattgtattgtaggcctcactaattcgtctgatggggatacaatttgttttgatgagtacgagtgtacgacgctaaacagccaaagttctatgcatagattccagtgattc

SEQ ID NO: 265273 - DNA, 503 bp, Zea mays
tggttcagatataagggtctaccaaggagcttttgttaaggccgcacggtttcttatcaagacattacccgatttatcaggaacagggaaagtaacttccgtaaaattcggagtagacgcgaaatacatagccataggttctatggaccgcaatctacggatatttggtctccctggagatgatcaaatggaggaatcaaacacagcggccgagtgatgggaattcatggtgcctaatttgtttcttctgccatcatcctcattatactgtggtgatggatagactgattgcacatggatacatcaccgtcacaagagggaagggtcctggcggggattactggtctgagcttcggccggtgtaaaacaagctgtgatattgttgtactgtaggccttactaattcttctgatgaggatacaatttgttttgttgactacgatgctaaacagctaaagttctctgcgcagattccagtgattccaaacgaactacctgcttcc

SEQ ID NO: 265274 - DNA, 392 bp, Zea mays
  unsure (1)..(392): unsure at all n locations
canaatttctcctctcgaagaaccctagcggcaaaacctttgctccgtcccgccgtcgcctgctcccatcccgccgccggcgctgccacccgcatctgccaaggcgctcgccgccggggaggctgctcgcggtgccgcgctctctcccgcgcccgaccttggccctcccctcctccatgatctgcgcgatctccggcgaggtgccggacgagccggtcgtgtcgaagaagtcggggctactcttcgagcggcggctcatcgagcgctacattgaggaccatggcaagtgtcccgccaccaaggaggacctcaccatggatgatatcgtgccggtcaagaccaacacgatcgtgaagcccaggcctttgcaggctgcaagcattccaggactc

SEQ ID NO: 265275 - DNA, 1524 bp, Zea mays
cccacgcgtccgaacaactcttaggacaaagttgtatgaagggctgcctgaccagttgactgatatggtggtgaatgcagttctctgcattcgcaaaccagatgaaccaattgatctgtttatggtggaaataatgcacatgcgccacaaatttgatgttgacacccgtctggttgagggtctggtcctggaccacggttctcgtcaccctgacatgaagcgcagggcagagaattgttacatcttgacctgcaatgtctcattagaatatgagaaaagtgaaatcaatgcaggatttttttactcaaacgcagaacaaagagagaagatggttgctgcagagagacgccaagttgatgaacgtgtcaaacagattattgaattgaaaaataaggtttgtgctggaggcgataaaaactttgtggtgatcaatcagaagggcattgaccctccatctctggacctccttgctagagcggggattattgctcttcgaagagcaaagaggagaaatatggagaggcttgtgctagcatgtggtggtgaagctgtcaattcagttgatgagttgactgaagattgtctaggctgggctggtcttgtctatgagcatgttcttggagaagaaaagtacacatttgtggagaatgtgaaaaatcctcgctcttgtactatactgattaaaggacctaatgaccataccattgcacaaatcaaggatgctgtccgtgatggtctaagatctgttaagaacacagttgaggatgaagcagttgtgctgggtgctggtgcttttgaggttgctgcaaagaagcatcttatcgacaatgtgaagaaaaccgtcaaaggacgagcacaacttggggtggaggcgtttgcggaagctcttcttgttatacccaagactttggctgagaactctggtttagatactcaagatgtgattgtttctctccagaatgagcatgaccgtggattagttgtggggttgaaccatcactctggggatccgattgatccccagatggaaggcatcttcgacaactactctgtgaagcgccagatcatcaattctggacccatcattgcatcccagttgctgcttgtggatgaagtgatcagggcaggccgcaacatgaggaaaccgacttagatttttgtcgccacctagccgagacttatttgttctaccttttgttttggttttgtgcctagtagtgatctggatgatacgtttgacttgagttggtcccatttcacgaagcaggtcgcattcgcttttttttttttgggattactgcgtgcttccattttaacatgggattttagttttatcgatggttttaacatcctcctatgaggaaacaaagcctctagagagacgaggttgccttcccgaagttagtgccaccaaacttgctgcatggaacatgaagaagcaatgtttatcccaatgttaccatcaagtaatccgatgtgatggataaaaaaaaaaaaaaaaaaaaaaaaaaaaagggcggccgc

SEQ ID NO: 265276 - DNA, 611 bp, Zea mays
cagacgcgtgggcggacgcgtgggttcttacccaatggaggagcagcattcacgattccggcagtggcaatggcagtggcgcctcttctccctcctctcatcccagccggagctgctcccgccgccgcggccggccaaccatgtcaggtgggaggagaccgccgccgcgcagctcttctccgcaagcctcgcgggagtgcgcaaggaggagatcagggtggaggtggaggacgccaggtacctcgtcatccgcaccgagctggacgccggcaccggcaccggcggcgccgtcgcggacgcgaggagcttcgaccggaagtttcggctgccggggatggtggacgtggacggcatctcggcggcgtacacccacggcgtgctgaccgtgaaggtcccgcggatgcacacccgggccaggcctgtagttgacatcctcggtgcgggggcggggccggccagcgaccacgcggcccgggcggcctgattcgtgatttatagcatcaagcatgtactcgctctatcctataaaaaaattatatttagagttcaaattttatttcaaaataaatacacatttagaaataagatcatatgggcttaagtggttttcc

SEQ ID NO: 265277 - DNA, 296 bp, Zea mays
cccacgcgtccgcttacccaatggaggagcagcattcaggattccggcagtggccatggcagtggcgcctcttctccctcctctcatcccagccggagctgctcccgccgccgcggccggccaaccatgtcaggtgggaggagaccgccgccgcgcacctcttctccgcaagcctcccgggtaacccaccccactcgatccctgactcgcgcgtgctgctcgccgtcgtcggtctttgcagccagccagctgagctgactgctgagcaaggccttcttcttctgtgtgccgtcagg

SEQ ID NO: 265278 - DNA, 756 bp, Zea mays
ttcttctgacgcgttggcggacgcgtgggggcatatcagatatgagataatcaaaggaatttgccatggtttgcattaccttcacacagattgccaaattgttcatttggacctaaagcctgagaatatattgctagatgacaacatggggccgaaaattacagattttggtatgtccaggctctttggtctacaacaatccaaaatcatcaccaaaacttgtggaggaacacttggatacatggcaccagaatacttactaaaagggttgatttcagtgaaggccgacatattcagtttgggcgttataatcatagaggtgatgaccggaggccggaattatcccacttgtgaaaaatcttgcgagcaattcgctgttgatgtggttggacgttggaggaagaggttattggaggaggcaggaaggtacacacccttggaaaaatacgttgagcaagtagagacatgcatcttgataggattgatgtgtgtcgatgatgatcctaacaaaaggcccacgacattggacattatcgaaaggcttaccaaagtagatgtcacgaacacggacagagggccacccaaaactctggaggccgcgacagggcttacaggccaccccaacctcgcaactagatcatttcttgacaggttccgccgaaccatcgtgatagggatgctgaagaaggccctgaaaatccaggacgtatcgcagttggagcagctcctggccaaggaggtgctgctggagctcca

SEQ ID NO: 265279 - DNA, 644 bp, Zea mays
gattgttagagcagaattaaggatgtataacccccaatacctggagcgaccttatgttgaggaccacaacaaaattgatcttcctaaggcccaagatagactatctgcactggtcttagagatatcttcaattggatgtgaagaagggcatgagcaaagtggcagcaaagataacctaaatggacgagtaagtgatcatcaggtcttatcagaggctaaagctgaaggtgttgaaaaggagctcggggactatccaagacctgaagctgtcgtggctgctagcgtattgaggcatatcgggatcgacgagatgctgaaggagataagggcagccctgagaaaatgctttgatcacaagttaccagaacattgagcaaagtaagttagcataatataggctaaatagtaccatagtccagttccagtagcagaaaagggaatgaactggatgcccccctggcacatactgaagaatccccaacggcagttaaatccatggagagttttctgaagcaacggcaccagcggtttctgaagggtgaaaacactaatgctggagcacagcggtttttcaggcgttgtttgtaacaccgggttctccagtgacatttctgcgaaaattgaatttgttgtcgtccacagct

SEQ ID NO: 265280 - DNA, 636 bp, Zea mays
tcctcggcccgtgcgccgagagcccgcagccggaacggaacggactggatggcgtccagttcgctcctcgcaatgggagcggagcggacccaaaaactcgaaaagtcgaaatccaaacccgctgatcagcttatccccttcgcaggagccaggacggacgaactgcgagtacacgagagaggacagaggagaggagacacaggcgacacgcgccatttgggagagggaaaggaatggagctgacgtcttcttcccgctccgtgctctcctcctgcaaccggccggtcgctcgtgctctttgcaggacggcgtacccgggtgcaaggaggaaggagaagggaatagtatgtatcttgagcgaggagaaagaagtggtacaaaggacgatccggaggcgagctgccttttctttgttgctggcttcgccggtgctatcagtggcgttctcggcctatgggaagagtaaaaccatgaacccttacgatgaaaggcgtctgcttcagcagaataagaagattcaggaagccaaccgtgcccctgaggatttcccaaacttcatcagagaaggcttccaggtcaaagtagtgacaccggacaactatattacacgggcctctggactaatgtatgaggaca

SEQ ID NO: 265281 - DNA, 725 bp, Zea mays
cggacgcgtgggcaaaccctcaaattttcgggatttggaccttatccttgcaagggacaggcagaactatgaagatatattgaactcgtttgagagaatggagacgcaaagagcctctccctgatagtgcacccaataagggtaagctgatgtgctcctactgcaaacatcatactgagtctgaagttccagatccttattatggaggccctcagggatttgaaaaggtgctggacttattggaagatgcttgcgagtcgctgcttgatagtatcgtcgcaaacaatgcaagcatttctgggtgacatcgatgtaaatctccacatacagacatctattttcagacgcaccgaaggctgtagcatccatgcacaaccggagtaatttggtttctaatgcaacattgatcatgtcgtcattacccaggtcttggtctggtttgtatataccaccatccttatacctggttatgtgataagtgacaaaaaaactgctcatcatcacttttttccactaaagataatcagaaacaatcagaatgaccgacaaagcatgcttatgtccatttgaaacttactattttcgcataaggcatactcggttcctcaggaaccatgcttggaacaattgtttgactaatttatatgacatttgatgagctggaacagtttctgggttctggctagatttctagctaaaaaaaaaaaaaaaaaaagggcggccgc

SEQ ID NO: 265282 - DNA, 462 bp, Zea mays
cttcattcttgaaagttcacacttactgaattggtacgggcatggtcattaggttaagctgatgtgctcctactgcaaacatcatactgagtctgaagttccagatccttattatggaggccctcagggatttgaaaaggtgctggacttattggaagatgcttgcgagtcgctgcttgatagtatcgtcgcaaacaatgcaagcatttctgggtgacatcgatgtaaatctccacatagacatctattttcagacgcaccggctgtagcatccatgcacaaccggagtaatttggttgctaatgcaacattgatcatgtcgttattacccaggtcttggtctggtttgtatataccaccatccttatacctggttatgtgataagtgacaaaaaaaaaaaaaaaaaaaaaaaacaaaacaaaaaaaaaaaagagaaaaaaaaaaaaaaaaggagtagaaaa

SEQ ID NO: 265283 - DNA, 940 bp, Zea mays
gttcaagggaacaaaaaactgatattagccgttctatggcaattgtatgcggtacaacattctacaactgctgaagaatcttagatttcactcaaatggaaaagagatcacagataatgacatattggcatgggccaataagaaagtaaaagattctggaaagcaccactcttatatgcaaagtttcaaggataaaagcctttcaagtggcacctttttccttgacttactaagtgctgtggagcctcgagttgtgaattggagccttgtgaccaaaggggaaaaagacgaagagaagcaaatgaatgcttcatacatcatttctgtggctaggaagcttggttgctccatttttttgttaccagaagatatattggaggtgaaccagaagatgatgctaactctgacagcaagcattatgtactggtatttgaaaaggccaacatcacaatcattggactctgaaaacgggagttcatgtgaaacaacctccatcacaacttcagatgattctgcatctgaatcatcgattgatgacaatacaactagataaaagagcagggtcatgaaaataattgatatgacctgtcattttgaaaacttgggattgattgtttgctgtaattttaagggcaaatacattcaagaccgaggcaagggaaatggttaagggctttgggtgtttttttgaggtttaatagtgtgattgggtgaaagatgtttgacatcctgtaaatatatctataactagtgacaataggttgtccaaaatccactatttgagttagaacaatttgagttacaatgtacaataaattagtgtcctatccgttaaagcttttaggcgcatgttgtcatatgcttatggaataactacaacattttccttgaaatatgcttaaattaacacgagcttaaatcgcttgtgatttggcttgaa

SEQ ID NO: 265284 - DNA, 933 bp, Zea mays
gcgtccacgcgtgcgtccacgcgtccgatggcgatggccgcgctccactcgccacgtgtccccgaaccctgatgtaaatccagcacggcgcatacccaatcagttcccgttcccctcgtcgacacctgcagtgccaagttgcatcgactcctccccggtcctccaccgcccgccgccgatggatgtggatgtggacgaggccaccgccacccctgcctccgcctctgccaagcccgcttccaacggcgaggccccctccggcgcccgcgaggtggatgtcggcgaggagtacacgctcgccggcgttctgcgcagcttcgtcgacggcgtctggtacccggacgagccgctgctccggcggctccgggcggcgtcctgcgaggccgcgccgcggctgaagggggcgtctcggaactcagcgcgggatctgctcgagtggacaaggcagggcagcggcctccgcgccatcctcgtcatctcggtcgggacaatcatgcctatagcattgactggccttttaatcttcatgttctttctgctaattgccactgctaatgcgatcatcgtctcagccctgatgtcactggccgctgctggcggattcttggctatcttctttgcttgcttggttgcagtgtatattggagcagtaggagttgctatctttgccatttctgccattgtcatctcatcagttgttggagttatgattactactggttgggttgggttcttctggatgatctggttcaccgcaaggaagagcatggacctgacgaagcattccatcagcatgacgagctcggcagtccaatcctattccgcgtcccgccaagtgaagcagaagcatgtcgactgaggctagttggttgcgtcttgcgtcctcgggtcgatctgtgtgaattacggtagacgacatgcttgttttggcag

SEQ ID NO: 265285 - DNA, 482 bp, Zea mays
agtgtatattggagcagtatcagttgctatctttgtcatttctgcgactgtcatttcagcagttgttggaattttggttgctaccggttgggttgggttcttctggatgatctggttcaccgcaaggaagagcatggtcctgacgaagcactccttcggcatgacgagctcggcaatccaatcgtattccgcgtcccggcaagtgaagcagaagcctgtcgactgaggctagttggttgcgtcctgtatgaagcggatatatctatctatgtgaatcccggttttgctgtttgtttgtttgtaagagtgtagaagacagcttgcttgttgcggcagctctgtttctctcggtgactaggtgtataatgctagctctgaactttggcagcatgtacgttcggcatggcggtcaatgctgttatttaaaggatagtgagcagatgttaatgtttatagcaaataaaagcatgttaatgtttatt

SEQ ID NO: 265286 - DNA, 1169 bp, Zea mays
ggcccggtatactttggtcgtcccacgcgaccgccacgcgtccgcccacgcgcacgcggacgcggggggatttgaacccctaacgctcgctgccaggggcggaggaaggggagctcgacgcacccgcaagtcgcccgcccacggaacgcgccgccgccgccatcacatcacagaggcctcgccgtcgtctcggatattccccgccgtaggaccagtttccctccagctgccggagaccatgtcgggcggcctggacatgtccctggacgacctcatcaagcagtccaagtcccgacccaaggacaacccggcgtccttgtcggggcctgcccgccgcgcgccacaccccgcccgcgccgcgccctacccaccggccgctcccaaggcccgtgccgccgccgactcgccctacggggtctactccgagcacatcgccgcgatagccccgcccggccgctgccggccaaagcaaggtcgctcgagacgggaatgaagctgcacatctccaatcttgactccggcgtcacggtcgaagatgtccaggaactcttctcagaagttggggagctcaagcgttattcaatgaactatgacaaggatgggagatccaaggggactgcggaagttgtttttgcaaggaaagtggatgctttggatgctatcaagagatacaatggtgttctacttgatgggaagccaatgaatttagagctcattggaaacaatgtcgaaccacctcccttgccaccattaatacacaatcgtcctttgcagaactataacgatatccacagcagtgtgcttcaatcccaaagaaatggtcagcgaagagcacctcaagtcaacggtcggggtggacgcagtagtcaaagcagtggtggccggggacaggggaaaggccgaggccaggaccggaatcgcaccaccatttctgctgcagatcttgacgccgaacttgacaagtaccatgcagcggcagtgaaggaggaatgaggctctggcgttctgtttactaaacagctggtacggccccgggacagtgtggccttctgctttagaagcatgaagtttgctatcttagtcctagtgttttatgctagaaattttttttggcccatgtacaaccgcgtctctgcgtcaagattcctggtgttttatgtgtagcatga

SEQ ID NO: 265287 - DNA, 1063 bp, Zea mays
ggacaacccggcgtccttgtcggggcctgcccgccgcgcgccacaccccgcgcgcgccgcgccctacccaccggccgctcccaaggcccgtgccgccgccgactcgccctacggggtctactccaagcacatcgccgcgatagcgccgcccccgctggccaaagcaaggtcgcttgagacgggaacgaagctgcacatctccaaccttgactccggcgtcaccatcgaggatgtccaggaactcttctcagaagttggggagctcaagcgttattctatgaattatgacaagcctgcgagttcttaggggactgtggaagttgtctttgcaaggaaagtggatgctttggatgctatcaagagatacaatggtgttctacttgatgggaagccaatgaatctagagctcattggaaacaatgtcgaaccacctcccttgccaccagtaatacacagtcgtcctttgcagaactataacgatatccacagcagtgtgcctcaatcccaaagaggtggtcagcgaagagcaccccaagtcaacggtcggggtggacgcagtagtcaaaccagcggtggccgcggacaggggagaggccgagggcaggaccggaaccgcacccccatttctgcttcagatcttgacgccgaactcgacaagtaccatgcagcggcagcgaaggaggaatgaggctctggcgttctcttctactaatctatttacacaggtggaaaggcgttctcttctgggggcgttcagaagcatgaagtttactatcttagccctagtgttctacgctagaattcttttcgaccaggattctgttttgtgtgtaggatgaacttgtggttctactttgcaggatcttatttgctgctttgtgggcacgaatattgagaacaactggaaaccgactttgttattgtgtccgccctggtcctgggtctgttctgttgtattttaagtagttttgggttgcctaccgaagacatcaggcaaacatattccggagcccaagagtctctgtgttctgtcttgatgttttacaattgtgcctttagtctt

SEQ ID NO: 265288 - DNA, 279 bp, Zea mays
gggaagccaatgaatctagagctcattggaaacaatgtcgaaccacctcccatgccaccagtaatgcacagtcgtcctgtgcagaactataatgatatccatagcaggcataccattctggttacttcgcagtatgcctcaatcccaaagaggtggtcagcgaagagtgccccaaggcaacggtcggggtggacgcatagtcgaagcagtggtggccggggacaggggaaaggccgaggccaggaccggtatcgcaccaccatttctgctgcagatctt

SEQ ID NO: 265289 - DNA, 555 bp, Zea mays
cggacgcgtgggatcgaaaaagaaaacggccttgcggtcttgctctccttcctcgtggtcgggggccggtgcagctgtaggcacgcgcgcctcggcaaaccctgcgcctcctcgcccatcctcccctccatcccgtcccagccgcagggccatggactcttctgccggcgcaggccgccaccgcgttcgaatcgcagtcgtcggcgacgtgcacaatgattgggcccttgaggaagattcaaaggcgcttcgatttcttcagccggatttagtgctttttacaggtgattatggaaatgagaatgttgaacttgtcagaagcatttcagatcttcagctaccaaaggcggcaattcttggcaatcatgattgctggcacacacatcaattctcagagaagtaagagtcacgatctcatcctgaaaggagaaagtactaaagtagtttaatttctttttatgtcaaaatgtactggttggtattcaggaaggtcgatcgtgttcggcttcagctcgcaagccttggtgagcagcatgttggatacaaatgtttgga

SEQ ID NO: 265290 - DNA, 1087 bp, Zea mays
cgaacccctccagggtaaaaagagggctacaccacgggcctgctagaatcgtggcgtctccctggggataaagtacttctccagctcctctgcgtcttccgccgctcttgctgtcctctgtgctatccgctagggtttatctgctcgaggaatggcgtcggtgcaggtctccggcgcgggggtcggtgccgcggccttctctgtgaaggggaaggcctccaccggtgcgctccggcttcgctctacgttgaccttcggcgaggtctgcccggcgcggcgggcgttccgcggcctcgtcgtcagggccgctaccgtcgtcgcccccaagtatacaacacttaagcccttggctgatagagtgcttgtaaagattaactcttccgagaagaagacaactggtggaatcttgctccctacgactgctcagtccagacctcaaggtggcgaggtagttgctgttggagaaggaaggataattggggataagaaagttgatgtcagcattcaggttggagctcaggttgtgtattctaagtacgctggaaccgaggtcgcgttgaacgatcacagccatctggttctcaaagaggatgacgttataggtatcttagaaactgatgacgtgaaagacatgaagcctctgaacgaccgtgttctaatcaaggttgctgaagctgaagacaaaactccaggaggcctactgcttacggaaactgccaaggagaagccatctatcggaacggtcgtagcggttggcccaggccccctggacgaggatggcgagaggctcgcgctgtccgtctccgcggggagcactgtcctgtactccaagtacgccggcagcgagttcaagggcgccgacggcacgaactacatcgtgctgagggcgtcggatctgatggccgttctctcctgaactgggcttgggctggaggacgaacgaggtgcaggtgcaggagcaggcttagcaataccgtaggattcctcgcggctttcccgtcccctcccccctcctacttggttgtcttgtttgactgtcttctgaggaaccgaacaccagtaataagcacaccgatgccgttcatac

SEQ ID NO: 265291 - DNA, 763 bp, Zea mays
cccactcgtccgcttggcgttgcctccatgctcattgccgcgaagttcgaggagatcagcccgccgcacccggaggacttctgctacatcacagacaacacctacaccaaagaggagctcctcaagatggagagcgacatactcaagcttctcaagttcgagttgggcaatcctaccattaagaccttcctgagacgtttcataagatctgcccatgaagacaagaagggctccatcttgttaatggaattcttggggagctacctcgctgagctgagtctactagattatggctgcctccggttcttgccatcagtagttgctgcttcagtcatgtttgttgctaggctgaccattgatccaaataccaatccgtggaacacaaagctgcagaagatgactggctacaaagtttctgaactcaaggattgcatcgtagccatacatgacttgcagctcaacaggaaatgtccatcattaacggcaattcgagacaagtacaagcagcacaagttcaaatgcgtgtcattgatcctcgtgcctgtcgtgatccctacttcatactttgaagacttagctgagtagctgctctcggactgtaccgctgtaaggctaacaatctgagctctccttgagctcttagggacatgcagaaaataaccgtttgatgagctttcctctcatttaagtagcgtggtgaaagctattggtttgaggttctttaggattcgcgccgctgtgtcactcttagtgagaccaggca

SEQ ID NO: 265292 - DNA, 1018 bp, Zea mays
ttcagggcaaccatatggaaaaatgggaagcaatttacatgcttaaatatgtcctatcctcaattcattacccatggataatcatatcccacagtttatacttaatgctgattctatccggtgaagatcatgttgaagagatcaataatcatgtagatttcacatgctttgctcatcgcatttttgaaacactcaaggccattgaaagcgttatgattgctgcccctatggcattggtgcggaaaaaagcatttgctgctttgaaaaaggttatttcaatggtgccatcatcccagagatttgacatcttacatggtcttgtaaacaatagtacatctccagctttgactgcaattctccttgatctagtgaggcaggaagtttcgagagagagtcgccaagctgacaatgattgtattgaagacgaaggatttcgaggtaatgggttaccgcgctgggcatctcatgcacttgagttagttgagctgattttgaggcctccagaaggtggtcctccttgccttcctgatcacagtgaacaggtaatatcagctctaaacttgctaagatttattctgataatagattcaagaggacaaagatctgcaaaattgtttcggaaagagacattgcacaaggtgcactcggagtggctgaccccattaagaccaatcgcggagcaaattcagttggaaaatgaaaaggatgctgatgagattacaaaacaaatagtgtgcatgttaaatcttgttcaactggtgctataccgctgcatcgagttggtggaggaaaagatgaaaggctgctaatgtttttggtacctgtcatttctatacagtagcatctgctgtatctggatggaatgttcttgaggatataaattccatcttctcaggttattgtatatttacatggccaggaagtctggttttatttaaagtgtgcataacgtattcacaggaaaaaaaaaaaaaaaaaaaaaaaaaaaaagggcgacagatagcgatctagaactagt

SEQ ID NO: 265293 - DNA, 978 bp, Zea mays
cccacgcgtccgcccacgcgtccgccttgctcgtcagcccggataagataacgcccatctgcacgggccacgcgaagcgttcgagctcctcccacggcagccatggtcaccgccaccacctccccgctcttctccctctcctccctccgcgcctccctcccttcccccacccgatttcacacgtctctctcgctccgagccctctccccacgtgctcgtctctctgccgccctccctttcgcctccccactcgtttcaggcgggtacgggacctgggcggcgacttcaatctcgtccgcgggaaggttgagacggcgggggctggaggtggtgtgcgaggccacgaccgggcggcggccggactcggttaagaagagggagcgccagaacgacaagcaccgcatccgcaatcacgcgcgcaaggccgagatgcgcactaggatgaaaaaggtcttaagagctcttgaaaagcttaggaagaaacctgacgcgcagcctgaagaaataattgagatagagaagctgatcgctgaggcatacaaagccatcgacaagacggtgaaggttggcgccatgcataggaacacggcgaaccatcggaagtctcgactggcaaggaggaagaaggccatcgagatactccgtggttggtatgtcccaaacgctgaacctgtcgctgccacctaggattcttgagaaatcgctatcatgtgtcagcttttcatttttgggcgactatgctattcacgggtctcaacagcttgccaggttctctattgaaatggtctgttcataccttttctgctatgcgtttgctctgtactagcagtttgactactggctagaatgggcagctcttctcccctgtttctgttgttattcgcctcaacgttgtaaaactgaattcagaaaattttaaatatagctgtcatctggtcaaacaaaaaaaaaaaagggcagccgctcgcgatctagaac

SEQ ID NO: 265294 - DNA, 617 bp, Zea mays
cggacgcgtgggggacatacatggtgtgcattcagaagtcttcgctgatgataattcaagctgggactccatggtgcgaaactactggtctttgctatccccacttatattttcagaccatccaaagagacctggtgatgaagacccacagccaccatttaacatgctaaggaacgttttagatatgaatgctcactttggtggatttaatgctgctttactgaagtctggaaagtctgtatgggtgatgaatgttgttcctacaaatgccccaaactatctaccgctgatatttgaccggggttttatcggggttcaacatgactggtgtgacgcatttgcaacttacccaagaacatatgatatggtgcatgctgatggctttctatcacttcagaagacccacaagcatagatgttctactcttgacatattcttggaagttgatcgcatcctacgaccagagggctgggtcataatccgtgacaccgcccctcttattgaagcggcaagatctgttgttactcaactcagatgggacgcccgtgttttggatcttgacatagctagtgatgaaaagctactcgtctgtcagaagccctttctcagaaaataag

SEQ ID NO: 265295 - DNA, 449 bp, Zea mays
gggctactttgggcctttgcagaagccaattatatcagattcattttattggtgatctctgcaatcttctgtggttatgtttaccagtgtcctccattccgattaagctaccaaggactaggcgagccgttgtgtttcgctgcatttggtcctttggcaaccacagccttttacttctcaaacagcagcttaaatacttcgagcggaggagcggctcttctccctctcactaaaacaggtatagcttcatctgttctcgtcgggctgacaactactctgatactcttctgcagccatttccatcagatcgatggagatctcgccgttggaaagatgtctcctctggtaagaatcggcactaaagcaggatcgcggatagtgtcgattgggattgtcatgctatacattctcttggctatgtttggaacatggggatctctcccgccatc

SEQ ID NO: 265296 - DNA, 425 bp, Zea mays
cggacgcgtgggcggacgcgtgggcgctgatctagtggctgagctgggcaacaagctggagaggaggcacgcgtcaggcatcagcgaggacgagacgcgtggcctagctcgccggttgaaaaacatactggctgttctgaacgagttcgataaagctagagccatttcgaaggcgtttcatctcagagaagccctttaggtcgtcctggatggagtcagagtgagaaatccagttttggcacaggtttctacatccttccagtgtgcagagatgttgtaccacatatacatcttgaccatgatcgagtttttagtccatcgcttgatgctatcaaagaaagctgggttgcttctaggttgttttctggttacgaacacacaaactggttaaccaaatatgtattaaatttaccttttgcgagttc

SEQ ID NO: 265297 - DNA, 835 bp, Zea mays
gaaagagcatattttagcacacgcaaggtgaaacttgatcatgagtacctttcgatggctgttctcgtgcaataagttgtgaatgcagattatgcttttgtcattcataccacaaacccatcgtctggagattcttctgagatatatgctgaagtggtgaaagggcttggcgagaccctcgtgggagcctatcctggtcgtgctatgagctttgtttgcaaaaaagatgaccttgactctcccaagttacttggttacccaagcaagccaattggtctcttcataaggcaatcaatcatcttccgttccgactccaacggtgaggacctggaaggttatgctggagcaggattatatgatagtgtaccgatggatgaggaggatgaggttgtacttgattatacaactgaccctcttatagtagaccgtggattccgaagctcaatcctctcaagcatagcacgggctggccatgccatcgaggagctatatggttctcctcaggacgtcgagggagtagtgaaggatggaaaaatctatgtagtccagacaagaccacagatgtagtatgtatgcatctattagacagctcaataagcactgttgtacgcttgtatggttgggacatatgggcgttatggcatgtatagttgtatgcctagatgtacaacacgtgtactcgtatatatatatataaatgctgaaacaagcattggtcctgtactgtagtttctacatttcattgtcaccaataattaagtgtactcctatggctgggagtctatgaaaatggacgtgttgacttattgggtaataaatattttttttttcaacc

SEQ ID NO: 265298 - DNA, 949 bp, Zea mays
gaattcccgggccgacgcacgcgtccgggagctgggaaagaaaaggcagggaagaatttatcggaggtaaaagaatcttcgggtaaagagaagttaaacacagggagtggccacaaatcaggtcctccaaataaaattataaaaaatctggtaaaaaaagtatcatccaagattcacgaggaaaaagaaagccccaatggtagtgccaaggttttttcgagaaagaagaaacccacagcagaaaaggagatcaaagagaaaaagtcgtcaggaaaaaaggtgacaaaaggtaaaggagaatcagctgaagcagttcttcccagcaaggacgatctgaggaagaccattactgaaatcctcaagaaagttgacttcaacacggcaactttcagtgacattcttaagaagctcgacaatcactacaaaatggatctgaccccaaagaaagaagccatcaaagttatgatccaagacgagttaaccaagctatcagaggaggatgaagaaggagagggagacgaagacaccgggaagaaacagcagcagcctcaggcgcaggagatcgaggcatgaggatccgcggaaccccgtagctgtagtagccgctgttaactatcctgtacttagtgcgtatgtgtcgcatgtacaggcatcctttgttgatttcagccaccaacctgagaacctcaccccctgattgtgtatgctaaaagacatgatgtgtaggcagcctccacaccttttagctgactgatcggagagttactcttaggcaacaacttgtgtttctagatttgcaaatggtgtctgaaagactgaaactctgcattcgctgtggcagggcgtgtacttaattgttcgtgataggtctgaataacacatggatggaccctagttgttcgtgttgccttgagcttttaaaaaaaaaaaaaaaaaaaagggcggccgc

SEQ ID NO: 265299 - DNA, 775 bp, Zea mays
gggaatacagcatccatcttttggtcattcacaaatcacaacccacagaagaaacggatcaagtaaaaaaaataagctacagactgataccatccatgtgttattcagacctatcacgaacaattaagtacacgttctgccgcagcaaacgcagagtttcagacaccatttgcaaatctagaaacaagagttgcctaggagtaactctccgatcagtcagctaaaaaggtgtggaggctgcctacacatcatgccccataacatacacgatcaggggtgaggttctcgagttggtgcggcgataatcaacgagatgcctgtacaggcgacgcaaacaaacacattaagtacaggataattaacagcggctactacagctatggggttccacgaatcctcatgcctcgatctccttcgcctgaggctgctgctgtttcttctcggtgtctccggctccctctccttcgtcctcctctgataacttggttaactcgtcttggatcataactttgatggcttctttctttggggccagatccattttatagtgattgtcaagcttcttaaggatgtcactgaaagttgccgtgttgaagtcaactttcttgaggatttcagtaatggtcttcctcagatcatccttgctgggaagaactgcttcaacggattctcctttaccctttgtcacctttttgcctgatgactttttttctttgatctccttttctgctgtgggtttcttcttcctagaaaaaacctttgcactattattggg

SEQ ID NO: 265300 - DNA, 820 bp, Zea mays
caaattcaattctttatttatcttttattccaaaattctcccgaaaatccaatttcatttttcaatggggttagatgatctagttcttaatattattagtttacttaactgacagtttccacaacaaatctcttgattcggaattaggggctcatgttccgtctgatgaatcgattttctcttttttttacacttctgtatctcactctatcttgttttttagtattatctaaaataaccgatgaattatgaattttccataacttaaacttacgtaagtgctttaccagcatatgtagtgtagtaaaaaaaatggaattgaaccccttcatgcttactataactagttatttcggttttctactggctgctttaactataaccccagctctatttattagcttgaacaagatacgtcttatttgaaatgaattgaatagaagaatctttcttttggattcttggtattctagactcttttccacactaattaccaatttttttcttggtcattgagattcgtgggtagtttagactattatttagagatagatcgtacctctttttttatcccctcgaacaaatcgaaatgattgaagtttttctatttggaatcgtcttaggcctaattcctattactttagcgggattattcgtgactgcgtatttgcaatacaggcgtggggatcagttggatctttgattgagtaatatttcttttttgattgacctcctctctggtctggaggaggtcaaattggagttgcaattctactttgtgtttttttaagttattttagtttcgacataagatatatgg

SEQ ID NO: 265301 - DNA, 826 bp, Zea mays
  unsure (1)..(826): unsure at all n locations
gcttgtaacacttgttaggacagctaaaggactagcatcgacatatttgttattgaagatgatgatcatttcaaaattcaaaactaccacttcgttaaaaaattcaatgcattgtangaacaattgtagttaaggagttcaagggaagactgtattcttgcagagtttgtaccatgttgtaatctttggctcacgggtatgtgctacacctgccgtacatttaaatatcttccttaggtatgctcatctgaacttcaggtcaccatggccccatatccttgtatgtggtgcttatttaattgtttcttctcggggtatcatatctgttcttgtccctgtccaatattttatacggtacatgctgtgtagatttggatacgtcgtcacatcgattcatatatcccagtggacctatcactggtcaaacttttttgtttttcagattgattatttggtgtccattttgatgttttgtttacccattccccatttccttttttcaggttctggtcactgtcagaaacaatgcacaactgtatgtggtagtttcaagggaaagcctccccatcgactatactgccaaggaacttgattggatttctgagatttctatgctgaagatacataaatggtaatggattttcttctatacaaacatggcccaaaacaaagcatcttctataaactactaagctacttggtgaccagtctatcagtatagttgaggatttgtattctaggaatcctattggtataacatgaggactgtgtagtttagtttagttaaaaaagtatactatctatgatctggaagaaacctgttcag

SEQ ID NO: 265302 - DNA, 943 bp, Zea mays
cggacggtgggcggcgctgctcctcttcctgtgtctctctcgtctcccaacgacgcgattggcgattccatttctaccccgagacctccagccgtccgcccctgaaccctcagccttctccgtcccgcctcggcactcgacggccgccggcacacaccgcgcagtctcgagacaggaaccggaggaacgaggatggaggatgactcgccgctgacgaagacgatgaagggtgcggtgacaggactcgccgcggggaccatctggggcaccgtcgtcgccacctggtacgacgtgccccgtgtggagcgccacgtcgcgctccctggccttatccggacgctcaagatgtgcggcacctacggggccaccttcgccaccatcgggggcctctacatcggcgtcgagcagctcgtgcagagccagcgcaagaagcgcgacttcgtcaacggggccgtcggcgcgttcgttgccggagcctctgtctgcggctacagaggaaagagtattcagtcagccctcatcggaggctcctgtctggctttcacatctgctgtgctggacattggcggcaatacgaccagagttgacaacggcaaagagtactatgcctacacaactgagaagaagcctgcaaattgattccaagtctgcacttctagcaaacaatcttgcacgccatcaactcagtgaatttgaagctgatgtgcagttttatgtctgttttgctgatgcaattagttcttaagcaaatccatggcaacttgtttatcgctgatgcttgagggatggaaatgacactcagaataaatatttgatttgctttcttgtgatcgttgatcacattaaacgcagtggcgcgatatactgtgtaattgtctattttcccgtagtaagtattgataggaacgttgacctgataaaatagataatctaattttggttt

SEQ ID NO: 265303 - DNA, 507 bp, Zea mays
cacacgcgtccgcccacgcgtccgcccacgcgtccgcccacgcgcgcaacgcgagcagcagttgcattggaggcgaggaggagccacgccggggctcaaggaatggccgctctccgccacctcgctgccggccccacctgccaccaccaccaccacggcgtcgcggcagccaccgcctccctccggctccatcgcctccccctccccttccgcccccttcgctcccgctcccgctccgctccttcaccagggtttatgcgatctccagcaatgacatcagggtcggcaccaacgtcgaggtcgacggcgcgccatggaaagttctagagttcctccacgtcaagcctggaaaaggcgctgctttcgtcaggacaaaactgcgtaactatgtaactggcaacacggtcgagaaaaccttccgtgctggaagtacgctacaggaaccatccctttcaaaggagaccaagcaatttacatacaaggatggctcccagttcgtgttcatgg

SEQ ID NO: 265304 - DNA, 852 bp, Zea mays
ctcacgcgtccgacgctaccctttgcgtgcgcgtagcatttaaccaagcaactcccaatccccactcctccggtcctcccccaccatttcttccctctcgccttcccctccgccgccaatcccacgtccaatcagccgccgctccagccttccatccatccatcccgtgagcgcctgccgccctccaccgtttctgtcgatttccccgcgcctcctgaccctacccgattgttttttcttttccaggttcatggtcctcccgtagctgctctctattccgccagcgatcgagagaccaagaggagcaggagcgatggcgaggagctcgttcaagctggagcaccccttcgaaaggaggcaagctgaggctaaccgcatcagggagaagtaccccgatagaattcctgtcattgttgagaaggccgagaggagtgacatcccagacatcgacaagaaaaagtaccttgtccccgccgacctcacagtgggacagtttgtgtacgtggtgcggaagcgcatcaagctcagcgccgagaaggcgatcttcatcttcgtgaagaacaccctcccaccaacagctgccctgatgtctgccatctacgaggagaacaaggacgaggacgggttcctctacatgacctacagcggcgagaacacctttgggctgctatgagtggcgccgcgccgccgtggatcgacgtcggacaatgcccctcctcctgtaaatacttaaaaaaaaaataggcgtctcaagaatccgtgtacataataatctggcatgtcttgcatcaaaagcaactcgttgcgtccactgtctgttgaaactattgaagcgtactaaacatttaagcc

SEQ ID NO: 265305 - DNA, 678 bp, Zea mays
cccacgcgtccgcatttcttccctctcgccttcccctccgccggcaatcccacgtccaatcagccgccgctccagccttccatccatccatcccgtagctgctctctattccgccagcgatcgagagaccaagaggagcaggagcgatggcgaggagctcgttcaagctggagcaccccttcgaaaggaggcaagctgaggctaaccgcatcagggagaagtaccccgatagaattcctgtcattgttgagaaggccgagaggagtgacatcccagacatcgacaagaaaaagtaccttgtccccgccgacctcacagtgggacagtttgtgtacgtggtacggaagcggatcaagctcagcgctgagaaggcaatcttcatcttcgtaaagaacaccctcccaccaacagctgctctgatgtccgccatctacgaggagaacaaggacgaggacggcttcctctacatgacgtacagcggcgagaacaccttcgggctgttctgagtgggagccgctatggatccacattgggcaatgcctcctgtaaatactaaacatgcatcacaagaatctgtgtccatagcataatctggtctgtctgtcattacgcaacttgacgtgcaatgctaaacacatttaagtaataatactacactactctgctttgggatgcttc

SEQ ID NO: 265306 - DNA, 661 bp, Zea mays
ggtaatcccacgtcctatcagcgtggaccattcttgcttccatccatgcatccctcctcctcgtcgcttctctctgttccgcgtgcgatcgagtggatcaaaaggaggaggaggatggcgaggagttcgttcaagttggagcaccccttcgaaaggaggcaagctgaggctaaccgcatcagggagaaataccctgacagaatccctgtcattgttgagaaggccgtgaggagtgacatcccagacattgacaagaaaaagtcagccatttcacgagtaccttgttcctgccgacctcacagtcggacagtttgtgtatgtggtacggaagcggatcaagctcagcgctgagaaggcaatcttcatcttcgtaaagaacaccctcccaccaacagctgctctgatgtccgccatctacgaggagaacaaggacgaggacggcttcctctacatgacgtacagcggcgagaacaccttcgggctgttctgagtgggagccgctatggatccacattgggcaatgcctcctgtaaatactaaacatgcatcacaagaatctgtgtccatagcataatctggtctgtctgtcattacgcaacttgacgtgcaatgctaaacacatttaagtaataatatatactactctgctttgggatgcttc

SEQ ID NO: 265307 - DNA, 333 bp, Zea mays
cccacgcgtccgcccacgccgccgggggtacgttagcgtttgcgtgcgcgtacaactccccacgcaaagccgccgccgttccctctcgtcttccccagttcccctacgccggtaatcccacgtcctatcagccgccgatccagccttgcttccatccatccatccatccatccatccatctcgtcgcttctctctgttccgcgtgcgatcgagtagatcaaaaggaggaggaggatggcgaggagttcgttcaagttggagcaccccttcgaaaggaggcaagctgaggctaaccgcatcagggagaaataccctgacagaatccctgtcatt

SEQ ID NO: 265308 - DNA, 450 bp, Zea mays
acgcgtccggccacctgctcggcgagccatggccggccgccgcgaaggcgagcaccaggcgagcccgtggcgatccgggacgcccgcggcggaggaggactcgggcgccttcccctccgccatcatcttcttcgctctcgttggcgctaccgccaccaccgccgccgtcggacaactgcgccggacggtcagctggttctacactcaacttagtaggtcggaaccatatgttttctgggaagacatacctcgtcgaccaaatcgtcatcggtgcggtgaagcctgggaacgatatcaccagaggatgcgtgacaggaccgaggatcaaagggaaagagtggaacgcatacggcacatgcaagatgtatttaaaaaggagagaagtacatgtctggattatcgaaattgggatagccataatcccaactattatcagcatcatcaaagaga

SEQ ID NO: 265309 - DNA, 761 bp, Zea mays
cccacgcgtccgctctgaccggttattcagttgtatcagcttgtgtgatcacactaagatggaatgacaaaggaactagtcgtcgctcccttggaagtatgtcaatttggcaagagggtgttctaagtcttgtcatagttgctctttgtggttttatagtgggactttgctatcgctttaactatgctatagcctttatggttgtagcttttctgatagctgttgctgccagtttcgctctccagtttcgtcaggtctatgtggatccacctggcttttcttgtcctggggtaccgttggttcccattatttctgttttcttcaacatggtcctgtttgctcagctacatgaagaagcgtggtatagatttgtcattcttagtctcatcgctgtgggagtttatgccggctatggtcagtacaatgctgttccttccagctcagaacactctactattggttaccatggcgttccttctgaagccgcatgagctatgttcatccccggagttcttcgaacatactgtacggtaccaacatacaccatggtcaccgaagtttgaacctgttgcttttttcttgatgttttgcacagtgcatactcttgtagttacgcttagtactcctatacctatatctagacagtgaatttcccagcctgtgttgtgccccccacaccattcgtcaggaagcttgccaagtgcatagaccttgtaaaaatgcaaatgaaaataaagaactgcagctgcattgtttgtagg

SEQ ID NO: 265310 - DNA, 438 bp, Zea mays
actcggtttcgaattcccggctcgacgcacgcgtccggttgacggagactctctctaccgccttttcacggctgctgaacaaggagaagaagcggtgcagacaaaagtgttccaattggattaattctggagtagaaagagcgaaagagtcggatgcactaaatctaggcttgaaatagttcctggcttgggactgttcctatgctgccgaatggggccgagcaatttccaaatatatattatctattgctacttccttcacatatcattactttatatgttcttattggttacatttggcgccattgttggtaagactgtaccacccacagttttattgagaaaggcttttaagatggttgtggttgcacaaattggaaaataaaactacactaacttaattttccttttcttcttgtgcttcatgaaacttgatta

SEQ ID NO: 265311 - DNA, 794 bp, Zea mays
agccagggtttcttcggaggctttatttatcgtttatccacggaacttccggtgccggcggcgaccacttgtggcgatccatccctcaccatgtcgtcggaaaaggaggcggcgctcgccgccgtgctcgatgacagcccaaccatatttgacaagatcatcaaaaaggaaataccttctactgtggtttacgaggacgagaaggtactggctttcagggacataaaccctcaagctccaacacacattctcatcatccccaaagtcaaggatggactaactggcctggcaaaggctgaagagaggcacatagaaatacttggctatctcctctatgttgccaaggttgttgcgaagcaggaaggacttgaagatggctatcgcgtcgtcatcaatgacggcccaagtggatgtcaatctgtttaccacatccacgttcatctcctcggaggcaggcaaatgaactggcccccaggctaagaatatcttgtgattgatcagtgctaatgccaaggactgctactccatttctctagaataatccctgtaatttccataaaagctagtgcgcagtgcgctgaccttgtgctatatttgtggaattaccggaagcatgctgctgtgatctatgattggacacaagaaacttgtaactggtactcctatcatcgattgacttgtccttattgatcagctgatgggggttgcccactggccttgctgatctgcagaaaaaaaaaaaaaaaaaaaaagaaaaaaaaaaaaaaaaaaaaagggcgccgccgactagtagc

SEQ ID NO: 265312 - DNA, 318 bp, Zea mays
gtagagctgttgcggcattcttgccaaatttaaaagctggtaaaaagaagagcttgctaggagattcaaaagagcctgaagaccaagcaccacataagtgcatcatgtccggcttctaggtactggctttcagggacataaacactcaagctccaacacacatcctcatcatccccaaagtcaaggatggactaactggtctgtcaaaggtctacgacggatccatcctgctggacaatcgctcaagcatcgtgtcagagatgttcgccacacccaacaacaactcgatgtgcgggtaccccgtagtcgatgccgtca

SEQ ID NO: 265313 - DNA, 1494 bp, Zea mays
cgtggctggcgcttctggtcgtggtggtgctcgcgttggcggacgcggcggcggggaggttcgtggtggagaagaacagcatccaggtgacgtcccccgacgagctcaagggcaagtacgagtgcgccatcggcaacttcggggtgccgcagtacgggggcaccctgcacggattggtcgagtacccaaagtccaaccggaaggcgtgccagagcttcgaccagttcgacatctcgttcaagcccaagcaggccgggggacgacccatcttcgtcctcgtcgaccgcggagaatgtttcttcacaaccaaggcatggaatgcacaaaatgctggagctgctgcagttcttgttgtggatgacaagtcggaacctctaatcacaatggacaacccagaagaaggcaaagagcacctagaaaacatcactattccctcagtgcttataacaaagaaattgggggaaaaccttaagaaatccgcggaaaatggcgatatgctcagcgttcttctggactggagagaatcccttccccatcccgatgagcgtgtagagtatgagttctggacaaacagtaatgatgaatgtggtcctaaatgtgatatgcaaatggacttcgtgaggagctttagaggaactgcacaaattcttgagaaaaagggttacactcagtttactcctcattatatcacatggtattgtccagaagcttttgttgatagcaagcaatgcaaatcacagtgcatcaatcatgggagatattgtgcaccagacccagatcaggattttagccaagggtatgatggaagaaatgttgtggttcaaaacctacatcagatttgtgtattcaagattgctaatgagactggaaagccatggctgtggtgggattatgtgcatgatttcgcacttaggtgtccaatgaaggataagaaatacaataatgactgtgcccatgatgttatcaaatcacttggattggacatcgagaatataaacaagtgtgttggagaccctgaagccgatgaggaaaatgaaattctaaaggcagaacaagatgcccaaattggtcatggtaaaaggggagatgtcacaatactaccaacccttgtcatcaacaacaagcaatatagaggtaagctggacaaagttgctgtcctgaaagcgatctgttcaggatttgaggagacaactgaacctgctatttgtttgagcgaagagattcaaacaaatgagtgtttggagaacaatgggggttgctggctggacaaagctaataatgttactgcatgcaaggataccttccgcgggcgtgtttgtgagtgccctattgtgagaggtgtaaaatttgttggtgatggatatacccattgtgaagcttccggtgttggtaggtgtgagatcagtaatggagggtgctggcaggaaactacagatgggaaaacaatctctgcctgctcaaacgaaatatctgaacgttgtaaatgtccagtgg

SEQ ID NO: 265314 - DNA, 646 bp, Zea mays
gtcttatacaaccctcttaaccaggtttggcttctatctcctagcgattttgtaccatgtcttctgttgatttatctacagtacatggtttgtatgaatctgccatatttgccatcttcagctttaatacatgtaattgaaattatacggaaacttgtttccaccaattttcactagtgatatggtgagccatttatcattgttggtcttagaaatatcaagtggttttggccgtaggcatgttaatgtttttattatcaagtggttttggccgtagacagtctaacatcaaacaaatatttatctgcaggctgctgactgaattttgcaaccctactgaatcttatgtgtaattaaaggccaaccttcaaacagcactggattggtgaattgtgttggtacctttttcttggagtggatgcgcaccaaaccttgaatcagaaaggtgttccagtctcggccaataatttccaaatcgctggagtgtatactgtgggaggtgctcttgtttagactcgactagtcgagtttcctttttgtgtttagtatgatggttgggcacgtgctggtaccgaacgtgcttcactcattatagtattttgattcttgaacaaattgtgtgttgggctaaaccatgatatatcta

SEQ ID NO: 265315 - DNA, 540 bp, Zea mays
cttcaagaagtgcgccgcgcgggtcgccgagggggaggagtacgagcgcgtaggcctcgtcgaaaacactaacagggatgattccctcatcgaggccaggtcggttgaggaggctatcgcgcggatgtcggtcgtggatccgcggcgtccctgcccgctgacaagcatcctgagcgtcgcctcaagtcgacctttaaggcatttgaagaggcagagctccctaagctgaaggaagaaaagccaggtctaacgctgcaccaatacaaagacatgatatggaaactgtggaagaagtccccagacaaccctcttaaccaggctgctgactgaattttgcaaccctactgaatcttatgtaaaggccaaccttcaaacagcactggattggtgaattgtgttggtacctttttcttggagtggatgcgcaccaaaccttgaatcagaaaggtgttccagtctcggctaataatttccaaatcactggagtgtatactgtgggaggtgctcttgtttagactcgactagtcgagtttcctttct

SEQ ID NO: 265316 - DNA, 596 bp, Zea mays
gtgtaaataaattgtatctttgcagagtgttccccgataaatacttatttcttttatccaattttctccatagatagcaggtttgaattagtatacaaaagcaatgactattcatgattccatccatattggatcaattctcgataccattttgcaatgaaattagaggaatgttatggtaaaacttcgtttaaaacgatgtggtagaaagcaacgtgcgacttgaaggacatgatcgattgtggatttgcctatccatcattttccatagtaatgaaaatgctcttggctcgacatagtctgttctattcgtcccgaaccgaattttcgctgggttgtttgtaagtaaagtaaatagtacacgatggagctcgagaggacagaatttctttttgatcaagggaaagaatctagggttagtgaaaactaataaattaggccaactttgtcagtctatccttaatatagaaatcaaaaggttaaaataagaaaaagtctaattttggaagattggaaaaacttttttgatgaaaagtctatctgaatcaattgttcatatttgatttctatagaagagtgaaatgctttatcgaagg

SEQ ID NO: 265317 - DNA, 955 bp, Zea mays
cgcccacacgctgcgcctcgtgcgcccgcccgtcgtctgggtcgtcgtcgagcccgccgccgacgcgcccgccaccgctgaggtgctccgcggcaccggcgtcatgtacaggcacctcgccttcaagcccgaggacaacttcaccaccgccgacgccgaggctcacgtgcagcggaacgccgcgctcgcgcatgtcgagaagcaccgactcgccggcgtcctgcacttcgccgacgccgccggcgtctacgacgtcggcttcttcgaacagatccgccagatcgaggcgtttggtacatggcctgtggcaacaatgtcggcgggcgagaagaaagtggtagtggcgggtccactgtgcagtgcctcaaaggtcgtcggttggttctcaagggacttcaacgacgggaccacccgttcagtgacgtataacacggaagctgacctgaatcctgctggtgccgctggtacacgagcccacacgatcgacgtctcaggttttgcgttcaatagctctattttgtgggatcctgagcggtggggacggccaacgtcattaccagacacttcacaggactcgatcaagttcgtgcaagaagtgctacttgaagaccgagctaagctgaaggggatcccctccgactgctcccagatcatggtgtggcagtacagcgtgcccagctcgcgatagagggcagccgagaggacgcacaagaggcgtcgcaacctcgcaggcaggggaagaactgcagggggttggatcggagtcgctgtaaatgtggtgggcgatggtaacggcaaggaaagcaagaaggctgattactaagggttctttttctctctctctccttttggtgttccctttttctttcccctcagttttagttttcaggttgggaggggggccatgaatgatgaactgtccgtgggagcaaaagaattgcgatagtatttattc

SEQ ID NO: 265318 - DNA, 1095 bp, Zea mays
aatcgacatatcttttcacaattcagaggttatgttgggatgaattatcctcaataattaagcccgttactgttagcttcaaagagggtcttggtcaaaaattcaggcaaccttcaggaacaggaattgacttttcagtgtttgaagaatcagatttattaaagcagggggacatggatgtatatccacttgcagttaaagctgaaacaacattgtctgttgatcacccaccagaaggggatgaccaaaagatgataactcctaactcacagatcacccaggccgtttttgaaaagaaagaaaatggggattatcaagtaagagttgtttgccagatcctctgggtcaatggaactaggtatgaactgcaagaaatatatggcatagggaactccatggaaggtgatgctgatgcaaatgatccagggaaagaatgtgttatttgcctctcagaaccaagggatactactgtcctgccatgtaggcatatgtgcatgtgcagtgagtgcgccaaggtcctgaggtaccaaaccactcggtgccccatctgcaggcagcctgtggagcgtctcctggagatcaaagtgaacaacaaatctgaagatcagcagcagacgccccaatcgccaccgcgcccagacctggctccgcagcaggaaggggtgtagccgtgatcaaagtcagttctgaggtattatatggctcgaatctgcggaccttcctgaaggtttgttctctcatttgagcaacgggggatgcaactggtacttttacctttagcatatgtaagcttctggcatcgcatggctttgccgacctctgctgtatctgcctatctggaggtcggagagcaggatgtcaaggagagtgtgtatcatatatacatcatgcatgcgtgtgccatggctaccttaagaagcgtatcgaggaggattcctgatgcctggttgacttcctccagggaaaaaggggaagagaactagagaagaggtggtctcttaaatctgtacaaaaatgactatttcaccttgattccataccttctctgttatggcctgaaaaggtcgatgagtattttacttggagttataaaac

SEQ ID NO: 265319 - DNA, 514 bp, Zea mays
tttgcggtatccctcctacggacaacatctgcctatgcccacgccctacgttgagcaccagaaggccgtcactatccgcaacgacatcaaccttaagaaggagacgcttcggatcgagcctgatgaagaatgccctggccgcttcctcgtcgccttcacctttgacgccacggtcgctggcagcatgactgtttacttctttgcaaaggaagagctcaactgcaatctaacaacagtgaaagaagacctaattaagcccattactgttagcttcaaagagggtcttggtcaaaaattcaggcaaccttcaggaacaggaattgacttttcagtgtttgaagaatcagatttattaaagcagggggacatggatgtatatccacttgcagttaaagctgaaacaacattgtctgttgatcacccaccagaaggggatgaccaaaagatgataactcctaactcacagatcacccaggcccgtgtttgaaaagaaagaaaatggggattatcaagt

SEQ ID NO: 265320 - DNA, 1002 bp, Zea mays
ccgcagtcaaggacactcccacgaagcgtcctggtcatatgcacccaggtagtgatgataatcacgtacctgctcttcgcgttgggccggctcgccacgctctacgtctccgtcgccttactcggcttatgctacggggtcctgctctccgtggtgatctcgacctcgtcggagctcttcgggctgaagcacttcgggaagatatacaacttcatcacgctggcgaacccggtcggcgcgtacctgttcaacaccctcgcggggtacgtctacgacctcgaggtggagaggcagcacgccgccgcagcagcggcggcagggtcggacgtcgtcgcgtgccacggccctagctgcttcaggctcacgttctgcgtcctcgccggcgcggcctgcctgggcacgctgctgagcacggtcctcaccgtgagggtccggcccgtgtaccagatgctctacgctggggggtccttcagccagcccaggaactctgcgcattgaccggcggggatacaaagcccttgttgttttctgctgctagaataaaaatccggtatggcctctctgaatagcttcgttaatggcctgctgtagttcatgagcatgcacgctagtcttgtgctctgtggctgtggtgttttggggtccttcttggcctaataggaggagggagcgatggcctcgtgcagcagcagatgcttgctcccggtttagccgccgacgccgaggcccgagttttagggggtgtataattgaaatccctacttattatgtagaacaatgttgcttgtatacgacacgggtttaccggacattttggcagatcgcatatggtacggagacgaatttgcattttttatctcgtaaaaaaaaaaagcaaggggacatggatgtatattcacttgcagttaaagctgaaacaacattgtctgttgatcacccaccagaaggggatgaccaaaagaatgataacttctaactcacagaatcaaccaaggcgttttt

SEQ ID NO: 265321 - DNA, 490 bp, Zea mays
cccactcgtccgcccacgcgtccggatgccccaatcgccaccgctcccagcactggatccgcagcaggaagaggtgtagccatgatcaaagtcagttctgaaacattatatggctctcgtttgcggaccttcaagccttccctaaaggtttgttctctcatttgagcaatggggaatgtaactggtactttacctttacgtatgtaaggctctggcatggctttgccgacctctgctgtatctgcctatctggaggtgggagaccaagatgccaagaagagtgtgtaccatatatacaccatgcatgcgtgtgccatggctaccttaagaagcgtagcgaggaggattcctcatttctggttgacttcctccaggaaaccaggggaagagaaggttgtctcataaatttgtacaaaaaatgactatttcaccttgattacatgccttctgtgttatgcccaaaaaactggaagaactacaccagagatgg

SEQ ID NO: 265322 - DNA, 1651 bp, Zea mays
cgtcaaaagcaaggccgccccactctaggctcacctgattccttccgccttgtcagcgcagcgatccagacccacccgagccaacaacccatggccgccgcgacgccgcgtctcctgctcgcggtcgcgggcctcaccctcgccgtcctcgccgccgcggtctcgccgtctctggcggcggggccgccggtgctgcaggacccggcggagctcctgcgccttgccaaggagccggccttcgcggactggatggtcggggtgcggcggcggatccacgagaacccggagctgggatacgaggagttccagaccagcgagctcgtgcgccgggagctccacgccatggggatcccctacaggcaccccttcgccgtcaccggcgtggtagcaacagtcggcaccggcggtccgcccttcgttgctctgcgggcggacatggacgcgctgcccttgcaggaaagtgtggagtgggaacacaagagcaaagtccctgggaagatgcatggatgtggacatgatgcacatgttgctatgctgttgggatctgctaagattcttcaggagcatcgtgatgagttgaagggtacagtagttcttgtcttccaaccagctgaggaaggtggcggtggggccaagaaaatgatagaagacagagctgtggaaaacatagatgccatttttgggcttcatatagctgactctgtgcctattggtgtgctggcatccaggccagggcctattatggctgggagtggattctttgaggccgtaataagtggaaagggaggacatgctgcacttcctcatcacactatagatccgatattggctgcctcaaatgttattgtgagccttcagcaacttgtttctcgagaagctgatcccttggactcacaggttgtgacagttggaaagtttcaaggaggtggagccttcaatgtgatccctgattcggtaactataggtggcaccttccgagcctttctgaaagagagttttaatcaattgaagcagcggattgaagaggtgattgtgtctcaagctagcgtgcagcgctgcagcgctgccgtggacttcctcagcaaggaccgtcctttcttcccgccgaccatcaacagccccgagctccacgacttcttcgtgaacgtggccggcgagatggtcggctcgaggaacgtgagggacaggcagccgctgatgggcgccgaggacttcgcgttctacgccgaggcggtcccctccacctactactacttcgtgggcatgtacaacgagacgcgcgggccgcaggcgccccaccactccccctacttcaccatcaacgaagacgcccttccctacggcgcggccgggcaggcggcgctggcagctcgctacctactcgagcgtcagcagcctgctgccgccaccgctgataaggcagaaacccatgatgagctgtagatagtacatgatgtttgcgtccctgtccctgtgttgatggaattagattgagcaataatttcttcgccaagtttattcagcggctgtacatatcctggtatctccatgctttggtaatgatcggttgggatcagtcagcaaatagtctgaaaaacatgctttagtctgagaaacatgattccatcccttgatcaacgtcgcagtacct

SEQ ID NO: 265323 - DNA, 1819 bp, Zea mays
agagcggcagccggggcgggttctttctggaccccgccgcttgtcccccacccctgcctgctgccccccgcctgccccgtgtttatatctgccgagccgcacatggagagagtctagtccagctcgtccgcgcaggtcaggcagtagtggatagctccgctcgcggtcgcgggcggctcgagtcgcaccccagatcccaatgcgccccgccgcgccgctctaggccgcggaacggaagctaggtgcgtcacacgccggggccggtcgcggtcaccggaccggacgcacaggggcgccgtacgtgcagtcatcggccatgaaggtcctcgtcctcgccgtgctggcgctcgtcgccgccgacgccgccgccgccgccgccgccggtcagggcgaggaggggggcgggccgccgctgccgttcgcggtgggcgcggcgccggcgggctgcgacgtcgcgcagggcgagtgggtgcgcgacgacgacgcccgcccatggtaccaggaatgggagtgcccctacatccagccgcagctgacgtgccaggcgcacggccgccccgacaaggcgttccagagctggcgctggcagccgcggggctgctcgctgcccagcttcaacgcgacgctgatgctggagatgctgcgggggaagcggatgctgttcgtgggtgactcgctgaaccgggggcagtacgtgtccctcctctgcctcctgcaccgggccatccccgacggcgccaagtcgttcgagacggtggactcgctgagcgtcttccgggcgaagaactacgacgccaccatcgagttctactgggcgccgatgctggccgagtccaactccgacgacgccgtggtgcactccgccgacgaccgcctcatccgcggcgcgcccatggacaggcactacagcttctggaagggcgccgacgtcctcgtcttcaactcctacctctggtgggtcgccggggacaaaatccagatcctgaggggcgccgacaacgacccgagcaaggacatcgtggagatgaagtcggaggaggcctaccggctggtgctgcaccaggtggtccggtggctggagcgcaacgtggaccccggcaagtcgcgggtgttcttcgtcaccgcttcgccgacgcacacggacggcagggcgtggggcgacgacgacgcggagggcagcggcaactgctacaaccagacgtcgccgatcagcgccgcctcgtcctaccgtggcggcacgagccaggagatgctgcgcgcgacggaggaggtgctggccacgtcgcgggtgcccgtcgggctggtcaacatcacgcggctgtccgagtaccgccgggacgcgcacacgcagacctacaagaagcagtgggtggagccgacggccgagcagcgcgccgaccccaggagctacgccgactgcacgcactggtgcctccccggcgtgccggacacgtggaacgagctgctctactggaagctcttcttccccagcaacgatcaggtcctctgatggtgcattggtgcctgcatacatacgcctggaaaccaactgctaggggctagcccaaagaaaatgtgtctagatgaacaaagccatggggttcaaatgttttgttttgatttcggatatggacgctgtcgatgctcttgttctctgtggaattcttcttaccaactgtgcctcccatatatacatcactactgatactagaatctatgctcctgttttctttcgttaaaaaaagcgacagtgaagcgtagaagcacctacaagagttttcaaaaaaaaaaaaaaaaaaaaagggcggccgctcgcgat

SEQ ID NO: 265324 - DNA, 362 bp, Zea mays
tccacgcgtccgcccacgcgtccggtcagtcagtagtggatagctccgctcgcggtcgcgggcggctcgagtcgcaccccagatcccaatgcgccccgccgcgccgctctaggccgcggaacggaagctaggtgcgtcacacgccggggccggtcgcggtcaccggaccggacgcacaggggcgccgtacgtgcagtcatcggccatgaaggtcctcgtcctcgccgtgctggcgctcgtcgccgccgcctccgccgctggtcagggcgaggagggggggccgggccgccgctgccgttcgcgttgggccgtcgcccggcatctttaaatgaggaaccatgacctggggcatcaagaggctt

SEQ ID NO: 265325 - DNA, 500 bp, Zea mays
ggctggtcagtcagtagtggatagctccgctcgcggtcgcgggcggctcgagtcgcaccccagatcccaatgcgccccgccgcgccgctctaggccgcggaacggaagctaggtgcgtcacacgccggggccggtcgcggtcaccggaccggacgcacaggggcgccgtacgtgcagtcatcggccatgaaggtcctcgtcctcgccgtgctggcgctcgtcgccgccgcctccgccgctggtcagggcgaggaggggggggcgggccgccgcttgccgttcgcggtgggccggcgcccccggcggctgcccaacgtcgcgcagggcgaggtgggtgcgcgacgacgacgcccgcccatggcaccaggtgtggggagtgcccctacatccagccgcagctgacgtgccaggcgcacggccgccccgacaaggcgtaccagagctggcgctggcagccgcggggctgctcgctgcccagctcaacgcgaccctgatgctgg

SEQ ID NO: 265326 - DNA, 1752 bp, Zea mays
tttttattcccacgcgtccgcccacgcgtccggtgccccctccctgcctccttccccggcgccccgctcttcctccttccgctccggcgatgggcactggccgccgcggcggcggcggcggcggcgtgttccaccgcctcctcgccctctcgtcgctgctgctcctcgcttccggcgaggtcgtcttcgaggagcgcttcgaagatggttgggagactcggtgggtggaatccgactggaaaaggagtgaagggaaagcaggaaggttcaagcacacagcggggagatactctgcagatcctgatgacaaaggaatacaaacaacaatagatgccagacattttgctatctcagccaagttccccgaattcagtaacaagaaccggacgcttgtggtccagtactccatttagtttgagcaggatattgaatgtggcggtggctatattaagcttatgtccggttatgtcaaccagataaaatttagtggggacactccgtacagcttgatgtttggaccagatatatgtggtactcaaacaaagaagctccatcttatactctcttaccaggggcagaactatcccatcaaaaaagatctagaatgtgagacggacaagttaacacacgtgtatactttcattcttaggcctgatgcatcttatagcctgcttgttgataaccgtgaaagagaatctgggagcatgtacactgattgggatattctccctcctcgtaaaattaaggatgttcacgccaaaaggcctaaggattgggatgacagagaatatattgaagatcctgatgaagttaagccagagggctatgattctatcccaaaacagattcctgatccgaaggacaaaaagcctgacacatgggatgaagatgaggatggaatatggaagcccagaatggtatcaaatccagcatacaagggaccttggaaacgcaagagaattaaaaatcctaactacaagggtaaatggaagaccccatggatcgataatccagagtttgaggatgatccagatctttatgtgctgaagcctttgaagtatattggaattgaagtttggcaggtaaaagctggttcagttttcgacaacattctgatttgtgatgaccctgagtatgcaagaaaggttgttgaggaaacttggggtgcaaatagggaggctgaaaaggaagcttttgaagaagctgaaaaggagaggaaagctagggaggatagggaaggtcaaaaggcaaaggacgatggtggccggcatcgaagacacaggcgtcattaaaaacactacagagatcactgggacgactaccatgatgagctataaaagtccccaaatattgcattcctcaaaagcataagctggaagttgcttcggacattgtgggtgcttttcaataataataattgattcgcctggtcagaacaacctgaagtgtttcttgctatgcgccaacaaattattgaactacaggatttgatatgtaatggacaaccgaagatctgcagggcattccagcgaaaacttggctctggtactgaaatagaggggacgagagactgtagtttgtgtctgtacaacggtgccggccatgtgctagctttgtaatctcaaaacattgtctttgcatgaataatgtaagttacccaaaaattactgcataccaagttacaaagtgttgtagctgacatatgaggaacattttaattttaatcatcatatctatacttctgtaatcttc

SEQ ID NO: 265327 - DNA, 582 bp, Zea mays
gtcgtcgcccgtggcctggggcctgctgctgctaagccggccttggatgaacgggacggtgccggcgaggtcgctgggttctggggctacctgctccagatcatctaccaggcaaatgcaggcgcggtgatgctcacggactgcgtgttctggttcatcatcttcccgttcctcaccgagaaggactacagcctcaacttcctgttgatcgggatgcattcggtgaacgcagtcttcctgctgggcgaggccgccctgaatagcttgaggttcccgtggttccgggtcgcctacttcttcctctggaccgcgctctacgtcgtcttccagtggatcgtccacgcagctacgccgatgtggtggccttacccgttcctcgacctgacatcgaacctggcacctctgtggtacctcgcggtggcggcgctgcagctgccgtgctacgtggtgttctggctgctgatcaaggtggagcaccacctgctggccaggtgctttccggtctcggacgtacgcttgctaggggcttgggcacaagcaggcaggcccggcttctccggcgcaacggtgagagcaacgcaa

SEQ ID NO: 265328 - DNA, 536 bp, Zea mays
gcagattgacagtattccagatgggctagttgattttgaggagtttgttgctgcaacagtacacgtgcatcagctggtggaacatgatactgagaagtggaaatcattgtctcaagctgcatttgataaatttgatgttgacagagatggctacatcacacctgatgaacttagaatgcatacaggaatgaagggttctattgatcccctcctggaggaggctgacattgacaaagatggcaagataagcctagatgaatttcgccggctcttgaagactgcaagcatgagcgcacgcaatgtacaaactcctaggggtgttcgcaagtcatagttttctgttttttgtagttcacataactgaactagagagcagcagcacatgtgattggagaaaggcttttccatgtaaattagaccatccataatacccatgaatggaggtaatccgtagttgttccttgaaaacgagcactgtattcccgctattgcaatacaatgtcccgtttgttcccaaaaaaaaaaaaaaatataaa

SEQ ID NO: 265329 - DNA, 711 bp, Zea mays
ctttatacatggaggaaacaggaaaggagacatcagcgggaggaccgaacacaaaatgtgaagtaactatatgtttatgccctttttacataataaagcaaaatggtcaattatatcaaatcaaacaattatttccacctgtcaatcctttaagttgattttagcccctgagcatactctgggacagtttgtgatgatgccacaattgaacaatgtgctcccttgatcatcagccagaggatggctcagagattcaggatgccttacttgagatagttggcaggcgtactgtccctcaagtttttgtccatggaaagcacctgggtggttctgacgatactgttgactcctacgaaagtggaaaactggctagacttctaaacatcggagtcaaggacgacctttgagtgacatgctacatcggtcagcctgttcgtttggtttcaatccgtaccggcttctactacttctatattgtttttgtctctatggattacagctacaacagtctaaatagctgattttaatccgaagcgaacagtccaaacagtctcttgttttgagttaccaagggattttttgtgtgactctgataaaagatatgtaactgaatgttttattatagtttataccatttgaaccgtacttttattgctcgcccaacaagcattatgtcgtgttgattctgtcaaaaaaaaagaaaaaaataaa

SEQ ID NO: 265330 - DNA, 642 bp, Zea mays
tccaaccgtacgtaaactagtcacaactcaggaccagtgcctcttcggtcaaaaatatccttgtacctgcatctcgacctcaccggcgtccggcggtggtatcacgatggtggcgttgctgggccggcggatcggggtggctgcggcagctgccgcgttcatcgccctcgtggcgttcggatccgcctcatcctcgcccaagtccttcgtgaagtccaccgtctccgcccacgacgtcgtcatcttctccaagtcatactgcccgtactgcaaaagagcaaaggccgtgtttaaggagcttgagttgaagaaagagccatatgttgtggagcttgatcagcgagaggatggctcagagattcaggatgccttacttgagatagttggcaggcgtactgtccctcaagtttttgtccatggaaagcacctgggtggttctgacgatactgttgactcctacgaaagtggaaaactggctagacttctaaacatcggagtcaaggacgacctttgagtgacatgctacatcggtcagcccgttcgtttggtttcaatctgtaccggcttctactacttctacattgtttttgtctctatgggttacagctacaatagtctaaatagctggctttaatccgaagc

SEQ ID NO: 265331 - DNA, 439 bp, Zea mays
  unsure (1)..(439): unsure at all n locations
cccacgcgtccgcccacgcgtccgggtcggccggaccatcgtcgccgcgcgccggaggggcaagaacctctggctccagctcgacgcgccgcccttcccgtccttccagttcgggatggcaggcgcgatatatatcaaaggcattcctgtgacgaattataagagatccgttgttaattccgaagaggagtggccctccaaatactctaaatcctttgctgacctggatgatggtttggagtccgctttcactgataaacggcgctttgcaagagttcgtttgtttgaagatcctgaaaccgtacccccaatttctgagctaggtccagatgctctgtttgagccaatgtccgtcgatagtttcttggactccctgggtagaacgaagatagggataaaagctcttatactngatcagagcttcatatcaggcattggc

SEQ ID NO: 265332 - DNA, 791 bp, Zea mays
gatgcgaccaaattcctcctattccctctcctgtccgcccacccttctctcgcccgcgtaactcctctgtgtcgcctaccagaagcggagcaaccgaggcaagaggaagggggtgggcgaggaaaagcgatttggcttctcttccagttccggattcatcgtaagaaacacatgactgcaatggatatctgaagcatgaaaagacaaaccatctcactcttcaaacagttcacctagcacacttaatggcggaggtgtttgcatgacattctctttgagctgatatatatgggagcagtggctgcattggtaatttaagaaaatctcagtcacttccagattctaagccgaaacgatctttaagaaagaaatctctggattcatctactggaaacagaagacgatggcaatcgagtctagaagcaatggagaagaatgttagcatatcagtttctcttgaggggaatatctcttctattcccaactcgatagtcaacgattctaaaacgttaatggaaaatggggtagatacatcatttatcaaccatgctgctaaagaatggactgagatgagaagacaatgggttggacatcaggcagaagttccgagaaaggcccctcaagagccagtgataagttggtccacaacatatgatgatctcttgtcgacaagtgagcggtttccacagcgaatcccactatctgagatggttgattttttggtcgacatatggcacgaagaagggctctatgggtagctgatgtctggctttctttcccgcttgcattta

SEQ ID NO: 265333 - DNA, 383 bp, Zea mays
cttctcgttctcgcccgcgtaattcctctctggcgtctaccaaaagcggacaaccgaggcaagagaaaggggtgggcgaggaaaagcgattaggcttctcttccagttcctgattcagtctgagaaacaatggatatctgaagcatgaagagtcaacccacctcactcttttaaacagttcggttaacacacttaatggctgcggtgtttgcatgacattctctttgagcttatatgggagcagtggctgtattggtaatttaagcagatctcagtcacttccagattctaaaccgaagcgatctttgagaaagaaatatcaggattcatcgactggaaacagaagacgatggcaatcgggtcctagaagccatggagaagaa

SEQ ID NO: 265334 - DNA, 682 bp, Zea mays
gcgagaaccagcccaccccacctgctcgatcggcgcaccgtcccgcaggccgcgggccggtcgtcagccatgatccagctcctgttctcgctgctggccgcggaggcggcgctggtgctggcgctgctcttccccacgcccgtgcgccgcctggctctgctcgccatcgatcgcgccaagagggggcgcggacccgtcatggccaagaccatcgcgggcaccatgctcctcgtactagtctctgctttctacagcgtcgctaagatccgccgccgcgagggggagctcggacagctcacgcccaccgaccaggtgctcgccagtcgccacctcctcgaggcgtcgctcatgggatactctctgtttcttggattaattattgaccgattacatcactatattagagagttgagaatgttgaggaaagacatggaggctgtaacagagcagggccggacactagaagcagcaaaatccggaagcactgacgagattcaaggataccagaaagaggttgcgagtttgaaggaacaagtgcaagagctccagaaccaatcacaaaagaaaacagagcgactaaaaaccgccgaagcaaattctgtagctttacagaaacaatcggaaggtttactcgctgaatatgacccgctcattgcggagaacagggatttgagggaccaac

SEQ ID NO: 265335 - DNA, 737 bp, Zea mays
ccacgcgtccgggacctgggccggcgggatcgtctgcctgggggtcgtcgccgtcgccgtctacttctgcggcatgagctccgacaccagcaactccaggatggcctacgccttctccagggacggcgccatgcccttctcctccgtctggcactaggtcaacaagcaggaggtgcccatcaacgccgtctggctctcggctctcgtcgcgctctgcatggcgctgccgtctctgggcagcctggtggcgttccaggccatggtttccatcgcgacgatcgggctgtacatctcgtacgcgctgccgatcctgttccgggtgacgctggcgcgcaagtacttcgtgccggggccattcaacctgggccgctacggcgtcctggtcggctgggtcgccgtgctctgggtggccaccatcaccgtgctcttctcgctgccggtcacgtacccggtcaccaaggacacgctcaactacacccccgtcgccgtcggcggcctcctcttcctcgtcctcgcgtcctggctgctcagcgccaggcactggttcaagggccctgtcaccaatctggacggatgaatatgtataattggacatgtatagtagcgaggctggcagagacggaagagttgttgccaacgacatgttgtaactactttgttccaaaaattaactagcaaggaaaccgacaggatgaaggttctcccgcgtgaaatgcatcagcatgtcgattgcgagc

SEQ ID NO: 265336 - DNA, 1332 bp, Zea mays
cccacgcgtccgcccacgcgtccgtctagatcgctcgtccggtgtggtctctggacttgccgttcacttctcttcagcggcagcgtggcaaggcaacgagagcaacgaagagtattcaaaccgaaaacaatggagccggtgcggaagagcgtgtgcgtgaccggcgctggcggcttcgtcgcgtcggagctggtgaagctcctcctctcccggggccaatacgcggtccgcggcaccgtgcgcgaccctggtgctagcaagaatgcccatctcaaggtgctggaaggagctgaggaaaggttgcagcttctcaaggctgatctgatggactacaacagcattgcatcagcagttgccggctgtgagggtgtcttccatgtagccagtcctgtcctttcccatcgaccctccaaccctgaggtggaggtcatagctcccgctgtaataggtacaaccaatgtgttaaaggcttgctatgaggcaaaagttaggcgagttgtggtggtgtcttcatgtggagctgtgtatgctaatcctatttatccgaagggtaaggtgtttgatgaagactgctggtcagatgaggattactgcaggaagaaggaggattggtatttagtttccaaaacactgtcggaacgagaagctcttgcttttgcagcaaaaacagggctggacgttgtaactgtttgtccgtcattagtatttggacccttgatgcagcctacagtaaatttgagcagcgaaatgatccttaaatatttcaaagatctcgagactgttgaaaatgtactcagtaatatggtggatattcgtgatgttgctgatgctcttcttctgacttacgaaaagccagaagcgtctggacgatacatctgcagttcacatgcaataaaaatttctgatatgataaacatactgaagaccatgtatccgtcttacccttatcccaaaaattttgtggaagatgatgtcaactctgtatacagctctgagaaactgcagaagctggggtggaccttcaagcctatagaggaatccctccgtgacactgttgaatcctacaaggcatttggcatcctgaattgaacatccaactaggactgtttccatctgctgttgcctccgaactcctcctgaataatgtaggcgcagttaaacagcagcagcactgccgatctctttatttttcaatattgttatctagtggttcaggaccaaataagtaggccaggtgctgactgttgtatggtttgtggcctattgtcgttgctaaaaactagaaatgcgcgtactaatgttgcattgctgcacttgatttgtttgtcgtcc

SEQ ID NO: 265337 - DNA, 602 bp, Zea mays
gcaaaacgtctttagcgctcgtccgtctaaactgtggtcggtgtacttccgctcactttttgagcggcgtcttgacaacaagagcaagaaagtatcaaaacccgagagcaatggcggcggcggcgaagagcgtgtgcgtgaccggcgcgggcggcttcatcgcgtcttggctcgtgaagctcctcctctcccggggccagtacgtggtccgcggcaccgtgcgcgaccctggtgctagcaagaatgctcatctcaaggtgctggagcgggctggggaatggttgcagcttctccaggctgatttgttggactacagcagtgttgcatcagcatttgccggctgtgagggtgtcttccatgtagcttgccctgtcccttctggtcggtcctccaaccccgaggtggaggtcataggtcctgctgtagtaggaacaaccaatgtgttaaaggcttgctatgaggcaaaagttaagcgagttgtggtggtgtcttctgtttcagctgtattcagtaaccctaattggcctaaggacaaggtctttgatgaagattcttggtcagacgaggattattgcaggaagaatgaggattggtattaatct

SEQ ID NO: 265338 - DNA, 379 bp, Zea mays
atcccaaaaatttcgtggaagatgatgacaactctgtatacagctctgagaaactgcagaagctggggtggagcttcaagcctatagaggaatccctccgtgacactgttgaatcctacaaagcatttggcatcctgaattgaacatccagctaggactgttccatctgctgtttttgcctccgaactctttctgaataatgtttgcaggcagcgaaacagcattgccagcaggttaatcctggcatcatgctggagcagcactgtagttctatctttttcttttttttttccatccccaatactatctagtggttcaggaccaaataagtaggcccagtgctgactggtttatggcttgtggcctattgtcgctgctt

SEQ ID NO: 265339 - DNA, 786 bp, Zea mays
cccacgcgtccgaaaatggaacaagggacgaatcatatgcttgaagtcccaactaaaaaggctgcagtcggccgtagactcctcaaatgggtctcttgcagctggttttgtcgacatgacaaactcccgtctgccggctcccggttccccgcggtccccgggcgaggaccaattggataatggttcacgccatttgcctgacgaaccgttggcggaggaaaaggagtcggagacttctcgcactgtgagctgctgcccttcgcatctacagttgtgatgccattggtctgaacaaggggagacgagatgcaggataccaagcgtattttcggagttcgtccattcagatctccgtctcggtctcagttatccagggtgggtgctacatactgcagattcacatcttgcctggaatttatttgtctggggcttgacagtcaatgctgaacttcagttgcatttcaggcaggattttagctcgttgtagggagaacgagcttatggatgttgttgacccgcccgcttctgtgtatggtatccttgtgcgtccagctcaactctgcaaaacatgatagcctgataagtccccgtcagtggaacatgtcaactgttgatacgatataaatcctgatgatgggaatagtgcctgtagtgtgatttgtattattaccagctgagtgaccatctgttgcttgctactaataaatctctctttattaaaaaaaaaaaaaaaaaaaaaaaaagggggccgctcgcgatctacggacgcgtgggcggaagcgaggg

SEQ ID NO: 265340 - DNA, 916 bp, Zea mays
gttattgcctattgcatgatgctgtcactatatgccaggaatgacaggtggactgacgcgtacgatctgctggaagaaatgaaaacaaatcgtgctagtagtacacatcaagtaattgcttccctaatcaaaggggaatatgatgatagctccaactggcaaatggttgaatatgtcctcgaaaacagtaccatggaaggctgtgactatagtttccgattctttaatgctctccttggtgtgctttggtggtttggtcagaagggccgagctgctagagttctggatcaagcagtaaaatttgggctgttccctgagttatatcgtgacaccaaactggtttggtcactagatgtacataggatgtcgatgggtggagcactggtggctgtgtcagtatggctcaataagctttatgacagactagtagaagatgaagatcttccacagttagcatctgttgttgtattgagaggagaaatggagaaaagcacagttacaagaggactgccaatcgccaaagtcgtctactcctttctaaacgatacactatcagcgtccttccattttccaaaatggaacaagggacgaatcatatgcttgaagtcccaactaaaaaggctgcagtcggccgtagactcctcaaatgggtctcttgcagctggttttgtcatcacaactgtacatgcgaagggcagcagctcacagtgcgagaagctccgactccttttcccccgccaacggttcgtcaggcaaatggcgtgaaccattatccaattggtgctacatactgcagattcacatcttgcctggaatttatttgtctggggcttgacagtcaatgctgaacttcagttgcatttcaggcaggattttagctcgttgtagggagaacgagcttatggatgttgttgac

SEQ ID NO: 265341 - DNA, 1110 bp, Zea mays
tcctctcgtccgcccacgcgtccgcccacgcgtccgcacagtcactccgtttagctcaaatccttatcggcgactcggcgtcggagctcacgaccacgaccgcttccacgccctcgaccccgaacccccaatcccggacgcgaccgctgaaccctagcatactccggccatctgctgccggccccggcgatcccccgccatggcctcccccgagggcacaacgtgggtcttcgactgtccccttatggacgacctcgcggtcgccgccgacttcgcggcagcccccgcgggaggatttttctgggcagcgccgccgtcgctgcagccgcaggcgccagtgcagtctgtcgttgccgcgtcggctcccaacccatgtatggaaatcagtagctctgtggactgtggtcaggaaaaagaacagccaacaaataaacgtccaaggtcagaaagtactacagaatcaagcacaaaagcatccagggagaaaattagaagggacaagctgaacgagaggtatgttccctggtgagacaagacaatggttgcattttagtttgcagtttaatctttttttctcttcatattatcgtattcgtcaactaccactgtacttatgatattctctgtgttagattcttggaattgggtgccattttggagccagggaaaactcctaaaatggacaaaacagctatattgagtgatgctattcgtgtagtaggtgaattgcgtagtgaagcaaaaaagctcaaggattcaaatgagaatctccaagagaagattaaagagctgaaggtctatactatttcatgtggccaagttataaatggtgctgttcagatgggaggtggcacgtgatgtgttgtttaggcacttcatactgttccattttcttgatttatgatccccttttctcatttggtcatttttttttcttatctagatttaattcatccagtcaaataacatgggaataattattagtacacctgtcattctccctccagtttgtggtttagcttattttgggttgcttgcattagcaattttttatccacataatgcgttttttttcttaaatggtaaaccctgcagctgtataacaatatg

SEQ ID NO: 265342 - DNA, 431 bp, Zea mays
gattttaccaaaacacttcttatagaagcggactgaaaagctggggcgtttggcagaccgcaccagattttggtggccggaagttgaaaaaagcccaaacaaacagggccacagtatggaaatcattagctctgtggactgtggtcaggaaaaagaacagccaacaaataaacgtgcaacgtcagaaagtactacagaatcaagcacataagcatccagggagaacattagaagggacaagctgaacgagagattcctggaattgggtgccattttggagccagggaaaactcctaaaatggacaatacagctatattgagtgatgctattcgtgtagcacgtgaattgcgtagtgaagcaaataagctcaaggattcaaatgagaatctccaagagatgattaatgagctctaagtctatactatttcat

SEQ ID NO: 265343 - DNA, 920 bp, Zea mays
ggacgctgggtcgacgtgggcaacaacggcacgcaggggccctgcagggcgttcctcgccgacctcacagagaatgacccaaggaggactcggatcgctaatgcatacttttcactcttcatggccctgggaaacatacttggatatgccaccggagcatacagtggatggtattcgatatttcctttcactgttacagagtcctgcggcatcagttgtgccaaccttaagtctgcctttcttcttgacattattgttctggtcatcacaacgtacactactgtaacatccgtgcaagaacctcaaacttttggaagtgatgaagcacaaaatccaggtgctgaacaggaagctttcctctgggaactttttgggtcattaagatacttcaccctaccaatttggatggtcttaattgtcactgcccttacttggatggcatggtttccttttaccctctttgatactgattggatgggccgagaaatctatcgaggaagcccagacaacccaggagagacccaaaggtaccatgatggtgtgagaatgggttcttttggtctaatgctcaactctgtcgtccttggattcacctctgttgtgctagaaaagttatgtaggaagtggggagctggacttgtatggggtgtctccaatattctaatgactttgtgcttcttggcaatgcttgtaataacatatgttgcaaagaacatggattatccatccagtggtgcacctccgactggcattgtcgttgcttctttggtgggctctacaagtttaggggcacccctggcgatcacatgcagtataccatatgcaatggctgttagtcgtgttgaaaatctcagtcttggccaaggcctagctatggctattctcactctaagctattgccactccacaattttattgtg

SEQ ID NO: 265344 - DNA, 1594 bp, Zea mays
cccacgtttcttatcccctccgcaccgcagctgtctcttcctctcctggtcttcgtcctgccactcctccaccccaacttgctctgctcttctcggattacggctcggggttggtcattggcggacagggcctttcaagaaagggcggcggcgcttttcctgacgcaagttgccccggtgtcctggcttgctgcgcgcttgggggttgggctcaggaatggggggagagcaggcgctgcgtcgactggtcctgttcccatctctctgaaacttagatggatgcatctgtgaacgccaagaagaaggtttgttttctgtgggaacactggccacagccgctgcggtgatgttcatttagctgcggtgtgctccggtcgtatgcgaagcaaccccttctcacttcaggtttggtttgcatttccgttcaagtataaaggcagcagcatttgccattttggcatggcatttgaatagcgtcggaacctagaaaacagtgttccagcagtattacgtcacactggtgttatactattatagaaaaacatggtggacgtagaactgtctgttaaggagactagtgatcacagcatcagctctgaggaagaagatatccttgtcaggagctgtagcaatctcaatgtgagctctggataccattgtgattctcatcagagcttttctcctgaaacatgatcatggccatggcatttctcctaagaacacgtttgggcctaataccatgatggggtcacgaaatggctcattcacttgtttatctggtgctgctattagtgcaaatttcacactggcaaatacaaacatttgcaatggtcttattggcgaagaaattttaccagaactagattctccaaactcctttagaaaaattgtttcttctccatcaatgtcaagattggactcgttctccacctcacaaggaagtcctgtgtcaactgagagctctatattcgagatcagtaaaaacctttggaggtccagtgcaccaacaactgtatcatccaattttctgactagtacagaggtgaaaatggctggcggagctgctggagaggatagagtccaagctgtgtgctcagagaaaaatggatggctgatttgtgggatatatgatgggtttaatgggagggatgcagctgattttcttgcagtaactctatatgataacatagtgtattacttgtacctgctggagaatcggataaggcaacaaaatggtctatacaattcatcagaaagctctctcgatggtcttaaaagtgagttaacactagccatgagaaactcagaaaatgaagacataaaattttctgaaacatttcgatctggcgtgctgaattgcctttctactgctgttgagcaagccgagaatgactttttatgcatggttgaacaagagatggacgatagaccagatttagtttcggtagggtcttgtgttctggttcctcttcttcatggaacagatctgtgcatcttaaatatgggggacagtagagctgtgcttgcttccgtgccatatgtagaaaatggtgctttgaaggctgctcaactgacagagacccactcacttgaa

SEQ ID NO: 265345 - DNA, 995 bp, Zea mays
ctccctggccgtgtccaacgagtagtaattagtttgtgcccgtgtccgtgtttggttgaataataaattgacgaaagagggccaagtatagcttagagagagaagctagctagctgaaatggaggctagcagccgccgccgcgtctctcttgtgccactgctggtggtgatcatcgggtgctgtgcctgccgcgcccagatcccgatcccggcgaggacggacgggttcgtgtacggcgggaagccgccggcgtggggcgagacggtggtggtagaggcgttcttggacccagtgtgccccgacagccgcgacgcgtggccggcgctcaagaaggtcgtcgagcactatagctcacgcgtgtccgtcgtcgttcacctcttcccgctgccttaccacagctatgccttcattgcgtgccggtcaattcatgcggtgaacaaactaaatccgtcgttcgtgtaccctctgctggagaagttcttcaaataccagaaacgttactataatcagccaacatacgaaaaatcaagagctacagtggttgatgaaataaccaagaaccttgttgtgcccatcatcggtgaaactaatttggcggcattcagagcaggtttcaacgattcacattctgatcaggctacaaggatatctttcaagaacggctgtgcacgaggtgtgaccgggacaccctacttctttgtgaatggcatacccatcaacgattcaggttctcctctggaatacaaggactggatttctatcctgcgtcccttggttggaaagatgtaacgcggttgctagtttgttcatcaataaagtcctagtggagagtaaacaaacaaaagctgaataataaataacattaatcagcatcgtcattctcaggaaaaaaaaagagtgctaactcagtaactctcctcggattcaaattgtgtacaagcaacagttcattctgtcaggcaacatatcatgcgtgtgcaactgtcccggattc

SEQ ID NO: 265346 - DNA, 691 bp, Zea mays
ggaccgtcccggaattacttcccgggccgtggcttgcaatcacaacgaacagaagctctcgatctcaccgacaccgaggaagaagagatcaatggcgtccgagcagggagtcgtgatcgcgtgccacagcaaggctgagttcgacgcccacatgaccaaggcccaggaagccggcaagctggtggtcatcgacttcactgccgcctggtgcggtccatgccgcgccatcgccccactgttcgtcgaacacgccaagaagttcactcaggtcgtcttcctgaaggtggacgtggacgaagtgaaggaagtcaccgcggcctacgaggtcgaggcgatgccgaccttccacttcgtcaagaacggcaagacggtcgcgaccatcgtgggtgccaggaaggacgagctcctggcccagatcgagaagcatgccgcgcctgcgcctgcgtctgcgtctgcctaaaggagatcagatcagtcgtcgccgtcaataagggccagcacgtatggctgtaaatgttgtcgttatcagttctggctttgtcgtttgtgggcgattgtgaactagtagtatgtttgtttctatccgagccggaggcgatacttaaccatggatacttgttgtgagttcgaaaaattactaatttaatattattttatttcaaataatttttttatttattattataacaaa

SEQ ID NO: 265347 - DNA, 674 bp, Zea mays
  unsure (1)..(674): unsure at all n locations
gaataacccgggtccgacccacgcgtnccgcccacgcttctcgcccaggaaagccgtcaagctttttggttattgaacttcactagccgcctgtgcggggccatgtccgcgcacatcgcctccagctgttcgtcanaacaccgccaatgaagttcacttcagtgtcgtgtttcctcgaagtgtggactgtggcacgaagtgaagagaagcacccgcggcctacgaggtcagaggcgatgctcgaccttccacttcttcaagaacggcaagacggtcgcgaccatcttgggtgccaggaaggacaagctcctggcccagatcgagaagcatgccgcgcctgcgcctgcgtctgcgtctgcctaaaggagatcagatcagtcgtcgccgtcaataagggccagcacgtatggctgtagatgttgtcgttatcagttctggctttgtcgtttgtgggcgattgtgaactagtagtatgtttgtttctatccgagccggaggcgatacttaaccatggatacttgttgtgagttcgtttctgttcgcgtgtgactcttgaattgaatcaaccagctcaccactgcaccaggccgtggtgagtggtgacagtgatttcctgttattatggatgatcctatggatggatatagaataatagataaatcccgttgcgctgc

SEQ ID NO: 265348 - DNA, 345 bp, Zea mays
gtagtagtcggattcggtcgaagcaatcttgcaatccacccctcgaaagaaaacctcaatcaacaccagaagctctcgatcccaccgaggaagaagaagagagaggaatggcgtccgaggagggagtcgtgatcgcctgccacaccaaggccgacttcgacgcccacatggccaaggccaaggaggccggcaagctggtgatcattgacttcacggcctcctggtgcggcccctgccgcttcatcgcgccactgttcgtcgagcacgccaagaagttcacccaggctgtgttcctgaaggtggacgtggacgagctgaaggaagttgccgcggcctacgatgtcg

SEQ ID NO: 265349 - DNA, 2088 bp, Zea mays
gagggttggccagccgtagaaaggagataagaagcgagaagagagcacaggcagagggagtgagggaaaaggcaagagcgtagaaagcagtccggtcggagaagcggaagttcgcgttgctttgctgatccaatgggggagaccaacgagctaccgccgccacccgtggccgcgccgccgcccatgatgccgatgcagtccatgatggtcggcgcaggcgccatccacccgccccacgagcagttccaccatctcaactactgcgtccactcaaatccatcctgggttcaggtggcagcacttgcattccttcactatcttgtgatgttgggttctaccgtcatgcttgcaacagctattgttcctgcgatgggtggtaacgctggtgacaaggctcgagttattcaatcgttcctctttatgagtggcataaacacactgctgcaaacacttattggaacgagacttccaacagttatgaatgcctcttttgcatttgttgtcccagtgctgtcaatagcaaaagagattgaatcaaataacttcctgaatgatcatgagagatttaaacacacaatgagaacagcacaaggagctctgattgtggcatccatcctcaacatgattcttgggttcagcacgatatggggggcatatgccaaaaagttcagtccggtgataatgacccctgttgtttgtgttgttggtcttggactattccaacttggctttccccaggttgggaaatgtgtggagattgggcttccaatgctaattcttgcggtggttgtgcaacagtatgtgccaaattacttcagttatatccatcaacgggtcaccttcttgtttgagaggtattcgttgcttctttgtatcggcatcgtgtgggcctttgcagctatccttactgctgcgggtgcatatgaccatgcttcacctaagacacaacagcactgccgcactgataagtctttcctcatgtcatcggcaccatggattaaaattcctctaccattcgcatgcggtcctccaatcttcactgctggtcattcatttggaatgatgggtgctgtacttgttgcagtcttcgagtcaactggagcacactttgctactgctcgtctagcgggtgctacaccacctccagcttatgtccttagtcggagcgttggcttgcagggtattggaatgttcttggaggggatctttagtgttccagcaggttcatctgtatcagttgaaaacattggcctccttgggctgacaaaagttggaagtaggagggtgatccagatatcaactgggtttatgatattcttctccatatttgggaaatttggggccttctttgcatcgatcccactgccgatctttgcagcaatttactgcatcttgttcggcattgtagctgctgtgggagtctcgttcatgcagtttgccaacaagaactcgatgaggaacatctatatcatcggactctcgttgttccttggcatctcggtccctcaatacttcaacggatacacttcttcagctggcggccacggacctgcccggacaaatgctggatggttcaacgacattataaacaccgtgtttgcttccgggccgacggtggcgctaattgtcgcttctgtcctggacaacacgctggagttcaggggctacgaggccgaccgggggctctcgtggttccagccgttcctgcgccgccataagggatactcggaccccagaaacgaggagttctacagcttcccaatcagcgtctatgacgtcatcccagaccgatttcggcgctgactccaaatgaccgctgttaccccgcagctgtgcatgtaaatccccgtgagtcttgttagtcttactcctgtgacttgtagcggctggttctagggggatatgggtaaaagaatgcttagggcaattgcttggtttgactcttttcgggataagaaacgggttacatgataatgtagagctctgtgccggatacattggttttgggaagggttacagaagaatactagccccttacatgttgatgggcatttagttgaaggcccccgctatttgtttttttgcccc

SEQ ID NO: 265350 - DNA, 511 bp, Zea mays
tttttcgctgcatttgtttagcgggagttcgtcgaacaagcagcgctggcggtgcttgcgcgaatcttttgagtgaagctccccgtcacatcagtcctcttcttccccggtcgtcgtcctatgcttgtccctgtctcggcaattctgggatactaaagaggaatcggtgaaggtccggtcttcgattccccgagatttgcatctgaatcttcttcttcttctcttttgcctccatggagtctcttgctgcgtgccactccatcgagcgagtctagcgcgcgcgacacagtagcagcagcaaagcagtcccgtcggggaagccggaggtcccgttgctttgctgatccaatgggggagaccaacgagctaccgtcgccacccgtggccgtgccgtcgcccatgatgccgatgcagtccattgaggtctgtgcaagcgtcattcacccgtcccacgagcagttccaccatcttaactactgcgtccactcaaattcatcctggggtaagggca

SEQ ID NO: 265351 - DNA, 837 bp, Zea mays
ccggaattcccggggcgagccaagccgtccgaaactaactgcttgctctagctagctagctgctcccggcccatatccactacacgggtaggctagcagcagcagcagcaatggcctcggtgacgaggttcccggccgtggccctcgtcctgctgctcgccgccagcgccttcctggccagcgaggtggcggcgtgcggcggctgcccgaaaccaactcctcctcctccatcgccaccaccgccgtcgcccaccagcacgccgtgccctccgccgacgtccagctccggcggcaagtgccccaagaacgcgctgaaactgggcgtgtgcgccaacgtgctgggcctcgtcaaggtgtccatcggcaaggtgcccaccgactcgtgctgcccactgctggacgggctcgccgacctagaggccgccgtctgcctctgcaccgcgctcaaggccaacgtgctcggcatcaacctcgacgtccccgtcaagctcaccctgctcctcaactactgcggcaagagcgtccctcagggcttcctgtgcgcctaatatatatactagtggctagttcgtcactagcttcagttgccatgcatatttgtgattcttcttctttccttctagttcaccactgtatgtacgtgcctcctccgatccggatgttttctttggtattgccttcccttctactcttcaaaaaaaaaaaaaaaataataaattaaaattaaaaacaaactaataaataataaaattaaaattaaaaactttaaaaattattaaaaaaaatttaaaaagggcggccgttttaaaggatccaagtcttcttacgcgtgcttgc

SEQ ID NO: 265352 - DNA, 720 bp, Zea mays
caaacagggaattcaaataaccatactccatctgcttctttctcaactggtgctgctgttcctcctccctttgccttctcgggctcaggaaatgaaggaacgcaggcacgccaagcttctaatggacttgaaggggaacatggtgaaccaggcatacacagggatgatgacgtccatataaatttggctggacccgagcaggctgcggaggctttgagagctgtgatgcagatgcttgggccacagatgggtcaacatgagggtgcacctagaggaccaggttaagcgtgggaggtaggaaaatgtgttacgtggcgtattgtggtctgcaggagtcttatacgggacattattttgtcttctccatcctgacgaagaatggagattctcgtgcgccttattattatagcagcttatctgtgtgctacaacaattccaccgtaatggttaccggcgttcaacttatctgccctgttcatattggcgtaggtgtgtcattagctgtgctggggcctgggtcttgttttgttgagacttgtctcgtaatggctgtcggtccatcatgtgatcttaaattaaagcctttttgcccccctcccctgcttttccgctgcttgtcggttcccagttgatacttggaaaatatttgcaaggttggtgaaaaaaaactgtcactggaatgaagttcatcatcgttattggctggctggcttgctggat

SEQ ID NO: 265353 - DNA, 1556 bp, Zea mays
aaataaactaaattgtagctgaccatatttatatgcatctaaactgtttgctttgtgtgccatggagaagtatagactctaccttaaacgcccaggtccgggggccgcacaacaggctagcattgttgctgctttgggaggcgtacgacccctttatgcggatgagtgcatttgaaggactccatggttatcaatcttttgtctcttcagcagctctgccatctttcagtccacagggactgttaaatagaaataatccagcatcatttgcgattcaaggggtggctgcttccaggccaattcagattgcaaccggcaataccacaatgagtcattccattggcgatccaaatgataaatatcaccttagcttaccaggcactagttgcctacaaggaaatctagcacaaggtttgccaactccagttgggcaggtccagctgccacagaagtggatacacgaagaaactggcgatctatctactatcctttctgcgagtggccgggctaatagtggtgttcctggcacactccaaagtgtcacgaacagtcacttgctgcagcaaggctttgttgaacgtagacaagacaaagttgttatccagccatcttcatctgcaagttcagatcgtcctgaaggcactgttggagtttcctccagtctgatggattcctgtgcaacccagcagagggttgttccattgtctgccttctctagcagtgcatctccaatgaatggctcgttttgcagcaacggtgtagctgagttgggtgctgcatcctctggaggtacaagtattttcccctccaatgacctgaggatagaaagagacagcaaagtgggagctagctcttttggtagtgtgatacttctgtctccagacactgtgccaaaccaaaaatacttgaacttcggcggtgaaagcgatttgagatcgaacatggatggagggaacgcaggcaatctgttgaatcccaagctactatggagttgtttgccggcctctcagccgcctaatcttatcggaagtcatcatcccatgagccaaagactgaaccttggcggctcaatggtcagacagacaacagctagtgcttcggcagctgccccacagacaaggatcgacatgtttatctccggagacgctccgaagagcgcgtcggatttgagcttccctaagggccacagcgagcttagctctagcagctgcagctttgacggcctcctcaactccataatcaaagtggagaaggacgatgcttccttcagcgatgacctgggatgcgacttgtactccctgggtgcctgtatatgatcgctaccttccacgtatctgcatctgtgttaatctcccattgtatgctgtgcagctagtgttaatcttaggtagaattgtagctgtgcgcctatctttgcttgctcacagccaagaaaaaaaaaattgatgtctgcacgtgatgtgctagcagtaagatatctggatttgtggaagtcaatgcccatttgctacatcaaaaaaaaaaaaaaaaaaaaaaaaaaaaaaaaaaaagggggg

SEQ ID NO: 265354 - DNA, 2335 bp, Zea mays
cggctcgagatcggttttctccttggaaatctgctggcgagtcccaggacccgaatgccccactcttattacctgctaattttgaatttcctaatcgggttgcagctgcttatataagctcactaaccccgcattcgcttttccgactcccacctccagccaaatcgggctatagatcaaacgctgcactgtagggagcgtgaagccagcggcgaatggaatccctagccgccacctccgtgttcgcgccctcccgcgtcgccgtcccggcggcgcgggccctggttagggcggggacggtggtaccaaccaggcggacgagcagccggagcggaaccagcggggtgaaatgctctgctgccgtgacgccgcaggcgagcccagtgattagcaggagcgctgcggcggcgaaggcggcggaggaggacaagaggcggttcttcgaggcggcggcgcgggggagcgggaaggggaacctggtgcccatgtgggagtgcatcgtgtcggaccatctcacccccgtgctcgcctaccgctgcctcgtccccgaggacaacgtcgacgcccccagcttcctcttcgagtccgtcgagcaggggccccagggcaccaccaacgtcggccgctacagcatggtgggagcccacccagtgatggagattgtggccaaagaccacaaggttacgatcatggaccacgagaagagccaagtgacagagcaggtagtggacgacccgatgcagatcccgaggaccatgatggagggatggcacccacagcagatcgacgagctccctgaatccttctccggtggatgggttgggttcttttcctatgatacggttaggtatgttgagaagaagaagctaccgttctccagtgctcctcaggacgataggaaccttcctgatgtgcacttgggactctatgatgatgttctagtcttcgataatgttgagaagaaagtatatgttatccattgggtcaatgtggaccggcatgcatctgttgaggaagcataccaagatggcaggtcccgactaaacatgttgctatctaaagtgcacaattccaatgtccccacactctctcctggatttgtgaagctgcacacacgcaagtttggtacacctttgaacaagtcgaccatgacaagtgatgagtataagaatgctgttctgcaggctaaggaacatattatggctggggatatcttccagattgttttaagccagaggttcgagagacgaacatatgccaacccatttgaggtttatcgagcattacggattgtgaatcctagcccatacatggcgtatgtacaggcaagaggctgtgtattggttgcgtctagtcctgaaattcttacacgagtcagtaaggggaagattattaatcgaccacttgctggaactgttcgaaggggcaagacagagaaggaagatcaaatgcaagagcaacaactgttaagtgatgaaaaacagtgtgccgagcacataatgcttgtggacttgggaaggaatgatgttggcaaggtatccaaaccaggatcagtgaaggtggagaagttgatgaacattgagagatactcccatgttatgcacatcagctcaacggttagtggacagttggatgatcatctccagagttgggatgccttgagagctgccttgcccgttggaacagtcagtggtgcaccaaaggtgaaggccatggagttgattgataagttggaagttacgaggcgaggaccatatagtggtggtctaggaggaatatcgtttgatggtgacatgcaaattgcactttctctccgcaccatcgtattctcaacagcgccgagccacaacacgatgtactcatacaaagacgcagataggcgtcgggagtgggtcgctcatcttcaggctggtgcaggcattgttgccgacagtagcccagatgacgaacaacgtgaatgcgagaataaggctgctgcactagctcgggccatcgatcttgcagagtcagcttttgtagacaaagaatagtgtgctatggttatcgtttagttcttgttcatgtttcttttacccactttccgttaaaaaaagatgtcattagtgggtggagaaaagcaataagactgttctctagagaaccgaagaaatatggaaattgaggttatggcttatgactgtcgtttgttcagtatgaaactagatttccaactgtgccttagaagtttgcaaatgtcttgttatataagggccggctcagtagactagtcatgtcttttaatacaactcatgtggtcctctttgtgcatattatattgcataggtatatggtagtg

SEQ ID NO: 265355 - DNA, 719 bp, Zea mays
aagactcctttggtgtggaatagttgccatagtagctcttaagggttagtttgacggcctcattttccaagagattttcattttctaaaattagttcatttttacttgaaaaatgagaatcctttggaaaaatggagttaccaaactagcctaataaaatttatttatatgaccaggtgaaggccatggagttgattgataagttggaagttacgaggcgaggaccatatagtggtggtctaggaggaatatcgtttgatggtgacatgcaaattgcactttctctccgcaccatcgtattctcaacagcgccgagccacaacacgatgtactcatacaaagacgcagataggctttgggagtgggtcgctcatcttcaggctggtgcaggcattgttgccgacagtagcccaaataacgaccaacgtgaatgcgagaataaggctgttgcactagctcgggccatcgatcttgcagagtcagcttttgtagacaaagaatagtgtgctatggttatcgtttagttcttgttcatgtttcttttaccccctttccgttaaaaaaagatgtcattagtgggtggagaaaagcaataagactgtctccctagagacccgaagaaatatgcgcaattgaggttatggctaaaaaaaaaaaaaaaaaaaaaaaaaaaaaaaaaaaaaaaaaaaaaaaaaaaagggcggccgcccgggaattcg

SEQ ID NO: 265356 - DNA, 757 bp, Zea mays
cggacgcgtggcggacgcgtgggcgcagtcactcccgggccgccgccgccgccgcctccgcgaaaaaccctagcaggcttcgccgctatcactccaaggggcgcgaccatggtggccacaaagaagacgaagaaatccacggacaacatcaataacaagctgcagcttgttatgaagagtggcaagtacactctcggctacaagaccgtcctcaggactctcaggaactctaagtcgaagctagtgatcatcgctaacaactgcccgccccttcgtaagtctgaaattgagtactatgctatgctggccaaggtcactgtccaccacttccatggaaacaatgtcgaccttggaactgcctgtggtaaatactttcgggtctgctgcctcagcattattgatcctggtgattctgatatcatcaagactacaccgggtgagcagtaaagaagcccctgcagtagggggatcttactgcatttgttcttctgtcttgttaaacagcatttacctgctagtaaactgagttattcggaacattgtcttgaattgaatttttgctccggtgttttgacacttaaatagagctttagcttataccgttgttcaggtcgcagctgtatgttgtcactatcaaaccgtcgagcgaatgctccaccagtggaggtatcccctataataaggattcattgtttgtaggaattggatgatatctactgttggaattgtacgaaaaaaaaaaaaaaagagcggccgc

SEQ ID NO: 265357 - DNA, 614 bp, Zea mays
ctcgagccgcgacaagagccgccgccgccgccgccgccgccgccgccgcgcaaagccgcttcaacgccgtcactcctcggggcgcaaccatggtggccgcaaagaagacgaagaagtccacggacaacatcaacaacaagcttcagcttgtgatgaagagcggcaagtacacgctcggctacaagactgtcctcaggaccctcaggaattctaagtcaaagctagtgatcattgctaacaactgtcctccgcttcggaagtctgaaattgagtactatgctatgctggctaaggtgacagtccaccacttccatggaaacaatgttgaccttggaacagcctgtggaaaatacttccgtgtctgctgcctcagcattatcgatcctggtgattctgatatcatcaagactacaccgggcgagcagtaaggatgccacaacagctgtactcggcatctgaattcttagtagctgatgattttgatgtacttgtcttttatcgtgttccgtcagaatttatagagttcttggcaacattgtgtggattgaacatttcgttccagacatttgctaattgttgaatggatctcttgccggatgtgctcggattacaac

SEQ ID NO: 265358 - DNA, 715 bp, Zea mays
cctgaattcccgggacgacccaagccgtccgcaattcaacaaagacgtacgtacatgcacaaaactagagcgagctgtgtgtgtgtgtgttcgtcatttcctcgatcatggcgaaggcgcaggcgcaggtggcggcgaggttcatgatggaggcgccgccgccgcaggtggtgtcggtcatgcggcggaggaaggcgccgaggagcctgagcaccatcgccgaggacgacagggagatgctggcgccgtgcgggtcaccgtcggaccacggccacgtacatacacataactagagcgcaggcgcaggtggcggcgaggttcacgacggaggtggcgccgccgcatgtggtgtcggtcatgcgacgaaggaaggggccgaggagcctggacaccatcgccgaggacgacagggagcagcagctggcgtgcgggtcgccatcggaccacggcctcgcgacggcgtggtcgtcgctccagaggataccgacgccaccgcagccgccgcgggagcgcgcaggtgggtccgtgacgagggacctcagcaagaacttcttggactcccacggctgccagcaggccagcggctgggagggtggacacatgctaggccaccggcgagccgtgcatgcgctggagcttcacaaggtcggagcttgttgaagagggaagagagaaaatctagcttagctgcagtgagcttgttcgggagaaatat

SEQ ID NO: 265359 - DNA, 516 bp, Zea mays
gcgattcaacaaagacgtacgtacatgcacaaaactagagcgagctgtgtgtgtgtgtgttcgtcatttcctcgatcatggcgaaggcgcaggcgcaggtggcggcgaggttcatgatggaggcgccgccgccgcaggtggtgtcggtcatgcggcggaggaaggcgccgaggagcctgagcaccatcgccgaggacgacagggagatgctggcgccgtgcgggtcaccgtcggaccacggccacgtacatacacataactagagcgagtagagataccgtctcttactgtgtgtgtgtgtgtgtgtttatcaactcctcgatgcatggcgaaggcgcatgcgcaggtggcggcgaggttcacgacggaggtggcgccgccgcaggtggtgtcggtcatgcgacgaaggaaggggccgaggagcctggacaccatcgccgaggacgacagggagcagcagctggcgtgcgggtcgccatcggaccacggcctcgcgacggcgtggtcgtcgctcca

SEQ ID NO: 265360 - DNA, 1485 bp, Zea mays
ccctcttctctcatcgttgattcgattttcctcgcccctggagcttcaaattcaagtgaaggagccagttaaggcttgccaaaactagcggcggcatcggcaatgctctagttggcctttccttccctcccagctcgagcagcgcaggcggccctctttatctctctcggcagtggaggcagcgtcacccttcgcctaaatcaccaccaccagctctggagcgctgcgtcgccgctcctctaccatttcctggtagattggaccggaacggactaacggagtggagttctgctattgatcattgtgagttcatccccactccaatccatctgtccatggtccgtatgagctcatcttcctcggcgtctggggtcaatctgacagagcaaatcgagaatgtttttgaccaactgatcagcaaaattgaacaagcggatccagattttgacccgcggccctttttgaaacaattgaatgtgttaggccgctatgaaccaatcaagcggaatgtatatttcactaagagatacattgaagattatggcatttcttgtcactgtaagccttctcctggttcatcagttgtgtgtggcagagactgctattgtagcatgcttttctcttgctgttcatcacaatgtgaatgtgatattgcgtgcaccaataaatcattccagcacagacctcttaagaaaaccaaattgattaagacagagaaatgtggtcatggattggttgctgaggatgaaataaagaaaggagaatttgttattgagtatgttggagaagtagtaatatggtcattgatgcaacaaacaagggaaaccggtcccgatttataaaccatagctgtgaaccaaacacagcgatgcagaaatggactgttgatggagagaccagggttggaatttttgcacttcgtgacataaagataggggaggagctgacctttgtctacagatttgtccagtttggagcagctcaagtttgtcattgtggatcttcgaactgcagaaaaatgctaggcacgacgaagtattcaggaagctcacagaatcatcatgccaagaagacaaagacggaaaacaagttgtgagaattgcatacagcagtttcttcggctgtggcatccacgtcaaaaaatgtatgttggttgttggatagttgacttcgatcaaggaactaaaatgcatactctccagttcattgatcaccatactgaaaagtttgatttgaaagaagaagaatggcacttattggaggtcgactctgatgaagattgatcatcgaagggttgtcatggtttgctgtccagccagctagttcgcggttcatttgcggtcgcagcatagactgacggacggccattgctcttccattttggagtcatagtccaagcctgaactgtgacattcgtgcatgcttatacgcgaaagtgtacctgagagcaaattatacgtggaagtgcatcagcgttgcatatgc

SEQ ID NO: 265361 - DNA, 430 bp, Zea mays
gtggcatccacataaaaaaatgtatgttggttgttggataattgacttcgatcaagattcgaaaatgcatactctgaagttcaatgatttccatactgaaaagttcaagttgaatgaagaagaatggcacttcttagaggtcgattttgatgaagattgatcattgaaggtaactgtaagagttgactgccatggtttgtgacagggttgccatggtttgctgcaccgccggcctactagttgggggttcatttgcgatcgcagcatagacagacgcgcggccatttttcttccattctggagtaatagtccaagcctgaactgtgacattccgtgcatgcttatacgtgaaagtgtacctgagagcagattatacgtgaaagtgcatcagcgttgcatatgcaaaaaaaaaaattgttatatatattat

SEQ ID NO: 265362 - DNA, 1559 bp, Zea mays
ccctcgtgtccgtttccctctgtctaccgcacgcgcccgtggctagctgccagccgcgcgcccgccgccaccccgcgcccaccccactgcgcgccggctggcgcgccgccacccagcgcggcccgccctcgccaccctgtggccccgccaccgccccgctgccccaccgttaaggcaggtgatgcggccgacaagggggcggcgtccgggaacccgcagagccacgtcgtggtcgggaggcacgggattcggatccggccgtggccgcacccggaccccgtcgaggtgatgcgggcgcaccggatcatggagcgcgtgcaggaggaacagcgccgctggtacggcgtcaaggagccgaggcaggtgctcgccgtcaccccgacctactcacgcgcgtttcaggcgctccacctcaccggcctcctccactcactccgcaacgtgccgtacccgctcacctggatcgtcgtcgaggcaggcggcaccaccaacgccaccgcgtcaatgcttgcgcgctctggcctcactgtcgtccacatccccttccctgaccgcatgcccaccgagtgggccgaccgccacgctactgagaaccggatgcgcctccacgccctacgcgtgatccgtgagaggaagatggatggcgtagttgttttcaccgacgacagcaatgttcatagcatggagctgttcgatgaggtgcagaaggtccagtggatgggtgctgtatccgtcggaatccttgcgcatactggcacggcagaccaactacggctcagcgaggaggacaagcagaatatgcctcttccagtccagggccctgcttgcaactcctcagggcatctgattggatggcacacgttcaactcattgcccttctctgggaagacggccacagttgttggtgaagcagcccctgttctccccaggggtttggagtgggctggctttgtgttgaactcgagaatgctgtggaaggaggctgaaggcaagcccgactgggtgaaggatcttgatgctgttggcgagaatggagaggagattgagaacccacttactctgttgaatgatccatcctctgttgagccactggggaactgtgggaagaaggtcctactgtggtggcttcgtgttgaagcacgggcggatagcaagtttcctcaagggtgggtaattgagccacctttggaagtcgtcgtccccgcaaagcgcactccatggcctgaaaccaccaccgagcttccagccgagttattggatgacaagcaagagcaggaggataggcgcttgtcaagagccaacaaatcatctcggccccgaggcaccacgaaacggaagggcgaccctcaaggacaagataactgatgcagaacgtactggccttgtgatgtatatcttacaccctgcaaaaacacagtagcaagcatatcctgttaatctggcggtgtctggttatttttttctgctctatacttttctgatcgtcttgctactgtggcgatggtccaagcttgggtatgttatatgtagagggcacattggtaaagtagtggatgtat

SEQ ID NO: 265363 - DNA, 509 bp, Zea mays
  unsure (1)..(509): unsure at all n locations
gcggtcgtcggcgggcgtcgccgcgggggcagacggggctatgtccgacggcggcggcgcggggccgcgggcgcccgcctcctccaccttctggttcctgctccacgcgctctgctgcctcatctcgctcttcctcggcttccgcttctcgcgtctcctcttcttcctgctcttctccaccaccgcgctctaccgctccagcacctcctcctcctcggccgcggtccttcgcgccaccaccacgacaaccaccaccacgaccaccacgacgacgacgaccaacaccttcacgctctccttcgccgccgccaacactcccccttccacccccgctaaccgcaccgcgctggatgtggccgacaagggggcggcgtccgggaacccacagagtcacgtcgtggtggggaggcacgggattcggatccggccgtggccgcacccggaccccgtcgaggtgatgcgggcgcaccggatcatggagcgcgtgcangaggaacagcgccgctggt

SEQ ID NO: 265364 - DNA, 584 bp, Zea mays
  unsure (1)..(584): unsure at all n locations
caactgtctaatagctacccagcaactgaaactgttggccctgtttagctgagctccatcttcaagatacatgtggaccacgccaggtgggtaattgagccacctttggaagtcgttgtccctgcaaagcgcactccatggcctgaaacaaccaccgagctgccagccgagttattggatgacaagcaagagcaggaggataggcgcttgtcaagagccaacaaatcgtctcggcccagaggcaccacgaaacggaagggcgaccctcaagggcaagataactgatggagaacgcactgccattgtaatgtatatctcttgcaccctgcaagaacacggtaggaagcatatcgggttactctggcggtggcggtgtttaatttttctttctgatgtttttgctcatgtggcgatggtccacgcttgggtgtgttatctgtagagtgcacatttctaaagtagctgcacctgttgtgttgtaatgtaactgtattgggaactaaaaaaatgcgggctggattctcgaagccaaaaaaaaaaaaaaaaaaaaaaagaaaaaaaaaaaaaaanancccncgcgtccg

SEQ ID NO: 265365 - DNA, 516 bp, Zea mays
  unsure (1)..(516): unsure at all n locations
caacgggcgcggacaccntgaccggcgtagatgcgtgcgctgccgtcggcctccctggcggggctccttgacgcccggacgagcgaagacgcaggaaggtcggcctgccggtgcccttttgctgtgtcgccctgccgatcgttgacgctcgaacgtcgacccctcccgaagatcaggcttttgctgcgcgtcttccgaccgcgaccacctcgacttcggctacctcggcatctaggggctatcgtcttcttggagcacacaccggtctctgctccagccgcaacattcgcaccatcacgacgctgcgactgcggggggatttcaacccgtcggctcctaccttcggcctctactccagtctcatcgtgtgtggtgcccccgttgcgactgcggggggatgttagactctgtgtgtgagtgtgtgggccggcaccactgttgggcggccggcccattagggttagggctcagtctctctatatatgtnccccntctcctnngaaggcnacatttcat

SEQ ID NO: 265366 - DNA, 576 bp, Zea mays
cgttcttagattcaaccatccacatatacaatgtcagggtagatgaggtaaaaactagactcaaaggacatcaaaggaggataactgggttggcattctccaccaaccttggcatacttgtttcttcaggcgctgatgcacagctctgtgtgtggaccaatgacacctgggaaaaaaagagaacagtctcgatacaaatgccagctggaaaaactccttcaggagatacacgggtccagtttagttctgaccaaagtcacttgctagtagtacatgagactcaactagccatatatgatgcatcaaaaatggagaggatctatcagtggataccccaggacacattgtcagcttccatatcgcatgcatcatactcatgtaacagccagctagtttttgctgccttcaatgatggtaacttaggtgtttttgatgcggagaacttgagattaagatgtcgaattgcaccatcggtgataaacagcaatccacctgttcaccctcttgtcgtcgccgcacatccccacgagccaaaccaatttgcggtcgggctgtcagatgggtccgtcaaagtgc

SEQ ID NO: 265367 - DNA, 436 bp, Zea mays
ggtgctctctgaatgaagaatcgcagctgatcaaacatggactagtatccaagcagttaatttcatgccttgctgcttcgcttgtgttcgtctctccacctagtcaggctattcctgcagaaacctttgcccgtccaggcttgtgccagattgcaacagtggcagccattgacagtgcgtcaggctcctctgaagtttggcaacccttcagatgatgtcagcacacggatgatgatgaggggtatgaccgccaaaaacttcgatccagttcgctactctggtacatgggctgaggtagcctcgttgtaacgtgcatttgctggtcagggactagaagactgtcactgtactcagggagtgtattcttttgatgagaaggcacgcttcaatccaggtggatacattctgtgtacacggtggacctgatggatacatc

SEQ ID NO: 265368 - DNA, 331 bp, Zea mays
ctcatgcacgacctgtgcaaggtgctgctgcacccaagcttcggggagctccctcagtgggctgtcgtcggtgacaccttccccgtcggctgcgcatacgacgagtgcaacgtccacttcaagtacttcaaggagaaccccgactaccacaacccgaagctcaacaccaagttgggggtctactcggagggctgcggcctcgacaaggtgctcatgtcatggggccacgacgactacatgtacctggtggccaaggagaacaagtgcacccttccttccgcggggctgttcatcagcagataccactcgttctaccccctgcacaagcatg

SEQ ID NO: 265369 - DNA, 527 bp, Zea mays
taaattctctgaagacagggatgttgcaacgatttaagagcagctttgtctctggatcttcaaatacaccaagcagcagtgcaccttcctttgtaagaccagcactccgtggctttgtgtctggcggcaccattggaggagacacacggcctgcacaggcagcccccactggcatccctgcatcccggcctgcacagcctgcccccgcggtccctgcatcccagcctgcaggaaataacaacgaaaatgggaacccgaatccagaaagttcacgggatcagttcagggagagaaaacgaccatcaggttgggatcgctagtccctgctaactggtatgcccaattgtgattccttccccgctttgttatattgatgtagtctcttgggagacatcctataaaaaagcactgtagattacatgatgtcagggtaagtgttgtttaggtagtttggcctttattctttatccttcaactactggtgtatctggcccggtgttcacatttttcatcagagcaaaatttac

SEQ ID NO: 265370 - DNA, 638 bp, Zea mays
cccacgcgtccgctctggttccctaaaaggatttcctagtgattgcaaagcagcttcaaagcttgaatcttgtgtgccgaaaaaacctgggaattgataagagcatccacactgcatatgtccgagcaatcagatctgcacaacatttcatttatattgagaaccagtactttcttggttcttcatatgcttggccatcctatgtgaattcaggtgctgataatctggtaccaatagaattggccctcaaaattgcaagtaagattaaagcgggagaacgctttgcagtgtatgtagtgataccaatgtggcctgaaggagtccctactgcagcatctgtgcaagaaatccttttctttcaggcccagacaatggagatgatgtataaaataattgcagatgagctcaaggcaacggacaataaggatatgcaccctgaagattacttgaacttcttttgtcttggaaatcgggaagaaccaccatctaatggtagcccagaatcagagaaatctacagataaaagtgcagcggccttagctacgaaatatcgacggttcatgatctatgttcacgcaaaagggatgattgtggatgatgaatatgtcattctgggttcagcaaacatcaaccagaga

SEQ ID NO: 265371 - DNA, 931 bp, Zea mays
ctcaattttccatactcgagacattgagttgactgagaaactggactattcttcagctgtggccttgcttggctactcgttgatcctttcattgctaagggctttcaatgtcaaggatgaggctagcagggtgatgtttgcagcccctattttggcattcgttacaacgcacatcttgtatcttaacttctacgagcttgactatggatggaacatgaaagtctgcgtggtgatggctgcggttcaacttctgacgtgggctgtttgggctggtgtaagccggcatccatcacggctgaaactctggacggttgtttttggaggagcactggtcatgcttcttgagctctacgacttccctccatacatggggtttgccgatgcccattcactgtggcatgcaagcaccattccactcacctatctctggtggagcttcatcaaggacgatgccaaattccgcacgtcaacactcagcaagaaggcaaagtagttaagcaaagcgcgacattcttagcatagggtcagagaggatcagattccgattccgtggtctgcacgggggacattttgggggcacacgtgttgtcggacatcatggaacctcggtatatttgccctccccaaaaaagacattcatcttcatccactcaggtttttggcccacaaaactcagcatactctttagggcgcatgttctgcccttacgaattatctctttactgacctgaacgtgcatcctgtgattgaatcggcatcttatcattgtagtgttggtggggtttgggagattttgtcatcgccgaatcagttttgtgaaatcagacagaacaatgaacatcagcggtgtgtttcctattatgtgtggagttttgtaaattcctgaagcccattttgtatgagttctccaacgttacgaaaattcctgaac

SEQ ID NO: 265372 - DNA, 710 bp, Zea mays
tgcacatatgcactctttctccaaaatttggcatttaatcttattgcaacatacttgtacagaggggcgagggttgttcagtgctttgacatgtgtgcaactattcaagcacaatggttagatgatatccccattcattttagattattacattgtggtgttcggcttcttcagtcaagcagcaatcatgcaacatgccttactgtagttttttatcactgcacatgttgctggacaaatttatggactggaggattatagaggactaacaagtgctactgggagattctcgagcaccattgaactaagagattccaaatagttctttggagtctattgttgatgttggcggggataatctagcagagatttgtcagattttttgtgcaacacggaggctacatgaggcagcaacgatcccattcttctcgcatgccactttacacaagctaaggatagcttctggtctcactcatggttgtggcagggaaagccgagtcagtagggtttgtcatgtagctggagttatctcagaccgcatattagatgcagtgatgatgttaatggaggatgtttacatttaccgtgcaagcaagatgacttatattatgccttaggacaataagtattgttttcactctaatgaaatacttggtaaaaagttgtctctgtactcctatatttaaaaaaaaaaaaaaaaaaaagaaaaa

SEQ ID NO: 265373 - DNA, 583 bp, Zea mays
  unsure (1)..(583): unsure at all n locations
tctgtcggtcctaatgatgagcgttaagaacaacaccaagatactgaaagcaaacatggcttgttcaatcgggcagcggcagcagaggggtggggccaatgacggagacggagaggagaacccatcgatttggtggcataagtgggagctcatcgaggccggtgcgtttgggcaggtctaccacaggatttatttgcccttctagggatcagcagatcccacacctattacatgatctgtccttctagaatagaatctgctctctatcttctgaaccagtactgccttcttcaatatcagccaccggccggtccacctcttcaataatcgtccttcatcgcccttcagttgtgagttgtgacatactatttatattcggatctgatctattacaaatatacatgcatattatagggtgtgcatctgcatattacaaatttaactacaacggctggatttacttaccagttgcttctcgttctgttttctttgtcccattattgagaagtaccatgtcacatttcattttgtatgtaccttcacaaatttgaagggctggtaaaaaaaaaaaaaaaaaaanaaa

SEQ ID NO: 265374 - DNA, 817 bp, Zea mays
cccacgcgtccgcgaggcgtgaagctgacggtggtgctggtagtccgcaaggaaccggatttggacgcgctctccctcgtcactaggtaagagacccaggtacggaacatataagtggttgttctgattttggattttagccaatttccccctccattctgttactgatttatatgcccatctagggatcagcagatcccacacctattacatgatctgtccttctagaatagaatccactttctatcttctgaaccagcactgccttcttcaatatcggccaccggccggaccacctcttcaataatcgtccttcacttcagttgtgagctgtgacaagtgacatactatctatattcggatctgatctattacaagtattagtttccttttcgaggatagaaaacatggggctagaactggacattgacggcaaataccaagtatgtgaagaatgtagacctcctaattagtttctaatatatttatttgactttgggttaggtatggaaaatgggaagaatataaagctgattagtaacatctagctacttcaaattatgagtttccctttaaaattctccattcttaacttgtttctcttatagactgcatgattatgtgttggttattattagataaataaaaacacttagttttgacaatttttgttcctttgatatctcaaatcggccaaacaaactaggagtgctggcaggaaaagatcggtatgtttatgctaccatattttttagacgtttttattttctagcttttctttaaacttgcattgtaccatctatttttcagattttgc

SEQ ID NO: 265375 - DNA, 641 bp, Zea mays
cggacggtgggtcttgcaagcctacatagctcaatgttcactattcatattaaatatgctggcttcagttgtggtgatatagggagctagcttgaaaactcagaatcagatagaagaagtaatagccataggattttaaaggcttgcaagattaaaatcctggttgatggaaagctgtattacttgaaaaatacctcgttcatcaatctatctctataaggaaaggctagtagcatgatactgagtgcagatcagccttttaatatttctgcaatctttcctgtaaacacttttatgataaaataggacattcttttgaattgtggcccccttttatgtaggcttttcacttcttgggccttccttgctacatagaagacaatgaaattgtaattttggagctggaatagttctgcaggaccctctcagaaatgaagacatttactgtgccacacgttcacgtactcagtattcatacaccaatgatggacgtcagaagtgcacaagatttctgtactgggccgttcctgagctgagaagatgggcatgtgcagaagcacaatgatgactttaaggatttggcttgataaaaaggaagcgaaaagacagcttcgtcagagatagagctctagtccctacgg

SEQ ID NO: 265376 - DNA, 1458 bp, Zea mays
aggcttttcacttcttgggccttccttgctacatagaagacaatgaaattgtaattttggagctggaatagttctgcaggaccctctcagaaatgaagacttttactgtgccacacgttcacgtactcagtattcatacaccaatgatggacgtcagaagtgcacaagatttctgtgcgtcatttgggcattggtgcatgaactttgaaacaacttgttggtctacatttgtgtgctttttgcaggtactgggccgttcctgagctgagaagatgggcatgtgcagaagcacaatgatgactttaaggatttggcttgataaaaaggaagcgaaaagacagcttcgtcagagatagagctctagtcctacgggagttgcactctgctgcacagcgcgagtcttgcattggcaacaagaaattctggaaagagagaacctaccaagagctgagacgtctattcatggaatcgtgacaaacatcgatggttgcagctttctctttccagaaagacctgatctgaagtctgtagtgcttaaagagcaaccattctctttgcagagggaaacatcgatgaacaaaccatttttcatgctgttgacattaaatttcagtgatggttgcagctgtttgagctcctcaattggatggcctgttgattttcagaagcgaaaagacagcttcgtcagagatagagctctagtcctacgggagttgtactctgctgcacagcgcgagtcttgcattgggcaacaagaaattctggaaagagagaacctaccaagagctgagacgtctattcatggaatcgtgacaaacatcgttaggtatgacactgaagatgaaaagttggctccacccaagaatgatttgatgaatcacagccgcagcaaccctgcaaaacggcacgtggaaggcactgattgccactcgtcattgccaaagaaactgaagtactttttgaaagacaagaagctgaactgctaaaagtgtaaaaccgtagaaggtagatagagaatgctgtaggtttgtttattttggttattagacgagttatacatagcatagatgcatgggaagttcgcatgctaaggttgaactcttctgctgcataggaaagttggctgacttcttatattatgcgagcctagcttaggtacctcctgtggggagaagcgattgcaatacatggtagcatgttgtagagctcctcaccccagttagtcagtgactgatgatggtatcctcttaccagtcctctggtggtatcatcttttgttcacggaggtcgatgaagtactgcctccgataaaaaaaagacgcttttgacattattgctcccccaaattcttattttggcggctttgctttgaaaaaaaaaaaaaaaaaaaaaaaaaaaaccaaaacaaaaaaaaaaaaaaaaaagggcggccgcccgcgatctagacggacgcgtggg

SEQ ID NO: 265377 - DNA, 411 bp, Zea mays
gctgatcttgttctatgtctaggaactagtttgcagattactcctgcatgtaatatgcctctgatgtcaatcaagaatggggggagggtggccattgtaaatcttcaggcaactccagaggataaaaaggcaagccttgtcatccatggacttgttgatggggtcatcgctgcagccatgcgcaagttgcgtccgcgcattcctccatacgtacgtactgactttgttcagctcactctcaggcactcactgaaaaagaaatgtgttagatggactcttcgagtaacaagtattcatggcctccgagcaccattgccatttcttcagtctgtcaaggtttcctttccagaaagacctgatctgaagtctgtagtgcttaaagagcaaccattctctttgcagagggaaaca

SEQ ID NO: 265378 - DNA, 316 bp, Zea mays
caccacataaccaccaccagctagcagcagcagtttcctagtgagcttaccgccgctgctagtgcctgacaactgtcgtgtgctgtgctagctccgagaagcttagcgcgagccaaagccaagaggaagcttcggccgggccgggtgatcgagatcgccggaatgggagccagcctgtcttgcttcggctcgggagctggcgggtactactacgccgacgagccggggtacgagcagccgcggcggtcgtccaggaaggtgcggccgagcgacgatgacgggctgtggtacgttggcgagcgcgacgtcgacatga

SEQ ID NO: 265379 - DNA, 920 bp, Zea mays
tgcgacctcacgacgcaccaaccgaggccacaggccaccaccattccttccttgttccttccccagctccgcaggctgctcatcgccctccctccgcgcccccgatccagatccagatccaggggcttgtcatggcatccaaacgtatcctcaaggaattaaaggacttgcaaaaggaccctccaacatcatgcagtgcaggtcctgctggtgaggatatgttccactggcaggcaaccatcatgggtcctcctgatagtccatatgctggaggtgttttcttggtgaacattcatttcccgccagactaccccttcaagcctccaaaggtatcttttaagacgaaggtcttccatccaaacatcaatagtaatggaagcatatgtcttgacattcttaaggagcagtggagccctgctttgacaatctctaaggttttgctttctatctgctccctgcttactgatcccaacccagacgaccctcttgtccctgagattgctcacatgtacaagacggatcggcctaagtacgaggcgacagcccgcagctggacccagaagtacgccatgggatgaaatgttcggcgttactggctaaatgcagacgattgtggtgttgcccatgaaactgttatcggggacgtatgttcttctgttccttgtgcattctccgatccatctctaggatccgagttctagtccaacattaacctaccattgccttgggtaatgagatgacttgtgcttgctgtggtaactatgctagtgttgatgttaatgattctcattgagggcttgttcagggattggagggtttaggggattttgacttattggcgagctctgctgccagtctatatctactcttattacgctctactataattacgctcgactgatagatgcctgatatttttt

SEQ ID NO: 265380 - DNA, 796 bp, Zea mays
  unsure (1)..(796): unsure at all n locations
accggtcctagttcccgggtccaaccaagccttcagagcgccccccattcaaattcaaattcaaggggcttgtcatggcatccaaacttatcctcaaggaattaaaggacttgcaaaaggaccctccaacatcatgcattgcaggtcctgctggtgaggatatgttccactggcaggcaaccatcatgggtcctcctgatagtccatatgctggaggtgttttcttggtgaacattcatttcccgccagactaccccttcaagcctccaaaggtatcttttaagacgaaggtcttccatccaaacatcaatagtaatggaagcatatgtctcgacattcttaaggagcagtggagccctgctttgacaatctctaaggttttgctttctatctgctccctgcttactgatcccaacccagacgatcctcttgtccctgagattgctcacatgtacaagacggatcggcctaagtacgaggcaacagcccgcagctggacccagaaatatgccatgggatgaaaatgaaatgaagtcgaaactccatattcggcattactgcttaaatgcagacgattgtggtgttgccccatgaaactttttgtggggacgtatgttcttccattccttgtcgcccgtatgcattctgatccatctaaggatcgagtgctagtccaacatcaacctaccattgccgtcgataatgagatgacttgtgctttctgttataactatgctagcgccgatgttatttggtaaaaacaaaaaaaaaaaaaaaaaaaaaaaaaaaaaanaaa

SEQ ID NO: 265381 - DNA, 626 bp, Zea mays
cttaaggagcagtggagccctgctttgacaatctctaagaatgtcaagacatatgcttccattactattgatgtttggatggaagaccttcgtcttaaaagatacctttggaggcttgaaggggtagtctggcgggaaatacatgttcaccaagaaaacatcaatagtaatggaagcatatgtcttgacattcttaaggagcagtggagccctgctttgacaatctctaaggttttgctttctatctgctccctgcttactgatcccaacccagacgatcctcttgtccctgagattgctcacatgtccaagacggatcggcctaagtacgaggcaacagcccgcagctggacccagaaatgccatgggatgaaaatgaaatgaagtcgaaactccatattcggcattactgcttaaatgcagacgattgtggtgttgccccatgaaactttttgtggggacgtatgttcttccattccttgtcgcccgtatgcattctgatccatctaaggatcgagtgctagtccaacatcaacctaccattgccgtcgataatgagatgacttgtgctttctgttaaaaaaaaaaaacccacgcgtccgcccacgcgtccgcccacgcgtccg

SEQ ID NO: 265382 - DNA, 422 bp, Zea mays
cccacgcgtccgggccaccaccattccttccccaactctgcaggctgctcgtcgccctccctccacgccggacgcgccccgatccagatccaggggcgtaacatggcatcaaaacgtatcctcaaggaattaaaggacctgcaaaaggaccctccaacgtcatgcagtgctggtcctgctggtgaggatatgttccactggcaggcaaccatcatgggtcctcctgatagtccatatgctggaggtgttttcttagtgaacattcatttccccccggactaccctttcaagcctccaaaggtatcttttaagacgaaggtcttccatccaaacatcaatagtaatggaagcatatgtctcgacattcttaaggagcagtggagccctgctttgacaatctgtaaggttatgctttctatctg

SEQ ID NO: 265383 - DNA, 419 bp, Zea mays
caccgttggcaacttcatcgacggcgacctctggctcgccggcacgtccatccccttcaccaccggcttgtgagcgcgcggccgtcgtgtgctacgtacgaggggtttcacggcaaagggaaggcaataaaccaaattggcggcggaagttcgtcgttcatacgttcgttcatttcaatcagagctaaaaaaagcaccgtatcgatccggtcgtgttactgtagttgattattttgtgcttggggacgcaggccaatatatttatttaatttaaccgtcccatatatatgtacacgtgcttgttatgattcggtgtattatttatatgtattgatacggtatcaatatataattaataatcccccgggtcctaataaaaaaaaaaaaaaaaaagggcgccgctcgcgcccacgcgtccg

SEQ ID NO: 265384 - DNA, 417 bp, Zea mays
gctacaccgttccctcagtggcaccgccgtggccttccagttttccaaggatctgaacatttgcgtgcggacggatcctgaagatggcctggagggcttcttcattgcattgtttgtcaggaaagcaggccctacttcagaagagcctagcgaagatgccacggtagaagtaagaaccaaacaagtgcgcgggaggcgaaatggggtcagggcgttcagctccttgaggctgtccaggatgatcctctggtgaccaaaggcgttctggatttaatttgatgtatcattgctatttttggtagtcaatgtggtaacaggtaggtttgaatctgttctgaattttggactcatttttttcttctactccagataatatgttgccatactccatgtccatttcagattataagacatttt

SEQ ID NO: 265385 - DNA, 1569 bp, Zea mays
cggacgcgtggcatatcgtggagtggaaaccctactcgtccccttccgcagccgtcgccgcccaattcccccacccaattcccactctccgctcgacagatccatacatgatgggagaggccaaggagaacgacgtttatgaggaggagctcctggactacgaggaggacgacgacaagacggtcgatggctccgctgctaagcccaccggagaggtcgcaaagaagggctacgtcgggatccacagttccggtttcagagacttcctgctcaagccagagctgctccgtgctatccaggattgtggttttgagcatccttccgaagtgcaacacgagtgtatccctcaagccattcttggaatggatgtcatctgtcaagctaaatctgggatggggaaaactgctgtttttgtcctttcatccctccaacaaattgaccctgttgcgggtcaggtagcagcacttgtactgtgccacacaagggaactggcttatcagatatgccacgaatttgagaggttcagcaaatatcttactgaagttaaagttgctgtcttctatggaggtgttcacatcaggaagcataaagatttgttgaagaatgaatgccctcatattgtggttggcacgcctggtaggatacttgctcttgccagggataaggatctctccttgaagaatgtgaggcacttcattcttgatgaatgtgacaaaatgctggaatcacttgacatgcggagagatgttcaggagatcttcaaaatgactcctcatgataagcaagtcatgatgttttcagcaacgctcagcaaggagatccgtcctgtatgcaagaaatttatgcaagatccgatggaaatatatgttgatgatgaggcaaagttgaccctccatggtcttgtacagcactatataaaacttagcgaggcagagaagaaccggaaactgaatgatctcttggacgctcttgatttcaaccaagttgtgatattcgtgaagagtgttagcagagctgccgaactgaataagttactttgtgaatgcaacttcccatcaatctgcattcattctggaatgactcaggaagaaaggctaacaagatataagaacttcaaggaaggccacaagagaattcttgtggctacagatttagttggcaggggcattgacattgagcgtgtcaacattgtgataaactatgacatgccagactcagctgatacttatttgcacagggttggaagggctggacgttttggcacgaagggacttgcaattacctttgtttcctctgcttcggattctgatgttcttaaccaggtgcaagaaaggtttgaggtagacataaaggaactgcctgagcaaattgacacctcgacctacatgccatcataaatgggaaggacaactgagaagagaggaggataggggagtgagcagccgtctgggagatggttacctttgaactatccgatctggaggatttgatttgcctcctttgtgtacttaaaatacagatcatcatcctggctgccctttttaacccacgcgtccgcccacgcgtcaa

SEQ ID NO: 265386 - DNA, 1039 bp, Zea mays
cagagcataacttaacttaagtgtggaggctgtatgtactgacagagggtgtatattgatatatatactgtgagactgactctggaatgctaatttgtttcatgtatcatttgttcctcttacagccgatggaaatatatgttgatgatcaggcaaagttgaccctacatggacttgtacagcactatataaaacttagcgaggcagagaagaaccggaaactgaatgatctcttggacgctcttgatttcaaccaagttgtgatattcgtgaagagtgttagcagagctgccgaactgaataagttactttgtgaatgcaacttcccatcaatctgcattcattctggaatgactcaggaagaaaggctaacaagatataagaactttaaggaaggccacaagagaattcttgtggctacagatttagttggcaggggcattgacattgagcgtgtcaacattgtgataaactatgacatgccagactcagctgatacttatttgcacagggttggaagggctggacgttttggcacgaagggacttgcaattacctttgtttcctctgcttcggattctgatgttcttaaccaggtgcaagaaaggtttgaggtagacataaaggaactgcctgagcaaattgacacctcgacctacatgccatcataaatgggaaggacaactgagaagagaggaggataggggagtgagcagccgtctggagatggttacctttgaactatccgatctggaggatttgatttgcctcctttgtgtactttaaaaagggcagccaggatgatgatctgtattttaagacaatgctgtctgtttgggtttaggattttgctttgtcgaaaactagcacacttattgtactactgagcagcatatttgttttcatccctgggttaaataaaaaaaaacaacagttgagacaaaaaaaaaaagggggggccggcaagaatagacgttcctaacccgggaaattaatcggggaggaaacatgagagggagaaaaattttccccgaaaggg

SEQ ID NO: 265387 - DNA, 461 bp, Zea mays
cgtcctcgtctcgtctcgtctcgcacgcacccctcactttccttgtcaatcgactcgcgatcgaatccgccccgagtcgattccgccgcggaccgcccggttcacttcccttttctcccgagatctcgactctcgagcaagtatgggtgaggcgaaggacaacgaggtgtacgaggaggacctagtcgactatgaggaggaggtggagaatgtcattgatggcgcccccaccaacggctcctcagatgtcgtcaagaaggggtacgtagggatccacagctcggggttcagagacttcctgctcaagccagagcttcttcgcgccattcaagattgcgggtttgagcatccttctgaagtgcaacatgagtgcatccctcaagctattcttggaatggatgtcatctgtcaagcagaatctggaatgggtaagactgcagtttttgtcctgtcaactcttc

SEQ ID NO: 265388 - DNA, 538 bp, Zea mays
  unsure (1)..(538): unsure at all n locations
cgccggtcgacacacgcgtgcagtggaaaccctactcgtccccttccgcagccggtactcaaccccaaccctatcctgtccgccgccgtcgcccggcgcctcctcccccacctagaaacccagaggctctaatcctagttctttctgtgcagtcgccgcccaattcccccacccaattcccactctccgctcgacagatccatacatgatgggagaggccaaggagaacgacgtttatgaggaggagctcctggactacgaggaggacgacgacaagacggtcgatggctccgctgctaagcccaccggagaggtcgcaaagaagggctacgtcgggatccacagttccggtttcagagacttcctgctcaagccagagctgctccgtgctatccaggattgtggttttgagcatccttccgaagtgcaacacgagtgtatccctcaagccattcttggaatggatgtcatctgtcaagctaaatctgggatggggaaaactgctgnttttgtccttcatccttcaacaaatgaccct

SEQ ID NO: 265389 - DNA, 1097 bp, Zea mays
atataaatatgttatattgttatgagaaaagttttttgtaatccattggtgatcctgtctatacataatgtttaattatagtataaagtataattgctatccttgacaaatatatgtattatgcagacatgcggagagatgttcaggagatcttcaaaatgactcctcatgataagcaagtcatgatgttttcagcaacactcagcaaggagatccgtcctgtatgcaagaaatttatgcaagatgtaatgccctgcagccttctccagctctcctttccaaagtcatcatattttattcccattgctcctgtggtggtcctcctgtagctgttagtcatctaccagctttggagttgtagttgtgtcttctgctctttctaggtgggaggattctattcctcagtgtctccatttgtagtacataagtcagtcctcttttctttttttcattatcccacccctgtacagtagaaactgaagagtaaggggtgtgtccaaatggtccttttttggcgatgtgttggtaactgggggcacataaagggttgccttctgtcctgaagatgcggtctctgagctcctggtcgacatctccagtttgctgcacactcaatgttcacttggtttcacttaattggacttcactggtgctggttctccaactatctcgtgcgggtggagaaagaattcttctgctggagttgtatttggaagcaccgttgcaaaacttaagcatatctggaaagaatctagtgttgaacaatgcataactgaacttctgtatggaggctgcatgtaatccgatggaaatatatgttgatgatgaggcaaagttgaccctccatggtcttgtacaggtaatccaataatactctgcatttgagtcgtgcacattttttttatttgttttctctaaataattggaatcgtatatttttgcagcactatataaaacttagcgaggtagagaagaactggaaactgaatgatctcttggacgctcttgatttcaaccaagttgtgatattcgtgaagagtgttagcagagctgccgaactgaataagttactttgtgaatgcaacttcccatcaata

SEQ ID NO: 265390 - DNA, 362 bp, Zea mays
atccgccccgaggttccaaaccctagctttctctcatcctccacgaaccctagatccaaaatctaacacacgtcatcctcttattatcgccgtgcttgacgcttctctctgcagtcgattccgccgcggaccgaccggttcacttcccttttctcccgagatctcgactctcgagcaagtatgggtgaggcgaaggacaacgaggtgtacgaggaggacctagtcgactatgaggaggaggtggagaatgtcattgatggcgcccccaccaacggctcctcagatgtcgtcaagaaggggtacgtagggatccacagctcggggttcagagacttcctgctcaagccagagcttcttcgcgc

SEQ ID NO: 265391 - DNA, 539 bp, Zea mays
  unsure (1)..(539): unsure at all n locations
tgcggtccggccggattccgggtgccacgcgtcgagtttctgcgtttcttcgtcttcctcgcagcgccggcgcgccatctcggtacgaaggcgacggcggcggcgacggcggcgttcaggatcgggatctcagcgacgacgtcagaggcttcccatcccgacccccgccagtcgcctcgcgccctcgactccggactccggtcctccgcacaccggccggtgaccctgcgtttgaacctgctatagaaatttataaaatggccgcggttgatgcgacaaccaaggagatggatgcactgcatgttggacaaaatgatgaaacaaaagagactctgattaaagaagacaaagctgcaaacagcaatcattctgttgttgcagctcagtccttgccaccagaggacgacgatgatgatgaagcacaagctgatggtccatctcaagatggagcagcagcagctgttaagaagaaaaagaagaaaaacaaatccaaaaagaagaagggcccccttcaacagacagatcctncatcaatacct

SEQ ID NO: 265392 - DNA, 1181 bp, Zea mays
ttatagcaaggaacgtttcctcctcgcccagagcgcctgcgccctcggctggggcattgaatggcttcaggctttctttcttgtgcttgatgatatcatggatgactctcacactcgtcgcggccagccttgctggttcagggtgcctcaggttggcttaattgctgcgaatgacgggatcatccttcgcaaccatatctcacggatccttcggcgccactttaagggcaaaccttactatgctgatctccttgatttgttcaatgaggttgagttcaagacagcttcaggtcagctgctggaccttatcactacccatgagggagaaaaagatctaacaaagtataacataacagttcacggtcgaattgttcaatacaagacagcctattattcattttatctgccggttgcatgtgccctgctgctctctggcgagaatttggacaattatggtgatgtagagaacatccttgttgaaatgggaacatactttcaagtccaggatgactatctggattgttatggtgatcctgaatttatcggcaagattggaacggacattgaagattacaagtgctcatggctagttgtgcaagcccttgagcgtgctgatgagagccaaaagcgcattctatttgaaaattatggcaagaaagatccagcctgtgtggcaaaagtgaagaacctctacaaagaacttgacctagaggcggtatttcaggagtacgagaatgagagctacaagaagctgattgcagacattgaagcccagccaagcattgcggttcagaaagtgctgaaatccttcttgcacaagatctacaagaggcagaagtagggtgctcttggataaacgagctcaggagtcgttactccttcgcatgcttgacataaccggacttcctcacctggttgctctagtatgatgtggagcgtctagttaaaaaaaatcgatgtagtatgaagcaccttgctgctctgaatattaacaggcaattaaggcaaggtgctgtttcggtttggtggaccgcatgttgcagataataaattagttgttttgtcatttgcgtctctatcgactttgctagtttgcttcttttggccaccgcccaactagtcgctttcaagagataaattaaatagaaacaaaaatgtaattatgctacaaattcacctct

SEQ ID NO: 265393 - DNA, 746 bp, Zea mays
cccacgcgtccggcgtcccacgttgccttggttcccccaccctgctgtctccctccctccttccttccttccccgccactgcgcagcgcgagtgcggcgacagccagtcacacactcccactccctcgaccgctctcggccctcggccccgtccgcgtcgccgcagggcgaggaggcaatggcggcgggcgggaatggcgccggcggggacaccagggcggccttcgcgcggatctacaagacgctcaaggaggagctgctcaccgacccggccttcgagttcaccgaggagtcacgccagtggatcgaccgcatggttgactacaatgtactcggaggcaagtgtaaccgtgggctctctgtggtcgacagctacaagctgctcaagggcgctgatgctctgggcgaggaggaaacgttccttgcttgcaccctcggctggtgcattgaatggcttcaggctttctttcttgtgcttgatgatatcatggatgactctcacactcgtcgcggccagccttgctggttcagggtgcctcaggttggcttaattgctgcgaatgacgggatcatccttcgcaaccatatctcacggatccttcggcgccactttaagggcaaaccttactatgctgatctccttgatttgttcaatgaggttgagttcaagacagcttcaggtcagcttctggaccttatcactacccatgagggagaaaaagatctaacaaagtataacataacag

SEQ ID NO: 265394 - DNA, 397 bp, Zea mays
ctccctccctccttccttccttccccgccactgcgcagcgcgagtgcggcgacagccagtcacacactcccactccctcgaccgctctcggccctcggccccgtccgcgtcgccgcagggcgaggaggcaatggcggcgggcgggaatggcgccggcggggacaccagggcggccttcgcgcggatctacaagacgctcaaggaggagctgctcaccgacccggccttcgagttcaccgaggagtcacgccagtggatcgaccgcgtaacgatccctctctatctctctctctcgctgtcgctgccggccttccttcctttttctgttcctgtttcctggcttgatccttgtggcgtgcgccgtgcggtgcgggggctccctgtgccgttcgtcacc

SEQ ID NO: 265395 - DNA, 2930 bp, Zea mays
attatttagttacactctctctggaaatacagttggttttagtaatctggtcaaacgacagaaagacgagacgaggcaagtatgggtagctgaggcaacagagagctcaagctacactctttccaacgagattcctagaaaatctcaccaaatcaacccttagagcggtcggattgggctctcttgatcatatgtaattgttgtttcagtttcgatgtggtgtgggtgatgatcttgctcagcaagatcctcatcttgtaggattttcttctctctctaatataaaatatgggacggttttgagaaaaaaaaacttcaagagctaaaagaaaggcttctatgtatagttggctaccctgccgtctgaattaccataaatggcgctgcccgccgttttttttggaacactatggcagagattatagagaagatgagtacataggaagtcttaccacccatgaatatgctgaaggagcaggtcgcaggacctatgctcaggaaagagattcatatggggatggtgaagcttattcatcccgtggtcgtggcagcaatgctgatgatcctactcaggatgataggcctatagagcgaaagctttctaaccagcaaatttcttcaccaccaccgaactacgaagatgtcacaagagatggccaggacaatcttcacgatgacagaaatggaggaagtgttcctgctgctgtatcaagggtgccctctccttcagttcctgcaacaactgttcctgcagtacaggtgaatggggttcatgacagcactgttgaagatgtacctgcaccaccaactgctcatgccgagcctaatggatttgatgagtttgatccacgtggatctgtaccagattcttcccctcctgtaaaccctgcatcagtagcgaatagcttggagatggatttgtttggatcagatcctattagttcgttggctttggtgtctgtgcctcaaccaacgactacatcaaatgttgaagcaccggcaaattcaggttttgaaacaaatagttttgtgggcatgcctcctgcttcaactggatttggcgagattgatgcttcaaatccttttggggatcctacacctttcaaggcagttcttgatgaaagtccagcactacctcagacacatgctgcaccagctggttctttccaacccactggacctggtacggatgtgaaccctttccagcctgcttcagccgcaagctttggttttggagacactcttggtgatctcacttttgcaccaaatgctgcacctgagctgcaagatatgtttgcaaacacagcctccttgccttcagaggtagcaccagcaaacccatctgtggttctccaacagccagttcctactaatttctcctctcaggtatctccacctcaggctgcccctgcattttcttattcacaagggcctcatcctggtgctgccatccagtctcaatttcgccagactgtcgccccatcatttcctccttcgcaggtgcctcaatctgtaacacccaatctgccaccaggccaatcgaacttttttttgcaatcagcatcagggtctggtattgacagcctgtctggggttcctacccagaatggagcaccatcctacattcccccacagaattctcagttcactgctccggcaaatcaacaaccattgcagccaagcttcatcccacaaactagcacaccagcactccagccggccttgatctctaggggggcatcccagccccttggtgtgccaaattcagtgcctactagtggcagcttcccgttgcagtcaagttcatcagctcccccagaaacaatcgtttctgctttgcaagtcaatcaaactgagccagtgaagaagtttgagcccagatctaaactgtggtctgatactttgagccgaggtctagtcaatctggacatttctggaccaaaagcgaatcctcatgctgatattggagttgactttgattcaatcaatcgcaaggagaaaaggcaggaaaagaaaatcaaccaagcacctgtggtgtctacagtcaccatgggcaaggccatgggagctggttccggcattggtcgggctggtgtaggtgcaatggcacctcctcctaaccaaatgggtgccgggaggggcatgggtatgggtcctggtgccggtgccggttatggtggtggaatgggaatgaaccggccaatgggcatggggatgggaatgaatcaacaacagatgaggatggggatgaaccaacaaccgatgggaatggggatggggatgaaccaacaaccgatgggaggaatgaacatggggatggggatgaaccaggggatgccgatgcgtcctccaatggggatgggtcctggtggaatgcccggtgctggctacaatcagatgggcgcggcgtacggtggccagcagccatacggtggatacaggtgaggaggggctatgcagtcccccacaccacagatttatgggggcgaggtgttgaagaaacggttttggaggcatctgtattttgctcacctggttttgctttgggtatgatttcttgtttcttttgggggtggaggtgagaagggtataattttcgtcactattcttttacagtctatgttggatactgtacctactttactaaatagcaaaaagcaaacatatgaacaagggcggtgctacaactactgcgttgtgttggatgtaaagccttgatatattatctctttcccatgtagttgtggctataggcggcttcttttcagtgaacatattgtctgtttcagcgttcttgctggatggatagtaaatggctgtaccatttggttgaattatcatggtttttgctttgatgttcaaaaaaaaaaaaaaaaaaaaaaaaaaaaaaaaaaaaaaaaaaaaaaaaaaaagggcggcggacgcgtggg

SEQ ID NO: 265396 - DNA, 438 bp, Zea mays
caacattatggctaccttcggtatgggtcacctcaccccgagtcagaatgaacttatccgttgcagatttgtggcgaaaagtgagcaacaatgtgcataaagagaaagaaaaggaataaacaatgctattatcttggaggcctggtgcatttggcggcaaagaaatcgtacggtttttgaaggagatttgccggctgttagcaaggtgcagcaaagttttctagaagagctaacatgtttggtcttgactggggctcatctccttagcattttagggataattgattcccttagagcggtcgggttgggctctcttgttcatatgtaatttttgtttcagtttcgatgtggtgtgggtgatgatcttgctcagcaggatcctcatcttgtagggctttcttttctctctcttatcataaataccggacgcgttcgaag

SEQ ID NO: 265397 - DNA, 467 bp, Zea mays
cacctttcaaggcagttcttgatgaaagtccagcactacctcagacacatgctgcaccagctggttctttccaacccactggacctggtacggatgtgaaccctttccagcctgcttcagccgcaagctttggttttggagacactcttggtgatctcacttttgcaccaaatgctgcacctgagctgcaagatatgtttgcaaacacagcctccttgccttcagaggtagcaccagcaaacccatctgtggttctccaacagccagttcctactaatttctcctctcaggtatctcagccagttgctggcacattgcatgctgctcctacagcatttgctccttctcaggctcctcccacatcatttgctcattctcaggcacctcaggctgcccctgcattttcttattcacaagggcctcatcctggtgctgccatccagtctcaatttccccagactgtcgcc

SEQ ID NO: 265398 - DNA, 1055 bp, Zea mays
gagcgggcggcgggcgcggaggccgtgtacgctcacggggaggtatcgcgggacgaggtccgcgccgaggagagggtgcaaaatgctgtggagaacgagggtatcaacgtgaagtacttctggggtagcacgctataccacgtggaagaccttcccttccgcctcgaggacatgccgtccaactatggcggcttcagggaggccgtgaaggggttggaggtcagaaaggtgctggaggctcccgaggaggtcaagtgcgtgcccatgaagaatgtgctcgagcccggtgacatccccacgcttgctgagctcgggctcactgcgccaccagccatgtcacaggactcaaaacctgctgttggctctactctcattggtggtgagacagaagctctggagaggttgaagaagtttgctgcagaatgctctatgcagccaaacaaagtagacaaaagcaatacccaagatagcatatatggtgctaatttctcttgcaaaatttctccatggcttgctacaggttgcctctctccacggttcatgtatgaggagttgaagaagcatgctactaaagcaattccttttgggtcaacacccaagaataatgatggcacatctgatgctggaacaaattggttaatgtttgagttgctgtggagagatttcttcaggttcatcacaaagaagtacagctctgtacagaagacatctgaagttgccactggctgcactcccgccccagcgcttgcatgaacttacttagacaagctgattgccagctgcttttttggggtgataaacttatgtgcattttcaatggagtcttttttttgccgccaataatgttggtagtcaaagtgaacgccgaatgcgcattcctgcgttttggtttggtcgatgtatttaatgctgtcgacatccctccaaatgactgttgaatgcaaatgatactgtgagcaacctatcatctgctgtgtaaatgtgttctgtcgacgttcctccaaatgacacttcgatgcattgatattgtgagcaacctgtaagctgttttgtaa

SEQ ID NO: 265399 - DNA, 1125 bp, Zea mays
tcgagaggggaaagactacatatcaattttgatgttacgttcccggcccttccttgttctctagttgctgttgatacgatggatgttagtggagagcaacattatgatataaggcatgacataataaagaaaagaattgatcatcttggtaatgtaattgaatcaagaaaagacggagttggtgcccctaagattgaaagaccattacagaagcatggcggtaggcttgaccacaacgaggtttactgcggatcttgttatggtgctgaggagtcggatgatcagtgttgcaactcctgtgaagaagttcgtgatgcgtatcgaaagaaagggtgggctgtcaacaacgtagaattaattgatcagtgcaagagggagggctatgtacaaaggttaaaagatgaacaaggggaaggttgtaccatccatggatttgtaaatgtgaataaagtagctggcaactttcactttgcccccgggaaaagcttggaccagtcattcaacttcctgcaagacctgttgaacctccaaccagaaacttacaatataagccacaagataaataagctgtcctttggggaagagttcccaggtgtagtcaatcctcttgatggagttgagtggatacaggataactccaatggattaacggggatgtaccagtattttgtaaaggttgttccaacaatctacacagatatcagggggcgcaagattcactcaaatcagttttctgtgacagagcacttcagagaggcaattggctatcctaggcctccacctggtgtatatttcttctacgaattttcaccaatcaaggttgattttactgaggaaaatacgtcgctccttcacttcctggcgaacatatgtgctaattgttggaggtatcttcacggttgctggcatcatagattctttcgtgtaccatggtcaccgcgccatcaagaaaaaaatggagctcgggaagcttgggtaaccgcagttttcggcatatagcagttaggaccatagcggaaacgagctgaacttgtgttgcactggcccccagaagcggagggattttgattcgctgtgatgcgtctgtagtcattcagatttgacaaacccccccacgtttgtgtt

SEQ ID NO: 265400 - DNA, 773 bp, Zea mays
ctccatcctggacacgtgcttccagggccaggcggcgcggctgcgcgtgcccgaggtcaccatgggcttcgccggcggcgcggcgctcaagctggccgccaggaacctgctggtggacgtggactgcgccaccacgtgcctggccttcgcgcccgcccggagcgccgccatcatcgggaacacgcagcagcagacgttcagcgtcgtctacgacgtcaagaacagcaagatcgggttcgccgccggcggctgcagctgagaagcgacacctacatacacgcgcatgcacagaccgactcggtaactaaaactaaaacgagcagcgcatgcatgcatctaccgtccggtttcgtctgaaaccatcattaatttcgatcgtccactccacgcacagcaagttctttacggaccttgccgcatatgatatgtacatggtgacaagataaggtacaggagaattgatgaaagaagcgttgccggccagtcgtcgttgcacaagaacaaacacataaattaaaacattattacaggagtagggtatttattgtattgttcaggccagaaaaatatgtggaaagtgggtctttaacttaattcggaagaagcatatagcactcccaaaaaaaaaaaagattcatattcatcccatagcccacagatagcatgtagtagctgttcatgcatgttattcttttggcaagtcctggtcaggaagtaccatttactgtgtgtaggacgaataaactgaagtgatgtgtatgtttctgctttcc

SEQ ID NO: 265401 - DNA, 605 bp, Zea mays
cgttggcggcggtgctggactactcctacccgccgctggcggagaccagcgaggcgacgttcgacgccgccttcagcgtcaacacacggggcaccttcctgtgctgccgcgaggcggccaggcggctggtgcgtgacggccgcggccgaatcgtgacgttctcttcgtcgggagttgggtctctgcgccctggctactcggcatacgcagcaagcaaggccgcggtggaggtgatgactaagatcctggcgcgcgagctgcgcggcacggggatcacggccaacgtggtggcgccagggtccacggggacacccatgatgtacaccggcaagacggaggatgacatggagcgatacatcgccgaggcgccgctgggccggctcggcatgcccgaggacatcgcgccgctcgtcagcttcctcgctagtgatgctggccactgggtcaacgcgcaggtcctgcgctgcaacggtggcaccatctagctagtactgcgtgcctactttttatggttgattagatgtattttcctcggagcataaatttaagcttgtggcgcagttatcgcttggcagttcattaatttatttaaagattgtgtcgtt

SEQ ID NO: 265402 - DNA, 1461 bp, Zea mays
ttggacgaggctgacgactggggcgccactaagaagttcaccccggctcccgccgactccggccgccgcgataggttcggcgggccttcccctctcggccgcgctgatgatattgacgactggtcacgcgacaagaagccgctcccgtcgcgctaccccagccttggttctgcaggtggcttccgtgactcgccgggcttccgcgactcatcagcttcttctgacgctgaccgttgggtccgtggagccacccctatgccacacaacggccagggggcgggggagaggccacgcatcgtccttaatccacctaaacgtgacccgtcaactgcctctaccccacctgctgaggtggctcgcaaccggccaagcccttttggggctgcaaggccccgggaggatgtgctggctgagaagggggtggattggaagaagtttgagaatgagattgaccagaagaccagccgccctaccagttcgcactccagcaggccgaatagtgctcattcctcccgccctggcagccctgggtcacaggtttcggccgttgggagcgaaggagcaccaagggcacggccaaaggttaacccatttggtgaggccaagccaagagaagtggtgctgcaggagaaagggaaggattggaggaagattgatgttgagcttgagcatcgtgctataaataggccggagtctgatgaagaaagaaatttgaaagaagaaatcaacctcctgaaggtggatcttaaagaaatcgagggaaagatgagtaatggttctgagcagacatcggtagatgcaaaagatttgtctgagaagatatctatgttggaaagccagcttgagcagctttcaagggagttggatgacaagattcgatttgggcaaaggccacgttctggtgcaggcagggttacaacacttgcacccactagtttaggggaggaaccacaggctacagtggtggacagaccacgttctcgtggtggtatggaaccacccccaaggcaggaagaaagatggggatttcaaggaagccgagaaaggggctcgtttggtggaagcagaaattcagacaggccaatggcaagacagagatggtgaagttgggacaacaagccgctcttagggacacttctggatcgcagtccctttttttgttctgaaaggatgggcaaaaataagtcgttttctgtctgtcgtgtctggtcggtcttagaagattgttgagggtggagataactccacatgaagctattggttgtcaagtctgtatgccgtgggatgcttgacatgtccctttttgccgtcttccatgtcaaaacaatatctggcaacctccgatactaactgttattcatgggtcactgaattccggatcagcttttgtcataggtcgtttatttcaaaaaaaagcagaacaaaataaaaaagggcggctgctcgcgatctagaactagt

SEQ ID NO: 265403 - DNA, 658 bp, Zea mays
  unsure (1)..(658): unsure at all n locations
aatttatgcactaatatctccacagatgggcaaacaagtggttgcatttgttgctgctatgaaaatcatggctgagcagtttccaggggccttttcaggttatcatttagaggtccttcaatcaattgtctggcctgagactttaaatgctaaattttgatatgtggtcataccatctgccaatacctgcaattctgagtgtcaggattccttttcccaggttttagaatcccatcaagctggcaagctggatacatctggtacagctaaagacgtgattgcttgttttgagaaactaggtgtgtcatatgatatgaaccggatggttaagattagagatccagaacagcagcttgagatggtgggtgtccctgaagaacacatccaagggcatgcattccatctgtatcatctcacttctcctgatgacagtgtttcatttgagttccagcacaatgtttgtggccgttcaatctatgccgaaggaactattgacgcggcaatgtttctgcataggaaggtgcaatcaaaggattctaagagaatatataatatggatgatgtcctgcgagaagaaacttgccataaagcctactgattagctgctgataaataatactcccttcggtcttttntatttttcgctgtttagttcaaa

SEQ ID NO: 265404 - DNA, 1394 bp, Zea mays
taggacataatggagacatcatggaagccctcggcgtccagagcagagcgaagtgctccaatccggccatccatcatgtcactagggctgacaacatcagcaccggcacgagcctgtgaaacagcctgtttgcacaactgataaactgtttcatcattcataattacaccatcttccctcacaataccatcatgaccatcagatgaataagggtctaacgcgacgtctgtgtagataacaatatcagggaacttgtcccggacgcgtgggcggacgcgtgggcggacgcgtgggcggacgcgtgggtgaaggagaagaagatgctcctatcggagctatgccagggtgctataggcttgggtggaggcacgggctgcttgacgaggtttacaaggcccgcgatgttggtgttaatagtttcgttctctttcctaaagttcccgatgcattgaagtctccaacaggagatgaagcgtacaacgataatggtctggttccacgtacaatccgcttgctcaaggacaagttccctgatattgttatctacacagacgtcgcgttagacccttattcatctgatggtcatgatggtattgtgagggaagatggtgtaattatgaatgatgaaacagtttatcagttgtgcaaacaggctgtttcacaggctcgtgccggtgctgatgttgtcagccctagtgacatgatggatggccggattggagcacttcgctctgctctggacgccgagggcttccatgatgtctccattatgtcctacaccgcaaagtatgccagttcattttatggccctttccgagaagctttagattcaaatccaagatttggagataagaagacgtaccagatgaacccagctaactacagagaagccctcatagaaaccgcagcggacgaggcagaaggagccgacattctgctagtgaaaccgggattgccgtacttggacattatccgactgcttcgggatcattcagccctaccgattgctgcttaccaggtctcgggcgagtactcgatgatcaaagccggcggggccctgggcatggtggacgagcagaaggtgatgatggagtcgctcatgtgcctgcggcgagccggcgccgacgtcatcctgacctacttcgcccgtcacgccgccgcggtgctgtgcggcatggggcccaagtaggaggcgaggcccgcccgccattcctgccctgcactgtcattgtggagttgagcgatgagttggcttatcgtatgttttgggggcctggcactggcagaggattgtccgaggccttggatctcttccaataatctgcgccgggagataataagttttggagttctcgcatttcccggtactaatcttctgcgtgttgctagtactg

SEQ ID NO: 265405 - DNA, 704 bp, Zea mays
aaaaaggaaaacttctaggtagcggcacatttggttgtgtgtatgaagctacgaatagggacactggagctctctgtgcaatgaaagaagttaacataattcctgatgatgctaaatctgctgagtccttgaagcaattagagcaggaagtaaagttcctaagccaatttaagcatgaaaacatagtgcagtattatggcagtgatattattgaagatcgtttttacatttacctggaatacgttcacccaggttcaattaataagtatgtcaaacaacattatggagcaatgacagaatcagttattcgcaacttcacccgccacattcttaggggtctagcatttttgcatggccaaaagattatgcatagggatatcaaaggagcaaatctgctagttgatgttcagggtgtagtcaaattggctgactttggaatggcaaagcatttaagtactgcagcccctaatctttcactgaagggaacgccatactggatggccccagagatggttcaagctacactaatgaaagatgtaggctatgatctcgctgttgacatatggagtcttggctgcaccatcatagagatgttcgatggaaagcctccttggagtgatcttgaagggccagctgcgatgtttaaggtgttacataaagacccaccaattcctgaaaatttgtccaatgaaggcaaagaattt

SEQ ID NO: 265406 - DNA, 430 bp, Zea mays
gggaaagacgatggcggcggcggcttgtcccgagaggatctggaacgcctggtcgggagggacgaagatgccaagttcaatgggttggatcttgcaaacctcatcaggaagaagtacggtagatcgtacgatgtgacgctgataaagaaagagttcatggggaggaatctgctggccatgaatgtgatgtggaagtacagggagcaaagatcgttcccgctgagcgaggaggagtacctgctgcggctggacgatgtcgccaacacgctcaagtgctggggagccgtggcgcacgtgcgcaacacgctggagaagctcaaggagaggccgcgcatcggcaaggccgtcagcatcttcatcgacatggaccagaccggaggccgctccaacgaatggatttacaagtagcttcccactccatcgatcatgt

SEQ ID NO: 265407 - DNA, 1027 bp, Zea mays
atacgacgagtctgacaaagagcaactgagtgaaatcacgtcgccggagcccaagttgctcggtggcgcacccatgcccataagggccgctgcggcggtgccacccctgccgcctccattcttcaggagagaagacagctcttccggcagtggtctgtcgctggtaccacccgcagctaagccgccgattcctcccatgtctgccagcgacaacgcgagcggcagattctgtgccactatgccaccgtctggctctggggtcaacttgcactctcaggctcagcagcaagccaggaaggcgaggcggtgctggtcgccggagcttcaccggctgtttgttgccgccttgcatcaactcggcggccctcaagttgctactccgaagcagatcagggaggtgatgaaggtggacgggcttacaaacgatgaagtgaaaagccatctccagaagtaccggctgcacaacagaagatcccccggcgtcgtggctccggtgagccagtcggtcatgctggcgggcggcctctgggctcctcctcatcaggagcaaagcagctcgcagtccgggtctcggcagggcccgctccagttctccagggcaggtatggccgtcggtggcggcgacgacagcagcagcagcgacgacgacgaagacgacgacaagtcggaggatggctacagcctgaaatgcgtgtgaggctgaggcaggctgcgtttgcggaagatcggatgagagtgtagagagatagcgttgtcgcggcttgagcatgcatcggtggattcttgagtctgtccgagagagtggttgtagtgcaggcaggcatgtatacagggagattaggcgcgcgcggcccgtgtgcgcccaagagatgaactgatcatgcggcgtttggaaagctgataggccttttgtttggttttgtttgagtctttgctgacttctgttaacttccgggcagatcacaaaattttcgccctgagaataacttattaataataatattactgcggcggctgctgttatttt

SEQ ID NO: 265408 - DNA, 511 bp, Zea mays
actctggcctgtcgttggtatcgttgtcgccggcaaccaaggcggcggtgccgatttctcctccgggggtggcggccagcggtactaccacccgcgccagatctcgtggcaccaccatgccaccatctggctccgaggtcaccaacatgcactcgcaggctcagcagcaccagccagcaagcccgaaggcaaggcggcgctggccaccggagcttcaccggcggctcgttgccgctttgcacgaactcggtggccctcaagtggctactccgaaacagatcagggaggtgatgcaagtggacgggcttacaaacgatgaagtgaaaagccatctccagaagtaccggttgcacaacagaagatcctcccccggcgcggcggcggctccggtgagccagtcgatcatgctggtggatggcgtctgggctgctcaggacaaaagcagcggctcgcagtccgggtctcggcagggcccgctccagttctccagggcaggtatggccgtcggtgg

SEQ ID NO: 265409 - DNA, 818 bp, Zea mays
tctgttccctcaactgctgaacggagagttcgacctagcacgcccggccgccgccgcagcccgcaatggcgtcccttttcaaggaccccagcaagctctcggcgtacagggaccgccggttcaaggggacgcaggaggagtatgaggcggcgctgcttgcgtcgacaacgctgtacatcggtaatatgtccttctacaccacggaggagcaggcctacgagctcttctcccgcgccggcgagatcaagaagatcatcatggggctcgacaagaactccaagaccccatgcggtttctgctttgtactgtactactctagggaggatgctgaagatgctgtcaaatacattagtggaacgatgcttgacgatcgtccaatccgtgttgatttcgattggggctttgaagaaggcagacagtggggccgtggacgaagtggtggacaagtcagagatgagtaccgtacagattatgatcctggaagaggtggttacggtaagatggttctgagggaactagaagcacagcgagaattagttgactatggtggatcttttcaaccgaatgcaccacctccctatgagagaagtgagcggaagagaggacatggagattctcataggaatgacagaggagattaccagcggaaacgctaccggaacgatgaccggtcagcaccagaggagtccaagagagcaccggactctgatccagcggagaagaatcctagattccgtgagaaaggtgactctgacgaagaagaggatgactacgacggcaaacgtcgtcgctaaagctgtggaacagccgttgctact

SEQ ID NO: 265410 - DNA, 830 bp, Zea mays
cccacgcgtccgagggcatgtggcgttagagggatctgaaccctagcggtcgtccgtgggtccagatctgtgacccgaccttctcgacgcttcggtgacatgagtgcctggaaatctagggaggcgaaaaggtcagagttcagtcatgtcatgcttgatttgagttctgtgccagatcaaagcaagtagtagtacgtgagaagttaaccatgaacagacaccctttttctctttgtgtatcacagattttgaaacttgctgagagggaaaaacaaatttatggggaaaaaatgtgacactgaaagccatttgcttccagcagcttaagaattgttgcggtagatgcaactgaagagggtcttcaagtaagtaaatcaactactacaatggctcactaaaaatggtcgacaggacagtttcggaaccttattgttgttcttcagagagaacatcgacaaaggaacttgaagctccgtaggcgaaaggatctctagaaacgactaactaaattctcctaggtactactctagggaggatgctgaagatgctgtcaaatacattagtggaacaatgcttgacgatcgtccaatccgtgttgatttcgatcggggctttgaagaaggcagccagtggggccgtggacgaagtggtgtacaagctttacaaaccatgatatgtccgtgcgttgtagtagtaagaaagaactaatgttcacagttaaaaagtgtggaatgagaaccgccattaaaataggagaatccatccaatgtgggtttcatacatatgttctatgtttcacatctaccaccgaaggccaagtacattttgat

SEQ ID NO: 265411 - DNA, 1420 bp, Zea mays
gcaaatatgatcatggtattttgcagcaaaaggcagatgagagtaagttaaaatctcaaattgcttccctagagtctagggtgagtatcagtgagggtaggttgtcggcaacacgtgaacaggctgattctgctcaagaggaagcatccgaatggaaacgcaaatatgacgttgctgttagtgaggccaaaacagctctgcagagagcggcggtagcacaggaacgcacaaataagaaagtgcaagagagggaagatgctttgagggtagagcttgctaaccgactatctgagaaggaagagaaaattgcaagattacatgcaaaacttagtcaaatggaaattcatgctacaagtttgatctcgaggcttgaggccactgaagcgaagtcgaagagccatgagtctgattcgttggctttgagggaggagatcagattactgactgataacctggagtctattagaagtgaagctctgtcacgtgagaaggaagttgggatcctggaacaggaaaagaaccatcttgaggagaagtatttgtcacagtgcaaaaagtttgatgagacagatattagatgcaaggaagctgaaagggaagcaaaacgagcaacagaattagctgatgtagctcgtgtagaagcttctgctgctcaaaagggtaagggggaagctcaacggctcgcaatggagaggtttgcactgatagaaagaatggagcgacaggttgaagctctagaaagggacaaggctcagttggtagaagagattgagagacttcatcagtcagagaaggatgctgtgtccaaggtcgcattgcttgaaagaaatgtcggtgagcgggaaaaagaaattgatgagatgttgaagcagaataaccagcaaaggtccagcacagttcaagtgcttgagagtctgctggcaacagaacgtgaagcacgtgctgaagccaataagagggcagaggaactgtcgttgatgttgcaggcaactcaaggcaaactggacatgctccaacaagaaaccacacttgatagcaagctcaagacctctgcaaggcgcttaaggggtgatgctacagagtctgtacatgatatggatatcgacggggacaatgggaggcgccggaaacggtcaaaaagcacaacaagcccgttcaagagcaatcacacagaggatggcggttctgtatttattggcgaagatacttgcaacgggagtcagcaagggacagaaacagaagactacaccaaatttacagtgctgaaactgaagcaggagctcaccaagcgcgggtttggtgctcaactactccagttgaaaaatcccaacaagaaggatatcgttgccctgtatgaaaagcatgtcgtcggcaagtagttcctcggcaatacttgtatgctttctagacttccatgtag

SEQ ID NO: 265412 - DNA, 2471 bp, Zea mays
  unsure (1)..(2471): unsure at all n locations
cggaactgggacagcaaaggaagatacggcgcgatattttagattacaggagagtaggagaccggcgccgaaagctccgtggcctcgtctccttccccacttcggcctcggcagttccgcgtgccggccggagcctcgtctcgcttcgcatctcgcacttcgcgccttcgccgctgcgattcctcagcagctcctcgaccgctccacccacccctgcgccggcgagatggagctcaagcccggcatgtcggcgctcgtcaccggcggcgcctccggcatcgggaaagcactttgtattgcttttgcaaggaggggtttatttgtgactgtcgttgatttctcagaggaaaatggaagagaagttgctacattagttcaaaaagaaaatagcaaatttcacggagatcttagaattccatcttcaatatttgttaagtgtgatgttagtaatgcagataatcttgctgcttgttttgagaagcatgtacagacatacaatggactagatatctgcatcaactgtgctggaattgctaataaaacactagtttatgatgatacatctgatggaactagaacatggaggcatgctgttaatgtgaaccttgttgctgtcattgatggtactcgcattgcaagtcaaataatgcgaaaccaaaagaagcccggtgtcataataaacattggttcagcggcaggtctttatcctatgttcctcgatcccgtatatagtgcggcaaaagggggtgtggttatgtttacaagatcactttctccattgaaacgccatggtgttcgtgtcaatgtgctctgcccagagtttgtccaaaccaatatggcggaacaaatgagccgcaaagctatagattcatctggtggatatttggagatggaagatgtcggtaacggcacatttgagcttatacaggatgagagctaggctggtgcttgcctttggatcacaaaacgacgagggatggagtactggccatcaccagatgaacaaagaaagtgtatggtgaatcctaacaaatcaaaaaggatgctgacaaacaatatatatcctagcatccgaatgcctgaattctttgagaagatagttgttcacacactcagccataattttcgcaatgctacaagacttgagcgtgtgcaactgagatttcctatcaaagcgcatagtgctctggttaaaataatatatgctggcgtaaatgctagtgatgtcaacttcagttcaggacgttattttagtggtaatcctaaagaaactgcttcacgccttccatttgatgctggttttgaaggtgtgggaattgttgccgctgttggagattcagtcagtcatatcaaagttggcactcctgtggcccttatgacttttgggagctatgctgaattcacggaggttccagccaaacatcttcttccagtgccaagaccagaccctgaggttgttgcaatgttgacatcaggactgactgcatcaattagtcttgaaaaggcaggacaaatgacatctgggcaagttgttttagttacagcagctgctggtggaacaggacagttcgcagttcagctggcgaaattagcaggcaacaaggttgttgccacatgtggaggtgaaagtaaagctgaacttctggcttccttaggagttgatcgtgttatcaattacagaaatgaacgagtcaaagatgttctgaagaaagagtttccaagaggtgtagatatcatatatgaatctgtaggtggggaaatgtttgacttgtgcttgaatgcacttgcagtccatgggcatctcattgtaattggtatgatctcccagtatcaaggagaggatggctggaagccaaagaactacactggactatgtgagaagattctagctaaaagtcaaactgtggctggatttttccttgttcaatatgctcacttgtggcaagatcatcttaacaaactttttgacctgtatgcctctggaaagctaaaggtttccctagaccccaagcaattcttgggtgttgcttcagtcgtagatgcggtcgaatatcttcattctggcaagagtgttggcaaggtcgttgtgtgtattgatccatcatacggtcagatcgttgcaaaattataatccatggacatgatgcgcattgtcttccatggtcacgtaggttactgtcttatagttacacatatacctcaagaccgtattttcccagcgggtgacaaatgaataagggaacatgttggtgtatagtttagtttcatttttccaaagtgtaagatgcacaactatactgaagggcaagcatgggcatggaaatcgattaagtttctaatcccgtgcagtaggatatgcattcgagtggcctcgttccacgttttgtgtatacagtatataacttgtctcagtgccacatgcttcaattcgacccggtaacaataattcaaccagtaaaaaaaaanaaaaa

SEQ ID NO: 265413 - DNA, 488 bp, Zea mays
gcgtcccgcaaggcgtacgccgagacgcggccgcgcatcaagggccgcttcgccaagcgccgctccgcggagggcgaggacgaggcgctggagcacgaggaaggggcgtgcttctcgcccacggggtcggcgcccgccgcgtcggacggcgtcgtcccgtccttctgttgaggggagaagacgacgacgaccccggcagacggctccttaactttgccagctctgtcgaccctgaaccctttttttccctcccctcttctctcttttgatcgaggggttgccagctctggatctgaaattctgaacgcatgggacgcgagctgtgtgtagcatgaataactgcgtagtttgttggatggacgaactcaatcgcgctcgcatggaatggaactcttgtaatccaccctttgtacattaccatctcgagttgctccttttttccatgagccaaaaaaaaaaaaaaagggtggccgctcgcgatctagaac

SEQ ID NO: 265414 - DNA, 1003 bp, Zea mays
acgcgtccgcggacgcgtgggggggaacggagggtttgcaaggaaccttcaaccacatgagattgtggaacaggtgttggccatcgaggggacgttcaaacacagggtgacaaatgttgtgttcatggggatgggtgagcccatgatgaacctcaagtcagttctagaagcacaccaatgcttcaataaggaactaaaaattgggcaaaggatgatgacaatatctacagttggtgttccaaatacaataaaaatgctagcatctcacaagcttcagtcaacgctggcagtcagtctgcatgccccaaatcagaagctgcgggagacgattgttcctagcgccaagtcttaccccttgggagcactaatggatgactgcaagagttacttccttgaaactgggcgcagggtatccttcgagtacactctgctagctgggattaacgatgaaaaggagcatgccgaagagctagcagaactacttcgtatgtgtggaggtggttaccatgtgaacctgattccctataacccaattgaaggctccgagtacaagagaccttacagaaaagtggtccaagcctttgttgatgctttagaagcacgcaagataaccgttagcgttcgacggacccgtgggcttgacgctaacgcagcctgtgggcagctgaggaatgagtttcagaagaatccactacttgagattgaaccgtcaccctccacagagcggaccctcgtagctgcttaattgaaacacctatcaggttgatgcagcatgttcaagcatacggaatcgtcatttaatttatggggacattaggtgttgtaaagtgacagcaagttatgcataacgctagagaattttggaacgttctgtccgtgcccatctgatgtcatgagtggcaattacggaattaccacacttgtctcagatattataaacccatctttgttacagaaagtcaccagaaatgaactcctactgtccatgatctgttgcattcac

SEQ ID NO: 265415 - DNA, 838 bp, Zea mays
tttagaagcaaaagcaaaacaatacaaggatcctgcattgatgcacatatttttgatgaacaacattcactatattgtcaaatctgtccgcagatcagaagccaaagatttgttgggtgatgactggattcaaaggcaccgaaggattgtgacaacaaaatgccaatcagtatagaaggattgcttgggcgaaggtgttgcaatgcctctctggtcaaggtttgacttcatcaggtggtagtggtcatgtaggaagtgatggtggcaatagcagtggagcttcaagaacagctgtgaaggagagattcaggtctttcaatgtgttgttcgaagagatctaccacaagcaatgtggctggtccgttccagacactgagctgcgcgagtcactaagactcgcggtcgctgaaatcctgttgcctgcctaccgatcattcataaaacgttttgggcctctcattgagaatagcaaagcacctgggaaatacgtgaagcacactcccgagcaactcgagctgctgctaggcaatttattcgaggggaaacaagaacgtgcttgatagtttggtaccgcccgcagcaaggatgtgctgctcttctatgtaaaatccaaaataataaaaataaaaaagatctggaggccctgttagcgttagcattgcttgtgttctccccaatccttgtttagccgcattattatttgtacagaagaatatatgtgtcagctgtgccttgtgttgatctgatagcaggcgtgttcctggtttctttaatgactggccccggtccaaaaaaaaaaaaacccaaaaaaaaaaaaaaaaaaaaaaaaaataataaa

SEQ ID NO: 265416 - DNA, 735 bp, Zea mays
acccacgcgtgcgcccacgcgtccgcccacgcgtccggagcccttctcgtcctcagatctagcgccgcctccgtcaccctgctgctggccgcctggccggcgagctcctcagcgtgcttgtgatgataatgccacaacatcttctacaagcaagatcaggaagaagacaaaaaacgttatagtgaagaggaggggttgattgctgcattcaaaagtgtcggggataccttatccaatgctactgagaaggttgccacaggggacactgatgtgccagatgatctttttatagtttgataaacctttcaggttttgagcagacccacatatctctgtatttcaattatctggtggcgcaccctcacattgctagagccttcaacaagttgtcattcgaccacaagttaatctgggctcgcaatttcgtcagtgaaaagttcctaggagtgtgagggcagttggtaggtaggcttggagggttcttttgcttgaaccacattgaacaatgaactgcgatctatgtgtaaccaggagtgtgagggcagttagtagataggcttggacggttcttttgcttgaactacatcaaacaatgaaatgtcgtctaagtatgtcagcggatttttgcttgaacatgcagattttgtggaagccttaaacttgatattatgtgtaatgctaggacacattattatgtattgtgtggaattaataatatgtgtgttttgtagactt

SEQ ID NO: 265417 - DNA, 1075 bp, Zea mays
acctcaccggctccattcgaccattccatcctttccttatcccctcccgcttcgtctcccttcctggcttcctttcttcgccatggcaaccatgtccctccgctgcctcgccatggccatggccgacaccgcgctcccgcccgcccacaagctcctccccacagtttccctcccgctcctctcctcgtccacccgcgccgcgccgctcctcctcttcgccaggcgccgcctgccgctcgcgcccctcgttacctcctccgacgccgttgaggccaagtcggcagacgaggaggaggagaaggccggagagcccgtcgaaatggaagctggggagtttgaggaggtgctagcctcaggcggcgagggtgaggggcagtacgccgcggtggagccgccagaggaggccaaggtctacgttgggaaccttccctacgacgtcgacagcgagggactcgcgcagctcttcgaccaggccggcgtcgtcgaggtcgccgaggttatttacaacagagagactggccagagccgtgggtttggctttgttaccatgagcactattgaggaagctgataaagccattgagatgttcaaccgctatgatattagtgggaggcttctgaatgtaaacagggcatctcctaggggcactcgcatggaaaggcctccgagacaatttgcgcctgctttcagagcttatgttggcaacttgccatggcaagctgatgactctaggctggtgcagttgttcagcgagcatggagaagttgttgatgctaaggttgtctacgacagagaaactgggcgctcacgaggattcggttttgtatcaatggtgtcaaaggaggaactcaatgatgctatttcggccctagatggacaggaattggacggccggcctcttcgagtgaatgttgcagcagagcggccacagaagggcttttgatgcggctgtatgagagagatgactggctggttgtgatgagcgtggtgacacatagacacaatgtacgagcaatggtgcaaattaacggaagctgatgctgtcacaagttgctagatctttctcccttagctt

SEQ ID NO: 265418 - DNA, 370 bp, Zea mays
cccacgcgtccgcccacgcgtccgcgaggtggaggtggaggtcggggagtacgttgagccgcccgaggaggccaaggtctacgtcggaaacctgccctacgacgtcgacagcgagcgcctcgctcagctcttcgaccaggccggcgtcgtcgaggtcgcagaggtcatttacaacagagaaacagatcaaagtcgtgggtttgggtttgtcactatgagcactgttgaggcggctgagaaggctgtggagatgttccatcgctatgatgtacaatggaaggcttctgactgtaaataaagcagcacctagaggctcacatgtggccaaacccaagtggatgattctacattggtggagttgttcagaaac

SEQ ID NO: 265419 - DNA, 770 bp, Zea mays
cacaaggaggagacgcggagcgcggcggtgcacgccgacgtcgccagggggtaccgcgcgcgcgtggaggccgagctctccgggagctgcgcggggatcctgcgcctcctcgacgagcgcctcgtgcccgcggcggcggccgtggacgccagggtcttctacctcaagatgaagggggactaccaccgctacctcgccgagttcaagaccggcgccgagcgcaaggacgccgcggactccacgctcgccgcctaccaggccgcgcaggacatcgccgtcaaggagctgccgcccacgcatcccatcaggctcggcctcgccctcaacttctccgtcttctactacgagatcctcagctcgccggaccgcgcctgctcgctggccaagcaggccttcgacgaagctatttcagagctggatagtcttggggaagagtcgtacaaggatagcaccctcatcatgcagcttcttcgtgacaacctcaccttgtggacttctgacatgcaggaggatggtggcgatgaaatgcgggatgcaaacaagcctgacgaggagcagtagtagtctccatcgatcatgccatgccatgccatgcttgtacaaggaccattttcgtgtgtcctttccttcaatcgtcgacctttcgttttgttgttatactgctattgtggaaccctgttactgttactgttagtgtatcctattggcaataatcaaatgtggtatggttgactactatactaatgggggatcattattcatcatttgat

SEQ ID NO: 265420 - DNA, 309 bp, Zea mays
ctgcctgccgtttccatctccatccagttccacgcctccacccacgaccacgacccacccactccactcctttccccaacccatcggcggccgtggacgccagggtcttctacctcaagatgaagggggactaccaccgctacctcgccgagttcaagaccggcgccgagcgcaaggacgccgcggactccacgctcgccgcctaccaggccgcgccggacatcgccgtctaggagctgccgcccacgcatcccatcaggctcggcctcgccctcaacttctccgtcttctactacgagatcctcagct

SEQ ID NO: 265421 - DNA, 870 bp, Zea mays
cccacgcgtccgcccacgcgtccgcccacgctttcctttcctgcagacaagctgtaaatctcgcctagctcgtcgtcggagaccaaggagaagagcaagggggggcgcagaggcagaggcttgccagcctacctagctcgtcggggccctatggagatccagcaccaccgggggctgggcaactccaaggttgtcaaggtgcagagcgaggaggcgtgggatctgttcaccgatcaagcgagcaacgagggccggcccgttgttgcccatttcggggcgtcatggtgcgtgacgtccctgtccatgaactacaagtttgaggagctggcgcagacccaccccgaggtcttgttcctctacgtggacgtcgacgatgtccagagtgtttcatccaggtacggagtgaaggccatgccgacgttcttcctcatcaagagcaaggaggtggtggggaagatcgtcggggcgaacccagacgaggtgaagaagctggtggatgcttccgccgaacccttggagactcagatagtcgtggagtagtagtcgtttcagacttttttttttttttgaagagtcgttcgtgtcttccgaaactgctccgcgagactgtgcgaccgtgagtgcttcttggtcagggtctggatcgtcccggactctgtccagtgtcgcccgtgcgtgtgcgtgtcacgtgtgtgtgtgatgggtttctgtcgctttgtagcattagtagcagccttgcctgttgggctggtagtggtactgctagtgccaggtgccggctgactgtagtgtgactctgaatgctgcatctgttctggggttggaaaataaaaaataaaaaccaccaaaacgagcccccttcgaagcgcc

SEQ ID NO: 265422 - DNA, 603 bp, Zea mays
cgtgggacgacccacgcctccccatcctgtcgtgggatcccagccaccgccgctagaagaagagctcggcgattcccaggtcccgcgagaatatgccgaagcagatccatgagattaaggacttcctcctcaccgcgaggaggaaggatgcccgctcagtgaagatcaagaggagtaaggatgttgtcaagttcaaggtgcgctgctccaagtacttgtacacgctctgcgtcttcgatgctgagaaggcaaacaagttgaagcaatctcttcccccaggtttgaccgtcgaggaggtctgattggatacatggcaacgccgggttgaactacccaagcttctttatcagtagcagagcatgctactcatgtacttttggaacctaagctattagacctgtcagtgttggatgtgtggatcttgcatttttggagaaataccaatttacctcgttcaaggatgcacctttcagtatatttcttgtttaactgcacattactttatatttatgcctctacaaacatagttactagatttttgtgcttttatatgatatgccatttgcggggatacttcaaaaaaaaaaaaaaaagggcggccgc

SEQ ID NO: 265423 - DNA, 559 bp, Zea mays
atcgcttcctgtctagggtttcacccgcgtgccttatatatcctatcacttcccgcccagccgccatctccgcatttccatcttcccgtgggatcccagtcgccgccgcaagaagaagagctcggggacttccaggtctcgcgagaagatgccgaagcagatccacgagatcaaggattcccttctcaccgcgaggaggaaggatgcccgctcagtgaagatcaagaggagcaaggatgttgtcaagttcaaggtccgctgctccaagtacttgtacaccctccgcgtcttcgacgctgagaaggcaaacaagttgaagcaatctctccccccaggcttgaccgtccaggaggtctgattggatacatggcaacgccgggtcgaacctcccgggcttctttatcagtagcagagcatgctgctctatgtacttttggaccctaagccattagacctgtcagtgttggatgtgtggatcttgcatttttgtggagaaataccaatttgcctcgttcaaggaaccacaaaaaaacaaaaaaacaccaaaaagggcggccgc

SEQ ID NO: 265424 - DNA, 366 bp, Zea mays
cccacgcgtccgcccacgcgtccgaccactcaaccagtgcgctactccaagtgcttgtggacgctctgcgtcttcgatgcggtccgggcaaacaagttgaagcaatctcttcccccaggtttgaccgtcgaggaggtctgattggatacatggcaacgccgggttgaactacccaagcttctttatcagtagcagagcatgctactctatgtacttttggaacctaagctattagacctgtcagtgttggatgtctggatcttgcatttttggagaaataccaatttacctcgttcaaggatgcaagtatatttcttgtttaactgcacattactttatatttatgcctgtttcataacagagaaa

SEQ ID NO: 265425 - DNA, 355 bp, Zea mays
gttgatttatcttgatctgtcaaatgaagtctcaattattgcacgagtccactctgaagttctgttctttcctataaaatgtccattgttgcaggtttgaccgtcgaggaggtctgattggatacatggcaacgccgggttgaactacccaagcttctttatcagtagcagagcatgctactctatgtacttttggaacctaagctattagacctgtcagtgttggatgtctggatcttgcatttttggagaactcccaatttccctcgttcaaggctgcaagtcaaacaaacaaaaccaacacaaacaaaacaaaaaaaaaaaaagggcggcagctcgcgatctagaactagtc

SEQ ID NO: 265426 - DNA, 408 bp, Zea mays
ccagagcccacagatgtccatcattagctctatcacaggacttagtaccagtagctcttgtggtccggttcatcgtggatcatggtgtactccaccaagactattagttgaagatcaggatgtttttcatccggatatgccacagaattccactggcaagaaggccaggaaagacgaaggaagcaaaaggaaaccaccaggagctgtaaaaatcagcacatggtcactggctcgccttaacgcagaggacgtcacgaaggcagctgttgaggccaagaagagatctaaagtcctccagccgatcacaaggcgggggaatattcttaaacctgacaagagaacagacaaaagcagggtgttcctacctgtacctgaacaatctccggatcccatggcaagggacattcg

SEQ ID NO: 265427 - DNA, 543 bp, Zea mays
  unsure (1)..(543): unsure at all n locations
ccggaggactgagaccagaggaggagacgtcacgcctgcgcggctgcgcccaccatggacgaggatgagtttcggcgcatgctcgacctcttcccggtcgtccgctcccgagactactgctgctccgatcctggaacatccagcagaggaaccagacagcgatcacgagttcaggaggcaactaagggcgataataaggactcgtccggtgcacaagatatgtttatgcagaaattgaagatggctgcggagaataagattggagcgacaaaggcagagttcttctgcaagacattcgaagaagttcatgagaaacttgttcacagagagctgaatttggatgctgctaagaagttcctgagcgcatatgagagctgatgatgaacaataggcaaacttttaacaacaggtagatgctgttgagcataccgcctgattggttcaccgatcgtccgtagccagctcgtatgcagccaggccgtccagagacggttatttgggccgtacgagtggatgcacnnncaatgactcaaaataactatg

SEQ ID NO: 265428 - DNA, 613 bp, Zea mays
  unsure (1)..(613): unsure at all n locations
cccacgcgtccgcccacgcgtccgcgcggctgcgcccaccatggacgaggatgagtttcggcgcatgctcgacctcttcccggtcgtccgctcccgagactactgctgctccgatcttggaacatccagcagaggaaccagacagcgatcacgagttcaggaggcaactaagggcgataataaggactcgtccggcgcccgagatttgtttatgcagaagttgaagatggctgcggagaataagattggaccgacaaaggcagagttcttctgcaaggcattcgaagaagctcatgagaagcttgttcacagagagctgaatttggatgctgctaagaagttcctgagcgcatatgagagctgatgatgaacagtaggtagatgctgctcaaagggtcggcaggtgccaatgatcctgggaaagttgttgatgcctgtcgagattttgatcattgacaaacttgtgttgtgtgcagacagtagacatccctttttggtcagctacaatacttttttcagagaaccttttgaagttgtccaattgtacgatantaaccgattttctaaaaaaaaaaaaaaaaaaaaaaaaaaaaaaaagggcggccgcccggga

SEQ ID NO: 265429 - DNA, 610 bp, Zea mays
tcgtccgttagaacatagcttttgtgggggagaatttacagaccgttggcggagttttgtcacgacgcatgcatgacctctagatggaagagaggtggctagacgactgcggctcctatctgggagcagccaggttaggtaccagacagagcacacgagtataagagggaacgaagggcaataataaggactcgtgctgtggacgagatttgtttatgcagacattgaagatggctgcggagaataagattggagcgacataggcagagttcttctgtaagacattcgaagaagttcatgagaaacttgttcacagagagctgaatttggatgctgctaagaagttcctgagcgcatatgagagctgatgatgaacaataggtagatgctgcttaagggtcggtagttgccaatgatctggaaagttgttgatgctgttgagattttgatcacaggcaaacttttaacaacaggtagatgctgttgagcgcatactgataccgcctgattggttcaccgatcgcccgtagccagctcgtatgcagccaggctgtccaaagactgttatttgggccgtagaagtggatgcactcaaaataaatgttgcgtt

SEQ ID NO: 265430 - DNA, 1582 bp, Zea mays
cggaaatcgccggggcgacccacgcgaacgccttggctaccaccgacgcgcgggcggcacaacaatgtcttcctcctcaccgctgctcgccagaactgcaacgcggccagcatcctcctcttcctccaccgtgtcgtagatgtgtttaagcactacttcgaggaactggaagaggagtcgctcagagataacttcgtcgttgtgtatgagttgctcgatgagatgatggatttcgggtacccacaatacacggaggcgaagatcctgagtgagttcatcaagacagatgcgtacaggatggaggtcacacagcgtccacccatggccgtgacaaatgctgtgtcatggaggagcgaggggatccggtacaagaagaatgaagtcttcttggatgtagtggagagtgttaacattctagttaacagcaatggccagattgtgagatcagatgtggttggggcactgaagatgcgaacatatttgagtggaatgccggagtgcaaacttggcttgaatgatagggttcttttggaggctcaaggcagagcaactaaaggcaaagcgatagacctcgatgatatcaaatttcatcagtgtgtacgtttggctagatttgagaatgatagaactatatcgttcatacctcctgatggatcttttgatctaatgacatacaggcttagcactcaggtaaaacctcttatctgggtcgaagcacagattgagaaacattctagaagccgtatagaactcatggtgaaggcaaggagtcagtttaaagaaagaagcacagcaacgaatgttgaaattgaagtgcctgttccttcagatgccacaaacccaaatataagaacttcaatggggtctgctgcatatgctcctgagagagatgcaatggtttggaaaataaaatcattccctggtggcaaggaatacatgtgcagagcagaatttagtcttcctagcataacagcggaagaaggggccccagaaaagaaggcaccaatacgagtgaaatttgagataccatatttcaccgtatcaggtattcaggtccgttatctgaagataattgaaaagagtggttaccaggcactcccctgggttagatatatcacgatggctggcgaatatgagctgagacttatatgagttttctcttttctggctgatggaagacatttatgaagctgcaagatacatatttgctcgagacagcaaccgtatgacatttgaatgttagcctggacgtcttctgccgaccacacaaggttttccccctgggggcttgttcatcttgttaggctcaccttaccttggttattgtacgttacccatcaagtatagtttttgaaaaaaagagaggataattttaattttcatctctcttgtattattattgatttatttttgtgggtaccaaacttggatttgtttcatctgatcgagttcacaaaaatactgccattactgggtgatggttctgaactgcaggttgaaacaattgtgccctttactgtaaatgtcttcttcttgtatccaggcaaaagaaaggaaacctaccaagacctattaagacctc

SEQ ID NO: 265431 - DNA, 518 bp, Zea mays
tcgcccacgcgtccgcccacgcgtccgcccacgcgtccgtgcgtttccaagtccgatacaaaccatctgtgccgcgccgcgcgagcacgtccggcgccggtgcggcaggcgaaatccgagagcactcctcccccgctacgccgcaccgcccatggccgcagctagccgcagatagagagaggcgcaggcgagggcgtgcagatccagatccggtgggcgggaaggacttgatcgcccccaccaccatggccggcgcggtgtcggcgctcttcctgctggacatgaagggccgcgttctcgtctggcgcgactaccgcggcgatgtctccgcgctccaggccgagcgcttcttcaccaagctcctcgacaaggagggcgattcggaagtgcactcgcctgtggtctacgacgacgctggcgtcacttacatgttcatccagcacaacaatgtcttcctcctcaccgccgctcgccagaactgcaacgcggccagcatcctcctcttcctccaccgtgta

SEQ ID NO: 265432 - DNA, 502 bp, Zea mays
cccacgcgtccgttttaggtgtgtacgtttagctagattcgagaatgatagaactatatcgttcatacctcctgatggatcttttgatctaatgacatacaggcttagcactcaggttctctttctgatcaactgtggaatgctctatagaagatatgaaatgtttccactttatcattttcacatgcatgcctttatttgatgttctttaggtaaaacctcttatctgggtcgaagcacagattgagaaacattctagaagccgtatagaactcatggtgaaggcaaggagtcagttcaaggaaagaagcacagcaacaaatgttgaaattgaagtgcctgttccttcagatgccacaaacccaaatataagaacttcaatgggttctgctgcatatgctcctgagagagatgcaatggtctggaaagtaaaatcattccctggtggcaaggaatacatgtgcagagcagaatttagtcttcctagcataacagcggaaga

SEQ ID NO: 265433 - DNA, 475 bp, Zea mays
cccacgcgtccgctgagagagatgcaatggtctggaaagtaaaatataagaacttcaatgggttctgcagcatatgctcctgagagagatgcaatggtctggaaagtaaaatcattccctggtggcaaggaatacatgtgcagagcagaatctagtcttcctagcataacagcggaagaaggggccccagaccagaaggcgccgatacgggtgaaatttgagataccatatttcaccgtatcaggtattcaggtccggtatctgaagataattgaaatgagtggttatcaggcactgctctgggttagatatatcacagtggctggtgaatatgagctgagactgatatgagttctctcttctctggctgtcggacgacttttgaagctgcaggacactaaagatacatatttgctatcgacacagcgaacagttttcattcggatgttggcctggaagtcttctgccgaccata

SEQ ID NO: 265434 - DNA, 1777 bp, Zea mays
ttgacatcatgcatgggcttgaacctcagacaattgaatccctgaatcttttgaagagtcgagatgcagtgttcattgttgctttgaataaggttgatcgtctctatggttggaagtaatgtccaaatgctcctattgtgaaggctttataacaacaaaatgaagatgttaagagggagttcaatatgagactcacagatattgttacacaattcaagatgcaaggagtgaatactgctttgtactacaagaacaaggagatggaagatacctttaacatagtgcctacgagtgctgtaagtggtgaaggtattcctgatttgcttctgttactggttcaatggactcagaagacaatggaagaaaaactcacttttgttgatgaagtccagtgtactgtactggaagtcaaggttgttgaaggccatggtactacaattgatgttgttttggtcaatggtatactccatgaaggagatcaaatagttgtttgtggcatgcagggacccattgtgacaactgtcagggctttgttaacaccacacccaatgagagagcttcgagttaagggcacctacatacatcataaggagatcagagctgcacaaggagtcaaaatatctgctcagggtctcgaacatgcaattgcagggacagccctttacgtgttaggacctgatgatgatttagacaaactgaatgaagctgttatggaagagatgacacgggttaggagccggattgacaggagtggtgaaggtgtctatgtacaggcatctacccttgggtctttggaagctctcactgagttcttgaagagccctgctgtgaatattcccttctgtgatttcagtatagggccagtgcataagaaggatgttatgaaggctagtgtcatgcttgagagaaagaaagaatatgcaactatcttggcctttgatgtcaaagtgatgcctgatgcccgcgatctcgcagaagagtccggtgtgaggatctttgtggcagatataatataccatctgtttgatcaatttacagcatacattaagaacctcaaggaagagaagaagaaagaaagcgctgaagaagctgtgttcccttgtgttcttaagattatgccaaactgtgtcttcaacaagaaggacccaatcgttttgggtgttgatgtccttgaaggaatagccaaggtgggaactcctctctgcatacccagtaaagaatttattgatattgggaagattgcctcagttgaaatcaaccacaagcaagttgatatggctacaaaaggccaaaaggttgctattaagattattgcgaacaattctgatgagcagcagaggagcttcggcagacactttgatatggaagatgagcttgtcagccggatatcaagaagatctattgatattttgaaacagaactacagggaggatttgacaactgaagactggaaacttgttgtaaagttgaaatcaatattgaagatacaatgaaaagccccctcccctaacacacctgcccatgaatttgggagttgtggttctgtggcgccacacctatctctagttctctacaccggagttccccagggagggttaccaattttgatacggtttgatttttgtaatttgctcggaaggcgcttcattttacaaccacattccgtaataacataatattttgtgtttgtttctgtacttttcatgaactctgaagcctctcaccaacgccttgtgtaatatactacatgctatggaaaatctgtgctgtttacgac

SEQ ID NO: 265435 - DNA, 545 bp, Zea mays
cgatgctgttgagtttgagctgcatgttcaggaaccctacttcactcaactcagagccggagtcaagaaggctgaagggagattagcgactggtaactacaaccggattacacaaggttctttgctgctattcaataaatgcctcttgcttaacgttgaggcagttaggaagtacaattcattctctgagatgctgaaaggagagaaaatctcaaatgttcttcctggtatttcatcaattgtagaaggtgtgaaagtatataggaaattctatgcagaggaaaaggagaactcttatggagttttagcgatatcagtttcaaagccaacatctcaaccttacataaccatgaataatatccttgctggattggggtatgatggactgggtagactccttggtatggcgaaaacaactggaactgttccagatggactacctcctccaagatctgcactgctgtcatcttgtatgggactggttcaaccaaatgagtaggaaaggatggtggggcagctttaatgggagtggtaaagataaagtc

SEQ ID NO: 265436 - DNA, 1049 bp, Zea mays
gggtcgagcccacggttcgcacacagatctcacgcccctgcagccaaaacaaaatcagcatccggatctccacattccccaccaaaaatcatcctccggacgaaatcagcggcggcggagatgggagcggagtgccggtacgaggtggcgcaggcggcgtacatcaagctggcgctgcacgcactgaagcacccggcgaccgccgtcaacggcctcctcgtcggtcgcctcgtcgagccttcgtcctcaccggccgtcgtctcggtcattgacgccgtgccgctttctcaccacccgcaccatctgccgctgctccccacgctcgagctcgcgctcaccctcgtcgaggaccacttcgcaacccagggcgaaggcctcgccgtcgtcgggtactatcacgccaacccgcgctgcgacgacaccgagctcccgccagtcgccaagcgcgtcggagaccacatcttccgatacttcccccgctccgcggtgttgttggtcgataacaagaagcttgaggaggccgtcaaggggaagttttctgatgcggtgattcagttacacaccagggattcatcaaaaagttggcgtcaggctggatcagatggaagcagtcagctgattctaaaagaaccttctaccaatgttgtcctagctgatcatgttacaacaaagaaatgggagaaaattgttgatttcgatgaccaccttgatgatattagcaaggattggtcgaacccaggcctccttgactgaattttcatgattgatctcgctatactgttttggaacttcgctagaaatgaggtggtgaagctcgtcctgctgtgctatggatttctctcagtcgcaacgagttgtaagcactaagcacggatttcattttaatgtaaatgagtgattttgtaacaattacagttcaaaatgctaaaattatgcagagaccattaaattgtttcaaggtcatgacaattattacgagttgtcacaaacaatttttgtttgtacatgcctcttattttaaaaaatcccccctcgcataaatttaagtg

SEQ ID NO: 265437 - DNA, 1033 bp, Zea mays
gagatggaggcgagggacggggtagtgtgggagcagcgcccccaggacgtggacgcggagcggcggcgacgggagctcactagcccaggtttcagcttctccgccgcggggctgctcttcccctaccacctcggcgccgcgcagtgcctcatggaccgcggatacatcacctgatcgcatctgggaacacaatgcaagatgctctgcaggtgaccaaagttctagctgacaactgccgaagtaaaggcacggcgtttcgccttggggctgtactcaaggatgtccttgttgagtttctcccagatgatcttcacattagatgcaatggaagaattcgtgttgctattactcagctatcctggaggcctaggggcttgctggtggaccaatttgactccaaagaagatgtcattaatgcagtaatcacatcctcctttattcctggatacttagcacccaggccagctaccttcttccgtaataggctctgcattgatgggggccttacattgtttatgccgcccacttctgctgcagaaacagtccgaatatgtgcttttccagccagccgtttgggattgcaagatattgggatcagtcccgattgcaatccagagaacagggctagcccaagacagctgtttaactgggctctggaacctgctgctgatgaaactctagacaaattatacgagcttgggtacctggacgcagctgtatgggctgagcagaattatgctgagcttatcgccaagaatgatcaatcccttgtcgctgattgaattgagttcagtttgcccagaagtaattttggtatccaaagctgagttcatgagaatccatgcctgtaatatattgtaaagatagcaccgtcattgtcgaaggtggcattgttctgcattggatttgggtgtttatgccagcattttcgtagctgtgacaatagtgtagaacaggttgctagcatggccataaaaactgatcagcataatcaaatgtatagattatagatgatgaggtttgacctgagcct

SEQ ID NO: 265438 - DNA, 2072 bp, Zea mays
gccacgcgtccgaggaggagcctgcccgcgcctgcgcctggttgtaattgtagctgacgctcacccttcagttgaccaccgctgcggcagcaatggcggcgagtcgccggcagcaccgccgcggcttcccgctggtcccgctgctgctgtcgctcctggcggccgccgcgtacggccgcctcatctccgacggcggcccgcccgcgccgctcctcccggtcatccgcctcgcggcgccgccggccgaggccgagtgcgagcagacctacggcttcctcccctgcaccaccaccgtgctcggcaacctcttcctggtgctggcctacggcttcctcatgttcaaggcggccacgttcctgtcggcgggcagcgagctgctgctagagatcatggggcccggcctcgtcggcggcctcctcctccccatcctaggcgccctccccgacgcgctcctcgtcctagtgtccggcctctccgggagcaaagaggaggcgcagagccaggtgctgatcgggatggggctgctcgccggttccaccgtcttcctcctcaccctgctctggggaacctgtgtggtcgttggcaaatgtgaccttgggccaaaccgtgaggcagttgatgtgacagacaccaagggcttcagcttgactggcactggtgttacgaccgacgtgcagaccagctacgcggcgcggatcatggggctatctgttatccccttcatcatcgctcagttcccaaagatgttgaagacgcaccacgggcagcgcctcgctatgctgctggcccttgtcgtgtcgttcgcgctcgtgcttgcctactgcctgtaccaggttttccagccttggattcagaggaggaagctcgcgtacgcgaacacaagcacgtgatctccgggatactgaggcacgcccagatgcagtcgctcggccgcctgctgaacgacgacggcacgcccaatgaacaagtcatcagaaagctgttccgcaagatcgacatggacgagagccggtccctgtcccgcgccgagctccacgccctcatcgtcggcatcaacttcgaggaggtcgacttcgacaggacggacgcggtggacaaggtcatggacgacttcgacacgtcccgcaacgacgtcgtcgaggaggaggagttcgtgcaggggatgaggaagtggctggacgaggccaggcgcacgtgcccgtgggcggcgccttctccagcaagttcatccacgagtaccacgagaggacgaggcaggagcacgacgagctggtcgacaggtccgacgaggcggtggagagcgtggagaaccccgggtggtgcatagccaaggccgtggcgctgctgctgctgggctccgccgccgccgccgcgttcgccgacccgctcgtggacgccgtccacggcttctccaacgccacgcgcatcccgtccttcttcatctccttcatcgccctcccgctcgccaccaactccagcgaggccgtctccgccatcatcttcgccagcaggaagaagcagaggacctgctccctcaccttctccgaggtgtacggcggcgtgacgatgaacaacacgctgtgcctcggcgtgttcctggcgctcatctacttcaggaacctgacgtgggacttctcgtcggaggtgctcatcatcctgctcgtctgcgtcgtcatggccctcttcaccagcttccggaccacgttcccgctctggacctgcctcgtcgcctacatgctctacccgttctcgctggtcctcgtctacatcctcgactacgtctttggctggtcataggctctcatcggcgcctcgagtgaacacgaccctgattggagcacctgggttttaacagccgccggtgtttctgcttgaccttgaaattttgactcatgtgaagctatctgtccagactctaatatttctttgtgtatccaaagcacgcacgaacttcgtcaaaaagcagttgcatgttttcaaaaaaaaaaaaaaaaaaaaaaaaaaaagggcggccgctcgcgcccacgcgacagcccacgcgtccgcccacgcgtccgcccacgcgacagcac

SEQ ID NO: 265439 - DNA, 382 bp, Zea mays
ggtgtacgtcggcgtgacgatgaacaacacgctgtgcctcggcgtgttcctggcgctcatctacttcaggaacctgacgtgggacttctcgtcggaggtgctcatcatcctgctggtctgcgtcctcatggccctcttcaccagcttccggaccacgttcccgctctggacctgcctcgtcgcctacatgctcttcccgctctcgctcatcatcgtctacatcctcgactatgtcttcggctggtcataggctctgatcggctcaagtgaacgcctggctttttgacagccgccggtgtttctgtttgccctccttgtgcttttacctatatgtccagactttttctcaaaaaaaaaacccacgcgtccgcggacgcgtggg

SEQ ID NO: 265440 - DNA, 294 bp, Zea mays
tcatcctgctggtctgcgtcgtcatcgccctcttcaccagcttcaggaccacgttcccgctctggacctgcctcgtcgcctacatgctctacccgctctcgctgatcatcgtctacatcctcgactatgtcttcggctggtcatagacctgattggctcaagtgaacacctggttttcagacagccgccggtgtttctgtttgacctccttgtaattttaactatatgtccagactttttctcatgtgatgctgtgatcatgttctactttctctaaaaaaaaaaaaaaaagag

SEQ ID NO: 265441 - DNA, 479 bp, Zea mays
cccacgcgtccgcccacgcgtccgagaaccgaaaaaaaaaactctgcggagattgaccgaccaccaccaccgcctgcgttcccgcgccgccaccgccatggctgccgctgccccccatgcatactcctccctcgtgcctgtttcggctgcgcggcctctctccggaagcacagtttctttcggtgcttcgtgccacaagtggaggaaggttccggcatggcgactccactgtgttgctgaagacgaagaggaagtcaaagattttggagtcaatatggcactatccatgctaaaattttacaaacgagaaatatcacctttactaccttcaagctgccgatatgtaccaacttgcagtgagtactctatgcaggcgttcaaaccatatggtgttgtaaagggttccatcttgactgcttggcgcctttgcccgtgtaatcctcttggtggatatgggtatgatcctccaaaatggtttg

SEQ ID NO: 265442 - DNA, 508 bp, Zea mays
ctctgctccttcgaagcgacctcgctctgacggctcgattggcctaaccttgtctcaagctcccaccacaggactctgccgatgcctcaacagtttcattgatcgcgccagatcgtttgcagctttgttaaccgaacaacaagtgtacagagaggaagcagggtagcagtctatgcatccgttcttttttatttgtcgcagtttagttcaaaaataaactagcgggcggcaaattttcgagaactgtagtatttgataagttgttactagatcccagagttttatttcgactatagtcgtaagtgataagccccatctgtagctaaagggagctctaattttaactcccccgacattaattgttttcagatccagctgatcgccccactgtagtgtagtgggtttagatggattctattcatgttatttcgcccgattaggcgaagaaatgttacatgtgaagatctgaaattatgagaaataaaaccgttatttctgaatggttttt

SEQ ID NO: 265443 - DNA, 1137 bp, Zea mays
accctcacgaaattctgagatccatccagaaacgtcgctccatggcgattatctccgacttcaaggaggacgaggccccgcagcagccggcggcggtcggccccggcgtcgaggagaccctggtggcagcgctagagaggaccggcggtgcactcccctttctccaggcggccatcgatgtcgctcaccgcaggtctggcctgttccgcgacccttcggcggtgagcaaggttaccgcgatggcggcggccgtcagggcgcaggtggagaccgaggagagggcagccagagaggtcaagaggaaggcggaggaggccgagaggaaggctgcggccgaggcgcagaaggctgacatggaggcggcgacggcgacggcggaggagaagctggagaaggaccgtatggatgcggataaggcggaggaaggcaacgttagacaaccaaatgctggcaatggtcttgatttggagaagtactcatggactcaacagttgcctgaggttaacatcactattcctgttcctcaaggaacaaaatcaagatttgtggtcgttgatataaagaagaaccatctgaaggttgttctgaagggccagccacctatcattgatggtgagctctataagccagttaaggttgatgattgcttctggagcatagaggatggaaaaactctttccatattgcttacaaagcacaaccaaatggagtggtggaagtctgttataaagggtggccctgaagttgatacccaaaaggtggaacctgagaacagcaaactctctgatttggatcctgagactagacaaactgtggagaagatgatgtttgaccagcgccagaagcagatgggccttccgacaagtgatgaaatgcaaaagcaagaaattctcaagaagttcatgtctgagcacccggagatggacttctctagagcgaaaatgccttgaggatttgttcgggcagttatttctaccagtctgtttaggttgtctttgagtctggtatcggtgtcaaacaaatcttcatctgttttttttttaatgggtcaggaatatcaggcttgttctttttcatctcaatccatatgcattggaagcgtttgggtggggtttaaatccatagtaggtcaaaagc

SEQ ID NO: 265444 - DNA, 503 bp, Zea mays
gtgatgaaatgcaaaagcaagaaattctcaagaagttcatgtctgagcacccggagatggacttctctagagcgaaattagattgaggatgtgtttggccgtttgtctgaatgcgttattagtatgaaacattttttgatcagtttgcatgtaatgcgtcagaaatatctggagatagacttctctagagcgaaaatagcttgaggatgtgttcggccagttatttctaccagtgtgcattggttgtctgagtgcgttattagtatgaaacaaaaattttgatcagttcgcgtgtaatcgtcagaaatatccggagatggacttctctagagcgaaaatagcttgaggatgtgttgggccagctatttctacagtgtgcgttaggttgtctgagtacgttatcagtatgaaacgaattttgaacagtctcttgtaatgcgtcagaaatatttttttagaactgtggcatgtccttgaaccaatacgatggctggattatgtcg

SEQ ID NO: 265445 - DNA, 710 bp, Zea mays
gccgtagtagaagtatgtgccccagtcggcgttgctgccgtcctgcacgtcgtagcagctggactgctcggtgaaggtgccgacgcccctgggcggcttgaggttgttggtggagtccaccacctggacgttcctgaagtagctggccttgccgaacccttcctcggggaagtggccgctgcccatctgcgtgctggtgtggctgccgtcgggctccgagttcaccacctcgccgccccactccaccatcgacgcgctgtccgccaggtacgagaagaggaacgacggccagtaccccagcacgtagtccttgccgaactgcagccaccagttgccctccttggggtccttccagaccaagatgttgatgtcatactgggagccgccgtagttggagatagggaagatgctggcgcccatggcgatctggttgtttatctggatgaaccccgagcacagcaggttgtagcatcctgttgcctggtaggcatcgctagtccagtaggtgaagagcctagtgttgttgtccccatacaggtctgggctaacctgccaccctgcggcggtgcgcttgggccccgcgatggcggcggccgtcagggcgcaggtggagaccgaggagagggcagccagagaggtcaagaggaaggcggaggaggccgagaggaaggctgcggccgaggcgcagaaggctgacatggaggcggcga

SEQ ID NO: 265446 - DNA, 934 bp, Zea mays
  unsure (1)..(934): unsure at all n locations
ggtccgtgtaattcccgggtccgactccacgccgtctcgtcggaccgccgtaggggggcagcccatcatgttctcgcagcatctcggctctcnnnggcaaacntcncnnaagaactctgggggcgcgtcctaggggctcnctagcaccagttanntcgctcgtctnaccagcttcgcgctcgcgtagcccaccgcttcctggttttccctttcttccttcccgcgccctcggaccatcgccagtgaaggcccgcgcgcgccgtcgtttgaatcctggttttctccctactcgctgcgctcacgtcgtcgtcttcctgctcgttccgcgacgtcgctcccagtccacagctcgttggcttccctgtgcgcggttgcggatgccgtcgcccgatccttgtgccttggcccgatccttgtgccttgccgagctcatcacccgccgcgaggactctgcccatcgctgtgctcaagccacgccttccctagtccgtcttgcacatacctcatctccaaacaggggaccacgctgccgactatttgaccccgtcgttgcctcgcagcgctcgaacactatcgttgtcactcgacaacgtgtntgcccgtcaccacgttaccttcagcaacacggctctactggactccgtgcgctcgtcgacacctggttatcgatctccgccacgccgtgcccccgctcttcagcatcgccgccgccctttttctgttatgtcgcaggcgttcgtggattggtaagctgatttataaattttgctagttggtttaatgaatggattagctagatagattagtcacaatgatgttgtgattatattaagtgttgttgaagcgtatcgtctcatgcagtaatgtgattgtgaagtggttgcgtcgtgtgaagcttagtgttaagatttacgttttacaatgagtattttga

SEQ ID NO: 265447 - DNA, 649 bp, Zea mays
cttccgtcccatgcaacacttggttgcttgcctccctggccgcatcacttctgaacctccccaagcaaatgtgccatctctcagctgtcgtgctcatcggagccagcctccaccaccgtccacagctctctggtgctcgcccatggcgcccgccctgccccaggtccgaagctggtcgtcgtgtatgctcggtctcacgggcgccatcgttccgcgcaccggcctcggcaaactccaagaacctgggccgcctgggcccagcacgttatcctcgtcaccagctcgctcgcgtgcccagcttcctgttttccctcttcctcccgcgctcggacatcgccagtgaaggcccgcgcgcgccgtcgtttgaatcctggttttctccctactcgctgcgctcacgtcgtcgtcttcctgctcgttccgcgacgtcgctcccagtccacagctcgttggcttccctgtgcgcggttgcggatgccgtcgcccgatccttgtgccttggcccgatccttgtgccttgccgagctcatcaccgccgcgagactctgcatcgctgtgctcagccacgcctccctagtcgtcttgcacatactcatctccaaacaggagcaccctgccgactattgatcccgtcgttgcctcgcagcgc

SEQ ID NO: 265448 - DNA, 1361 bp, Zea mays
cccacacgtccgcccacgcgtccggaacgggctgcaatagcctttcctctcactcgcccctctgcatttaccactttgccctcgtcggcggcgctgaccacccgccgccgagtccggcgaaacaaccgcctgtagttccagagtagtacctcatggcggccatatcgtcgcttcccttcgcggcgctgcgcggagccgccgagtggaggccgtcgtcgacggcggcggccgtctccggcgccgtcgtgctcagcgcgaggtctcgccggggctcgcgctcggtggtgcgatgtgtcgccacgacgggtgatgtcccacccactgtcgcagaaacaaaactgaacttccttaagtcatacaaacgcccaatcccaagcatttacagtgcagtcttacaagaacttttggtgcagcaacacctgatgagatacaaaaaaacctatcagtatgatgctgtgtttgctcttggcttcgtcactgtctatgatcagctcatggaagggtaccccagcaatgaggacaaggattccatcttcaaggcatatataacagcattaaatgaagatcctgatcaatacagagctgatgcactaaagatggaagagtgggcacgttcccagaacggtagttccttagttgatttttcttccagagatggagaaatcgaggctattctgaaagatatatcagaaagggccaagggtaagggaaacttcagctacagccgattctttgcagttggcttgttccgtttgcttgagcttgcaaatgcaacagaaccaacagtactagacaagctttgcgctgcgctaaacatcaataaaagaagtgtggatagggaccttgatgtttaccgcaacatactctcaaagctggttcaagccaaggaacttctcaaggaatacgtggatagggaaaagaagaagagagaagaaagatcagaaaccccaaagccaaatgaagctgtcacaaaatttgatggaaatctttattccataaggcattagatcaaccctttgcagaggagagtttcccagtataacagaattacgtgttgagaaactaccaaatgatctcctttcaccacagacatcttttgctgctcgtcttgtggtgtagcattcttgcggtacaaaaggatccagatcattcatactattggacagatatttgtattttctcatgagtcttcaaatcaaatgtatttattttctgtcagtctgaaagtatatgaagcggtgtgtagggttaatgttactcataagcagagaaatatagttttctcttttgtactttgtggagatactttacgagcctgtgttcacttacatgtttttgcaaccatgaaatcagttgatggg

SEQ ID NO: 265449 - DNA, 608 bp, Zea mays
ttgttagcatctgggccgacatcgcaggtggcgggggaccggaaagaagaagatcctttccacccatggcgtgcactaaacgtcagtacaagaagtgtggattggccttatgatgagaaggacagtcttgctcaaagcaggctagccaaggaacttctcaaggaatacgtggatagggaaaagaagaagagagaagaaagatcggaagccccgaagccgaacgaagctgtcacaaaatttgatggaaacctttattccacaaggcattagaatcagccctttgcagaggagagtttcccaggataacagaattaacagtaacatctggaccgtgttgagaaaccaccaaatgttcccctttcatcacagacgtctttggctgctcgtcttgtgatgtagcattctgccgtacaaaaggatccagattattcttactactggacagatatttgtattttctcatatgtcttgaaatcaaatgtatacattttctgtgtgtaggggtcaatgttactcaagcagagaaatatagttttctcttttgtatttaaattcaggtaatttgggaggccgtgttcacttatatataatatagtgtggcaaccatg

SEQ ID NO: 265450 - DNA, 831 bp, Zea mays
ccgcaagcaaatcctcctatctccaagcctccaatctgtgaacggtgaaccccaatcgaatgacgccgacggcgagcctcctcctcccggctcccccattcgtctctatctccgatgtgcgccgcctccagctccccccgcgcggcggccaccggcctcgcccctgctggaagggcttggagtgcggctccgtacagacgcggatggtctcttctttcgttgggagcagaacacgccgcagaaacgttatatgtgcttccctgttcggagttggagctcccgaagcactggtcattggagtagtcgccttgttggtgttcggccccaagggtctagcagaggtagccaggaatttggggaagactttgcgtgctttccaaccaaccattagagagctacaggatgtatcaagggagttcaggagcactcttgaacgagaaatcggaattgatgaggtttcccaatcaacgaactataggcccacaaccatgaataacaaccaacaacctgctgccgacccaaatgtcaagcctgaaccagcaccttatactagcgaggaactaatgaaagtaactgaagaacaaattgctgcatcagctgctgctgcttggaatccacaacagcctgccacgtcgcaacagcaagaagaagcgtcctcacttcttggagtagtgggcgcttcttcttgctgttgactgcaagagcctttcctcgcactcgcccctctgcatttaccacattgccctcgtcggcggcgcgaccagctgccgccgcgtccagcaaaacaaccggccgtagtccaaaatagttccccatggcgtccatatcgtc

SEQ ID NO: 265451 - DNA, 430 bp, Zea mays
ccgcaagcaaatcctcctatctccaagcctccaatctgtgaacggtgaaccccaatcgaatgacgccgacgggagcctcctcctcccggctcccccattcgtctctatctccgatgtgcggctccgtacagacgcggatggtctcttctttcgttgggagcagaacacgccgcagaaacgttatatgtgcttccctgttcggagttggagctcccgaagcactggtcattggagtagtcgccttgttggtgttcggccccaagggtctagcagaggtaaattacctgcgtctacaagccttgtcagctttctgttcttgccttcttggggctattcactcgttaagtcgttaatgtgcttgggtggtgctagtaattgagaacactgatcgacaagattgacctataggtatggtatggaatttcaatcc

SEQ ID NO: 265452 - DNA, 695 bp, Zea mays
attcgcttcagccttcaggcccatcagcttatccattctctccctcacgagtcacgaatgaatagtacacggcgctcgctccctcctcgagagcgtgtatgcgcagctgcagctcggcaaggcagatgttgctgactcgtctgtccagcgtttcttgctcgtcaacagcgcagcagttgcatgcgggcgtcggcaagttcgccgccgccgcatgctggagctggaagaagaagcgcgaggagctcccctgcttcagggccagactggccgccaagccgccgcgcgcctcaccggcgaagggcggcattgtcccggccagcgacgatgacgacggcgttagcctcggcaccgtgaagctgccgggcaacatcgacaccgctcggttggagtccttgctcttccagtgggggaacagcctctgccaaggcgccaacctgccacttccggtgcctctcaaggtggacaaggttgagggcgggatcaggctagggttcgtcgcggtcgaggacggcgcgacgcggacgctggtgtacatcgattgcctggtctctccggccccggatggctctggtccggtgttccgagcgatcaggaacggtcctatgaaggacagggagccacctggggagcccaggatcatgaaaagcctccttcaggctctttaaaagtctattcagatcgctcgtgtttgaccg

SEQ ID NO: 265453 - DNA, 990 bp, Zea mays
atccaatgtttgtaagttaccagacatcaaaaagtgaagtaatatatttatctgaagaagcaactgaccctagtaaataccttgatggtactcgggtgtatgtgcaaggatcaatgtgggatggttttgcgaatggtaaaggggacttcactgatggtccatatgagattcagtatccagagagttttttcaaggacagcttctacaaatatgggttcaaccctgaagttgggtctgtaggggttccagttgccgcaacaattagggccacaatgcctccagtaggatggagcattccgattttaaagaaaagaattgatgggtacatcgaagaagtaccaaatccaatatgggactaccacaagtatattccatactcaaaaccagggaaggtccatgatcagattgaactatatggagccccaaaagacctggatgatttttgtgaaaaggcacagctggtgaactatgttcagtacagagcacttttggaaggatggacttccttcatgtggacaaagtttacaggtgtcctaatttggaaaacgcagaatccttggactggactaaggggccaattctatgatcacctccaagaccaaacggctgggttttatggttgccgttgtgctgctcaacctattcatgtccaactgaatttggccacctattttgtggaggtggtaaacactacagctgatgaactcaaagacatggctgtcgagatttcagtgtgggatctagatggtgcatgcccctattacaaagttaccgagaaaatagttataccgccaaagaaagtgaagcaaattatcgagatgaaatacccaaagatgaaagatgccaagcctgtgtattttctgctcctcaagctcttcaggctgtcagacaatggaacaatctccagaaacttctactggttacaccttcctgggcaggactacaaatcgctggagcagtatcagcagaaaaagattcaataaaaattga

SEQ ID NO: 265454 - DNA, 1329 bp, Zea mays
cccacgcgtccggagagacagagagagagactgccaacgaggcgaagcagccggccaatctagcatcagcgcgcggggtctgagagcagagcggcagggcgccatggcggcatcggtggcgctgagcagcgggcaccggatgccggcggtggggctgggcgtgtggcggatggagaaggcggacatccgcggcctcatccacacagcgctccgcgtcggctaccgccacctggactgcgccgctgactaccagaacgaagctgaagttggtgacgcgctcgcagaggcattccagaccggactcgtcaagcgggaggacctgttcatcacaaccaagctgtggaactcagaccatgggcatgtgcttgaagcctgcaaggacagcctgaagaagctgcagctagactatctcgacctctacctcatccatttcccagtagccactcggcacaccggagtcggcacgacttctagcgctctgggtgacgatggcgtgctggacatcgacaccactatctccctggaaacgacatggcacgcgatggaagagcttgtttccatggggctggtgcgcagcattggaatcagcaactacgacatcttcctcaccagagactgcctggcctacgccaagataaagccggcggtgaaccagatcgagacgcacccctacttccagcgcgactctcttgtcaagttctgccagaagcacgggatctgcgtgaccgcgcacaccccgctgggtggctccaccgccaacgccgagtggttcgggacggtctcgtgcctggacgaccctgtcatcaagagcttggctgagaagtacggcaagacgccggcgcagctcgtcctccgctggggtctgcagcgggacacggtggtgatccccaagacctccaaggcggagaggctgcaggagaactttgacgtcttcggttttgacatctccggcgaggacatggagaggatgaaggccgtcgaccggaagtaccggactaaccagcctgccaagttctggggcatcgacctctatgcttagcttttagttcggttgcgttgcgtcgcgtcgcgtgctgcgtctctcggcacccccagacaagacagcatcaataatgaggattccctcagacggcatcagtcaaagtcacgaggatctcagacagcatcttccatcacatgtgacggtgtgaggttgatggtagggtttggtatccccacgtgtccctctctctttcagctcagcttcatcaccatgtagactacgcagtgtttgcctccgattatttactgtttttcttccttacaaacaaaaaaaaaaaaaaaatactc

SEQ ID NO: 265455 - DNA, 529 bp, Zea mays
ctggagcactctcatagccaataaaaatacagagctgcagcgcctggttggcatttacaggaatattttaaacaatgcaggagtcactctgatcgaaggtcgtggaaagatagtcgatcctcatactgtcagtgtgaatggtaagctctacactgctaagcacatactagttagtgttggtggccgaccatcgatgccagatatccctggtatagagcatgtcatagattcggatgctgcgctggatttgccttcaaaacctgagaaaattgcaatagtgggaggtgggtatattgctttggagtttgctggcattttcaatggcttaaagagtgaagtccatgtgtttattcgtcagaagaaagttttaagaggatttgatgaagaggttagagattttgtcgctgaacaaatgtctttaaggggcatcacgtttcatacagaacagagccctcaagctataactaaatcaaatgatggtctggtatctttgaagaccaataaagaaaatttttgtgggttctcacat

SEQ ID NO: 265456 - DNA, 1052 bp, Zea mays
  unsure (1)..(1052): unsure at all n locations
tntngaccgtaaggcaaacatttgcaggaattttatttcaacgtacaagacacaggaaaatagctcggcggacaggtatgtacagccaattctattaaacagcatcgttggttccctaacatgaaatttctcagaaattcctagccgttatttcagctactctgccggtgtattccaaaattccgtccagctgtcgtcctgcagcaggaatactccctcccccgagaacacctcctaggaaaaaatggtatctactgcttacttacaacctcatctttagattctacctgatctgtagaactttttcgaatttttctagtcgggctcctcattgtgacgaattcctcagcgggtgtggggtgaatgccaatggtggcatcaaaatcttgcttcgtcaatccagctttaacagcaattgcaattccctgaattatctcaggtgcatcatcaccacacatgtgcactcctacaactttgtttgacgtagcgcacacaagaatcttcatcaatacacggtcaggtagtccagacagagtggccttgaggggcctgaagttggcagcgaagacatcaacatctccatactctgcaattgcctgctcctcagtaaggccagcttgtcctattggtggttgggagaacacagcagaaggtgtagctctgtaatctggtttggtaggttcattgccaaagacagttttcgcaaatgccccaccctccatcagtgcaactggtgtcaggttgaccctattggtaacatctccaacagcccaaatggaatcaactgaggtacgtgaatactcatcaaccactattgcaccgttcttatccatttcaacccccaccgcttccagtccaaggttctttgaatttggtctgcgacctgttgcaaacattacatgtgagaacccaccaaaattttcaatggcttaaagagtgaagtccatgtgtttattcgtcagaagaaagttttaagaggatttgatgaagaggttagagattttgtcgctgaacaaatgtctttaaggggcatcacgtttcatacagaacag

SEQ ID NO: 265457 - DNA, 332 bp, Zea mays
gcctggggaaggcggcgatcagcccccacctgcaacccccacagcggtaagtggcggtgaggagaaggggcttgaggcatctagtagcaagggagagcgcgtgaggatcaggatctatctagtgttgtttatgaaaattgtattctgggcttctcgagttagcagttcatatccttttaaccgcatcgcggtttcaggccatgtaccgatattgtttgtagtttgtaccgggagtaacatatttggttgagcttctacgtattgaagaaacaacttatctgtgaagctgatgtgaacaaattctatttattatctatttttagtttgttctg

SEQ ID NO: 265458 - DNA, 854 bp, Zea mays
gcgacgctccctatccatagcgcccgctcatcagcccacgcggccacgccgaagtatggcgctctccgtctcctccctcgccgccgccctctcccacctctccctcccatcgacctccacccccaagcctcaccaggccccgctcctgcgcctgcgctccacctaccgccgcgctgttagcctcgcgctccgcgcctccgcagccgaagcgtttgaggcggacctgcccgccgaggaggtgatggctgtcgaggaggaggcggaggaggatgcgctgtcgggaatcgcgctgcgaaagtatgtgaagcagcggctgccgggcgggttcgcggcgcagcggatcaccgccacgggccgtcgcaagacggccatcgcccgcgtcgtgctccaggagggcaccggcaaggtcttcatcaacttccgcgacgctaaggagtatctgcagggaaatccaatgtggatggagtactgcaaggtacccttgatgactctagggtttgagaagaactatgacgtctttgtgaaagtacacgggggtggtctctcaggccaggcccaggcaatttgccttggtgttgcccgtgcgctggtgaagatcagcaatgccaacagggttcctctgaagtcggaaggtttgctgacaagggacacccgtatcgttgaaaggaagaaggctggtctcaagaaggcacgcaagcggccccagttctcaaagcgttgaggacgttcacttgttgcattgccacttccagaggcccctttttttttctgtcaactgctgtgcaaaatctgtaatggacacgatatatctgtagtgtgttaagcctgaagcaaatttcatgaggtggctatct

SEQ ID NO: 265459 - DNA, 598 bp, Zea mays
gacgaggccagccacgcgcaaaccgaatccaccaacgtcaaacgaccgcaccaaccaatccacttcgccggcgatccgtctcatctcgtcgcgtctccggcgccggcagacacgggtaacgcggctccgagatcggcgggcaggatgatgatgctgatcgattgctcggggtgccgtaccccgttgcagctgccgcacggggcgccctgcatccgatgcgccatctgtggggccgtcacgcacatcgcccccgcccctcccgccgagcccaaccgcggcgccgtacagccgccgccggggtgggcgccgccgccgccgccggtgcacgggcgaaagcgagccgtggtgtgcgggatctcgtatcggcactcgcggtatgagctgaagggctgcatcaacgacgccaagtgcatgcgccacctcctcatgacgcgcttcaacttccccgacgactccatcattatgctcaacgaagaacaaaccgacccctacaaaatcccaacaaagcataacatagggatggccatgtattggcttgtgcaaggttgtcaacctggagactcattggtgttccattattctgggcatggagcacagc

SEQ ID NO: 265460 - DNA, 898 bp, Zea mays
  unsure (1)..(898): unsure at all n locations
tgttttcccacgcgtccgcggacgcgtgggcagatgcggccggaaggaggcagccagtggcggaggtggcaggcatggctggaataggcaggtggtgctggaggcagcagacaggaggctggcggcggtcaaggtggtagggaggaagtaggcgcctgagagcagaggaaggtgcgacagggcacagagcggatggataagctgggaaggtataaggtgggctaggctgtttttgatggactaggctgcttttgatgggcctttctatccaaccctaggcctgtaatctcctgttttttctttccctttgaggtaatacttgcatatgcttgcctatttgtgaaacacctaggcttgcctcgcctaagctttaggctgaaggtcactgcctagcacctaatgtaacattgttatttagttagcgctcttttttgtcggttcacttggtgtttgtggactgtaaggatggtatcatattaactaggcagtagaatgatagatggaggatatctgagttagtttgacctctgcgctgtaatgttatttttagaaggtaaggaaaccaacagggctaatttcaattatataacatggtgtcattgaaattcaatttattgcgctctaaatttgtaataaagcgattttagtttgtttcttatcgcagttctcctgcgtacttgaggaaaaaggaacttgtcaggataaattgtccacaaatggttcctgcttctgcagtttccactaattagcagtaagtagtttattctataattgcattgaagcttgaacattgantttggttgggcatgcagtaagtagcttacaagaacatggcttagttgggatactgaaatgcttcatcaatagctctaaacctgccacaaattacttgacattc

SEQ ID NO: 265461 - DNA, 436 bp, Zea mays
actgtgtccagcacaagagagagaagaggagtggaggaggtgggagcagcaagaatggcgtgctccaccaatctctgcttctcggcgttgattcctcctcttccagcctcttcttcttctggctcctcccccttcctcacgatgaagcgtgtgtcctctgttccgtcgttgtccaggtggacaatccgatacaagcaattgggacatgcattatatcagagaagccacgttctggcctttgctagtgcagatgcatcacaaggcaaaagaagctcaggtgagaatgttgtgatggttgatccactggaagctaagcgtctagctgctaaacaaatgcaagaaattagggccaaagaaaagctgaaggtgcattgctgctgtattggagtgtatcattccttagattaaatcaatcttatatgctaaaggaagaaaa

SEQ ID NO: 265462 - DNA, 558 bp, Zea mays
  unsure (1)..(558): unsure at all n locations
gcgtgctccaccggtctctgcttcttggcgtcgattcctcctctctcagcctcttgttcttcgggctcctcctgcttcctcatgatcaagcgtgtgtcctctgctccgtccttgtccagatggacgatccaatacaagcaattgggacatacaatatatcggagaagccacggtctggcctttgctagtgcagatgcaccacaaggcaaaagaagctcaggtgagaatgttgtgatggttgatccactggaagctaagcgcctagctgctaaacaaatgcaagaaattagggccaaagaaaagctgaagaggcgccgtcaagcagaagcgatcaacggggcattggcagtgataggactcacggctggattgctagtggaggctcagacaggaaaggacatcttanggcagctagctggatatctgacggctatttctagtttatttgggcaataacactggaccatggttggagatttatttttcacgttccacggccaggagaggtcttatctgaatcttatttgatggatccacctcaattttttgggagctgat

SEQ ID NO: 265463 - DNA, 802 bp, Zea mays
  unsure (1)..(802): unsure at all n locations
ataggttcctgctggagtggattctggaagcaggctgagggtccgatctgagggtaatgctggccggcgaggaggccttcctggggacctttatgtcttcattgatgttctctctgatcctgttcttaagcgagatgggacaaacattctctacacatgcaaggtttcttacattgatgcaatccttgggacaaccgtcaaagtccccactgttgatggaacggttgaccttaagataccctcagggactcagccaggcacaactctggtgatgtccaagaaaggtgtcccgcttctcgggaagtcaaatgcccgtggagaccagctggtgcgtgtccaggttgagattccgaagcgtctgagcagcgacgagaagaagctaattgaggagcttgcaaacctgaacaaggctcaaacagccaatagcaggagatgattgtcgcacaaggcttcgtaggacagcgcgcttgtgtggtaggcaattttgatgcaaactgcagtgatgattggatgaaaagagttggtagtgataaactcttctacgaactacatacagcaaggggtacactggagcaaaaacatgtgccgttcccacatctgtaacctcgtttttaagctattgaaagttgagtcagtgaactggacgtttttgcaatagcttagcatatgcactaggcgactttattagccatttttttttgttgttatacggcttttgtattcttggaagccttangcaagatatctgatggtggaatcaggtttagacttgacatttcttgcacaaatgctgcaccatgca

SEQ ID NO: 265464 - DNA, 576 bp, Zea mays
agagtacgcacacgcgtccgcggacggtggggcagctgggcgtgcacttaacacaacaagggcagctattgaggaaggtgttgtagttggtggtggatgtagcctactaagactgtcagagaagattgacgcgatcaaggaatcatcgttggataatatagagcaggaggttggtgctgacatcttcaaacaagccttgagttaccctacctcactaatagcaaaaaatgcaggggtgaatggcgactttgtcattaaaaaggtgttactgaatgatgatgcaaattatggttacaatgctgccaagaactgctatgaggacttgatggctgctggaatactggacgcaacaaaggttgtgaggtgttgcattgagcatgctgctgtagttgctaagtcctttctcacctctgatgtggtgattgttgaggcaaaagaaggcaaacctattcgaataagacccccaatgcctcctaggcacttaattcccccaatgcctgcttcaatttcaggtattcgagtgtagcagtcgtcctttccaccaagaatcagcctcaacacaacaagactacgggg

SEQ ID NO: 265465 - DNA, 1373 bp, Zea mays
  unsure (1)..(1373): unsure at all n locations
ggtccacgacgcgtccgaaaagaacagaggttgctgaagacttagtgctcganaaaaaaaccttgcccccggggtgttccggtgaatggttttggatccaagcccgaaggcctaatccaaaatgggttcttaagcattccgaattggaatgggcctcccccgaaaaggtggaaaaaaagcaatgagatcgaacacagtaattacataaggttataactggcgcatttcctgacaacgtgggtcaaaaacttattggccttgttacaagtagagatgaaatcgctgatttactaaagcttgatgatgtcattgatcttgtcattccaagaggcagcaataagctggtttcgcaaatcaaggcatcaactaagatacctgtcctcggtcatgcggatggtatttgtcatgtatacattgacaaatcagctgacatgaatatggcaaaacgaatagtgatggatgccaaaactgattacccagcagcctgcaatgctatggagacattgcttgttcataaagaccttataaaggctccaggtcttgatgatatactcctatcactcaaaacagaaggagttgctatttatggagggcctgttgcacatgaagtactgtgtattccgaaagcagattcattccatcatgaatatagctctatggcctgcacaattgagttcgttgatgatgtacagtcagcaattaaccatatacatcgttatggaagtgcacatacagattgcattatcaccacagatgataaagtagcagaaacttttctgcgtcaagttgatagtgctgctgtatttcataatgcgagtacacgattctctgatggggctcgttttggattgggtgccgaggttggcataagcacagggcgtatacatgctcgcgggcctgtgggtgttgaaggtctcttaacaacacgctggatcatgcgaggaagtgggcaagtggtgaatggtgacaagaatgttgcatacacccataagaaccttcccttacaatgaggctgtttttgtgcttgatcaggattcgtgtctatccagtgatgtttgatagtttcatcaggcaggagcatagaatggtgaatcttttcgattgaggactgtgaatccatggatgttcagtcattgtttgtgtagacattgtggtgagcttggaggccaccccacctccccaataaagcagtgctgggagtaatagagcactgatgtactgagggtgcctaggttaaacaagaggaaccggttatatttgttttgcggtcgaacacaaacaatttttgttggtgacttgtttcttatgattctacatatttcaaggtttatgtgctgtcctaaccgtggtctttgataccggttattttggat

SEQ ID NO: 265466 - DNA, 394 bp, Zea mays
caatgatatcgcatacacccataagaaccttccattgccatgaggccgtttttgtgcttcatcaggattcgtgtctatccagtcatgtttgatagtgtcgtcagacaggagcagagagtggtgaatcttttcgatgagggacggtgaactgcaatgtccacttatccagtcatttttatctagaacattctggtgagacacccaccaccccgataaagcagtgctgggagtagtagagcactaatgtaccgaggctgtgtctagtctaggttaaacaagagaattcggttatattgttaatttttttgggtctgattgaacatatatgttgtcagtttttgtagtgatacatatatttctttaaatccgacttgttggcaagagttatgagctc

SEQ ID NO: 265467 - DNA, 464 bp, Zea mays
cttcgacaacgtcggccgctggctccattagctcaacacacattccgacacgacggtggccaagatgctggtgggcaacaagtgtgacctgggcgacatccgccaggtgcccgtggaggaaggcaaggcgctggccgaggccgagggcctcttcttcatggagacgtcggccctggacgccaccaacgtgaggacggccttcgagatcgtgatcagggagatctacagcaacgtgagccgcaaggtcctgaactcggactcgtacaaggccgagctgtccctcaacagggtgagcatcgacggcgactcaaaagacgagcagaagcaggggagccggttcgggtgctgctagaagtggtcggggggtagcggtacattattggatcgggttggatttgaaccggagatgatgctctgtcattttttttgggcggcgggtgggggctcgcttgtaactgtataca

SEQ ID NO: 265468 - DNA, 1451 bp, Zea mays
ctcgagccgattcggctcgaggttctgctctgccgccgccgccgctgccgctcccgctgccgcaggaaccctagaccacgctgagcaacccccggcctacacggcgtagctttgcaggaaatggaatacggcgccgtcctcgccgccgcgccgctcgtcgcacggccgaactggctcctcctctcgccgccgccactggcgccgtctattcagattcagaatcgtctttattcgatctcgtcattcccactaaaggctggacctgtaagggcatgcagagctttagcaagcaactacacgcaaacatctgaaacagttgatttggactgggagaacctgggttttgggattgtgcaaactgattatatgtatattgctaagtgcgggacagacgggaatttttctgagggtgaaatggtgccttttggacctatagcgctgagtccatcttctggagtcctaaattatggacagggattgtttgagggcctaaaggcgtataagaaaactgatggatccatcctattatttcgcccagaggaaaatgctgagaggatgcggacaggtgctgagaggatgtgcatgcctgcaccctctgtcgagcagtttattgatgcagtaaaacaaaccgttcttgcaaataagagatggattcctcctactggtaaaggttctctgtatattaggcccttacttatgggaagtggggctgttcttggtcttgcacctgctcctgagtatacattcattatatttgtctctcctgttggaaactactttaaggaaggtttagcaccaataaatttgatagttgaagacaagttccatcgtgctactcctggtggtactgggggtgtgaagaccataggaaattatgcttcggtgttgatggcacagaaaattgcaaaggaaaagggttattctgatgtcctctacttggacgctgttcacaagaagtaccttgaagaagtttcttcatgcaatgtttttgttgtcaaggacaatgttatttctaccccagcaataaaaggaacaatattacctggtatcacaaggaaaagtataattgacgttgctttgagtaaaggcttccaggttgaggagcggcttgtttcagtggatgaactgcttgatgctgatgaggtattctgcacaggaactgctgttgtggtgtctcctgttgggagcattacatatcaagggaaaagagtggaatacggccaccaaggtgttggcgttgtgtcccagcagctgtacacttcactgacgagtcttcagatgggtcaaaccgaggattggatgggctggactgtgcaactgaattagttggccgtggttcgtggatcattcccaacagatgatgggttcgcaagatccaaatctggaggatcacaaccatgtgtacctcttcggttacaattttgtatggtcttatgcaatggcgtcctgct

SEQ ID NO: 265469 - DNA, 1014 bp, Zea mays
ttccacgcgtccgtctgcatccgttccccgccctctcgcgcatccaccgccaccgcgccgctccatgaaggacccgttcgaggcggccgtcgaggagcaggactcgccgccggactcgccggcgccgcccgaggaggaacccggcgccgcgggccccgcggacgacgccgaggactacgacggcggcccgcccccgcgccagccgtcggcgccggcgtcgcacgcagcatcggccgcggccaaggccaagggccgggtccagagggagcagcaggaggatgacgacgacgacgaggaccagatggaggttgacctcgagaagcttcccagcagcactggcgaccctgacaagctcgccaagatgaatgctatactgtcccagtttacacaacagcagatgaaccgttatgagtcattccgaagatccggatttcagaaatctaacatgaaaaggctattggcaagcatcactggaagtcaaaagatttctatccctccatcaattgtggtatcaggaatagcaaaaatatttgttggtgagctaattgaaacagcaagagtagtcatgagtgagaggaaggattcaggacccatcatgccttgtcacatcagggaggcatacagaagattgaagcttgaagggaagatcccacggcgctctgttcctacgctcttccgctagaactgacacacatcatgcaggagtcgcgacatatgtgggacaatcgttttccacgtaactgcggacctcgtcatacgtaccatgggaattgaaaacctgtgtactgtaaagttagccccccgttttgacttcatactagccgctgatgcgctgaataacaggtggtggctcctgtcacgagctagatgtcttgaaatgggtttggggaatgatttagcaagaacaaggttaggattacagggtcgggcatgcggctgggacctgcgagacgaggatctattccaaatgcagtttgttagaatttacttacctgcttaagcctgttttcggtg

SEQ ID NO: 265470 - DNA, 2009 bp, Zea mays
ccctcgcgtccgcgtccttgccccacggaacaaggaaaagggtatatgctcccgcagccctcgtggaaaccaagggcggaccttcccctcctccaagcaaatccgaggcccacccacgggccgctcgaacatctgtcaccgccaagtggccccaccccacccctcccctccgctgccccttcttctacaaataccccggccggccgcggccgttcccgaatcgagcggtgactggcgaggcaaaagcattgcgaccacagacagcgcgcgcttcaaggccttttttttttgagataacaaggaggagaggaggagatggcggtcacgatcacgtgggtgaaggcgaggcagatcttcgacagccgcggcaaccccaccgtcgaggtggacgtgggcctcagcgacggcagctacgcgaggggggccgtacccagcggcgcatccactggaatatatgaggccttggagttgagggatggaggatctgattatcttggcaagggtgttcttaaggctgtcagcaatgtaaataacattattggaccagcaattgttggaaaggaccccactgagcaggttgagattgacaacttcatggtccaacagcttgatggaacctccaatgagtggggctggtgcaaacagaagcttggagcaaatgccatccttgcggtttcacttgctgtgtgcaaagctggagctatggtgaagaagattcctctttaccagcacatcgcaaatcttgctgggaacaaaactctggtgctccctgtacctgcctttaatgtgattaatggagggtcacatgctggaaacaagcttgccatgcaggagttcatgatcctcccaactggtgcctcctcgttcaaggaggccatgaagatgggagttgaggtgtaccacaacctgaagagcataatcaagaagaagtacggtcaggatgcgacaaacgttggggatgaaggtggttttgcacctaacattcaggaaaacaaagaaggccttgaactattgaaggcagccatagaaaaggctggctacactggaaaggtggtcattggaatggatgttgctgcttctgagttcttcggtgagaaagacaagacttatgatcttaatttcaaggaggagaacaacgatggctcaaacaaaatttcaggcgacagcctgaaagacctgtacaagtcctttgtttctgagtaccctatcgagtcgatcgaagacccatttgatcaggatgactggagcacttatgccaaactcactgatgagattggacagaaagtgcagattgtaggagatgatcttctcgttaccaaccccaccagggtcgccaaggccatcaatgagaagacctgcaatgctctcctcttgaaggtgaaccaaatcgggtctgtgaccgagagtatcgaagctgtcaggatgtccaagcgcgccggatggggagtgatggcaagccacaggagtggcgagacagaggacaccttcattgctgacctctcagttggcctgtctacgggccaaatcaagacgggagctccttgccggtctgagcgcctggccaaatacaaccagctgctcaggatcgaggaagagctcggtgatgccgcggtctacgccggagcaaagttcagggcaccagtggagccctactaagaaaggaagaggatggggatgttttcttgtggagctatactagctcgctgctgccttttgttacaatgtttgtacggtcgcaataaatgtatggtcgtgtttgctcgagagctactcaggtgattttgtcgtgggagcaccaaaagcagaaaagaactgtttttttcttctctctctctagattctgacgagtggtggtctgcactcgtcgtaatgtcgtttgcctaaactgattttgatggaacaggaaatcttgctggtcttgccaaaaaaaaaaaaaaaaaaaaaaaaaaaaaaaaaaaaaataaaaaaaaaaaaaaaaaaaaaaaaaaaaagggcggctgctctggaat

SEQ ID NO: 265471 - DNA, 1708 bp, Zea mays
ccttttcttgttatagcgcgcaaccggcgaatttcgaatccttgcttgtcaaaattgcaccattttcttctttttttaaaaaaacgaaacaaggcaaaaaaaagaaggccaatctgtgcacggttaccggcgaccgaattgctgagttttttttttaatctttgctgcttgctgctaggcgaggagcatctggaagagcatgtcgttccagatgtcgatgggtcccgggaggcaccagtggatgcagtcgttgtagagctgcaccttctcgttgggccagtgcccgtagcggctggggtggccgtcgggccgcatcagcatcgccgccgtggcgtccatgagcatcagccgccgccccttctcggcggcggccttctccgcggcgcggaactcctccatctgcgcggtgtagaagtgcaggtcgcggccctccatggcggtctggttcgcccgcagcggctgcgtgcgcctgcagtcgccgccgtggtcccaggtcccgttctcgaagtgcgacatcggggagagcatgcgcacgatgacgcgccctcgcaggcgctccaggtcgttgatggcgcgcagcgccacgcgccacgcgcggcgctgcgagtagtagagcgtcaggtcgggcacgccgtactggcggctgcagaagctgcacccgacgaggcgccgccgctcgtagaagagggaggggcgggagaaccagttggccgccgacaccagcacgtagtcgaagcggggcatctgggacacccacttgtcgtcgggctcgtccaggtagaggctccagtggcccgtgtgcgcggggccgtcgtggtcgggctcccgggcgcgcaccaggaacggcgaccagaacatgctgatggtgaagttgtacgcccggtagtggtacaccttgttctggtccgacgggttcgccgacaggtccttgggatacgccacctgggacaggaggcagagcagcgactgcatgtggttccgcgccagcgagtccccgacgaaggccagcgacttcccgcgggcgaactgcaggaactgcagcgggtcgaagcgcggcagctcgcatccggagggccgccaccgccacttgaggaagcccaggtcggggcggccgtacttgaggcagttctggtgctcctggatcatgtggcacgtcttgtggttgtagtagggcgcctccgcgtccggcacccactcgccgcggaagatgtcgcagtacttcatgacgctgaccacgggcgccgaggaggccagcttcgcggtgcgcggcgccacgccgacgcccaccagcccgaagtactgcgcgttggtgagcacgatgaggatggccagcgccgagaagtagaccggcaccggcccgaacaggaaccgcaccagccagtggagcttcttcatcctaccggccttctgccgccgccgcctcgagcggcagacctccgattcaactccccacaccgtacctagctggctacctagcaatctctcacccgcgcggctagcaattcatgcccaagtcgagcgtcggctagtaagacgacgacggcctccggcgctggtggccgggctcaccgctctcgctcgctcgctgtgtgctgtccagctagtgctatccatccatgccgaaaccccttttgctgctcttgaataagccggtggccgcgtgaaggcagggagtaggtgcgcggccggtttcaagaatactgccaag

SEQ ID NO: 265472 - DNA, 705 bp, Zea mays
cccacgcgtccgcccacgcgtccgcccgttgcctccaaactcatttctcccgagcgccgccgcgagcctctgttccagcttcgttcatggcttccctcaccggatccgctctctcctttgcgaggcccgtcaaggcaatcagcattaagtctgtctctttctctggtctaaggaaggataatgtagccttccgcttgcagccagtgccacaaagattcgctgtctgctgtcctgctaaaaaggagactgtggatcgggtttgtgatattgtcaagaagcagcttgcacttcctgagggcactgaggtctgtggctcctctaagtttcaagacctcggtgctgattcgttggacactgttgagattgttatgggccttgaggaggctttcaagatcactgtagaggagtcgagcgcgcagtcaatcgcaactgtggaagatgctgctaatctcatcgacgaacttgttgcaggagcagcaaaatcgtgttaaactcgtggtcgtattgcgttgggtgctgtaccagggcatcacttgttgttctatgcccccttccctactagattttcttttctaccctgggcctggagagatgtttctgtcatgactgtcattgtggatctcgcgatattgttatattgaagcttttgtgcttgttcaagaaaagaaaatgttgttgcgatatatatgttattatattgaaaaa

SEQ ID NO: 265473 - DNA, 531 bp, Zea mays
  unsure (1)..(531): unsure at all n locations
cccacgcgtccgcccacgcgtccgcccacgcgtccgcccacgcgtccgctcagttggcgtgtctacgggccaaatcaagacgggagctccttgccggtctgagcgcctggccaaatacaaccagctgctcaggatcgaggaagagctcggtgatcccgcggtctccgccggagcaaagttcagggcaccagtggagccctactaagaaaggaagaggatggggatgttttcttgtggagctatactagctcgctgctgccttttgttacaatgtttgtacggtcccaataaatgtatggtcgtgtttgctcgagagctactcaggtgattttgtcgtgggagccccaaaagcagaaaagacctgtttttttcttctctctctctagattctcacgagtggtggtttgcactggttgaaatgtcgtttgcataacccgattttgatggnccgggtnttcaaaaaaacncatgccgtaaaaattttaaaaaaaaaaaaaaaaaaaaagggcggccgcccgggaatncggacgg

SEQ ID NO: 265474 - DNA, 675 bp, Zea mays
agcggacccttgggggcaacccacaggattggcaaaacaaaggaaacctcaattgcgaactcccaatttggccgtccaacggcccaatccaaaacggaacccctttgccgtcctaacccccggccaaattacaacaactggcccaggttcaaggaggacctcgttaatcccccggtccaccccggaccaaatttcagggcaccagtggacccctactaaaaaaggaagaggatgaggatgttttcttgtggagctatactagctcgctgctgccttttgttacaatgtttgtacggtcgcaataaatgtatggtcgtgtttgctcgagagctactcaggtgattttgtcgtgggagcaccaaaagcagaaaagaactgtttttttttcaatctctctagattctgacgactccctggtctgcactcgttgtaccgtcgtttgcctaaactgattttgatggaacaggtaatcttgctggtcttgccatatgcgtgcgagtgactttctcgttccttatgctgtgtgaggccattttcgtattcagcatgggaaattacgggttcgttttgtagccccacccagcatgggtgtaggccccccgacccgcaaaaagaaaatcttgttggttgcaaaaaaaaaaaaaaaaaaaaaaaaaaaaaaaaaagggcggccgc

SEQ ID NO: 265475 - DNA, 959 bp, Zea mays
accactcacttttcatgttgaactcttgtaaataatgataaatattggtcaagcacccagcagaccggtaccacctactgatccttgaagtgcatctcctgttgcagaatatgcatgtgcatgtcgtgcacatcgcgtcggtcgaggaaacagagcaagcaagaaacgagctttaacaacagttttttcagttcagttcaggctatattatctgcaacattgcaatatctaggcataatttcacattggatcaaagggtttctttttagagcgatgaaacagaatacgaagcatggcagcttgaaggaggccacagaacactagagtagaacaaaataaagaattagtgaagaacatcatcaagcagcagatttcaggaatatatgaggccttggagttgagggatggaggatctgattatcttggcaagggtattcttaagcttttggcttaaaatttgagaggaggagatggcggtcacgatcacgtgggtgaaggcgaggcagatcttcatcagccgcggcaaccccaccgtcgaggtggacgtgggcctcagcgacggcagctacgcgaggggggccgtacccagcggcgcatccactggaatatatgaggccttggagttgagggatgcatgttctaatagaaggcgtctcccgctccatgcattccaagattctgtcctccccctccctccccccatgttgtaggctggtagtggtcaaattagttggccctgggtccatttggactgatgtattgtttactgctattgaagtcattcgttctcgttttgctcttgcagtggatcgctatagccttgtgttttcaatcttttagggcctgtttgggaatgcagtttcaaaatactgtaattttgagataccatagtttataattgtacatgacataaatactacggtattgctttaccacaataaaactatagtattgctccc

SEQ ID NO: 265476 - DNA, 451 bp, Zea mays
acgcccacgcgtccgcccacgcgtccgcccacgcgtccgcccacgcgtacgcccacgcgtccgggcacgcgtccgcccacgcgtgcgcaagacgggagctccttgccggtctgagcgcctggccaaatacaaccagctgctcaggatcgaggaggagctcggtgatgccgcggtctacgccggagcaaagttcagggcaccagtggagccctactaagaaaggaagaggatggggatgttttcttgtggagctatactagctcgctgctgccttttgttacaatgtttgtacggtcgcaataaatgtatggtcgtgtttgctcgagagctactcaggtgattttgtcgtgggagcaccaaaagcagaaaagaactgttttttttaccaaaaaaaaaaataaaaaaaaaaaaaaaaaaaaaaatgggcggccgcgcgggaatccgggcggta

SEQ ID NO: 265477 - DNA, 558 bp, Zea mays
gcaatctctcacccgcgcggctagcaattcatgcccaagtcgagcgtcggctagtaagacgacgacggcctccggcgctggtggccgggctcaccgctctcgcccacgcgtccgcggacgcgtgggttttgttacaatgtttgtacggtcgcaataaatgtatggtcgtgtttgctcgagagctactcaggtgattttgtcgtgggagcaccaaaagcagagcggcccccctttttttttcgatctctctagattctgacgagtggtggtctgcactcgtcgtaatgtcgtttgcctaaactgattttgatggaacaggtaatcttgctggtctaaaaaaaaaaaaaaaggaaaaaaaaaaaaaaaaaaaaaaaaaaaaaaaaaaaaaaaaaaaaaaataacaaaaaattaattaaaaaaaaatggcttgaaagattacaaaaaataaatataacccgaaaataaattcaaaaccaaaacggggggccctccacaatttcccttttcacccggggattaaaaccggggcggaaccttggggaaaccccgttttccttt

SEQ ID NO: 265478 - DNA, 308 bp, Zea mays
  unsure (1)..(308): unsure at all n locations
cccacgcgtncgnccacccgtccgcggccttgtggggcaaaatcgtgttaaactcgtgggcgtattgcgttgggtgctgtacgagggcatcacttgttgttctatgcccccttccctactagattttcttttctaccctgggcctggagagatgtttctgtcatgactgtcattgtggatctcgcgatattgttatattgaagcttttgtgcttgttcaagaaaagaaaatgttgaaattgcgatagacaattaaggtatagaataccatagaagcggatctgaaggagaaaaagatgaccatcatag

SEQ ID NO: 265479 - DNA, 848 bp, Zea mays
tatatagcccagcccaattaaaaccctagactggctggcgtgctataaaagcaggtggccgccgcctttgccttgctcaccctgcccttctgtgtacgaagccgacgagcagccgacgctaaagcttggtccggtgagcttcagagaaggggcgggtacgtcaagatgcagatcttcgtgaagaccctgacgggaaagaccatcaccctcgaggtcgagagcagcgatacaatcgacaatgtcaaggccaagatccaggacaaggaaggtatcccgccggaccagcagcgactaatcttcgcggggaagcagctcgaagacggccgcaccttggccgactacaacatccagaaggagtccacccttcaccttgttcttcgccttcgcggtggcatcattgaaccctccctgcaggcgctcgcccgcaagtacaaccaggacaagatgatctgccgcaagtgctatgcacggctgcaccccagggctgttaactgccgcaagaagaagtgtggccacagcaaccagctgagggcaaagaagaagatcaagaactgaagcttgccaaatcggttccttgcatggtttgcgtcaacaagacgtagaagtttcaaagcttttgtagctgccataggctgctgcaacgtttttaagtcggaactcttgtgttcctgttcagggtcttcagcatgacataaatcgtttcagaagtctagtaatattattactataatggggtcatgtcgtatttgtggctctccctttttgtttgctggtggtgctgcagtagaaggaaacattcccgttaatttcctcaaccgcaaatttaaccctgcttaattaactcagct

SEQ ID NO: 265480 - DNA, 498 bp, Zea mays
aatcctaaattaaaatttgctgagtcgaatttagacataaggagcgctactcatatcacataatcaactcagttagagtccctttctactcatattacataaccatctcagttagagtcccttatggtatcaggaagctctttttggtcattgtcctcatgatctgccgcaaatgctatgcacgactgcaccctagggctgtcaactgccgcaagaagaagtgtggtcacagcaaccagctgagggccaagaagaagatcaagaactgaggtgctgctcctagtcagtttcatggacaatgttgggctgtattgctgtgtggttgttgaaccgtgtttgtttacccaacatttgggccttctgttatgttttaccttgttgtcgatgacactactatatgacaatagcaactctgttattgtagttttggtcactgttcacctgatatgtgccatatttcggtacaatttcaaaaaaaaaaaaaaaaaaaaaaaaaaa

SEQ ID NO: 265481 - DNA, 978 bp, Zea mays
taggccgaagagcacaaagcaaaacgcactgcccgatttgaacggcccatatcactcaacgtaaccctaaaaccgcttccgcaaccacgtataaaaacaccgcacgcgccgccgccgccgtcctattcctcggagaggagaagccgccgccgcagcaatcacagcagcccggagaacgcccaggtccgacaagatgcagatcttcgtgaagacgctgacagggaagaccatcaccctcgaggtcgagagcagcgacaccatcgacaatgtcaaggccaagatccaggacaaggaagggatcccgccggaccagcagcggctgatctttgccgggaagcagctggaggatggccgcacccttgcggactataacatccaaaaggagtctacgctccacctcgtgcttaggctccgcggtggaatcattgagccctcgctgcaggcgctcgctcgcaagtacaaccaggacaagatgatctgccgcaaatgctatgcacgactgcaccctagggctgtcaactgccgcaagaagaagtgtggtcacagcaaccagctgagggccaagaagaagatcaagaactgaggtgctgctcctagtcagtttcatggacaatgttgggctgtattgctgtgtggttgttgaacggtgtttgtttacccaacatttgggccttctgttatgttttaccttgttgtcgatgacactactatatgacaatagcaactctgttattgtagttttggtcactgttcacctgatgtgtgccatatttcggtaaagtatcgttagtgggcaaccggaactgaatcctttctacttattccattttaaattattgaacttttatttagcaaaaaaaaaaaaaaggggcgcccgccgacaagggagctcgtcgcccgggaaataaatcccggacgggaccctgcgggggacccagctttcctaatggggaggcggataagagctgggggaaacca

SEQ ID NO: 265482 - DNA, 615 bp, Zea mays
tttcgatttcacgcgcccgcggattagatccgacaagatgcagatcttcgtgatgttgcttttagggaagaccatcactcttgaggtcgagagcagcgacaccatcgacaatgtcaaggccaagatccaggacaaggaagggatcccgccggaccagcagcggctgatctttgccgggaagcagctggaggatggccgcacccttgcggactataacatccaaaaggagtctacgctccacctcgtgctcaggctccgcggtggcatcattgagccctcgctgcaggcgctcgctcgcaagtacaaccaggacaagatgatctgccgcaaatgctatgcacggctgcaccctagggctgtcaactgccgcaagaagaagtgtggtcacagcaaccagctgagggccaagaagaagatcaagaactgaggtgttgctgctagtcagtttcatggacaatgttgtttggttgttgaaccgtgtttgtttacgaactgtatttttgtttggttgttgaaccgtgtttgtttaccgaacatattggccttatgttatgttttaccatgttgtcgatgacacaatactatatgacgatagcaactatgctattgtagtta

SEQ ID NO: 265483 - DNA, 382 bp, Zea mays
cacgcgtccacccaagcgtccgcccacgcgtccgcccacgcgtccgcccacgcgtccgggccaagatccaggacaaggaaggtatcccgccggaccagcagcgactaatcttcgcggggaagcagctcgaagacggccgcaccttggccgactacaacatccagaaggagtccacccttcaccttgttcttcgccttcgcggtggcatcattgaaccttccctccaggcgctcgcccgcaagtacaaccaggacaagatgatctgccgcacgtgctatgcacggctgcaccccagggctgttaactgccgcaagaagaagtgtggccacagcaaccagatttgtatataagcaagatggtgcgagtcagctttagctgaggg

SEQ ID NO: 265484 - DNA, 384 bp, Zea mays
atggggagaagctgctctactcttagctgctggcgctaaaggtaaccgtgccgcactgccatcggggacaattatgataaaacagccaattggtcgctttcaaggtcaggcaacagacgttgacattgccagaaaagagattcgaaatgtcaagatagatatggttaagctgctggcaagacacatcggtaaaccaatggaagagattgctcgggacatcaggcgtcctaaatactttagccccagtgaagctgtggattatggcatcatcgacaaggtgatatacaacgagaaaatccacgatgattgcggcgtcgtgtcagaactcaaaagatcaaatttgatatagtgttctttttacacaagtagacacgtctatgcatg

SEQ ID NO: 265485 - DNA, 623 bp, Zea mays
tacacgaacgctacggcgtcgagcaggagcacttcaagagggaggagaaggagcataagcacaaggagcgcctcggcgaggtgggcgccctcgcgggcggcgcctttgctctgtacgaggggcaccgtgcgaagaaggacccggcgaacgcgcagaggcacaagatcgaggccggcgtggcaacggcggcggcgctgggcgccggcggctacgcgtaccacgagcaccgcgagcagaaggaggcccactacgagagcaggcagcaggagcacagggtgccgcacgggcacgggcacgggcacggctactcctactactgcgactgaaacgactgatcatcccatcgatcgagatatgcatgcagaactcgatatatatacggcccctagcgccgtacacgtgcgtgcgtgtaagtctagcgccgtacgtgcgtgcgtgtaagtaaataagagcaaacgtcgtcacgtgtgtgttgctcgatcactacttcatcgatctacttatttatcgctgcaaataacgacttagcgcatgcttttgcagcgtgtaacgatccatcactggtactatatctaatgatgcatgcatgcaattaagctatatatgatttttttatgtgtgtt

SEQ ID NO: 265486 - DNA, 583 bp, Zea mays
cggacgcgtggggaaggagcataagcacaaggagcgcctcggcgaggtgggcgccctcgcgggcggcgcctttgctctgtacgaggggcaccgtgcgaagaaggacccggcgaacgcgcagaggcacaagatcgaggccggcgtggcaacggcggcggcgctgggcgccggcggctacgcgtaccacgagcaccgcgagcagaaggaggcccactacgagagcaggcagcaggagcacagggtgccgcacgggcacgggcacgggcacggctactcctactactgcgactgaaacgactgatcatcccatcgatcgagatatgcatgcagaactcgatatatatacggcccctagcgccgtacacgtgcgtgcgtgtaagtaaataagagcaaacgtcgtcacgtgtgtgttgctcgatcactactccatcgatctacttattatcgtctgcaaataacgactaagcgcatgcttctgcagcgtgtaacgatccatcactgttactatatctaatgatgcatgcatgcaattaagctaaaaaaaaaaaaaaagggcgccgctggcgatccgctcgcgatctag

SEQ ID NO: 265487 - DNA, 528 bp, Zea mays
ggcaccctctttggttggtcaaatgaccctcagtattcattttaccctggtggcttgtgacatccacgtcaagaggctgaaaattgggatggaacttccactagttacatggctactgctactgggggatacaaagtattttcccagggaacaacttcagacatgaggggtggtatggcaggcacattgctccaacagccaataatgtcaactcatgatagatggactgatggaagcagcgattctggaaggaactgccctcaggttgacatttcgtaccgcatgtacagcctattctagcaccagggcgagaggtctgcttcctagaccctaacaacagacatgtacaagtcataccttctaacctagtagatgccaagatgatggatggtggcgaaaatggtgtcagggagtgcttcgtgtttgttgctaaagcttgtaaagatcaaacatggaggagcttcatgtacaaagactgcaggggtgggtatttggtttaacatttggtaaacagtcattctttccccc

SEQ ID NO: 265488 - DNA, 801 bp, Zea mays
gtttccttggaccagccttgttcttaacactgctgagcaaagttcgtactccagccatggctgtgttatgtatggcatgcagtcagggtagcgatgctttttcacagtctggcctgtattcaaatcaccaagacataggaccacgttatgcgggggtacttctcggactgtcaaacactgctggcgttctggcaggagtttttggtactgctgccactggctacattcttcagaaaggttcttgggatagtgtgtttaaggtgtctgttgtgttgtacatagtaggaacggtggtttggaatgtcttttcaactggagagaaaattctcgaataagctgtggacattcctatatgccactatacggaactgtgtgattttgatgatgtcattttggcaaacaaaataaattttagaagagatacatctggaagaaaactccattttatgcaagaggtgtacctgaatctgatgtttgggctatcggaagaaccagatcaaattagggtactgtgtgaggtcaagaaggtacacttggaacttgggaaaattcttgtacacaaagcaaccgcaccaagggcacgtcagatttttgcagttgtttcttgagaagtccaggcttctgtcaagatcaccaatccacatctttttgttttaaaatgattgacagttaaatcgtgtatcaccttgcctttgcttaaggcgctacaggtactgccaaactaatgtatgtgcttttcttatcgaaaaacctaaatgtatgtgcttcagatatcttgaacatctctgctgtttgcgtcaa

SEQ ID NO: 265489 - DNA, 1780 bp, Zea mays
cgctgctgcgtgcttgcggggacactccatctcctcctccagacctccacgatccggcctcccccacctctcgccggccgaggacgatccgccggcatcagagcgcgcgccccggagccgaaaagcggggggcgtcatgaagcccccggccggcgccagcggcaagggcggcgcggtggacccctctctgccgcggttcaggtgccaggagtgccgccgcgccctcgtcgtcgtcggggtcgagtcctacgccgacagactgcccgcacacgccgcgcccggtaatcatgcatcttctgttcagggcagtgttatgggtgcaagcaagatggacaactcttatgttgtgctatctagacagaacaaatctcagggtcctagaattcctccacgcccaccaagtgcagcagcggcacatgctgatcccagccaatcaacaagagcgatagaggggtcatatatagtgcttccacctcctgccgcttccatatacaggacatctgcctctgaaggtggtgcacagctcacaccatcaggtgtaatctccagtagcccctcgctgggaaacaattctgggtttcactctagtgttactgtgctgaaaagggcctttgagattgctagctcgcaaactcaggttgaacagccactttgtctggaatgtatgagggttctttctgataagatggataaggagattgaagatgttaatgctgatattaaagcttatgaggcttgtcttcaacgtttggagcaggaaccttacaacatcctcagtgaaacagattttcaaaaggagaaacaaaagattgaggaagaggaaaagaaacttaaagctgctattgaagaagctgaaaaacaatattcagaagttagatctgagatggaagatcttgaaataaagtctaaacaatttgaggaattggaagagcggtattggcatgaattcaacagttttcagtttcagttgacatctcatcaggaagaaagagatgcagtttttgccaagatagaagtttctcaggttcatttggaactgttgaagcgtactaatgttctcaatgatgcattctatatatcacatgatggagtaatcggaacaataaataactttcgcctaggacgtctttctaatgtagaggttgagtgggatgagataaatgctgcatggggtcaggctgcactgctgttgcataccatggctcagtatttcaccccaaaattccaataccggatcaagattcaccctatgggaagctatccaagagtcacagacatccagaataacacatatgaactgtttggtcccgtgaatttgttctggagcacccgatttgacaaagccatgacatggtttcttacttgcctgcaagagtttgctgagtttgccataagtttggataagcagaacaatgttccccctgaaaaatcactgaagcttccctacaagattgatggtgacaaagtagggagccacacgatcgtccttagtttcaataagaatgaaaactggaccaaggctctaaagtacatgctgtgcaatctgaagtgggttctctactggtttattggcaatacaagttttgcaccaccctctgtatcactgcacacacaatctctgaagaacaagagttgatgctgttctctctctgcaacaactgtacatagtttgtgtactcgaccctattcgttggatatagccgcagtgacaataatgacacgtttgatgtgcaaaaaaaaaaaaaaaaaaaagggcggctgctcgcgatctagaactagt

SEQ ID NO: 265490 - DNA, 1479 bp, Zea mays
gaggcacaataaatggcgtcaaagccacgggccttcgcgaaggtcttcctccccgcgctcccgccgccgcccctcctcactgcccccgtcttctcgcggtagccggccgacgaatcggggtgccggcgcggcggcgatgtcggctgcggcggctgcgccagcgcaggctccaaggaagtgggagggactagtggacgaggtgctcgagagggaggtgctgggagcgtgcctggaccaggcccccgagcgccgccgcatccgcgaggctttcaaggacgttcagctcagcatcgaccattgcctcttcaagggacaatatagtggcatcagaacaaaggagtcatgtgagcataactctaggggtgtggagattttctcaaaatgctggtttccggagaatcgtcgaatgagagcaattgtttgtctttgccatggttatggagacacatgtaccttttttcttgatggagttgcgaggaagattgcttcagctggatatggagtatttgcactggactaccctggctttggtctttcagaaggacttcatggatatattccaagttttgatacacttgttgatgatgtagctgaacacttctctaaggtcaaaggaaatcctgaatatagaggcctaccgagctttctgtttggccaatctatgggtggagcagttgcattgaaggttcacttcaagcaaccaaatgaatggaatggtgcaatactggtggcaccgatgtgcaagatagcagacgatgtggttccaccttggcccattcagcaagttctaatttttatggccaaacttctgccaaaagaaaagcttgttcctcaaaaggatttagctgagttggcattcaaagagaagaagaaacaagagcagtgttctttcaatgtgattgcctacaaggataaaccacgtttgcgaacagctctggagatgctgagaacgacacaagagatagaaaggcgtctagaagaggtttctttgcccttgatcattttgcacggtgaggctgatatggttactgacccggcggttagtaaggctctgtatgagaaagccaagagccaagacaagaagctgtgcctctacaaaggtgcgtatcacgctatcttggaaggtgaaccggaccagacaatattccaagttctcgatgatatcatatcctggctcgatcagcattccacaaaagaaggtatatcgttgtgaatcaggcagcgctgttcgccaggattgggtgaattcctttggcaatgctgtatcgcttccggttggggatcccagattcaacggtggggattccatttttgatatgaccctgtaaaattcttagttcagattattgatgtctccgtcatgtacctgaacgatgtagacgtacatatatgtaactgattaatgtgtatcaattgaccccgaattatttgggaaaacctcagttgcaaaacgccttttatttaatcacaatttctatc

SEQ ID NO: 265491 - DNA, 651 bp, Zea mays
cggctcgaggtgcgatataactggcatcctcttggagatggacagaatattaaggcccgagggcacagctatcatccgcgacacagtcgacgtgctcacgaaggtccaggcaataaccaagcggatgcggtgggagagccgcatcatggaccacgaggacggccccttcaacccggagaaggtcctcatggcggtcaagacgtactggaccgccgaagccgaggaggagcactagcacacgagtgacaccgagctcacttgaaagcgtgaaccaagcctgttctacacttctactaccggtcgagagggatggcgtcagcgttttgcgtctcagtgtagtatgtatgtcccttttcaccttttctctagttctttgtagctagctacaatcagatgggaaggtaagggagagttttgagacgggggggggggggtggttggtcctctagttgagatacaggaagcggttttgtagcaggggaaggtttcgctggtcttgcgtaggttcctggccctgtttcacgaggggttgaactaggttttagtttgtaatgcgatggccccgggcaggcattgttaatcgtatattggggtgcccataatagtaacaggtatttatttagttttcatctgaaaaaaaaaagtgcttgg

SEQ ID NO: 265492 - DNA, 623 bp, Zea mays
gaaaggtggtacccctgcgaggaccgcgccgcaatacctcgccgccgcacccagctccgcaacgcgccccgccctttccccaactcgatctcgcacctagggtttcgtctcgccgctctcgtcctccgcgaagatgccgaagaacaagggtaagggaggcaagaaccggaagcgaggaaagaacgaggctgacgacgacaagcgcgagctcgtcttcaaggaagacgggcaggagtacgcgcaggtgacccggatgctcggcaacgggcggtgcgaggccatctgcgtcgatggcacgcgccgcctctgccatatccggggtaagatgcacaagaaggtctggatcgcggctggggacatcgtcctcgtcggcctccgcgactaccaggacgacaaggccgacgttatcctcaagtacatgaacgacgaggcgcgcctgctcaaggcctacggggagcttcctgacacgctcaggctcaacgagggcgtcgacgtcgatgggcccgaggacggcaggagaaccgcactcaactaccttcagatgtgggcgaggacatcgaccagacctaagaattctgtatttccttctttccggccatcttattattatttgggatcccttt

SEQ ID NO: 265493 - DNA, 809 bp, Zea mays
gcgaacgctagcacggatccgctcgcgtacacccacgcgggcgtcccgtgctcgcgctaggttttcgcctcaccgctctcgtcctccgcgaagatgccgaagaacaagggtaagggaggcaagaaccgggggcgtggaaagaacgaggctgacgacgacaagcgcgagctcgtcttcaaggaagacggccaggagtatgcgcaggtgacccggatgctcggcaacgggcggtgcgaggccacctgcgtggacggcacgcgctcgcctctgccatatccggggcaagatgcacaagaacgtgtggatcgcggccggggacatcgtcctcgtcggcctccgcgactaccaggacgacaaggccgacgtcatcctcaagtacatgaacgacgaggcccgcctgctcaaggcctacggcgagatccccgacaacgtcaggctcaacgagggcgtcgttgatgaggaggaagccggcgcgcaggatgactatatacagttcgaggacgaggacatcgacaagatctgatgatcgcctcttccacacggtccctttccatggtaaactaaacgtatgcaaaacaattgtatccttctgttttgtggtggctaccattactgaagaatggtagtcgtggtgatggtataatgatttgggcggagagtactgtgtataatgatttgggggcacttgttgtgcccaataaccccatatggtaatatagcaagtatgggactgaacgaaccgttcctctccctttctgttaatatgatataattggttgggcaaaaacaaggtccgccgggcgctacag

SEQ ID NO: 265494 - DNA, 832 bp, Zea mays
ccgggtcgccacgcgccgccacgcgccgcgacgtgcgagcgcccaaagccccaccgccgctcccatcaagcggcgctaaaggtttcctcgcccgcaacgcgatgccgaagaacaagggaaagggaggcaagaaccggaagcggggcaagaacgaggcggacgacgagaagcgggagctggtgttcaaggaggacgggcaggagtacgcgcaggtgacgcggatgctgggcaacggccgctgcgaggcgctctgcatcgacggcaccaagcgcctctgccacatccggggcaagatgcacaagaaggtgtggatcgccgctggggacatcgtcctcgtcggcctccgcgactaccaggacgacaaggccgacgttatcctcaagtacatgaacgacgaggcgcgcctgctcaaggcctacggggagcttcctgacacgctcaggctcaacgagggcgtcgacgtcgatgggcccgaggaaggcgaggagggcagcgactacatccagttcgaggacgaggacatcgacaagatctaagaaatctgttcctgcttacggctacctgtattgttacgtgacgcgttcttctgcttctgcttgcggctacctttattgttacgtgacgtgtactggtatgttgtggtatggtttagcctgggttatcttgtaaaaggatctgaagtggttaaataatcgtgggtaatttcgtttttaatctggtacatgctgttacaaggtgttctgtactaagctattattgttctgaattgtgttctcctgtcttgattgatttgccaattagacccaagttttattgagtctaatattttcgg

SEQ ID NO: 265495 - DNA, 449 bp, Zea mays
cgggtcggcccaagccttccggccaggtcggggttttccgggatctccatttcatcaacaagccagaactgtgcgtccaagccttccagcagccacccaagtttgacagcgatggaaatctggtcgatgctgaaatcagagagcggctcaagaaagtgctcctatcccttcaggccttcacgctcaggcttcagaaggaggactgaatcaactcggtaccattgtagtacgtgcttccctgagaagcgtttattgctcttggaagtttgtaacgcgttgctgggtggcctggaagtttgtaataaatccaagaagtgttctcgctgaatatttaagatttgatcgcatctatatattaataaagattgtgttctagcgtttttgcgtttcccagtaaatgagaatcgattccagtaaaaaaaaaaaaaaaaaaaaaaaagggcggccgc

SEQ ID NO: 265496 - DNA, 548 bp, Zea mays
gctcgccactgtgaacccagagcttgatttcagcaacctatcgacactcctgcacaaagacatgtaccaacagccatgtggtggcccttcggcaagttcggtctttccactggaaagcgccggcgcagcttttccattctgcgagcaggcggatcttttccacagctttggctcgggtggtagcggtagcggtagcggtagtggtatggaggatcagtgctctctaagcctgctgctagacacggctctgccccacgcggccagcccacagtttgcttttcaaaagcagcaaagggacttgtgggaggatgccctacagaacgccttgcctaccggtagtgagcaaagacaggaggaggatgggcttttagtacccaactttgatggtacgtaacctgtgcctaaatgatgggcgatcaattgaagggcacgcacgctttggagattaaccatttggctgataccccatcatacgttgtgtctgatgcaggccagttacatgctgaccagacaaaggttgagttctagtccctggcgatcctcccaag

SEQ ID NO: 265497 - DNA, 1559 bp, Zea mays
cggacgcgtgggcggacgcgtggggaacccgcgcgacctctctcccgagtctactactgtgcccggccagccccctcccctgttttccttcccatctcatcacaagcagaagaaaatcgagataacgagagctagggttttgattccagtactcacgccgcatcctgtctccttctgcccctccctctcggcaccgcctccgccccctcattctctctcgcgtcatccggcggaggctcgaggaaactgaggccgggagcgccccgaagaatattctccacccagtcgccgacacccctgcgcgcgcgagagttaccattgtactgttgtagcttggcagttggttgactgtgtgacaactttgagctatgtcatattacgaaagaaggggtggagacaggggtagtggccgtattcaaggaagtggtgggcgaggtggacatgtcctgcgtggaagatcaggattggctccccgaggacctcttggggttaactcccgtccatctgcacgcactattgctaagtcatttagcagaaccaaagacatgacatggcgacctgatctatttagtgatagcatggcggctagtggaatagaaactggtacaaaattgtacatttcaaacttggactatggggtctctaatgaggatataaaggagctgttttcggaagttggtcatttgaaacgctttgctgttcactacgatggttatggccgcccaaatggcactgcagaggtggtgtttacacggaggagcgatgcaattgctgcactgaagcgttataataatgttctacttgatggaaaagctatgaagatagaagtcatcggaaatgacttaggattgcctatgacacctcgtataaatgttgttggggcttctaatggcagagctacaagaacagttgttatgacgcctgagtttagtcaacgtggcagaggttcaagcagtagacctctaagcgcaacaggtttaataaccgtggtggtttccaagctggtcgaggccgtggccagttccagagctgggggagaggccgtggtcagttccagagccgggggagaggccgtgcccagttccagggacgagggagaggcaggaagcctgagaagactgcagatgagctggataaagacctggaaagctatcacgcggaggcaatgaaaaccgattgattgcaaggccggtagtgccacaaggttgtggttttatccatcattttctgggagcaacgaacatgctttgtgctttggtttcaggagactagactcttgtagtaaattcgaacaaaagattgccagtttgtagtgtttgcatgaagtttgcaacctgatgtgtttatttttgtatcggttgctttggagattgtgttaatttttaggttcatgcttagaataaccgcacctggccttaacatgcacccggccctgttccgctctgcgatgtgccttcgcagcattgtgttatttttagcatattgcagtttgtcggaggttaaaatacatcaatatggcattcattttggaagtcgacaactgctacagctacacattc

SEQ ID NO: 265498 - DNA, 760 bp, Zea mays
  unsure (1)..(760): unsure at all n locations
gaaaatcgagataacgagagctagggttttgattccagtactcacgccgcatcctgtcgccttctgcccctccctctcggcaccgcctccgccccctcattctctctcgcgtcatccggcggaggctcgaggaaactgaggccgggagcgccccgaagaatattctccacccagtcgccgacacccctgcgcgcgcgagagtaagtcgcctcccccgccgccagtgctcttcgtgatgatatatttccagatccggtttgtccgacgcagatggtagggctggagaggctgccgatgtggtattgaagagggatttagatgcatgaattttgtgttcgtaacgtggattggtgtggggtgggagaggctcctttgccggattggccaggttaccattgtacctgtgtagctnggcagttggttgactgtgtgacaaccttgagctatgtcatattacgaaagaaggggtggagacaggggtagtgggcgtattcaaggaagtggtgggcgaggtggacatgtcctgcgtggaagatcaggattggctccccgaggacttcttggggttaactcccgtccatctgcacgcactattgctaaggcaaggccaaacctgtcactatgtttttgttcatggtcaagttcctgactaaagtagaaactgaatggggagagcatgcctaagcttacattatatggaggggcaggagtatctgtgatgtctgtgactaatgcgttctctgtcagtattggttggagg

SEQ ID NO: 265499 - DNA, 1069 bp, Zea mays
ccccaatcgcgttctcttcctcggcgacatggcggccgccaccggctacaccgacgccccaaccgacgagcaactgctggcgtacgctgagctgcccagacatggccgctacatggcggaggtgttcgccgtgcgcatcctcgccaccgccggaggagacccgccgccccatggcatcatctctttctacggcggccactgctgcagcgatttcatttacagctggaactcactggaagaggaagaagacacctcgaagcaaacctgcgacagccagggtaacctcgtgctaactgggccatcaatggccacctcggcagaaagtccaattgccttcaccttctacctccatgatggcagcccgcaagccggagaagccgctgaggacgacgaggacatcgggaggataatctgcgactgcatcggcgacgacttctccaactacaacagggccatagtcgagactgtccaaatgggctatggcctcgctgaagtgatctatgccgtgctgaacaacggcgtccaaggccgggtcgctgtcaaacttgctcgcctgccggtgtccaaagccggagaagaagacgccaccgccattctcgggaggatcgttgctcgcagcaagctgttcgacgtcggctgcgtgctcttctacaaagagggtgacaatggagtgagcgtgcgaccgggggggctgattcagctggcgagggaagcgctcgccgtgccgctgcacatgccgctgacgattgagcttgacctgcatcgctgttccggcgatgaaattgttggaggggtccttgagttcaatcctgcgattgacggccagcacacggaacgacttgttggacaaaatggcgctgaattggaagtggcaatttcatggtcggagtacccttggtaatgcctattattattagccattaattcaagagtgcatttttatatgtatcaatgactaagggttttaaatcatgtttcatacaagacagttgcactagagcaagataacatttcgtggtgggaacgccaaataaataaaaatagagtgagtatccctttggttttttct

SEQ ID NO: 265500 - DNA, 692 bp, Zea mays
ttgcactcgaaaaatatcgtgcactttgatttgaagtgtgataacttgcttgtaaatcttaaagatcaatcacgtcccatatgcaaagttggtgactttggtttgtccaaaataaaaagaaataccctggtttcagggggtgtgagacggacactcccatggatggctccagaattactcaatggaagcagcaataaggtgtcagagaaggttgatgtattttcttttggtattgttatgtgggaaatcctcactggcgaagaaccatatgccaatatgcactatggcgcaattatagggggcatcgtaaacaacacactgaggccacatgtgccagcttcatgtgatccggagtggagaaggctcatggagcagtgctgggctccagatccggcacagcgcccagcgttcacagagatcgctggacggcttcgctccatgtcagttgcagcaaatcaggcgaaggcaaccaaataagatacaggtggagtactgcctttcaacccccaatccgttgggggttctcttctccttttttcccttttgactggagagtaatacatatacatgcatgttatagagtgctgtataaattagtgcatcaatttatttataaccatgttatgagctggattgtatccgtgaaacttctggacccggtttgaaggttggtgatgtgtagaagtattagt

SEQ ID NO: 265501 - DNA, 328 bp, Zea mays
cccacgcgtccgctcgtacgccgtcgcttcctgcggtacgtactctctgtccgcagcgttcctccagctagtagcagtagcagctagctagctagctagcaactggccatcggggctgctagcagcgtacgtacgtggcgcgatggctcctccagctcatgataggctccgccgcctggtgctgctcctcgtcgttgccaccgccgcggcggctttgcttctggcgccgacgacggcggatgctgcgctgccgcgggtgcagcacacgcccaccaaggccgacgggtcgctcgccatcctcgtcgtcggcgactgggtgcgccgtgga

SEQ ID NO: 265502 - DNA, 1365 bp, Zea mays
agatagatagagaaaggagaaggaacagggaagcaaagcacaagaggtggccgccgcagtccgcaccccctccccaatcacgccacccgacaccgcgctccgcagattcgtagtcgccgctaggcttccggcgagatggacgtggtgaaggcggcgcagttgtcggggcggacgctggaacgggtagtggtgcatcccttggtgctgctcagcatcgtcgaccactacaaccgcgtcgcccgcgacacccgcaagcgcgtcgtcggcgtcctcctcggcacctcatcccgcgggtccgtcgatgtcaccaactcctacgccgtgccgtttgaggaggatgacaaggatcctaggatctggttccttgaccacaattaccacgagtcaatgttctccatgttcaagaggattaatgccaaggagcatgttgttggctggtacagcactggcccaaaactaagggagaacgacttggatgtccatgcattattcaacagttatgttcctaatccagtcttggtgattattgatgtccaacccaaggagctgggtataccgaccaaagcgtactacgctgtggaggaggttaaagagaatgcaactcagaaaagtcagaaggtatttgtccatgttccttcagaaattgcagctcatgaagttgaggaaattggagttgaacaccttctaagggatgtcaaggacacaacaataagcacacttgctacagaggtcactagcaagcttgcagccttaaagggactcgatgcaaggcttagggagatccgaagctatttggatcttgtaattgacgggaagctcccactgaatcacgaaattttgtaccatttgcaggatgtctttaatctccttccaaatctgaacgtaaatgagctaattaaagcctttgcagtgaaaacaaacgacatgatgttggtgatatacctgtcttctctgatccggagcgtcattgcgcttcacaatttaatcaacaataagatgctaaacaaggagcacgagaaggccgaggattcgaaaccaaccgccattcctactgctgccggaagctaaacgtgcttttgatcactgattgggtggctaagaaaagggaagaaacttgtgatgacatgttagcacggttgtgctcgaaccaactgtcttgaccttgaatggacattttttatgtttattttatgtatgatcaggtcaacggcaagagaaaccaattacactgtatgagctttagatcacacctcaagttttctgtagatcttggtgctatttcatctgatgggtcatgtttcatgatgttgactccgtttcctgtgattgatttatagcgagcctgtacgttgtatgtcatgcaaa

SEQ ID NO: 265503 - DNA, 479 bp, Zea mays
ggggggggacgcacgcgttctcccacgcgtccgcggagtgtgatttcgctttacaatttgatcaacaataacatggtaaagaatgatcgtgagagggctgtggtttcgaaaccagccgccattccaactgctgccggtggagggggagctgaatgagcttttgatcacttatcgatggccaatatatgggaggaaacgtgattacatgcttaccacggttgtgctggaaccgaatcgccttgaccttgaatggatattttcatgtttacttcacgtatgataaggtcaacggcaagaaaaatcatttacgttgtatgagagcattagatcatacctcaagttttctgtagatctcgatgctatttcatctgatgcatcatgttttgtgacgttgacttaagtcttattattatcatgattgacttatagtgggacctgtacgtcatgcaattaatgttcattcgtgattgatttgtagc

SEQ ID NO: 265504 - DNA, 1127 bp, Zea mays
ggtccacgcacgcgtccgcacacgagtccgcccacgcgtccggaccgcggagcactcggtgaacgccgcgctcggacagttcgagaactgcctcgccgaccgcggctgcgctgtcaacacccacctcttctccttgattgacgacatggatcgacttattgaggtaataaagcaagcagcaaaggaaggggcactggttctctacacccttgccgatccttcaatggccgaggcgactaagaaggcctgcgatttctggggtgttccatgcaccgatgttcttcggcctactgtcgaagccattgcctctcacatcggtgttgctccatctggaattccacgaagctctccgagtcgaaatggtcggctatcagaggattacttccaacggatcgatgctatcgatttcaccatcaaacaagacgacggggctctgccacagaacctctaccgcgcagacatcgtgcttgccggcgtttcgcgtacagggaagacgccactgtcgatatacctagctcaaaagggatacaaggtggcaaatgtcccaatcgtgatgggagtggaccttccaaagtccctttttgagatcaaccaggacaaggtttttggactgacaataaacccagcgatccttcaggcgattagaaagaccagggccaagactctaggttttgatgggcgtcagagcaattacgctgagatggaccatgtgaggcaggaactggtccatgcgaatcaaatctttgctcagaatccatcgtggccagtcattgcggtcactggaaaagctatcgaggaaacagctgctgtcatcttggggatcctccatgacaggaagcagaagtgctccatgccacgcatatcaaaacgatactagcactgtgttctatcccttctctactacaccttgtaacgtgtgcatgttttgaataagctttgtgtcaaggaccatagccttcatgtaatttttttttgttggaccaccttctaggtggtgccgtttgtatcataaacataacttgaagtttagcgcagcagaaacacatgtatattgcgtttaaaaaaaaaaaaagcatcaaatcaactcacatcagtgaacagagaccagttcacaaaaaaaagggcgg

SEQ ID NO: 265505 - DNA, 333 bp, Zea mays
gctctctcctcggcctcggtctcggcgccgccggtgatcaagtcgccgcggcccgaggacgctgccgtggcggtggaggatggcgaggacgacgacgtgtgcgaggccgagagggacgccgcggccgggaaggccatctacatagtgtcagacgggtccgggtggaccgcggacactcggtgaacgccgcgctcggacagttcgagaactgcctcgccgaccgcggctgcgctgtcaacacccacctcttctccttgattgacgacatggatcgacttattgaggtaataaagcaagcagcaaaggaaggggcactggttctctacacccttg

SEQ ID NO: 265506 - DNA, 251 bp, Zea mays
ggcagcagcacaagcaagaaccacacctcctcccttcgcctgcgatcatgtcgtcttgctgcggcggcaagtgcgggtgcggctccagctgctcctgcggcagcggatgcaacggctgcggcatgtaccctgacgtggagaccgccggcaccagtagcgtcaagaccacggtcctcgacgacgcgaccaccaaggccagcggcggagagttcgaggcggtcaacgatgacggcggctgcgactgcaacacc

SEQ ID NO: 265507 - DNA, 787 bp, Zea mays
cctatgcttccgaccagttccaggaattcattgtcggcctcatgtccctccccatcaagctgccggggactaggctctacaggtccctccaggccaagaagaggatggccacgctgatacaggggatcatacaggagaagaggcggcggcggagggccgcccttgaggacggcggcgagggcgaggccggtcccccgcgcgacgccatcgacgtgctcataagcggcggcgacgagctcaccgacgagctcatatccgacaacatgatcgacctgatgatccccgccgaggactctgtgcccgtgctcatcacgctcgcagtcaagtatctcagcgagtgcccgcttgctctgcaacaacttgaggaggagaacatgcagctgaagaggcggaaaaccgacgtgggagagaccttgcagtggacggactacatgtcactgtcattcacacaacatgtgataacggagacactgcggatggggaatatcatcaacgggatcatgcgcaaagcggtgcgggacgtggaggtgaaggggcacctcatccccaagggctggtgcgtgttcgtgtacttccggtcggtccacctcgacgacaagcgctacgacgagccctacaggttcaacccggggaggtggaagggagaaggacacgagcaccatgggcttcaccccttttggcggtgggcaaaggctgtgcccatgcctggatctggccaggctggaagcttacatctttctccatcacctggtgaccagcttcaagtgggtggcggaggaggaccaca

SEQ ID NO: 265508 - DNA, 693 bp, Zea mays
  unsure (1)..(693): unsure at all n locations
ccggnccggaantcccgggtcgaccgacgcgtccgccactctgcccaccgagcgccagtggagcgcttacttgacttgacctcgccgcctccgggcctccccctccccctccccctgccggcgcccgttctttcctcccctcgccggacgcccaccgccggagcggaagaggggggaatgcagccgccgcagcaatacccgccggcgcccggctcctggggcggggtcgcgggggccagggccggcgccaccaccgtggatgaggcgtccatggaacgtagcaagagcttcatcaaggccctgcagggtgctggacaacctgaaagactatgccttacgagccgtcgtcaacgcggttgatcatctgggtactgttgcgtacaaactgaccgatcttttcgagcagcaggctgccgaggtgtcgacatatgaactgaaagtcgcacgcctgaaccagcaaatcttcacatgccaggtctacacagacaaagaaggcctcaggcagcagcagatgatgggagcaaacatcaagcaccacaagcactacatcctaccccccactggttataaaagatccctggcaaatggacacctgcaagcggacactgatcaggaatccaagcctagaccttacccctccgcaaaaaccctttcctggcatctgtcttcggagaacagcaccaaaagcaacgc

SEQ ID NO: 265509 - DNA, 766 bp, Zea mays
cccacgcgtccggtctcggcagccacaagaaaccacccccttccggcacacgggctcgaccacctgactccatcaccgtgcctgtctgtgttctagggacaagaagagcagagatatacaggagcgagcagaggcggggagaagaggatgagcaccacaacggcgtcgtcgctgaaccccaacgcgccgctcttcatcccggcggcgtaccggcaggtggaggacttctcgcccgagtggtgggagctcgtcaacaccaccgcctggttccgggaccactgcttccggcagcgccagctccacgaggccgcctgcgacgacgtcgccgcgctcctccccgacgacctcctcgacaccaacgacctcttctacgcgcccgacgtcgtccaccaccaaccagcgacggcgctgctgcccgggtacgatgtcctcgacgtgctcgcggcgctgagcctcagctcccccagggccatccgccagcctcgctaggagaagcctgctcatggcgcctggcgggccaccacctccaccacggctgctgtgcctagtgtaaccccaagcaaggctagtctgtttctgtgtatacaatacgactgaaaaactaggagaggggggattcggccaaggcggccggtgctctctcctctcctcgtagctagtttttcctcctgttccagctcagttcttgttcatccagccgtgttaggaaaacaaacccagccccgtgcccatgttgttgaaacatatatcagtctggtctttacac

SEQ ID NO: 265510 - DNA, 1059 bp, Zea mays
ttcggacgcgtgggcggacgcgtgggcggacgcgtcgggtgacgcgtgcactcgctggtcgttgcctgctgcggattgcccccaggcggccccactcactccgctgctgatatttcgtttggttctcctttccgtcttgtccgtcgccgaggccttctccgctcgctccccagctccagcaggcagatcagatccatccaaccacgaacaggaaggaaggtaggaggcctgaggggctgaagttgaaccatgagtgccgtcgcggtttcgtcgtcgctgaacccgaacgcgccgctcttcatcccggcggcgctgctgcaggtggaggacttctcgccgcagtggtgggacctcatcaccaccaccgcctggttccgcgaccactggtcccgcgagcacgcccacctggacgagatagccgagcagctcgagttggtcgccctccttgcctacgatgaggatgaggacctcttctacggcgagcaggcccccgccgccgccgccccttaagacagattcggtgctcaaggcgctgaacttgggctccccgaagagcggcgacgccccgcgggggttccgggagaaacccaggcactccgagaagccgaccaagtacgccggcagccccaagagcagcgctcctcgcgtgatccaccagcctcgctaggttcgctggccggcccctgatggggactcggtgactcacatggaaggctgctgcctctctagcagcatctgctactggctgcagctgccgtcggcgtcgtggtctgtctgtcaaagtcgaagtaaaaaaacgtgagtagttgtactactgtagaagtttcttttgtatagcatgcacgtaagaaatgaccaaaaaatataacaagaatgcagctgttagtttactgctgctctcctcgtgtgtctagggtgcacttctgtaagcaaacgtatatgatgtgtaatggcagacagcttaatgttacaactagctcttctactgttcttgcgtgcaaaaaaaaaaaaaaaaaaaaagggcggcccccgattattgaccccttcgacccgggattt

SEQ ID NO: 265511 - DNA, 995 bp, Zea mays
gagtacggacgaatcgggccctcactgctcgttgccggctgcccccgcggccccggccagtccatcccctcgctcgctccccaactccagcaggcagatcagatacatccatccattcgcggaccggaaggaaaggaagggttgaactatgagcgccgtggcggtttcgtcgtcgctgaacccggacgcgccgctcttcatcccggcggcgctgctgcaggtggaggacttctcgccgcagtggtgggacctcatcaccaccactgcctggttccgcgaccactggtcccgcgagcgcgcccacctggacgagatggccgagcagatcgacgcggccggcctcctccccgacgacgaggacctcttctacgacgaccagctcgagcagggccccgtcgccgccgcccttaagacagattcggtgctcaaggcgctgaacatgacctccccgaagggcggcggcgacgcccgcgggggttccgggagaaacccaggaacgccgagaagccgaccaagtacgccggcagccccaagagcaacgctccccgcgtgatccaccagcctcgctaggttcgctgggggaactcatcaggaaggctgctgcccctcttgcagccttgctcctggctgccgccgctgtcgtggtctgctctttcaagtcgaagtaacggtggttcgagctagtggatagtgtggctcaactgtagaagttccttttgtatagcaagcaagtaaaaaaaatgaccaaaaaatataacaaaatgcagctgttagtttactgctgctctctaagtcgtgttcagtcatccggtgtgtctagggaaaccccataaaaaatggtgaaggtggaatcccatcccagtgttataattaaggatgcacttcttctgtaagcaaatgtatgatgtacaatggccggccggcagtctaaatgttacagctagctcttcttggtgaattcaccggaacccttattctcactttttactttctca

SEQ ID NO: 265512 - DNA, 919 bp, Zea mays
cccacgcgtccgaccacgcgtccgcccacgcgtccgcggacgcgtgggggcttgtctggcagctacaaaccacccaaaagccacccccagaaaccggcggtccttgggtgttccggatctgagccagcagctgagaagaggatgagcgccgtggccgccatggcgacgtcgtcgctgaaccccaacgcgccgctcttcatcccggcggcgtaccggcaggtggaggaattctcgcccgagtggtacgagctcgtcaacaccaccgcctggttccgggaccactggttccgccagcaccagcaccacgaggccgccttcgccgccgccgtcgacgccgagctcgacgtcgccgcgctccttcccgacgactccgtcgacctcctcgacaccgacgacctcttctacgcgcctgacgtccaccacccccacaacgccaagccggcgctgctgcccgggtacgacctcgacatgctcagggcgctgagcctcagctccccccggggccgccgccgcgccgtcgccgtcgccgttgctgcgcgcccagcagcagaggcacgcggacaggccggcgcaccacgccaggggcgccgcgcgccgcgtcatcatccaccagcctcgctagaagcagcctgatcatggcgggctgccgccatggctgttgtgcctagtgtaacctcaagcaagtctagtctgtttctgtctgtgtatacgactaaaaaaacaacagatgggggattcggacgaggcggccagtgctctctcctcatagccagcttctcctgttcaagctcagttcttgttcatccagcagagcacaaaaaaaaacagacaggcggagtgatgtacttactattcctcctcctcctcccatgtccatgttgttgaatatatatatgatggcaagcagcctgatcttttc

SEQ ID NO: 265513 - DNA, 491 bp, Zea mays
cccattcgtcttctcgctggtcgttgcctgctgcggattgcccccaggcggccccactcactccgctgttgatatttcgtttggttctcctttccgtcttgtccgtcgccgaggccttcttcccctcgctccccagctccagcaggcagatcagatccatccaaccacgaacaggaaggtgagcgccgggaacgagccctccgtcctcctactagctgcgatccgtagccttgcgtcgctttcgcgcctagtctagatcgccacgttctagatctgtggtgttttactttcccgggtgcgggtggtcgaatccttccatccaccaggagagctcgtggcttgtctttgattagctcggtctcccctgtgtccgtgatctgatatacgtccggatctgtctgctgtaatcatcaggaaggtaggaggcctgaggcgcttgagttgaaccatgagtgccgtcgtggtttcttcgtcgttgaacccgaacgcgc

SEQ ID NO: 265514 - DNA, 896 bp, Zea mays
cggacgcgtgggcaccgacgcgcacggaccggaccagcacagcccggaaactgccctacgccgacacgttttccggtccggcccagcagcagcagggaggaaggttcgctcggtcgctgggcctggctccgcgtgccgtccctcctataaatgcgagtcctcgccgagtccactgggcaccagaagctcactcactgctcgttgccggctgcccccgcggccccggccagtccatcccctcgctcgctccccaactccagcaggcagatcagatacatccatccattcgcggaccggaagtaatcatcaggaaaggaaagggttgaactatgagcgccgtggcggtttcgtcgtcgctgaacccggacgcgccgctcttcatcccggcggcgctgctgcaggtggaggacttctcgccgcagtggtgggacctcatcaccaccaccgcctggttccgcgaccactggtcccgcgagcacgcccacctggacgagatagccgagcagctcgagttggtcgccctccttgcctacgatgaggatgaggacctcttctacggcgagcaggcccccgccgccgccgcccttaagacaggtacggatctctctctcttactcttccaccgatttttagatttgcctaaaagacgaatcatagtgagctcatccacgcgtacgttggtgtgcttttcctccgccagattcggtgctcaaggcgctgaacttgggctccccgaagagcggcgacgccccgcgggggttccgggagaaacccaggcactccgagaagccgaccaagtacgccggcagccccaagagcagcgctcctcgcgtgatccaccagcctcgctaggttcgctggccggcccctgatggggactcggtgactcacatgga

SEQ ID NO: 265515 - DNA, 1204 bp, Zea mays
  unsure (1)..(1204): unsure at all n locations
ttcactcgtccgcctttgttttcgatcgctggtcgcagccggctgcccccgcgctttttaccgatggtctttgtcatcgnctcgtgcctggcctcggcccttcccaactccagcaggcagatcagatacatccttgcgcggaccggcaggaaaggaaagggttgaaccatgagcgccgtggctgtttcgtcgtcgctgaacccggacgcgccgctcttcatcccggcggcgctgctgcaggtggaggacttctcgccgcagtggtgggacctcatcaccaccactgcctggttccgcgaccactggtcccgcgagcgcgcccacctggacgagatggccgagcagatcgacgcggccggcctccccgacgacgaagacctcttctacgacgaccagcccgagcagggccccgtcgctgccgcccttaagacaggtactgatgtctctctctctctctctcttactctcccctcgattttagatctgcctgaaggacgaatcatagtgagctcacgttggtgcgttttcctccgccagattcggtgctcaaggcgctgaacatgacctccccgaagggcggcggcgacgccccgcgggggttccgggagaaacccaggaacgccgagaagccgaccaagtacgccggcagccccaagagcaacgctccccgcgtgatccaccagcctcgctaggttcgctgggggaactcatcaggaaggctgctgcccctcttgcagccttgctcctggctgccgccgctgtcgtggtctgctctttcaagtcgaagtaacggtggttcgagctagtggatagtgtggctcaactgtagaagttccttttgtatagcaagcaagtaaaaaaaaaaaatgaccaaaaaatataacaaaatgcagctgtaagtttactgctgctctctaagtcgtgttcagtcatccagtgtgtctagtctagggaaaccccataaaaatggtgaaggtggaatcccatcccagtgtcataattaaggatgcacttcttctgtaagcaaatgtatgatgtacaatggccggccggcagtctaaatgttacaactagctcttcttggtgaattcaccggtccacactgatgtgctgctatgtatcattactatccagttagggcttgttcggttattcctacgccatatggattggacgggattggaaaattttagtagacattttg

SEQ ID NO: 265516 - DNA, 646 bp, Zea mays
cccacgcgtccgctcactgctcgttgccggctgcccccgcggccccggccagtccatcccctcgctcgctccccaactccagcaggcagatcagatacatccatccattcgcggaccggaaggtgagcgccgtgaacgaaccatccgccctgctagctgcgatctgtagccttgcgtcgctttcgcgcctagatcgtcacgtcacctatcacgatccgtgcggttctagatctgtggtttttccttcccctggtggtcgaatccttccatccaccagaccaccacgggacctcgtggattccttttggttttcctgtgccgagagccaaaatcgagggggggggcttggtttttattggctcggtctcccgctgtctcgtgatctgatttgctgtagtaatcagcaggaaaggaagggttgaactatgagcgccgtggcggtttcgtcgtcgctgaacccggacgcgccgctcttcatcccggcggcgctgctgcaggtggaggacttctcgccgcagtggtgggacctcatcaccaccactgcctggttccgcgaccactggtcccgcgagcgcgcccacctggacgagatggccgagcagatcgacgcggccggcctccttcccgacgacgaggaccttttcta

SEQ ID NO: 265517 - DNA, 1781 bp, Zea mays
  unsure (1)..(1781): unsure at all n locations
ttgtttatcgcgccccaaccccaaccccaacccagcgggcccagtcccccctccgttctctctgcactctgcagctgccggtgccggccatggcgcgcgccccgagctcgtggacgccgtccctcgccatggtgctcctcgtcgtggccgccgcggccgtggtcgcgtcgtcggaggcggccagggtgcccgccgccgtcggcaactggacgggggaggagctgcgcggggccgccgcgaggcggggcggccggcgctcccggcgccgcgcgttcgagaacggcctcggccggacgccgcagatggggtggaatagctggaaccacttcggctgcgggatcaacgagaacctcatcaagcagacagctgatgcgctggtcaacaccggtctggcgaagcctggctacgagtatgtcaacatagatgattgctgggcggagtctgacagggactaccagggaagcttcgttgcagacggacaaaccttgccctctggcatcaaggcgctcgcggactacgtgcacgccaaggggctcaagcttggcatctacagcgatgctgggacacggacgtgcagccagaaaatgccagggtcacttgaccacgaggagcaggacgtgaagacattctcgtcctggggtatcgattatctgaaatacgacaactgcaacgacgccggcaggagcgtcatggagaggtatacgaagatgagcaacgctatgaagacgtatgggaagggcatcttcttctcgctgtgcgaatgggggaggcaaaaccctgctacctgggcaggcggcatggggaacagctggagaacgaccgatgatatcgccgacaactggggcagcatgacgtctcgtgcagaccagaacgacaggtgggcttcctacgccggacctggcgggtggaacgatcctgacatgcttgaggtgggcaacggcggcatgtccgaggcggagtaccgctctcacttcagcatctgggcactcgccaaggctccgcttctgatcgggtgcgacgtgcgggcgatgagccagcagacgatgggcatactcagcaactcggaagtcatcgccgtgaaccaagatagccaaggtgcgcagggaaagaaagtgcagtccagcaatggcttggaggtttgggctgggccgctcagcaacaacaggaaggccgtggttctctggaaccggcagggataccaggcaaccatcaccgcacagtggtcgagcatcgggctcgcttcttccactgctgtcactgctcgcgatctatgggcgcactcgtcgttctcggctcaaggccagctatcagcttcggtgccacctcacgactgcaagatgtatgtcttgacgccgaactagctcagaagacaagagcggattgttccatggcgcgtgggatgcaaccattcggtcaggattcagggaagaagagtatgcagtgcaggcaaggatttcaagagaaggaaattcgatatcatttggttatacaggatatgagtgcgaatggaggaataatttatactaatactatggaagtgtatctaaggcgccgtcaaaatgccggtgcctgtgttactggatgtttgtaacgagagttgcagcaataaaattggcttgccccccaccctttttacgagcatgtggacggatttcagagaacaagagaatatagaaaatgtgcgttctctgtgaagtgatgttactaatgttaaatcccatgaattcttaaaaaaaaaaaaaaaaccaaaaaaaaaaaaaaaaaaaaaaaaaaaaaaanaa

SEQ ID NO: 265518 - DNA, 494 bp, Zea mays
tggacgcgtgggcggacgcgtgggcgcgccccaaccccaacccagtcgagtccccctccgctctctctgcagttctgcactctgcagctgccggccatggcgcgcgccccgagctcgtggacgccgtccctcgccatggtgctcctcgtcgtggccgccgccgccgtggccgtgtcgtcggaggcggccagggtgcccgccgccgtcggcaactggacgggggaggagctgcgcggggccgcggcgaggcggggcggccggcgctcccggcgccgcgcgttcgagaacggcctcggccggacgccgcagatggggtggaatagctggaaccacttcggctgcgggatcaacgagaacctcatcaagcagacagctgatgcgctggtcaacaccggtctggcgaagctgggctacgagcatgttaacatagatgattgctgggcggagtctgacagggactaccagggaaagcttctttgaaacagacaaacctt

SEQ ID NO: 265519 - DNA, 805 bp, Zea mays
cccacgcgtccgcccacgcgtccgcccactcgtccggagcgctccggcacaggaagattgtgagtgcgtgcctaaacgctcgtgggagtttaccatttcatactagatttgtacgccattcagatcctgacatgcttgaggtgggcaacggcggcatgtccgaggcggagtaccgctctcacttcagcatctgggcgctcgccaaggctccgcttctgatcgggtgcgacgtgcgggcgatgagccagcagacgatgggcatactcagcaactcggaagtcatcgccgtgaaccaagatagccaaggtgcgcagggaaagaaagtgcagtccagcaatggcttggaggtttgggctgggccgctcagcatcaacaggaaggccgtggttctctggaaccggcagggataccaggcaaccatcaccgcacagtggtcgagcatcgggctcgcttcttccactgctgtcactgctcgcgatctatgggcggtacgctgcttttgctgcctcgctcgctcttcagattgcataactccataccataaccaatgtaatgaaggctggctggtgttcgggcttgagatttcgtgttccattttgttgtgcagcactcgtcgttctcggctcaaggccagctatcagcttcggtgccacctcacgactgcaagatgtatgtcttgacgccgaactagctcagaagacaagagcggattgttccatggcgcgtgggatgcaaccattcggtcaggattcagggaagaagagtatgcagtgcaggcaaggatttcaagagaaggaaattcgat

SEQ ID NO: 265520 - DNA, 674 bp, Zea mays
  unsure (1)..(674): unsure at all n locations
aagtaaagccgaacccctgccggtaccgtaccgcaatacccggctcgttccacgcgcccgtatcgtttgcgctggtcaacaccggtctggcgaagctgggctacgagtatgtcaacatagatgattgctgggcggagtctgacagggactaccagggaagcttcgttgcaaatagacaaaccttcctctttggcatcaaggcgctcgcggactacgtgcacgccaaggggctcaagctctgcatctacagtgatgctgggtctcggccgtgcagccagaaaatgcctgggtcactttgaccacgaggagacaggacgtgaagacattctcgtcctggggtatcgattatctgaaatacgacaactgctactacgccggcaggagcgtcatggagaggtagtaaagcacatgaacggtgcctagcttgaaaccgcactgttgtcgatgcgtcnggcatcgcgcgcgtgccggattgctcggtgacatagaggtgtggccggtgctgttgcaggtatacgaagatgagcaacgctatgaagacgtatgggaagggcatcttcttctcgctgcgcgaatggtggaggcaaaaccctgctacctgggcaagctgcatggggaacagctggagaacgaccgatgatatcgccgacaactggggcatcatgacgtctcgt

SEQ ID NO: 265521 - DNA, 1464 bp, Zea mays
gccgtttcggactactaccaatttgatgatttgctgactgatgaagagaaggcactcaggaagaaggtccgaggtatcatggaaaaggaaatcgcgcccattatgactgagtactgggagaaggctgaattcccattccatgccattcccagccttgccagtcttggtttagctggtggtacaataaaggggtatgggtgccctggactctcgcttacagctagtgctatttcgatagcagaggttgcacgggtcgatgcgagctgctccacatttattctagtgcactcctcgttggctatgtccactattgccctttgtggatctgaggctcaaaagcagaaatacttaccatctcttacccagttcaaaactattggttgctgggcattgacagagccagattatggaagtgatgcaagctccctatggacgtgcagcaaccaatgtacctggtggttggcatttagatggacaaaaacgctggataggtaacagcacttttgcagatgtcctcatcattttggctaggaatgcagatacaaaccaactaaatggatttattgtaaagaaaggagctcctggtctaaaagccacaaaaattgaaaataaaattggactcagaatggttcaaaatggagacataattctaaataaagtatttgtccctgaggaagacagattaacaggcatcaattcatttcaggatataaacaaggtcctcgctatgtctcgaattatggtggcatggcaaccaataggcatatcaatgggagtttatgacatctgccatcggtatttgaaagaaagaaagcaatttggagctccactggcagcttttcagctcaatcaagaaaagcttgtccgcatgcttggcaacattcaggctatgcttctcgttggatggcgactgtgcaagctgtatgagtcaggcaaaatgacaccaggccggtctagtttaggcaaggcatggacgtccaagaaggccagggaggtggtttctcttgggcgagagctactgggtggcaatggcattttggttgattttcttgtcgccaaggcattttgtgacgtggaacccattttctcgtacgagggcacctatgacattaatagcctggtggctggcagagagatcaccgggatcgcgagcttcaagcctgctgtgtcagcaaaatcacgcctgtgaaagttgtttttttctttgttcccgaagacagtagaaatcaaccttgtacattcagatgattgggaataagaacggtaggaaagctgtaaaactcgacgtgcttcctcgtatgtactgttctgtttcaaattattcgacgttttgtcggaacggaacggaggacctgtatggctgtatatgatactcatcctatatatcacgcagcttttgaagattttgtaaaaaaaaaaatgaagtgcaaaatccttaacatacaaaaaaaaaaagggggcccc

SEQ ID NO: 265522 - DNA, 842 bp, Zea mays
  unsure (1)..(842): unsure at all n locations
gttcaaacctgcagaatgtctgctgcctctacaatgcataagtttaaagcacgaatccatctatctaagactactaattagggaacaagcaagcactggtctaattttgttgtcttagtacaattttcttgcagctatgggctggtatgtgttataacaagataaactccagtgctccacatgttggctaaatctagcagaacagaaggcgatattatttttgcaggctgatgtatttgtacgatgaatatatcactatcatggtatttcagaactcagattcatcatggatgtagatcttggttatttatgtaaactagattgcttgctgtatggtagtaatctagcacttagtagtaccgaaacttccctagaaccatgctttggtccacaaatgttggatttatttctctttctcttggctagggtctattactactgccagtttgatataagttttaaagtatcattcatttcttatattgatgttaatctcatgtttggcttgctacaatgtagagacacttgtgcattcaactcttgaacactgtgaggatgctgatttcacatttccagttcattttaacttcagagagcacacaatatatgttcgatgccgcccctatctcaaggaattcttggatagggttgccagcgtgtttgagacaattattttcactgctagtcatagcatttatgcggagcaacttctcaatgttcttgatcccacaagaaagttgttccgtcatcgtgnttatcgtgaatctcgtgtctatgtggagggaactacatgaaggtctgacagtacttggacgtgacttactcgcgtaatgatgttgaca

SEQ ID NO: 265523 - DNA, 852 bp, Zea mays
gccggcccacgcccacgcgtgcgcccactcgtccggatttacctgatttatctatggtggtccccaagtttcgtcctggtctgcttccaaagcagacccggagttgtcctacgatgactcttgtacttgatcttgatgagagcacacaatatatgttcgatgccgcccctatctcaaggaattcttggatagggttgccagcgtgtttgagacaattattttcactgctagtcaaagcatttatgcggagcaacttctcaatgttcttgatcccaaaagaaagttgttccgtcatcgtgtttatcgtgaatcttgtgtctatgtggagggaaactacatgaaggatctgacagtacttggacgtgacttaactcgcgtaatgattgttgacaattctccgcatgcctttgggttccagttggacaatggcattcctatagaaagctggtttgatgatcccaatgacatggagctgctgaaattgctcccgttcttagaaagcttggtcggcgttgaagatgtcaggccttatatagcaaggaagttcaacctaagggagaaggtagccaccgcatcttctcttacaatagacatgcagatgtgatccgtccaatgctgccaggtatttttcaggtgccaaaggtcgccgtgatgataaatgtaggaccggagctgatatagtggttcttgttgaatgtagcatgtcaggatctcctggctccttgcattattgtatgctctaccgaccgcaatgtacaattttcgctgcagttggcagttgtagacttcacttgcattttgttggcccagttgacatgggaagggcctacttgaacattttgtcgatcagtt

SEQ ID NO: 265524 - DNA, 549 bp, Zea mays
gtgaataacctatccaaaggcttagaagaacaaacaacacatgttcatggtagtaaggaagctagcctaaaatctggttcaaaccttgcatgcaacactcatgatgggataaatgaccactctggcacactaaagttgcaatcagctgggcaaagcacattgcttgaagtggatgagtacagtgaactgggaaacctttcctcagaagtatcagcaatatatcttgctatgcagcagtctaagttggagtgcattgatgaacagagtcaagattctacctcaacagaaggttatggtgaagctgaggagactgaagagtatgatgattttgacccctactcctttatcaaagatttacctgatttatctatggtggtccccaaatttcgtcctgttctccttccaaagcagacccggagttgtcctacgatgactcttgtacttgatcttgatgagacacttgtgcattcaactcttgaacactgtgaggatgctgatttcacatttccagttcattttaacttcagagagcacacaatatatgttcga

SEQ ID NO: 265525 - DNA, 594 bp, Zea mays
attctgctgtctatgttgagggtgatattgaaaccagggtctacaatgacagtgttaatgatcaagtcaaaaacatacctgagatatgtgttcgacgtgatggcaagattcaattggttaaatctggggacagtgctgctaacatatcattagatgaactaagagaaggactgttctagctatagtgaaagatgtcaggagtatgcttctggcttgaggcaagtttgagtatgtttgtgcttcttagtctcagcactactagtattagagtgatgcttgcgtacccctctggctgggttttcattcgtttgaactctagcttatattgccaaatttacttatctgcagaatatttgagccctcaatgaaacatctctgtgtaatttactgctactgttttttccatgtgatgcgcatctgtcatgaactcattaaataaatacaaaagaaagttgctccgaaataaaagaaaatcgagaatcttgtgtctatgtggaagggaaactacatgaaggttctgacagtacttggacgtgacttaactcgcgtaatgattgttgacaattctccgcaagcctttagattaaaaggggg

SEQ ID NO: 265526 - DNA, 555 bp, Zea mays
  unsure (1)..(555): unsure at all n locations
cccacgcgtncgcccactcgtccggaggcctgtccgtacgtcgcgccgctcctncccaagacgaggcttactcccgcgcgcaggcgcgtttctgggccgattacatcgacaagaagatctatgacagccagactcggctgtggaagttcgagggcgaggcgcgggagcaggcgaagaaggacctggtggaggtcctggagaccctggagggggagctcgccgacaagcctttcttcggcggcggcgccctcggcttcgtggacgtggctctggtgcccttcacgtcctggttcctcgcctacgagaagctgggcgggttcagcatccaggagcactgccccaggatcgtggcctgggccgcgcgctgcagggagcgggagagcgtggccaaggccatgtccgaccctgccaaggtgctcgagttcgtccagttcctccagagcaagttcggtgccaagtgatcgatcggaagcactgtgtgtgctgctatgcangccangctggtgctttgatcagctcgatcagcttcatgcccatgctagcgttgcatatcgc

SEQ ID NO: 265527 - DNA, 732 bp, Zea mays
cggctcgagggaacgagcgcgcgggcgaggaggacccccgacggaggatggcggcggcggctagggttttccgcgggtccctcttcctgaggtccccggcggcgggcgccaaggcgtcggcagccaagaaggcgggcgcggcggcggcggcggcggcggtggccaagaagaccgaggcggccactacgaagccgagactgccgaccgggatcacgaagccgatgccggtctccgatgagttccgcaggttcgccggcggcgcgcccgaggtcgcacgctccgaggccatcaagctcatctgggcccacatcaaggcccacggcctccagaacccagccaagaaaacggagatcaactgcgacgccacgctcaaaagcttgtttggcgggagggacaaggttgggatgctggagatcaacaggctactgaacgctcacttcccgaagaactagcaagcagcagtccgtggtgccagtgatcgcgctttggtaaaggactttcttgtggctggcctcttgtggtccatgtgaagtcccaagtcccactaggtggttacacccgaaaaccatgtgatgccattaagacttacagactttgttcagcagttgggtttttgggcgtgatgcatgtaaaaaggatccccagtgtttccgtttctcttgtgatcctgtgaggacaccgatgtgggaaatatttaagtctgctgatggcaaatcttattagccttttgtc

SEQ ID NO: 265528 - DNA, 1297 bp, Zea mays
ccatcgtccccgcctgcacctcgcgagcatccaaagctgtacttgcggcaagttctcgcaaaatcctactcccaccgccgactcgtacctccgctcccctcctccccaacccttccacgcttgcttctccgggagggaaggcacacgggaggtcgccccgccacccatcgcaaaagccacgcgccaccaaactcttttttccctcacccagtcgctttcgcgttcagcgcgagctgagccagccagtgggtcggtcgctggaggcggagccataaaggcgtcagcgacggcagcatgatgagcggcacatcgggcgggagggacgccgaaggcgagtgggaagttcggcccggcgggatgctggtgcagcgcagggacggtgaggcggccggccccgtcatcaggatcagggtctcccacggcgccaacttccgcgaggtcgtcgtgccggcgcaggctaccttcggtgagttgaagaggatccttgttcagactactggcttggagcctgagaggcagaggctcttcttccgtgggaaggagaagagtgacagagagttcctgcacacggcaggtgttaaggatggagcaaagctgcttctgctcgagaagcctgcccctgccaacatagagcagaaggttgagcctgtgattatggatgaaagcatgatgaaggcatgtgcggctgttgctcgtgttagagttgaagttgataagctgtctgctaaggtgtgtgacttggagaagaatgtactaggagggagaaaggttgaggataaagaatttgttgtcttgacggagctgcttatgatgcagctgctgaaactcgatggcattgaagctgaaggagaagcaagggcacagaggaaggctgaggtccgccgagtccagtcccttgtggagaccttggataagctgaaggcaagaaatgcgaaccctttcagcgatcataacaacgctgtttcagtgacgacgcagtgggagacgtttgagaacggtatgggcagcttcagcgctcccccgccccacgttccttcagagcaagttaacactgactgggagcagttcgactaggctcagctgaagctgttgatgtatcgtgagatcggtatgggcattccttttcccaggcagcgaggtgttttgtgtatatgccccgcgtttggtgcctttggtgtcccaactgcctgtgaatgttaccagatcataccatactaccatgtgaattgcattgccccgctcaacgctcattgagggccatgtttcgatatgcccctgccaatgccattcgcatgat

SEQ ID NO: 265529 - DNA, 500 bp, Zea mays
tgttttgtccccgcctgccattcgcgagcatccaaagctgtagttgctgcaaagctctcgcaaaatcctactcccaccgccgactcgaacagtcgaacctcggctcccctcctccccaatccgtcatcttccttctacacttgtttctgcgggagcgggagagaaggcaccagggaggccgcccccgtcacccatagccaaagtcacgcgccaccaaactttgttctctcacccagtcgctctcgcgttcagcgcgagccgagcccagccggtgggccggtcgctgaaggcggagccataaaggcgtcggcgacggcaggatgatgagcggcagatcgggcggcagggacggcgaggcggccggccccgtcatcaggatcagggtttcccacggagccaccttccgcgaggtcgtcgtgccggcgcaggctaccttcggtgagttgaagaggatccttgttcagactactggcttggagcctgagaggcagaggctcttc

SEQ ID NO: 265530 - DNA, 778 bp, Zea mays
ggatgttcgtgcctatatcacagcatcagaaattcagaatcgatccgatctccgcttgcgctgagctccatcagattcaattctctgcaggtgcaggaccgcgaacacgaggaggcaggggagcagcatccacaaccacaagccatggcggggaggaccaacatccccactaacaactccgccctcatcgcaatcatcgccgacgaggacaccgtcactggcttcttgatggccggcgttggcaatgttgatctgcgcaagaaaaccaattacctcctcgtcgacaacaagacgacagttaaacaaatcgaggatgcgttcaaagaatttactacgagggaggatattgctattgtgctcatcagtcagtatattgccaacatgataaggtttctggtggatagctacaacaagcccgtccctgctattctggagatcccatccaaggaccatccatatgatccagcgcacgactcggtgctctctcgagtgaaatatctgttctctgcagaatcggtggcgtctgataggcgatgaaggcatccttgcgtagcagtacccttcgatgcatctattttgttatggtattgaaaagaagatggcacgtaccattgggtgcgagcgagccagcatgaataataatgagcttgcaaacaataattggttgaactaaaccaacaccctttttttcataaatggttcgaatgataaaaaatattttttatgttaatcttttatctctttttatatattctatataattcttattctttacttt

SEQ ID NO: 265531 - DNA, 815 bp, Zea mays
cgttgggcatggcccacctgccattgttagaggcggtagcccacaggcggacccgaatccagaattcctgaatcctgtcactgctcgaaaatcgaaatcgatccgatctccgcttgcgctgaagcctgatctccaccgggttcgcagcaggggcgcaggacctcgatcacgaggaggcaggggagcagcatccacaaccacaagccatggcggggagggccaacatccccactaacaactccgccctcatcgcaatcatcgccgacgaggacaccgtcactggcttcttgatggccggcgttggcaatgttgatctgcgcaagaaaaccaactacctcctcgtcgacaacaagacgacagttaaacaaatcgaggatgcgttcaaagaatttactacgagggaggatattgctattgtgctcatcagtcagtatattgccaacatgataaggtttctggtggatagctacaacaagcccgtccctgctattctggagatcccatccaaggaccatccatatgatccagcgcacgactcggtgctgtctcgagtgaagtatctcttctctgcggaatcggtggcgtctgataggcgatgaaggcatccttgtgtagtagtaccctttggtgtatctgttttgttatgtattgaaaagaagtggcatgcgtccgagcgagacagcaaacaataataatggttgtggaaccaaaccaacccctttttttctttcataaaaggttggaaccctattttgttgctttgtactgtatttggttggttaatagagagtaataaaatgcgattgtcatgttgc

SEQ ID NO: 265532 - DNA, 578 bp, Zea mays
ggtggggaaaggttctaggagcattatgtaaatcatgaacagtagtaccactgtaccagctaggtaatagaagaaacgcccatcttataagttgtattcctgctgatgtctattaattgtgggtgacagattgccaacatgataaggtttctggtggataagctacaacaagcccgtccctgctattctggagatcccatccagggaccatccatatgatccagcgcacgactctgtgctctctcgagtgaaatatctgttctctgcagaatcggtggcgtctgataggcgatgaaggcatccttgcgtagcagtacccttcgatgcatctattttgttatggtattgaaaagaagatggcacgtaccattgggtgcgagcgagccagcatgaataataatgagcttgcaaacaatgattggttgaactaaaccaacacacttttttttcatccatggttcgaatgataccttggtgcttgtgtttgattggttattagggaataaaatgcccctgttatgacgaaaaaaaaaaaaaaaaggcgcggcgccccgggaatccggccggtacgtgcaggc

SEQ ID NO: 265533 - DNA, 791 bp, Zea mays
accgtccggaattcttttcgtttacgcgccgtgtcgcgtggcggacgcgggaaaaatcgaccgtcttttccaacccaagtggatgtgcaggaccgcgaacacgaggaggcaggggagcagcatccacaaccacaagccatggcggggaggactaacatccccactaacaactccgccctcatcgcaatcatcgccgacgaggacaccgtcactggcttcttgatggccggcgttggcaatgttgatctgcgcaagaaaaccaattacctcctcgtcgacaacaagacgacagttaaacaaatcgaggacgcgttcaaagaatttactgcatgggaggatattgctattgtgctcatcagtcagtatattgccaacatgataagatttctggtggatagctacaacaagccagtccctgctattctggagatcccatccaaggaccatccatatgatccagcgcacgactcggtgctgtctcgagtgaagtatctcttctttgcggaatcggtggcgtctgataggcgatgaaggcatccttgtgtagtagtacactttggtgtatctgttttgttatgtattgaaaagaagtggcatgcgtccgagcgagacagcaaacaataataatggttgtggaaccaaaccaacaccttttttttctttcataaaaggttggaatgctattttgttgctttgtactacctccgttcttgaatatttgtcgctcgctagttcatttttgaactaaatggtaacaaataaaaaagaacggagagagtattggattggtt

SEQ ID NO: 265534 - DNA, 955 bp, Zea mays
aaattgtatggcaatgtcacttatgttgatgagaaggcatcggcacagatatgaggtgaaccctgatatggttccagagttcgaaaatgctggacttcagtttgttggcaaagatgatactggaaggaggatggagattatcgaaatacccaaccaccgatattttgttggcgcacaattccatcctgagttcaagtcaagaccttcaaaaccttctcccctatttgtggggctaattgcggctgcatctgggcagttggatagggtcctgcaagaccgctgcactggtcatgctggttcagcgaaacatgttctgagcaatggctcatatacacccgcagtacaccaaaatgggaacccaaagaagctcaccaatggtctctcaaacggaacatactatgccaatggcaatggtgtgcatgcttagaccatcagatggatggatcaaggattttgcaactctttacttcaattatgcggttcctaatgcatcagttttgtccgttcgaggaagaaaaagttcttgcgctcgatgcagactgtctgctgggaatagtgctcgttcggtggtttttagttaaagaactaagctggatctctttggaaggcacgagactggtttctgtgttcgtctctaccctattgtgtaagctaaaggagcagatttgggacggaagagtttacaagttgtatatcctcaaagaaaagctgaatatttttattaacttaaattaggtcttcagtgaggtcgagagctgatgcttaaaagtgggcagcagtgcaagtgcaagagagagtatttcgaaatcaggcaactctgtattttgattttggacattttttttgtttcttgtgcgcaaataagttgatgcactgttgcatgatcatatatcagtttagactttagactcgaaaaaaaaaaaaaaaaaaaaaaaaaaacaagcgccgcgccgca

SEQ ID NO: 265535 - DNA, 983 bp, Zea mays
ggactgcctggagccacgcgtgcgtccacgcacgcgtccgattccctgctaaaaaccctagcccatcagggcagcgaccttggagagccgtctccaatggcgctactccgagcgctccggcgagcccttccggcgctctcctcgccggcggcgggtctcccccgtcgcgccccgcacccactacctcctccgcccgctcctcgtcggttcctggacccgatcgggctccgctccttctccgccgccgccgccaccgcgtcgcacgcgccgcccatgggggccaccctgttcggcgggctcatggacacccggttcccgaagcgccggtcgggcttcgccaaccgccggaagagggctagcttgcgccccaaaggtccgtactactgggtgaagtgcaagcctgacgagcccataccagttagtcagccgaaccaagggagcgtacgagggaggaaggagaagaagcggatcaagcagcgcaaggactttatcatggctgagaagaagaagcgcagagctcagtattctgctgctgttaagagaaaggaggcagaacgaacagaaaggaagatggctgctgtggcaagagagcgggcatgggcagcaaggttgatagagctaaaacagattgaggaagacgttaaagctgtaatggcataagggcctgctctggaaaatggcaaggcgtctaacctgtttctgctgctctattttctcctcctttgttcctacatagtttaaattgtcacaattctttgtgatggaatggaagaccagtaccacttctttcaacagtaatatcaaatgccggaactgtttttttaatacagactctcattagaccatgtttggagtttgtttacttttgatgtaatttagaataagtgatgcgatggtatctgtgtgcttgacatctgagatggctgttgtctgcaatatatagttttggtacacttgttctatgatacataatttgtactgtc

SEQ ID NO: 265536 - DNA, 300 bp, Zea mays
actagttctaggcgacgtctacagcttcggtgtggtcatgctggagctgatcgtcgcgaagcagccgatcgagaagggcaagtacatcgcccgcgaggcgaacagggtgttcgacgccgacgacgccgagttctgcgggctcaaggacatggtagacgcaaggatcatgagcaccaataaccacctcgcggcgttcggcaagttcgtccagctggccctcgagtgcgtcgacgaggtggccacggcccggccgtccatgagcgaggtcgtcaaggagatcgagatgatgctgcagagcga

SEQ ID NO: 265537 - DNA, 1222 bp, Zea mays
caacagcatcatggcgctcaccacgagcactaacaaccaagccttgcttgacgctcagctagagctctggcacacgtcctttgctttcatcaagtccatggctctcaagtctgcagtggaccttggcatagccgacgccatccacagccacggtggcaacgccaccctgccccagatagtttccagggccgcgctccacccgtccaagatcccctgcctgcgtcgcctcatgcgggtgctcacagccgccggcatcttcagcgccgcccaccgctcgccggacgacggcggcggcgagctcgtctatggactcacaccggcgtctcagctcttggttggcggctcttcaagcctggctcccttcatgtccctggtgttacaccaggtctacgtgtcgcctttccttggcctcggcacatggttacagcacgagcgctcagacccgaccctgtttgagatgacgcatgggctcactgcctgggacctgaatgaccacaagccagctttcggcgagctcttcaaccaaggtatggtctgcgacagcagcttcgtcatggacatcgtcgtcaaggagtgcggcgacgtcttccggggtctaagctcccttgtcgacgtcgccggagggcttggcgcggcggcactggctatctcgaccgcgttcccgcatgtccagtgcagtgtcctggatctcccgcatgtcgccgccaatgctcccgctaacaccagtgtcaagtatattgctggcgacatgtttgagagcattccaccggcagacgccgtcttccttaagtgggttttgcatgactggggcgatgctgattgtatcaagatactcaagaactgtaagaaagctataccttccagggatgcaggaggaaaggtgataatcgttgatatggttgttggaggccagtcgtcaaacattaagcacaaagagactcaggtcttgtttgatctcttcatcatgacgatcaatggcgccgagcgagacgaacatgagtggaaaaagataatttccgaagctggatttagcgactacaaaatcatacccgttctaggtgttcgatccatcatcgaggtctacccatgattatttggcgaatacgtgtttcgtttttttctgaataagttgtttggttaactagcatgggacgagtgtccatgagatcatgtgtgatgaaaactatgtttgtggtgaagtaagcactttgcaatgatatta

SEQ ID NO: 265538 - DNA, 990 bp, Zea mays
gctctatcaacaaggcaggcagctagtgcagttttgcaggacatcgctgattcaggggttctatttgcgttattgatgtgtgagcacaaggttgttagtcttgttggagcacaaaaggcaactttgcatcctgatgatattttattacttgcgaatttcattctgtcctctggatcttttagaacttcagagtcttttgtacccatatgtttgccaagatacaatcctatggcctacttgcatgcttatgttcatttttttgacgaacatacatatgtgactttgcttactacacgatcagatgctttttatgatctcaaagattccagggcccacattcaaaatgctcttttaaagtcaaatgtcctcatcgaagtccaaagatctttacatgagaatgcattgcgtgttgaggatctcccaaccaacccgtcttctcaatctgcatcacaccctccagagtcctctcaagacattagttcacaatctttgtcttctgaaatggcaattggaggaccaggtggactatggcattttatatataaaagcatttaccttgaccagtttgtgtcatcagaatttccctcacccataagtaacaaaaagcagaagaagggattgtacaaagcttaccaaaaattgtatgcatccatgcatgataaagcaactggtccgcacaaaactcaattcagaagagatgaggattatgttctattttgctggataacccaggatttcgaactatatgcagcctttaatccactggctgataagactcaagcaatcaagatgtgcaatagtggatgccaatgggtgagggattttgaaaatgagatattcgtgtatggggaaagcaccctttcctggtgatatgttgtcctgtgtgtaataacttgttatgcctatgttacatttttttgtttgaaagttttttttgatgttacttgtaaaaaaaaaaaaaaagggcggccgctcgcgatctagaactag

SEQ ID NO: 265539 - DNA, 746 bp, Zea mays
tgcagtacggccggaatccgggcgacgccgggccaccgctcctgagtcctgtccaccctgccaccgccgacgccgcgccgccgcagcaattgtcaccgtcgctatggcccgtatcaaggtgcacgagctccgggggaagagcaagacggacctgcaggcgcactcaaggagctgaagtctgagctctccctcctccgcgtaccaaggtcaccggcggcgcacccaacaagctctccaagatcaaggtggtgcgcacctccatcgcgcgcgtgctcacagtgatctcgcagaagcagaagtcggcgttgcgggaggcgtacaagaagaagaacctgctccccctcgacctccgccctaagaagacccgtgccatccgccgccgtctgaccaagcaccagctctctctgaagaccgagagggaaaagaagcgtgagaagtacttccccatgaggaagtatgctatcaaggcctaggtcagaactgtgagatgctgtgcttagcatatcatccgctgtgttttaatttttggtttgtatggacatttgttgtgggtcggaagtacgatgtattcctctgtttccttataaatggctagattggtttgactggcaattcgtattggcgttcatatttggtggcaacttctctttgtattcttctaaactagatgtttgctggtcattatatttgtgggaccgttgctcatggtaaacaaaaaaaaaaaaaaaagggcggccgctcgcgat

SEQ ID NO: 265540 - DNA, 802 bp, Zea mays
gttctagatcgcgagctgtccgcccttttttttttttttttttttttttttttattctcaatctgcatcacaccctccagagtcctctcaagacattagttcacaatctttgtcttctgaaatggcaattggaggaccaggtggactatggcattttatccattttttcatctcattcggcgccgcggcaccccctgctcgtcactcgcgatggcccggatcaaggtgcacgagctgcgcggaaagagcaagacggatctgcaagcgcagctcaaggagcttaaatcggagctctccctcctacgcgtagccaaggtcaccggcggggctcccaacaagctctccaagatcaaggttgtgcgcacctccatcgcgcgcgtgctgaccgtcatctcgcagaagcagaagtcggcgctgcgtgaggcgtacaagaagaagaagctgctcccgctcgacctccgccccaagaagacccgcgccatccgcaggcgcctcaccaagcaccagctctccttgaagaccgagagggaaaagaagcgtgagaagtatttccccatgaggaagtacgctatcaaggcctagatcagtgaaagaacatttatcctgtcaagttttgctcagaagttacttgaatttgagacaaatctatctccatccaagtactatgtagctgatcaactgcatgatgaaaaacgagtactttttgcttgtttaaacgtgctttaaatttaaagtttccaaaaaaaaaaaaaaaaaaaaaaaaaaggacggagggcggccgcaccgggaatctccggcgccg

SEQ ID NO: 265541 - DNA, 674 bp, Zea mays
tcgcccacgcgttcgcccacgcgtttcgcccattctttttttcatatcctcactcgccgccgccgccgctcgtccctcgccccatcgcgatggcccggatcaaggtgcacgagctgcgggggaagagcaaggcggatctgcaagcgcagcttaaggagtttaagtcggagctctccctgctacgcgtagccaaggtcaccggcggggctcccaacaagctctccaagatcaaggttgtgcgcacctccatcgcgcgcgtgctgaccgtcatctcgcagaagcagaagtcggcgctgcgtgaggcgtacaagaagaagaagctgctcccgctcgacctccgccccaagaagacccgcgccatccgcaggcgcctcaccaagcaccagctctccttgaagaccgagagggaaaagaagcgtgagaagtattttcccatgcggaagtacgctatcaaggcctagattagtgaaagaacagcttttatcctatcaagttctgcccagaagtttcttgagtttgatgtaccgcacatctatcgtcattgcgatggaatgatgaaaacgaatatgttttcgggtttcacttttatatatttttttttttttagtttttttttttatttattttattttttattttattttttttttttgttttttttatttttatttttt

SEQ ID NO: 265542 - DNA, 505 bp, Zea mays
  unsure (1)..(505): unsure at all n locations
agcttcgacaccgtacgaccgtactgatcctggcgccctgccgacgcgagacgagcggcgcagaattgtcaccgtgctatgagcagttaggtgcacgagctccgacgaagacaagactgactgcagcgcagtgaggagctgaagctgagctctaatcctcgcgtaggaacgtcaccggctgggcacccaaaagctctcaagataaggtggtgcgcaccttgatcgacacgtgatacagagatctcgcagaagcagaagtcggcgttgcgggaggcgtacaagatgaagaacctgctaccccctcgacctgcgccctaagaagacccgtgccatccgccgccgtctgaccaagcaccagctctctctgaagaccgagagggaaaagaagcgtgagaagtacttccccatgaggaagtatgctatcaaggcctangcattgcttgatgagcgcaaaaaaaaaaaaaaacacgaagaagaaagaagaggaaaccaaagtattttattt

SEQ ID NO: 265543 - DNA, 406 bp, Zea mays
gtgaatagaatgaccaatgctatatgcagtagtataatgtgtactagtagttgaagtaatatatcaagctactcatcgttcttagatcttcttgtctgttgacttgtggtgtttgtgttcttcagctctccttgaagactgagagggaaaagaagcgtgagaagtatttccccatgcggaagtacgctatcatggcctagatcagtgacagaacagcttttatcctgtcaagttctgcccagaagtttcttgagtttgaggtaccgcacatctatctccatccaagtactatgtagctgatcaactgcatgatgaaaaacgagtactttttgcttgtttaaacgtgctttacattgacatttcccagagaagggaagggtagagaggagggggggcgggggggggg

SEQ ID NO: 265544 - DNA, 638 bp, Zea mays
cccacgcgtccgtccacgcgtccggtcacctccacctttgagttcggcttccaagttgggtagaggtgtcatcaatcgataagtcaatgaccctgacgaccgagcactgcttgggaaccaatagcttgtcacctccacctttgagttcggcttccaattctggctctgcagcacatacaccgaaaattatgcatttttcagtcgcataccatcggcctagtcctttgccaaagcctaacgggaaggaagcaataaatttgatttcacattgaataacaacatggcagctatcacaacatctgggccaaaagccacataacccttgcgctgttactcatagctgacaatttttgggtctcgtaaaaaatattttccatgtaaaaagattaccactatatgatcacagggaaatgctgctaaatgagggagctttgtgaaatctgttgtaccgtttgatttctgggaaactgattggattgcccatgtaacatatttttattagggtgtagctgtaggtgaaactaatggtcaagattgtgccgacaaataggacattagggttgtagctgtagcgtgttgttgatgctgtgtaatgatcatacttgatgtaatcattattgattttttttggggaaggt

SEQ ID NO: 265545 - DNA, 1326 bp, Zea mays
cggacgcgtgggttggaacaggaaattaagtttcttagtcaatttaagcatgaaaatattgtgcagtactatggcagtgaaactatcgaagatagattctacatatacctggagtatgttcatcctggttcaatccataagtatgttcatcaacactgtggatcgctgacagaagcagtcatccgtaacttcacacgtcatattctcaagggtcttgcttttttacatagccaaaagattatgcatagggatatcaaaggggcaaatttgttagttgatattaacggtgtagtgaaattggctgacttcggaatggcaaagcatttgagtactgcagctcctaatctttcattgaagggaacaccatactggatggctcctgaggttgttcgggctacactcgataaaagtgcaggttatgatcttgctgttgatatttggagccttggctgcacaatcattgagatgtttacaggaaagccaccttggagtggtcttgaagggccggctgcaatgtttaaggtgttgcgcacggacccaccaattccagataacctgtcccctgaagggaaggattttctgagatgctgcttcaagagaaaccctactgagcgaccaacagcaaacaagttgctcgaacacccatttatccaaactttgaaccactacagcccacatagcgttgtacattcattttcgggaattaaatctccagatactgtgcacagcagtgcaagagataaagtaccctggaaaagtgattcatatatgagagggaaacatgcaaatggtgaaacaagcagtgctcggtcgtcagagtcattggcttatcggttgatgacacccctacccaacttgggaaccaatagtttgtcacctccacctttgagttcggcctccagttctggctctgcagcacatacaccgaacagtatgcatttttcagtcccataccatcagcctagtcctttgccaaagcctaacgggaaggaagcaataaatttggtttcgcattgaataacagcatgccacctatcacaacatctgggcaaagtccacataaacagcgcaagtgtatccgtccctagcgtctgacccttgtactgccagtaatagctaacaattttctgggtcgtgtaaaaataatttccatgtaaagagatcaccgcgatatgatcacagggaaatgctgctaaatgagggagctttgtgaaatctgttgtaccgtttgatttctgggaaactgattggattgcccatgtaacatatttttattagggtgtagctgtaggtgaaactaatggtcaagattgtgccgacaaatag

SEQ ID NO: 265546 - DNA, 1189 bp, Zea mays
cgactgtggacacgggagcttctcaaacaaccccaagctgaacagcgtggtcggacacatactccattcctccattcttgtcccgtaccacggatggaggattagccacaggacgcaccatcaaaaccacggccacgttgagaaggacgagtcctggcacccgctaccagagaggctgtacaaaagcctggactttatgactaggaaattgcggttcaccatgccgttccccttgctcgcattcccgttatacttgttcgcaaggagtccagggaagtcaggatcacacttcaacccaagcagtgatttgttccaacctaatgaaaagaaggacatcataacatcgacggcatcctggctggccatggttggtgttctggctggtctcacctttctgatgggtcctgttgcgatgctaaagctctacggagtcccatactttgtatttgttgcttggctggatatggttacatacttgcaccatcatggccacgaagacaagcttccctggtaccgtggacaggaatggagttatctgcgtggaggactgacgacgctcgaccgggactatggactgattaacaatatccaccatgacatcggaactcatgtcatccatcaccttttccctcaaatcccgcattatcatctcattgaggcgactgaggcagcaaaaccggttcttggcaagtactacaaagaaccaaagaagtcgggtcctctcccgtggcacctgtttggggtgctagcacaaagcttaaagcaagaccactatgttagcgacaccggagacgtagtgtactaccaaactgactcgaaaacgaacacctctgcacaaaaatctgattgacacagactatagaacgtagcgtattcttcatttttctcaggcgggctgtgcctgaagacctggccagcctcctgagacctctgattggtgtgtgtgtgtgtgactgggttccgtcaattcaagaatgtaaggtggcgaagtattatcatgtatgcgagtgagggtataattctttcgaatgatcgaagtcggatgctgcttccgatgtaacgaactgtgattctttggacaagaggtgtactattacagtaaagagtgaaaaaaaagaagagttagctacaaaaaaaaaaaaaaaaaaaagggcggccgctcgcgatctagaaccggacgcgtgggcgt

SEQ ID NO: 265547 - DNA, 1082 bp, Zea mays
gcccaacttgatcttgctagtggaagattgtggtcgcagttgttgcatttcaaacaagaaggttttcttcttggtgctggaagtccttctggatctgatgctcacatctcatcaagtggcattgttcagggacatgcgtactcaattttgcaggtaagagaagttgatggccacaaactcatccaaatcagaaatccatgggcaaatgaagttgaatggaatggaccatggtcagactcgtcaccagagtggacggaacggatgaagcataagctcatgcatgttccacagtcgaagaatggggtattctggatgtcttggcaagattttcagattcactttcggtcaatatatgtttgtcgtgtttatccacctgagatgcgttactctgtccatgggcaatggcgtggctacaatgcaggtgggtgccaagattatgactcgtggcaccaaaatccacagtatcgacttagagtaacaggacgtgatgcactataccctgttcacgtttttattacccttactcagggtgttggtttctctagaaagacgaatggttttcggaactaccaatctagccatgattcttcaatgttttacattggaatgaggatactcaagacacagggctgccgtgctgcttacaatatctacatgcatgaaagcgctggtggaacagattacgttaactcgagggagatatcatgcgaactggtcttggatccttatcccaaagggtacacaattgtgccaactaccatccaccctggggaggaagcaccttttgttttgtcagttttttcaaaagcatcaatcagactagaggctgtttaattcaagattgagatcccatgtgtttggtggtagctgcgtctgctgggcactccccgtgcacgcaggatccagctgtgggttctcgggaactagataatgggtataggaattgcctcctggacaacttcaatcaatcttgctgcatgcaagtacataagttcggttgcttgttgcagaactgacaaactgcaatgcttcttgtgctgaagggaaaggagagaaggtatgatccatggttctttggtagc

SEQ ID NO: 265548 - DNA, 790 bp, Zea mays
  unsure (1)..(790): unsure at all n locations
ctccaacctacgcagcagaggccagccacctccccgtcgctctcacgctcttcgtgcccgccgcctcccctccgtcttcccctctccctctcccctcccgtctgacgcacatggcctccatcgccggatcttccgccctctccttcgccaggcccgtcaaggcaatcaacacaaattctctagctttctccccgttgaggaagggcaacacattcctccgcctgcaaccaatgcctatgagatctgtttcctgcgctgccaagaaggatacaacagacaaggtttgtgagattgtgaagaagcagcttgctcttcctgaccatactgaagtttgcggtgaatcgaaattctctgaactcggtgcagattcgctggacacggttgagattgtgatgggccttgaggagcacttcgacattagcgtggaggagtccagcgcgcagacaattgccaccgttgaagacgccgctgacctcattgacaagcttgttgctgtgaaggcataggccgcatctcttctatcattgtcttaccactctaggtttctatggtctgaagacttgtgattttctccgcactgctgttgctattcccgtgtcgtaataatacgagatgttttaagcggctgaacacacggtggtgtaatctgttactggtaaggtgcattgttgtatgaattgtttctcacccagaagaaccagaccggctntatatgatatgctatttactcaacttgatgtattctcttcccaacttcttgtgacagacagtgattttgagaatccaaact

SEQ ID NO: 265549 - DNA, 752 bp, Zea mays
tcgttgcccgccgcctcacatacatcggttgctgtcccctcacgcctgaggcacatggcctccatcgccggatcttccgccctcttttttttttttcttcgccaggcccgtcaaggcaatcaacacaaactctctagctttctcaccggtgaggaagggcaacacattcctccgcctgcaaccaatgcctatgagatctgtttcctgcgctgccaagaaggatacaacagacaaggtttgtgagattgtgaagaagcagcttgctcttcctgaccatactgaagtttgcggtgaatcgaaattctctgaactcggtgcagattcactggacacggttgagattgtgatgagtctcgaggagcacttcgatattagcgtggaggagtccagcgcacaaacaatcgccacagttgaagacgccgcggacctcatcgacaagcttgttgctggcaaagcgtagttctgtacctcctctatcgttgtcctaccactctaggtctatcccttgatctaggtttctatggtctgaagatttgtgattttctccgcactgttgttgctatccccgtgtcgtaataatacgagatgttttaagcggttgaacattacggtggtgtaatcagagtaatctgttgctgttaaggtgcattgttgtatgaattgtctctacccgagtagaagaatcagaccattcgggattctatgatcacagtacattttttgcttgaaaaaaaaaaaaagaaaaattcgac

SEQ ID NO: 265550 - DNA, 601 bp, Zea mays
cccacgcgtccgaaggtattaacatcaatgacaacaaaaaagcttattatgaaaacaaatggcatgttgtatctaactatactaattttgtgtcactaatatgtcttttttctatagaattcagtcaaaataaaaaatttaacttagaacaactctagaaatggatttgttcaagcaggagccaggagggaaatgatctaacttgatagatgaaaggcttgctcttttagatattttgcttcaagattttactaaaggtacttccaaatttgtcacaggttgagattgtgatgagtctcgaggagcacttcgacattagcgtggaggagtccagcgcgcagacaatcgccaccgttgaagacgccgcggacctcatcgacaagcttgttgctggcaaggcgtaggccgcatctcttctatcattgtcttaccactctaggtttctatggtctgaagacttgtgattttctccgcactgctgttgctattcccgtgtcgtaataatacgagatgttttaagcggctgaaaaaaaatcaaagcggaactaggacacgtgcgcggggtactccatgttcgtggtcaacagggacggccaaggtg

SEQ ID NO: 265551 - DNA, 443 bp, Zea mays
tgttcggccagccacctccccgtcgctctcacgctcttcgttgcccgccgcctcccctcctccccaatccacctcactcctcccgtctgacgcacatggcctccatcgccggatcttccgctctctccttcgccatgcctgtcaaggcaatcaactcaaattctctagccttctccccggtgaggaagggtaacacattcctccgcctgcaaccagtgcctatgagatctgtttcctgcgctgccaagaaggatacggtggacaaggtttgtgaaattgtgaagaagcagcttgctcttcctgaccacactgaagtttgtggcgaaatcgaaattctctgaacttggtgcggattcgctggacacggttgagaatgaatcacaatatttcttttcgctgatgtcatctacataagtcacttgttaaatgattttataatggaa

SEQ ID NO: 265552 - DNA, 867 bp, Zea mays
cccacgcgtccgcttctcgcgcgataagcagcagctcatcacctgaaggagagcagcccggaggagggggagcaagcagcagccgtcggtggaagatgtcgtacctgctgccgcatctgcactcggggtgggcggtggaccaggccatcctcgccgaggaggagcgcctcgtcatcatccgcttcggccatgactgggacgagacctgcatgcagatggatgaagtgctagcagcagtagctgagaccataaagaactttgcggtcatctaccttgttgacatcacagaggtccctgatttcaacaccatgtatgagctgtacgacccttcgacagtgatgttcttcttccggaacaagcacatcatgattgatctcgggactggaaacaacaacaagatcaactgggccctgaaggacaagcaagagttcatcgacattgtggagaccgtatacaggggcgcccggaaaggccgtggtctggtgattgctccaaaggactactccaccaagtaccgttactaagaaggcaggcattccccttatgcaatctattggggatgtttacacggacagttagtccgacaggtgatccctaactgtatcttggcataccctagtaattcaagttgctggctggagtgatgcttatccatgtcttggcatgccatagtgaacatgtaaacctgtgatttgaggtgattattcgagtgtaaagaaaccaggattgcgttcgcctatgactatgtgtctagttgtctacttaataagaaacagttattggtttggaatatcggaactgagacaatggtttcctttcggtatttctattatcaactaccctgctttgctacgttttttatatatt

SEQ ID NO: 265553 - DNA, 432 bp, Zea mays
cccagaacgaggccatggacgaggcttgttggtccgacgtcgaattctgcagaaccactcaggtcaggtgacagaaaaaaaaagcttggcacggcaccctgttgagcctgttcctctcatccccgccctcacctttctgtctcctcccgtcgctcctctgccagaactggtactgtctctccaagacactcgcggagctggaagcgcttgattacgcaaagaggagtggactagacgtggtgtccgtctgcccgtcgctggtgatcgggcccttgctgcagtcgacggtgaacgcaagcagctccgtcatagtcgattgcttgaaaggagatcgtgaggtgaagctgaagctgaggaacttcgtggacgtccgcgacgtcgccgacgctctgctcctggtgtacgagactccggaggcgtctggacggtaca

SEQ ID NO: 265554 - DNA, 524 bp, Zea mays
atcggctaacaagtaataatcctctcgatacccgaatcggtgaaggaaaacaagacgagtccgtcggtcgtgatcggtaccaatggaaggcgcagcggggatcaggacgaggccggcggtgtgcgtgaccggcgcgggcggcttcgtggcctcgtggctcgtcgagcgcctcctcgccggcggccgatacatggtccatggcaccgtccgtgatccgggcgacgccaagaacgcgcacctggcggcgatggacggcgccgcggaccggctgcgcctgttcagggccgaattgctcgactacggcagcgtggcggcggccatcgccggctgcgacggcgtcttccacgtcgcgtccccagtccccatgacctatccaatcggtgaccccgaggtagagctgctcgctccggccgtgacgggcaccaagaacgtcctgaaggcgtgctccgaggccaaggtgaagagggtcgtcgtggtgtcgtcggtggccgccgtgatggtgaaccctggctggccccagaacg

SEQ ID NO: 265555 - DNA, 629 bp, Zea mays
ttcttgcgtccgcacgtacacactgcagccatcaaaagccatggaaggccgcgcgcgcctctccctcgtccacgccgccgccgcgctggtggtcctgctgcagctgcatggcggcgccgtcgtggttgcgtctgagccgccctacacctgcggcgccggagcgccgcccaacatcccgttctgcgacgcggggctgcccatcgaccggcgcgtcgacgacctcgtctcgcggatgacggtggcggagaagatctcgcagctcggggaccagtccccggccatcccgcggctcggcgtgccggcgtacaagtggtggtccgaggcgctgcacgggatctccaaccagggccgcggcatccacctcgacggcccgctccgcgccgccaccagcttcccgcaggtcatcctcaccgccgcgttcttcaacccgcacctctggtaccgcatcggccaggtgatcggcgtcgaggcgagggcggtgtacaacaacgggcaggcggaggggctcaccttctgggcgcccaacatcaacgtgttccgggacccgcggtggggccgcgggcaggagacccccggcgaggacccgacgatgaccggcaagtacgccgccgtcttcgtacgcggtgtgc

SEQ ID NO: 265556 - DNA, 684 bp, Zea mays
  unsure (1)..(684): unsure at all n locations
tttagccattgagctatccaaaagagaagatgagttgctacggcaaaaaacagaggtcacaaaaattgcagacacgcttaaactggcttttacagaatccaagagaattattgacgaaaaaagagccaatgctcggctggagatagaaagtgctaaagcttctgtacaaaaaattcaatcagcacttaaagagcangaaattttttctcaaagaactgggaagcangacgtcgatgaactgaaggaagaagttcaagaagcaccaagagtgaaaatgttgcattgcccaagcaaggcaatggacattgagaacgagatccaagttctgtgtgatcaactggctaaaaaatcttcagattctcttcgccttttgaaagagttggagctgcatcgaagttacggggaaaatgacatgcccttgtatgaactaaagggtctagaaactttaggctcaacgttgcacatagttgttcacgactgtgcctctgtagatttctggaacagttcaatccagtggtttcgcatacagcctgaaggaagcaagaaagaaattatttgatgcaccacaaaaccagcatatgctccagaaccacatgatgtgggccggtacacccaagctgaagtcaaatctggtggccaaacatcaatcacaaaaattgctggttcagtagatcctggtttgac

SEQ ID NO: 265557 - DNA, 1890 bp, Zea mays
tttaaacaaaccaaatctggctgcgagctgggcggcgagggcgcgcggcgccatggcgaggagcaggacgtcgggcggcggcgagtacgagagcggcagcgaccacgacggctcgctgcagaagccgctgctgcccaacagcgggagctggtaccggatggggatggggtcgcgccagtccagcctcaacgccgccggcacctcctccatggccgtcctgcgcgagtcccacgtctgcgccttcctctgcacgctcatcgtcgcgctcggccccatccagttcggcttcaccggcggctactcctccccgacgcaggccagcatcatccgggacctcaacctgtccatctgcgagttctcggtgttcggctcgctgtccaacgtgggcgccatggtcggggcgatcgccagcggccagatggccgagtacgttggccgcacagggtcgttgatgattgcagcagttccgaacatcatgggctggcttgcaatctccttcgcaaaagacacttcgtttctgtacatgggacgattgcttgaaggatttggtgtcggtgtcatttcctatgtggtaccggtatacatagcagagatatctcctcagaacatgagaggagctcttggcgctgtgaacccgttgtctgcaacctttggtgtcctgtttgcctatgtgcttggcttgttttttccttggaggcttcttgcattaataggaaccttgccctgcttactgttgatacctggcctgttcttcattccggaatctccaagatggctggcaaggatgaatatgatggatgagtgcgaggcttctctacaagttctgagggggttcgacgctgacatcactgcagaagcgaatgatataaagatagctgtagcatcggcaaacaaaagtggtgcaatgagctttcaagagttgaaccagaagaaataccgcacgcccctaattctaggaatgggcctacttgtgttgcagcagctgagtggaataaacggtataatcttttatgcaggtagcatcttcaaagctgcagggctcaagaacagtaacctggacacatgtatacttggagtgattgcggttcttgccactgctgttacaaccaagatcttggacagagctggacggagaatcctccttattatttcttcttctgggatgaccctaagccttcttgtagttgctgttgtattttacatcaaggataatatttcacatgactctgacttgtataacatcttaagtatggtgtccttggttggtgtcgtggcttatgtcactgccttctccttcggtatgggtgccattccttggatcataatgtctgagatccttccagttagcatcaagagtgtggcaggaagcttcgcgacccttgccaactggttgacatcctttggaataacaatgacagcaaatttgcttctgacctggagtgctgcaggtacatttgcctcctacatgatggtgagtgctttcactctcgtcttcgtcatcctttgggtgccagagacaaagggaagaaccctcgaggagatacaatggtccttccagtgagctccagcatttcatatatatatgcaattagggcgtcaaaatgcgaaatggttcttcgagttttgtcgctttagatactcaaatcactcgacgaaggccacacattctttctgttcataaaaggtcttgtacatgagattgcataccccgttgttataactttacccccaatagacttgtaaatgcttgtgcagtaactcttatattacttttgcttcaacattgtaagatagaagacttgccaaaataaaatctgaaccttgggtccaatattccatgtaaacccgagcatgtttcttgatccatcaaaatctcaagcatttttgttg

SEQ ID NO: 265558 - DNA, 574 bp, Zea mays
ctcgagccgtttgcttctgaactggagcgctgcaggtacatttgcctcctacatgacggtgagtgctttgactctcgtcttcgtcatcctttgggtaccagagacgaagggaagaacccttgaagagatacagtggtccttccagtgagctccggcattcatatgtacatgcaaatagcgtggcaaatcctccaggatcccaataaaagatatagtgaaatatagcagaagctatttcatttagcattttttatagtttaaatggaatttcgctgccgattctgcatgagaacatgtaaataaggagatttcacgaacatgaacactcaaatacatgtacaggcctgtaaaagaagatgtctctagatccattactttaatattcgtggaatcatagccagaagtataagctagtgaggggaattgtagatcaacgggaagatggtgatattctgatacaatgatttttatactgagttttggtggtttgtcaaccactttattctcgttgaggcaaaaaaaaaaaaaaaaaaaaaaaaaaaaaagggtggcttccggacgcgtgcgtggaccc

SEQ ID NO: 265559 - DNA, 827 bp, Zea mays
  unsure (1)..(827): unsure at all n locations
tttttnttttacgcggtggtaatggtgttcatatcttttcgtatttgacatacacaaccattggtgaaaaatacatgcagctccttcttctgaacccaccgcggcctcttcttcaccagttcctctgtcttgccgccgccgcctgtgcagttcagttcagttcagttgtcctgtgggtcggaccgttcaccgcttcactccacgggatcaggcacagtgatcagtgccgtgctagctgtgtggaacgcttgttttagtgttgtatccacatgtacgatttgtaacgtttccttgcttctcccgtttcgtgttttcgtatggtatctatggtattgcaaagtccatggccacgatagacagggaaagcatatgtatacaccattagaaggatgtgctctgcgcctctgcccgagtcttgaggacaggagctgcatgtatttttcaccaatataatggttgtgtatgtcaattccgaaaagatatgaacaccaaataaaaaagggcaaaaaaaaaaaaagggcggccgctcgcgatctagaaccccacgcgtccgggaggcttcttgcattaataggaaccctgccctgcttactgttggtgcctggcctattcttcattccggaatctccaagatggctggcgaggatgaataggatggatgattgcgagacttctctacaagttctcaggggattcaatgctgacatcactgcagaagctaatgatataaaggcgtgcactttactttcattcatttagactgattgaatacagtttatttgaatagtcttcactttgtgtattattatctttaacatttggcatat

SEQ ID NO: 265560 - DNA, 1447 bp, Zea mays
ttcaccgcacacccggcggcgccaagcccttcgaccaggtagctgaccagcatagcggcagatggtttcgcggccgctagagacttagcgtcgacgaagagggaggaagcggcgtgccacatgttgagtgagcagacggcggctagcactagcagcagcggcggcggcgtcgagcgtcaggacaggtggctgcagccggtggcggagaacgaggaggaggaggaggagttcagggacatccacgcgctgagcccgccgccgagccagccgtcgtcgtaccgccgggcgcgcggcggcgagccgtgggggtccgccgcgggcgggagcaggcacacgtccgtccgctccgtcgggagcgacaccgcgcccagcgagcccttcccgactatgaccagggagttctcggccatggtcgccgcagcagccagcgccgcagcagccagccgtgacgccgacagcgacgtcgtgggcagggccgaggaggaggaggaggaggagctggaggagaccaacccgctggccatcgtgccggacagcaaccccatcccgtcgccgcgccggggcccgccgcccgccgccccgggcgccgacgcggcggcgctggtggccgccgacgggcacggaagccgcgaaggcgggggggtgtccgtggggcaggtcaggaaggaggaggtggagtccaagatcgccgcgtggcaggtcgccgaggtggccaaggtcaacaaccgcttcaagcgcgaggaggtcgtcatcaacggctgggagggcgaccaggtcgagaaggccagcgcgtggctcaagaagtacgagaggaagcttgaggagaagcgtgccaaggcgatggagaaggcgcagaacgaggtggccaaggcgcggcggaaggcggaggagaagcgcgcgtccgcggaggccaagcggggcaccaaggtggcgcgagtgctggagctcgccaacttcatgagggccgtggggagggcgccctccaccaagcgctccttcttctgaacccaccggcctcttcttcaccagttcctctgtcttgccgccgccgcctgtgcagttcagttcagttcagttgtcctgtgggtcggaccgttcaccgcttcactccacgggatcaggcacagtgatcagtgccgtgctagctgtgtggaacgcttgttttagtgttgtatccacatgtacgatttgtaacgtttccttgcttctcccgtttcgtgttttcgtatggtatctatggtattgcaaagtccatgtccaccatagacaggcgagctatatgtatacaccattagaagaatgtgctatgcgcctctgccagagtattgaggacaggagctgcatgtatctttccccaatataatggttgtgtaggtcacttacgaaaacgcgtgggtgggtcgggccagtaagtccgggccggtgccggcgggcgagccagccttac

SEQ ID NO: 265561 - DNA, 581 bp, Zea mays
ctctgctttgatgaatgttgccattttattgtttgttccaagttctcctctgcatttgtctacaacagtgctggttaaccttgttttgactgtgagttctaacaatcaaagctctccagggctcaagaacagtaacctggacacatgtatacttggagtgattgcggcaagtacctaatgactagatagacctgatctagtctcccaatgttttttcattaatcttttgacaacattccatcaggttcttgccactgctgttacaaccaagatcttggacagggctggacggagaatcctcctcatgagttcttcttcggggatgaccttaagccgtctggcagttgctgctgtattgtgcatcaatgtagagttcatgtttctttgcaagagcaatctagtgaatattctggaggtgcagtattattccgaggtctgtcatcccaatctactgaatattctacgctcttgtcatcggctattcgtttcaggataacattgcacaagactctgacttgtacgacatcttaagaatagtgtccttggttggtgtcgtggtaagtctgtcgttcgcattttgt

SEQ ID NO: 265562 - DNA, 503 bp, Zea mays
cccactcgtccgcggacggtgggccgatccgcagatggtctctcccggccgctactagaggcttagcgttgagagccacatgttgagtgaacagacggcggctagcactagcagcggcgagcatcaggagaggagcgtcgtcgaggacaggcggctgcagccggtgggggagaacgaggaggagttcagggacatccacgcgctgagcccgccgccgagccagccttcgtcgtaccgccggagccggcacgcgtccgtcgggagcgacaccgcgtccagcgagcccttcccgaccatgagcagggagttctcggccatggtcgccgccgcagcagccatcgccaacggtgccgccgccgacaggctcggggaggcccgggacgaggagaccaacccgctggccatcgtgccggacagcaaccccatccccgcgccgcgcccggcccggtgccctgccaccccatgcgccggcgcccgccacgccaacggcgacggtggggtgt

SEQ ID NO: 265563 - DNA, 361 bp, Zea mays
ttcatttatctacacctccacactcactgactagcgtggagcgaactgtccagtgcttgctgactgataccaacgcatgtaatgtgcagaggaagctcgaggagaagcgcgccaaggcgatggagaaggcgcagaacgaggtggccagggcgcggcacaaggcggaggcgaagcgcgcgtcggcggaggccaagcggggcaccaaggtcgcgcggctgctggagctcgccaacttcatgaggggccgtggggagggcgccctccgccaagcgctccttcttctgaaccctcccccaccgcccaccgggcctctcccccttcaccagttcctctgccctgctctgctcgtcgtcgccgcccg

SEQ ID NO: 265564 - DNA, 875 bp, Zea mays
ttcatttttttttttttttttttttttttttttttttggttcatacgggaagaacgagacattgctaaatacccaatctgctcactgaaacgagcaacattacgttctgattttcagcaaatctatcctaacaacggagtgtgacggatgagtttacagcaacaagaatgcgcagcgcagccaggtctcctccttcaccaaccggggagacagcaaccagttctaaaacgactggacgctatctacaggcctgggcatgggctcaccccgcaggaagtgctcgaacagcttcaggccctgccgcggccggtgcaggggaacctcgtgccctgcgcctcggaccgtcaccagtgtcagcccctcgtacacctggcaccacccaccgaccgcttcgtcgtcgtaccaaggataccagttcgtgatagtcggtagaaagagggcgtcaatggagtaccttgtcgcggtgagcgggacaacggaatcagcgtcgccactgaaaacccatatccttatgcccgcggcgatgagttcacggtagataggaagcatggacctcggtgaatctttccaaaaatcatacactgggtcactgcaggttacccagggatacggtattccggtgacattggcgtgtagagctctctgcacctcaggtaagttgtagtacttcgtggagtacttctccgtgcagggatcgtaccctctgggcaaccagggcgttcttcctctgattagcctgcgccgaaggagtgcaacaaggtcttcgacatcgccgaggccgaggaaggcaatatcgatgcgtacagcatctacccgccgacttgcaagaagacttcactccacaagcgcaggctaaccagggcgttcttcctctg

SEQ ID NO: 265565 - DNA, 1224 bp, Zea mays
cgccactgaaaacccatatccttatgcccgcggcgatgagttcacggtagataggaagcatggacctcggtgaatctttccaaaaatcatacactgggtcactgcaggttacccagggatacggtattccggtgacattggcgtgtagagctctctgcacctcaggtaggttgtagtacttcgtggagtacttctccgtgcagggatcgtaccctctgggcaaccagggcgttcttcctctgattagcctgcgcttgtggagtgaagtcttcttgcaagtcggcgtgtagatgctgtacgcatcgatattgccttcctcggcctcggcgatgtcgaagaccttgttgcactccttcgacgcatgctcagatacgtcgaactggcaggcaagccgcagcttctcgtaggtttcgtcagagatcagcccgtgcgtccacaagtactcgaatgtgccgatgaagtcgtggtaatcgtcaattaccgcatttccaaccatgaagcctttgaagtttaggatcggcttctcgatgcctttgttgttccggtagactagctgagacaactgaggcacgtagtggcctgcgtagctctctcctgtgatgtagaaatcgcgatgcttgtattgtgggaaccgctccagccagttcaccaagaaattgtacgagtcatgggctgtcttgttgtcaccggcagtgtacagatcggaggtggagttggagtatgagtagccgacgccggccggcgagtccaagaacagcatgttcgccactttatcccaggggtaggggttcaagtagagcgtcctgccgtcggcgttgatccggaaggcgccgagctcctctgacgcgccgtagccgacggaggagcacccgggcccgccgttgagccacagcacgagcggcgcggactccgcgggcacgccggccgcctcgatgaaccagtagaagagggcccgccccgccgccgcgtccacggtgacgtagccggagtacatggagaagttgaccggcggctggcccggcagcctgccgatccggtccgcctccgccgcagccgtcgcggttgttgcggcggcggcgcggaggaacagcgctaatgtggcggccaggaccgcggcggtcgccattggcgctcgcggtaggtcagtggatcggcggagggcagcactggttggttggtggtgcagagtagcagagcacacggacacaggtagagagtgttgat

SEQ ID NO: 265566 - DNA, 480 bp, Zea mays
  unsure (1)..(480): unsure at all n locations
agctcgataacctcgatccgatccatctcgtctcttccgcgttgcttgcttgcttgctttagatgtgctgagtgctgactgctgttggggtagggcagggggagaggagaggaggaggaggaggagctcgtagcggaatcagatcagatggtgcgtcgccagagcagagaaggccggggcctgggctggcctgcgtgctgcctcggcttcctgctcaagctgctcgcgttcctccaggccttcgccgccgtctccgccctcatctacgccgcttggatcctctcccgctgggcgcgccaccaccagctccacctccgcgaccttctaagcccggacctatggttcccgtcgctcgtcatggcggcgggggatcttctactgcctcctgctcctcgcgggtacttggcagctgagatcaacaccggatgctgnctctgcttctacaccatcccagccatggctatgatgctgctggaagct

SEQ ID NO: 265567 - DNA, 324 bp, Zea mays
accccgcagtagtgctcgaacagcttcaggccctgccgcggccggtgcaggggaacctcgtgccctgcgcctcggaccgtcaccagtgtcagcccctcgtacacctggcaccacccaccgacctaatcaaggttcacagagttaggttccagcacgaagggagtgaagaaaaaaatgtcaagatggatggatggatgtagcggtgccactgcactgactaacctcttcgtcgtcgtaccaaggataccagttcgtgatagtcggtagaaagagcgcgtcaatggagtaccttgtcgcggtgagcgggacaacggaatcagcgtc

SEQ ID NO: 265568 - DNA, 455 bp, Zea mays
ggggtttgattcccaacgtacgactccagcccgacgtggtacctcgaccctgcctgagatgtggtgaaggatggattcaacggggtagttctgaattcgtttgatctcaagctatttcgttcgcctgtttgttttatttcgttcgatctcaagctattcggacggtgctcgatctgaattcccaagtacaggagcgtcaaacgattcactcccaccgtatttgttttgtgtcctcgtagacctgtgcataaattgtagtgtccccatttcgacggcagtcaccattctccacaccttgtcgtctgcataagccggacgattgttgggtggtgggaatggaaccgcgagaagcatagaagacatttgatcgtcggcgcgtctatgcgatagtcctgccattgcaaacatactacagatgattaactgacaaggtgatgatgaacgagcagcggcca

SEQ ID NO: 265569 - DNA, 1889 bp, Zea mays
tttcgtgcaactccggaggggacatcgtgtacctgcggggtatgtgtcactagaggttgacctggttaaaaaccttggttctgcaaatgaccgctggatagttgcaagaaacgaaagcgatgcaaaacttgaggcacagaaaaagtatgtaggaatgaaattacgtctagatcaagaccctgatgtactggacacatggttttcatctggtcttttccccttaacagtacttggttggccgtctgataccactgacctccgtgctttctaccctacatcggtactagaaactggacttgatattctcttcttttgggtagcaaggatggtgatgatgggaatgcaacttggtggtgacgtgccatttcagaaggtttatttacatcctatgattcgggatgcacatggccgaaagatgtcaaaatcacttggtaacgttgttgaccctcttgaggtgataaatggcatgtcactggatggtcttctgaaacgtttggaagaaggcaatctggatccaaatgaattaaacattgcaagagatgggaagaagaaggattttcctgatggcatagcagaatgtggtaccgatgctctacgctttgcactgatatcgtacacttcccagtctgacaggataaatcttgatattaagagggtggttggatacagacagtggtgcaacaaattatggaatgccatccgttttgcgatgggcaaactgggtgaccattacattccgccggcaactgttgatgtgtctcttatgccaccaatctgcaagtggatactctcggtgcttagcaaggccgttgggaaaaccgtttcctctttagaagcatacaagttgtctgacgcaacatctgctatatactcgtggtggcagtatcagctatgcgatgtatttatagaagctatcaaaccttacttcttcaacgattctcaagagcttgaatcagcaagagctgcctccagagataccctgtggatttgcctggagactgggctgcgcctgctccacccgttcatgccctttgtaacagaagagctctggcagcgtcttccacagcccaaagaatcttggttggaaaggtcgattatgatttcacagtatccatctcttgttgaggaatggagtaatggcagacttgaaaatgaaatggacatcgtcttggatgctgtgaacaaaataaggtctctgaagccaccaacagattcaaatgaaagacgtcctgcttttgcactttgccgaggccaagagatcgctgccacaatccagtgctatcaatctctaatcgtgtatctttcttccatatcacatctcaagatcctgacagagaatgatgaaactccagccgattgtgcaactgctgttgtcaacaaagacttgtctgtgtaccttcagctccaaggagctttaaatgcagacgctgaacgtgaaaagctaaagaagaaaaaagatgagattcaaaagctacagaatgcactggcgcagaaaatggacgcctctggctatcgcgagaaggctccacagagcgtacaggaggaggacatgaggaagctcaccgctttgttggagcaactagaggtcatcagtgaagctgagaagaaattagacgcgaactgagtttgacctctgtttcgaagaggccttgcttgtaccgaagctgaccccatatttttcttgtttgcaaaaaagctcagttatgtgcctgtacgctcgggctcaggtttacagttgatggttcaaatggaagccacatttttgcagcttgtcaagggtgcactggctaatacagaagcatatttattttgtcaagtgaggaacttttgatgatgaatgatgatgcatatggaatctgtcagaaaaaaaaaaaaaaaagggcggccgc

SEQ ID NO: 265570 - DNA, 391 bp, Zea mays
ttcagctccaaggagatttaaatgaagatgctgagcgtgaaaagctaaggaagaaaaaagatgaaattcaaaagctacaaaatgcactggcacagaaaatggacgcctctgggtatcgcgagaaggctccacagagcgtgcaggaggaggacatgagaaagctcaccgcgttgttggaacaactagaggtcatcagtgaagctgagaagaaattagactcaaactgagcctgtaccgaagttggtccccacatttttcttgtttgcaaaaagctcctgtttgctcaggttttcaattgatggttcagatggaagccacacttttgcagcgtgtaagaatattcactggctgtacagaaccatatttttgggtgttcgattttttcaagtta

SEQ ID NO: 265571 - DNA, 604 bp, Zea mays
gggaaaggtgtctgaggagggagaaggggcaggggggaaggtgtctgaggagggagaaggggcagagggaagggtgtctgaggagggacaaggggcagagggtaaggtgtctcaggagggacaaggggcagagaaaataggacatgaggatgagaagaagggagcagcagtgggcaccatgaaagtgaagacgggagaagaaggtaataagggtgcatcagagcaatcggaggcacagatatttgtgcagatggtagcggcatttggattgaaggataagttcgatgaggagttcttgagaaggctgtttgttgctaatggacggaagagggagcttgctaggattgcatgcgtgcttggatttgaggaaagccttggagatattgttgaggaactaataaagtcagggaatgctatagaggctatatatgttgcccatgaggctgatttgcttgggaaatttccacctgtgcctctcttcaaatcttatctgcagaattccactgataaggctcaagcagtgttgaaaagtggaagacattccagttctgcacttgaagaggcaaacaacttggagggcaatgcatacaggtccgtcataagg

SEQ ID NO: 265572 - DNA, 1553 bp, Zea mays
cggatccgtggcgagacgcgtgggcggacgcgtgggaaagatagagctatcccctccctccccatcccttggagccagcaactccactcctgagtcctcacctcgtgctgcccgcgccatttccacctcccactgtcctttcgtccagtccccagccctgcagcccaaccgtggaggttctggaaggcggtgtatcccttctagaaccttctcgagatgcagagcgccgcggctttccggccatgccccactcggctgctggtgagcagcccttgtcgccccctcctctcggcccgcccgcttcgtgcctccgccgctggcgccgtcgctaccagaagcagcgccgtgggccctcgcggtctggggctcgggctgctgccagcctcgcccgatcgggatggcaagtgccgccagcgacaggtgtcatgcagcgcggccggggatgctgtggcggccccgaaggcggaagaaggaggcgggctcatgaagacgctgtggctcggctcgctcttcggcctctggtacctgttcaacatctacttcaacatctataacaagcaggtactcaaggttttcccataccctataaacatcacagaagttcaatttgctgtcggaactgtagcagctctgttcatgtggatcactggtattattaagaggccaaagatttctggagcacagcttgtagccatcctacctctggctattgttcatactatgggcaatctcttcaccaacatgagccttgggaaagttgcagtgtcatttacgcacaccatcaaggctatggagcctttcttttctgttattctttctgcaattttccttggcgagctacctactatttgggtagtatcttctcttcttccaattgttggtggtgttgcattggcatctcttactgaggcatcctttaactgggctggcttttggagtgcaatggcttcaaatgttacctttcaatcccgaaatgtattgagcaagaagctcatggttaagaaagaggaatccttggacaaccttaatctcttctctatcattacagtgatgtcatttttccttttggcccctgttaccttctttacagaaggtgtcaaaattactcctacatttttgcaatctgctggtctgaatgtaaaccaagtccttacaaggtgtcttttcgctggactgtgtttccatgcataccaacaggtgtcttacatgattttggcgatggtgtctcctgtcactcattctgtgggcaactgtgttaaacgtgttgtggtcattgtaacatcagtgctgttcttcaggacacctgtttctcctatcaactctctcggtactgcgattgcacttgccggagttttcctgtactcacagctcaagcgacttaagcccaagccgaagacggcttaaatagggattgtattttccatctctttgtgttaatggagttaaacacttctatgtttcaggtgactgcattttaaaagatttgtgctttttaacaataaaatattccttattatttcatgggcggccgtttagaggatccaagtttacgt

SEQ ID NO: 265573 - DNA, 873 bp, Zea mays
  unsure (1)..(873): unsure at all n locations
cgtctcgtaaatattannngaaacttcacttggtgacccatcactcccgcttggctttcacganntagtgaagaattaccaaggttannattgagcccagtatctgcctcnnaacacacatgcnntcctactcnnacaaggacctgnngtcgctggaacctggagngnnaagttttttcacttttgatcganngatggagatnacttaataagtaccttcaagatatttaaaaataatctgcattaacaagaaatgctatattatggcacggttcaagggttgacccgaattttgtgggaacttcttaagtcaaagggctttaagaattgcacctcctgaagggcacctgttactggctatactgttcggcaaaaggcctctactttgcaagatctagtaaagcaagagcgcacaatacttgttatgtggataggaataatcctgtaggtttgatgcttctttctgaggttgctttaggagacatgtatgaactaaagaaagccacgtccatggacaaacctccaagagggaagcattcgaccaagggattaggcaaaaccgtgccactggagtcagagtttgtgaagtggagggatgatgtcgtagttccctgcggcaagccggtgccatcatcaattaggagctctgaactcatgtacaatgagtacatcgtctacaacacatcccaggtgaagatgcagttcttgctgaaagtgcgtttccatcacaagaagtagctgggagactaggcaagtagagttggaaggtagagaagcagagttaggcgatgcctcttttggtattattagtaagcctggcatgtatttatgggtgctcgcgcttgatccattttggtaaagtgtgcttgggca

SEQ ID NO: 265574 - DNA, 1072 bp, Zea mays
cccacgcgtccgcccacgcgtccgcccacgcgtccgcccacgcgtccggaacatccagtcacagccatcagatgcttctgtgatgttaccacagcataattacaaactcgacgttcatgccctcaatagtcatcaacctggtcagttcgaatgtcgtgaattcagagaatcaatccttggcatcatgcctcatcattgggataggagagaggatactaccctacaacttgcacattttaggaagcataaaaggaaacaagttaagagaacgcctggaaaggctgttattaatagcgtgaacaagcccattgaacacaatccacctgggaaggatgcttccaatagaatagctagagctcttgggaaggctgcagatatggctaactcaaataaagccaggaaggcacagaggatgcagtatgttccgacaatcactaatcatactcaagtttggtgggttcctaatgttgttgttgtacatgaaaaggaagggatagaggttgtccatctagcttctggacgtacaatatgcaagcttcatttaaatgaaggaggccttcatgcagatattaatggagatggagttctggatcatgtccaggttgttggtggaaatggtattaaagagcagactgtcgtgagtggatcaatggaagtgctgaaaccctgttgggcagtcgctacatccggtgtgccagtgcgggagcaactttttaacgtctctatctgccattacaaccattttaatctgttccatcatggtgacttctcgagaagttttgggaggacatttgatacagctggtttagaggtcgcgactcctatcctggtccagacagacgatgggcataaacacaggagaggaagccatggtgatatcatctttttgacaagccggggagaggtgacatcgtactctcctgggctgctcggccatgatgcggtgtggagatggcaagtatcatcaggggcgacatggtccaaccttccatctccatcgggaatgatggagaacatagtggtgcctaccttgaaggccttctccctacgtgcctatgacccgaaagaggtg

SEQ ID NO: 265575 - DNA, 576 bp, Zea mays
gcaacgtcgaccgctcctacagacctggcgaggtcaggaagcaggtgctcgtcgtcgtcacctccggatggtcagtcatgtgcttcgaccataacctcaagaagctgtgggagcacaacctccaggacgatttccctcatgccgcccaccaccgcgaggtcgcaatctccataaccaattatactctcaagcatggagatgcaggcctcgtcatcgttggaggaaggatggagatgcagcatcattcagcagatctcttcgatgaatttatgataccagaacacaacatggatgggcgccgtcgaagcgccagtgagaaacagggctctgaggctggcaatgcagacctgcgccattttgccctttatgccttcgctggacgtagtggcgaccgtagatggagccggaagaatgagaacatccagtcacagccatcagatgcttctgtgatgttaccacagcataattacaaactcgacgttcatgccctcaatagtcatcaacctggtcagttcgaatgtcgtgaattcagagaatcaatccttggcatcatgcctcatcattgggataggagag

SEQ ID NO: 265576 - DNA, 1484 bp, Zea mays
ctcgagcgcggctacttcgcctccgggtacgacccactcactaccgctgccggggcggagtctgcccccggcacccagctcttccggcacgagaagcatcccacctgggtggacctcgtggtccggagccccggcggcggacacgacttcgttggccggagctatgccggtgaggccgccgtgccgcaggtctgcgactacgcgcttggcgtccttgacaaggcctccggcactctcaggatcgtgcccatcgctggcaaaaagattctgaggcttgagccacatcttgaagtgcagcatccagcgcattcgcagcactctgaggtggcatcagaagcggcttcagctgcaggaaatgatgaattgaaggttcaggatctgacaacgatgtatggtgccaagacggacagggacaaggacaataagtggagatcgttaaaggaacaaaggaatgatccttccgcttatgaggacattgatctttaaatatcagagaccaatgtcaacgccaatgataggcaggaacctgtacttgttcggaacattccaccttatgatcctaccgcagatacatcagaaaatgcatatcttttggacgagattattccaaagagtatgcgggagcatcttttggaaattgtccgtcattttgaatcaggagaaatctcctcaaaaggctatgggagttttgtctcaaaacgtgtgcacaagttaaaggagcttcagggtgaagataaaaagaggtttgcttggatactttcctacatccaacatctcctatctctattggcgcggaatggctccatgtccaatcgcaaatggaaaggcagaaatgaaaaccagataagccatggaccagcaaccccgcaggctgtatatcgcaggctgctgttcatgtttacagaaccggggtccagtgtcatgccaacagagaaaaaagagcttctgaccaactacatattggtcctaacactttttgccgatgacttcagatccaaccccagcgacatatgtgaggaccttaaaatgacccgccaaaatcttaaaccatactatgaccagttgggatgcaaatctgtgacagaaggtgcttttaagtctactttcatgacgctcccagcccctctcaagttcccaaaggaagttacgagaaagcggcgacggcagtagggcttttatccaaaggagacaaggagagaaaccaatggctatttatctcagaaatggcttgcattacttgaatggatggctggattggaaatactccctatcgaaggcaagaagtaaaggcatcgatgctaggggcccgattttaatagtgtactggaaatgaaaagttgtcctgtgtttcatctcgttttgtttttagttgctcatcgacattttcttgttaaggaaacatgtcatctatgtactgatacctgtttgtctatctgtatgagtgaatgtattgaaatgcttccgcttgggttaaaaacaaacgc

SEQ ID NO: 265577 - DNA, 837 bp, Zea mays
gttcgtgagctcggctctcgcttcagttgcactttgaggagagacgagatcatgaggaagcaatactcccctgtgctctccttgtgcctgatggcccttgtcgtagctgctatggtctgtgtcatgtacaccacctcggcacaagcaggaaggagtggctacaactcgtacgaacctgatggaaggggtggatacaactctgttcccatcaacggcggtggcagcccctagctaggcggtggatcggagcctgtatcagaaatcgaaataatataagactgtcttcaacggatcacactgccgctcccccacgctaaatttgggggctacagtgcacacgctagccgatcaacggctcacgctaccaggcgctctacgcggatgtgccccctagccagcttctctctccccctcgttctgtggtgcctctctcaccctctctaatattgttcacgtgggcccacttccaattattagtagatgaaaaattgataggaggtgaaaagtaggtatagaaaatgatattttatggttgtagtggggtataggggaaggatttagggggaaacgctgtacagagtggagatataggggggaagagaacgctgacgtggcacgtgagtgggatatagggagagaaatttaggggtaaccgctgaagacagtctaaaggctcatctgtgtgtattctgtcatgtcatgtcatgtcatgtgtgttggtatatgatggcttggtcgtcgtaatgtaatgtgtggacaataaatatgcggggttgcacctcaacgtaacttactagtacttgctattgcgatatatatgtactttattataataat

SEQ ID NO: 265578 - DNA, 432 bp, Zea mays
  unsure (1)..(432): unsure at all n locations
tgttgcactttgaggagagacgagatcatgaggaagcaatactcccctgtgctctccttgtgcctgatggcccttgtcgtagctgctatggtctgtgtcatgtacaccacctcggcacaagcaggtaaggctgtgtttggaagtgtagttgcagttttgaaacaatactgtagtgtttagtgatactatagtattgtaactcaaaaggtgtttgttttgtacaggtaaaacatagttttaaatattatggtttacctaaaaccatggtatttttggaattttcgaaactccactcatcatcttagtgttcttttcttctctttacaaattactttgtttttctaatagaaccaaacagatctcggttttgagtaatactgtagttntattacaataatataataccgtagtatttatgtcatgtataattct

SEQ ID NO: 265579 - DNA, 304 bp, Zea mays
gaagttgcactttgaggagagacgagatcatgaggaagcaatactcccctgtgctctccttgtgcctgatggcccttgtcgtagctgctatggtctgtgtcatgtacaccacctcggcacaagcaggaaggagtggctacaactcgtacgaacctgatggaaggagtggatacaactctgttccaataaacggcggtggcagcccctagccaggcggtggagcctgtatcagaaatcaaaaaaatataaaggctcatcggatgaaaactgtgtgtgtattctgtcatgtcatgtgtgttggtat

SEQ ID NO: 265580 - DNA, 916 bp, Zea mays
gctggctgttgagaggttcattgagcagagttgggcaggccaccgtcccgtctcccctacgataccataccatacccatccgtgtggccctcccccaagggccagggcgccaggccaaccaaaagactccttccttgcgcagatctccgtccgtcgctctccgaactctgattgaggaggagtgaagcttcttttcttcttcctccagtcatcccattgcaaaagtagaagcagggaaggaattggaagcatgaacaagcagcagcaggcgtacgggtacggaaatgggcagcaggccgacgtcccaggctactgctgtttccatccccgggaggtcggcgtcggcgtctgcgctcactgcctcaaggatcgcctcctcctcctcctcgccgctgccaacaacaataagatcgacgacgacgcccgccgcaaaagcaggagcaggagcaggagcatctccctccccaaggtcttcgcgctcggctcctccttcctccagcgcctcgactcccgccaccaccggggacgagggcgggacaacaactgctactccgacgacgacgacgccaccgcctccgtcgcaagcctcgatgattccttcatcttcatcaaattcgaggacaacggcaaggcgacgtgggacagccagagccagcacatggcggcagctcccgcgaggtcgtcatcgactacgaccatggtagcagtggagcacgtcatgcgtgtcaacgtcacccggtggcgcaaacatgtggtcggccggatgctgcaactgacgctctcgtcgaggtattccgtcactgcatgtagcctgtactgcaagatggcggcggcagcaacggctgaacggtccatggccagacggtgaggctggatctggagcctgactacgacgcacgctcactgagacccagcg

SEQ ID NO: 265581 - DNA, 676 bp, Zea mays
gactagttctagtattcttctcaatccactcccgagcctgaacaggcaaagggcattgacgaggtatccttgcagcaagatgttcagactgaggattctgaggatcatgctgatggcaaggaggatcagccagcgcacatggtcaaaagttgggatcagatatgtggtcaagttacttggacaaagtatcggatcctgctgccattggtgctgctcttgctgccattattgttgcagctgttgtggcattcctttacatgaggcacaagcaaactcgtgttgcctccaatgaaccagctgagcaggtggagcaagttgagcaggttgaacgggttgagcaggttgaacaagttgatcaggttgaaactctttctgactcaggaagtagccaggggcatgttgttgccaagggttcactgtttcacagtcctggcgtagaagcctctggcccctcacagtatagcagcagcttgtcatctgggcttggcaggaggaggaataccaagggtgaaggccttgagccagtagtgtcgaggagagactcgacagctcaatccacatcatcttatggtagtttcaccacataccagaagatccctgccaagaaaggaaacaaggaagacgaaacgatgaccccagttcggcgctccagcatgctgaggaatgtgaaaacttc

SEQ ID NO: 265582 - DNA, 507 bp, Zea mays
cggacgcgtgggcggacgcgtggggtcgctgggggcgaggatcctgcgggcgggcggcgtggggaaggtgttccggcgctggttctcctcccccgtcggcgggggcggcgagcggctgctcagggcgtcgcagtgctacctgtcgaccacggccggcccgatcgccggcatgctgttcgtgtccaccgagagggtcgcgttccggagcgaccgctcgctggcgctgccgctgacgtctccggccggcggcggcagcggcagcggcacgacgacggtgctgcgggtgccgtacaaggtgtccatcccgctgcgcagggtcgcggcggccaggccgggccagaacagggaccggccggaccacaagtacgtgcaggtcgtcacgcgcgacggcttcgacttctggttcatgggcttcgtcaggtaccaggcgtccctgcaggagctggagaaggccgtcgcgcagtcgcagtcgcaatgacctcaggcgatccgccggccggcccggcg

SEQ ID NO: 265583 - DNA, 1555 bp, Zea mays
ggctggcggcgcgcggcgctgcggcgggaggcggcggagctgccgcaccggctgcgcttgggccgcgtcgacaaggaatgggtccacgtcctcagcgaagggtgggcgagcccgctgcaacggttcatgcgcgagcatgacgttcctccaagcacttcatctcaatgccatccgcggccaggatggcaggatggtcaacatgtccgtccccatcgtgctctccgtcggggacgcacagcgaagggccatccaggccgacggcgccacgcgcgtcgcgctcgttgacgagcgcgaccgccccatcgccgtcctcagcgacattgagatctataagcataataaggaagaaagggtagcacgaacatgggggacaactgcacctggattaccttatgtcgaggaggcaattaccaatgctggtgactggttggttggtggggacttggaggttatagaaccaatcaagtacaatgatggtctagatcagtatcgcctgtctccagcacagctgcgtgaagagtttgccaggcgcaatgctgatgcagtatttgcctttcagcttcgcaatcctgtacacaatgggcatgctcttcttatgaccgacacacgcaaacgtctccttgagatgggttataaaaaccctgttcttctgctccatccactgggaggattcacaaaagcagatgatgtgcctcttagttggagaatgaagcaacatgagaaggttcttgaggaaggtgtcctcaacccagaatcaactgttgttgcgatctttccctctccaatgcattatgctgggccaactgaggtgcagtggcatgctaaggctcgtattaatgctggtgcaaatttctatattgttggaagggatcctgctggtatgagccaccccacagagaaaagggacctctatgatgctgatcacggaaagaaggttttgagcatggctcctggccttgagaggctcaacatccttcctttcaaggtggctgcgtatgacacaaagcaaaagaaaatggatttctttgatccatcaaggaaagatgatttcctcttcatctctggcacaaagatgcgcactcttgccaagaaccgagagagtcccccagatggttttatgtgcccgggtggctggaaggtactcgttgaatactatgacagcttggtgccatctgagggcagcagcaagctgcgtgaaccaattgcagcctgaaatatgggaagcgcttcagataaggaaccctactatatcagcacaagcggttctttgcgacatagaaccgttgttgtatgattgtatactggcttgtaagacttaaaaacactgggcttgatttggacgttaatgtgtgcattgtaactggtgtgccctatctgctggcagtgttgcacatcacatgtttggtgttaataaggacaggctatgtatcctctgccagattgttgtacatatacattgtggtgatataaacatgaagctgtcttctgctgttttataaaaaaaaaaaaaaaaaaaaaaaaaaaaaaaaaaaaaaaaaaaaaaaagggcggccgc

SEQ ID NO: 265584 - DNA, 500 bp, Zea mays
cttcatctctggcacaaagatgaagaggaattcctagatccttgagagaccaccagaggatgagatgctctcgatcggctgcacagtgctcctcacatactataacaacttagtgccatctgaagacagcagcaagctccctgaaccaattgcagcactaaaatctggaaaatccttcatataaggaatgctactatatcttagcaagcggttctttgcgacatagaaccgatgctatatgattgtatactggctgtaagactgtaaaacactaggcttgattcggatgttaatgtgtgctttgtacccggtgtaccttctctgctggcagtgttgcacatgcactggagcacatcaaacgtttggtgttaataaggacaggctatgtatcctctgccagattggacatatatacattgcggtgatatataattataaagctgccctctgccgtccaaaaaaaaaaaaaaaaaaaaaaaaaaaaaaaaaagggcggccgc

SEQ ID NO: 265585 - DNA, 469 bp, Zea mays
cccacgcgtccgcccacgcgtccgcccacgcgtccgccggcagggaaagccggcggactcaaaggggttgccctcatcggcggcagcgccaacagcacggtcgctggggtcattcacttcttcgaggacccctccaccaggtacaccgaggtgaggggcaaggtcacgggcttgactccgggaaggcatggattccacatccacgtcttcggcgacactaccaatggctgcaactcaaccggtccccattttaaccctcataataaaccccatggagctccatttgacgacgaacgacatttgggcgacctgggaaatatagtagccaatgaagatggagatgcagaagtgttcataagagacttacagatttcattgagtgggcctcattccattctgggaagggcatgtgttgtacatgctgatcctgatgacctacggaggggtggccatgaactgagtaagtcaa

SEQ ID NO: 265586 - DNA, 458 bp, Zea mays
  unsure (1)..(458): unsure at all n locations
ggttgatcagctgattgatgaacagatcgcagcagtagtctttgtgccagcgtgtatggaagctacgcctaataatgggataaatacaagcaaaaccgtggagacctttgctgctcatcagtctcctgagtatgatagtggattgaaagataaggatcagagaatatcatttgaagatgagatatctgacggtgggcaagctgaacaaagtactccacaacaggaattgtgggctatgccaccagatactagtgaccgtgaaactgttgagaggacaaccagaagtattgaggtggagcatttctctcaggttgagtcaaagcataaaatgaactctatgtncgtggaagcttctgagcatgtcactatcactcagattgagaagaagccggttcaacaagttgagataactcangagttagattcactggcgatatgttctatggagcattctaatg

SEQ ID NO: 265587 - DNA, 668 bp, Zea mays
actagttctagatcgcgtctaaacccttgttccccttcttatccccacctccctcgcggatcactcgccgccgccgccggccgcagccatcgccgtgatgctgtccctgtcgagggcgatcgggaggcggctcttctcgtccgccgaggccgcgtcgacggctgcggtgaggacggcgcagaacccgctcgaggagttcttcgaggtcgagcggagcaccgaggagggcaagcctcctccccactacggtcgcagctggaaggcttctgaactgcgactaaaatcttgggatgaccttcagaaattgtggtatgttcttctaaaggaaaagaacatgctaatgacacagcgtcaaatgctgcattcagagagcatgaggttcccaaatccagaacgaatttccaaggtaaagaaatcaatgtgccggataaagcatgtcttgactgagagggctatagcggagcccgatccaaggagatcttcggaaatgaagcggatgataaatgccctgtgattcactcacaggcattctcccttgggacttttgatggtacttattagaaagatctgctgccttctgttgtatctttatcccataagaactgtgagaccaaatcttttcgatgcccatggtatggtagcaaaaattagactttaactgatccgat

SEQ ID NO: 265588 - DNA, 562 bp, Zea mays
ctctctttctctctctctcttcgacgactccgccgctgtcttccactcgggggccgccgtccctgtcgtcttccgcccatcactgtcttcttcgctccaccacacttgggaaacgcagcgatggatggccagccaggtgctgctgcgttgtcgagtcctggtccgagagtaaaagcaagcctggttctgggatccgaatcgttcgctatcaactccgagttcggtaccctgtcggagcagctggccgcggtgaaggagaagagcatggcggtcctcaaggaacacatcgccaggcacaatgctccgaacgaggtccccgacgaggccgccgagggcgagtctgacagcgagggcgaagcgccgcttgtcgacaacccgccgaagaaacctaagaagcagaagtgaccgtctctagtcatgcacttgacttgttttttttttttgccatgcgttgcttgtgtaacgccagactgttgtcagtcacaatagcaatatgcaggtgttagcactcacttgctgttcgtaccactatcattagttctgcttctctgtcatgtgttca

SEQ ID NO: 265589 - DNA, 1761 bp, Zea mays
ttctgctcactcccgctgcccagtcctcgccaccgcccactccgtcgccaaccaatggcctccgccatggagctctcgctcctcaaccccgccgcgacgcaccgccaccgcggcggcctcgccggcctgcccctcgcgcggcgctccgtggtccgcttccgcgtgtccgcctccgccgcggccaccgcgccgcccaagtcctcgggccccaagaagcggggcaagacggagatccaggagacgctgctcacgccccggttctacaccacggacttcgacgagatggagcgcctcttcaacgccgagatcaacaagcagctcaaccaggcggagttcgacgccctgctgcaggagttcaagacggactacaaccagacccacttcgtgcgcaaccccgagttcaaggccgccgccgacaggatggagggcccgctccgccagatcttcgtcgagttcctcgagcgctcctgcaccgccgagttctccggcttcctcctctacaaggagctcggccgcaggctcaagaaaaccaacccggtcgtggcggagatcttctcgctcatgtcaagggacgaggcgcgccatgctgggttcttgaacaaggggctgtctgacttcaacttggcgctggacctggggttcctgaccaaggctaggaagtacaccttcttcaagcccaagttcatcttctacgccacctacctgtccgagaagatcgggtactggaggtacatcaccatcttcaggcacctcaaggcgaacccggagtaccaggtgtaccccatcttcaagtacttcgagaactggtgccaggacgagaacaggcacggcgacttcttctctgccctgctcaaggctcagccgcagttcctcaatgactggaaggccaagctctggtcacggttcttctgcctctcggtgtatgtgaccatgtacctgaatgactgccaacgcactgcattctatgagggaattggtctggacaccaaagaattcgacatgcatgtgatcatcgagaccaaccgcacaacggcgaggatcttccctgctgtcctagacgtcgagaacccagagttcaagaggaagcttgacaggatggttgagatcaaccagaagatcattgccgtcggagagtccgacgaaatccccctagtgaagaacctgaagaggattcctcttgtcgcctctctggtgtccgagatcatcgccgcctacctcatgccccccatcgagtctggctcggttgatttcgccgaatttgagccccggctcgtttactgattctgtacaaagatttatccttgagttattcaccctgaaagacaagctgctggtgctttctgccgaaggggccttggatgaatggtgaaaaccgctggatggttagaggatctacatcttcttgtgttcttctgtaaaatactgagacttgggcagcataaaaagcttggcaaatttctgttgtgtggcatctccatgtaagtaacagtggactgcatcagaagcgagccttccagttttgcgacagaagggggcgtccgaagttgttgtactgctaatgaacgtcgaactagcatgataaatgtatcccagcacatttggttgattgtgtaacactagaaagccattgaacagcgtttggctatgatgctgtaccatctgaatttacatagctccttttgttttagcgatgtcattgtcatgcatcatgagtgacgtctacaaacatttgtaagaaaatcgtggtaaaagattgtcagt

SEQ ID NO: 265590 - DNA, 1385 bp, Zea mays
ctgctccctttgtcttctttcgtatgctcttcttttagtattgggggcaattcaattcatacctttctcatacctttcaatatcgacatccaaatagagcattacagattttacgggattgacatcgtgagatcttattagcgccacatgggcaaatgaacatgcaggagtgaagagctaataacggccacttatttcttctctgggatcttcttcaataactcatccagaacctcgaacagatcagcaaccagtccgtaatctgcaacctgaaatatgggggcatcagcatctttattaacagccacaatgaccttcgagtctctcattcctgccaagtgttgtattgctccggatactccaaaagccatataaagatccggcgcaacgattttccccgtctgaccaacctgaaggtcatttggaacataacctgcatcaacagcagcccgagtcgcacccactgtgcgccaagtttctcagcaagctgctccaacaatttaaaattttcagcactttttaaacctctgcctccggtgactactacgggtgcatttgcaagatcaggccgctccgtgtcttgtgatgtcagattcacccatgtagatttcccttcactgaggaaagagagatcaacctgggtgataggtgcaacctttgtttcagacatagcctcagtagctggggaaaatgaagttgatctaatactcatcatgcaaggcccctctccagtatatttcacagtacaaagtgcatttccagcataaattggcctcacaaagacgtgtggctcctttacagcggtgacatcagtaacaggggacacatcaaggagagccgcagcacgtggaagcaaattcttcccgaatgatgtggatgaagctatgacatgagagtagcctcctttctgctgaacggaacggagtagctcggcccagggttcagccagaggatgcgccaaggcttccgaatcggccacgagcacctcagacaccagtggatggctgcacgcggcatggtcggcggccttgtgaagcgccggcccggaaccacccagcaggacagaaactttgttgtccttggcaatggcctccgcggcggccaatgcgctcagcgacgacggcttgacgaacccgccttcgtgctccgctacgacgagcgtgctcacgaatctgcgaagcgaatgagcgataaggcgcaagccgccgcggcatccacttcccctccgcagcgcgcccaccaacatcgccgccatgtccgccctctccgcctcctctcgctctgaatccgggcggcggagtggagtgagaagaaaagggaggcgtctgcggagacgggagaggaagagacgtgacggaactgatttggatgggtcggtccttggg

SEQ ID NO: 265591 - DNA, 1500 bp, Zea mays
tgctgattccactaaaacaacacaaattgctccatgtgctggtcattctttgatttcttggggtaacaaatttttatctattgctgggcatacaaaagatccatctgaaggcgttacagtgaaggaatttgatccgcatacttgtacctggtcgattgtcaggacttatgggaaaccaccggtgtctcgtggaggtcaaacagtgactcttgttggaacgacactagttttgtttggtggtgaagatgcaaaacggtgtctcttgaatgacttgcacatccttgatcttgaaaccatgacatgggatgatgtggatgcaataggcaaccctccttctccaaggtcagaccatgctgctgcttgccatgctgaccgctatcttttaatttttggtggggggtctcatgcaacatgtttcaatgacctacatgtccttgatttgcagacgatggaatggtcaagacccaaacaacaaggcctgactccaagcccaagagctggccatgcaggtgcaactgtcggcgagaactggtacatagttgggggtggcaataataaaagtggtgtttctgaaacacttgtgcttaacatgtcaactctgacatggtcagttgttagcactgtggaaggacgagttccccttgccagtgagggcatgactctagtgcatagcaattacaatggatacgattatctcatctcatttggaggatacaatggacgatacagcaatgaggtttatacacttagcctcaaatcagattttaagtccaccacaaaagaagaaactgtctcagatctagggtcgtcgaaccagaggttgaaatggtgattggcgtggacagtgctgattcagacctgaagaacagtagtacagtactgatgaagcaagtgaacagttcttagcagctctcaaagctgagaaagaggaactagaagcgacacttaacagggaacagctgcaaactgtgcaacttaaagaagacattgctccagcagagaccagaaatgcagagctgacaaaggaacttcaagctgtccgtggccaacttgcttctgagcaatcaagatgtttcaaacttgaggttgacgttgcggaacttcgacaaaagcttcagagtatggacgccctggaaaaggaggtcgaactgcttcggcgacagaaagctgcttcggagcaagcggcgctggacgcaaagcagaggcaaggttcgggtggtatgtggggttggctcgctggaagcccgccaccatcacagtagttcgtacaggccgtggttcatatattttacttgtaacattacatatcatttgacatttgtctacattttttttgtcacatggcattcgtgtttcgttttgaccacacaaagaacaacgtgctctggcgagcgttatattgtgctcatagagaatcgttaggttgccccctcacaatcactcaaatgtatcattaggttttaacaatgtactgatcatgtatgaacttccatttgacgt

SEQ ID NO: 265592 - DNA, 1101 bp, Zea mays
cccacgcgtccgcccacgcgtccgcccacgcgtccggcgtcgcccgcgaagggacgagggccagcgtcggctcgccgtctccctccctccttccagatctcggcgcgagttcacccttcagatttccatttccaacacgacggcgaagaagaagagctgcgatccggaggagtaaaccctacccgccggttgcccggtgcgcgggcgagatccgggcggagatctagggcgcggcgccggccatggcgagctccggactcgcttaccccgaccgcttctacgctgccgcggcttacgctgggttcggagccggcggggccacctcctccgcagctatctcccgcttccagaacgacgtcgccctcctcctctacggcctgcaccagcaggccacggttgggccatgcaatgtgcccaagccaagggcgtggaaccccgtggagcagagcaaatggactagctggcatgggcttggaagcatgccttcagcggaggcgatgcgtctttttgtcaaatcctggaggaggaagatcctggatggtactcaagggttcctgagttcaactctgagcccattgtagatattcaaatgcataaaccaaaagaagagccacagattgtaccggcttcaacgaatggaacatcaatttcagaaccaaaaatcatttctgaaaatggaagttctgtggaaacacaggacatagatgttattttggaaggccttagtactgttagttctcttgacgaatggacaccattagctatcagtggccatcgtccgaagcctcgttatgagcatggagcaactgtgttgcaggataagatgtatatatttggcggaaaccataacgggtgttaccttagtgacctccaggctttggatctgaagaatttgacttggtcaaagattgatgccaaattggaagcagaatcttctgattcagcaaaaacctcacaaattgctccttgtgctggccattcattgtttttctccattgctgggcataccaaagatccatctgaaggtgttacaggtttgctaaaattcagcttttagggaattgatccgcatacttgtacctggtctattgtcaggactta

SEQ ID NO: 265593 - DNA, 494 bp, Zea mays
acatctaattttaataccatagctgatttattattgaacccaattcaattcatacctttcaattcattacagattttacgggattgacatcgtgagatcttattagcgccacatgggcaaatgaacatgcaggagtgaagaactattaacggccacttatttcttctctgggatcttcttcaataactcatccagaacctcgaacagatcagcaaccagtggatggctgcacgcggcatggtcggcggccttgtgaagcgccggcccggaaccacccagcaggacagaaactttgttgtccttggcaatggcctccgcggcggccaatgcgctcagcgacgacggcttgacgaacccgccttcgtgctccgctacgacgagcgtgctcacgaatctgcgaagcgaatgagcgataaggcgcaagccgccgcggcatccacttcccactccgcagcgcgcccaccaacatcgccgccatgtccgccctctccgcc

SEQ ID NO: 265594 - DNA, 817 bp, Zea mays
cacatttcaatggtcttttttaaagccaacctggtgttattgaattttgaattgagttcatcgaggtgttggcttttgtgttttagaggcacccctcctccgagatcggatcatgctgctgcttgccatgctgaccgctatcttttgatttttggtgggggatctcatgcgacatgtttcaacgacctacatgttcttgatttgcagacgatggagtggtcaagacccaaacaacaaggcctgacgccaagcccaagagctggccatgctggtgcaactgtcggggagaactggtacatacgtgggggtggcaataataaaagtggtgtctctgatactcttgtgcttaacatgtcaactctgacatggtcagttgttagcactgtggaaggacgagttccccttgccagtgagggcatgactttagtgcatagcaattacaatggttatgattatctcgtctcttttggaggatacaatggacgatacaacaacgaggtttacactcttaaactcagcctcaaatcagattcacagccaattgtagaagaagaaactgtctcagatactatatctagggtcagagaacctgagaccgaaatttctcaagatgggaggatacgcgagattgccatggacagtgccgattcagacctgaataacagaaatgatgaagcaagtgaacagcttgtagcagatcttaaagctcagaaagaggaactagaagcaacaattaacagggaacagctgcaaactgtgcaacttaaagaagacattgctcaagcagagaccagaaatgcagagctgacaaaggaac

SEQ ID NO: 265595 - DNA, 440 bp, Zea mays
cttgttctgtaccattttgtggataacatggggcaacatggttttctccattgctgggcataccaaagatccatctgaaggtgttacaggtttgctaaaattcagcttttaaggaattcgatccgcatacttgtacctggtctattgtcaggacttatggaaaatcaccggtttctcgcggaggtcagacagtgactcttgttggaacaacactagttttgttcggtggtgaagatgcaaaacggtgcctcttgaatgacttgcacattcttgatcttgaaaccatgacatgggatgatgtggatgcaatgtaagtacaagaatcttgattcttaatgcacacctaatgagaagataaggccattatttgtttcgtgaatctttgctatgtgagcttaaaatgtatctttttaaaagctcctagatttggttggcgcact

SEQ ID NO: 265596 - DNA, 1438 bp, Zea mays
tttctcacgcgtccgcccacgcgtccggctacctagcaacgcgcagtaagcagcgtgggcaaagctacgagcgcccggctagcttcgccatgaacatgggtggggtgtccccgtcgacagtccggtgcaagcactgcagcacgcagctcaccgtgtgccccggcgagcgcgccatccagtgcacgcaatgctgcggcgtgacgcgtatccggcggcggcgggtccagcggccggcggcggcgccgcccaccacgggcttcccgcgcgcccgcggcaagaagcgggccctcctgatcggcatcacgtacgccggcacgcgccggggctgcggccagctgaggggggccctcaacgacgtcaagtgcatgaggcaactcctctgccagcgcttcgccttccccagcgacggcatcatcatgctcactgacgaccagaaggacccgttccgggtgcccaccaaggacaacatccggatggcgatgcagtggctggtgcaggggtgcagcagcggcgactccctggtgttccacttctctgggctgggcgcgcaggtcgccgacgcggactgcgacgagcaggacgggtacgacgaggccatctgcccggtggactcgttccagaagggccccatcctggacgacgagatcaacgagaccatcgtccggccgctggtgcccggcgccaagctccacgccgtcgtcgacgcgtgccacagcgattccgtcctcgacctccccttcctctgcaacatgtccaggagcgggagctggcagtggaaggacgagagccccccgtccggcgcctacaggggcacgagcggcggcaaggcgatgctcatcagcggctacagtgacggcaaagccaagtccagcgtggccagtgcgcagaaaccggaggcctgcgcgaccatgggggccatgacgcacagcttcatcacggcggtggaacgcgagccgcagggtgtcacctacggccgcctgctcacctccatgaaggccatcatgaccaactccggcggctgcgccgtgcagggtcctattggcgccggcgtggccgcccgtaaggtcgccaacttcagcggcgtggaggaacccaacctgtcctcctcggagaagttcgacatctaccgcaaggcctttgtgctgtaaaccttctctgcatcggccattgcaaactactgccgtctggactctttaaattgccgtgtcgggataataaaccagacggggcctatgtgtcaacaatgtgtctttgtgtcatcagtcacccgaggagaatatttgtgtttatgcacacgccaacaatggctccttgctactaaacctttatggcacattgtaataaggctattgtatctcttctacatgactctaaaataaactaagtgttatggtgctaaaaaaaaaaaaaaaaaaaggggggccgctcgcgatctaga

SEQ ID NO: 265597 - DNA, 778 bp, Zea mays
gaagggcccatcctggacgacgagatcaacgagaccatcgtccggccgctggtgcccggcgccaagctccacgccgtcgtcgacgcgtgccacagcgattccgtcctcgacctccccttcctctgcaacatgtccaggaccgggaactggcagtgggaggatcaccgtccaccgtcgggcgtctgcaagggcacgagcggcggccaggcggtgcttatcagcggctacagcgacggcaaaagcaagttcagcatgacgccggaggcctgcgcggcggtgggggccatgacccacagcttcatcaaggcggtggaatgcgagccccagggggtcacctacggccgcctgctcacctccatgaaagccatcatgaccaacgccggcggctgcaaccagcagctgcagggcgcctgcgcacccgcccgcaaggtcgtcaacttcagcggcgtgcaggaacctaacctgtcttgctcggagatgttcgacgtctaccgcaagccctttgcgctgtgaacctcctctgcattgccattgcctttgcagactaccacagattcccgtctggactctatatataaattaccgtgacggaataataaaccagacggatttatattatatatgatgatatgtcataatgtgtgccttaattgtcttgcggccaataatgtgtgtccatgtgtcgatcggttaccggccctgagccaagcttatagcctgtggaccgacgactttgttgaccattataaatacaatgttgataatgtttatatgtgtc

SEQ ID NO: 265598 - DNA, 927 bp, Zea mays
tcggtcttcgtgggcggcgatcaaaaccaccttcgacgactaccccacgcgtccgcggacgctcggattccactccgacattcacgtgcagctgtcgggagcaggcaatggcgccggatctaagcgaactcgccgccgccgctccagcccgtggcgcctacctcgccggcgtcggtgtcgcggtcctcctcgctgcctccttcctcccagtagccgagtcgtcctgcgtgcgagataactcattggtgagagacataagccaaatgccgcaaagcagctatgggattgaaggattgtcacatataacagttgctggtgcgctcaatcatgggatgaaggaggtggaagtgtggcttcagacaataagtccaggtcaaaggacgccaatccacaggcattcctgtgaagaagttttcactgtcctcaaagggaagggtacgctcttgatgggatcaagctcactaaagtacccagggcagccacaggaaattcctttctttcagaataccacattttcaatccctgtaaatgatccacaccaggtttggaattctgacgagcacgaagatttgcaagttcttgtgatcatatcgagaccgcctgctaagatatttttatatgatgattggagcatgcctcatacagccgcggtactgaaattccccttcgtctgggatgaggactgcttcgaagcagcaaaagacgaactctaggtcacaagtgtttcctgcaatttatctgcttcatccatgatcctgctggtgctggactactacaattctcagcactagttgtaataaagccagtgcgcttttcatgtataattctgtattgtggctcgcgaaaataaaatttggcaacggtttatgaacttatgcgcttgtggagttgatccaatgttccccgtttcaagattttcgcattatt

SEQ ID NO: 265599 - DNA, 1959 bp, Zea mays
ctcgctttcttctgcctcgcctttgttgatcttttccccttccagtctcccacattcccctcccccggccctcgccagccgctcccgctaaccccaccccgtcgccccggcctcctcggtccagcggcgagcgggtccgtccggtcccgacgccgcaccacatcaccgcctgctcccacggccgtcctcactcgacctcgatcggaacccccggatcggaggtaccttcgcgcgcggctccgctccgacctcgtcctccatcggttggcatcggaagcggcggcggcgcgttcccagccagctttcgaaaggttttattccgtgattgcaggcaatcaatcgtcaggctttttgggagctgtgttggggggaccggggggaagagtgaagttactgcagaggctaacatttaggttgtcgagtgatggcgcaaggcgccaatttccctggtttcattggcgccgtgggtggccatgatggcggtgtgaactttggcgggaacttctgtgacatggccttctaccagaagctaggggagggctccaacatgtcggtcgacagcctcaacagcatgcagaccagcatgcatggcggatccatcaccatgtctgtggacaacaacagcagtgttggctctaacagtgactcccgcactggcatgcttggtcatcctggtctcaaagggcctgccattgtgggaagctactcggttgggcacagcatcttccgccctggccgggtgtcccatgccttgagtgaggatgcgctggcacatgctctgatggacaataagttcccaactgagacactcaaggattatgaggagtggactattgatctggggaagctccacttgggaatgccctttgcacaaggtgcctttgggaagctctacaggggaacatataatgggatggatgttgctattaagcttttggagcgacctgaggctgaccctgagaaagctcaactgttagagcagcagtttgtccaagaagttatgatgcttgcaacactgaggcacccgaatattgtcaagttcattggtgcgtgcaggaagccattggtttggtgtattgtgacggagtatgcgaagggtggatctctcaagaatttcttgagcaagaggcagaacaggtctgtcccgctgaagttggcagtcaagcaggcattggatgttgcacgtggcatggcctatgtccatggccttgggttcattcatagagatcttaagtcggacaacctcctgatttctggtgataagtccattaagattgctgactttggagtggctaggattgaagtcaagactgaggggatgacacctgaaactggaacataccgttggatggctcccgagatgatccagcacaggccatacaaccagaaagtggacgtctacagtttcgccattgtcctgtgggagttggtaactgggaatgtccctttcgcaaacatgactgcagtgcaagctgcatttgctgtggtgaacaagggtgtgcgaccagccataccccacgactgcctccctgcccttggggagatcatgaccaggtgctgggacgcaaaccctgaggtccgtcccccattcactgagatcgtgaggatgctggaacaggtggagatggaggttctgaccaccgtccgaaaggctcggttccgctgctgcatcgcccaaccgatgacgctggactgagtcatccacaatccaggaaaataacctggagtgccgtttactcctatgtatttataatatatattattagagttgtgcttcagaagcagggagctgactcctcagtctgccttctgtctttgacatgtcaccgtagagtacaccagagtggttgtaatagaggtagctttttttaaattgcttgaccaaatacccttctccgttgtaaaagtgcctgttcttgcaaaaaaaaaaaaatttaaaaaaaaaaaagggcggccgct

SEQ ID NO: 265600 - DNA, 463 bp, Zea mays
agtccgtcccccattcgctgagattgtgaggatgctggagcaggtggaggtgaaggttctgaccactgtccgtaaggctcgcttccgctgttgcatcgcccaaccgatgacgctggactgacggactgagtcgtccgcaatccaggaaaagaacctggagaggggtttaatcctatgtgtttataatcccaatagacttgtgcttcagaaacagaaggctgactcctcagtctgctcctcagtctgccttctgtctttgacatgttatcgtagagtacacctagctgtcgtcaccagtggttgtaatagaggtagctttatgcttgactattttcccttcccccttataactagtgcatgctcttgctgctcgctgttatgtgtcttcatcatcatgcggcagcatgtggaagctttgcttaatggtatatatatatgatatatgtattattagtaactagcc

SEQ ID NO: 265601 - DNA, 381 bp, Zea mays
cgtccgaaaggctcggttccgctgttgcatcgcccaaccgatgacgctggactgagtcatccacaatccaggaaaataacctggagtgccgtttactcctatgtatttataatatatattattagagttgtgcttcagaagaagcaggaagctgactcctcagtctgccttctgtctttgacatgtccccgtagagtacaccagagtggttgtaatagaggtagctttatgcttgaccaaatacccttctccgttgtaaaagtgcctgttcttgctggtcgctgtttgcgtgtttatcatcatgcggcaacatgtgggagtcttgatgcttcatggtatatataatatgttttattaagtaactagcatggatttgcccct

SEQ ID NO: 265602 - DNA, 1481 bp, Zea mays
gcgcttctaccgcgagcgccgccgccacgtcatcacgacgcagaccgagcacaagtgcgtgcgggactcctgcaggtatctgcaacaggagggattcgaggtcacctatctccccgtgcgcaaggacgggctcgtcgacctcgcgcagctcgaggacgccatccgcccggacaccgggctggtgtctgtcatggccgtcaacaacgagatcggcgtcgtccagccgctcgaggagattgggcgcatctgcaaggagaaaggcgtgccgttccacactgatgctgcgcaggcgctggggaagatcccgattgatgtgaacaggatggggattgggctcatgtccttgtccggccacaagatttatggccccaagggcgtgggggccctctaccttcgtcgccgccctcgcatcagggtggaaccacagatgaatggtggtgggcaggagcgtggcatccgcagtgggactgttcctacacctcttgttgttggatttggggctgcctgtgagattgccgctcaagagatggattatgaccacaggcgtgtcagtgctctgcagcagaggctgcttgatggcatacgtgcgcaggtcgatgatgttgtcatcaatggaagtatggagcaccgttacccaggcaatctaaatttgtcatttgcttatgtcgaaggggagagcttactgatgggtctgaaggaggtggctgtgtcaagtggtagtgcctgcactagtgccagcttggagccctcatatgtgctgcgggcacttggggtggaggaggatatggcacacacttctattcgtttcggcatgggtcgctttaccactgacgaagaggtggacagagcaattgagcttactgtgcatcaggtgaagaagctccgtgacatgagcccactctatgagatggccaaggctggcattgacctcaagagcatcgagtggtcacaacattgaggcagttttcatgacaaacggtcactcgaaagcgtacacggatcgcatacataggcttatggtgctgctggtgagtacgttcatgtggtgctcctacctctgataggattatcacacttttttagctctcacatggggcccgagtgtatccacgagtgctttctaagttgagtatcttgacctcaaaataaggatacttcaaatacttggtaatgtatcgtctgaaatacagtttgaagtagtattgaagcggtgacaatgatgataacctattttagtgctgacaaaaatgttgttataatctccagttgttacaattcctgcatgtgtatttattctatgcttgatctgaaaaatccctgggccccacgcgaaaaaaaaaataataaaataaaaaaataaaattaaataatataataaatataaaataattaaaatttttttatattatataataaaaataataattaaaaataacttttaataattataatttaatattaatttaggggggcccccctcc

SEQ ID NO: 265603 - DNA, 883 bp, Zea mays
ggatatcacagcagggcatcgactacatccattaaccaaattgacataataacactaaaacatctatttttattcctagctttttattaactgccgacgaggccgtcgccgagttcttcgacaaccccaccgtcccgcgcgaggagaaggccgagctcatcggcgagatcgccaagtcgtccgagctgcagccgcacgtcgtcaacttcctcaacgtcgtcgtcgacaacttccgcgcgtccatcgtgccgcagatcgtcgtcgagttcgagaacgtctacaactcgctcacgggcaccgaggtcgccaccgtcacctccgtcgtgcagctcgagtcgcaggacctcgcgcagatcgcgcagcacgtccagaagatgaccggcgccaagaacgtccgcctcaagacgcagctcgaccaggcgctcatcgccggcttcaccgtgcagtacggccgcgacggctccaacttgatcgacatgagcgtccggaagcagatcgaggagatcccgtccgagttcgagttgcccgccctcccgctcgaagtctgaggccggcttgaggcgtccatcctcgccctcgaagctatagctgcggctactgtctcaaggaaccaagcgggaatgttggcactgtccccttcagtcagacctgcggatcaacggcggtggctccaaatctccaatactactacatatgaacggacactatttttgtgcgtttctgttgacgggaacctgtgtagttctttctcctttttttccctgtggttgacagacacagacagacactgtaatatgttttaaaacactcatctatatagctgagtgtgcacctctcctctcaatcgtatatacaagctgagatagagtcatgggatgaaaaa

SEQ ID NO: 265604 - DNA, 988 bp, Zea mays
cggacgcgtgggccgcactgcccgcgagtcctccactccgaccgcacgatggctgcgctgcgcctcgcctccttcaccctccgccccgccgctgccgcggcctccgcctcctccggcgcgaccccagccgcgtccggctccgtctccgtctccttcgcccgcgcggcgcgggggctgccctccctccgcctggccccgccccgccgccgcggggacctcgccaggccccgcgccgcggccgaggccgcggcggagagctacgcgtccgcgctgtcggaggtggccgtcgagaacggcaccctcgagcagacggtctccgacctggagaagctggagaaggtcttcgcggacgaggccgtcgccgagttcttcgacaaccccaccgtcccgcgcgaggagaaggccgagctcatcgacgagatcgccaggtcgtccgagctgcagccgcacgtcgtcaacttcctcaacgtcgtcgtcgacaacttccgcgcggccatcgtgccgcagatcgtcgccgagttcgagaacgtctacaactcgctcacgggcaccgaggtcgccaccgtcacctccgtcgtgcagctcgagtcgcaggacctcgcgcagatcgcgcagcacgtccagaagatgaccggcgccaagaacgtccgcctcgagacgcagctcgaccaggcgctcatcgccggcttcaccgtgcagtacggccgcgacggctccaacttcatcgagatgagcgtccggtagcagatcgaggagatcgcgtccgagttcgagttgcccgccgtcccgctcgaagtctgaggccggcttgaggcgtccttcctcgccctcgaagctataggtcctttttctgctgcctctctccctgctctgctattcatctgtatcattctctggttcttgaatgctttgagtgaatggtgaatgccgcatacctggatttcaggattcatatttgaatgaatggtgaatacactgcataccggat

SEQ ID NO: 265605 - DNA, 506 bp, Zea mays
cggacgcgtgggcggacgcgtgggcggacgcgtgggcggacgcgtgggccgcgacggctccaacttgatcgacatgagcgtccggaagcagatcgaggagatcgcgtccgagttcgagttgcccgccgtcccgctcgaagtctgaggccggcttgaggcgtccatcctcgccctcgaagctatagctgctactgtctcaaggaaccaagcgggaatgttggccctgtccccttcagtcactcagacctgcggatcaacggcggtggctccaaatctccgatactactacatatgaacggaccccacttttgtgcgtttcggttggcgggaacctctgtagttctttctcctttttttccctggggttgacagacacagacagacactgtaatatgttttttaaaaacactcatccatatagctgactgtgcacctcgtctctcaattcatcctcatgctctactgcagaacgttcaaaaatgagatcgtgagggcctacgcacaag

SEQ ID NO: 265606 - DNA, 1402 bp, Zea mays
cccacgcgtccgcccacgcgtccgtggcgattgcatttttggtgctaaaccgcacgacccactcggcccattccataccccaccttgcgtacgcgagccgaacgctcgtgggtactgcagcctccgtccctacctagggttccggcgatggcgcacggcggctacccgcgccgcggcgctgccgtacgcaggcccaagtcctcggcctctgccgctgttgccgaccgcaagcggaagcggaccgccgccgccgccaagaccacctcccttaagaaccagatccgctccaccgagcgcttcctccgcaaggaccttccggatgagattagggttgctcaagagaagaaactggaagaactgaagaggcaacaagagcttcagaatcaacttgttgtccagcggacattacagtttagagatagaaagataaaattctttgagagacggaagattgagaggatgataaggcgactcgagaagcaacaacgttcaaatggtgacggtgtcaacaataatctgtcaaaattgcgagaagatcttgaatatgttagattcttccctaagaatgagaaatatgtctcgctgttcactggagggaacagtcaagatattgttcaagagaggaataaatggcgcaaacagatcaaggagaatctcatggctgctgcagcaaacggaaaagatttagaagagacagcaagcgacgacgataccttggatgtgagtgatgatgacttctttatgtctggaagttcaagtgatgaagaggctgatgatgagtggactgacaagagtgctaaggaaccagcatccagtgcttcaggtagggcagcatctggcatgtcaagtgatgaaaagaaccagcgtcagagagatgctcgagttcttatgccgccaccacgctcattagccccaaatagaggcagacatgcagataaacgtgcgatatccagctcgagcagtacttcaaacagcacaagcggcgaatcatttaaaaatagaagagtaccaaatcgtcccggggataataacagtaatctgagctcaaattctgatgttcataaaccacggcgcaaaaggaggcataagaagaaaagaaagctgcaggcatgatgaatattcccaaagcgcgtgaactgtggggggtacggtggaaattcagattcccagcgaagtttggactttcagcatggccaatttggagaagttgaaaaaaaagaagacacagcatgtgcgatgtgtctgagcaagttgattgattctgtatcctcactcctaaatcctgatgtaaaacgactgtacatccatctgttcatggatatcacttgcggtggtcagatcttgccagtgtaccgaatgcgtgtccgtcatttccgccgtgaaattatgtatgcttttttcc

SEQ ID NO: 265607 - DNA, 1612 bp, Zea mays
atcgccggctgacactcacaagaacctgcctccctcggtctggatcgctatctcttttctagcggctccagagggagggaaagctagcgcacagccgagagaagagagcagagagggagggagaacaaagagagagagaaaaaaaacaccagagaggtggagcgagaaccgaggcggatccgccttttgtccctcctgcccgagggctagcctgccgccgcccccgcgagagatcgagaggaggcgctgttcagttcagtcctgtgattccttcctacaggaggggggagaagccggagggggaagagatgatgcgggagacgtacatggacgtgctgccgccggtggaccacatagccgcctcacggagcggcggctggttcccgggcgcggcgcgtctctggacggcggcggagaacaagcagttcgagcgggcgctggccgggctcgacctctgccgcccggactgggagaaggtggcgcgggccatcccgggccggacggtgcgcgaggtcgtcagccgcggccggacccgccgggtcgacgtccagcagatcgagagcggcctggtgcccatgccggtctacggcgccggggccggggccggctcgttcaccctgcagtgggacggctgctacggccccgcggactcgaggcacaacggctaccgcttcggaagcggaggctgcgggaggcggcaccacggtcgcaccccggagcaggaccggaagaagggcgtgccgtggacggaggaggagcacaggctgttcctcttaggcctgaagaaatacggcaagggggactggaggaacatatcgcgcaactacgtccagacgcggacgcccacgcaggtggccagccacgcgcagaagtacttcatcaggctcaactccggcggcaaggacaagaggaggtccagcatccacgacatcaccacggtgaacctgacggacgacgagcgggcgccctcgccgtcgcggtcctctctgatcaccaccaccaccagccagccaaacgcgccggctccggccgcagtggtgataggcggccccttctcgtcgtcgtcggcggccgaagccaagcagcaccagcacggcgctgggaacctgccaccgaaccggacctccgtggtgccggctgtttacaggatggacgattcgcaggaccgcggcctgcagtgtggccctctgcgtcatcaactggtcgccagccaccacagcgttctgttttaggcgcaagcgcaattcccactttgaggcgcgccatggtcatggatccatccatcaggtgttgtctagtgtgtgtgtgtacgatgcgtatgcgtgtgttctttgctgtagcttcagcgcctgtatcgaagtgattagccttttggggagggggggcgtaacggaaaggggatcttcggttccacggtggtccaggtccacaatttgttgttggtgaatggtgatgccgagaacgtaacaaaaaaaaaggacgccaaggattctgagtggacttgggcattcaatcatggaccctgcttttgctcgccgcggcccgcggatgatcagcagaacctaattctggatccttcttggtcagctgatgtatcctttgagtgaccatc

SEQ ID NO: 265608 - DNA, 548 bp, Zea mays
  unsure (1)..(548): unsure at all n locations
atcacctgagtagatttgcaacttgcagttaatcaactatcaacaattaatgcatttaatccggggggaattttcgattttccttatcgagtagagatctgactctctcttaaacagacatttactgaagaagatcgtcatgtttctgttcttccaaggtgtgccccccaagcccttgaagaagtacggcagaggggactggaggaacatctcgcgcaacttcgtcccgacccggacgccgacgcaggtggccagccacgcgcagaagtacttcatccgcctcaactccggcggcaaggacaagcgccggtccagcatccacgacatcaccaccgtcaacctccccgacgaagaccgcggcaacgcgccaccgtccgcggtcaccaccactaccaacccctccgtcgccctcccggacatgaagcccttcattgcgccgctccaagacgcgctcggcgtgtcgcacccctacggcaacgtgaagctggagcctaagagctcgctggtggccggcctgggcttcaacgactccgtcctnctgatgcact

SEQ ID NO: 265609 - DNA, 1085 bp, Zea mays
ggatccgactctctaggacagtcatgtactactagcttgttgcacatatgatggccagcaaagcaagaactgatcaaaagttagtcagcactgaacaagatcacgttttttttgtggttgatgttcttggggccaggctgttcctcctaggcctgaagaaatacggcaagggggactgggggaacgtatcgcgcaacgtcgtccagacccggacgcccacgcaggtggccagccacgcgcagaagtacttcatcaggctcaactccggcggcaaggacaagacgaggtccagcatccacgacatcaccacggtcaacctgacggacgaccagccggcctcgccgtcccagtcctccctgatcaccagccagtcgaacgcaccagctccatctccagctccggctccagccgcggggatatgccaggtcccattggcggccgacgtcaagcgacacggtgccggaactctgcccttcagctcaccgaaccggacctctgcggtaccggcctacaggatggagtttcatgaccaacaaggcctgcagtgtggccctctgcatgctcagttgctcgccagccagagcgtcctgttctaggcgcggtggcagcccaccctgcgccatggatcgaccaggtgcctagtgcataatacttgtggtatcgctgtagcttcagcgcctgtattgaagggattagcctttcgggagcataacagaaaggagatcttcatttcatgggtggtccataaaatttgttggagaatgtaacaaaaagaacgccgagaattcgatgccatggtattttcagactgttgctcgagtggtacggctggaaatgtatcatgcatcctatgaagtggacttgcattcaatcatggatgatcctatgaagtgtcggttaaccttggttgtgaccatctgattctgctgctgtctctgaagatggtgccttatattgaggccttccgagttcaaaccattctgtagtgtccagacatatttatccgtagtaatcagtttgcctattggtggtggtgcctgcctcaatctatgtttggagtttggacaagtttaattttctcggat

SEQ ID NO: 265610 - DNA, 445 bp, Zea mays
cccacgcgtccgcccacgcgtccgcggacgcgtgggctggatcgctatctcttttctagggcccagggaaagctagctagctcacagctgagctgagggaagaaagcaaggagagggagccagggaggaaggggaaaaacacgcggagagggtgagcaagaaagaaccgaggcggatcgccttctgttcctcctgccggctccgcgagaggaggcactgctcagggggggaagagggggaagaaagaggtggaacaacgcccggggcagagcagagatgatgcgggagacgtacatggacgtgctgccgccggtggaccacatagccgcacggagcaactggttcccggcggcggcgcgtctgtggacggcggcggagaacaagcagttcgagcgggcgctcgccgggctcgacctctgccgcccggactgggaggaggtggcgc

SEQ ID NO: 265611 - DNA, 661 bp, Zea mays
cgcgggctcacgggcagcgagatggcgcgcttcaagttccgcaagggctgcctggccatgtacgtctacaccgtgcgccggctcggcgccgccgggttcatgcgcaccgacgacctcaggcggatgctgcagtgacgcggcgagctcaaggacttcctggaccacacagccatgctcgccatcccgagccagaagagcatcaccctgcagtcccggacagcggtggctcactgagaggagatcgtcgtcacagggcatgtcacctccagagcctcgagtctgatctgattctgatgacgccggaagaacctcgatcggttcagcatcgcagaacagcctgaacaggtatggtcgtcggattgtagctgtaatcttcagagggcctatctcattttgtttgcccccctctccctctctcggttggattcgtttgttcagtgtcggtggtgcaagtgttcgcctcctctgctgggagagcagatgtatagatctgttgagcaaaaaaaagaagaagaagtgttcccgcaaatcaagcatagtttttattatatatataaaaaaatcccaaaggaaatttcccttcattggatcttgaaaaaaaaaaaaaaaaaaaaaaaaaaaaaaaaaaaaaaagggcggctgctcgcgatctagaactagt

SEQ ID NO: 265612 - DNA, 614 bp, Zea mays
gtacggtcggaattccgggtcgatcatgcgtccgcggacggtgtgcgtgacgcgtggggggaaggatgaatgcactttcatgaaacacagtttgaaattaaggagtgtatagtactgacgtcgaggattgggaaggaacaaaagacgccagcaaggatccactggtgacaagctacaacagaaaattcatgggaacagtagactacatatgggcctcggagggtctgcatactgttaaagtcttggacacatttcccatagagattttgaaaaaaacaactgggttcccgaccaagaaatggggaagcgatcacattgcccttgcctgtgaattggcttttacaaaatgacgccttttatcaggcggagagggcgcctgcatagttgctagtgaccaaacacacctcaagagaaagaatactgtctacaggacgattaactgaaccaaacctcgctcttttagagctcgttaatttatttcatttttttttcgacacacctttttgaattgtgcgtgagtatggagaaccggagtacatcacttgggtccaattttagagcattgttcctgtttgattggctatggagagtgtattttggtgtgctgcccctct

SEQ ID NO: 265613 - DNA, 828 bp, Zea mays
cccacgcgtccggcggactatctggcccaggagcaccgctttctttatgaaaaaatatcaccttttattttggattggaactggcgcaaggataagttactgtttgagttcggtctgtggtctccagacattctatgtcttcaggaggttgacaaatttacagaccttgaacaagaaatggcaagccaaggatataacggtacatggaagatacggactggagatgcagctgatggatgtgctattttttggagaacaacaaggttccagttgcgttatgaagaagacattgagttcaccaagcttggacttcgtgataatgttgcccagctctgtgttttagagtcggggggccttcagtatgtgcaaactgactctgttagattatctacaagttctaaccatccacaacaagctaaacaagttataatatgtaacattcacgttctttataatccaaagagaggggacatcaaacttggtcaggtcaggacacttctggataaagctaacgctctatctaagatgtggaatgatgctccagtgatagtttgtggagattttaactctacacccaagagtccattgtataattttatgttggggcaaaagttgaatttgtctggccttgcgagaaatactatatctggacagcaaattggtggtagttcacaggggctatatactggccctaatatatctgggtggacaccagaagaaatcaaagctgccactgggaaggatgaatgcactttcatgaaacacagtttgaaattaaggagtgtatatactgacgccgaggattttgtaggaacaaaagacgccagc

SEQ ID NO: 265614 - DNA, 1501 bp, Zea mays
cgatgttgttgttggaacacctggccgcataatcaatttgataaatggcggaagctccagttgggagaagttcagtatttggtcctggatgaggctgaccagatgctcgcagtggggtttgaggaagatgtggagacaatattacaacagcttcctgcaggcaggcaaagcatgttgttctctgcgacgatgcctagctgggtgaagaaactgtccagacggtacttgaacaaccctttgacgattgacttggttggcgatcaagatgaaaagcttgctgaaggaatcaaactctatgctatcccactcacagcgacgtcaaagcgcaccgttcttagtgatctaatcacggtttatgcaaagggtgggaaaaccattgttttcactcgcacaaagaaagatgcagatgaggtatcattggcactgacaaacagtattgcttctgaggcacttcatggtgatatttcacagcatcagcgtgaaaggacactaaatggatttcgtcaagggaaatttactgttctagtagctacagatgttgctgcccgcggtcttgatataccaaatgttgatctgattatccattatgaattgccaaatgagccagaaacttttgtccatcgttctggacgcactggacgtgctgggaaagcaggaactgcaatcttgatgtttaccagcagccagaaaaggacagttaagtcacttgagcgtgatgttggttgcaactttgagtttataagccctccgtccatagaagaagtgctggagtcatctgctgagcatgtcattgctacattgcgaggtgtgcacccagagtcaactaaatactttcttggagctgctgagaaattaacagaagaattgggacctcatgctcttgcttctgcactggcacatctgagtggattttctcagccaccttcgtcacgttctctcatcagtcatgagcagggatgggtgacgttgcaactaactagagaaccgggatttggcagaggcttcttttctcctagatctgttactggttttctatctgatgtttgttcagctgctgcagatgaagttggcaaaatatacataacagcagatgagaatgtccaaggagcagtcttcgatttacctgaggaaattgcaaaggacctgcttactatggaggtccccccgggaaacacattaaccaaaatttcgaagctgcctgcgttgcaagatgatagtcctgctactgatagctatggtcgcttttcaaacgaccgaggttccaggaacaacaggcgttcaaggggtggaggcgcttcaagaggccggggtggttgggacaccgacagtgaggaccgataccggcgtggtggcaggagcttgaggtctgacaacgatagttggtcagatgatgactggtcaggcggtgggagaaaatcaaaccgttcctcctcatccggtagccgttcctcatcatcctacagcagccgtggctcaccatccttcggtggccgctcatcat

SEQ ID NO: 265615 - DNA, 527 bp, Zea mays
cggaaaacccgggtcgacgcacgcgtccgcggacgcgtgggcgagcagcgcgcccctgtcatcatgtccatctgatgcagcttctgctgctgcttctgccgccattgaagacagcgtgaagcatttcctccaggcgccacttgaaaacagtgggatcatcccaaacgcagcagtttttcagaccaagccagcttctctgcaccgtgttgctagcctggagaacctgcagaagaggatcgtcggggatgcaatgtattccgagaccgcgtcaacgacattctcagatcctgaagctcttgccgataggtaaaggttgctcctgtcctgtgatgaacagccgtgtgatgctctagcggcctaagtgcttctggtaatggaagttgtagcacccatgcgcctgggtggggtctacacagtgatttgtacactattttgaaggttaataataattgttgagaaatgatctcatccctttgtacctatataagtccagtattccattaataaagacaatagagttttcactc

SEQ ID NO: 265616 - DNA, 722 bp, Zea mays
aggtggatgggctgctctatctcaaatgataccgagaggagtccaaacagaatactaccatacaaacatttcttaatgcttgtgtgtgagtatatgcacaactctgtactcttgtatcattagtaaaactgtgtttttttaaatatccatgctgaagggttctaacataatcatgttaagtttttatgaaaaaaatttgcttaaactatgactgttccggtcaggtttttacctaaagaaggtattcacaagaatcttggcatttaacagacctgcacaccttgactttatgaaaagggacatgtcttcaggaacacagtactgttttaattccaggtgaacatagccgaggaagctgtcaggaggctaactgggatcaccctcatgctaccgaccgcttttgagaagcccacgagcagcgcgcccctgtcatcatgtccatctgatgcagcttctgcttctgcttctgccgccattgaagacagcgtgaagcatttcctccaggcgccacttgaaaacagtgggatcatcccaaacgcagcagtttttcagaccaagccagcttctctgcaccgtgttgctagcctggagaacctgcagaagaggatcgtcggggatgcaatgtattccgagaccgcgtcaacgacattctcagatcctgaagctcttgccgataggtaaaagttgctcctgtcctgtgatgaacagccgtgtgatgctct

SEQ ID NO: 265617 - DNA, 899 bp, Zea mays
ctgctcccaactcccatcctccccctcccggagtacgaatactagaaagagagcggctttcctctaagaatggcgggtggcggcgccacgacgacgacgtggtggtggtgagctgcggcggcagaggcggcggcgaccccggctcgtacgccgcggtgctcaagaggaagctcgacctgtactgcgccgccgtcgccaaatccatggaagctaaatcacaagaatattcgttgggctaccccaactcacaagcttcagatgcttcgcaattgatttctcaagcttcctttgatggtgacatagatggggcaagcctagttacaaactctaatgtcatagaagatgatgattttcaaggcaagccaaccaacaggggcacatcaaaggaactgtcagacgatgatggtgaccttgaagagaatactgaccccgctaacgccaagaagatgaggagaatggtgtcaaaccgggaatcggctaggcgatcaagaaagaggaagcaagcacacttgaccgatcttgaatcacaggtttccaggttaacgtctgagaatgcatctttgctgaagcgactggctgatatgactcagaaatacaaggacgcttccgttgacaataaaaatctaacagttgatgttgagactatgaggagaaaggttcgttcgtcttgaatgcatcacagacctttttcttctttttgttggtgtacgagagctcttaactgcatccatttatcgatcataacatttttactgggctctgcgtatactcaccgtaatcaacgtttacatctctctagatggctgcaaagggcagtgaaagtaatatgattgctcatagttcttattttagaacctgcaagtacagttttagtttccaatggtttttaactgcaccca

SEQ ID NO: 265618 - DNA, 471 bp, Zea mays
gcgtccgatgaggagaaaggtgtgaggagttgtaaaacgaaacaaaacattaaaagcgcacgtgccatgccccaatgcgccgggtgtgtgtcccattaagcctgtggggcgttgcccttgccttgccttggggatgggctgctactatctcaaatgataccgagaggagtccaaactgaatactaccatacaaacatttcttaatgcttgtgtgtgaacatagccgaggaagctgtcaggaggctaactgggatcaccctcatgctaccgaccgcttttgagaagcccacgagcagcgcgcccctgtcatcatgtccatctgatgcagcttctgcttctgcttctgccgccattgaagatagcgtgaagcatttcctccaggcgccacttgaaaacagagcagtttttcagaccaagccagcttctctgcaccgtgttgctagcctggagaacctgcagaagaggatcgtc

SEQ ID NO: 265619 - DNA, 699 bp, Zea mays
tttgctcccaactcccatcctccccctcccggagtacgaagtactagaaagagagcggctttcctctaagaatggcgggtggcggcgccggcgacgacgacgtggtggtggtgagctgcggcggcagaggcggcggcgaccccggcgcatacgccgcggtgctcaagaggaagctcgacctgtactgcgccgccgtcgccaaatccatggtgacatagatggggcaagcctagttacaaactctaatgtcatagaagatgatgattttcaaggcaagccaaccaacagtggcacatcaaaggaactgtcagacgatgatggtgaccttgaagagaatactgaccccgctaacgccaagaagatgaggagaatggtgtcaaaccgggaatcggctaggcgatcaagaaagaggaagcaagcacacttgaccgttcttgaatcacaggtttccaggctaacgtctgagaatgcatctttgctgaagcgactggctgatatgactcagaaatacaaggacgcttccgttgacaataaaaatctaacagttgatgttgagactatgaggagaaaggtgaacatagccgaggaagctgtcaggaggctaactgggatcaccctcatgctaccgaccgcgtttgcgaagcacgcgagcagcgcgcctactgtcatcatgaccatctgatgcagcttctgcttctg

SEQ ID NO: 265620 - DNA, 1026 bp, Zea mays
cttctctatccgccagagggaaatacccattgatctcatctcatgccctgttgccgcgcctgctcctccttccccatccgcgcccaccgcggcccctccggcagctccgccacgcgcccaaccgcaacctgcccgcacggccaccgctgcctggtagtatctatcaaatcagccacctgtcctctttttcttcaaatcaagtccgtttccccttcctgtctaccctctccctcgtctccggcgggcggtggcctcacctccctctccccgtcgccctgatggctccctccgcagctctcgctccggtggccttccgctccgccttctcgactccgctcgcgtcgaaccctacccgtaatagaataaacatagaaggcgctttctgtttgccgtgttccacaaggaagagagctagttatagatctttccgagtgtacagtttatttggagggaagaaggataaagatgagaatggcgatgaagcgccatcgaaagcagggatttttggaaacatgcaaaatctctatgaaactgttaagaaggcccaaatggttgtccaagttgaggctgtccgggtgcaaaaggagcttgcagcgactgagattgatggttattgtgaaggcgaactaatcaaggttacactttctggaaaccagcaacctattagagttgaaatcacagaagctgcgatggagttgggtgctgaaaaactttccgggttggtcaacgatgcttacaaggatgcacaccaacggagcgtccaggccatgaaagagaggatgtctgacttggcacagagcttaggaatgcctgcgggccttggtgatggtctcaagtgatgctgcgattcgggaagcctttctaataatttttttttttgtccctcaattttgtatacgaagtcacgtagtaagaagtgtactcgtgaccagctgtttcgttcagcgttagctgtgattttgttttgtacaagcagatatatttgcactaaatcgtggtaacgtcgtcctctggagcttggatgtc

SEQ ID NO: 265621 - DNA, 674 bp, Zea mays
ctcccgtcactccttatcccttcccatcgatcccatgccctgttgccgcgcccgcacctccttccccatccgcgcccgccgcggctcctccggcagctccgccacgcgcccaaccgcaacctgcccgcacggccaccgctgcctggtagtatctatcaaatcagccacctgtcctctttttcttcaaatcaagtccgtttccctttcctttctaccctctccctcgtctccggcgggcggtggcctcacctccctctccccgtcgccctgatggctccctccacagctctcgctccggtggccttccgctccgccttctcgacgccgctcgcgtcgaaacctacccgtaatagaatgaacatagagggcgctttctgtttgccgtgttccacaaggaagagagctagttatagacctttccgagtgtacagtttatttggagggaagaaggataaagatgagaatggcgatgaagcgccatcgaaagcagggatttttggaaacatgcaaaatctctatgaaactgttaagaaggcccaaatggttgtccaagttgaggctgtccgggtgcagaaggagcttgcagcgtatgcatttatatcattaatttatctatctcttgtcgatgcaaaatagccagcctgtgcgatttttttctcctatttttaagactg

SEQ ID NO: 265622 - DNA, 689 bp, Zea mays
ggagctcccaaactagccctaaaggtttccactcccagaagctccgttttttttgtgtcttcgccacacatctgttatccatgtgggccacaggagcagggagagagatctgggtggagaagggcctgggaggaccagatcgcagagctgaagaggaggagcgtggcgaaggattcagaagagaacctgtcgtggggcgctcgcatgccgagaatggccgaggcgttagcagcggagtagctgcgacaagcgaccctgccaaatgcagctgtactcgtacgtagcatgtggagcgaagcgaaacggaatatattttctggtgggtacaatttggtctgcaaggtttttaaggcgtggatctaaagatgtccagatggaaaccttcagagacagacctgttacgagaattggacgtgtagcagtagtagctgtagcggtggcatctggccagtattgaggaggaacagcagcacctggatggagtgtggtggctgctggctgcagaccaacacccttggccctggctacataatagttgagttcctgcctggccacctgggcctggctggctgtatgtaaacgactcaactatgttactccttgagactcctgttacatctgtggcaggtccagtgtaaatgtaaatactacaagcatcaataacgaaggagcaagccagttgttcttcc

SEQ ID NO: 265623 - DNA, 1074 bp, Zea mays
cccacgcgtccgccccagctcccgagggcccatttcgccgtctttcactccatcaccccctctcccccagtcccccgtccctttcccctcagccatctccttccccctcacctcgccatggcgttcttctctcaccaccatctccagcagccacacccgcagcaggcaccgcccccgaatcagcagcagccggtgcttccttccttcaggaacgcgctaccggtgcctgtggatggccagatcccagcgcccctcaccttcttcaacccgccgcctgccttcccggagcagcccgcgcagacaacgctggtggatgcggtggggctgacggcagctgctgggcttgggtggaggcagccgagggagcaggaactgcttggagaaaactcccagatgtcgtccatcgattttctgcggacgggctcggcggtatcgacggggctggcgctgtctctggaggaccggcgccacggcggcggcggggctgggaactcctccggcgattcaccgctgctcctgctgcccatgctggacgatgacatttcacgcgaggtccagcggcttgacgctgatatggaccgctttattaaagctcagagtgaacggctgaggcaatctatactggaaaaagttcaggcaaagcaatttgaggcactggcctcagttgaggacaagatactcagaaaaatacgggacaaagaggcggaagtggagaccataaacaaaaggaactctgaactagaggaccagattaagcatttgggagtggaagttggtgcttggcagcatagggccaagtacaatgaaagcatgatcaatgcactcaagtacaacttggaacaggtttgtgctcaccagagcaaggatttcaaggaaggctgcggcgatagcgaggtagatgacacggcgtcctgtcgcgatggtggtgctatcaattttcaactgactccgaaggagaacagacaaccgaaggatttgacggcttgcagggtctgcaaatcaagtgaggcatccatgctcttgctgccttgtcggcatctttgtctatgcaaggagtgcgagagcaagctgagc

SEQ ID NO: 265624 - DNA, 481 bp, Zea mays
  unsure (1)..(481): unsure at all n locations
ccttcacccatctcacccgcgacccgcccctttcccctaagccatctccttcctcctcacctcgccatggcgttcttctctcatcaccatctccagcagccacacgcgcagcagccagtgctcccttccttcaggaacgcgctaccggtgcctgtggatggccagatcccagcgcccctcaccttcttcaacccgccgcctgccttcccggagcaacccgcgcaggcacctctggtggatgcggtgggcttgacggcagctgcggggcttgggtggaggcagccgagggagcaggaactgcttggggaaaactcccagatgtcgtccattgattttctgcagacgggctcggcagtgtcgacggtgttggcgctgtctctggaggaccggcgccacggcggcggcggtgctgggaactcctctggcgattcaccgctgctcctgctgcccatgctggacgatgacatctnacgcgaggtcc

SEQ ID NO: 265625 - DNA, 1253 bp, Zea mays
ctagctagcatgtacgccgttccccaacctctggcgtagtcttgttcatcttcgatctcctccatctcccttcatcctctctctcgctgtttgaggagaactgcctgcccctgctccctcttccgctcctccccgcgccccgctcgccatccccagacttcatttcaggccgggatggacgactacgcccgggagatgatggagctcaagacgctcgtcacccgcaccctcgagaagaagggcgtcctcgccaagattagggctgagctaagagcaagcgtgtttgaagccattgaagaggaggatcgggtggagaatgatgatggagggaaccctgctttgcttggtagctgtaatgaccgagctaagcaactgcatgcttcaccttcaggtaggttactaactgcacttgtatgcgaatacttggagtgggcgcaactaagtcacacaatgaaagtttacttgccagagtgtaacctgcccaaggacttctggaagaatgaactgaaagacttctctaacaaaagtggagctgaagggagcaggagtgctgaaagtggtccactgcttttagatgttctcgaaggttatctgaaatatgagaatttgtctcaagcaaggatgggcggcaggaggatgatgagttcagaatctgatccatcactaaatgctgaacatcggagcatgaggagggcaccatcagcatcagttgggaatctgcctcctatggggagacctatctcttcttcgcagcaggcatcagatcgcagaggggggtcttcagtttccaacacaaggaaagatgagtacaactggagatacgataccaccgatgatatatctgaagaggtgctgcgggcatcgactgccctagaaagtgttcagctagaccgcaaatctcggaatctgccgacatcttggaggcattcaggggatggcgccgagtaacaagaaggctttggagctggttgcttgacttgaccgaccctgtatcatgtaatttgtatgccactcatttgtggtgcttggattgctgctatcttagaaaaagaagtggtaaactggttatgtatggttgtcttgtaacgaacaaaacaaatcaaagagttaggtgccgtttgttttacatatttgtaacgtgatgggtaactgtgatgggtaactgataacgttaacccatgtttgtttaagtccaaccgtaatcagataccacattaaaaattaatactagcttattcaaacttattatcgct

SEQ ID NO: 265626 - DNA, 543 bp, Zea mays
ccttttcgtccgcccacgcgtccgattaaattgaacttttttctttactttaatttccttatggcaaaatttggatactatgtatagagcccccaaaaggttgactataatacaacaaacaatactttcggagtcaatatggtttcttgcagaattgctgcctttggttataaaaaacttttggtcaggaaataaattttagcttgacttacattgtcttcttggtgcgcttctttactaatcaacttgatcgaatgttcatgactcctaaattcctaccgtgtgtgtcaggaaataaattttagctcgacttacatcgtcacgcaagccaaatgcagttccttaataatatgttttctaactataatacaggtaccatcatgagttggatgatcttagaacacatctgtcatttactcaagctacaggagaagcaggtgttgcatcagctaagttagctcggatgtagtgcatgtcattgctgaaagagctgaatgagaaggacaactcactcaaagaccatagacttcgaagtgacaatct

SEQ ID NO: 265627 - DNA, 606 bp, Zea mays
gtgccatcatcatcagtttcttcgtcgtcagatttagatccgttgctgaaggatcttacggagaagaagttgagctttaggaggaacgtggtgtcattggcagctgagctcaagggtgtgaggagcaagcttgcttcccaggagcagctgtttgtaagggaatctcaaactagaaagcttgcggagacaaaaacaaggagcatggaagaggaagtaatcaagctgcagaaatgcttacaggacaaggatgagcaactgcgttcatccacaagtagcacggaacaggagaagcaggtgttgcatcagctaagttagctcggatgtagtgcatgtcattgctgaaagagctgaatgagaaggacaactcactcaaagaccatagacttcgagtgaacaatctaggtgagcagcttgatcttctccagaaggatgtacaagcaagggaggtcacacaaatgcaacttaaagatatagttatgaggatcgagaccaacatcatggatgaagttgccaaagcttttgaaattgcgatgttgagaggggaaatcagaatattgtctactcactggacgaacaaaccaagaccctgaatcacagttaaaaagc

SEQ ID NO: 265628 - DNA, 375 bp, Zea mays
atgatatatctcaagaggtgctacgggcatcgactgctctagaaagtgttcagctagcccgcaaatctcggaatctgccaacatcctggaggcattcaggggatggcgccgagtaacaacaaggctttggagctggttgcttgacttgaccctgcatcatgtaatttgtatgccaatcatttgcagtgaggccatgcctggattgccgctatcttacaccagtggtaaactggttatgcgtgtttgtcttgtagcgcaccacacacctttagtgttagtttcatgttgcgattttcaaagctctcatgttggaactgcgtggacgagtttcatcgtcacaaagctcattttattcccgtagaacattatttaatc

SEQ ID NO: 265629 - DNA, 281 bp, Zea mays
tcctcgagcaagtaaagttgcttttcctattatacttcattaataacatcttttattattaacctccaaatatagtcaacatgctctagcttaaattttttggttttcttcagcatgctttggtcatctaattgtgttgttttggtcagaatttgtctcaaacaaggatgggcggcaggaggatgatgagttcagaatctgatccatcactaaatgttgaacatcggagcatgaggagggcaccattatcgtcagctgggaacctccctcctatggggagg

SEQ ID NO: 265630 - DNA, 900 bp, Zea mays
gtcaatcataagatctggatttgttgtcattccttctacctgtaaagatgcgagtgtttttgtttagccatgtgttttgcaatctgctcataacgaatggttttacattctaggatttctattgcttgcaggtaggttactggttgcacttgtttgtgaatacttggagtgaccacaactaagtcacacaatgaaactttaagtgtaacctggtgaccggtgaccattcataatatttcgtttttacattttggatatcaatatccattaatatgtttccctattttgtttgtatatcagccgaacttctgatagaatgaactgaaagacttctctaacaaaagtggagctgaggggagcaagagtgctgaaagcctgaaagtggtccaatgtttttagatgttctcgaatgttatctgaaatatgaggtttatctcttgcttgatcaacaatagaagcaaaaaatcatccttttgtttatttatgtttcccaatataaaggaaaaaggggaaatattttggtgcagtgtgcccaattcttttgtccctagaaaactgtgtagtcgcctatagcaggcgctatagtcagttttagctattttagacaccactactatttgtacacacatttctattatcctattttagcctgctatatccatgtatgagccttatgggaactctgcaactactatggatcctcttatacattatgttcgacatgcagacaaggtattatattgagttggaccaataatccttcatatttattgatgtgaattatgttgtactggtgtcctgtccttttgtttgtgctttataatttgtaattcctagctgctgatatggtatgatggatgggaggtggctgaaatcgttcggataagtgtcaatttgttg

SEQ ID NO: 265631 - DNA, 849 bp, Zea mays
caaagaagttgagctttaagaggaacgtggtgtcattgtcatcagagctcaagggtgtgaggagcaagcttgcttcctaggagcagctgtttgtaagggaatctcaaactggaaagcttgcggagacaaaaacaaggagcatggaagaggaagtaatcaagctgcataaatgcttacaggacaaggatgaacaactgcattcattcacaagtagcacggaacaggaacccaactgaaccttcaacttgcttgttctgggagatctgtgagcaagcgagtgctcctcacaatgggtattcgacatgagccccatccctgccacagacttgggaaaggcacagtgatttttatggtgacatgaatacattcctcttcaaattatatctttaagcatccatttttcgccctactggtgcaaacaagaatttgcaatgggtaggttactggctgcacttgtttttgaatacttggagtgaccacaactaagtcacacaatgaaactttactttccagagtgtaacctgccggacttctgatagaatgaactgaaagacttctctaacaaaagtggagctgaggggagcaagagtgctgaaagtggtccaatgtttttagatgttctcgaatgttatctgaaatatgaggtttatctcttgcttgatcaacaatagaagcaaaaaatcatccttttgtttatttatgtttcccaatataaaggaaaaggggaaatattttggtgcattgtgcccaaatcttttgtctctagaaaactatgtagtcacctatagcaggcgctatagtcagttttagctattttagacaccactactatttgtacacacatttcta

SEQ ID NO: 265632 - DNA, 1054 bp, Zea mays
acgagctccagctgtcggacgccgagaaggcccggatataccacttctacatccccgtcttcctgtggtgcgaggacgaggtcatggtgcacagagccaggtacaacgacggcgatgacatcccgccattggtgatcggggtcagcgctccccaaggaagtgggaagacgactcttgtgttcgcacttgattatctttttcgggttgctggtaggaattctgccacattgtctatagacgacttctatctgacagcaaaagaacagaatgaattgagggacagaaatcctgcaaatgctcttttagagttccgcgggaatgctggaagccacgatctccaactctcagtggaaacactcgagtcactgatcaagctaacgaaggaaggtatgaagatgaaggttccacggtatgacaagtctgcgtttgggggaaggggtgaccgggctgatccttctgtatggccagaggttgaagggcccttagaggttgttctgttcgaaggatggatgcttggatttaaacctccttccaaatgaagttgtgaaagaagtggatccacagctggagggggttaacaagaaccttgaagcatactctgatgcttgggacaggttcatccagtcatggattgttattaaaataagagaacccggtagcgtttaccagtggagactgcaggcagaggtcgctatgagagcagatggaaagcctggaatgtctgatgaggaggttatggattttgtatcacgctacctaccggcataccatgcatatctgccaacactgtacaaagaggggccgaatggttcgaatccagatcatctgctggtcatcgacatagacgaaaataggaaccctatctgtggtggatcatgggacatctcatgtttgtgaaactacttttatgatgggccgtcaaacaccactggcctcttgttgccctacactctggtagtgtaaatctgtgaattccatgtaaatatgaatttcgcttcttaaggcactttttaatctggcatggtctttagcttgaaaaaaaaaaaaaaaagaa

SEQ ID NO: 265633 - DNA, 495 bp, Zea mays
  unsure (1)..(495): unsure at all n locations
nccacgcgtncggcgacgcgctccccgacacctgcaggctgctggtggcgaagaacacgctggtggggaaagccatcgagggtaccccctgggaggcgctcaagccgtgcatgaagggtatgaatgcctggctcttcgtccacactgaggaggtacccgcagcgctcaagccctaccgcgccttccagaaggaggagcgtgtcgaggagaccaacgacttcgtcggcgccgtctttgagggcaagttttacgggcccggcgacttcaaggcgctcgagactatgcccagccgcgcagaggtgtacgccacgctgctcggcgcgctgcagggacccgctacgtccctcgtcgccacgctgcaggcgccagccagggatgttgttgcggtgctctccgctacgtgcgcaactcgaggaggaggctggagcgcctatggtgtcgaatggtgtcattcctctcatcctatctgtgtagtaaattctggtacttatggca

SEQ ID NO: 265634 - DNA, 615 bp, Zea mays
agactagctctcacgtgcgcaccgcctgctcgacgcaattccccactcgcccaccaaccttcccgtccccgatggcgatcatggcggccaccgccactgccgcggcttccccctccagctccacctcgccaggtcccctccaacccagcccccgcttcctccctcccgtctccacgcccgctcgctgccatctcctccccaagccgcggcggtgttgcgcgcgcctccacatcgagcgtcgggtggccgtcggcagcgacgtgtcttcgtcccatgacgtggctgccgaggaggccgctgctgcgcccaaggtcgggaagcgcgtgcgcgtcacggtgcccgtccgcgtccaccacgttgccaaggcgcccggcctggacctgcgcggcatggagggcgtcgtcaagcagtacatcggcgtttggaaggggaagcgcatcacggccaatctcccattcaaggtagagttcgagctcaagctggacggtcaggacaagccggtccggttcatcacccaccttcgcgagcaagagttcgagatcctcggggaggaatagagctctggactagagaataacgcgctctcatcggcggctgtggcatctgtatactatt

SEQ ID NO: 265635 - DNA, 1544 bp, Zea mays
ctagagttaaaaaaacacttacagcacgcagttgtcgtcgtcattgtcttcgactcttcgtggcacctcccgtccataaaaataaacgtgtgcccacaaatctgttcgctcgcattggcaactgaaccgcaccaggcaccacagtcccgtgcggcagtggcagacgcacagcagatcagcagcgcctccctctgcggctctgcctcttgccaaagccccccacagaattcttctccctccccgtctcctctcgcgctcgcgcgtggtgaggtgaggtggagttccgaccccgaggccgcaatggcgacagcggaggtggtggtggccaacggctcgggcggcgccgacaccaagaccgcgtttaaggagatatacagcaagctcaagcaggagatgctcgaggaccccgccttcgaattcactgacgagtcgctccagtggatcgaccgcatgttggattacaatgtgcttggaggaaagtgcaatcgtgggctatctgttgtcgatagctacaagattttgaagggtgttgacgttctgagcaaggaggagacatttctggcctgcacccttggctggtgtattgaatggcttcaagcttattttcttgtgcttgatgatattatggacaactcccagacacggcgtggccagccttgctggtttagagtgccacaggttggtctcattgcagtaaatgatgggattatccttcgcaatcatatctcacgaatccttcaacgccacttcaaaggaaagccatattatgttgatatcattgacttgttcaacgaggttgagttcaagacagcttcagggcaaatgttggatcttatcactacccacgagggtgaaaaggatctaactaaatataacttgacagttcaccgccgcatcgttcagtacaagacagcttattattcattctaccttcctgttgcatgtgcattgctgctggctggtgagaacttggaaaactttgttgatgtaaagaacattctcgttgaaatgggaacatactttcaagttcaggatgactatctagattgttttggtgatcctgaattcattggcaagatcggaactgacattgaagactacaaatgttcctggctagttgtgcaagctcttgagcgtgctgctgagaaccaaaagagcattctgtttgaaaattacggaaagtctgatccagcgtgtgttgcaaaggtgaaggacttgtacaaagagcttaaactggaggaggttttccatgagtacgagagggagagttacaacaagctgattgccgacatcgaggcccagccgagcaaggcagtccaaactgttttgaagtccttccttcacaagatctacaagagggacaagtagacccagatcgtcgacaagctgctccatcgacgcttgcatcaatcaaattactatacttgattgatgcggacgagtaatttgtactatgttgttctgtgtactatgttgttttgtgttttcattctcctgttgtacggtacaccttaatataataaagcacagtggtactagggatg

SEQ ID NO: 265636 - DNA, 752 bp, Zea mays
ttctttccggtggaggcgcggacgacgactgaggggacggtttgtcccgggacgactgtttgaagtacaggaaggaggagaaggagcacaagcacaaggagcacctcggcgagatgggcgcccttgccgccggcgccttcgccctgtacgagaggcacgaggcgaagaaggacccggagcacgcgcagcggcacaagatcgaggagggcgtggcggcggtggctgccctgggcagcggcggcttcgcgttccacgagcaccacgacaagaaggaggccaaagacgcggcggaggacgccggggaggaggaggagtccggccgccgcggcgaggggaagaagaagcaccacttcttcggctgatcgggctgctgctcgatcgatctacttgcgtacgtaggctgctccccaggaccagaaggagcatgcatggagggcgaacgaagtcacgggggtttgattgcccgtctatgtatatcatgtgtagttactgatgatgtgtgtgcatggtacttcgtacgcgtgtttggtgatcgatgtgtggtgtgtgtgtctctgcatggacattttcctactctgcgttttttctctctctactgatatagtatatatgtggtgtgtctatatatgtgtgcacgtggttttcgctcggctttttatcaacgctttgagaataaaagctttctcttcatctgtatattttatttttaatgaaagaaataaaccactatatatttcgacactcttagatag

SEQ ID NO: 265637 - DNA, 441 bp, Zea mays
  unsure (1)..(441): unsure at all n locations
gttcaatttcatctttagttggagtgaacttaataaggttctccacctggtcagcatccagancagtatcatccagagccagaattgcactcattaggtcaggcagtggcattttgactttggtaagcatgattccacaattgttagcccggcgaagatcaataagatgaattttctctggtttcgacccagatgcacgactgcctgacttatctgaacgccttgaatctgaacttggcagtgcagctgagaaaagattttctaattctgacatatcaaacacaggagcttttaaagtttcgtcaggcttctgtgactccgccgtgtgcacgtggttttcgctcggctttttatcaacgctttgagaataaaagctttctccccatctgtatattttatttttaatgaaagaaatccaccactatatatttcgacacaccc

SEQ ID NO: 265638 - DNA, 468 bp, Zea mays
ggagaaggagcacaagcacaaggagcacctcggcgagatgggcgccctcgccgccggcgccttcgccctgtacgagaggcgcgaggcgaagaaggacccggagcacgcgcagcggcacaagatcgaggagggcgtggcggcggtggcggccctgggcagcggcggcttcgcgttccacgagcaccacgacaagaaggaggccaaagacgcggcggaggacgccggggaggaggaggagtccggccgccgcggcgaggggaagaagaagcaccacttcttcggctgatcgggctgctgctcgatcgatctacttgcgtacgtaggctgctccccacgaccagaaggagcatgcatggagggcgaacgaactcaataaaagaatcagccgggggtttgattgtccgcctatgtatatcatgtgtaggtactgatgatgtgtgtgcatggtacttcgtacgcgtgtttggg

SEQ ID NO: 265639 - DNA, 437 bp, Zea mays
aagctcttgagcgtgctgctgagaaccaaaagagcattctgtttgaaaattacggaaagtctgatccagcgtgtgttgcaaaggtgaaggacttgtacaaagagcttaaactggaggaggttttccatgagtacgagagggagagttacaacaagctgattgccgacatcgaggcccagccgagcaaggcagtccaaactgttttgaagtccttccttcacaagatctacaagagggacaagtagacccagatcgtcgacaagctgctccatcgacgcttgcatcaatcaaattactatacttgattgatgcggacgagtaattgtactatgttgttttgtgttttcattctcctgttgtacggtacaccttaatacggagtataataaagcacagtggtactagggatgcaaagccctcttgtgtcaccattcccc

SEQ ID NO: 265640 - DNA, 534 bp, Zea mays
atcgtgggctatctgttgtcgatagctacaagattttgaagggtgttgacgttctgagcaaggaggagtccggccgccgcggcgaggggaagcagaagcaccacttcttcggctgatcgggctgctgctcgatcgatctacttgcgtacgtaggctgctccccaggaccagaaggagcatgcatggagggcgaacgaagtcacgggggtttgattgcccgtctatgtatatcatgtgtagttactgatgatgtgtgtgcatggtacttcgtacgcgtgtttggtgatcgatgtgtggtgtgtgtgtctctgcatggacattttcctactctgcgttttttctctgtctactgatatagtatatatgtggtgtgtttatattttaatttttcttttgggcgtttcgttctataggttccatgtttttttttatgttttcattgattatgtatttttatctattttgtgtctcttattttttaatattctgacttttttctctcatttattattcttgtttttttttatttttttt

SEQ ID NO: 265641 - DNA, 1407 bp, Zea mays
cggtcgtttgggttcaaggattctttcaaacgcatttttgagggaggtgaacagtctttaggcctttcattcaatggtacaattgaaataaactgttcaaaagatattaaagtccaaggtattattggaccatgcacatctttggagaagaaaggagccatgtgctctgacacagttgtcggtcaaggaaatacatcagcatggaaaatgtgtggtctcgatagaaatacttctcttacagtattttttgatgtctcaccgagtgaacgatcgagccagccaggaaaccaaaatccccatttgtatatacaatttgtgacaagttaccaacacccagaaggtcaaatgaggataagagttactacgatatgcaggaaatgggtagatggttccactaataccgaggaattagttgaaggttttgaccaggaaactgcagctgttgtgttggcaagatacatctctttgaaaatggagatggaggaagagttcgatgcaacccggtggcttgatagatctctcatacgtctttgttcaagatttggggattaccggaaggatgatccctcttcatttagcctgcattcaaatttctcattgttccctcagtttatgtttaatcttcggcgttcacaatttgttcaggttttcaataacagtccagatgagacagcttatttcaggatgttactcaatcgtgagagtatcactaactcggttgccatgatccagccttccttgatatcattttcttttgattcacctccatctccggtatttctagatgtggcatcaatagcagcagatcgtatactgctacttgatgcgtactttagtgttgtcatttttcatggaatgacaattgctcagtggagaaacatgggttatcagaaccaacctgagcatgagcaatttgcacaactattacaagcaccacacgaggatgcgcagatgataataaagggtcgatttccagttccaagactagttgtctgcgaccaacatggctcgcaggcaaggtttttgttggctaagctgaatccatcggccacatataactcagctcatgatgttgctcctggttctgacatcattttcaccgatgatgttagcttccaggtcttctgtgagcacctacaaaggctggctgttcagtcttgaggacctacctgtatgcaaaggttgtacaccctatttgatagttgctcataatgcactgggttcttaggttggagttgtgagaatttcccttttctgtttctctttggccatagttttctgagatcagacaattttttcgggaaactgccctaaaggaatgtgtaagttgcctacagaggtctattatctacatatatagtatatatacttatttatgttgtcaaaaaaaaaaaggatattaccaaa

SEQ ID NO: 265642 - DNA, 548 bp, Zea mays
cccgggcgggcatcagggccggcggctcaagtcgcacgtcgtcgtgctaggcttggaggcaaagttgcttcaggtgtactcctaccgatcagatggctggcacgtcccgccgcgtgtgacgaggatgaagagtggaacagtctcgtcgtccagctgccagctcgcggcagctccgagtggctgtgttgtgttcatcgagaacaagaggccatggcccatgggcgtacgcgtgccgttccagcgtccatttcggttcagtgtacaaaattcgacaagtacagagtccaacaacttccccggtaccgaacaataaagcattcgataaaaagcctcttccagcgtcaccggcggcttggattaggatccaggatcagaagatttctgtaccggcttaattgttaatgtatttttggtgtgtgcaacatctccccccagatggtgttaacacttgtagtgtgtaatgcttgtagtggggtctcgcaaggtttttgtccgcccaaaaaaaaaaaacaaaaaaaaaaaaaaaaaaaaaaaaaaaaaaaaaagga

SEQ ID NO: 265643 - DNA, 706 bp, Zea mays
  unsure (1)..(706): unsure at all n locations
acccacgcgnccgctactatctaagctagcatggccatgatgtttcttgcgcgcaacctgtgctctcgtctgcggccaccgctcgccgccgtcgtggcgttctcgacggtccccgcggcgtcggcggtcgcagcggaggcggagaggtcgatactggacgggccgcggaacgactggagccggcccgagatccaggccgtctacggctccccgctcctcgacctcctctttcacggggctcaggtccacagaaatgtccataaattcagagaagtgcagcaatgcacacttctttcaatcaagactggtggatgcagtgaagattgttcttactgtcctcagtcatcaagatacaacactggattgaaggcccaaaaattgatgaacaaatatgctgtcttggaagcagcaaaaaaggcaaaagagtctgggagcacccgtttttgcatgggagctgcatggagagaaaccattggcaggaaatcaaacttcaaccagattcttgaatatgtcaaggaaataaggggtatgggcatggaagtctgttgcacactaggcatgatagagaaacaacaagctgaagaactcgagaaggctggacttacagcatataatcataacctagatacatcaagagagtattaccccaacattattaccacacgatcatatgatgattggctgcagactctttagcatgtgcgtg

SEQ ID NO: 265644 - DNA, 1290 bp, Zea mays
atgttaattatcaaattgagagagggagaagggggtgggggttacgtaacacggcgattcaggaggggatagcatcgtcatcgcaaaatgcaggctctcctgctccccgcgcgggccgcgccgccgacgccggcgatgcttcggcagcgtgcggtttctgcctccgcgtgtgcgtcgcaggtctgccgccccctattcggtgccgccagttgcatctcctgtggggtccacggaagcgttcggcggcacctcacagtggcggtggcggcggccccgccctcgccttcgtcctcaccttcgtcgggaccgctctacccgacgcctccacccaccgagcaggaggtggagagggtcaagctcgagcaggttatgaggagactagagaaaacagcaaggtatttcaagaatttgggtaccctggggttctggtcccaattggtgtgcacaattatttctgctggaattttggcattctctacagttgtaacggggaaggtgacatcaccctttacattctatgcgactgctgctggtattgctgctgcttttatttcagtcttctggtcatttggttacatccgtctctctgaaaggcttagaaaaacatccaaagaacctgctaaggctcctccacgtgctgatgttgttaagagccttaaaaatggcatcgtggttaatattcttgggatgggcgctgctgttctcggcatgcaagctactgttggtgctttggtagcaaaagctctcacaacctctgcagtaccctattatcaggctgctggccaaagccctgtcttggctttagatgttttcctagttcaggcttcagcgaacaccatcctgtcgcatttccttggggtggcgagctccctggagctgctgcgctcggtgtcactgcctccagcagaagccgccgtcccggccccggcccctgcacgggcctgagccatggcccgttgggcaggtcaagaaaaaccttcaatccttggctttggctctagacagttgctatttcttgattgcatgtacaacttgcatcaagaatacatacacatcgatgccttccagttcacctggacgcaacatgttcgcgtaattcccgccgagtgtgagctcttgcatgagcactcgcgaaccacatgtggcgcttgtttgctgtgcaagtgcaagtgagtgcagtgaccggctctcgctcgttcttaatcattggacccgtttaaaaaaaaaaaaaaaaaaaaaaaaaaaaaaaaaaaaaaaaaaaaaaaaaaaaaaaaaaaaaagggcggccgc

SEQ ID NO: 265645 - DNA, 1117 bp, Zea mays
cggacgcgtgggcattaccacattggtttctccgatcagagttcaactcggttctttgccgagtcagataagaaccccaacagtttttaattgcgcgccaatctgttttatatatacggagagagcactcctgtttttactagctgcaaaagggcgtgtttgagactagcggaccgaccggcctgcgcggcgatggatgtcaagtgccggcgtctggaggggaaggtggccatcgtgacggcgtccacgatggggatcggcctcgccatcgccgagcgcctcggtctggagggcgccgccgtcgtcatctcctcccgcaagcagaagaacgtgaacgaggcggtggaggggctcagggccaagggtatcaccgcggttggtgccgtctgccacgtctccgacgcacagcagcgcaagagcctcatcgagacggccgtcaagagctttgggcacatagatattcttgtctccaatgctgccgcaaatccttctgtagatagcatacttgaaatgaaagagtctgttctcgataagttgtgggatattaacgtcaaggcttctatccttcttattcaggatgctgctcctcacctacggaaggggtcatctgtgattattatttcttcaattgctggttacaatccagaacaaggattgacaatgtatggtgtcacaaagactgctctctttggtctcacgaaggctcttgctggtgagatgggacccgatactcgtgttaactgtatagcccctggttttgttcctacacggtttgctagtttcctcacagaaaatgagaccattaggaaagagcttaacgagaggaccaagcttaagagattgggtactgtggaagacatggctgcggctgcggctttcctggcgtctgacgacgcatcatacattacggctgaaaccattgttgttgctgaaggggtccagtctaggctgtaaatctggctaaagtttatatttacttggttactaatgtgtactagtgctctaaagcatcaggcgtggctaataatgtgtactagtgccgctagagcatcaggctaccttctatatatgacaggcaactctaaaagattttctatatcttattcctcttcaataa

SEQ ID NO: 265646 - DNA, 421 bp, Zea mays
tcttccgtgcaaaagggcgtgtttgagactagcggaccgaccttgaagttgaagttgaaaaggccggcctgcgcggcgatggatgtcaagtgccggcgtctggaggggaaggtggccatcgtgacggcgtccacgatggggatcggcctcgccatcgccgagcgcctcggtctggagggcgccgccgtcgtcatctcctcccgcaagcagaagaacgtgaacgaggcggtggaggggctcagggccaagggtatcaccgcggttggtgccgtctgccacgtctccgacgcacagcagcgcaagagcctcatcgagacggccgtcaagagctttgggcacatagatattcttgtctccaatgctgccgcaaatccttctgtagatagcatactttgaatgaaagagtctgttctcgataagc

SEQ ID NO: 265647 - DNA, 869 bp, Zea mays
cgccgcctggccgccggggcaccccttcgggggttccttggcgcgccaatccgggccgtggcggcgtcggcgtcggcggcccccgcggcggcggccaagaccatcgcggtcggggaccggctccctgacgcgacgctctcctacttcgacacgtcctcccccgacggcgagctgaagacggtgacggtccgcgacctcaccgcggggaagaaggtggtgctcttcgccgtgcccggcgcgttcacgcccacctgcacccagaagcacctcccggggttcgtggccaaggccggggagctccgcgccaagggcgtcgacaccgtggcctgcgtctccgtcaacgacgccttcgtgatgcgcgcgtggaaggagagtctggggatcggggacgaggtgctgctcctgtcggacggcaacggcgagctggcgcgcgccatgggcgtcgagctcgacctctccgacaagcccgtggggctcggcgtccggtcccgccgctacgcgctgctcgcggaggacggcgtggtcaaggtgatcaacctcgaggagggcggcgcgttcaccaacagcagcgccgaggacatgctcaacgcgctctgaactcgcgacgccatggttggttcgtctcttccggcaagagttggtttcttttccctgaaaataatcgtgacggcaacggtggcttgtgttactgccgccactgttgtgaccggcgctgttactagtgcactgcagagatgcaagtttcttgcgaacatggctttataggtctagcttcatgcaattgttgacgccctctgtttcatgacttgcaaaacgaaaaaaaaaaaaaaaataaaaaaaacaaaaaaaaaaaaaaaaaaaagggcggc

SEQ ID NO: 265648 - DNA, 322 bp, Zea mays
tcaacgcgctctgaactcgcgacgccatggttggttcgtctcttccggcaagagttggtttcttttccctgaaaataatcgtgacggcaacggtggcttgtgttactgccgccactgttgtgaccggcgctgttactagtgcactgcagagatgcaagtttcttgcgaacatggctttataggtctagcttcatgcaattgttgacgccctctgtctcatgacttgtcatggtatgcaactcttgtctgagaattgatcatctgcatagtaccactactatcaaaaaaaaaaaaaaaagggcggccgctcgcgatctagaac

SEQ ID NO: 265649 - DNA, 929 bp, Zea mays
gccggacaagccttccgttgcgttggacggcggcgcggtgctcatcactaagaatctcgacgctatcacggccgcgatccagcgtgccttcgccgctgtcgacaccaagctctccacctggctcgagcaaacggacaaggacgactctggtgctacggccactgtcatgtttctcaggagcgatgtgcttgttgtctcgcacattggggactcttgcttggtgatatcacgtggtggaagatctgaagctttgactggctctcatcgaccgtatgggaacaacaaaacgtcccttgaagaggtcaagaggatcagagcagcaggtggatggattgttgatgggcgcatatgtggagacatatctgtatctcgtgcttttggggacataagatttaagacacaaaagaatgaaatgctggtgaaaggagttaaacaaggaaggtggactgataagttcatctcacgaatacaatttaaggatgatatagtaatctcgtcacctgatgtatctctggtagagcttggaccagacgtggaatttgttctgttggcaactgatggtctttgggattacataaaaagctctgaagctgtagcttttgtcagagaacaactccgtcagcatggtgatgtccagttggcctgcgaggcacttggtcagaaagctctggatcaacggtcccaagacaatattagcatagtcatagctgacttggggaggacaaactggaaggcgttgcccgatgaaagaccgaacttgttcttggaactaagtcaagcagtcgcgactgtaggggttgtctcaataggaatttgggtttcgtcgttccttgggttacagtagaactagctactccgtccggatgtgtatattacctactgagtttacatctttctgctagcagtagcagctgcaaaatgtatgtata

SEQ ID NO: 265650 - DNA, 1361 bp, Zea mays
agcgcctgggcaggtgcagccagcgacgtcgccgaaggcgctgttggaggttgccgtagaggtgcccgatctggagttgaagagatcttctaatgctgggagtagtgtatctgcagaacaactgcagtttgtccctatcattcgatctggtagctttgctgatattggacctaggcggttcatggaagatgagcatattagaattgatgatctttctggtcatcttggctcactgttgatggtctctgcgcctagcgcgttctacggggtgtttgacggtcatgggggttcagatgcagcagcctacatgaaaacacatgcaatgaggttgttctttgaagatgctgacttccctcaagcatcacaagaggataaaatatttgctgaatctgttgaggattcggtccgcagagctttcttgcgggctgaccttgcacttgctgatgattcagtcatcaaccgttcttctggcaccacagcgctgacagcattggtccttgggaggcaactgttggtagcaaacgctggggactgccgcgccgtcctgtgtaggaaagggacagcggtggaggtgtcaaaggatcacaggccgacatacgacgcagagcgtcaaagggttatcgagtgcggtggatacatcgaagatgggtacctcaacggcgtactctctgtgacccgggctttaggggactgggacatgaagctgccccaaggctctccgtcgccccttatcgcagagccagagatccactggaccaccctgacggaagacgacgagttcctcatcatcggctgcgatgggatatgggatgtgatgagcagccagcacgcggtgagcacggtccgcaaaggcctccggaggcacgatgaccccgggcggagtgcccaggagctcgccaatggaggcgaagaggctcgagaccttcgacaacctcaccgtgatcgttgtctgctttgtccccgacctcgccgggggctcggctacgccctcggagcaggtgccggctggaaggatcaggtgccgcaagagcttgtcgccagaggcactctgcaagctgaggagatggctcgagtctgaccagtagacgcttctatctgtagaggccagcgccagcctgtgtttctgtgctgtggctgtgtaaatattggcgctgatggtgttccgtctagtacggctgtgcttacacggccagcaattttgtagctgagagagagttccccccaccgccgctgccgcttttgtttcacaccgttttgtacttttgtgggatgtacataccattaccattgttgctcggtctcggctcagtttggcagacaccccaactactctagttcgctaccaccgttgccttgcctga

SEQ ID NO: 265651 - DNA, 694 bp, Zea mays
ggcgggcgcggcggccctctcgccgcggcggcctcgacctccccacctgtctactccggtggcgtccagggctcgtcggactacctgaggtaaccccagatgcttctgcaagcgtccacgggcagccagggcaccctgctcccgttctatggcggcggcatgagcaatccctacggcggccgcgccgccatgaccggttcctacggtggagccggcggcggcaacacgagtggttccttgggctcctactactcgttcccggcctactctgtttctgtcgccaccgtgccgtcctctacttcctctgcttcggggtactactactcgtcgccgcacgactcgcaacacagcgaggcgtccgcggcggcggactggaactgggagagcgcgctggcctggcccgactcgagccagtacccgccgccacctcacactcagtagcagcagccagtagcggtcttcttcttttctctgtaacaataagtaaggtgagtacggttgcgcggagggagacgcgcggcaacgcaaagcaaaacaaagcagatcaacaagaggaggatgctttcatttctttcgtgttatgatgatgacacccgagtggtctttgtttgttgatttttagttttggtcgacgatgtggctggcggctatccccattgtttccatttaatcttggctgcgaatttaagagatg

SEQ ID NO: 265652 - DNA, 1008 bp, Zea mays
cccacgcgtccgggggcactgggctctgggctctggcctagcctccactgtctcccagtccccaggtcctcatcggcctccggtcttctggtctccccagatctcccaccggggaaccctacccgagcatcagccatggcgatcgcggcgcgcgtcctgcgccgcctcccgctccacctctacccctcgctcgctcgctctttctgcgcagtttccccggccgccgcctcggccgccccggcgtccgcctcggccgccccggcgtccgccaaggtcgccgatcgcatcgtgcgcgtcctcgccatcgatctcgagggggcgcgccgcgaggtcgtcggcctctccgggcagacactcctccgcgcgctcgccaacgcggagctcatcgagccggcctcccaccgcctcgaggatatcgacgcgtgctccgccgagtgcgaggtccacatcgcgcaggagtggctcgacaagctgccgccaccgtcctacgaggagcggtacgtgctcacgcgcgcgtccaggaaccgcgagctcaacaagcacgcgcgcctgggctgccaggtcgtcctcacgccggagctgcatggcatggtcgtcgctgtccccgagcctaagccgtgggacatcccgtaatggcctgccgcgacgaatggcaaggtgcggctttcgacgctgtgagccttccttcattcccctggctcggtcaagcttgtgcgcctctgccatacccttttatgttacggatttgatgaagaataatagtttgatgggaaaaacctgccattggttaacttttgttcttttgaatgtggagtgtaatggatgctgtaatgtggaatcccgttgcaattaccgcagttcaatgtttcatggttttaagttttgtactctgatgaatagttgattggtcttttcctttccatcttcagaagaaaatgcagaacaatagtagaattcgcagactggtctaatgtaagcatgtgcctaaacgattttctatgttctctc

SEQ ID NO: 265653 - DNA, 779 bp, Zea mays
catcggcctcctctctctcggtctcgccagatctccccacggaaccctacccgagcatcagccatggcaatcgcggcgcgcgccctgcgccgcctcccgcttcacctctccccctcgatctcccgctccttctgcgcggtttccccggccgccgcctcggctacctcggcccccgccgccgcgtccgccaaggtcgctgaccgcatcgtgcgcgtcctcgccatcgatcccgacggggcgcgccgcgatgtggtcggcctctcggggcagacactccttcgcgctctggccaacgcggggctcatcgagccggcctcccaccgcctcgaggatatcgacgcgtgctccgccgagtgcgaggtccacatcgcgcaggagtggcttgacaagctgccaccaccgtcctacgaggagcgatacgtgctcacgcgcgcgtccaggaaccgcgagctcaacaagcacgcgcgcctgggctgccaggtcgtcctcgcgccggagctgcaggggatggtcgtcgccatccccgagcctaagccgtgggacatcccataatggcctgccgacgaaaggtaaggtgcggcttttgacgctgtgagccttccttaattcccttggctcggtcaagctgtgcgcctgtgccatccccttttatatgttacggatttagtgaagaataataatttgatgagcagaacttggcattggttaacttttgttcctagtatatggatgctctaatgtggaatccttttgcaactaccgcaggttaatgtttcatg

SEQ ID NO: 265654 - DNA, 615 bp, Zea mays
tatcggcctccggtcttctggtctccccagatctcccaccggggaaccctacccgagcatcagccatggcgatcgcggcgcgcgtcctgcgccgcctcccgctccacctctacccctcgctcgctcgctctttctgcgcagtttccccggccgccgcctcggccgccccggcgtccgccaaggtcgccgatcgcatcgtgcgcgttctcgccatcgatctcgagggggggcgccgcgaggtcgtcggcctctccgggcagacactcctccgcgcgctcgccaacgcggagctcatcgagccggcctcccaccgcctcgaggatatcgacgcgtgctccgccgagtgcgaggtccacatcgcgcaagagtggctcgacaagctgccgccaccgtcctacgaggagcggtacgtgctcacgcgcgcgtccaggaaccgcgagctcaacaagcacgcgcgcctgggctgcagtcgtcctcgcgccgggctcagggatgtcgtcgcatgcgacctagcgtaggctccatatgctgcgcgaagtagtgcgcttgagcttactcctatccttgtgtcattcctgtcaccttaagtagatagtaaatatgtacaactgctgt

SEQ ID NO: 265655 - DNA, 899 bp, Zea mays
  unsure (1)..(899): unsure at all n locations
cccacgcgtccgctcaaatactcctcaatagccatcgaggagaagggagatagaaacgggagggaacacccactcgatcgtcagccatgacccggggagagaaccaggagtcgcaaaccggtaacgtccccgccgcatccgcggcgcgccggggccgaagccggcgtcggcggggggcgggaaacgcgcggagggccagtcggtggtgcggcggctgcagtcggagctgatggcgctgatgatgggcggcgacccgggcgtgtcggcgtttcccgagggggacaacatgctccactgggtgggcaccatcgccggctccgccgggacggcctacgagggcacctcctaccgcctcgcgttggccttcaccgccgagtacccgtacaagccgcccaaggtgcggttcgacaccccctgcttccaccccaacgtcgacgtgcacggcaacatctgcctggacatcctccaggacaagtggtcctccgcctacgacgtgcgcaccatcctcctctccatccagagcctgctcggagagccgaacaacgactcgccgctcaacacgcaggcggcggcgctttgggcgaaccaggaagagttcaggaagatggtggagaagctctacaaggccgccgcgtagaggacagcacacggcgcagatgccgcctcaggttcttcaagcaccgatctcacttggatcgattgacgtggatggttttgtttggttgggttcccagtctggtactgtagcggtgtatcatgagcgcgtgggtagccttgagcctggcgattctgtaattgtcctcttctgaaatgttgagagattcatttttaaaaaaaaaaaanaaaaaaaatatttttaatttaaattaatttatttatatataaatttatttattata

SEQ ID NO: 265656 - DNA, 409 bp, Zea mays
ccagagcctgcttggagagccgaacaacgactcgccgctcaacactcaggcggcagcgctctagggcgaaccaggaagagtttaggaagatggtggagaaaatctacaagcccgccgcgtagaggaggatgacagcgcctggtgaagatgtgggttcttcaagcactcatttcgcttggattgatcgacaagagataatatttggattgtttgggttcccagtctggtgctgtagcaggaaggaatatttgggtcgcctagagcgtggcgattctgtaattttgttctttgagttctgaaatgttcagatattcatttttccatgaatcgttttcgtcccttcgcctcttcctaactgcaatattggtatgaaattatgaatatggactggacaagactgattgaattc

SEQ ID NO: 265657 - DNA, 1714 bp, Zea mays
ccctcgcgtccggtttcttaacaaggatactaagtcaaaacaatctcaatggctctattcctgacacactagcaagcattttaagcttgacagacattcggctggcttacaataaactcactggtcaaataccttcccagctgtttcaagttgcacgttataatttttcaggtaataacttgacctgtggagcaaacttcctccatccatgtgcctcaaatatgtcttaccaaggttcttcccgtggttcgacaataggcattgcgcttgggacagttggaggtcttatggggcttctaatcatatgggctgtattcattatctgcaatggaaggaggaaaagccatctacgtgaaatatttgtggatgtatcaggtgaggatgatcgtagaattgcatttggccagttgaaaagatttgcatggcgagaattgcaacttgcaactgataatttcagtgagaaaaatgttcttggacaagggggttttgggaaagtatataaaggagcacttccagatggcactaagattgctgtaaaacggttaactgattacgaaagtccaggtggagaggctgctttcttgcgtgaggttgagctaattagtgttgcagttcaccggaatcttttaagattgattggtttctgtacaacacaaacagagcgcctacttgtttatcctttcatgcaaaatcttagtgtggcctaccgtctacgagaatttaaacctggggagccaatattagactggtctgcaaggaagcgagtggctataggcacagctcgtggactggagtatttgcacgagcactgcaatcctaagattatacatcgtgacgtcaaggctgccaatgtcttgcttgatgaaggttttgaaccggtggttggggatttcgcgcctggccaagctggtggacgtgcagaagacgtccgtgactacccaggtccgtggaaccatgggtcacatcgcccccgaatacctgtccactgggaagtcctccgagagaaccgatgtttttggctatggcataatgcttcttgagctagtcactggtcagcgtgccatcgacttttcacgtctggaggaagaagatgacgtgttgttacttgaccatgtcaagaagctgcagagggaagggcatctcgacgccatcgtcgaccgcaacttgaacagctgttacaacgggcaggaggtggagatgatgatccagatcgcgctgctctgcacgcaggcgtcgcccgaggaccgcccgtccatgtccgaggtggtccggatgctggagggcgagggcctcgccgagaggtgggaggagtggcagcaggtggaggtgacgaggaggcaggactacgagcggatgcagcagcgcttcgactggggcgaggactccatctacaaccaggacgcgatcgaactgtccgccggcaggtgacgacgtcgggtcgtcacacggagcttgtcgtcgtcgacgtcgcagtgccgacatgtaactgtatatgtaaggcattgttgcgaagcttgttagcaaaatataatctgtgacactcacttagtgttgatacgtgcctgtattttattatttgtgtgtataaggaaggatgatttaaacgggttcaggtgtttaccggttgtccggctcccatcctgtaaagctctatataggggggtggggaccggttgaaaccacatcacatgcaagctgcaagaattggcttgac

SEQ ID NO: 265658 - DNA, 1009 bp, Zea mays
ataaaaataaataaaaagtgagagagggaggaaggcgcacacttcctccttccttctttccctcttcgtcttcgcttggccggtgggtggtgcggtggggatgcggcggctatggcggtggtaccagcagtgcctggccgcgcacccggtgcgcacgcaggtcgtcagctccggcatcctctggggcctcggcgacatcggcgcccagaccgtcacctactactccgctagccccgaccgtcgcggccacgacagcagccctcccgaccccgaggataaagataataaagacaataaagagtttaaagttgattggaagagggtgggcatcacaagctccttcggatttgcttttgttggtccagttgggcattactggtatgaatacctggatcgcatcatccggcggaggtttcagcctaacacgttcaaattcgtcgcctcaaaagttgccgcggatggattcctcttcggaccactagacctcctcctgttcttctcatatgttggtctgggtcaaggaaggagcatagagcaggtgaaggaggacgtgaagagggacttcattccggctctggtgttaggcggaaccatctggcctgctgtgcagatcgcgaacttccgcttcgttcccgtgcggtaccagctcctgtatgtgaacttgttctgcctcctggacagctgcttcctgtcgtggattgagcagcagggtgacgcctcctggaagcggtggttcacttcgttccagaaaatcgaagaccagaagggtaaggtttgatttgagtcatgcatggttcgttgtctggatcagtacctgtaaactccggttgatcaaggaagataattgcgatgccagcaaggctgaacattggcgtcgctatagagaattctttttagtctttgacgggatgaaacggttgccgagttgctctgttaactgaagtgcctgtgttttgccgatgtgttaaacttaaaaaaaaaaaaaaaaaaaaaaaaaaagggcggccgc

SEQ ID NO: 265659 - DNA, 601 bp, Zea mays
ccggtgagatccccgtcgtcggcggcaccgggacgttccggatggccacgggctacgtgctgtggaagacgccggaagggatcaacggcaccgacgccaccgtccagctggatgtctacgtcaccacggacggcaacggcaccacggacgccggcgacgccgacggcggaggcggatccccgtccgcagggtcagggtcgtcggggtcgtcgggaggctccaagtccacctccggtgccgagagtaggaggaggaggatgaccggcgggtgggtcgtcgccgtagtggttgcggtggttggatccttctgggtttggtgagcaacgacctgttgacgaaggatgggggtgggtgggtggtgtgtgagtggggtggtggtcccacatgctggtgggtgagagtgggtgcatgtgctctgctgcggcatgtcggttgccggcatcattcctatctatctgtattggacttgttctagagcttttgcttttcgcaaaaaaaaagacatgcgggtcattatgttaaagtcagaagagttttctttacaacgacgatctttatgaactgttaaagatatgagacagatatcgagcatcttcgttgg

SEQ ID NO: 265660 - DNA, 820 bp, Zea mays
taccggcttggacgacccacgcggacgcactcgacgctccagctgaccgtgtgctcgcacctttttctcttccccaaccgtgcccgaggcctcgcgctcccgccccctccggggaccgctgcggcgcttgacgcgacgcaggaggaggaggaggaccaggagtgggaggctgcgctgcagaagtggaagaccaagacctacgcgctctcggtgcccctccgggtcgtcgcgctccgcggctccttccctccatcttggattaaggatttcgtcgaagctcaggggaagagactcaaattcagtcctgagctccgtgctaatcttgatgggatcttctctgagatgtcacaatgtatggacaagggtcaagttcagccgaagtctgcaatggcagctgatgttgtttcccttggggactcttggctcggctatgccatccgtaagggattgctagagcctatcaagaatgctgaagaacaggattggttccgtagcctgagtgacagatggaaggtccatttgtgcaggaaccagaacggagaagcagatcctaatggtacaatatggggagttccatacagatggggcaccatggtcattgcttacaagaaagacaagttcaaaagacataatttgaagccaatacaggattgggaggatttgtggaggcccgagcttgccgggaggatttcaatggtccatttccatatcaactgtgttgtatgatgagcccagatgcttcagaacagcaccaatcacctctctaggagacatcaccaggtcccggacgcgtgttctatccggaattcggaccgtactg

SEQ ID NO: 265661 - DNA, 355 bp, Zea mays
tcagcccataggctgctccctgacttgggaacaaccaccgcgacattgaacattcgctttgcagcaggaatcacgtcgctgctccaaccccactgcgacccatacatctccaacactaaccgacttcagatagttcatgctgtcgactagttggacctgcttctgtagttgcgtaaagctgtctaggactgctgctctaccaccattgacgtccatctccatatcaactgtgttatatgatgagcccagatgcttcagaacagcaccaatcacctctctaggagaatcgaccattgaaatcctcccgcggacgcgtgggcggacgcgtgggcggacgcgtgggcggacgcgtggg

SEQ ID NO: 265662 - DNA, 1252 bp, Zea mays
  unsure (1)..(1252): unsure at all n locations
attagccctgacacgacacggccgcgctcaccagtcacacacgacacgacacgcgacagtccccaccccaccaaccgcctttcgccgtcctcgctcgcgcagctgtcctgcaccagcactgcacccggctacatggcggccgcctccaccctcgcgttcgggcacccaaaaaccctagccgccgccggcgccaagcccctgcccgccgccacctccacgtccgtctccttcccggccacccaccagcccgcgtgcctgctctcctcgcccgcgcccgggtctctgcgccgccgggacgtcgccgccatggtctccgcgccgccggccgtcggcaccgccatgccgtcgctcgacttcgacacctccgtcttcaacaaggagaaggtctccctcgccggccacgacgagtacatcgtgcgcggcgggaggaacctgttcccgctgcttccggaggcgttcaagggggtcaagcagatcggagttattggatggggctcgcagggtcctgcccaagcccagaacctgagagattcactggctgaagccaagtcagatattgttgtgaagattggtctccggaaaggatccaaatcttttgaggaagcacgtgccgctggattcaccgaagagagcggaaccttgggcgatatttgggaaaccgtctccggcagcgatcttgtgttgctgctgatatccgatgctgcacaggctgacaactatgagaagatcttctctcacatgaaaccaaacagtatccttggtttatctcatggatttcttctgggacatttgcaatcactcggactcgatttcccaaagaacatcagtgtgattgctgtatgccccaagggaatgggtccatccgtccgcaggctttatgttcagggcaaggaagtcaatggcgctggcatcaactctagctttgctgtgcaccaggatgttgatggaagggcaactgatgttgctttagcatggtcagttgcacttggttcccccttcacgtttgctactactttggaacaggagtacaagagtgatatctttggagagcgaggcatcttgctgggtgctgtccatggtatcgtggaggctctgtttaggaggtacacagaacaaggaatggatgaagagtcggcctacaaaaacactgtcgagggcatacctgggtcacactgatgttctttgggaaatcgagtccgagtgattgcaaatgtcccagcagaaatccacccacgcgtccgcccncgaggcg

SEQ ID NO: 265663 - DNA, 1179 bp, Zea mays
cggctgatgttgctttagcatggtcagttgcacttggttcccccttcacgtttgctactactttggaacaggagtacaagagtgatatctttggagagcgaggcatcttgctgggtgctgtccatggtatcgtggaggctctgtttaggaggtacacagaacaaggaatggatgaagagtcggcctacaaaaacactgtcgagggcataactgggatcatctcgaaaaccatctcaaagaaagggatgcttgaagtgtacaactctttgagcgaggaaggcaaaaaggagttcaacaaggcttatagcgcatcgttttacccatgcatggatatactctacgaatgctatgaagatgtggcctctggaagtgaaatccggagcgtggtgttggctgggcggaggttttatgagaaagagggcctcccagcttttccgatgggcaacatcgaccaaactcgcatgtggaaggttggtgaaaaggtgcgctcaacccgtccggaaggtgatcttggcccgctccatgccttcactgctggagtgtacattgccctgatgatggctcagattgagatcctgaggaagaaggggcactcctactctgagatcatcaacgagagcgtgattgagtcggtggactcgctgaacccgttcatgcacgcccgtggggtcgccttcatggtggacaactgctccacaacggctcgcctgggatccaggaagtgggcgcctcgcttcgactacatcctgacgcagcaggcctttgtggcggtggacaaggacgccccgatcaaccaggacctcatcagcaacttcttgtcggaccctgtccatggtgccattgaggtctgcgccgagctgaggcccaccgtcgacatctctgtgcctgccaacgccgactttgtgcgcccggagctccggcagtcttcctagattgaggcagtgagcggagagggagagggagagagaaagagaggatttcgtgtcccgagttagaacagagtgctgtatgttttgtgcgactgtttgtaagtcaagtctgaactgtgaacctatgtttgcttctatcagaggacccggagaaagcctgggcatctgtttccggaataaaatgggtccttcggaataaaaaaaaaaaaaaaaagccaccgctcaaagaccccccgatctctcttcgcat

SEQ ID NO: 265664 - DNA, 564 bp, Zea mays
agaagagcctgaacgccttcttcgagctggccacggcctgctgcagcccgtcgccgtccctgagacccagcacgaggcaggtactcaagaggctcgaggagatcgcgagataaatggacgcgagtgctgagcaggcctggcgacttgctgcttaatctgcatcgctctctattgcagcatgccgttgagctgagaagcgtctaccattccctaagctgtacgaacaaacgtatttttgtggtgggccagtaggaaatggatgcatgtttttcacgtccagtaacctgtactgtacagtttcaccgagatgcagggttgttcatcagaaaacatacagggtgtgctttcggtgcaagaggaatctccatgtggcggaatgttctctccagcgcgtatgtaacatggtatttgtcgtcgacgtcgtgatactcgcatgctcgcggtgccacaccatcaagtctggggttggtgatttgtccttatcgcttgacacttgccaatgtaatacaacggactgacgatcccccttagctttcgacttgtttcgatagcctggcgcggtgg

SEQ ID NO: 265665 - DNA, 772 bp, Zea mays
aagaacttctggaggacgcgcgccaggaagcagaaggcggcggcgcacagcagcagcagcagcaggacagccggagcagcaagacggcgacggcgtcggcgttctcagggtcagcgtcgtccgtgactaccaccacgtccagctgctctggctctcctagtccgaccagccgcggctgtggcacggccacgtcatcgtccgctctgaccgagtccgcgctgcggcaaagcggcggcgaagacgaggacgccgagctcgacgaggcgtccaccaccaccaccaccacggcaagccagcgtcaacaccaagacgacgaccaccagcagcagcaccaggagtgctacgcctcggaccacttctggaacgacatcgcggcggcggaggcggccatctacatgttgatcgacggcggctggacagggtccggccccggccatcccgccgccgatccgccttcgtcgccggcgtgggagtactgctctgattactcgctctggaggatcgacgacgacgagtactacgagaagatgctcgactcctcctcctgattcgattatccagccatcacacgcatatgcatatctatcattagcttatttctttcttttttttgtgctgattagtctagcatacagcagctatgagaatccaaagcttcggttcggctttcgttgcatctctttgtataatactgtaacatatctatatatatatatgtatgatatgaaaaaaataaaaaaaaaaaaaaaaataaaaggaggacgctcgagat

SEQ ID NO: 265666 - DNA, 484 bp, Zea mays
ctctggaggatcgacgacgacgagtacttcgagaagatgctcgactcctcctcctgattcaattatccagccatcacacgcatatatgcatatctatcattagcttatttctttcttttttttgtgctgattagtctagcatacagcacctatgagaatccaaagcttcggttcggctttcgttgcatctctttgtataatcctgtaacatatctctatatatatatgtatgatatgatactgctctcgatcatatatattgtaccaatatgtgctaggatatatagacatgtagtataatcatcgtcgtcgatcgtgtgtttagtgaagaatcagatgatgaggcgagacacaacccaatcgattgtagtgtgtcctgctgcatctatgtatttattcatgtactaagtcctatatatatatataagtgatgatgagattgcgtatgattcagttcgacaaatacattcttcagtagtttctg

SEQ ID NO: 265667 - DNA, 1058 bp, Zea mays
  unsure (1)..(1058): unsure at all n locations
aaccaaccaaaaccacgggaaggagacgagacggggggaaaaacactgcgcaggcacaggcagggagagacgtaaagccgccgcttcgtgcgcgtcgacgtcacctcgccgccggggcccgtctcgccgcggggtcccttagagctcccttccgtcgccggactgggcggtcgccggacggatcgggaagcgacgacctgaggggactggctgggatggccgggaagaagcgcaaggcggaggcggcacgcctggaggagacggaccgggcgctctacggggccttccggggcgccgccaactcgctctcgcagctctacacgctcggcatgggcgcgcagaaggcctccttccacgccggcgaacgccacgccatggaaaaactttatgaatggatcctgaggcagcacgaaaatggtttgaggctaacagttgctgatgtagcctcccatatccagcatgagattcagtatggaggtgacaatgcatcagcctctccaaggtcacaataccctagccaaagcactgcaccgacaatgcacattcccaacacaagcaaccagcaaccatcgccaagcttatttgctccaggaaaccctgggttgacacagtccaagaattccatggtcttttcaagcgcattatccagccccatccggcggagcctgcaaccttaccacctagagcaggacggggatgcagggtactttgcgaacggtgcaagccgcgacgtgaaccccacggcttcgaatgattcgtccatggacatgcactcggacagcccagctcatgactcctactgagcagctcccaccatggaaccagcctcaagaacagcacttcaagtggaagaagtctgctgtcacagccttcccaggcctagtagtaatattcaatttaacaccttccatagcctctcttacactaagcgtgtgatgtcttgtgttgttactactacttaccacttgttgctttgcgagaattatgtaatttgcatgtactatactatactgtaccatttgatttatctgtgcatattactgctgttggtacgtgnc

SEQ ID NO: 265668 - DNA, 420 bp, Zea mays
ttcgtcacgcgttcgtccacgcgtccgcgggggacagattcacttcgcaggcagcgagagtcgtaaagccgccgcttcgtgcgcgtcgacgtcacctcgccgccgggggccccgggctgtctcaccgcggtgtcccgtagggctcccttccctcgccggactgggcgggcgccggacggatcgggaggcgacgacctgaggggactggctgggatgaccgggaagaagcgcaaggcggaggcggcgcgcctggaggagaccgaccaggcgctctacggggccttccggggcgccgcaaactcgctctggcagttctacactctcgccatgggtgcgcagaaagcctcctttaacgccggcgaacgccacgccatggaaaaacttctatgaatggatccctgggcagcacgaaaatggttt

SEQ ID NO: 265669 - DNA, 291 bp, Zea mays
gggggaaaaacactgcgcaggcacaggcagggagagacgtaaagccgccgcttcgtgcgcgtcgacgtcacctcgccgccggggcccgtctagccgcggggtcccttagagctcccttccgtcgccggacggatcgggaagcgacgacctgaggggactggctgggatggccgggaagaagcgcaaggcggaggcggcacgctgggaggagacggaccgggcgctctacggggccttccggggcgccgccaactcgctctcgcagctctacacgctcggcatgggcgcgca

SEQ ID NO: 265670 - DNA, 1696 bp, Zea mays
gtaactgcctacccccgaggcaaggcagtaccccgtcgcccagcgtataagcgcggaaggagggcgcggaatatcgccttttctaacactaatggcaacggcggcggcggatgccccccctgtggaaccgcagtctctgaagaagctgagcctccggtcgctcaagcggtccctggacctcttcgccccggcgcacgccctcctcttcacgcccgacgccgagagcaagcggattcgtactgggtgcaaggtgagtgcggagtacggtgcggtgaaggacctcacgccggagcaggggcgcggcgggcagggcaagggtcctgcgccgccatcttcaacaagctttggcattgccaggaacacaagatacaaaagatgctcaccgagaaggctctaggaatgccattgtccctgcaccacttatgctgccaaaagcacctgaatctaccatacctggcaaaaatacaactctgtcaattcctggatcatctgacagattttctacatccgcactgatggaaaggatacctagtagatggccacggcctacatggcatgctccttggaagaactatcgggtcatcagtggtcacttgggatgggttcgatctattgcatttgatccagcgaatgaatggttctgcactggttctgccgataggacaataaagatatgggatcttgcatcaggaaccctgaagcttacactgactggtcatattgagcaaattcgtggacttgctgtcagccaacgtcacacttatttattttctgctggtgatgacaaacaagtaaaatgttgggatcttgaacaaaacaaggttattaggtcctaccatgggcatctgagtggtgtttactgcctagctctccatccaacaattgatatcttactgactggtggccgggattcagtttgcagggtgtgggacatcagaacaaaagcacatgtttctgctttaacagggcatgacaacactgtctgttcagtgtttgctcgtcctacggatcctcaagttgttactggttcacatgatacaactattaaattctgggatcttgtagctgggaggactatgtgtacccttactcaccataaaaagtctgtccgagctatggcgcttcatccaaaggagaaagcatttgcatcagcatcagcagacaacgtaaagaagtttaaccttcccaaaggcgaatttctgcacaacatgctgtcgcagcagaaaacaataatcaattcaatggctgtaaatgaggatggtgtcttggcaactggaggggataatggaagcctgtggttttgggactggaagagtggtcataactttcaacaagatcagactatagtccagcctggatcactggagagtgaggcatgcatatatgccctctcatatgacgtgagcggatcaaggcttgtgagctgtgaggcggataagactataaagatgtggaaagaggacttgacagcgacgccagagactcatcccatcaatttcaagcccccaaaggacatccgaagatattgatgctcaaatcccacaagtagcaagctagtggatggttggagcctccacaattgtgtgacccaaactcgcttcttccctgagcccaattgaaattttgctagggtttgctctattgtgtaatctgatgcatgtactcccccagtctgatgccttggtccaacgctttg

SEQ ID NO: 265671 - DNA, 1051 bp, Zea mays
  unsure (1)..(1051): unsure at all n locations
attacatgtttcgatccgggtcactgcgcggtaggcccggctggtgatgtggggctcggttcggttcttcgtcgcgttgctttcttcctttcctcnccttcccctcccacgtacgccggtcgccggcacgcgctcgtgacgcgcaagtcgcaggtcgcagcaaccgtaacgcgccgcgagcccgcatggcggcctgactcggcgccacgcgtttgctcctccggccaccatcctggctccttccttgtcgccgtttcctcggctatatagccgccagcctggcggaaggagaacggccaaaccagcacccgccgccgacagggaacatcgccggccgagatcggctgcacatctgtgctgcttcagggcgccggagttcgcgtcgtcgttcggtaacttgcggggtcaatgggaggagggaaagacaagcatgacgagagcgacaaggggctcttctcgaacatgatgcacggcgttgccggtggtcatgggtacccccaccagggataccctccgcagggctacccaccgcaaccaggagcatacccgcctcccccaggggcgtatcctcctcctccaggggcatatcctcctccacctggggcatacccaccacaatatgggtaccctcagccaggtggctacccacctcaaggtggatatcctcctgcaggctaccccggctcatctcaccagggttatgggagcagccacggcgggggccacgggggccacatggggacgggggcaatgctagctggaggtgccgccgccgccgctgctgcttacggagcacacaagctttctcatggccatagcggacacggtggacatgggccctttggaggccatggtcgtggtcgtggtggttatggccgtggtcgtggccaccacggcaagttcaagcatggcaagcatggacacggcatgttcggcggcaagttcaagaagtggaagtgatgtgttgatcgtagctagcggtggtaatggatcacgatttaaatgtttcttcacaatatgttagagaccgtaaataattttaattttaaaa

SEQ ID NO: 265672 - DNA, 636 bp, Zea mays
  unsure (1)..(636): unsure at all n locations
cccacgcgtccgcccacgcgtcggagcacacaagctttctcatggccatagcggacacggtggacatggggcctttggaggctatggtcacggtggttacggccacgggtatggtggccacggcaagttcaagcatggtcacggccaccacggcaagttcaagcacgggcacggcaagttcaagcatggcaagcacgggcacggcatgttcggcggcggcaagttcaagaagtggaagtgatgtgccctccatggttgatcgtagctgaactcaggcttccaggacatgtgttgccagtaataccttttcagcgttactcatccttcatctgtatttccagtaatccagcttgtggcgagtgacataatgctaataagtgacataaataaccatttgctgatatgctgtatatgttggtcttgtggatggagcgctctgaagattatatccattgccagtaataaatcgtggctttatctgaccnannaaaaaaaaaaaaaaaaaaaaannnnnaaaaaaaaaaaaaaaccccccnnaaaaaaaaaaaaaaaaaaaaaaaaaaaaaaaaaaaaangggggcggccgttttaaaggatccaagtttacgtacgcgtgcttgcaacgtaatagctttt

SEQ ID NO: 265673 - DNA, 468 bp, Zea mays
aggctatggtcacggtggttacggccacgggtatggtggccacggcaagttcaagcatggtcacggccaccacggcaagttcaaagcacgggcacggcaagttcaagcatggcaagcacgggcacggcatgttcggcggcggcaagttcaagaagtggaagtgatgtgccctccatggttgatcgtagctgaactcaggcttccaggacatgtgttgccagtaatactttttcagcaaatggttatttatgtcacttattagcattatgtcactcgccacaagctggattactggaaatacagtggaagtgatgtgccctccatggttgatcgtagctgtagtcaggcttccaggacatgtgttgccagtaataccttttcagcgttactcatccttcatctgtatttccagtaatccagcatgtggcgagtgacataatgcaaatggttatttatgtcacttattag

SEQ ID NO: 265674 - DNA, 855 bp, Zea mays
cccacgcgtccgatcacccaggtcatagctacatcggttatcttaggtttactgtggtggcactctgatcccagcacactaaaaggtctagaggatcaggctggcctgctgtttttcatcgctgtgttttggggcttctttccagtgtttactgcaatctttacattccctcaagagagggcaatgctgaacaaggagcgcgcagtcgacatgtacaagctcagtgcatacttcttggccaggacgacgagtgatctaccgcttgaccttttcctccccatcatattcatggtgatcgtgtacttcatggcaggcctcaaagcaactgccacacatttctttctcagcatgttgaccgtctttctcagcataattgctgctcagggactcggattggcaattggagctactctgttggacatcaagaaggcgacaactctagcttcagttacagtcatgacattcatgctagcaggaggcttctttgtaaagagcgttccaccattcatctcctggctgcgctacctgtccttcaactaccacacgtacaggctcctgctgaaggtgcagtacgaccccgtgccggacatcctgaccaccacgaggcacatggacagcggtggcaccgaggtggcagctctcgtcgccatggtcatcgggtaccgggtgctggcctacctgtccctgagaagggcgaaggccctgggcagctagcgcatcccttcaccgcagtgacttgagcctgagctcgtggagcgggttgggtcattgggtgtgtagggaaaagttgtgctatattgcgctgtgaaaagatggaagtctttttttcttttaactttttctgtctttttaact

SEQ ID NO: 265675 - DNA, 380 bp, Zea mays
ctcgtggctcccaagccttccatgcccaggaccatcttctccgccaggcgagccggtcggagttggaggtgcctcgtcgtcgctgccaccatcaagcaacaagtcggcacacggtcagaaagtgtggacgtcgatgcgccggtcgagcacctagcgccgccttcgaaggcgacgacgggagctcgcggcggcctgctcgccgccgtggcgacgacgacgagcagctgcacggcagtgttaccgtgtcacgccttatcaggcgccggagcggtggaatcgggaccgtggtggtggacgtcgccgctggacaccttgtaccgcgcggcggtggtgctgggcgacctgcacccggtgacggcgcgggcggtggtggccgtgcc

SEQ ID NO: 265676 - DNA, 1073 bp, Zea mays
acgaattgtagaagatgaatctatggctgatgcaaatattgcgcactctatggtcatggttgatgaaactgtggaggcaaaagtagtaccactcgggcgagagtacagagaatgatgctgctaccataggagtagttgaggagacagctgaaggtgaaactaaggaggaagcaccagacgagaaggggaaaatagaaaataatgaagatgctgacaaattggctggagagaccagggcaggtgaaattacagttgaggcaccagatgagaaaacagaacttaaagcagatgctgacccaccagctggtgagaccaaagaatgtgaaattacagtagaggcaccagatgagaaaatagcagacaaaggtattgttgaaccaataatcagggagataactgaagatcaaactgcagctggagaaccagatgaagaagctacaacaactgaggaaacggtagaggatgttaaggtgctagatgataagtctacagcagatgggaaacctgtagagaatgccacagtcgcgacaaatgaggattcaacaacagttgagaatactctgaaggatgcaatggttgcgccaccaggtacaaataccaccaacgccgaagaaactgctctgggtgccacagttgaagccctagatgaggatgctccagcagtggagaggcctatagaggatacctcggttgaggccccagatgttcaagcaggtgcaagtgagtaaaccagcttagcgatcctttgcattcctgtcagtttctgttgatatcgacgtagtttgctcaactgattctcttgtctaaatgatgtgttctgtatagaaaacctggaaccactttagcatcataaggctgttaggttttaaataacttgggcatctatatttttgccccttatttttcctatataaacttcatctagttgtattggatgcgcacgtgtgagtttgtcataaacacaattttctcctatatgtcagttcagtgctcatgcgatcagtgactgagtggaagtctttgtgcttcagaacagagctcattaagggctgtagtaacaacaacaacagcac

SEQ ID NO: 265677 - DNA, 469 bp, Zea mays
ttcggctcgaggtcccacaaggtttcacagcagccgaacttcttgcttaccagaggcagcttgccttaagccaggctgcagcagggcagattgctggccagcatggtctcgcgggtcaggtttctgcaggtcttcttgctgctgctggttctcaggccctctacgatggctacccgaaccagtcatcagcccagcagcttatgtactacaactagagttcaagaggacggcgttggccatcgtcgccctgttttttattttgtggttcatgtactatttgtgtgagagttcttgatctcttgtcgccgcggaattgtgttactatcttattactgtaccattgaccatttttcttgtgagattcatttgagtagtcactttaacagagtaagagatgtattctatgtgacttcgcgattgattaatgtaatgctcccctgtgcatcccctttggtcgctgggctggttc

SEQ ID NO: 265678 - DNA, 661 bp, Zea mays
gtacggccgaatccgggtaaccacgcgtccgggaccgggtggccccacggcccacctccacggtggtggccggcaccacgccgctgcccaacgagcgcgacgccgagatccggagcaagatgaaggcggacggcacgttccagcagaagcgggagcaggcgacgcagcaggggatccacgagtcctactaccgcgacatgaccgtcatgttcggcaagtgggagttcgaccccatggcgctgccggagccgccgtgccccgtgcacctctggcagggcgacgaggacggcctcgtccctgtcgtgctgcagaggtacctcgccggcaagatcggatggatcaactaccatgaactccctggcaccggccacttcctgtcgtcggtgcctgggctcggagacaacgtccttaggacccttttcagtgacaagcagtaaacaaacaatcctccctcacgacgtatcgaagctttcgagcatggtggtggtggtggcgcattagttcattttattattgtaaaggcccgtggttgtcgctgattagagatgataaaataatggtgatgtagatgcaagaccttaaagtgaaatactatatcagagatgtaatatacatacatagtgatgacctttctggtttcaatataaacaaattgtcttgg

SEQ ID NO: 265679 - DNA, 778 bp, Zea mays
ccggttcttgcaagcaagagcctatggcgtggtgccacggcgcgttgcccatacatcatgcgtccggcgatgatccatcctcacttgctataaaaagaggtgtccatggtgctcaagctcagccaaccaaataagacgacttgtttcattgattcttgaagagatcgagcttcttttgcaccacaaggtcgaggatgtcttgcaactgcggatcaagctgcggctgcggctcaagctgcaagtgcggcaagaagtaccctgacctggaggagacgagcaccgccgcgcaggccaccgtcgtcctcggcgtggccccggagaagaaggccgcgcccgagttcgtcgaggccgcggcggagtccggcgaggccgcccacggctgcagctgcggtggcagctgcaagtgcgacccctgcaactgctgatcacatcgatcgacgaccatggatatgattattatctatctagcttgtggtggtggttgaacaataataagcgaggccgagctggctgccatacataggtattgtgtggtgtgtgtgtgagagagagagaaacagagttcttcagtttgctatctctctctgcatgtttggcgtcagtctttgtgctcatgtacgtgtgtctacatgcatgttggttgatccgattgcgtctgctgtaaccatatattaattggtccacgatgatatgatttgatactatatatatatactaaaaccggacttattataaaaaatgtagtatataagtttcttacgccgcaattgatcgattc

SEQ ID NO: 265680 - DNA, 560 bp, Zea mays
gcgtccacccacacgtccgcccacgcgtccgcccacgcgtccggacttgtttcattgattcttgaagagatcgagcttcttttgcaccacaaggtcgaggatgtcttgcaactgcggatcaagctgcggctgcggctcaagctgcaagtgcggcaagaagtaccctgacctggaggagacgagcaccgccgcgcaggccaccgtcgtcctcggcgtggccccggagaagaaggccgcgcccgagttcgtcgaggccgcggcggagtccggcgaggccgcccacggctgcagctgcggtggcaactgcaagtgcgacccctgcaactgctgatcacatcgatcgacgaccatggatatgattattatctatctagcttgtggtggtggttgaacaataataagcgaggccgagctggctgccatacataggtattgcgtggtgtgtgtgagagagagagaggaacagagttctttcagttagctatctctctctctctccctccctcgcgccgcatgcttggcgtcagactttgtgctcatgtacgtgtgtctacatgcat

SEQ ID NO: 265681 - DNA, 492 bp, Zea mays
  unsure (1)..(492): unsure at all n locations
gtccggatttnccgggtcgacccacgcgtgaggccttgtttcattgattcttgaagagatcgagcttcttttgcaccacaaggtcgaggatgtcttgcaactgcggatcaagctgcggctgcggctcaagctgcaagtgcgggtaatatatatgataatatataagtgcaccgtgcatgattaatttctccagccttcttcttgtctagttaatttccatttatttattttttccattgcaaaacaaacaaacaaacagacaagaacaaagttaatttggatcgagtagttcaatccatttgcgcgctgtccttttcagcaagaagtaccctgacctggaggagacgagcaccgccgcgcaggccaccgtcgtcctcggcgtggccccggagaagaaggccgcgcccgagttcgtctaggccgcggcggagtccggcgaggccgcccacgcctgcggctgccgtagcagctgcaagtgcgacccctgcaact

SEQ ID NO: 265682 - DNA, 689 bp, Zea mays
  unsure (1)..(689): unsure at all n locations
cggacgcgtggaaacacatgatgaaattgataagcgaattacacgattcggtgaggaaatagtaacaacataaactcaaatatacaagcacttcgctgagcaattgacgacttgtttcattgattcttgaagagatcgagcttcttttgcaccacaaggtcgaggatgtcttgcaactgcggatcaagctgcggctgcggctcaagctgcaagcgcggcaagaagtaccctgacctggaggagacgagcaccgacgggcaggccaccgtcgagctcagcttgtcccccgagaagaaaggcacgcccgagttcctcgatgcctccaaagagttcatgcagggctgccactcctggcgcttgtgtagcagctgcaagtgcgacccccagaactgctgatcacatcgatcgccgcccatggatatgattattatctatctagcttgtggtggtggttgaccaataataaacaaggccgagctggctcccatacataggtattgtgtggtgtgtgtgttaaaaaaaaaaaaacagagttcttcagtttgctatctctctctgcatgtttggcgtcagtctttgtgctcatgtacgtgtgtctacatgcatgttggttgatccgattgcgtctcctgtacccataccaaaaaaaaaaaaaaaaannnnnaaaaaaaaaaaaaaaaaannnnaaa

SEQ ID NO: 265683 - DNA, 462 bp, Zea mays
gaaaaccactgattttgatttgggcaagatagtcgagtttatcaactgaagagcaacaccagactcccaatttaaagaacgtgtgcttttttaggatttgaggatatgatatccaagtcctgcaagaaaattactccttacgtgctgagttttctaacccaagtgctaatggctaacaaattgctagcttatcagctattcagttacactgccatactagttagtagataaccagatggcccagtaaatgttgtattagttcatgcacgtaaatgaggtgtagctgtgaaagtagatcgatgaaggttcctgatgtgaaaaagtcaaaagacaatgtaggagcttctgggtcacagtttcccaacattttgtcccttggcactcattgtaagatctttttggaaggtatgccatttgttgttctgccatctaaaaaaaaaaaaaaaaaaaaagggcgcccgc

SEQ ID NO: 265684 - DNA, 801 bp, Zea mays
cgccgtctcgcacaggctcgttgttcctcttatccgcggaggaagaaccttggcccgacaccatgctcccaatggccgtccaccccaccaccacgccggccttgtccccgcgcgcccgcgtctcgccgcacaggcctcccatctcctccctggcggacccctcgtcctccccctgccatcgcatcgtcagtttcaaaagcaggaggctgccacttcgctctctccacatcgccgctgccgctgccgccggggcagaggaagaagaggcgcaactaggtggaagtgtgaacgcggtcgacgaggaggaagcggagaataaggtggtggtgcccgagagacaggacccgatgctggtactcaagttcatctggatggagaagaacatcggcatagcactcgaccagctggttcctggctatggcagcatcccgttgagcccgtactacttctggccgcggaaggacgcgtgggaggagcttagagccaagttggaagagaaagagtggatctcgcagaagcagatgatcatccttctcaaccaggccaccgatatcatcaacctctggcagcagggtggtgggaacctgtcgacatgagtccctccccgccctgttctttcaaccgtgcaaagcttgcgttttgttggtttcactacaggctctctctgttgttaatgttaaaagtatggtacatggccttgtagatcggttcaaactgttctcaggtatggccttttccatggaaatcatcttgggatttatcttagttattatgtgtatcaatccgtcacccccccccccc

SEQ ID NO: 265685 - DNA, 1121 bp, Zea mays
ttcgcgtttgcgtgtacaacaccagctccggcttcatgggcaacggcagcagctacgccaagaacagcaacaacaacgccggcatgctggcgttcgacaagatggggagctacggcaacaacggcggcggtaataccaacaacaacagcaacggcgtggaggtgaagagctacttcaacaagtccgccgggagggcggcgagcaacaacaacaacaacagcagccacgccggcggcggcaacaagaagggcggcgccggggagtacggcaggaagaagcacgccaagagcgagggcgcggcggcggcggcggccacggacaagcagcggttcaagacgctgccggcgtcggaggcgctgccgcggggccaggccatcggcgggtacatcttcgtctgcaacaacgacaccatggacgagaacctcaggagggagctgttcgggctgccgtccaggtacagggactctgtgcgtgctatccgcccgggactgcccctcttcctctacaactactccacgcaccagctccacggcatcttcgaggccgcgagcttcggcgggaccaacatcgacccgacggcgtgggaggacaagaagtgccccggcgagtcgcgcttccctgcgcaggtgcgggtggcaacgcggaagatctacgacccgctggaggaggacgccttccgccccatcctgcaccactacgacgggcccaagttccggctcgagctctccgtcaccgaggccctcgcgctcctcgacatcttcgccgacaaggacgacgcctgatccccatcggatctgtcgtcgggccactcgaagctcggatgcacgaatgaatgaacaaacaataataacggatggatgggcatgtatatcgtcatgcgcatgtcccacgacgagacgggagtataccacggtggagtagtattatattaataattaatatagtatgtccacctttgtttgatactactaagggctatgtattgaggcacgcgtcccattgttttgtttttataacacttgtgcgatggttgcagacgactagccctctttttttttggtaagatgtctgtattattattattattcgggttccactgacatggataaaaaccatctgtg

SEQ ID NO: 265686 - DNA, 914 bp, Zea mays
gaccgcgagttctggaacttcagcgacctagtgcgcctgcacaacaacttctccaacctctccatcgccgaccccatctggtcctccaccacactggatcctccctcctccttcagcgacgccccgggcctcataggatccgccaagctcgcctttggcaacgccaccacggccaacgccgaccgctacaacgccaacgccgccggtgtcgccagcaagagcatgagcgtgggcatgatcgaccactacctcaacaagaacactaacaacgacgtcgtcaagagctacttcaacaagtccgtcggcagcaggccggccaacaacaacaccaccacaaccgtcaagaagaactccgccgcccaccacgacaagaagcacaagaactccggcaacggcgccggcgtcgacaagaggttcaagagcctgccggcggcggaggcgctgcccaggggcgaggccatcggcggctacatcttcgtctgcaacaacgacaccatggaggagaacctcaagaggcggctcgccgggctgccgtccaggtacagggactctgtgcgggccatccgccccggcctgcccctcttcctctacaactactccacgcaccagctccacggcatcttcgaggccgcgagcttcggcgggaccaacatcgacccgacggcgtgggaggacaagaagtgccccggcgagtcgcgcttccctgcgcaggtaccctactgtactgtctgcttcgatccacagtctagtactctagtctagcagccatggcggcggcggcggcgggtgatcgatcagctcaacgactcgccggccacactagcgaacgtcgacttgtacgcttgtttcaattgtgttcaacaccaccaaacagtacatgtacatgtatcaccgacagacgaaaggctatcaat

SEQ ID NO: 265687 - DNA, 472 bp, Zea mays
gtgccccggcgagtcgcgcttccctgcgcaggtgcgggtggcaacgcggaagatctacgacccgctggaggaggacgccttccgccccatcctgcaccactacgacgggcccaagttccggctcgagctctccgtcaccgaggccctcgcgctcctcgacatcttcgccgacaaggacgacgcctgatcgatccccatcggatctgtcgtcgggccactcgaagctcggatgcatgaaggaacaaacaataataacggatggatgggcatgtatatcgtcatgcgcatgtcaatcccacgacgagacgagaagagacgggagtatccgcatcaccacggtggtcggtggagtagtatattaataattaatatagtatgtccacctttgtttgatactactaagggctatgtattgaggcacgcgtcccattgttttgtttttataacacttgtgcgatggttgcagacgact

SEQ ID NO: 265688 - DNA, 779 bp, Zea mays
cccaagcgtccgggataggagacgtaactcagtcctcctctgaccgccgactcatccgccattgccggcaccggctccggcgtcgataagaggtttaagaccctgccagcggcggaggcgctgcccagaggctaagccatcggcggctacatcttcgtctgcaacaacgagaccatggaagacaacctcaagatgccgatcttcgggctgccgtccaggtacatggattctgtgagggctatcaggccccgcctgccccacttcctctacaactactccacccatcatctccacgggatctttgatgctgcaagcttcggaggattcaacatcgacccggcggcgtgggaggacaagatgtgccccggcgagtcccgcttccctgcgcaggggcgggtggcaacgcggaagatctacgacccgctggaggaggacgccttccgccccatcctgcaccactacgacgggcccaagttccggctcgagctctccgtcaccgaggccctcgccctcctcgacatcttcgccgacaaggacgacgcctgatccccatcggatctgtcgtcgggccactcgaagctcggatgcacgaatgaatgaacaaacaataataacgaatggatgggcatgtatatcgtcatgcgcatgtcccacgacgagccgggagtataccacggtgtagtagtattatattaataattaatatagtatgtccacctttgtttgatcctaaaaaaaaaaaaaaaaaaagtggcggccgcccggtaattccagcccgg

SEQ ID NO: 265689 - DNA, 343 bp, Zea mays
cgacgggcccaagtttcggctcgagctctccgtcgccgagaccctcgcccctccgggacttcttcgctgccaaggatgacgcttgagccttccttgccgccccctcgccgccagtgccaatccattaatgcccagacaataaaatggctggagggacagaccaaactatccacctttgtttgatatgataaagggctatgtatgaggcacgcgtcccattatttttgtttttattataagactagacctcgttccgtaagatacatgtatcaatattatataaaaacaaaccatcagttcttgtgctgcaaaaaaaaaaagaaaaactaacaaaacggaaaaa

SEQ ID NO: 265690 - DNA, 536 bp, Zea mays
ctcacgcgtccgctctgatcctccttttccactggtctgcgtctgcgtctgcgtctgcactacttcaacaagtccgacgggagggcggcgagcaacaacaacaacaacaacaacagccacgccggcggcggcaacaagaagggcggcgccggggagtacggcaggaagaagcacgccaagagcgagggcgcggcggcggcggcggccacggacaagcagcggttcaagacgctgccggcgtcggaggcgctgccgcggggccaggccatcggcgggtacatcttcgtctgcaacaacgacaccatggacgagaacctcaggagggagctgttcgggctgccgtccaggtacagggactcggtgcgggctatccgcccgggactgcccctcttcctctacaactactccacgcaccagctccacggcatcttcgaggtacagtacagcacagcacagcacagtagccactagccagttcgtggttccctttccttgcttcttcttcgttcgctgtccttgcttcttcttcgttcgct

SEQ ID NO: 265691 - DNA, 1431 bp, Zea mays
ggacctggcgtggcgtcgattgggaggcgcaggacgcggaggcgcgccatctcgtgctgctcgtctacagacgcagatggccctcgccccgccgcgccaccgacctccgcagcgccttccgacgggtcgatacagctctattcccagatcgagagggtaatcacggaggcggcaaagcagtcccgggaaggctggggttcgactggagattggaccgaagtcgagggatcatgggtgttgagaccgaagtccttggagccatcatttgttgtccactttgttggaggaatttttgtcggagccgctccccagatcacataccgcttcttcctcgagtgtctcgcgaacaggggagctttggtgattgctacgccttatgcgagcggctttgaccatttcttcattgcagatgaagttcaatttaagtttgacaggtgtttgagaaacttggatgagcctgtaaatgatctcccaacgtttggtgttggacattcattgggatctgttatccacatgttgattggatcaagatatgctgtgcagcgaagtggaaatgtactgatgtcctttaacaacaaggaggcaagctctgcgatcccactattttcacctgtaattgttcctatggcacagagttttggccctatattctcccaattggcatcgtatccaacaatccgatttggggcagaagcagctattaagcagcttgagaatctaagcccacctgttgttaagcaacttctacctttacttcaacaacttcctccgttgtatatggacctaataaaagggcgggaggacttcattccaaaaccagaagagacacgccgcctgataaaatcctactatggaatttctcggaatctcttagtaaagtttaaagatgatcaaattgatgaaacctctacccttgcacaagtactaagctctgaagcagctattagctcattgcttgatatgtcaattcgatcacttcctggggatcatgggttaccattacaacaggttcttcctgatgttccaccagcaatggctgatgcagtgaaccgcggaggtgaacttctgacaaatctgacaacaggcacaccatgggaggctgttgctaaggaggttggcaccactttgggtactgactcaggcattctacgagcacagatctcaaaagacgttgaaactcttgttgatgtaattgcttcatggacatcttcaaattctggtccaagactacttcgcccatgatcacccagctgtctgcgtacagaaatgttagtaacagtgaagagcaacaggatttaatgatgcattgtgagtaacaaaaagatgatacgagacgttggcaattaaggagttatgttaccttggccggtggaggaaggatgcatggcactggcaataggagcttttgtggacaaactatcttaacccatt

SEQ ID NO: 265692 - DNA, 1172 bp, Zea mays
ctcatccgtacccgagcactgcacagcacagcacagcacagcacaccacctttagtatatagcaatagcacactcggcccccctcctcttcaactcccccggccgtcctgctcgccggcttctggctggcccctgcatccgcccagtgtgtgtgtgacctcagggaatcgattcgttcatccaagtgaaggcaaccagactccaggatggagttcaaagccggcgttttcaccgtggcaatgctagccatcgtcgtgctctccacaccagcagccccgcagaagcccaagagccctcccgctccgcgatccccagtcgtcctggcgccggcgccagcgcccgcaccggcggcgccgcaccacgtggacctcgcggacctcctcagcgtggccgggccgttccacacgttcctggactacctgcagaagaccggcgtcatcgagaccttccagagccaggcgaacgacacgaagcggggcggcatcaccgtcttcgtgcccaaggactcggcgttcgcggcgctgaagcagaccacgttcgccaacctcacccaggaccagctcaggtcgctgctgctgtgccacgcgctgcccaagtactactcgctggccgagttcgaccggctgagcgcgctcggcccggtggccaccctcgccggctcgcagtacacgctgaacctcacctacgacatgggcaccgtccgcgtgaagtccatgtggtccgaccccaagatcagcagcagcgtgtactccacccgccccgtcgcggtgtacgaggtcggcaaggttctcctgccgatgcagatcttcaagagcgaccccccgctggcgcctgcccccgctccggcaccggatgccaaggcatccgacgtcgctcccagcccggcgtcggggaaatcgtcagcgagtgcgaaggcgaaggagaaggcgggagagaagagctcgtcgtgccgagccggtgtcgtcgcccattacttggcgatcgctgtctccggcggcctggtgctcttgtggtgaggatcgacgagttcgtcctcaccgtgtgtccgtgtcgaaggagcaagtacggggttcagcttagggccccccgtgtttaatttatatatgggtgtttatggattcattcttttggacatatggtaggccatttgtgtttaaaaaaagaaaaacaga

SEQ ID NO: 265693 - DNA, 1349 bp, Zea mays
agagagagaaaccacggctgccggcccccagcgagctagagagagaaaccaaggccaaggagcacagcaccccgtacgtccccagcaggagagggagagacagaagggtgtgcgaaggaaagaagaggcggtgggagaggagggcgacatggagaggccggcaccggtgaggaagtctcacatgtcgacggcggacctgctgatctggccggagggggcgccgcaggagtcgcccgccggggccacgccgccatccaaccgccggccgcatcagccgtcggaggcgctcaggaaggtggtgttcggcgggcaggtgacggaggaggaggccgagagcctcaacaagaggaaaccatgctctgctcccaagtggaaggagatgacaggaagcggcatatttgctgctgggggcgaggctgaagaagatgaatctgccaatgcctctgcaactcccatccggaccgctccaaagaattatcaggcaattagcactataagccacatctcattttccgaggaagaaagcatttctccgaagaagccgacttcgatagcagaggtggcgaagcagcgcgagctgagcggcacacttctgagcgaggacgacagcaagatgaagaagcagatatcggacctgaaatccaaggagctgagcggccacgacatctttgctcctccggaagacccacggccacgcaactcagagaacggctcgacctcgcagaccccgggcaaaaatgcacacgtaagcaacttcaagttcggcgaggccgacgaggacggcatggtgaagaccgcgaagaagatccccacaaagaaattcaccgacctcgcgggcaatatcttcaagggcgacgacgaggcacccgggacggcggagaagcaccacctgagcacggcgaagctgaaggagatgaccggcagcgacatcttcgcggacggggaggccccctcccgggactacctgggcgggatccgcaagccgcccggcggggagagcagcatcgcgctggtttaacagcagggacaaacaaccagatggacatagcagcccctcccctacatcattcgtttcttcctcatcgccgtcgccgtcgccatcttaggagtgatcttttattagggagtttttttttttcgttcattggaggactgatcgattggaacccctggcttgctttcctgtttcccgtgactttcgtcaggttttcgttggtaatccccccccatgggggtgttgtgtgggtatgccaccaacgatggttatctctaatttaacattgctttggcctgggtctcaaaaaaaacaaacaaaacaaaaaaaccacaaaaaaaaaaaaaaaaaagga

SEQ ID NO: 265694 - DNA, 616 bp, Zea mays
ttctcttagacactcaattagtctagacagattctgtttcttgatatgtaaaaaaaaccttcaagaaactttcatatttttccccctgtataatttttttctacagactgcttagcaactctaatatttttgcagcatactcactgtagcatcaagtttctattccataatcagcttgatgtttggcttcaagaaagaaagcattttcttgatgctggcttgcgtagctggaacactactgttacacggactaatcctgctgcattttctcaagtacaggcaatcagtactataagccacatctcatttgccgaggaagaaagcatctctccaaagaagccaacttcgatagcagaggtcgcaaagcagcgcgagctaagcggcacgcttctgagcgaggacgacagcaagatgaagaggcagatatcggacctgaaatccaaggagctgagcggccacgacatctttgcccctccggaggatccgaggccacgcaactcggagaacggctcgacctcgcagactccgggcaaaatgcacacgtcctgacctctgactctgaactcaccctcatcataattatatgaaccagaccaacccagttacagaaaagctg

SEQ ID NO: 265695 - DNA, 442 bp, Zea mays
gcgggcaatatcttcaagggcgacgagacccccctgggacggcggagaagcacctgagcacagcgaagctgagggagatgaccggcagcgacatcttcgcggacgggaaggccccctcgcgggactacctcggcgggatccgcaagccgcctggcggggagagcagcatcgcgctggtttaacagcaacagcaacctgatggacatagcagcccctacatcattcgtttctttctcctcgccgtcaccgtcttaggagtgatcttttgttcttcttctttttcctttcctttggaggactgatcgattggaacccccggcttgctttcctgttccccgtgacttgcgccagattttcgttgtcgatcccctctgatggtggtgttgtgtgggcatgacaacaacgatggttatctctaatttaacattccctcggcttggct

SEQ ID NO: 265696 - DNA, 556 bp, Zea mays
  unsure (1)..(556): unsure at all n locations
cccacgcgtccgcggagggccgggggccgacgcttgctcgacgcctcaagaagtccgacgcctgggacacccgtcccgggcgccgcccgtccggcggtggcagcagcggggaggtcgatccagcggccgtggcaccggcgggggcgatgcggaaggccgagactttcaacgacggtggcgccggaaggagcaggcctgctcccgctgcgctggtgcggctggagccgtcgctggggcangacgagctgaaccgtcgcgtggaggcgttcatccacaagttcaacatggagatgcggctgcagcggcaggagtcgctcaagcactacaacgacatgattggcaggggcaggggcagccgttagtgggaatgggaagtcttgctgcaaatagctgcggctcgcaagaaggattctgcttttttgttccgtgatatttctcgattttggttcctggtctctgtaagatatggttttgtgtaaatggttttatcaagtgacgaggacaagttcgatcgtactaaaaaaaaaaaaaaaaaggcggccgctcgcgatctagt

SEQ ID NO: 265697 - DNA, 793 bp, Zea mays
cccacgcgtccggtcgcggattacggaggaaccctctaggctccggttccggaaacagcgggcgccattcccgggcgaggaggccggcccagatccgagtacggcggcggcggctgcggcggcgagatgactggtggcggcccggccgcggcgtcgcaggcgtacggcgaggcatggtactgggacgagcgctacgcgcaaggaggccgggcccttcgactggtaccagaagtacccggccctggcgccgctgctccgcctctacctcgcgccgcaccaacgcctcctcctcgttggctgcggcaactccgtctttggtgagaacatgattgacgatggttatcaagatgttgtcaacattgatatatcttctgtggtaattgagcaaatgaagaagaaataccacgataagcctcaacttaaatacatgaagatggatgtaaagaacatgtcagattttgagtctggttcttttgatgctgttattgacaaaggaacactggattctcttatgtgtggtcaaaattcccaagagaatgcaacgaaaatgctagaggaggtcaacagaatcctcaaggaaaatggtgtctacatgctgatcacttatggggatccaagttaccgcttgcgtctcttgaaggacatggaaaaatggacagtaaagctccatgtcatagaaagatgggagaaaagttcgaatcagaacaaatgggaactgacaaagccattgcctctagaggaccatagcacatcactagctgcacttcttggccccaaacctgatgtccactac

SEQ ID NO: 265698 - DNA, 583 bp, Zea mays
gacgaaggaagctttggagatatgtcaagtggtgatgttgatgaagataacgagagaagagaatgcgtaaaagctgctgcagtttcctctgtcgtcggtgttctggctagtttgcccatatctttctatgaagttgaagatcttccacaactattccttcggtcatcaattgttttcataagttgtgctttgtttggagtcacattccggtacgctgttagaagagatctggataatatccaactaaaaactggggctcctgcagcatttgcttttgttagaggccttgctctgctggaatctggtagaaccttcgagctgagtactgataccttaatatcagttactcttgatgctgcagtcagtgtggttgagaacattttcatatttctgcctgctgctgttgcactggactactgttttaagatgagatttttgagtccctttcctagaagaaaacaatagcttctgtgaagaatatgtatgatcaatagcaatcttgatagctcaaatgcgtcatatgtaacacaagtgatatcttagattcatgtaaaaaaacatttcccctcatttttctagagtt

SEQ ID NO: 265699 - DNA, 1054 bp, Zea mays
agcgaagttgtctacatcacttgacttgcgagcgaccgcggctcacgtcggctgcataaattgcttcgtagactagtaccacacagtttgcgagaaggggagaggtagaggttccgaggtagagagatagagaggaggagagggagggcgaggcggcggatccgtcactccgttcttctccgctgatctggaggaaggaggcgaggggagttgcaaatccatcaatggccactccaaccacctattcagtccgcatatcctcggagacccacaagattgaagcctgggtggtgtctgacgaagctttggccaggcaactgcaggaggaggagaacacgcgtgacgctgctgccgacaccagagaagtcgccggcaatgtacccttggagtcatcgtcaccggctgttgagtacaggcctgcacagaatgcagctcaggttgcaagggaagacaatgtggacccagataatatgtcatatgagcaactacaagcattaggggaagcagtaggaactcagtccagagggttatctgatgagctgatatcttatttggagccatttaggaacaagtgcactttcttctccaggaaaaagaacagtgaggaatgtgtgatctgcaagacaacatatagaagccggcagaaattgataagactaccctgcagtcactgttatcacgcagattgcataactcgttggcttaagatcaacaaggcatgcccagtctgcaacgaggaggtgtttggatgaactgcaaggttcctggcagatgctgcagtttcatcgttacttgcttgcggcatgcttttgagaagacgttggacgcatatggtccattgtttgtgattatgttgtgagcctagtttggtgccctttgcttaagaggactggctctgcccatgcatgggtcggtctacacgtgtgctagtaactggaccaggtcgcgttttgtgatgcgtctatccatcttggttttatcacaaattgatagatctgttgtgtgggtagtttggttgccgttttctgaatataatggatggtgtttttgcccc

SEQ ID NO: 265700 - DNA, 736 bp, Zea mays
cagcgaagttgtctacatcacttgactttcgagctaccgcggctcacgtcggctgcatgaattgcttctgtagactagtaccacacagtttgcgagaaggggagaggtagaggttccgaggtagagagatagagaggaggagagggagggcgaggcggcggatccgtcactccgttcttctccgctgatctggaggaaggaggcgaggtacgcactgctatctccttccagttcgttcgagaagacggtcgttgggtgattcggcgggcgctcctgttctgtagtaaagttgtttgtttttttgtctcttgtatgtttggtttcttgatcggaaacagaagtcccaaattctttcttttgcttggtcaagtgccaattgggaggcagaacggaagacagaacctccatgcgaactttagtcgcgctgatttcgatggaatcggaactgatttaggtgtattttagctctgattgttcttggcaggagtacaattttagtagcaccgattgatggtacggttcttctgggtggtaaattgcccttactgcgacgcgatgtcagacttcgatctctgttggaagacgctagacattgcagacatagatattgttactgcaatcatgagctcgaaatccaaatgtaatcaggtgccaggttagacaatcgctggaacatgtgtaaaagctggacgaggtttcatatactcgattgaatcctcggcttcggcgctaaatc

SEQ ID NO: 265701 - DNA, 491 bp, Zea mays
gaagaagatgacaacggtgtcaaggcattataggattgcgtgtcccctgagaaatcaggggctgggggaccattagaagaagacccagtccatgagaagccagcggacgcagtagctgagccgtcatctcaggacgacactgccactgaaaagccctcagctacaactgacactgcagaaactgcatgagacatcagttagctggttaaagttagttagcaacagttttaaacggagtgtggatcgaatactattggtcatagttcggcgtggcttctgtttgggctctttttggtggggtgggggtggggtataatgcttgagttgtaaaatttgagggaaagaaactatagtattgatttggtttttttacaagcaataatcccctcctccacatgttaggaggaggataccattgaagttctatacataggatttgtgtgcggtttgattttttgtttggaagttgtactttgtaatcgattttgtgc

SEQ ID NO: 265702 - DNA, 608 bp, Zea mays
cccacgcgtccgcggacgcgtgggctttagcacaggagacacagcggtccgggaaagccatcaatacacttgagtcttggataaaaaaatcaaatagttccagagactgagtgaagttgagtagcaatagatggatttctgcaataagacatgaggaatggtagaaaataagggctccgctgagtccatccatcatccgtgtatgattggctttcttctcgtgttttgttcatgatttgtgtcagaaacctaggtggcatctagtctggtttatgtattgccagtgctgttgtgtagaaaaatctccgtcgatattctaagctttttggttagaaaggtgcgctcttcattgtccttgacggaactcggggtagatgaacataggccatctgttgtgatcttgtgatgctgcattacgtttgcaatggatcatatattatgcaatggcatgggaagattatacccatttgtaatgggggagaatcagggcttaaacatttctacaataacgtgcgaagagttgtccccattggtaacgcatgtcctgaaatatgaataaagctgcaggcagttgatattttgcaaaaaaaaaaaaaaaaaaactcgac

SEQ ID NO: 265703 - DNA, 378 bp, Zea mays
gcggcacggctttcccggcggatgatccgtcagtggacgtgcagacggaggaggcccggctgaagacggcgacgatgatccagcaggcgaggacgatggcggacggcaataagctgggcgacgcgcgggacaagctggcggaggcccagaacgcgctggaggacgtggtggcgcagtccgacccgctgctggacgccctcaggacggagctgcaggagctactgaagctgatgaagtcgcaggacgtgtacgagaaacagggccggccctacgccatgtcgtcggagacgtcgcacgacaggcagcggttcgcggcgaggggcgacatcgagagcaatcgcctcttctcgacgccgcgcatggacaagtacctggagc

SEQ ID NO: 265704 - DNA, 726 bp, Zea mays
cccacgcgtcctcgcacgcgtcgggttggattgggttcaaagttgggcttttggacagctgtggtgtgcacggcagctctgtgacttgtgaggaggaagggaggaagaaagcggatccatggcgtcgaagcggatcctcaaggagctcaaggacctgcagaaggatcctcccacctcttgcagcgcaggccctgttgccgaagatatgttctactggcaggcgacgattatggggccatcagatagcccatacgctggtggcgtatttttggtcactattcactttccaccggactacccattcaaaccaccgaaggttgcattcaagacgaaggtttaccacccgaatatcaacagcaacgggagcatctgtcttgatatcttgaaggagcaatggagccctgcactgacagtttctaaggtcctcctctcaatttgttcccttctgacggacccaaaccctgacgatccgttggtcccagagattgctcacttgtacaagactgatcgcgtgaagtacgaatctactgctaggagctggactcagaaatatgcaatgggctgacaagctattggtctctcatagacccttctgtaactgaaaccagatgtctaaattaatttgtccattcgtgcatcgaacttttgatatataatggaaggagaaacattgatagtacctcggtgttgtctgtggtccaatttaatttaatttaattttggtct

SEQ ID NO: 265705 - DNA, 187 bp, Zea mays
  unsure (1)..(187): unsure at all n locations
gcgtgaagtacgaatcgactgctaggagctggactcagaaatatgcaatgggctgacaagctattggtctctcgtagacctaaagcacgtactgccttctgtaactgaaaccagatgtctaaattaatttgtccattcgtgcatcgaacttttgatatataatggaaggagaaacattgatagttna

SEQ ID NO: 265706 - DNA, 651 bp, Zea mays
  unsure (1)..(651): unsure at all n locations
tccccgcgtccgcccacgcctccacaccgccgcaaggactcgcgacggacggagcaacggaggaagcaactacgcggcagccatggtgaacgttccgaaaaccaagaagacctactgtaagaacaaggaatgcaggaagcacaccctgcacaaggttacccagtacaagaaaggtaaggatagcctttcagctcaagggaagcgacgttatgaccgcaaacagtctggatatggtggtcagacaaagcctgttttccacaagaaggcaaaaacaacaaagaagattgtgctgaagctgcagtgccagagctgcaagcactactctcaacacccgatcaagaggtgcaagcactttgagatcggtggtgacaagaaaggcaagggaacctctctgttctaagcgtatcataaacttgctcagggtctcaagtatctgtcagaatttaccattacaaacaccctgtgcttagcttctgcatatgttcttttgtcacatctttttggtacgttgtagtttgtatgagaccaagctattgtttcgtgttattattatatttcatgaaattgtcaacatgaccgtttgcttgactgtaaacatagttttgagctttgggcaaacagtagtttaatttatcgtatccatcttgagnc

SEQ ID NO: 265707 - DNA, 558 bp, Zea mays
tcttatttctccttcaaggtccaggagatgtgagtgttaatgatgttgatctggctgggccgtcgcgtgggattatatttggctttaatgtcagagcaccaggatcagttaaaaactctgctaagaagacaggtgttgaaattcggatgtacaaagtgatctatgatttgattgatgatttacggaaggccatggaaggtcttctcgaacccgctgaggaggaagtaccaattggttcggcaaaagttcgagctgtctttagtagtggcagtggaaaggtggccggatgcatgattacaacaggaaaagttgttcaagattgtaatgtgcgggttcttcgtaaagggaaagaagtatatgtgggttcgcttgattccttgagaagggtgaaagaaactgtgaaggaggttggtgctgggctagagtgtggtattggggtagatgacttccatgaatgggaggaaagtgacatcatagaggcattcaataccgtgaataagctgaatggtgagctgaagctattgtgctgaagctgttgtgagctggaccggtggaccg

SEQ ID NO: 265708 - DNA, 382 bp, Zea mays
gggttcgcttgattccttgagaagggtgaaagaaactgtgaaggaggttggtgctgggctagagtgtggtattggggtagatgacttcgatgaatgggaggaaggtgacatcatagaggcattcaataccgtgaataaggcaagaaccctcgaggaggcctctgctaccgtgactgccgcactcaaggatgcaggggtccagctgtagaattggcaacacgctgatactcttttttattaatggcatgaaatgttaatttatatatactttgaagctgaatggtgagctgaagctattgtgctgaagctgttgtgagctggaccggtggaccgtttccctgattccttcggtggtggctgaagctgaatggtgagctgctgg

SEQ ID NO: 265709 - DNA, 907 bp, Zea mays
cccacgcgtccgcccacgcgttcgcccccacctcagctccgccgcttgcccgcttttgctctctccctcccggctctcggcttcttctacacgctaccgtctcacagccgtaaacgcccctcccggatcccgctagttcgccaccgccgcccgcccgcccgccgttcgcctcatcatggccgcctcgtcgaccgccacctccgtccacgacttcatcgtcaaggatgcgagcggcaaagacgttgacctcagcacctacaaggggaaggttcttctcattgttaacgtcgcatcccagtgtggcttaactaactccaactacactgagctggcccagctctacgagaagtacaaggaccaaggctttgaaatcctggctttcccatgcaaccagtttggtgggcaggagcctggtaccaatgaggagattgtccagtttgcctgcacacgcttcaaggctgagtaccccatcttcgacaaggttgatgtcaacggtagcaatgctgcgcccatctacaagttcttgaaatctagcaaaggtggccttttcggcgacagcatcaagtggaacttttccaagttcttggttgacaaggagggacgtgttgtggatcgctatgctccaaccacttcacccctgagcattgagaaggatatcaagaagctgcttgggagctcttaatcagtatctgggtgcaaagctgtagaaaaacatgtatcaacaatgccctgagcgataaaatatatgataagttgtattaataaagtattgtcgtacttgagaggttgcagtatctgctctatttcccttgcatacactctgtacttgtatatccccttccaatgaattccaatgctgtatcagtttgctaccccattttcgtgtgactgacctgataatagcata

SEQ ID NO: 265710 - DNA, 769 bp, Zea mays
cagctccgccgcttgcccgcttttgctctctccctcccggctctcggcttcttctacacgctaccgtaaacgcccccctcccggatcccgctagttcgccccagcatggccgcctcgtcgaccgccacctccgtccacgacttcatcgtcaaggatgcgagcggcaaagacgttgacctcagcacctacaaggggaaggttcttctcattgttaacgtcgcatcccagtggtatgaatcatatggaaggggttaaaagtagaatatgtactatgttttaggtggaaggggttacatataaaataacagtcatcattagatctagatcggatgcaccagatcgcttgattgcacgcgtgcaccaggataagtgattgcataggatattttccccatatagtgaagtagaagtcccaaaccttcttggtggggaaatctcaagcctttgtgcaaaggcagtcagcttgtcatcatatcttacttccattttgaagttttttcagatggcaggcgtcttgagattccaggaatcacaccaaaccatcatcagatctatacatcctctatctcttctttgagcgtctaatcccaccccaatccttttagtttttctgtgcatgcatattctgaacctaaaagaatatcacaacctatttcattgatcctggaaatgcacatccatatctcgtgtgttgttgttgtcatcgtcatcaaggtaatccacaagcacatttgcaggccgtcgtttcaacctttggaatatgtcatca

SEQ ID NO: 265711 - DNA, 530 bp, Zea mays
gcaaaggtggccttttcggcgacacatcaagtggaacttttgctagatttcaggaacttgtagatgggcgcacattgttaccgttgacgtccacctacaagttcccgtaatctagcaaaggtggccttttcggcggcatcttcaagtggaacttttccaagttcttggttgacaaggagggacgtgttgtggatcgctttgctccaaccacctcacccctgttcattgagaaggatttcatgaatcttcttgttagctcttaatcattatctttgttcaatgctttttattattttgttttttcttttcttctgttattattttatttttatttgttttttttttttaattttttttttttttttttttttatttttttttggtgtttttttctttttttattatttttttttttttttttttttttttttttttttttttttttttttttatttttttatttctttttttttttttttttttttttttttatttctattttttatttttttttttatttttttattttt

SEQ ID NO: 265712 - DNA, 1106 bp, Zea mays
ccgctgccgtttcttctcgagtgtgaccatggcggctcagggatccctcgtcatgtggagggcggtcttcgcagcgctgggcttgctcatggtggccacgctggtgtacaccttggccaccgacggctcgccgttccgccttgagctgtttacgccgtggatggtggcaacactggctgatttttatgttaatgttattgcaatctcggcttgggttatctacaaggaagcaaactgggttagttctgctgtgtgggtggttctgttgttttgctttggcagtgctgtcacttgcgcttatattgttaagaaacttcttgaagtaacatctgcagggtcatcccaagatcctcttgaccttctatttatcaggcaaggtaatctatcccaaagaaagtgctcttatgttgtaattggaagggttattttcagcattttggggatattcatggctgcggttgtcacatatactgtcatcactgatggactaccttttaggaaggaattgttgacaccgtggatggcggcaaccttaattgatttctacataaatgtctttgcgatatcggtctgggttgctcacaaggaatcatcatggatatcaactaccatttggattgtcttgctgatatgctttggaagcatcacaacatgcggctacattgtcatccaacttttcaaagtatcatatcaagatccaatctaccacgtgctattgaactcccacagcaagtatggaattccaacttcactgtgataattcatcttctatgatcctggttagcttacagttgtctaaacttcagcttgtcatctggtcattgatttccattcataattcacttgtttgaaatgtaggaagatttgaaaatttattgaagttttatgtgcagcttggctggtaatattaaaatgttccttctatctatatgtaaggtaccacaattaaggggacaggaggatagcaattagacaagttgttttactttgaataaaataactcatgtgctgagttctctgctaaatgaactgtaacgtgaaatcctttattgtatttctgattgaaattgcttgaacaataatctcctctgttatggtttcatttc

SEQ ID NO: 265713 - DNA, 415 bp, Zea mays
  unsure (1)..(415): unsure at all n locations
gggttgctcncaaggaatcatcatggatatcaactaccatttggattgtcttgctgatatgctttggaagcatcacaacatgcggctacattgtcatccaacttttcaaagtatcatatcaagatccaatctaccacgtgctattgaactcccccagcaaatcctggaaagatttgaaaatttattgaagtgggatgtgcagcttggctggtaatattaaaatgttccttctatctataggtaaggtaccccaattaaggggacaggaggatagcaattagacaagttgttttactttgaataaaataactcatgtgctgagttctctgctaaatgaactgtaacgtgaaatcctttattgtatttctgattgaaattgcttgaacaataatctcctttgttatggtttcatttc

SEQ ID NO: 265714 - DNA, 385 bp, Zea mays
cacaaggaatcatcatggatatcaactaccatttggattgtcttgctgatatgctttggaagcatcacaacatgcggctacattgtcatccaccttttcaaagtatcatatcaagatccaatctaccacgtgctattgaactcccacagcaagtatggaattccaacttcactgtgataattcatcttctatgatcctggaagatttgaaaatttattgaagttttatgtgcagcttggctggtaatattaaaatgttccttctatctatatgtaaggtgccacaattaaggggacaggaggatagcaattagacaagttgttttactttgaataaaataactcatgtgctgagttatctgctaaatgaactgtaacgtcaaatc

SEQ ID NO: 265715 - DNA, 426 bp, Zea mays
cgccaccgttcatgtgcccacgaccgccaccatgcatgtaccggaggtggtaatggagataaaagttgatatacacggtgtgcatgtgtttgtgccaaagcttctcgtacgtggtgttcgagtttctgtcaccccaaataagaaccgagctcttctccggatagaactatcttcacagggttccctgttcaagttaggatggcacgcatcatcatatctcggaaggaagccctcggggagtcttctccatgtatgggtggagttttgaaagaagccattatattattgctagtccttgttccctaccagatgttctcgttgatgcgtggattttatacgtgtacttgttctcttgtgctttccaccggccctgatgtcgtcccgttgtcaccgatgttcgtttgtgttcccctgtgtctttggttt

SEQ ID NO: 265716 - DNA, 788 bp, Zea mays
caggcagtgactctgaaagcgaatcagaaaaagttggcagcgctggaaagcttgcgaaggggactaagatacctgatcagctggtggagcaagagtagagtgatgttattagtccagctgatgccaaccgtcctgctgctattgtggggctgacatggggaggacagtgagtcaaagcctgcaccagggggggaaaactcagaacccgatacacaagtctcaccagacaggctattgcgagcagcccttttgaggagccgttatgctgatgtgattgtcaaagctcgtggcattcttagtcagggtggagacaaacaggaggagctggaaaagctacagaaggaagagaaagagcgcttgttggctgaaggtactgcagccatggaggcttgtagagccgaagctgaagctgaaaagaagcgtaaacggaattttgagagggagaaggctcgtcaggccctacaggagatggagagaactgtagaaattaatgataacctccatctcaaggatttggaattgcttggaacagccacaacagaacatattgtaagctctgttgatgagactagtccagaacgctctcatgatggcatggccggctatcatccaggagctgtcaatcctttggagcaacttggactgttcataaaggtagacgatgaggaagacgacgagcagtgttccctgcattaaagaaagaagagaaaggagaaatcagctgatggtgctgtgtttttccatgccctgtcacgggctaggggctggtgcgaactattgatcaaagt

SEQ ID NO: 265717 - DNA, 1078 bp, Zea mays
ctaggctgctgcaatgggagctgatcttattgtaatggcaataagtgcagtcgatggatggactgatgatgacactaaacttatggagcatgtttcggtaaataggaagtgctcaggttctgcagttccgatggttcttgtaatcaacaaggcagattgtgcgccatttcttcccggagaacagttcaaacaattcagtggcctcttcagaaaacacgtacagacatgtgcagtcaccggtaaaggcatttccgatttggagagcgctgtaatagaggtcaggggtattgagcatgtgccttctgagggacgaaggtggaccgtcaatcagaggcaatttgaacagctgttgaggactaaagaagctttcgcacgtctagagtcatcaatcaacgagcagttaccaatggacttttggactgtggacttgagggaagctgcgcttgcccttgcaacaatcagcggcgaggacatctccgaagaagttttgagtagcatattcagcaaattctgcatcgggaaatgatctcgcaagatgctgcatccagtagtttggagcagaagctttttccttgactgagaacaggaaccaacatgctgagtggcacttggttcgcggcatcagaatggtgaacaggcgtgcttgttctctgaggtgccacaaagaacacaagggaggtgaagccctgtccatcctagtgcacaccgtatagatgctaaggatggaaccatcgagttcctgtcttcgacgtcggatacgaatcctgtatactcgtggttgatatgagaaaattttattagacctaattgagaacgcaaacagtttcattcatccgtcttgctgtacgggacgcaacatacccgaattgtgaccaggagacattaaggtgccgtctggttcagacgttgtaacaggaatcgtaatgagatcccttaccggcggtaatgtaatggttattggctgatcccttaccggcggtaatgtaatggttattggctgtaattagattggatagtaccagatactacttgaaagagctcagtcaaataaaggtctcggttttatccgtttccccct

SEQ ID NO: 265718 - DNA, 923 bp, Zea mays
cacgcctataaagccaaccaacccggcggaggggggtcgaccggcgcgtagacaacccgtcagcccctctcgtttttcatccgccttcgcctccaaccgcgtgcgctccacgcctcctccaggaaagcgagagcttctgcataagaacaacaaatcaaaagcgtgatcagctcggtgccaacaaaacctcaacaaccaagtttcatgtctgatctcgacgtccagcttccatctgcctttgatccgtttgctgaggcaaatgctgaggactctggtgctggtcctggaacgaaggattatgtgcatgtgcgcatccagcagcgcaacggcagaaagagtctgactacagtccagggtctgaagaaagagttcagctataacaagatcctcaaggatctgaagaaggaattctgctgcaatggtactgtagttcaggacccagagctaggccaggtcattcagctccaaggtgaccagcgcaagaatgttgctactttcctagttcaggctgggattgcgaagaaagagaacatcaagattcacgggttctaagggacctgtaaatgcttgtgccctatattgtgtgcctccacatattggggagcttgaagcatcgacagttactagtcattgcttacttatataagaacataagtagtatttgctattgtcaagtgtgccttgcttgatgcaagttgtgttttcgtatcattattattatgcacggccatcgtacgtgtatggcttgtatgggttattgccaacttaataaaagcacactctgtttgcctataaaaaaaaaaaataaataacaaaaaaaaaaaaaaaaaaaaaaaaaaaaaaaaaaaaaaaaaaaaaaaaaaggggcggccgttttaaaggacccaggttaacttcccctggcttgcaacgtataagctttt

SEQ ID NO: 265719 - DNA, 420 bp, Zea mays
ccgacgtgtgggccgacgcgtggtttgcgctggtcacctgggagctgaatggtgctactgatcctagttcaggctgggattgcgcaagaaagagaacatcacgattcacgggttctaagggacctggagatgcttgtgccctatattgtgtgcctccacatattggggagctcgaagcatcgacagctactagtcattgcttacttatataagagcataagtcgtatttgctattgtcagagtgtgccttgcttgatgcacgttgggttttcgcatcattattattatgcacggccatcgcacgtgtatggcttgcatgggttattgccaacttaataaaagcacactctgtttggctctccgtcctgcgtagtaagaaacaaaaaggaaaaaaggcttttaaaggaacttgagatgctc

SEQ ID NO: 265720 - DNA, 752 bp, Zea mays
cctagctctgggtcattcagctccaaggtgaccagcgcaagaatgttgctactttcctagttcaggtattcagaatcttcagacctggccagctgaatactgttttaccataccgatagatgttccatctgttaatactgatcgtgcaattattacttgtcttggtaggctgggattgcgaagaaagagaacatcaagattcacgggttctaagggacctgtaaatgcttgtgccctatattgtgtgcctccacatattggggagcttgaagcatcgacagttactagtcattgcttacttatataagaacataagtagtatttgctattgtcaagtgtgccttgcttgatgcaagttgtgttttcgtatcattattattatgcacggccgtcgtacgtgtatggcttgtatgggttattgccaacttaataaaagcacactctgtttgcctaaaaaaaaaaaaaaaaaaaaaaaaaaaaaaaaaaaaaaaaaaaaaaaaaaaaaaaaaaaaaaaaaaaaaaaaaaaaaaaaaaaaaaaaaaaaaaaaaaaaaaaaaaaaaaaaaaaaaaaaaaaaaaaaaaaaaaagggggggccgtttaaaaggaccaaagtttacttcccctgcattccaacctaaaagtttttttatagggtccccaaaattaaattaaggggccgcgttttaaaaacgtataaattggaaaacccttggcttacccaaattaaatccctttgaaaaaaatccccttt

SEQ ID NO: 265721 - DNA, 680 bp, Zea mays
atggagtcttgcattcagctgaaggaagttcaggacgatggggacaatgacgatgatgatgatggtgctgaagatgttgatgacaacgatgaagaggaagacaccgaagatgatgatgaggattcggacgacgacgacgatgcgagagaagaaacagaagaggaatttctggaaagatatgcactagcggcggctgcgggcgagtcagtcgaggaaggagacattgatgaagagacccaagacatcgaattgggctctctggatgacgtggacatacagcaggtggttattcccctgatgcagaaacttcctgctctgcagcccgccggagcgtttccggacagcctggttgaaagaattgcagaaacattcccggaatacgaacagtttttgcaagcccttcgacgagcttagagtataggaaacatgtgcagatttttctctttttgttatatgtttatatttttttgtgtcatttttggtttgcttctaccttgagcgttgttccgagatgtgtttctttttgtcagatatggtgtttattttcccttgatgtgggtggcaagatatgggtgatgatgtacgtacgatggttacaagtatgttgtgagcataattgttatggcaacaaaaaacgggagcgaaggaagctgagacgggaggaagacgcggtatggaat

SEQ ID NO: 265722 - DNA, 1051 bp, Zea mays
gcctcatcgccccgaagagttgtggtacagttgtactgagctgagctgccggaggcagaataggagaggcaggcgatgacgatggcgacgaaggcggcgtgcgtgctggcggtgtgggtgctcgtcgcctcgggcctgtgcgacctgggctcagcgcgcgcgcccctgggcagcaagccgcagcgggagttcgactacttcgcgctctccctccagtggcccggcaccatctgcgcctccacccgccactgctgcgccaccaacggctgctgccgctcggagcctctccagacgttcacgatccacgggctatggccggactacgacgacgggacctggccgtcgtgctgccgccgcacccaattcgagatggacaagatattgccactgaaggaggtgcttgacaagtactggccgtccctctactgctccaaatctggaacatgcttcagcggcaagggactcttctgggctcacgagtgggagaaacatggaacctgctctgcccctgtggttcaggatgaattacagtatttcacccttgcccttgacctctactccaagtataacgttacggaaatgctgtcaagtggagggatacaggtttcaaatggtaaggaatatgcactgagcgatgtcatcgataccatcaaacatgcttttgggggatcgccacaaattgtttgcaagaggggttcaatcgaagaacttaggttatgcttcgacaaagaattgaagcctcgtgattgccttaccacttctttggcgaatggaagtgtatcaaaaagcaagcactgcccgcggtacatcaccttgccaacatatgatccccttgtgcttgccaattcaactgtagagatcatgacacagttcgatgaatttgaggtgcctgcagctctttatacagcttaaaatgcaattattgcaatagcagaaggtgctcgcgtgagcacctagaaccaggcacatttatcctgggatattcaatcatttgtacatgtacacttgaaagagaactgacatcttttcaacctgaaaatttataagcttt

SEQ ID NO: 265723 - DNA, 515 bp, Zea mays
gctgccggcggcagaataggagaggcaggcgatgacgatggcgacgaaggcggcgtgcgtgctggcggtgtgggtgctcgtcgcatcgggcctgtccgacctgggctcagcgcgcgcgcccctgggcagcaagccgcagcgggagttcgactacttcgcgctctccctccagtggcccggcaccatctgcgcctccacccgccactgctgcgccaccaacggctgctgccgctcggagcctctccagacgtgcacgatcctgtaagtgctcggcctttcgatttctgttcatatgttccgtcaggtgaatacgggatcggtttcgtctgaatttcgcgactgttgccgctcgagcagacgggctatggccggactacgacgacgggacctggccgtcgtgctgccgccgcacccaattcgagatggacaagatattgccactgaaggaggtgcttgacaagtactggccgtccctctactgctccaaatctggaacatgcttcagcggcaaggga

SEQ ID NO: 265724 - DNA, 487 bp, Zea mays
gttcaaagttatattgacaagggattcagagcgatcgaaaagctgttggaaggatgtgagagtaaatatgctgcgggagatgatgtccaattggcagatgtgttccttgaaccacagatacatgccggcataaatcgcttccaaatcgatatgtcgatgtacccaatcttggagaggctccatgatgcatacatgcaaattcccgcattccaagccgcgcttcctaaaaatcaaccagacgcaccttcatcataaacatcaatattatctcaataatttgcatgtcattttgtaataatttggatagggagccactgcttcctccatcccgttgtggatcaaaagggtgaacgattggcacttacctgcatggtccaatacctattatatttcttaaacagatactatttacggctattgtaatttaagcccaatacctgcatggtccgttttctaccacgcataagatatatcagttgtagggaac

SEQ ID NO: 265725 - DNA, 891 bp, Zea mays
cgtcgctccaggtcttctgcaagcagcaatcggagcgttctctacaggcgttcctgactgccaggagaggattgctaggcatgaagctgctcatttcctagtcgcctatttgattggcctccctatccttggatattctttggacatcggaaaggagcatgttaatttgatagatgagcaattacaaaagctaatatacagtgggcagcttgatggaaaggaactagacaggttagctgtagtttcaatggcaggactggctgctgaaggtctagaatatgacaaagttgtaggtcaatcagcagaccttttcacccttcagaggttcataaacagaactaagccgcaactaagcaaagatcagcaacaaaatcttaccagatgggcagtcctgtttgctgcatcacttctgaagaacaacaaagcagcccatgaggcgcttatgtcagcgatgtcccaaaaggcaagcgtgttggggtgcattgaagcaattgagaatgcatcctgatcaaaaatgtaacctgagtagtgtactagcatcactggactcgatattgtttcaccgcttctgattactactgctgttggttcgttgagcctgaggaatcgggtggaggagaggatcgaggcgtaggaaggagaaaccctaatcatcaccgtcgattcctgtacttctgtagacatcaaaaactcaggccacagggaagtcaagtgctcgaaactccaaagggaaggaaattcacacgatgacaaaaacaatagcctaatctgctgccatttactatcatacacgtgtgccccaaatattactcccatcttttgttttcgtatataatgcgcgattgtcctctccaacaccacactttgaccattaatatcttgtatgctgtc

SEQ ID NO: 265726 - DNA, 588 bp, Zea mays
aacccggaaagggaccagcagcgcaaaggtgagcgagctttccttcggaactcagaactctcgtgctcacctcatccgtccgacaaatccacacgaatcctctgattcagagcagggtgttggcattgatcagacgcctgccatggcggatcagttcgtggattcggcgaacaatgtgatcattgaggaggtgaacaagggcctgaacccaggaatggtggttctgcttgtggttgcaagcttcctgctgctcttctttgtggggaactatgcgatgtatgtgtatgcgcagaagacgctcccgccaaagaagaagaagccggtgtcgaagaagaagctgaagaaggaaaagctgaagcagggggtctctgcgccgggagagtaaacggccatgctgccgatcctcccgtccagagctcctattcacatgattattaaagaaaaaaatttatatatatataccagatggagccgtagtgttggagtaactttgttctgtagatgctctgtctttaatggtacatctgtattggagactttgagaccttgtttcagcaactgatgaatcttagcctgagccgagctagt

SEQ ID NO: 265727 - DNA, 797 bp, Zea mays
tttcactgctccagcgaaggcacagccgccaccggttcttgatctcccatcttcatcttcttcgtagcgccggcgctccatcttccgctccctcccttagtcgcgctcggcacgcgggtgacggcggcagtggcggcactcaggatcgggctctcagcgacggcatcagcggtttcccctcccgcttctctccagtcgcctcgcgccctcgcctccggtcctccgcacaccggccggtgaccctccatatagggtgtgagactaccaaaactcgaaaatgaacaagggaaagatttttaagctagccaagggattcagaggaagggcgaaaaattgcataaggatagcaagagagagggtggagaaggcgctgcaatattcatacagggatcgacgcaacaagaagagagacatgcggtctctttggattgagcgcatcaatgctggtacacgcctccatggggtgaactacggcaattttatgcatgggttaatgaaggagaacatccaactcaacaggaaggtgctctcggagctgtcaatgcacgagccatacagcttcaaggctcttgtcgatgtgtctcgcaatgcatttcctggcaacaggcctgttcctgccaaggaggggctagcgagcattctgtaaacgttttcttcccaataattaaacttgatggtttacctctacatctgaaagtgacctgtctgcttgtaacgtgacgaggaggttgtcacgggcattgcacgtgttattcctctatttttccccatctatctaattgcatgctttgtacctc

SEQ ID NO: 265728 - DNA, 870 bp, Zea mays
cggaattcccgggtggacccacgcgtccgcccacgcgtccgcccacgcgtccgcttcgtagcgccggcgctccatcttccgctggctgccttagtcgcgctcggcacgcgggtgacggcggcagtggcggcactcaggatcgggctctcagcgacggcatcagcggtttcccctcccgcttctctccagtcgcctcgcgccctcgcctccggtcctacgcacaccatccggtgaccctccatatagggtgtgagactaccaaaactcgaaaatgaacaagggaaagatttttaagctagccaaaggattcagaggaagggcgaaaaattgcataaggatagcaagagagagggtggagaatgcgcttgcatattcatactgggatcgacgcatcaagaagagagacatgcggtctctttggattgagcgcatcaatgctggtacacgcctccatggggtatgtatcgtttacaattgaggctcattttctatccttggcccaaagtctcttttcatggtgacgctaaaacaaacaattctcagaagacaccagctttgttcatctcatgcaagtagaatgggtcgccagagctttggaatgtttcgaaacttaggcagtgcagtgcccatgcttattatagtaccttggttgtttgtccaggtgaactacggcaattttatgcatgggttaatgaaggagaacatccaactcaacaggaaggtgctctcggagctgtcaatgcacgagccatacagcttcaaggctcttgtcgatgtgtctcgcaatgcatttcctggcaacaggcctgttcctgccaaggaggggctagcgagcattctgtaaacgtttcttcccaatattaaacttga

SEQ ID NO: 265729 - DNA, 712 bp, Zea mays
tcgggagcacaagaagaaggtggaggccaagaactcgctggagaactactcctacaacatgcgcaacacgatcaaggacgagaagattgcgtccaagctgccggccgatgacaagaagaagatcgaggacgccatcgacgcggccatcagctggctggacgccaaccagctcgccgaggcggacgagttcgaggacaagatgaaggagctggagagcctctgcaaccccatcatcgccaagatgtaccagggcgcgggtgaagacatgggcggcgctggcggcatggacgaggacgcccccgctggcagcggcggccctggccccaagatcgaggaggtggactaagcggtttgttgtcagtcttgagcgtgctgcagttgctggctggcccagtcgctgccgcgagttatcgtcgtcggtcggtgcggtgtgtccgcttaaactttatttgtggtgggctggtacttttgtggtggttattttttttggacctcgtgatagtcggtcggttccatgttatcgcggctactggcaaaccttaagtgatacggtaattcttcttttcggtatttgtttctgcaaaaagctggcatcgaatttgatttttgagcttgcgattctttgttaatttcacccttttgccagttagggggcccaaaacccgcaagaaaaaaaaaaaaaaaaaaaaaaaaaaaaaaaaaaaaaaaaaaa

SEQ ID NO: 265730 - DNA, 462 bp, Zea mays
  unsure (1)..(462): unsure at all n locations
gacgcgtggcgtgacgcgtgggcggacgcgtgggcggacgcgtgggcggaccgtgggcggaccctcggcaaccccatcatcgccaagatgtaccagggcgcgggtgaagacatgggcggcgctggcggcatggacgaggacgcccctgccggcagcggcggccctggccccaagatcgaggaggtggactaagcggtttgttgtcagtcttgagtgtgctgcagttgctggctggcccagttgctgccgagagttatcgtcagttggtgcggtgtgtccgcttaaactttatttgtggttggttggtacttttgtggtggttatttttttggacctcgtgatagtcggtcggttcaatgttatcgcggctactggcaaaccttaagtgatacggtattcttcttttcggtaaaaaaaaaaaaaaaaaaaaaaaaaaagaaaaaaaaaaaaaaaaaaaanaaa

SEQ ID NO: 265731 - DNA, 850 bp, Zea mays
gacccacgcgtccgcccacgcgtccggcagctgtcgatccaattgtcacttgctctccctccaacaagctaattaaggccggtcatccctcttctagctcgtttcattatccatggcggaggagaagcaccaccaccaccacctgttccaccacaagaaggacgaggagcaggccgccgccggcgggtacggcgagtccgccgagtacacggaggccacggtgacggaggtcgtgtccacgggcgagaacgagtacgacgagtacaagaaggaggagaagcagcacaagcacaagcagcacctcggcgaggccggcgccatcgccgccggcgccttcgcactctacgagaagcacgaggcgaagaaggacccggagcacgcgcaccgccacaagatcgaggaggaggtcgcggcggcggcggccgtcggctccggcggcttcgccttccacgagcaccacgagaagaagaaggaccacaaggaggccgaggaggccggcggcgagaagaagcaccacttcttcggctgattgatcctcccgtatcgtcgtccctccccgtgtgctacgcgtgcgtgtgagagtgatatcgagcgcccgccgtgttgtgcgcgcgtacgtatgtatgcgctcgtgtgatgcacgaataagcgtggctacgtaatctatcgtatgtatacgtgtgtgtatgcatgtgcttgtgtatgatcgtggtacgaggaccgaaaaaatgtatgcaactctgatttacttacatgtttagttgtttacgtttctccaaaagtattagtacccattatgttatattttactatattatattttattgattattaaactatgtatgggtgg

SEQ ID NO: 265732 - DNA, 960 bp, Zea mays
gctatagctagccagccatcctactgtcacacacacacacacacacagacaagtggtttccaaagccaagtgtgtgtactagcaaccagctagctcgggcggcagcaggcagccatcatgtcggaggagaagcaccaccacttcttcaaccaccacaagaaggacgaggagcagcccgccggcgagtacgggtactccgagaccgaggtggtcaccgccaccggcgagggcgagtacgagaggtacaagaaggaggagaaggagcacaagcacaagcagcacctcggcgaggccggcgccatcgccgccggcgccttcgcactctacgagaagcacgaggcgaagaaggaccccgagcacgcgcacaggcacaagatcacggaggaggtcgctgccgcggcggccgtcggcgccggcggctacgtattccacgagcaccacgagaagaagaaggaccacaaggacgccgaggaggccagcggcgagaagaagcaccaccacctcttcggctgaccgtagtaccggccggcgcgcgaccgagctagctagctccggcgcacacaaccacacacctgtttaattctgtactgcatgcgtgtgtaatttgatggttcacaataatgagtccctctccggaccttggtagctgcttgcttgtggtgagtgagagtgtgagactgagggagaagaggtggtgggcgtggggctacgtcgagagaggcgtgttcctgtaatcctgtactcgcttcgttttctctgcatgcgtctataattgtgttcaataataagtgagagcggtgtgatgtgtggctccccttgtcaggctcatgtttatccgtattgaatcctggcaccatgcatgactgaggatctggatgtctatgaagcaccgtgtatctatcatcacttttgcaaaaaaaatattcttatatttcttgaagtagcatgtcatgattcatg

SEQ ID NO: 265733 - DNA, 462 bp, Zea mays
cccacgcgtccgcagctgtcgatccaattgtcacttgctctccctccaacaagctaattaaggccggtcgtcatccctcttctagctcgttttattatccatggcggaggagaagcaccaccaccaccacctgttccaccataagaaggacgaggagcaggaggagcagctcgccggcggcgggtacggcgagtccgccgagtacacggaggccacggtgacggaggtggtgtccacgggcgagaacgagtacgacgagtacaaggaggagaagcagcataagcacaagcagcacctcggcgaggccggcgccatcgccgccggcgccttcgcactcgtacgtagtcctccgtccgatccgatcctccttgagtagtatatacatacataaatgaacgacgagtacgaataatatatatatattaatcgaacgaactgaatgacggtcacctcgtgtgacgt

SEQ ID NO: 265734 - DNA, 468 bp, Zea mays
ccgatcgatccgatcctccttgagtagtatatacatacatgaacgcgataacgaataatatattaatcgaacgaactgagtgatgatcacgtatcacctcgtgtgacgtggacatgcacagtacgagaagcacgaggcaaagaaggacccggagcacgcgcaccgccacaagatcgaggaggaggtcgcggcggcggcggccgtcggctccggcggcttcgccttccacgagcaccacgacaagaagaaggaccacaaggaggccgaggaggccggcggcgagaagaagcaccacttcttcggctgattgatccctcccgtatcgtcgtccctccccgtgtgctacgcgtgcgtgtgtgagagtgatatcgagcgcccgccgtgttgtgcgcgcgtacgtaccgaattttttgtattttagccccctaaactgaagtaaattcacgtttagacctaaaaaaattttaa

SEQ ID NO: 265735 - DNA, 721 bp, Zea mays
  unsure (1)..(721): unsure at all n locations
atcggtcctgaattcccgggtcgagccacgcgttcggccaagccttccaaaaaaggaggagatggagcacaggcccaagcagcacctcggcgagggcggcgccatcgccgccggcgccttcgcactctacgagaagcacgaggcgaataatgaccccgagcacgcgcacaggcacaagatcacggaggaggtcgctgccgcggcggccgtcggcgccggcggctacgtattccacgagcaccacgagaagaagaaggaccacattgacgccgatgaggccagcggcgagaagaagcaccaccacctcttcggctgaccgtagtaccggccggcgcgcgaccgagctagctagcttcggcgcacacaaccacacacctgtttaattctgtactgcatgcgtgtgtaatttgatggttcccaataatgagtccccctccggaccttggtagctgcttgcttgtggtgagtgaaagtgttagcctcagggaaaaaaggtggtgggcgtggggctacgtccaaaaaggcgtgttcctgtaatcctggactcgcttcgttttctctgcatgcgtctataattgtgttccataataagtgagaacggtgttatgtgtggctccccctgtcaggctcatgtttatccgtattgaatcctggcaccaagcatgggttaggtaaaaaaaacaaaccaaaaaaaaaaaaaaaaaaaaaagataaaagggcn

SEQ ID NO: 265736 - DNA, 401 bp, Zea mays
  unsure (1)..(401): unsure at all n locations
gattgatcctcccatatcgatcgtcgtttttccccgtttgctacgcgtgcgtgtgagagggatatcgagcgccggccggcctgcacgcccgccgtgttgtgcgtacgtacgtacgtatacatgtatgtatgtatatgcgcgcgtgtgatgcacgaataagcgtggctacgtaatctatcgtatgtatacgtgtgtgtatgcatgtgcttgtgtatgatcgtggtacgaggaccgaaaaaatgtatgcaactctgatttacttacatgtttagttgtttacgtttctccaaaagtatctgtacccattatgttatattttactatattatatttcattgattattnaaaaaaataaataataactgaaaaaacaggattggaaattaagtaaaatggatacg

SEQ ID NO: 265737 - DNA, 535 bp, Zea mays
  unsure (1)..(535): unsure at all n locations
cgcgtgttcctgtaatcctgtattccctcagtctcacactctcactcaccacaagcaagcagctagctagctccggcgcacacaaccactaccctgtttaattctgtactgcatgcgtgtgtaatttgatggttcacaataatgagtccctctccggaccttggtagctgcttgcttgtggtgagtgagagtgtgagactgagggagaagaggtggtgggcgtggggccggctacgtcgagagaggcgtgttcctgtaatcctgtactcgcttcgttttctctgcatgcgtgtataaattgtgttcaatcnaaaaaaaaaaaaaaaaaaaaaaaaaaaaaaaaaaaaataaaaaaaaaaaaaaaaaaaaaaaaacaaaaaataaaaaataataaaaaaaaaaaaaaaaaggggggggccgttttaaagaaacaaagcttacaaacccgtgcatgcaaaagaataacttttttataggggaacctaaattaaattaactggccggcgttttaaaaagtctggactggaaaaaccct

SEQ ID NO: 265738 - DNA, 416 bp, Zea mays
caaagaaggacccggagcacgcgcaccgccacaagatcgaggaggaggtcgcggcggcggcggccgtcggctccggcggcttcgccttccacgagcaccacgagaagaagcaccacttcttcggctgattgatccctcccgtatcgtcgtccccccccgtgtgccacgcgtgcgtgtgtgagagtgatatcgagcgccccccgtgttgtgcgcgcgtacgtatgtatgcgctcgtgtgatgcccgaataagcgtggctacgtaatctatcgtatgtatacgtgtgtgtatgcatgtgcttgtgtatgatcgtggtacgaggcccgaaaaaatgtatgcaactctgatttccttacatgaataaatgtttacgttaccaacccaaccaaaaaaaaaaaaaaaaaaaaaaaataaaaa

SEQ ID NO: 265739 - DNA, 1412 bp, Zea mays
  unsure (1)..(1412): unsure at all n locations
attggtagcggctcncccagctctggaccttctcaaacccttccccgtgggccgtggccgccgtctgcctgtctccttccactcgccactccgatttccctcggtcagacgccgaagccgaaccctgactccaattctctcgtgcgagtgacatctaggtttccagacgccttcggtgagtacagggaaggaagtcgccatggctgacgacgaacaggcggagaagaaggaggaggtccccgagcttgctccttttgacccaaccaagaaaaagaagaagaagaaggtggtaatacaagagccatcagatgaggtggataacttggcagagaagacagagagcttgactgtaaccgagtctagtgagccaagctttgcgggcatgaaaaagaagaagaagaaacatgtggaacttgattcttctcttaccgagaccggagatgttgatgacacaggagacgatcaagttagagaggatgaagaaggagaagggattgtgctcgctggtgccgctgccaccagatacccttgggaaggaactgacagagattataagtatgaagagctgcttggcagagtattcaacattttgcgtgagaacaacccggatcttgctggtgatagaagaagaactgttatgaggccccctcaagtcctcagggaaggaacaaagaagacagtttttgtgaacttcatggacttgtgcaaaacaatgcataggcaaccagaacatgtgatgatgttcttgcttgctgagatgggaacaagtggatccctggatgggcaacaaaggttggttatcaaaggaagatttgcaccaaaaaatttcgaagcgatacttaggagatatatcaatgaatatgtcatatgcaatggttgcaagagtccggataccattctttctaaagagaacaggttgttcttcctccgatgcgagcagtgtggttcgtcgaggtctgttgctcccatcaaggctggattcgttgcccaagtgggccgtcgtaaggctggatcttaagctacctactacttgcctgaagtcgcttcccgatgaagacaatgcaaactagtttgctggtccacaaaaatcattgttgcactttcccttgtgcctacacagttcactggatttctgctgttcgctatacttggattggtgctgtgaatttatttcgtgtgatgagagaatttttgtttgcggctcacttgtgtttactacgtttgttttgctcgtgattttgctgtggaaggcactgtcgggagcttcccgagttaggacgagtaacaaaaaaacgtgttgcttccatcagataaaaagcaaggctgcagcattctgaactgttcctcagcttcttttccctgtacttatttgggtataaaaagctaagaagatgtgattttatgcttttggt

SEQ ID NO: 265740 - DNA, 502 bp, Zea mays
accggttcggaattaccgggtcgacccactcgtccggctaaacgcctgtctgcaattcatgcacatgattgcacactggaacagtgggatattgggtctgctcagttgaagttggatgatatactgaattcctcttcactagatggtgcttgtgacaagatcaaaagcttagccaaggctaaagaacttgattcatctctaattcttctcattaacagagcttgggctgctgcaaaagaatctacaactatgaatgataaggtcaaggacataatgtatcatatttatacaactacaaaagaaagcctcaagagcatctcacctccggagatgaagctgctgaagtatttgctgaatattgaagagcctgaacagagatttcgtgctcttgcaactgctttctctcccggagatgggcgtgaagctaacgatgaagatgctctatacacgactcccagcgaactccacatatggatcaaaatgcttctcgactcataccatc

SEQ ID NO: 265741 - DNA, 899 bp, Zea mays
accacgcgtccgcccacgcgtccggagagcacgagacgcccctctgcttccttttctctgtcgctcaaaagttgctggagccctcttctctctctccgacccccaaccatggatgaggcgcaagttgtggagtcaaaggatggaaccatctcggttgcttctgcatttgctggttatcaggaagctgtgcaagacagggatcacaaattcttgacaaaagcagtggaagaagcatatcgaggagtcgattgcggtgacggaggtccattcggagcagttgtcgtctgtaatgacgaagtagtagtcagctgccataacatggttctgaagcacactgaccctactgcgcatgctgaagtaactgcaattagagaggcttgcaaaaagcttgggaaaattgagctctcagactgcgaaatttacgcgtcctgcgagccatgcccaatgtgctttggtgcagttcatctctcccgaatcaagaggctggtttatggggccaaggcagaggctgccatcgccattggatttgatgacttcattgcagatgctctgagaggcactgggttctaccagaaggccaacttggagatcaagaaagctgacggcaatggtgcattgatcgctgagcaagtctttgaaaagactaaagagaagttccagatgtactgatgctgagcagaagagagatctcagatttgtacaatgcttactcataaggacaagaaataatacagtgcccaaatgtccattgtttcgggaaaaaaatctcaattccactgttcaacattttgatgatgcctgaatttcttgttaacagacacaagattgatatttgctgttaaatgtgcagttgatggaatattctttctccctgtctgatggtgccctttatctcattt

SEQ ID NO: 265742 - DNA, 439 bp, Zea mays
gcacgagacgccagcgccatccaccgcggcaaaagccgagacgacccaggaatctcggcactgtcgcgtgccgtgcccgtgcgtcgctcccctttctctctcgctcaaaagttgctgctggagccatctcccctctctccgacccccaaccatggatgaggcgcaagttgtggagtcaaaggatggaaccatctcggttgcttctgcatttgctggttatcaggaagctgtgcaagacagggatcacaaattcttgacaaaagcagtggaagaagcatatcgaggagtcgattgcggtgacggaggtccatttggagcagttgtcgtctgtaatgacgaagtagtagtcagctgccataacatggttctgaagcacactgaccctactgcgcatgctgaagtaactgcaattagagaggcttgcaaaaagcttgggaaa

SEQ ID NO: 265743 - DNA, 312 bp, Zea mays
cccacgcgtccgcccacgcgtccgcggacgcgtggcgagacgcagcgccatccatcgcggcaaaagccgagacgacccaggaatctcggcaccgtcgcccccctttctctctcgctcaaaagttgctgctggagccctctcccctctctccgaccaccaaccatggatgaggcgcaagttgtggagtcaaaggatggaaccatctcggttgcttctgcatttgctggttatcaggaagctgtgcaagacagggatcacaaattcttgacaaaagcagtggaagaagcatatcgaggagtcgattgcggtgac

SEQ ID NO: 265744 - DNA, 1438 bp, Zea mays
ttggttgtttcccagctaacctggaagactcaagtttacatgggttgcaggcttacagggttttcatttccatcgcttcgacccttggggacggtttatacaacttcattaaggtgctgatccgcacaattgcgggtttcatatcaatggtgcagcaaaattcaaaaagcatgcttcctgtttcggacaatggcagttccatgtccagtatggaggctgtatcctttgacgatgaacgtcgcattgagaattttctgaaagatcagattcccaagtcagttgcatacgggggctatgttgcagttgctgctatatctattggcacccttcctcagatcttcccgcagctcaagtggtactacattttagtagcctacgtcgtggcacctgtgctggccttctgcaatgcttatggaagtggcctcactgactggtctctcgcactccacctacggcaagctcgctatcttcgtgttcggtgcatgggctggcctctcacacggtggcgtgctcgttgggctcgcagcttgtggtgtcatgatgagcatcgtgtcgaccgcctcagacctgatgcaagacttcaagaccgggtacctgacgctggcgtcaccgaggtctatgttcatcagccaggtgattggcaccggaatggggtgtgtcatcgggccctgcatcttctggctcttctacaaggcgttcggtgacattggcgagagcggcaccgagtacccggcgccctatgccatcgtgtaccgcaacatggccatcctcggcgtggatggcttccgctcgctcccgaaaaactgcctcaccctctgctacattttccttgcggcagcgatcactatcaaccttgtcagggacctgaccccctacatggtgtcgaggttcatcccgctgccaatggcaatggcgattccgttctacatcgggtcctacttcgccattgacatgtttctgggcagcgcgatcctcttcgtgtgggagcggctgaacaaggcgaaagcggacgcattcggacctgcggtcgcgtcggggctgatctgcggagacggcatctggaccctgccgcagtccattctggccctcgccaaggtgcagccccccatttgcatgaagtttttgtccagatcgaccaatgccaaggtggacagcttcctcggcttgtcatgattttacacagaatggcaagtagacacgccctcatcctgtaattattggtgcaagatgcaatcaccaggctacagctctgtaaaagagaagaggttttgctgtggagtgaccaaagctttgtccgtgtagtctgtgtcaagaggaaaatactcaatggccctctgcctttttttgtgcaattattaactagcgtattcacagttataggtatttttgaaatgtgaaacgttcactacaaatttttttttaccgaatggagcttttg

SEQ ID NO: 265745 - DNA, 996 bp, Zea mays
agcccacgcgtccgcccacgcgtccgcccacgcgtccggacacagcagctccgctcgtcgatcagctctcggctgaccactcatcgccagtgggtgcctgccgaccaggtctcgccgccgccaccgccgcggtagagaggggagggagagggggaaaaaactggcccagatcgagaggtacagcacgaaaaagagaggcaagagagataggggaccggagggcggcgggccggggcccaagaccgaggggctcgtgcgcaggaagctgatgaggctcctgtcgctcgtccccttcggctgccgtgctggacccatcgacgacgcgccgccgcccgtggaccacgccgccgccgcgaggaggcgccggaggaggagggccaacagggccgcccagctgctgggggctgctgcgggtgcgccgcagcagtggcgcccctcgctcggcgacatctgcgaggagtacagcagcagcaccgacgccgtcaaggtcaggaaggcggcgtcctgggacctcgcccgggcgctgccccgcgcgcacggcggcaagcagtaccggcaccttgagggcgcgtcgtccctgccagcgttcgcgccgacggcgttcctgttctgatcatggcggtcggcgacggcggcgactcgtcgtcatccacgaggacgacgacggcggtgaagacaataagaaccaaccaaaaccactacgcgaagcatatatacagattactgtcaacgtattgtagaaccaaggatctatgtatatatatatgtgtgcgtccatatcatcatcggaccggaataaagctagcaatctctcttcttcacgatcgagagatagcgcgcgtgcgtgtaattaagtattatagatgcatgcatgatgcatgcgtgtgtgtatctatatatcatgtgatggtttgtatatgagctagctatagctatagctagaatcgtgtaatagtatactacaaactaagctaatacaatatccaagtttgctat

SEQ ID NO: 265746 - DNA, 443 bp, Zea mays
cggacgcgtgggcggacgcgtgggcggacgcgtgggcggacgcgtgggcggacgcgtggggacggcggcgactcgtcgtcatccaccacgacgacgacggcggtgaagacaataagaaccaaccaaaaccactacacgaagcatatatacagattactgtcaacgtatggtagaaccaaggatctaggtatatatatgtgcctccatcatcatcggaccggaataaagctagcaatctctcttcttcacgatcgagagatagcgcgcgtgcgtgtaattaagtattatagattactacatactatatatatgtgcatgcatgatgcatgcgtatgtgtatctatatatcatgtgatggcttgtatatgagctagctatagctagagtcgtgtgtaatagcatactacaaactaagcttatacaatatccaaagttgtatattc

SEQ ID NO: 265747 - DNA, 444 bp, Zea mays
cccacgcgtccgtttagaaactatgacagcaaatggatttgaaattgatgttgtcacatgtggaacactcattaatggtctatgcaaggctggtaggactcaggttgctttgaagcttttaagaggcatgcgaattaaagggattagacctactccaaatgcttacaacccggtgatacagtctttgttgagacggaatgatttaagagatgctcttagtcttttcagggagatgactgaggtgggtgagcctcctgatgccctcacatataagattgttttccgtggtctgtgtcgtggtggagggcctatcaaagaagcttttgatttcttggtggagatggtgaataagggtttcatgcctgagttttcatcctttcgaatgctagctgaaggtctattgaatctgggcatggatgattatcttattagtgctattgaact

SEQ ID NO: 265748 - DNA, 684 bp, Zea mays
  unsure (1)..(684): unsure at all n locations
cccacgcgtccgcccacgcgtccgcccacgcgtccgcccacgcgtccgcggacgcgtgggctttgcggccggtctctgctttcagattcatttctaaccagggttcctccagcccagccgccgccactgttgaggagctcacatcgcctcgacacaacacggtctctggtttcaacgtataataactgggctgcgagcactatatggatgatggcttcacgaggcaccagtgccgtgctttcaagggctgctcggatgaggcaaaaactgcagtctgccttggaggccagtgccctagatattgaagacgtttcttaccaacatgccgggcatgcagccgtcaaggacaatgcgaacgagacgcacttcaacatcaaggttgtttcaccaaaatttgaggggcagaacccttgtgaagcgtcacaggatggtgtatgatcttctgagggatgagcttagctcaggcctccatgctgtctccattgttgcgaaaaccccgaaagagttagggtcttgattgtataacaatgttgaataagccctgtcctatgtttcgaaataagtctgtcgtagcagccatgaccactgattgccaaaacaatgtcaccggcatgctcttcttattaacggctggtccccggaatattacaaaaaaaaaaaactaaaaaaaaaaattaaatanaa

SEQ ID NO: 265749 - DNA, 202 bp, Zea mays
cgtttctaaccagggttcctccagcccagccgccgccgccaccgttgcggagctcacatcgcctcgacacaacacggtctccggtttcaacattcatttctaaccagggttcctccagcccagccgccgccactgttgcggagctcacatcgcctcgacacaacacggtctctggtttcaacgtataataactgggctgcga

SEQ ID NO: 265750 - DNA, 1052 bp, Zea mays
ccggcgtcagagcgtcccgtcacgcgtccggtcacgcgtccgctcaaattgcagctgatcaacagctctatgcaatggtccttcctggtttttggatggatgttggtcagccaagagactacattactggattgcgtctttatctagactcgcttaggaagaaatcggctgccaggctagctgctggagcacatgttgttggcaacgtgctggtgcatgagagcgccaagattggagaaggttgcctgatcggtcctgatgtcgccattggacctgggtgtgtcgtggaggatggcgtgaggctttcccgctgcactgtcatgcgtggcgtgcgtatcaagaagcatgcctgcatctcaaacagcattatcgggtggcactcaactgttggtcaatgggcacggatagagaatatgactatcctgggggaggatgttcatgtgtgtgatgaggtgtacagcaatggcggtgttgttctcccacataaagagatcaagtcaagcattctgaagcctgagatcgtcatgtgagctctccagttttagctacagtacattcttaacttctttgacgaagggaggcttgcagatccccttttataaacgatattgcttggtatcttcgatttaatgcaaacagcttcatacttggtctcttgttaaactattgacaatgtatcttgttttttgttgaaaagtttagtacttgagtgtcaatcatacgtattcgcttgctaaactattgacaatgtatcttgttctttgttgaaaagtttagtacttgagtgtcaatcatatttcagagtcattgtgatatactgagcttggaggttttggccattgatctgcagaagttcaatacaattggaagaataagttaaaaaaaacgtggtccaaagtaaccttcagcagtaatgtttgtgtgccaaatgctcttccggagaattgtggtgatgcaaaccttgtaccactgaatatactgtcaatctgctatcttttccgtggcctctaactcttagagtgtgtttggtttgagttgaggaattacttcat

SEQ ID NO: 265751 - DNA, 1000 bp, Zea mays
agccaatcgccaagccaagccaagccagaagcggcagcctcgcgcagcggtctggtctctcttgtgggtggtgcccttcttcgccggtggccggaaagggcagtggagtgggaccgctcaaggagaggccggcgtccccaagtctcacttccgccgtccactttccccctgtagggatcgagggaggaaggaaaggaggtgcttcacaatgaaggccctcattcttgtcgggggtttcggaacccgccttcggcctttgactctgagcttcccgaaacccctcgtggattttgcaaacaagcccatgattctgcaccagatcgaagctttgaaagaagttggggtcacagaggtggttttggctatcaactaccgcccagaggtaatgattaatttcttgaaggactttgaggataagcttggcatcacaattacatgctcccaagagactgagcccttaggaaccgctggccctcttgctctagcaagggacaagcttgcggatggatctggccagccattctttgtcctcaacagtgatgtcataagcgaatacccatttgctgaactcatcaaatttcacaagtgtcatggtggtgaggcaacaattatggtcactaaggtggatgaaccatcaaaatacggtgttgtggttatggaggaggcaactggcagggtggaaaggtttgttgagaagccaaaaatatttgtgggtaacaagatcaatgctgggatttacttactgaacccatctgtccttgaccgcattgagctgaggccaacatcaattgagaaagaggtcttccctcaaattgcagctgatcaacagctctatgcaatggtccttccaggtttttggatggatgttggccagcctagggactacattactggcttgcgtctttatctagactcgattaggaagaaatcagctgccaagctagctactggagcacatgttgttggcaatgtgctggtgcatgagagcgccaagattgga

SEQ ID NO: 265752 - DNA, 563 bp, Zea mays
ctcaactgttggacaatgggcacggatagagaatatgaccatcctgggcgaggatgttcatgtgtgtgacgaggtatacagcaatggcggtgttgttctcccacataaagagatcaagtcaagcattttgaagcctgagatcgtcatgtgagagttctccagttttaactacagtacattcttaagttcttcgactaagtgaggattgcagatccccttttataagtgatatctattggtatctttggcctaattcaaacagcttcagacatgttcgcttgctaaactgttgacaatgtatccttgttctttgttgaaaagttttgtacttgtagtgtcaatcatatttcacaaagtggttgtcatataatactgagaggttttggacccttgatctgcagaagttcaataccatagtagcaagaataagtttatttttaaatgttgtccaatgtaactttcagcagtaatgtttgtgtgctaaatgctctcccggagaaatgtacacgctgcccacgtgtgatgtaacttaatatgttcacgcatttaatcttgtaccaatg

SEQ ID NO: 265753 - DNA, 1730 bp, Zea mays
acccacgcgtccgcccacgcgtccgggccgccaccgaggtcgggtgcctcgtcgtcaacgcgcccaccgccaacaccatcgccgcggccgagcacggcatcgcgctgctcgcctccatggcgcgcaacgtctcgcaggcggacgcggcgctcaaggccggtaaatggcaaaggaacaagtacgtgggggtttctctggtgggaaagaccctggccgtcatgggcttcgggaaggttgggtcagaggtagcgaggcgagcgaaagggcttgggatgcacgtgatagctcatgatccctacgcccctgccgaccgggcccgtgccctcggggtagagctggtttctttcgacgaggccatcgcaagagccgacttcatctccctccacatgccgctgataccgacgacgtccaagatcttcaacgacgagtccttcgcaaagatgaagactggtgtccggatcatcaacgtggccaggggtggagtgatcgacgaagacgctctggtcagggcgcttgactccggcaaagttgctcaggcggctcttgatgtcttcaccgtggagcccccgcccaaggacagcaagctggtgttgcatgagaatgtcactgtaacaccccaccttggagctagtactgtcgaggctcaggaaggcgtcgctatcgagattgcggaagccgtggttggtgcgctgagaggggagctcgcagcaaccgctgtgaatgcgcccatggtcccagctgagatcctgtcagagctggctccatatgtttctctggccgagaagctcgggaggctggcggtgcagctcgtggccggcgagagcggcatcaagggcgtgaaggtggtgtacaccacagcgcgtggccccgacgacctggacactcggctcctccgcgcgatggtgaccaagggcctggtggagccggtgtccagcacgttcgtgaacctggtgaacgcggactacacggccaagcagcgcggcctccgcctcacggaggagcgcgtggcgcacgacagccccgcggcggaggcgccgctggagtccgtccaggttcgcctctcgcacgtgcagtccaagttcgcgggtgccatcagcgacggcggggacgacatcgtcctggagggccgggtcaagtacggcgtgcctcacctcaccctcgtggggccctacgaggtggacgtcagcctggagggcaacctgatcctgtgccgccagatcgaccagcccgggatgatcggcaaggtcggcaacatactcggcgacacgaacgtgaacatcaacttcatgagcgtcggacggacgttcaggggcaagcaggcgatcatggccattggcgttgacgaggagcccgacaaggacacgctggagaagatcggggccattccggcgatcgaggagttcgttttcctcgaactatgatggctagcagcgagttttctctaggattgatattttgttatagtacgtactgaactggagtttgacgtcttccgctctggtctgtctgtctgtttggtgacctctacattttttatgcggggagaagggaagcaatatatattgtaagagggtgccttggcttgccccctgcctaaataagaggtgtgtgccgtttgtttatctgtaaactgtgtatgtgtatgtgcttaatgcgtgattctaattaagcacatcatcattgcgtctgttaaaaataaaaaaagaaaaataaaaaaaaaaaaaaaggaa

SEQ ID NO: 265754 - DNA, 779 bp, Zea mays
gcggtttactcgatccggagcgaggaggcgacaacatggacttggtaggatccacctcacgaccaacccgctagggaggcgctgctggaagccagcagaggcctccctcctccgacgcaggaggaagatgctcacgaaatttgaaactaagagcaactgggtcaagggcttcgccttccactcgtgtggtcgatggacctaaccttggtggggccctacgaggtggacgtcagcctggagggcaacctgatcctgtgccgacagatcgaccagcccgggatgatcggcaaggtccgtaacatactatgcgacacgaacgtgaacatcaacttcatgagcgtcggacggacgttcaggggcaagcaggcgatcatggccattggcgttgacgaggagcccgacaaggacacgctggagaagatcggggccatcccggcgatcgaggagttcgttttcctcgaactatgatggctagcagcgagttttctctaggattgatatttgttatagtacgtactgaactggggtttgacgtctcatgtcatggccacagggaggaacctgatccgctctggtctgtctgtctgtctgtctgtttggtgacctctacattttttatgcggggagaaggaagcaatatatattgtaaaaggtgggtgccttggcttgcccccctgcctaaataagaggtgtgtgccgtttgtttatctgtaaactgtgtatgtgtatgtgcttaatgcgtgattctaattaagcacatcatcattgcgtctgcaatg

SEQ ID NO: 265755 - DNA, 317 bp, Zea mays
ctagttctagatcgcgaacagccgccctttttaattttttttttttgttttatagtacgtactgaactggggtttgacgtctcatgtaatggccacagggaggagaggaacctgatccgctctggtctgtctgtctgtcagtctgtttggtgacccctacattttttttgcggggagaaggcaagcaatatattttgtaaaaggtgggtgccttggcttgcccccctgcctaaataagaggtgtgtgccccccgtttgtttatctgtaaaataaaaaaaaaccccaaaaaaaaaaaaaaaaaaaaaaaaaataaaaa

SEQ ID NO: 265756 - DNA, 715 bp, Zea mays
agcaagaagatgaagatctccagggaaatctctgacgccagtgggaagacgatcccagtggaagagatcctaacgatcgacgtgaagccggggtggaagaagggcaccaagatcacgttcccggagaagggcaacgagacgcccaacacgatcccggcggacctcgtcttcatcatcgacgagaagccgcacccggtgttcacccgcgacggcaacgacctggtggtgacccagaagatcccgctggcggaggccctgacggggtacaccgcgcacgtgacgacgctggacgggcgcagcctgacggtgcccatcagctccgtgatccacccgggctacgacgaggtggtgcgaggggagggcatgccgatacccaaggacccgtccaggaagggcaacctccggatcaagttcgacatcaagttcccggcgaggctcacggcggaccagaagtccggcgtcaagaggctgctcgggcagtagagcgcgcttgtgttgttttgtattgtggatcagacattttcgtgttggttcatcttgaactggggtggagggagctgccatttgcagcctccgcaacgacgacgacgattacgaggcccccaagtgttgagtacagaacagctactgttgtacggtgtatggttgaaaaactttaaatgtgtaacggaggattccttgtgcgaacttccagatcgtggtggttgtctgttcc

SEQ ID NO: 265757 - DNA, 483 bp, Zea mays
atcctgacggtgcccatcagctccgtgatccacccggggtacgaggaggtggtgcgcggcgagggcatgcccgtccccaaggacccgtccaggaagggcaacctccggataaagttcgacatcaagttcccggcgaggctctcggcggaccagaagtccggcgtcaagaggctgctcgggcagtagagcgcctcgtgttctggtgtgctgtgtgtcagacattttcgtgttggttgatcttgaactgggggatgctgccatttgcagcgtccgtgacgacgacgacgaggaggcaggccaccgagcgctgagtacagaacaagctagtggtggtatatggttgagaccttgagatgcacagcataggattccttgtgcaatcttccagacgggtggtgcttgtctgttcaccggtccatgtcgttccagccttgcaaaggtcggatggaataattattgagcacatacacgtacgttctttgt

SEQ ID NO: 265758 - DNA, 477 bp, Zea mays
gcagttcctattgaagaaaaaaacttcaccggtggatttcggctgggtaatccccttccccctcctattttgtgtatctcatgaccaccgaacctcaaggatcacatcagcatggttctaaacgtgatttgccttcatgccgaaaaaatgtgcccggcacatcattcgtctcagatttgagagatcacatccacgagttcatcaacgcctcttctgatgaacacatgacatgcttcacaaagactatcaagaagatgttcgggatgtcaatgactgtcgcacataaatcctcggaagcagagcaagctgggcccgcatgactgcatctcaccatttcatatttgactaggtagcagccagtaaacatatcttgtgtagataacactgtgtccacacttttgactgataagattatgtacacttttgactgataagattatgtacagttacatgggccatgtatgtaataattttact

SEQ ID NO: 265759 - DNA, 1486 bp, Zea mays
tcgcccacgcgtccgcccccgcgcccgcggccacgtggacagcagagagattactacgatccaacagttctagagcaagagagaggaagacacaccgcagagttagcaggctaataacttgcaggagcagcaggaatggcggcgacgcgtcgcctctcttgctttctcctcgccgtgcttctggcaggagtggccgctgccaccgccttcgacgaagcggctgctgccggcttcgggcttggccacggcgcgcgtttcgcgcgcaagcatggacgtgctgccgctgagatgccccagccggagccacaacctaaaactaagccggagccccatatgcagccactgccccagccagaacctaaaccgaaacctatgccacatccagagccaaagcctgaacctcaaccaaagcccaaccctgaacctcaaccaatgcccaagcctcaaccaaaatccaaaccagagccattgcctacaccgaagcctgaacctaagcccgaacctaagccagagcctaagcccgaacctaaaataaaaccaaagccaaaacctgaaccaaaaccagagcctaagccagagcataaacctgagccaaagccagagcctaaacccaaaccgaaaccagagccaaagccagagccacaaccaaaaccagagcctaagccagagcctaaacccgaaccgaaaccggagccaaagccagagccccaacctaagccagagcctaagcctgagccgaaaccagaaccaaagccagagccacaaccaaagcctgagcctaaaccagaaccaaaaccagagccaaagccagagcctaagcccgaaccaaaaccagagccaaagcctgagcctaaacccgaaccaaggccagaacctaagccagagccaaagcctgagccgaaaccgaaaccagatccaaagccagagccacaaccaaagccagagcctaagccagaaccaaaaccagagccaaagccagagcctaagcccgaaccaaaaccagagccaaagcctgagcctaaacccgaaccaagaccagaaccagaaccaaagccagagcctaaacctgaaccataaccgaaaccagaaccggagccacaaccaaagccagagcctaagcctgatccaaaaccagagcctaaacccgaaccaaaaccagagccccaaccaaaaccagaacctaagcccgaaccaaaaccacagccagaacctaagcccgagcccaaaccaaagcctgaccctccacacatcccaccagcagctatcaactgaggaagtggctattaacaattattgtagtgtttaaataaaatgccatgttgcagcgtgcttttgtaggtgctgctacttgttgtatctatcctatcttttctttgtcattttttgtatgttatgctattatatgatcttagtgcagtttagcttgttccgtgtatacacgcatttatgcactcagtgggtttttgttaaatgatcgctcctatgt

SEQ ID NO: 265760 - DNA, 621 bp, Zea mays
gcgtgaagaggaccatcttactgcaccagtagccaatcccgaaccttggccccaatcaggaccataaccgaaggcttaagcctaaccccaaccaaaggcagaacctaagccagagccaaagctgagccgaaaccgaaaccagatccaaagccagagccacaaccaaagccagagcctaagccagaaccaaaaccagagcccaagccagagcctaagcccgaaccaaaccagagccaaagcctgagcctaaacccgaaccatgaccagaaccagaaccaaagccagagcctaaacctgaaccaaaaccgaaaccagaaccggagccacaaccaaagccagagcctaagcctgatccaaaaccagagcctaaacccgaaccaaaaccagagccccaaccaaaaccagaacctaagcccgaaccaaaaccacagccagaacctaagcccgagcccaaaccaaagcctgaccctccacttcctcagttgatagctgctggtgggatgtggctattaacaattattgtagtgtttaaataaaatgccatgttgcagcgtgcttttgtaggtgctgctacttgttgtatctatcctatcttttctttgtcattttttgtatgttatg

SEQ ID NO: 265761 - DNA, 2097 bp, Zea mays
cccacgtttccgctggctccctcaaaggtatgtttgattgaagaatcaacggattgaaaatctcttatggatagaagtgcttattaactaaagattttgaagaagaagctgctgtctgctggagagaatggtgtggacaacgcggtaaatttggtgcagatggatggtgtgttcaaattgatcggagttctctggatggatacctatcgagtagtataattcctctctcagctcactgtccagacaattagtgctatctgtgactgttgggcaatcaggttatcgagattttgctggttggagctgtccggcattgctttcatcttttatcaatatgccggtctttggcagcatatggcgattcagaactgtgcgcagtggtttcctcgaatttaggaccccccaactgcattctgtattgagaacattcctgctaaatacatgatacttgcaggtattgtgttgtgtttgcaacgtgatagcttgtactgggaacaaaggtcaagatgggcgccttggacctacaccttgactttgcttctgctcaacatggacaagccaagttaaaggaatatgccaagagctctttgttgtctgatggaaactacaatacagacaagatcaatggttcaaaccctgatgactatgagaaatttgagaaagggataatgcactatgggtgtccacattatagaaggagatgccgcataagagctccttgctgcaatgaaatttttgattgccgacactgccacaatgaaactaagaattccattaaaattgataaaatgaagaggcatgaacttccacgccatgaagtgcagcaggttgtatgctcattgtgtggcactgaacaggaggtgcgacaagtatgtatcaattgcggtgtttgcatggggaagtacttctgtggtttgtgcaaactcttcgacgatgatgtctctaaacagcagtatcactgcaacggatgtggaatatgtagaatcggagggagggagaatttcttccactgttcaaaatgtggatgttgctattcaattgcgctgaagaatagtcatgcatgtgttgaaggggcgatgcatcatgactgtccaatctgcttcgagtacttgttcgattcgacaaatgatgtttccgtcctgccttgtggtcataccattcatgtaaagtgcctgaaagaaatggaagagcactgccagtttgcatgccccctttgctccaagtcggtttgtgacatgtcgaaggcatgggaaaggctcgacatggagctggcaactctgtctgactcctgtgatcacaaaatggtccgcatattatgcaacgactgcggggcaatatcagatgtgcagttccatttgattgcgcacaagtgccagaattgcaagtcatacaacacccgccagatttgaagtaagaatcgcaagtcacacaacaccgtcagatctgaaatagcaaatcctgtgggggtttctgcatttcttcaagaagcgtgatggactgatggccccttcccgtgagctgctgagcaccgggatgtctggcaagacactcatcactgtatccactccactgggtcctgcggaggcaaacagctcgagattgtatatctgctgctagctgccgcccttcgttatgcataagcctactcttgccgttttactcctgtcgctccgtgattctagtgtaataatgttatatttagtgctgcttcaagcgtacggctgcggttgaacggcggcggcggctgctgagccacagtaccttgctgttgctgagactgcacccagccacagtgcgccgccgccgcagcagcttgtagctggactttatgaaggtgcctttgttccgcaaggaagagttcttggttgcgggtagctattaaggccatctccaatagatgtcctattatatcccttatttcatcctctatttcaaactttatataaatagtattaaatatctcatctacactgccctatctcctgatcttttaaaccagtctttagttaggaaaatgtgaacggtgtgcccctgtggttgtacgtcaaatccggatcccattttctatgcatagataattatagtgttgtgttcccc

SEQ ID NO: 265762 - DNA, 507 bp, Zea mays
ctcctttgtccgaaccttcatacacatcgtctcgtttccgatttccccaaattcaggccacaggcgctacaggacccaggcaccactcggtcggcggccaccgcgtcgccccgcctgctcgattggggtcgcgtgtgcgataggaagttcgtcatacgccttgcggtttttctagtttccgttttgatttctatgcgcccaatgttttgtccgattgattgatctgcttaggtacgtgagactgtctctattgttcgtgagtgcgtagatggtgggtgagtctggttgtttagatttgtgactggttgctcgacttgattgtgctgactgattgtttcatctatcgtgtaagctgtattaatgtctaatcccttaattgctttgaaaccactgcatgtgcttgattagtttggtttgtaccgacagcttttggtgcctatttgtgatgagactgaacatcctgctgcttgtgttaatcttctatgttcgtgttcttgctgtatgcgt

SEQ ID NO: 265763 - DNA, 1154 bp, Zea mays
ttccttgtggcacaatactatgccccagtcttgaacctctagagctaatagttagctggtaaaattagctatagaggttccaatcactcttagctaataactcaactaattgctaactaactcacagctaacaattagttcattagctgactcaacccagctaacaatttgttagctgactaactattaaatttaggggtttcgaacatgactgtatcaattgacttcctctgttggccgacctttgcatatatcatcaatgagcagaaaaaaaggctttgtttttgctaaattaaggagaagtatcgctcaaatttagcatcgtaatgggggaacacatcatcttctcgatgaattccgctatatgccccagctatactcagatgagaacaggaagggacagtttgtggactacttgcaggctattgatttatgtattctttggtaaagaatcgggaagggcatttttcttatgcaggttgcataaccactggtgatatgagatgatctctattcgcttggaaagtagagataggttaaatttctggtctgaacggtgaaaccttaaataaaatcttaggatgttgtgtgagagaagcatgctggctccctcaaaggtatgtttgattgaagaatcaacggattgaaaatctcttatggatagaagtgcttattaactaaagattttgaagaagaagctgctgtctgctggaggtaggcttccttgaaatctaacgtcttaatgaacctttaagatcataacaacgtgcacgagtggtacatgctaacacgtcgaaacccttgtcacgaaagaatcatgtttctttcttccttccatttcctggcatttgatgctatgatgtgttcctcttgccagagaatggtgtggacaacgcggtaaatttggtgcagatggatggtgtgttcaaattgatcggagttctctggatggatacctatcgagtagtataattcctctctcagctcactgtccagacaattagtgctatctgtgactgttgggcaatcaggttatcgagattttgctggttggagctgtcccgcattgctttcatcttttatcaaatatgccggctctttggcagcatatggcgattcagaactgtgcgcagtggtttcctcgatttaggacc

SEQ ID NO: 265764 - DNA, 599 bp, Zea mays
gcatttcttcaagaagcgtgatggactgatggccccttcccgtgagctgctgagcaccgggatatctggcaagacactcatcactgtatccactccactgggtcctgcggaggcaaacagctcgagattgtatatctgctgctagctgccgcccttcgttatgcataagcctactcttgccgttttactcctgtcgctccgtgattctagtgtaataatgtcatatttactgttgcttcaagtatggcccgtacggctgcggttgaacggcggcggcggctgctgagccacagtaccttgctgttgctgagactgcacccagccacagtgcgccgccgccgccgcagcttgtagctggacttgatttatgaaggtgccggaagagttcttggttgcgggtagctattaaggccatctcgagtagatgtcctattacatcccttatttcatcctctatttcaaactttatataaatagtattaaatatctcatctacactgccctatctcctgatcttttaagacagtctttagttaggaaaatgtgaacggtgtgcacatgtggttgtacgtcaaatccggatcccattttctatgctt

SEQ ID NO: 265765 - DNA, 611 bp, Zea mays
tcttcagaaaccgtgtgctccccgaagcaggggagatatcttcctcccagcgcgggcctgccaaatcgcggtcactgctccgaagtccgaaccttcatacacatcgtctcgtttccgatttccccaaattcaggccacaggcgctacaggacccaggcaccactcggtcggcggccaccgcgtcgccccgcctgctcgattggggtcgcgtgtgcgataggaagtattgtgttgtgtttgcaacgtgatagcttgtactgggaacaaaggtcaagatgggcgccttggacctacaccttgactttgcttctgctcaacatggacaagccaagttaaaggaatatgccaagagctctttgttgtctgatggaaactacaatacagacaagatcaatggttcaaaccctgatgactatgagaaatttgagaaagggataatgcactatgggtgtccacattatagaaggagatgccgcataagagctccttgctgcaatgaaatttttgattgccgacactgccacaatgaaactaagaattccattaaaattgataaaatgaagaggcatgaacttccacgccatgaagtgcagcaggttgtatgctcattg

SEQ ID NO: 265766 - DNA, 1920 bp, Zea mays
ttcctccctcttcagctgttgccaccgcccttcgctcccttcctctccgcgtcggtcgccgtcccatctttggcctggacacctggcctgcccccccttcgcggacgcgccgggtcgccggccgaatccgccctcccgccgctgccaacgtcgatctgcgaccgcccgcccgccaagggagattcaaaggtaggacgacgggggggtcgagttcttgtcggtttcattcctggccgccgacttcacatgtcaacaaccccaaggagcagaagccagggtagtaggaccactaggccgtggatcttgtcagggatggactttgctggttccagacggaagcctaatctcacggggaagattgccgtggctgctgccctcacggtcatgtgcataatcgtgttgaaacagtcccctagtttcagcggtaccagcgtgttctctcgccatgaaactggggtgacccatgtgttagtaacagggggtgctgggtatattggctcacatgctactcttcgtctccttagtgacaagtaccgagttaccattgtggataacctatccagagggaacatgggagctgttagagttcttcaacggctatttccagaacccggaaggcttcaatttatttatgctgatttaggcgatgccaaagctgtgaacaaaatattttcggagaacgcatttgatgctgttatgcactttgctgctgttgcttatgttggtgagagcacaatggagccactcaggtactaccacaacataacgtcaaacacattgacagttcttgaggcaatggcagcacataatgtaaatactctgatttactcgagtacgtgtgcaacctatggtgaacctgatacaatgccgattgtagaaacaactcctcagaatcctatcaatccatatggtaaggcaaagaagatggcggaggacatcatcttagattttacaaaatcaaagaagcaatcaaatatggctgtcatgatcttaagatacttcaacgtgattggatcagacccagagggacggctaggagaagctccaaggccagagctacgcgagcatggacggatatccggtgcttgctttgatgcagctttgggaatcattccagggctaaaggttcgtggaaccgattactccactgcagatggaacttgcgttagagactacatcgatgtcacagatcttgtagatgcccatgtcaaagctcttggtaaagctcagccaggcaaagttggaatctacaacgtcggaacaggccaaggtagatcagtgactgagtttgtagaagcttgcaagaaggcaacaggagcttctatcaaggtcgaatatcttgcacgtagacccggagattatgccgaggtatacagcgatccgtcgaaaatccacatggaactcaactggacagcccagtacactgatcttggccaaagcctcgcccaggcgtggaaatggcagaaagcgcacccgaacggatatggaccagcctgattcagagttcaaagattgagagagactcgtcacgcagatccaaagggtccatgtgcagtcatgtagccttcagacagttggttcttcatcaccatagaaagatagcaaagagcaacagaagagtcctgattcttttattgcagcgctcgaagaaggaaaaaatatcacagagaaccccctacctgctccttgattagtttcaaatatatatatataggtcctcgttgacattttaatataatttgatgtgtgctgaggcgctatataataacacaaacgaaattttgttgtagacagggtagatcgatctcgtgtatcaacttttgtggtggtagaatgaaaggatataaataagttgatgtaagtttttgtttccaaacttgtttggagtttacataaggctggttctgccaggttcagccc

SEQ ID NO: 265767 - DNA, 513 bp, Zea mays
cccacgcgtccggcctcaaccattagtgcatgaggaagatcttagctgggaggagattgaggatgttggcgatgaagatcagaagaatggggttagcaaacggtcaagctctgtcagcaaagtggaggatctccggagacgtcttaattctgtggaagatgatgatgaggacctaagttgggatgtcgatgagtagaaagaacgtgtggagccctgcactgagttgtctgaaggacttctaaattagagagactgccatcctaagcataaattgaatctgtatggtgccgatgaagaagctttgtggatggattgccccaatgtgaatattgtgatggacactggtgattcaaattcagtgggggctcattagtttccttgcaagaactcgatagaatggtagtgttttttctgttagtgttggtaatttgtttccagttagcatacgtttgttgcaagtccaacatgtacccccttcctgtttaaaaatgacccatagttcatttcagattc

SEQ ID NO: 265768 - DNA, 735 bp, Zea mays
accggtccggcatacccggccgcttccagtgtccgccgtcgtgcgctcgctacccctctccctcgaggcctttgccggcgaagagcgcccagtcgcccaccaggatgaagtttgttgctgcctacctgcttgctgtcctcgctgggaactccagcccctctgccgaggacttgacagccattctggagtcagttggctgtgaagttgacaatgaaaagatggaactccttctgtcccaactgagcggtaaggacattaccgagctcattgccgcgggcagggagaagtttgcttcagtcccatgtggcggtggcggtgtggctgttgcggcagctgcccctgctgctggcggcgctcctgcagctgaggcgaagaaagaagagaaggtggaggagaaggaagaaagtgatgacgacatgggcttcagcctcttcgactaagcctgtgcaatagtcaagagtattgtttttgagtcgcggaagcagagggaagaaaaatcgtagtcatgtttggactttaactttgttttatgttggaaagtacttgaaagacttttcctgtggtaattctaggcgtaggttgctgtgctggttggggtttactggtgaaccagagtttttctatctcccactatgaatttgttacctcaagttacctggatgttcactattttgttggtacatgtcgattttgcctcgttcatgcatgtccactgagtgagtatgcgcatgtgtt

SEQ ID NO: 265769 - DNA, 781 bp, Zea mays
cggacgcgtgggcggacgcgtgggcagaagctacctaaacttccagccgtctcctccgcacgcgaaaaccctagcagctccgtagtccctcgcaggtattcgcagtcgaccggttcctcggagcacgatgaagtttgttgctgcctacctgcttgctgtcctcgctgggaacgccagcccctccgctgaggatttgactgccattctggagtcagttggctgtgaagttgacaatgaaaagatggaactcctgctgtcccaactgagcggtaaggacatcaccgagctcattgccgcgggcagggagaagtttgcttcagtcccatgtggtggcggcggtgtcgctgttgcggcagctgcacctgctgctggcggagctgctcctgcagctgaggcaaagaaagaagagaaggtggaagagaaggaagaaagcgatgatgatatgggcttcagcctcttcgactaggctgcacagtcatcacagtattgttttgggcagtgaaaccagaggaaaaccagagtcatgtttagattttaaccttgttttatgttggaaagtactggaaagactgctacttgtctttatatttggtaattcagccgtagattgctatgctggttgggatttactcgtgaaccagagtttttctatcttatatcctgaattggttatcccaaagtttcgtggctaaaaactcgagtttttttttttttttttacacataataactaagataaatcacaagatgatttccatggaaaaggccatacctgagaacag

SEQ ID NO: 265770 - DNA, 714 bp, Zea mays
cccacgcgtccgcccactcgtccgcccacgcgtccgcggacgcgtgggattccgcttgcttgattgttccaggtattcgcagtcgaccgggtcctcggagcacgatgaagtttgttgctgcctacctgcttgctgtcctcgctgggaacgccagcccctccgctgaggatttgactgccattctggagtcagttggctgtgaagttgacaatgaaaggatggaactcctgctgtcccaactgagcggtaaggacatcaccgagctcattgccgcgggcagggagaagtttgcttcagtcccatgtggcggcggcggtgtcgctgttgcggcagctgcacctgctgctggcggagctgctcctgcagctgaggcaaagaaagaagagaaggtggaagagaaggaagaaagcgatgatgatatgggcttcagcctcttcgactaggctgcacagtcatcacaagagtattgtttttgagtcgcggaagcagaggggagaaaaatcgtagtcatgtttggactttaactttgttttatgttggaaagtacttgaaagacttttcctgtggtaattctaggcgtaggttgctgtgctggttggggtttactggtgaaccagagtttttctatctcccactatgaatttgttacctccaaaataaaagtacaaaatagtaaaaaagaaaataaaaagatataaaaaaaataaaattaag

SEQ ID NO: 265771 - DNA, 474 bp, Zea mays
cacaggactaggactcgcgggtcgatacaagcctctagattgagtcatataatagcagtcgaccggttcctcggagcacgatgaagtttgttgctgcctacctgcttgctgtcctcgctgggaacgccagcccctccgctgacgatttgactgccattctggagtcagttggctgtgaagttgacaatgaaaagatggaactcctgctgtcccaactgagcggtaaggacatcaccgagctcattgccgcgggcagggagaagtttgcttcagtcccatgtggcggcggcggtgtcgctgttgcggcagctgcacctgctgctggcggagctgctgctcctgcagctgacgcaaagaaagaagagaaggtggaagagaaggaagaaagcgatgatgatatgggcttcagcctcttcgactaggctgctgcacagtcatcacagtcaagtattgtttcggggggcagtgaaacca

SEQ ID NO: 265772 - DNA, 759 bp, Zea mays
gtctcctccgcatgcgaaaaccctagcagctccgcagtccctctcctctcgaggtggcggcgctccctcctgttttcctcttcttcttcctgtactatatagcctcccctcgcaaatcgtcactgacgagtgatgtcattccgcttgcttgattgttccagatattcgcagttgaccgggtcctcggagcacgatgaagtttgttgctgcctacttgcttgctgtcctcgctgggaacgccagcccctccgctgaggatttgactgccattctggagtcagttggctgtgaagttgacaatgaaaagatggaactcctgctgtcccaactgagcggtaaggacatcaccgagctcattgccgcgggcagggagaagtttgcttcagtcccatgtggtggcggcggtgtcgctgtggcagcagctggccctgctgctggcggagctgctcctgcagctgaggcgaagaaagaagagaaggtggaggagaaggaagagagcgacgatgacatgggcttcagcctcttcgactgagctgtgtgggcagtcatcacatcagagtagtttgttttgttttgacttttgagtcgtggaaccagaggaaaatcgtagtcgttgcttggactttaacctcgttttatgttggaaactagtttgaaaggctcctactgtctttatatttggtaattcagccgtaggtcgacattgcctccaaaaaaaaaaaaaaaaaaaagaaaaaaaaaaaaaaagggggggccccc

SEQ ID NO: 265773 - DNA, 301 bp, Zea mays
tcctgcagctgaggcgaagaaagaagagaaggtggaggagaaggaagaaagtgatgacgacatgggcttcaaactcttcgactaagtctgtacaatacccttggctattgcacagacttagtcgaagaggctgaagccaagggtattgtttttgagtcgaggaagcagagggaagaaaaatagtagtcatgtttggactttaactttgttttatgttggaaagtacttgaaagacttttcctgtggtaattctaggcgtaggttgctgtgctggttggggtttactggtgaaccagagttt

SEQ ID NO: 265774 - DNA, 387 bp, Zea mays
atcaaagggaaaccagagtcatgtttagatttcactgcccgaaacaatactgtgatgactgtgcaacctagtcgaagaggctgaagcccatatcatcacagtattgtttcgggcagtgaaatcaaagggaaaccagagtcatgtttagattttaaccttgttttatgttggaaagtactgcaaagactgctacttgtctctacatttggtaattcagccgtagattgctatgctggttgggatttactcgtgaaccagagtttttctgtcttatatatcctgaattggttaaaaaaaaaaaaaaaaaaaaaaaaaaaaaaaaaaaaaaaaaaaaaaaaaagggcggcccgtttaaaaggatccaggttaacttccccttccttccaa

SEQ ID NO: 265775 - DNA, 543 bp, Zea mays
ctaaggaactggtacctgcagtacggtcggaattcggtcgacacaccacgggacctggcggacgcgtggcggaccgtggcggaccgtgggtgctgctgtcccaactgagcggtaaggacatcaccgagatcattgccgcagctagagagaagtttgcttcagtcccatgtggcggcggcggtgtggctgttgcggcaggtgcacctgctgctggcggactgctcctgcagctgaggcaaagaaagaagagaaggtggaagaggaggggagaagcgccgatgacatgggcttcaccctcttcgactgaggctgtgtgggcagtcatcccatcagagtagtttgttttgttttgacttttgagtcgtggaaccagaggaaaatcgtagtcgttgcttggactttaacctcgttttatgttggaaactagtttgaaaggctcccactgtctttatatttggtaattcagccgtaggtcgacattgcctccaaagatgttatgaattggtcaggtttcctggctgctcactgttatgttgttccccc

SEQ ID NO: 265776 - DNA, 314 bp, Zea mays
tcctctggaggtggcggcgctcctcccgtcttcttcttcttcttcctgtagtagtccctctcctctcgaggtattcgcagtcgaccgggtcctcggagcacgatgaaggttgttgctgcctacctgcttgctgtcctcgctgggaacgccagcccctccgctgacgatttgactgccattctggagtcagttggctgtgaagttgacaatgaaaggatggaactcctgctgtcccaactgagcggtaaggacatcaccgagctcattgccgcgggcagggagaagtttgcttcagtcccatgtggtggcggcgg

SEQ ID NO: 265777 - DNA, 521 bp, Zea mays
accacacacacacacgaagagccggcgatgaaaatgtccgcttccgttgctgccgcttcccccaccctccgcttctcctccgccactcatcctctccaccgaccgctccgccggcggctcccgtccgttcgatgctccctcgccgccgccgccgccggccccggtgtccgggcgccccctgagctcgtcgactccatcctctccaaggtgaagggaactgaccgaggagtgctgctgccaaaagatgggcaccaggaagtggctgaggtcgcgctgcagctggggaagtattgcatagacgaccccgtcaagtccccgcttatattcggagaatgggaggttgtgtactgctcggtgccaacctcgccgggcgggctctaccggacgccccttggccgcctggtattcaaaaccgacgagatggtccaggcggtggaagcgcctgacgtggtcaggaacaaggtgtcgttctccgtctttggcctagagggcgcagtgtcattgaaagggtagctgaatgt

SEQ ID NO: 265778 - DNA, 769 bp, Zea mays
gtgccctctctctctcttgttcttgttgtgcaggttttgtggtctacttcttcgagaagatctgtgccaggatccccagagggcaggagaagttcctcgccatcatggatctcaagggctggggctacgcaaactgcgacgtccgggcctacatcgcggccattgagatcatgcagaactactacccggagcggctgggcaaggcgctgatgatcaacgtgccctacatcttcctcaaggtgtggaagacgatgatctaccccttcatcgacgccaacaccagggacaagttcgtgttcgtggatgacaagagcctgcgggagacgctgcggcgggagatcgacgagagccagctcccggagttccttggcgggaagatgcctctcgtctccctcaaggactacgcccagcagcctcagcccgtttgcgagtgagtctgtcgtagcgatggtggccggccggtgacgtgagcgacccaaagccgaaagctgattcgatctagactaagctaatacagcctacaagagggaggaagagaggccctacccgtggaattaagtcattagtttgtggtccaattcaataagaaagtaaatgtggtgtgtgaagatggtatggcattatcagtctttaatcccatattatacatttagatagaagaaaatcaacttatatgtggtagtgttccctactttttatatgagataaataaagggatacggagaatgctgcacgcacgctctcgctcacgtttcatgtttttcgcgtt

SEQ ID NO: 265779 - DNA, 661 bp, Zea mays
  unsure (1)..(661): unsure at all n locations
tgtgccatgcttgcatantgttcctccnaggtggcgggcaggaggcgtgtggcctttttgaggcaccgtgcgggaggagcaggtgcgcggggagctggagcaggacaagatctacatgggcggcgtcgacaggaccggccgccccatcatcgtcggcttgctcgccaagcactactccgccaaccgcgacatggcggagttcaagagtacgtcgacgacgtggcccttctttcttcatcaatcaaaatgcgtgtgtacgatccccagagggcaggagaagttcctcgccatcgtggatctcaagggctggggctacgcaaactgcgacgtccgggcctacatcgccgccattgagatcttgcagaactactacccggagcggctcggcaaggcgctgatgatccacgtgccctacatcttcatgaaggcgtggaagatgatctaccccttcatcgacaccaacaccagggacaagttcgtgttcgtggaggacaagagcctgcaggagacgctgcggcgggagatcgacgaggggcagctcccagagttcctcggcggcaagatggacgtgatcccactcaaggactatggcgtgcagcagcagcctcaggccgtgtaatgccatgcgtatatacagcatacacgagttgtgttgagctat

SEQ ID NO: 265780 - DNA, 180 bp, Zea mays
cactactccgccaaccgcgacatggcggagttcaagagtacgtcgacgacgtggccttctttctgcttcatcaatcaaaaaaatgcgggtgtacgtccgtgcggaggtttccttccttatttcttggccgttgaccgcgtgcgtgtgtgtgcccccctctcttgtccttgtgcaggtttt

SEQ ID NO: 265781 - DNA, 475 bp, Zea mays
tggacaagtcgctcaagaccgcactgcttgttcttggctacacatctaccggcctatccggattcgcggcttttgggctgctgttgctagcccagcagattaactctgagaacaaatcggagtaactgacaggcactcgctgaagttgtggacctcatgccttgcctttctatgctccaatgaggcaaacgttcatagggaattgcatacactgggaccttgtgtgtatcagtgcatgcaatgttctgtataaaaataaagagccaattgtttgtgattacggataaaataatcggtggagatattgaagcaaacatggaagtcagcctgggactgactgaagaacaaattgttagtgaacgcaacagggaactgcttgtattcaaaattgtgctttcggagtgtggtactgctgttactcatcaaaactgaaaaaaatcgttcttacccccataattaagtatgatgaatgagt

SEQ ID NO: 265782 - DNA, 1046 bp, Zea mays
cagaatcagaagaactccaacttgcgtcggcaaccgcgaaaagcggagggagggggaagggacgtgggaccgatccaatcatcaatccactagcttcactgggaaacgaagaaagaacataggactgatccggtcggtgggacttcctctcgaatcgccccgatcgagaccctagttgccccacgaaccgaggatccaagatgagtttcctgttcgggaagcggaagacgcccgccgagctgttaagagaaaacaagagaatgctggatcgatccatcagggaaattgagcgagagaggcaaggattgcaggcccaggagaaaaagctcatcactgagatcaagaaaacagctaaagaaggccagatgggagctgtcaaagtaatggccaaagaccttattcgtacccggcatcagataacaaagttctaccaactcaaatctcagctccaaggagtttctctaagagttcagacactaaaatcaactcaagctatgggtgatgccatgaagggcgttacaaaggcaatggctcaaatgaacaggcagctaaatctgccagggttgcagaggataatgcaagagtttgagcggcagaacgagaggatggagatggtgagcgaagtgatgggagatgccatagatgatgctttggaaggagatgaggaagaagaagaaactgaggagcttgtgaatcaagtacttgatgaaattggcattgatatcaaccaagagcttgttggagccccgtcggccgctgttgctcaacctgcttcagcgggaagggttgcccaggctgaaagtgctgggaatgctgacactggaatcgacgccgatttgcaggcaaggctggacaatctgaggagaatgtaggtgctacaccagcaaaagagtagtgccttctagctctgttgcctgcgaatgtgaatacctagtcaatcaaagcaaaacgtttacaagccagtgtgtatgttgaaatgaatgaagcgttcaatatgccggtagtaatgaccaaatgtaaatatacatatttacaatttcttcccc

SEQ ID NO: 265783 - DNA, 478 bp, Zea mays
cccacgcgtccgaactccagcttgcgttggggaagggcgcgtccctgagagacgaaggaagagagcctaggactgactcactgacccgaacccgttcccggcgggacttcctctcgaatcgtcccagtcgagaccctagttgccccacgaaccgaggatccaagatgagtttcctgttcgggaagaggaagacgcccgccgagctgttaagagaaaacaagagaatgctagatcgatccatcagggaaattgagcgagagagacaaggattgcaggcccaggagaaaaagctcatcactgagatcaagaaaacagctaaagaaggccagatgggagctgtcaaagtaatggccaaagatcttattcgcacccggcatcagataacaaagttctaccaactcaaatctcaactccaaggagttttctctaagagttcagacactaaaatcaactcaagctatgggtgatgccatgaagg

SEQ ID NO: 265784 - DNA, 466 bp, Zea mays
gcctacttgtgcagctcattgcttgtggcgtcgctgtggccacctacagcgacggggcaacggatttcagagacacgcctgcttgcaaggaatcccaatcacaggagttccctgaggagtcggaatcatcgagcgctgatgtgttcgaaggcaacccgactgaggtagcaccagctcttgagtaggactagcaaggaggcacgggggagaaaactcgtctctctattcaagctttagcctatagggagggcttcgcgtttgctgtatagatataaaaggtttggttaaaatctgatgctacgaaaattggctggtataattattttgtactggattttcccttagaatcaaatatagatggatggctagtgcctggtggcgatgggattcaactgtgttattccaaaaaagtgggggatgggggaaagaaacagagcattagagcaagcattactgtcttttcctg

SEQ ID NO: 265785 - DNA, 500 bp, Zea mays
ccgacccacgcgaccgcccacgcgtccgcctggcaatgggcccgttgttgacgggcctaatcgtcggcgccaacagcctcgccggcggcaacttcaccggcgcgtccatgaacccggcacgctccttcggcccggccctggccaccggggactggacaaaccactgggtctactggatcggcccgctgctcggtgggcccctggcaggcttcgtgtacgagtcgctgttcctggtgcacaagacgcacgatccgctgctcaatggggaaatctgacgaccatcagcccctgtgtgtggcgcatgatgcttcatgcttggttctgtaaaacaggtcatttatctgcaagcatggtacatatattggccacggtaattagagaggcttgctgtaaagcagtaggattgctggctgtagaaattgttggttttttttggttttcctgccaaggaattctttcttttatataatctcaaaaaaaaagatttttttgtatgggct

SEQ ID NO: 265786 - DNA, 595 bp, Zea mays
cccacgcgtccgctactatcctcggcaatattaatgtaggcgaaggtgccatgattgctggtggctcccttgttttaaaggacgtacctccccacagtatggctgtaggtaatcctgcaaaggtagttggttatacagagaaagaggagccttctttaactatgaaacatgatgcaaggagagattattttgagcatgctgccatcagattgagatgattgatacacctaatgacgagtcttctttctattcgtctgtggaatactgtggagtaaaaaaagttccaaatcgccttattggcaagaagttttgtggagttaaaaaaaggtttcgtcgtcttactcgcaggaaaccttgtgaagttaaaaaaaaaatgtttgacgaaacgcatacggatgccattccggacatttcgtcacaggcacaaggctggatagtcgatgagctctgtgtttccctttctgcccagacaaccaaatgaagatggaaaagggtcacccagggctccaaaatctagagtgtagacaagcatgtccttaatgcgccttaaattggtctggatggcacttttttgtgataaactatctatctaaac

SEQ ID NO: 265787 - DNA, 485 bp, Zea mays
cgcgggactgctggctctggctctggcgctggcgcgggccagtgcgggcgttgaccagggagaagggagccgcgccggcgctcgggggccaaggccaaggtgcctttccacgatcctaccattccccggccgcaggacgtatacaaaatcagagtggataactacaagccattcgagcatgtctggctggagcgcacgtagacggcacccgacgtgttcacccgctggaaaacctgcctgttgaacagttcgttgacagaaatgttcctgacagagaaccagtgaagccagctgatttagaggatacaccatttacgctggttcaagatcacaaaggcttaacagaattagctaacaagttgaagagcgtaactgaatttgctgtacatctggagcataatcaatataggtcatttcagggcttgacctgcttgatgcagactttaacaagaacagaggactgtattgtggacactcttaagcta

SEQ ID NO: 265788 - DNA, 1228 bp, Zea mays
ctccatcttccgttccttcccttactcgcgctcggcacgcaggcgacggcggcggcggcggcgctcatgctcgggctcgggctctcagcgacggcgtcagcggcttcccctcccgcctctcgctagtcgagtcgcgccctcgcatccgttcctccgcacaccggcgggtgaccctgagtttcgttcttgttaactattcaagaagtaggaaatgatgagcaacttccaagccactacttgcaagcctcacagtaggatcattgtgaagaaacctatagcaagtcttggaagcacatgtcagtatccattatattcacatgctctcggattccacaggctgcaagagaaggtgtacccaaggctagttctcatttctgctagccacaaaaggcttactcctgtatgtgtcttaagtggaaagggaaatgctggcactgctgatgatcctttgatggaatctttgaagaaagctatggctgatgcaaaaaagcccaggtccatacaagacttgctgaaggagcaggtggctaaactcagagaacaagcgtccggtggaggcagagggaatgggaatcgccgtggaggcagtggtggttctggtggcccagatgatgaatcgttcaaggaaacattggatgaactaatgcaagttatcttatccactgttgctttcatacttgtgtacatccacataatcagaggggaggagctttaccgtcttgccagggactacaccagatatgtctgtaccggtaagaggactgcccgactgaagcgtgccatgcaaaggtggcgcaacttctcggagagcttcatgcagaaggcaggctcagaagacgaccaatatgagagaccagctgtgtcaaaacctgcatggtggcaacagcctcagaaatttgtgcattttgtggaggacctttgcaggggaaactggcgtccccatgctcaggagtcttagttgatggagtaccccccgacccattgcagaatgcatacttggctgtgattggagcaaggtcgcctgtcaggctgtcacctggggcagtttttttttgtttgggatttatcggatatttgccactggttccttaggagtatgtagaaagtcgctgaattgttggcaattttgcagttgatagaacctcgttttgagactctaacctgccaattcggtgtggaattgtttagtaagtcggcctttctatgtacatgtttgttgaggactgcc

SEQ ID NO: 265789 - DNA, 1546 bp, Zea mays
ggtcgaaatcacgggtcgacgacgccagcgtcgacgaaggaggaacgaacggacaggttgttgcacagaagcgacatggctttcgcgcccaaaacgtcctcctcctcctcgctctcctcggcgttgcaggcagctcagtcgccgccgctgctcctgaggcggatgtcgtcgaccgcaacaccgagacggaggtacgacgcggccgtcgtcgtcactaccaccaccactgctagagctgctgcggctgctgtcacggttcccgccgccccgccgcaggcgccggcgccggcgccggtgccgccaaagcaagcggcggcacccgccgagaggaggagccgtccggtgtcggacaccatggcggcgctcatggccaagggcaagacggcgttcatcccgtacatcaccgcgggcgaccccgacctagcgacgacggccgaggcgctgcggctgctggacggctgtggcgccgacgtcatcgagctgggcgtgccctgctcggacccctacatcgacgggcccatcatccaggcgtcggtggcgcgggctctggccagcggcaccaccatggacgccgtgctggagatgctcagggaggtgacgccggagctgtcgtgccccgtggtgctcctctcctactacaagcccatcatgtctcgcagcttggccgagatgaaagaggcgggggtccacggtcttatagtgcctgatctcccgtacgtggccgcgcactcgctgtggagtgaagccaagaacaacaacctggagctggtgctgctgacaacaccagccataccagaagacaggatgaaggagatcaccaaggcttcagaaggcttcgtctacctggtgagcgtgaacggagtgacaggtcctcgcgcaaacgtgaacccacgagtggagtcactcatccaggaggttaagaaggtgactaacaagcccgttgctgttggcttcggcatatccaagcccgagcacgtgaagcagattgcgcagtggggcgctgacggggtgatcatcggcagcgccatggtgaggcagctgggcgaacggcttctcccaagcaaggcctgaggaggctggaggagtatgccaggggcatgaagaacgcgctgccatgagtccatgacaaagtaaaacgtacagagacacttgataatatctatctatcatctcggagaagacgaccgaccaataaaaataagccaagtggaagtgaagcttagctgtatatacaccgtacgtcgtcgtcgtcgttccggatcgatctcggccggctagctagcagaacgtgtacgtagtagtatgtaatgcacggagtgtggagctactagctagctggccgttcattcgattataattcttcgctctgctgtggtagcagatgtacctagtcgatcttgtacgacgaagaagctggctagctagccgtctcgatcgtatatgtactgattaatctgcagattgaataaaaactacagtacgcatatgatgcgtacgtacgtgtgtataaaaaaaaaaaaaaaaaaaaaaaaaaggtaagttgttt

SEQ ID NO: 265790 - DNA, 630 bp, Zea mays
cgccaacaacccccagtgcaattggaaactgttgagaaaatgctcctggaagaagccccaccagctctgtctcctttcgaaaaagatattctgaatgtgtcaagagcaatgtgtatcaaagtagaccggtaaagtattcccttgtcaacggatgatcccatgctcagcttattaaacagaacatggcggtacgcccttgtcttgtgcaggacgagatcaatcaagatggtcatgagctcgcactcgatgtagggatcagcaacagccttgcacttatcgcatttcatcaagcggatgttgcccgtggagtactgcacgaagagcgtcttcacgcgcccgccgcagccaacgcagcgcggaccatcccctgtcgcctgcgcatcgctcatcggtgattccttccgccaccgcacagcctacctcgtgcagcccaggtccagtctccccctcaggcctcagcgtctccgccctatcccaccgggctccgccgttgagcttcggataggcacgacggagtggttgagacagtgtcggattctggtgcaggcgtcgtggtggtggcaggctggcggcggggcgtcgcccagacgccggcaggtgcgcagtggcggacggtcagatcgcggttaa

SEQ ID NO: 265791 - DNA, 621 bp, Zea mays
atcaagaatactcagggatccattgatagcaacaaatgttttattctaacaagagaacttgtcatgctagtgtaccttataatatcgaaatataatttgagaatatatcgtactcccaggagtaacatgatcataaatataatgtttcccaacgatgcatcaccaataacttctgtactttgaattttatcacagcgggaaaatttattttgcttctgaaatcctgttcttagcacagacaatggtagtgcaaaacaaactcaatgccagccattgacatttcaaattctttgcagttgatagtgccctcaaacttgccagagaatctgataacatttcaaccatgaaacaatgcgaaggaaccaatcctattgtgtctttctacgccaacccatgtagcaacagaaagaagatgaagaaatcaccatttcacttgttaaatccctgaagcgccttggcgactctcgacctcagccggtcaagctttccgctcgccctggtctccgcccatccgctgcctcttcagtcgcctccagccgcggtgccgtgtcgtcaccgatgcgcccgaatgccctcttcagcgccccgtagccgcacctcgcaccaatcgcctccacctcc

SEQ ID NO: 265792 - DNA, 390 bp, Zea mays
gagtattttgtttcgtttgagcttgaaccagggacctgcagtcggggccttgtacctggactcctccgtgtcgtccttccccatgcggcaggggcagcggcggccagcaagacggccaaggcggatgcggcgcccaacgccaccacctcgctgggattgtcgcctctggccacccacagcccacggcgaaaacctagaaaatgactagctccgcaaagctacctaggacacggtttcatcgcatcatcatggaaagaagaacgcagcggaggcgagggaagaggaaccttggcccgcatcgcgtcggcgcaggtggggcgcgcgctcgagctccctgtccctgattgcggcggcggagtactggcgagttggagacggacctgatgtgcg

SEQ ID NO: 265793 - DNA, 366 bp, Zea mays
ggaccgaccggccaggtggttgcacagaaccgccatggctttcgcgcccaaaacgtcctcctcctcctcgctgtcctcggcgttgcaggcagctcagtcgccgccgctgctcctgaggcggatgtcgtcgaccgcaacaccgagacggaggtccgacgcggccgtcgtcgtccctagagctgcggcggctgctgtcacggttcccgccgccccgccgcaggcgccggcgccggcgccggtgccgccaaagcaagcggcggcacccgccgagaggaggagccgtccggtgtcggacaccatggcggcgctcatggccaagggcaagacggcgttcatcccgtacatcaccgcgggcgaccccgacct

SEQ ID NO: 265794 - DNA, 551 bp, Zea mays
cacctcctcttctccctcctcggatagtcgagcggatgtgcaagctccggccggagcgtcaggataagaaccgcgcggcggcaggcagctcctcctgcgactgcgagcgcccgtccaatggcgtccctctccccttccctccacctcccttgcaattcaagaactggcttccttggaaagacacgtgggattcgtccttgtgttttccctgctggaagagttggatttgtcagaacagtagtggaatgcaaggaatctagaattggaaagcagcccatcgaagttccatcaaatgttactctcacattagaagagcagtttgtcaaagctaagggtccgctgggggagttatctctgagctttccaggtgacttgaagatcgtgaaagaagaatccggtaacctgagagtttataagactgcagagaccaagcgggcgaaccagatgcacggtcttttcagaacattgacagacaacatcatcgttggtgtgtcgaaaggattcgacaagaagcttcagttagttggtgtcgggtaccgtgcggcggtgga

SEQ ID NO: 265795 - DNA, 647 bp, Zea mays
cccccacgcgtccggtttcaactaatcagcttactaggatgaagcctgcaacggtggcactgctcattttgttgaacatgatgtgcatagttgcatactttgatcatggaacgatggctgaagaaaccaccttgctggcaaattcgtatggaagaaatgaaggaaccaagggcatacatcatggaagaaagctgatggacaatagtattggttcaaaccgtgagtattcaatcgatgatatgtctcatccaaaggcaccacatactgagctcaagcaaccctcatacttagctcctggttgctcaagcaaccctctcaagcaaccctcatacttagctcctggttgcattccctaaagttcatgcatacatatatagccttccactcatcatatgctggtatccgatctatatatagacacatatgatatgttgcatatcgccaggttctcagatcaagtcccttgtgtagtatgagtggaaacctatctaaataatgtgtgtggcttctgaaatatgtggtgttattgtactgagctatgctcaatagtaaacaacaaattattgaaatatgtcacgtgtgcgataataaagtgacttcgacagaaaaaaaaaaaaaaagggcgccgctcgcgatctagaactagt

SEQ ID NO: 265796 - DNA, 569 bp, Zea mays
tagggtgagtcctttgtctttttgtgacctacaccagttttctttagtagtacgattcaagagaggttccatgtactaattatgttacaaaataatacgatatataacgcgtagatatataatcagcttactaggatgaagcctggaacggtggcactgctcattttgttgaacatgatgtgcatagttgcatactttgatcatggaagctttcctggaacgatggccgaagaaaccaccttgctggcaaattcgtatggaagaaatgaaggaaccaagggcatacatcgtggaagaaagctgatggacgccggtactgattcaaaccgtgggttttctatcagtgatatgcgtcacataatgagctcaggcaaccctcatccttagctccagctggttgcattccctaaagttcgtacatgtatagccttccactcatcatatgctgggtatccgacctatagacacatacggcatgttgcagatcgatcgccaggttctcagatcaagtaccttgtattgtatatgagtggaaacctatctaaataatgtgtgcggcttctaaatat

SEQ ID NO: 265797 - DNA, 1093 bp, Zea mays
gactagttctagatcgcgagccggatccagcaaatggagcggctcacgcagcaccggccgtcggtacgaggggagcagccatggtgacgatctggagctgccaatatttgatctgggcacaattgcagccgctacggatggtttctccatcaacaacaagcttggcgagggtggctttggaccagtatacaagggtaaactcgaggatggaatggagatcgcagtgaaaacactctcgaagacatccgcacaaggtcttgacgagttcaagaacgaggttttgctgatagccaagctccagcaccggaatcttgttcgccttctcggatgcagcattagcggacaggaaaggatgcttgtttacgagtacatggcaaacatgagcctgcacttcttcctgtttgagaaagacactgcggtgcttgactggcaagtgcggtatcgtataatagaaggcatcactcgaggtttactctacctccaccaggactcgaggtacagaatcatccatagagatctgaaggcggccaatgttctcctagacaaggagatgactcccaagatttcagactttggcatggcaagaatatttggcaacgaagagacggaaattaacaccttaaaagtggttggcacatatggttacatgtctccggagtacgcaatggatgggatcttctctgtcaagtcggacgtgttcagctatggagtactattgctggagatcgttagtggcaggaggaacaggggagtgtattccagttcaaacaaccaaagccttctaggccatgcatggagcttgtggaacgaggagaagagcatagagctagcagatgagagaatgaacggacaattcaactcagacgaagtgcagaagtgcgtcagggttgggctactgtgcgtgcaagagaatccagacgaccgtccgctgatgtctcaggtgcttctgatgttagctagtcctgatgccgcatcactgccgactcctaagcaacctggcttcgcagctaggagagttctaatggtaacagacacatcatcctccaagccctactgtagcctgtttgacagtgcgacacccatcttgcttgaa

SEQ ID NO: 265798 - DNA, 1912 bp, Zea mays
cccacgcgtccgcccacgcgtccggtttcttccttccttggccgcttctgcgctcgccggccttctcctcccccatcctctcccttgtggttctagatccactcctccccgtgctcactgctcatccgcgaacaggttgagcggggacgccgtggaggggcgagggggagccagattgagccatggcctcctcctgggttcttgccctggttcttgcgctgtcggcaggcgcaagcctggcgcgtggctcagagccgtggtggaacgagacacaggtgtacgccaccaccgccaactccggtggcggcaacggcgtcttcgtcggcctcacgctcatccagtcggcggcggccaagggagcggtgtgcttggatggaagcttaccaggttaccaccttcacagagggtttggatcaggagcaaacagttggctcgtcaatctcgagggtggaggctggtgcaatgatcgcagcagctgtgtgttccgcaagggcagtcgtcgtggatcatcaaatcacatggagaggcaactccagtttacagggatattgagtaacatacctgaagagaatcccgatttctacaactggaatagagtgaaggtccggtactgtgatggtggatctttcactggtgatggctctgatgcggctgcaggcctttatttccgaggtcagcgcatttggcaggccgctatggatgacctaatggcccaaggaatgcgttatgctaatcaggcccttctttctggatgctctgccggtggtgtttctaccatacttcactgtgatgaattccgtggactgttcccatcaaataccagagtcaaatgcctagctgatgctggaatgtttcttgacacgtatgctcacacaaataaatgaaaccttttcgatattttatcttaatcatagtcatgggttgcttctcatgatgaaattgcgatcactccaattgtatattggtgtgaattggccctttaatcatttgcagtgttgatgtttctggccgccgggaaatgagatcctttttcaatggtattgtgagattgcagggttctggaagaagcttgcctaggtcttgcacctcacacatggacaaaacctcgtgctttttcccccagaatgtgttgccaaccatccgaaccccaacttttgttttgaacactgcctatgacgtgtggcagcttcaacaaagtgtggcccctagaacagctgatccccaaggtctttggtcaaagtgtaggacgaaccatgccttctgtaatagcaaccagctccagtttttgcaagggttcaggaaccagatgcttgatgccgtgaggggtttctctgcatcaaggcaaaatggtctgttcatcaactcatgttttgctcattgccagagcgagagacaggatacttggtacgcgaacaactcgccacgtcttggtaacaagaaaatcgctgacgctgttggggactggttcttcgagagggggaacgccaagtacacagactgcccatacccttgcgatggcacttgccatcaccttgtgttcaggggagaccactaagatcattcttcagcaccaacaaattcatcagatggtacaaggatcaaaccccaatgggtacagaatggaaaacaggatatagatacagataaggtgcaagtggtcggcttgcccatgtttgttcatcagtgagtcatatgattgatagtgcgaggacctcacccgcgaacgcgcggaggaggcctctgcattagattcacataccgtcatgatatcgattattttcattggaaaagcgtccatgattacgtaccagaacaattgagttacatactcatttcgtgtactgtattaataacactagaacgttacataaaaaaaaaaaaagaaaagaaaaaggagaaaaaaaagagagaa

SEQ ID NO: 265799 - DNA, 592 bp, Zea mays
cccacgcgtccgcccacgcgtccgcccacgcgtccgcccacgcgtccgcccacgcgtccgcagggatattgagtaacaaacctgaagagaatcccgatttctacaactggaatagagtgaaggtccggtactgtgatggtggatctttcactggtgatggctctgatgcggctgcaggcctttatttccgaggtcagcgcatttggcaggccgctatggatgacctaatggcccaaggaatgcgttatgctaatcaggcccttctttctggatgctctgccggtggtgtttctaccatacttcactgtgatgaattccatggattgtttccctcgaataccagagtcaaatgcctagctgatgctggaatgtttcttgacactgttgatgtttctggccgtcgggaaatgagatcctttttcaatggcattgtgagattgcagggttctggaagaagcttgcctaggtcttgcacctcacacatggacaaaacccctcgtgctttttcccccagaatgtgttgccaaccatccgaaccccaacttttgttttgaacactgcctatgacgtgtggcagcttcaacaaagtgtg

SEQ ID NO: 265800 - DNA, 1259 bp, Zea mays
tccacgcgtctctagatagctagtgaccagcctgatgcattcagtaagagctctgacggaggtgcaaagaatgcacctatctcgattagtacggatgatggttcaactggtgaaaatgaggatgttgcagagtcagaagcagaaggctcaaattcttggttggttgcacagcgtgaagacagtgctaagggctctgttgttaacaaaggatctgataggaaaaggtccgccgttgctgctgcagatggttttaaaggaaagagacaacctagtttctcaggaagtgagtccagctctggaaagttgacacctggaaatcttatatcgatgcaggcatcaaatgtagtggctttgccatatcaagtcccaggtcaagtttctggacctcctgtcttaactaatgcaccaaattttcacccggtatgtactgtgcagttgaggccgcccacaaatggtggactagctgtccagacaatgggtagtgcctctcaagttgcttttggttacccagcagtccagctaccaacacttgaaacgggctcttcatgggcatttggtgctccacctcaggctctgtcttcttttactgcaaaagacaaagctgatcaaacaggaaccaagcaagttgacgatggcaagaagccccaggaggcaggtgcttcctcgtctgctcatgctgaagatgagaaaaaggctgatagaggactctctcttatgggttctgccataaggccaggcatcgcaccaaatgtcaaatttggagggtctggatcatatccggatcttccctgggtttctaccatcggcgccggaccaaatggcagaaccatatcaggtgtgacatacaagtttggtagaaatgaggtaaagatagtatgtgcttgccatggcactcacatgtctccggaggagttcatgcggcatgcaagtgcagatgctccggcccaagataatagtgcaaccctgccagcattccctgctggtaaccaagccacgtctgcagaaaattaggttagcggttcagagaatgcttgactaataatccttgcccctcttgtgtctatatcagccattcactgtaatactcagtgttcatctcgtgttaactttttatcatgcaagtttagattcttgtattttgagctttgtttgaggataaaatctgtgtatttttagcgctatgtaacacatggactgccaattgctgtggttggattttgatctatagacaatgtaaaatttagataaaaaatataaaa

SEQ ID NO: 265801 - DNA, 409 bp, Zea mays
gtctgaaggccagagctttaacccaccgagcttggctattatcttccagctcgcatttgcgaccgatgatgggccggaccactgacctggctgtggttgagcagaatgaagcgaagcttgcgaaggtgctcgatgtgtatgaccaacggctgggggagagccagtattttgctggtgatgatttctccctggccgaccttgtgcacttgcccaatgcagatttccttgtgaacagaaccagcaaggctggcttgatcaccgagagaaagaatcttgctcgatggtgggatgatgtctagtaccgacctgcatggtaaaaggtcactgagatgcacagcacgctcatgccctgttagagctgaatattgggtttctgtgagcagatgacgatggcaaataggtgcattct

SEQ ID NO: 265802 - DNA, 877 bp, Zea mays
cgcttctctacgggctcggcgtctccgtgtacgcgttcgagggcatcggcatggtgctgccgctggaggcagaggcggcgaacaagagcaagttcggcgtcacgctcgggctgtccatggcgttcatcgccgtcatgtacgggctgttcggcgtcatgggctacgtcgcgttcggcgacgccacgcgggacatcatcaccaccaacctcggagccgggtggctgtcggccgccgtgcagctggggctctgcatcaacctcttcttcaccatgccggtgatgatgaaccccgtgtacgaggtcgccgagcgcctgctccacggcaagcggtactgctggtggcttaggtggctgctggtcgtcgtcgtcggactcgccgccatgtacgtgcccaacttcacggacttcctggcgctcgtcgggagcagtgtctgcgtcctcctcgggttcgtgctgccggcctcgttccacctcaaggtattcggcgccgagatggaatggcccggagtgctgtccgatgtcttgctggtcgtgatcggcctcgcgctcgccgtattcgggacgtacacgtcgctgctgcaaatcttccaatcgtcaagcgcttgatcgacgcaccttccgctgcgcgtcgatcatcgcattctccagggcaactacgatacatgtgttgagtgttgttcgtgagtggcttgtattggacgggggaaatctgtacgcttttcgtaccacagatttcagttactcccggtagcagtgtatgtgtatgcgtcctagatgttcctcctgctgtgcacgatgggggatacgatgaaaggacaagattttcacttcgtggaaaaaacttattttgctaaaaaaaaaaggagggcggccgcatc

SEQ ID NO: 265803 - DNA, 854 bp, Zea mays
  unsure (1)..(854): unsure at all n locations
ggtacccacatttcctttgaccccccaccgtataatatatcttggaggtaaaagagactgggcttcagatgttccttggtgatctagttgtgcgctttcgatctggtattgctcagatagtcagatgtttctccgctgtaggctggttcaagatcaagccatctaaggaggaggtggcctgttcatattgtgaaacatcatgatgcttattttgggcatcttaagctatcttctctggcacatcaatgatttcatgagcttcaaggcccctttattttaaaagttgattctttgcataatcctctctgtgggtgcctacaaagtttaaatgtggacatggctgtcactactcactagtctcattgaagcatcatggtgcaaatcctgcttcaaggtctgctattgatagcttagagatggctgtgatgtcaacgcctcagcattaatttggacttctaggccttccttgcgtatttatgctttatataagcatatggggtatggtcgatcttgtctatngcccttcggagttcctttcaacttcacttgagcctttgatggcacatttggagtcatgtgcctctgctcagaaaatcagtttttagctgaaacccttcccttttgcttgcttccttgattcgtcaatggtgataccagttattttagcatcaatcttggcggtgtgaatcccaaatggctgtggtattaatcttcctggttttttttggcactgatgatattgaaatagctatgaggttgttgatatagtatactcccttcattagtttttaagtgtccctgtttagttaaaaaatgaactaacagtcaacaaattttatcgttttccccattct

SEQ ID NO: 265804 - DNA, 1387 bp, Zea mays
cctaaactaagtcatactatcggccagctgctgagtttctggcatcttacccagacatatgtacctatggtgttgatgacctccgtgcagatcaaattcatgttatcgtggcatctttgtatcaaaaagatgcagaagagacagttgatggtattgaaaatacaactgctacccagcttgatgttgctgatattggaagcctttcagatcttgtttctcaggttgaggttgtaattagcttgctgcctgctagttttcatgctgccattgcaggagtatgcatagagttgaagaagcacatggtaacggcaagctatgttgatgaatccatgtcaaacttgagccaagctgccaaagatgcaggtgtaactatactttgtgaaatgggcctagatcctggcatagatcacttgatgtcaatgaagatgattgatgaagctcatgcacgaaagggaaaaataaaggcatttacatcttactgtggtggattgccatctccagctgcagcaaacaatccgcttgcctataaattcagttggaacccagctggtgcactccggtcagggaaaaatcctgcagtctacaaatttcttggtgagacgatccatgtagatggtcataacttgtatgaatcagcaaagaggctcagactacgagagcttccagcttttgctctggaacacttgccaaatcggaattccttgatatatggtgacctttatggtatctccaaagaagcatccaccatatatagggctactcttcgttacgaaggttttagtgagattatggtaaccctttccaaaactgggttctttgatgctgcaaatcatccactgctgcaagatactagtcgtccaacatataagggtttccttgatgaactactgaataatatctccacaattaacacggacttagatattgaagcctctggtggatacgatgatgacctgattgccagactgttgaagctcgggtgttgcaaaaataaggaaatagctgttaagacagtcaaaaccatcaagttcttgggactacatgaagagactcaaatacctaagggttgttcgagcccatttgatgtgatttgccagcgaatggaacagaggatggcctatggccacaatgagcaagacatggtactgctccaccacgaagtcgaggtggaatacccggacgggcaacccgccgaaaagcaccaagcgacgctactggagttcgggaaggttgaaaatggcaggtccaccactgccatggcgctgaccgtcggcattccagcagcaataggggccctggtactaaacctaaccacaattatacttgcacagtagtaaggaaaaaaagcaaagaaaagtcggggaggaggaatgatgtgtgctcattc

SEQ ID NO: 265805 - DNA, 550 bp, Zea mays
agcgaatggaacagaggatggcctatggccacaatgagcaagacatggtactgctccaccacgaagtcgaggtggaatacccggacgggcaacccgccgaaaagcaccaagcgacgctactggagttcgggaaggttgaaaatggcaggtccaccactgccatggcgctgaccgtcggcattccagcagcaataggggccctgctattgctaaagaataaggtccagacgaaaggagtgatcaggcctctgcaaccggaaatctacgttccagcattggagatcttggagtcgtcgggcatcaagctggttgagaaagtggagacttgaaagttccctgatacacagataaagatagtatgatatagcagggcacatgtatcttttgtattaactccgttctggaatatatatttgtgaactaaaatgtgacaaataaaaagaacgggtggagtatattgtaagagacggcaaagaaacctctgtatatatgacctgtcgatatcaaataatgccgatcagttagttggcttggctctttttagggtttt

SEQ ID NO: 265806 - DNA, 571 bp, Zea mays
tcccgggccgactcacgcgtcagcgagaattgggacatgggctcggcctcagcgagggagggccgctgttcgggttcaccaagtcgaacgagctgttcctggggcggatggcgcagctgggcgtggccttctccatcatcggcgagatcatcacggggaagggcgcgctggcgcagctcaacatcgagacgggggtgcccatcaacgagatagagccgctcgtcatcttcaacgtcctcttcttcttcatcgccgccatcaaccccggcaatggcaggttcatcatcggcgaggaagaggaataggctgctggctgctgctgctggcctcggacatgagtcgtgtgcgtttacttttacctgtgactgtgcgtctcggtgcgcgcgcgtaagtgctttgctgtgtatcaattactcgtgatgagacctcgaaggtagggtgtcgcgttgggttgtctgcttgtagaaacaagagcttatatataaattactactagctaatatgccatggttgcaacgagttctcctagactaaaaaaaaaaaaaaagggcggccgctcgcgatctagaac

SEQ ID NO: 265807 - DNA, 535 bp, Zea mays
cccacgcgtccgcggacgcgtggggccctcggcctcagcgagggagggccgctgttcgggttcaccaagtcgagcgagctgttcgtggggcggatggcgcagctgggcgtggccttctccatcatcggcgagatcatcacggggaagggcgcgctggcgcagctcaacatcgagacgggggtgcccatcaacgagatagagccgctcgtcatcttcaacgtcctcttcttcttcatcgccgccatcaaccccggcaatggcaggttcatcatcggcgaggaagaggaataggctgctggcctcggacatgagtcgtgtgcgtttacttttacctgtgactgtgagtgatcgatcgattgctgtgtatcaattactcgtgatgagacctcgaaggtagggtgtcgcgttgggttgtctgcttgtagaaacaagagcttatatataaattactactagctaataaaattaaataataatattaattaatacttcactttgttttataaaaaatgttttattataatttggggcggcc

SEQ ID NO: 265808 - DNA, 585 bp, Zea mays
  unsure (1)..(585): unsure at all n locations
ttcgtcgacgaggagttcaccggcctcgacaaggccgtcatccaacctggcaagggcttccgcggcgccctcggcctcagcgagggagggccgctgttcgggttcaccaagtcgaacgagctgttcgtggggcggatggcgcagctgggcgtggccttctccatcatcggcgagatcatcacggggaagggcgcgctggcgcagctcaacatcgagacgggggtgcccatcaacgagatagacccgctccgtcatccttcaacgtcctcttcttcttcatcgccgccatcaaccccggcaatggcaggttcatcatcggcgaggaagaggaataggctgctggcctcggacatgagtcgtgtgcgtttacttttacctgtgactgtgagtgatcgatcgattgctgtgtatcaattactcgtgatgagacctcgaaggtanggtgtcgcgttgggcggatggcgcagctgggcgtggccttctccatcatcggcgagatcatcacggngaagggcgcgctggcgcagctcaacatcgagacgggggtgcccatcaacgagatagagccgctcgtcatcttcaacg

SEQ ID NO: 265809 - DNA, 377 bp, Zea mays
agaatatagtatagtgccacctactcttttttattctgcccaagtgcatagacagaaaaggacagggggggaaaaaagtgacttcgagcaaaaggaaaaggtatagtgacaggaagtgctggagaaacatgctcgatttcgtatgttcaaagagaaggggttatcctatgcaactaggcatttttatccttcactggaatgttgagcattgcagaattgacaattgctatgccatccagccagttcagtcgtttgtaaatatgctcctagtaggaagtatctgaattattcgcaaaaaaaggaagtggctgaactattgtgccttttgcacgatgcttcgtttcaaggattagccatgaattaacgtttatgtactc

SEQ ID NO: 265810 - DNA, 345 bp, Zea mays
gctccagctcgtcgagtccctctctgtgtgcgccatgcagctcgctcggccgcgaccgtgccgagctccgcccctgctccacgtctcctggtcgggctctcgttctgcgcgtgacgccgctgttccctggtgctccctgctcgaccctgcttcttcttccttgagcctcgccgtgcgagttctccctggctcatgtgcctaccgccgtcggccccagtctctcgctcgcaaggtcttcccaagccgtcgtctcctgcctctggctgtcaagcgcgacgaactcgtcccgagctcgtcacaacgtctcagccctgcgtgtcgcgctagctcgcgtctatggtcgcg

SEQ ID NO: 265811 - DNA, 1333 bp, Zea mays
aggacgcgtgggcggactcgtgggcggactcgtgggcggacgcgtgggcggacgcgtgggcggactcttgggcagacgcgtgggcatcagccaagtgtaaagagtgcgaagaagcagtagcaaaaggattccattctcgtgttcttggagtggtccatcgatcgagctccgtgaaagagagagagagagagcaagcaatggcgacagcagggaaggtgatcaagtgcagagccgccgtggcgtgggaggccggcaaaccgctgtccatcgaggaggtggaggtagcgccgccgcaggccatggaggtgcgtatcaagatcctctacaccgcgctctgccacaccgacgtctacttctgggaggccaaggggcaaaccccggtgttcccgaggatcttaggacacgaagcgggaggcatcgtggagagcgtcggagagggcgtgaccgagctcgcgccaggcgaccacgtcctcccggtgttcaccggcgagtgcaaggagtgcgcccactgcaagtcggaggagagcaacatgtgcgacctcctcaggatcaacgtcgaccgcggcgtgatgatcggcgacggtaagtcccgcttcaccatcagcgggcagcccatcttccacttcgtcgggacgtccaccttcagcgagtacaccgtcatccacgtcggctgcctggccaagatcaaccccgaggcgcctctcgacaaagtctgcatcctcagctgtggtatctcgaccggccttggcgcgacactgaatgtggcgaaaccagccaagggctcgacggtggcgattttcgggcttggggctgtaggccttgctgctatggaaggtgctagactggctggtgcatcaaggatcatcggcgtggtcatcaacccagcagaatacgagcaagctaagaaatttggctgcactgaattcgttaaccccaaggaccacgacaagccagtgcaagaggtgctgattgagctgaccaacggcggcgtcgaccgcagcgtggagtgcaccggtaacgtcaacgccatgatatccgccttcgaatgtgtccacgacggctggggtgtcgccgtgctggtgggtgtcccgctcaaggacgaccagttcaagacccaccccatgaacttcctcagcgagaagacactcaagggcacctttttcggaaactacaagccccgcaccgaccttgccaacgtcgtcgagatgtacatgaagaaagagctggagctggaaaagttcatcacgcacagggtgcccttcttggagatcaacacggcgttcgacctgatgcttaagggggaaaacctgcgctgcattatgaggattgagga

SEQ ID NO: 265812 - DNA, 714 bp, Zea mays
cggacgcgtgggccggcgggcgcgctggaccccgggctgatgtacgacgccagcgaggacggctacctccgcttactctgcaactacggctacaacgcgtgcactgtgaggctcgtcgactccaccctccccagcgggttcagctgcgcggccaacgttagcaaggacctcatctccaacctcaactacccgtcgatcgccgtgacggggctcctcggcaataaatcggctgcggcgggcctaagccggaccgtgacccgcaccgtcaccaacgtgggggcgcaagaggcggcctcctacacggtcgccgtcagcgcgccggccggcctggacgtgaaggtcacgcccagtaagctcgagttcaccagaggcgtcaagaagctggccttccaggtgagcttctcccgtagcgggaacgacgacgacgcggcggcggccaagggcgccctttcgggctccataacatggtcagacggaaagcacatggtccgcagcccgtttgtggtcaccagctgaaacatcatggcaatacctgacgcgcaggcacgtcaagaaatgctgtgatctcagatataaaagtataggattcgatgttgacagccactgctagtggcaaactcagaatcatcgaagattctgaaactgggccttccaaaacgcctttgtcagaaatgacggttaaacattctaatataatgtcgaaaccttaggctg

SEQ ID NO: 265813 - DNA, 992 bp, Zea mays
cccacgcgtccggagaagctctgcgccggacccgccggcattgctactggactctcgaatgagtatttcttggaatgcctattgttccagcagtaactgagcttattgctgctcaatttctatggctagactatgacgaccgcacaaaacccatttatctgtatataaactccactggaactatggacgaaaataacgagcttgttgcatctgaaactgatgcttatgcaattgctgattttatcaatcgaagtaaatccaaggtttacacaatcaatcttagcatggcatatggtcaggctgcgatgcttctttcccttggtgtcaagggcaaaagaggagtgctgccgaattcaatcactaaattgcacctgcctaaggtgcacaaatctggtggagctgccattgatatgtggattaaggcaaaagagttagataccaacacagattactacctcgaactcttgtctaaaggagttggtaaaccaaaggaagagcttgctgaattccttaggggcccgaggtacttccgagcacaagaggctcttgattatggacttgccgatacgatattacactcgctggatggttctttcaaaccaaaggacctgaccgcgcagctagccaaggcacaggcgatgcgccagtcaggcaagcgtgcagctgctggagctgggagatggtcaactccaaccgcacccaggtagagactagaatggtagagcaggacaatatatgttcatctggatggtcttgtggctctgctatacaaagaggccagccttttgtatacttgtgttggaaatccatggagcttggaattagacgcacggctggatagtgagatgttgtgtactgtagtgtagtgtcagttgtgacgtacgtgtatcatctgtgtgcaatctttgctacactcgacccacatacattgcattcagatagattaatttcaccagtgaaaacgatagcctgtatggcaacagatgttctgc

SEQ ID NO: 265814 - DNA, 431 bp, Zea mays
cctgattgaccctgctattggaccaaagatgggtcttaacttcagtgtactcaacacattcggagtcccagggctgaggggggcgactaccaagcaggtttatgagcggcatttcgcgaacaaggaaaccaaggagttcaaagatttccacattgcctacgtcgagttctgcaagtatttcaacacggtgatgcccggtcaggattttgacactccatctactacggtgattcagaaattctttgaagacgagtggaagccggagaagaacgaggaggagaggaagaggaagttcctggagttcatgaggaagaaggtgagggaggccaaggtggacgacagcttcttcatcgcggcggggctggcggtgccggtggcggtcgtcatcggcaagagggccagcgggcagatcctctacgtgaagagcgtga

SEQ ID NO: 265815 - DNA, 662 bp, Zea mays
ggtgcggtcccatgcgcactgccctcggtggcaggcgcagacgctgcgccgggacagcagctacgtcggcgtcgagcacatcgacgggaccaccgtgtccgtcccagtcccagtcccagtcccagtcgcggccccgttcaagccgctcacgctcgacttcctgcggtcgctcctggaccggaactgcagcatggcccccgccgtcccggacggcgaggccagcgccccgccgccgccgcagatggtcgcgctccgggtgctggtgacctccgccgtggagctggacgcgcgccaggccgagcgcatcgcgcgcaagatgcgccgcctcaccggctttgtcgacctcaaggtagagaccgccgtggacgcgtccctcatcgccggcttcgtcgtctgctacggcaccgacgactcgcacgtcatcgacctcagcgtcaggggccagctcgcggcgctcaagagccgcgtcgactccatcgaccagaccgcgcatgcccacggacacccacaccaccactgaccgtcgatccaacacctgaggcaccggagcaaagcacagcgcgccgtcaccgtgctacagcttacaatacaagcctatactgtacacgcacagaatgacagaacagaaccgaacgcgcgccatggcaacaacagttttccta

SEQ ID NO: 265816 - DNA, 904 bp, Zea mays
  unsure (1)..(904): unsure at all n locations
acgggagcagatcaggatccattaacacccctacgtacgcctttcctctggaaacccttctctcgcctgcctctcccccgccgcgccgccacttcccctctcccgtcaactccggcttccgcgcgaggtcgagctagcgtttggagttctcgagacctgctgtgatggcgacagagcaagcggcggagaactacacggtggaggacctcgtggccctgaacccctacaaccccgacatcctcaacgacctcgagaagttcgtcaatgagcaggtctcatctcagacatataacttggatgcaaatctcagccttcttcgcttgtaccagtttgagccagaaaggatgagcatacagattgtggcccacatactgattaaggctctcatggcaatgccagcccctgacttcagtttgtgcttattcttaatccctgaacatgtgcaaatggaggagcaattcaaggtattgatagttctttctcactacctagagactgctaggttcagtcaattttgggatgaagcagcaaagaaccgccacatatcggaagcagtgccaggtttcgaacaagcaatccaatcctatgcgattcatgtactttccttgacataccagaaagttccaaggcctattcttgtagaggcaatcaacatcgaaggtctcgcgttggacaagtttcttgagtaccatgccgcgaactcaggttgggtgattgagaagggtgggcagtctcaagtgattgttcttccgcgtaatgagttcaatcacccagagctcaagaagaacacagccgatatccttccgtttgaacacgtaacacgcatattcctgtcttggtgatcagcgtctgnagatcaacacatcaggatgacttcctagcatgcactcagttgaggtactat

SEQ ID NO: 265817 - DNA, 493 bp, Zea mays
tttgtgttaggtttccatggggtatgctaaatggatagtttcttcttgatattaacacaccacttttctttacaggcaatcaacatcgaaggtctcgcgttggacaagtttcttgagtaccatgccgcgaactcaggttgggtgattgagaagggtgggcagtctcaagtgattgttcttccgcgtaatgagttcaatcacccagagctcaagaagaacacagccgatatccttccgtttgaacacgtaacacgcatattccctgtccttggctgattcaggcgtgctgagagatctatacaaaactcagcgagtgaagcttctcttagtcattgcatcttcagtttgtagtgtaccctattgagattatctcggtataccagtcctttttatgccggagttggtttctgcaacctatggttattgttattactataacgaaatgctcagatatgagattggtcttgtccttcgaaaaaaacccacgcgtaag

SEQ ID NO: 265818 - DNA, 962 bp, Zea mays
  unsure (1)..(962): unsure at all n locations
cggacgcgtgggaccagatctttcttcctgttgcttcctcggctggtttccttctctcggggcgtcggctgcttcttcccccaaccaaagacacgaatcagccatggcgctcgcctccgccacgtcccgccccctcctcggtcgccccgccggcaccgcgcggccccacctcgccgtttcctcatcctcccccgcctcctcgatccgcttcccccgcggcgccggcggcggcgccagcagagcggccgtctctctccgcgcccccacgcctccagcggcggcaacagcaacatctggtagcattgctccagcaatttcattgactgaaaaggccttgaaacatctgaaccaaatgagagctgaacggaatgaagatttgtgcttgagaattggagtgaaacagggtggatgctcaggcatgtcttacaccatggaatttgaaaatcgagcggatgccagccctgatgattctgttgtagagtatgatggttttgccatagtctgtgaccccaaaagccttctcttcatgtttggaatggagctggactacagcgacgccctcattggtggcggcttcttgttccagaatccaaacgcaacaaaaacctgtgggtgcggcaaatctttcgcgactggaaaggagaccgaggccgcggcaaccacttgcaacaactagagtagagaaatattgttagctaaacgtgatgtggcatgttgtatagcttgctcacccttgaagccctgtggctacaccacagatacataaagaggcatagttcaaaggaattacaccattaccaatggcctaattcagattttcttgtttggtgatcattccgaagtccttaaacttgtggtatggtctctcaaaatgcattgtattttcaggtatccaaacttgtcttgacgtgtcgtccaggcctacaagtactaaaattttatttntacatttttaaacttgg

SEQ ID NO: 265819 - DNA, 548 bp, Zea mays
gccacgcgtccgcgcctgcttcttcccccagaccaaagacacgaatcagccatggcgctcgcctccgccacgtcccgccccctcctcggtcgccccgccggcaccgcgcggccccacctcgccgtttcctcatcctcccccgcctcctcgatccgcttcccccgcggcgccgacggcggcgccagcagagcggccgtctctctccgcgcccccacgcctccagtctgtgaccccaaaagccttcttttcatgtttggaatggagctggactacagcgacgccctcattggtggcggcttcttgttccagaatccaaacgcaacaaaaacctgtgggtgcggcaaatctttcgcgactggaaaggagaccgaggccgcggcaaccacttgcaacaactagagtagagaaatattgttagctaaacgtgatgtggcatgttgtatagcttgctcatgttgaagccctgtggctaccccacagatacataaagaggcatagttcaaaggaattacaccattaccaatggcctaattcagattttcctggtt

SEQ ID NO: 265820 - DNA, 1070 bp, Zea mays
ggtaccggtccgccataattggggggtcgattcacgcgtcctttctcgcgtccgcccacgcgtacgtccacgcgttcgcttacacatacgcactgtctctctctactgtctgtctgtgtctcccaatcctccacagtctctctctagagtagacccaggaaagaggcgatggatatggccattgacactcctcgccgagaaggagatcgccgccgtcctctcctccgccttcgcggcccccgcagagagcagtgccgccgccgtcgaccacctcacctccctcgtctctcgcctccacggcctcaagcgcaagagggaggagggcgcacgagcggaggaactgcaggtgcagcggtgccgggcgcgtctggaccggctggcgactgccagcaccggcgacgatgccgagtgggaggacatgcggttgaagaggatcctggtcgattacatgcttcggatgtcctactacaattccgccaccaagctcgctgagacttctggtattcaggacctcgttgatattgatgtctttctcgatgcgaaaagagtaattgattctcttcagaataatgaagtttctcctgctttagcttggtgtgcagaaaacaagtctcggctaaagaaatcgaagagtaagcttgagtttttactgaggcttcaagagtttgtggagtttgtcaaggttaagaatttcattcaggctatagcatatgctcgaaaacaccttgctccctggggctctgtacacatgaaagaattgcagcgtgtcacagcaacattggtttttagaagcaatactaattgtactccatacaagatattgtttgagcaagaccgctgggactatcttgttgacattttcaagcaagatttttgcaagttatatggcatgacactagagccgctgctgaacatatatctgcaagcaggcctgacagctctcaagacccccgtctgctctgagggtagctgtgcctaagaagaccccttgcctctggagggcttcaggaaactagccgagcctctggccttctctaaacagcaccactcgaaacttgttgggtcatcac

SEQ ID NO: 265821 - DNA, 505 bp, Zea mays
tccacgcgtccgtagagtagacccaggaaagaggcgatggatatggccattgacacgccatcgccggcgccgcccacgccgccggcgccatcggcagcggccgggcggcagacgcgtgcggcagaggcggtgcgtctggagcaccaactggtgcgcgtgcctctcgagtccctccgcgccaccgtccgctcgaaccaccgcctcgccgagaaggagatcgccgccgtcctctcctccgcctccgcggcccccgcagagagcagtgccgccgccgtcgaccacctcacctccctcgtctctcgcctccacggcctcaagcgcaagatggaggagggcgcacgagcggaggaactgcaggtgcagcggtgccgggcgcgtctggaccggctggcgactgccagcaccggcgacgatgccgagtgggaggacatgcggttgaagaggatcctggtcgattacatgcttcggatgtcctactacaattccgccaccaagctcgctgaga

SEQ ID NO: 265822 - DNA, 1284 bp, Zea mays
ttgcttcctcgaggcatgatgtatattttatggcaaattccacagtaacccattggtcatcattgtctcacaaattatcagaggttctcgacttctctgggcacgttgctccggtggagaagcatcctggcagtttgctagaaggtttctctggggttcaagttagcacacttgctgtgaatgagggtttgttggtagctggtggttttcaaggagaactgattggcaaggatttggaaggatgtaatataaaattctgtgcaaggacaactttgagtgacaatgccataacaaatgccatagatatacacagatcgacaagtggaagcttgcgcattacggtatctaataacgattgcggtgttcgtgaatacgatatggagagatttcagctcttgaaccactaccgatataactggccagttaatcacacatctgtgagcccagataagaaacttttggctgtggttggagatgatcgagatgctcttcttgtggattcacgaaatggaaaggtaacctctaccctagttggccatctggactactcatttgctacggcatggcacccggacagccggacattcgcgaccgggaaccaggacaaaacctgccgcatctgggacacccgcaacttgtcgacctcacttgcagtactgcggggcaacatcggcgcgatccggtgcatccgctactcctccgacgggcggttcctggtgttctcggagcctgccgacttcgtccatgtgtacagtgtggctgcggactacaagaaacggcaggagatcgacttctttggtgaggtgtccgggatcacgctgagcccggacgacgagtccctgttcatcggagtgtgcgaccgcgtctatgccagcctgttgcagtacaggatgatccgcggattcgactatcttgactcatacgtgtgaagaactgagctttggtgaccggtgttgtgctaggtgctggctgaaggttctgatgcgcggttcagggaatatatctgcctgctcttagttcatggcgaatgatggttcggtgggactcgacgccagcgaatctgccgtgtaaatagtttagaatttgaagcgtagtgtagtgctgtggaccaatgctgtctctgaacatacatatgatcagagtaatgtgtgtttgcgctgttagtttcagactccggaatacaaatagttttggaccaaattcctaaagcctgtttgtactgtggaacacatgaaagggctagtttgtattcacttcgatatatgtgttgttattattgagttc

SEQ ID NO: 265823 - DNA, 615 bp, Zea mays
ggttaactgattggcaaggatttggaaggatgtaatataaaattctgtgcaaggacaactttgagtgacaatgctataacaaatgccatagatatacacagatcgacaagtggaagcttgcgcattatggtatctaataacgattgcggtgttcgtgaatacgatatggagagatttcagctcttgaaccactaccgatataactggccagttaatgcctgatggagcctccacgtgagggggagtattggagtataaatgagttgcccacctttccatattcagcttaagaatttgggttgaaatgatcagggcatgcaacttgataatatatttaatgctttgacattcattatttgcttctataacaacagcacacatctgtgagcccggataagaaacttttggctgtggttggagatgatcgggatgctcttcttgtggattcacggaatggaaaggtaacctctaccctagttggccatctggactactcatttgctacggcatggcacccggatagccggacctttgcgaccgggaaccaagacaaaacctgccgtatctgggacacccgcaacttgtcgacctcgcttgcggtattgcggggcaaca

SEQ ID NO: 265824 - DNA, 841 bp, Zea mays
ttgatagatggaacgggtcccggtgcaatccgacacaaactaacgaggcctaaaaggtttttgctcatatatatagctttaccactaacagcaagagctagtttggagctttacggatgtgttctattactaactgaactggtgggaagtgaaatgcggatttgatgtgttttgcaggtgacctctaccctagttggccatctggactactcatttgctacggcatggcacccggatagccggacctttgcgaccgggaaccaggacaaaacctgccgtatctgggacacccgcaacttgtcgacctcgcttgcggtattgcggggcaacatcagcgcgatccggtgcatacgctactcctctgatggacggttcctggtgttttcggagcctgcggactttgttcatgtgtacagcgtggctgcggactacaagaaacggcaggaaatcgacttctttggtgaggtgtccgggatcaccctcagccctgatgacgagtccctgttcgttggagtgtgcgaccgtgtctatgccagcctgttgcagtacaggatgatccatgcattcgactatcttgattcatacgtgtgaaatggagctttggtgttgacgtgttgtgctcggtgctggctgaatgtcacttgttctcggtgacggttctggtgcgcggttcagggaatgtatctgcctgctcttctgcgctagttaatggcgaatgatgattcgttgggactcggacgcgagcgaatctgccatgtaaatagttcagcaattgaagcatagagctgtggaccaatactgtctgaacatatgagctgagtaatgtatgttttgcgttgtt

SEQ ID NO: 265825 - DNA, 638 bp, Zea mays
aaaagttgtcagactgtgctcatggcacatctgctctaccttgttagggccatttcccggattgtgcctcacctagctgaggatgtctggcagaacctaccctttcaatacaccttgcaggatggatcccttgcaaactttgtttttgatctgaaatggccagaaaagaatgaagaatggctctcggccccgaaggatgatgttgatttcctgggtgttatcctggagttgaggtcagaggtcaacaaaattttggagaatgctcgcactggaaagttgattggttctagcttagatgcaaaggtttatctccataccgaaagttcagatacggtattaaagctaaaggagctatcttctgcatccaatgatgcagacgctctgcatcgcctgtttatcacatctcaggtcgatattcttccaatcctaaatgaagagattacatcatctgtaccatacacaggaaagttcagtaacccacgcactggagtcatatggattggtgtgactcgtgcggatggtgcaaaatgtgagaggtgttggaattacacacaggacgttggatctttccatgaccatcctactatacgagttcggtgctatggtgtcattgagttgcagacacaacctgcggccgc

SEQ ID NO: 265826 - DNA, 1459 bp, Zea mays
agcggcatccatatctgcgtgcgcgacggctatccaggctccagtcgtccccggattagttgtactgtacattgttcctgcgaagacactgggtcgtccgggtcaatcggcagcttgaacaagccatggcggcgcaccggccgaacgccgcggcgccgctgctcgccaagctcgacgccaccgccacgccgccggcgaagcgcaacaagtaccccttcttctgcgccgtgctcgcatccatgacctccgtgctcatgggctacaacgtcgcggtgacgagcggcgcgcagatcttcatggcggaggacctcgggatgagcgacgcgcacatcgaggtgctctcgggggtcatcaacatatactcgctcgtcggcgcgctgctggcaggctggacctacgaccgtctcggccggcgcctcaccatcgtcctcgccaacgccttcttcctcgtcggcccgctcgccatggcgcttgccggcgggtacaccttgctcatggtgggccgcttcatcgccggcgtcggcgtcgggtacgcgctcgtcatcgcgccagtctacgctgccgagatcgcgccggcgtcatcccgcgggctcctcagctcacttcctgagatttttatcaacactggggtgatgctgagttacgtgtcgaatctcgccttctcggggctgcccgtgcacctgtcgtggcgggtgatgttcgcggcgggcgtggtgcccaccgtgttcatggcggccggggtgttcaccatgccggagtcgccgcggtggctggttatgaagggccgggtcgccgaggccaaggccgtgctcgacaagacgtcggacacgcccgctgaggccgagcagcggctgctcgagatcgaggacgtcgtgatggacagcagcggcgacagcggcgcgtggaaggaggtggcgacgaaggcctggcgtccagcgcgtgttggcaaccgtggtgacgctgcagttcttccagcaggcgtcaggcatcgactcggtggtgctgtacggcccgcgcgttctcgccatggctggtgtcacatccaacagcttgctcctgagcctcaacatcctcttcggcgttgccaaggttggctccatcctcatcgccatggctctagccgaccgcgtcggacggcgcccactcctgctggtcagcactagcggcatgacggtggcgctgctcgtcctaggctccctgttcgcggtgtttgcgggagccaaggataacgctgcggtggctgcggtgagtgtggtggccgtcatggcgttcgtgatggccttctccgtcggcttgggccctctggcgtgggtgtacagctccgagatactgccgctccgacttcgcgggcagggtgccgggctcggcaccgccatgaaccggatcatgagcggcgtgatcaccatgaccttcatctcgctctaccagggcatcaccatggccggcgcgttctacctct

SEQ ID NO: 265827 - DNA, 483 bp, Zea mays
cccacgcgtccgctcgcccttggctcccatggcttccgggctccggcttcttctcctcgccgtcgcgtgagactgcgctaaaacctaggctttgagacaccaatggcctccgcgacggcgacggcgcccacattcgctctcgcatcgtccttctcgcgcggcggcttccttccgctccctcgtcgcgccggccggcccatgcttcagtctctgcggctcgtcgcgtcagccgtgaagcggcggcgcggcgcggtcgtggtggcagcggacgcggcggcggcggccgggagcgcggagttcggcgacgaggagaacccgtatgagcttctgggcatcaggccgcttgatagcttcgatcacatgaaaatggcctacaagaagaagcgcaaggacgccgaggagactggagacgacgagttccttgccaagttggacagggcctatgacactgtcatgatgcagcagctacagtattcggagaag

SEQ ID NO: 265828 - DNA, 530 bp, Zea mays
cacgaaaccacgcgcagatccaaacgaatccgagcccttccaaaccctaagctcgcctcccctcccccccaaacaccaccgcgcacctatggcgaagtacggcgagggcgacaagcggtggatcgtggaggagcgcgccgacggcaccaacgtccacaactggcactgggcggagcgcgactgcctggagtggtcccgcgcgcggctctcttccctgctcgcgggcctcaccatcctcgacggcgagggcggcctcagtctccgcaccgtcgcgctcgacaagcttgatggcgaggcctacgtcaacatccgcaagggcaaggtcatcccggggtacgagctctcgctcaccctctcctgggaggccgaggccgcctcggagtccggagctgcgaaggtcaccggcaccgctgaggttccctacctcgccgacgagaacgccgacgaggaccccgacctccgcgtcaccgtgcgcggcgacgagacgcccctcgcgctccgcgccaaggacgccttcctctcccgcggga

SEQ ID NO: 265829 - DNA, 520 bp, Zea mays
aaacgaatgcgagcccgttcaaacacttgatgcctttagcccgcctctacctcctcttcctgtcaacttcaccggggtaccgggggcgaaatacggcgagggcgacaagcggtggatcgtggaggagcgcgccgatggcaccaacgtccacaactggcactgggcggagcgcgactgcatccagtggtcccgcgcgcggctcttctcgctgctcgcgggcctcaccgtcctcgacggcgaggacggcctcacgctccgcaccgtcgcgctcgacaagctcgacggcgaggcctacgtcaacatccgcaagggcaaggtcatcccggggtacgagctctcgctcaccctctcctgggaggccgaggccgcctcggagtccggagctgcgaaggtcgccggcaccgctgaggttccctacctcgccgacgagaactctgtcccaggtcccctaccttcctgttaccgcccgcgtccactagtacctattttctgctacttcctacggactctctcctttttt

SEQ ID NO: 265830 - DNA, 531 bp, Zea mays
ctccatgcccctacccagccattcccctaaaaatctccagccgtctgtcttgctgctcgttcctgcagctcagacgtcgcctcccttctaccccttgctcctcagccaggcttgttagccgagcccctccaactagcgtgctagacctttgacgccgtttccccgtcgtccaagctccaccatgcccacacgtccgtcctgctcctccatgcacacgcccatgcatccttatctccctggaaacttcactcgtgtacggctccctggtgataatattcagcgatgcttcgccagggcaccgttcccctgcgcgctcgctggacgccgtcgcacatgctccctgctcggcctccccggcgtgctgctccctcgccttggtgcccctgcgagctccttctctctggcccggtttccagctcgggcctcgctagatgccgatgccgcttttctgacctcgtctcgatactcaatcgctgcagcacgccatgccgtgtgtgctgcactgtcatcattcgctatcctcatttttgc

SEQ ID NO: 265831 - DNA, 660 bp, Zea mays
gttttgtctcgctcacacctgtacaaactctgtgtttgtgcgagcaggacaaacacagagttcgtacaggttttgtctcgctcacacctcgaaatgcgggtctgggaacgtggtgctggagcaactcttgcctgtggtactggtgcttgtgcagtggttgttgcagctgttcttgagggtcgagctgagcggaaatgtgtagttgatttgcctggcgggccattggaaattgagtggagggaggatgacaatcatgtttacatgactggtcctgcagaggccgtcttttatggatctgttgttcactaggtactggggagtggggaccaagatagaagggttggctgccactcaaagcttgtgagattggttacaatatccatgaaactgaatgttctggtgccagtacactcgtttagatattttaaattatggttgcttgatttgggtagcagtagaggcttccttttgaagcattctagtgttgtccaccttttgtactcctttagtctgtcaggtttgaactacattgttagcatgtctttccaaccattttctgtttcttttctttgcaagttaacgtcaatgcagcttcagtattgttttctaaaaaaaaatctggatgcactgccccatgaatgggcttactagtttgctggt

SEQ ID NO: 265832 - DNA, 939 bp, Zea mays
cgcagccgctgtagccgccatgtcgtccgccgccgccacagcctttgccggagtctccgtcgccaccccgaacctcaccactccatttcgcggtcgcgtgcgccttccgctacgcggggtctccgctgccccacgccgcgccgtcgcttcgatggccgtgtccgcccccaggtccggcgccgccgcctcgttcctggagcgccgcgagtccgagcgcgctctccacttcgtcaagtaccagggcctcggcaatgacttcattatggtggacaacagggattcgtcggtgccgaaggtgacgccggaggaggccgcgaactgtgcgaccgaaacttcggcattggtgccgacggcgtcatcttcgtcatgccaggggtcaatgatgccgactacaccatgagaatcttcaactctgatggcagcgaaccagagatgtgtggtaatggagtccgttgcttcgctcggtttatagccgagattgaaaatctgcaggggacaaatagattcactattcatactggtgctggaaagatcgttcctgaaatacaaagtgatgggcaggtaaaggttgatatgggcgagcctatcctttctggactagacatccccacaaaactgctagctaccaagaacaaagctgttgttcaagctgagttggcagttgagggcttaacatggcatgtcacatgtgttagcatgggcaacccccactgtgtcacatttggggcaaacgagttaaaggccttgcagatcgacgatttaaaactcagcgaaattgggcctaaatttgagcatcatgaaatgtttcctgctcgcacaaacacagagtttgtacaggttttgtctcgctcacacctcaaaatgcgagtctgggaacgtggtgctggagcaactcttgcctgtggtactggtgcttgtgcggtggttgttgcagctgtt

SEQ ID NO: 265833 - DNA, 1349 bp, Zea mays
  unsure (1)..(1349): unsure at all n locations
tcgtgccgcctcgcccgggcgtaccagcactggggggggcagccgcgcgggggctcgctgcccagcttcaacgcaactctaatgctagagatggcgcggcgtaaacgaatgctgctgggtggagattctctgaaccgtgggcagtatgaatctattggttcgcctcctgcaccgaatcatccctgagagctccaagtcaatggagacagttgattcccttacaggtttcaaagcaaaggactacaatgccaccattgagttctactgggctccctttctggccgagtcgaattcggatgatgctgttgtgcaccggatcgcggatcggattgtaagagggacatccattgagaagcatgccaagttttggaagggggctgacatcttggtattcaacacctacctatggtggatgactggacaaaagatgaagattttgcggaactccttcgaagataaaagcaaggatatcatagaaatggaaacggaggaagcctatgagatggtacttaatgctgtgctgaaatgggtggagagcaacatgaaccccaggacatcaagaacattctttgtcactatgtcacccacccacacaaggagcagagactggggcgatgatactgacgggaactgctacaaccagacagcccccatcgaggacctgtcctactgggggccagacaccagcaagggcctgatgcgcgtgatcggagaagtgttcagcgcgtctaagtccaggatccccgtgggggttgtgaacatcacccagctctccgagtacaggaaggacgcgcacacccagatatacaagaagcagtggaacccgctgaccccggagcaggtcgcggaccctaagagctacgcggactgcacgcactggtgcctgccggggctccaggacacgtggaacgagctgctctactccaagctctttttcccctgagttaaaggtttgagttgcgaggtgcacggtgaagttggggtctctctctggcattggcacgctgcacaatactagttagcttggcattggcccaccagtctgaagatggatgctctgctccggtatggcatggcatggtattgttgatgtacgattcattcgttggaaaacctggacgtgagtgctggaattgccccatctggccttttctgtacatgcctgatgtaacggtggtgttgtgtttccccaccaccccctctcttttcccgatgatgacccagtgcatgaatagttgtatggggtaatgtgataatacaaactgtaattttttggttccttcaaaaagaaacccacaaaaaattaaaaaaaaacaaaaaaaaaaaaaaaaaaaaaaaaaaaaaanaaa

SEQ ID NO: 265834 - DNA, 559 bp, Zea mays
actgcacgcactggtgcctgccggggctccaggacacgtggaacgagctgctctactccaagctctttttcccctgagttaaagggtttgagttgcgaggtgctcggcgagcgcggccgctctctctggcattattggcacgctgcacaatactagttagcttggcataggcccagcagtctgaagatggatgctctgcctctgctgcggtagtttctcgggggcaaaccttccacgcggcatggcatggtattgttgatgtacgattcattcgttggaaaacctggacgtgagtgctggaattgcaccatctggccttttctgtacatgcctgatgtaacggtggtgttgtgtttccccaccaccacctctcttttcacgatgatgacgcagtgcatgtataattgtatgggttaatgacgcagtgcatgccttgcggagtgggccggtagacaaacatttcggcggctggtcacttggtcagtgacccgttgatattattattattattggatctaatgcaacaaccaattctggttaaaaaaaaaaaaaagggcgg

SEQ ID NO: 265835 - DNA, 505 bp, Zea mays
aattcccgggtcgaccgacgcggccgagaagaagcacttcatgttcggcccgccggcgccgccgccggcgaggccgacgccgacgcgggcccggacgccgaggtacgggcccccgacgccgacgccgacgcccgtgccggagcccaggcctccggcgcccgaggagcccgagccgttcttcaagaagaagccgaagctcaagttcatgcacaagaagaagccgtgcccgccgctcgtcgacgacgacacgacccggcggcctgcggcagcaggcgggcaggggcaggagaaggttcccatgaaactgaactaggggatcggagctggctcgtgcggggacagcagcagagctctaagatgttgcagtgtcagtgacgacgttcgtttcggttcggttcggtgatgatgttgctgtgttgtcagtgattgtttttgttcggttcgtgtgcccgtatgtgtcgcgcggcggcattggtgtttcagcccgtttgcttgcttgtatgtg
